United States Patent Application Publication US 2004/0123343 A1 - sequence listing, part 52

SEQ ID NO: 192090 - protein, 72 aa, Oryza sativa
  Clone ID: PAT_MRT4530_88348C.1.pep
MEAMLELVSRLAYPSIPDPRPTTAKRRDRWHAGWTPRRDRPRAEGLGMRANPHEGGAGGQGLHDDMMTLTSL

SEQ ID NO: 192091 - protein, 1036 aa, Oryza sativa
  unsure (1)..(1036): unsure at all Xaa locations
  Clone ID: PAT_MRT4530_88349C.1.pep
MATFCKVRKRDDGIYVLTLASSDGHHYLTTEAITQLKQALERIRSTKARGLVTTTTSGSFCDGINAVSDDDDDEPLSSLERGMAEVVRLLLDLPMPTAAAVRGDARWLGFVLALAHDHLFVHTEAVLGLAAAADTTAKPRRRPLPDYVVALLREKIPYAQLRKLLLLKAHVFTGEELKGNWHSVHEAIPNRDHVVAVAVQNLQSVVVGDGMDYAKVRRTMYTNSCVAVAVTTTTTTMLPFDGSSSVANGVTISSEMTPSGESFNSSYNSSTTPVDISLAAIEACTDGFSESKKVGSGAYGKVYKGVYNEEELAFKKIDGLAVLNEDQFKNELKHLMSVQHRNIVRFVGYCSQIKEKFIWRGKEYVSVQYITRILCFEYLPGGSLDKHLDKESESDGFDWRTRYNIIKVISQGLNYLHELEKPIFHLDLKPANVLLDENMEPKIADFGISKHFTGTKTHITISKPTGTPRYMPPEYLNKLVISNKYDVFSFGVMVMEIIAGPTGYDNFSEANDQDSFKYIDRSHGRISLSPQSKAFKVSGTRGSLQKTAARVVSRCQPKCIVNITKDFDDRKKELIAEIGFDGILDIKLTKVNRQFGAWLLSKVDPKSGTIVTDFNQELPFGPNDVNAVFGLPCSAIVQAKYLSKLVIQKVGITSVKSCHISQFEDNQIAMMIQQDIVSKHNPGYTFPRYGKLQLMKAPRENYPQAPEVSPLNLSSVSKIQCRGNDGGANLIKFLESHFNSLDVSAMVGPQAYKELKSYVQDGFNRIDEILPSIADFVDISNLKTATEAANMFKKAFKYNMAAAVKIATRAAVRNVIDTIEDMQGPLHPWGDPSAMGYHTPTNYSTHATEYENIVEQPTDTRHCDHKFGASQCTPTKFNGAPGIVRMYAVAGDEFWEASHQLAHFTGPEVVYDVSDSHMSKKVLVLDSLNTQDPXGESRFTRHDKIKIMVXPGWNKDILNWDYEAVENIPEQQNGDDCSFHVFNNMVNWDGLRLVNSTSQDPYYLRRQFLIHLLALRDNEAILPEYVVHRLRHIKYN

SEQ ID NO: 192092 - protein, 47 aa, Oryza sativa
  Clone ID: PAT_MRT4530_8834C.1.pep
YRLRSMLYLNGSAWQLNSCFVAVLFKGSIGYSSMMLFFCIILQCLLV

SEQ ID NO: 192093 - protein, 492 aa, Oryza sativa
  Clone ID: PAT_MRT4530_88350C.1.pep
MAPPSPIGDTEAEVIILEDLPPVGVPGAEVIDLESPECKSGAAGAKSRSHSSTGHPKQQSHGRISLSPQSKAFKVSGTRGNLQKTAARVVSRYRQSRVLNRQKKDNTTFGINCRCQPKCIVNITKDFDDRKKELIAEIGFDGILDIKLTKVNRQFWAWLLSKVDPKSGTIVTDFNQELPFGPNDVNAVFGLPCSGQLIIPCSQDELDGKKQKLCEIFEIPNFSHLKISLLERVLKKQYVHPMTIDEKREFKAAFVLYVTTKLLAPQSCANFISPRYIRAVADVDNTKQYNWSQFVVDEVKKAAESLPKRFPNTTQQSINGCIIFLMFEDNQIAMMIQQDIVSKHNPGYPFPRYGKLQLMKAPRENYPQAPEVSPLNLSSVSKIQCRGNDGGANLIKFLESHFNSLDVSAMVGPQAYKELKSYVQDGFNQIDEILPSIADFVDISNLKTATEAANMFKKAFKYNMAAAVKIATRAAVRNVIDTIEDMQGPLHP

SEQ ID NO: 192094 - protein, 93 aa, Oryza sativa
  unsure (1)..(93): unsure at all Xaa locations
  Clone ID: PAT_MRT4530_88351C.1.pep
SPLPLRICLLRTTITXPRPXQPLTLPPVLLRSSSXFAALDHGVGRIXRRXGRSGGARDGEGEGAIGCGGAEETAANGIASALERERRRWKPAF

SEQ ID NO: 192095 - protein, 79 aa, Oryza sativa
  Clone ID: PAT_MRT4530_88352C.1.pep
MIDRLQCRNVPGGPCRPAADRCVAACVMRWPRAPGERERERGEARPASSMSVALPGGGLARRLIDTGHVCLTPMGAARA

SEQ ID NO: 192096 - protein, 1761 aa, Oryza sativa
  Clone ID: PAT_MRT4530_88353C.1.pep
MTVPLLYNKETSVAVIICLPMIPALFPGSGINLQMAVNASVSSHGFGEGHHVAQLRDLARFLGFSCPEYTGYSVDRVPPRCELSVYLYPRGGIHGAGLRPHHFTVARPTLQIAYQDLSWTALRRLAHDYSHRLGGSAFRQLPRLPSGHADARYPCPYSESQPVLTRMVELSEAQATQHDLLLEAYRSLARRYAALEAHMAEEGVTSVDTVSWDSGRLCHASHLSSHSSRGSARTPSGPRSPSSRAPYSPVYSPYPHPVSPSYTPGHTPVASSRRGPRFIRTARKRVVGSSTVFRFHYPAPPPPAACAAAGPRQHLMAVQIQILQGLAAAVAGYQHNAHGNGHPHMGNNRSKLTDFLRSRPPEFSQTVEPVEADDWLKDVDRKLNLVQCTPVEKTLYASHQLRGPTADWWENYCNAYPEPTNIAWDEFATAFRAAHVPESTIDMKKEEFNKLKQGNSSVNEYLSMFNKLARYAPEEVDTDKKKIRKFLKGIAVGMRLQLLAHDFPTFQHMINKALLLEDARKEATEEYKKRKSNHQGNSSRGAPRPRYGQPMQYHQSVTQANRQPGYAPCPQMNRPAPQPQQRAPSGNTAPNSVTSFKSPQGPSAVQCFRCNQMGHYARQCPQNPTNTSSRHANGSTARTPTPAAAQSRPSSQASGQGTCASNNFGRGRVNHIQAETAQDAPDVVMGMFSVNSVPAIVLFDSGASHSFISQAFVKRNGWKTQNLRVPMIVHSPGRNIRATQICPEVNLRIEEVDFLAKPIVLDSQSLDIILGMDWLAKHKGQIDCAEKSITLQGPGGKQVRFTSNTPTASRSILTCLQVTSLESVPVVCEYPDVFPEELTSMPPDREIEFAIELAPGTAPIAKRPYRMVANELAEVKRQIEELKSKGYVRPSSSPWGAPVLLVKKKDGSERMIIDYRALNEVTIKNKYPLPRIDDLFDQLKGARVFSKIDLRSGYHQLKIRSEDIPKTAFSTRYGLYEFTLDQFVVVFIDDILIYSKNEEEHAEHLRLIMEKLRDHQLFAKFSKCEFWLDREAFLGHVISSNGVDVDPSKVEAVLAWNPPKNVLEIRSLLGLAGYYRRFIEGFSKLVRPMTELLKKEKKFHWSAACEDSFQEMKKRLTTAPVLTLPDIRKDFEIFCDASRQGLGCVLMQERKVVAYAFRQLRPHEVNYPTHDLELAAVFHALKIWRHYLIGNRCEVYTDHKSLKYIFTQTKLNMRQRRWLELIKDYDLGIHYHPGKANVVADALSRKAYCNVAQIRPDQDRLCRELEKLRLTVVQSGVPASLTVQPTLESQIREAQKDDEGIKELIKRIQEKKDTNFSIDDQGTVWCGPRICVPAKKELRDLILKEAHESAYSIHPGSTKMYQDIKAYFWWTGMKRDVAEYVALCDICQRVKAEHQRPAGLLQPLPIPEWKWEEIGMYFITGLPRTPSGYDSIWVIVDRLTKSAHFVPVKTIFDGKKLAELYMTHVVCRFGCPKKIVSDRGTQFTSRFWKQLHEALGTDLNFSTAYHPQTDGQTERVNQILEDMLRACALDFEGTWDRCLPYAEFSYNNSYQASIQMSPNEAMFGRKCRTPLCWNEVGEALVFGPDILKAAEEQVKLIRERLKTAQNRQKNYADNRRRDLEFEKGDHVYLRVSPLRGMRRFGMSGKLAPRYIGPYLITARRGEVAYQLELPEGLADVHNVFHVSQLKKCLRVPEEQVPLGNIELEKNLTYKERPIKVLEEAVRQTRRKTIKFYKVQWSNHSEDEATWEREDLLRAEFPELLP

SEQ ID NO: 192097 - protein, 62 aa, Oryza sativa
  unsure (1)..(62): unsure at all Xaa locations
  Clone ID: PAT_MRT4530_88354C.1.pep
INRELGPXXAGPPMTEVFPARRRGXLERPAASLPAFCNVDIPNGPGGVCHWLGNPRXPRTGQ

SEQ ID NO: 192098 - protein, 1542 aa, Oryza sativa
  unsure (1)..(1542): unsure at all Xaa locations
  Clone ID: PAT_MRT4530_88355C.1.pep
MAVNASFSSHGFGEGHHVAQLRDLARFLGFSCPEYTGYSVGRVPPHCELSVYLYPRGGIHGAGLXPHHFTLARPTLQIAYQDLSWTALRRLAHDYSHRLGGSAFRQLPRLPSGXQTPARAPARFGFEDGRAEPEVNHEQSPHSNRSHRTASRNAEVEQPRRSNRSHRTASCDAEMEQSHRSHHTASHNSGEELLPSPPHVENNMQHLMAVQTQILQGLAAAVAGFQHNAHGNGHPHMSNNRSKLTDFLRSRPPEFSQTVEPVEADDWLKDVDRKFNLVQCTPVEKTLYASHQLRGPAADWWENYCNAHPEPTNIAWDEFATAFRAAHVPESTIDMKKEEFNRLKQGNSNVNEYLSQFNKLARYAPEEVDTDKKKIRKFLKGIAVGMGLQLLAHDFPTFQHMINKALLLEDARKEATEEYKKRKSNHQGNSSRGAPRPRYGQPMQYHQSVTQANRQPGYAPRPQMNRPAPQPQQRAPSGNTVPNSFTSFKSPQGPSAVQCFRCNQMGHYARQCPQNPTNTSSGHANGSTARTPTPAAAQSRPSSQASGQGSHASNNFGRGGANHIQAETAQDAPDVVMGMFSVNSIPAIVLFDSGASHSFISQAFVKRNGWKTQNLRVPMIVHSPGRDIRATQICPEVNLRIEEVDFLAKPIVLDSQSLDIILGMDWLAKHKGQIDCAEKSITLQGPGGKQVRFTSNSPTASRSILTCLQVTSLESVPIVCEYPDVFPEELTSMPPDREIEFAIELAPGTAPIAKRPYRMAANELAEVKRQIEELESKGYVRPSSSPWGAPVLLVKKKDGSERMFVVVFIDDILIYSKNEEEHAEHLRLIMEKLRDHQLFAKFLKCEFWLDRVAFLGHVISSNGVEVDPSKVEAVLAWNPPKNVSEIRSFLGLAGYYRRFIEGFSKLARPMTELLKKEKKFQWSAACEDSFQEMKKRLTTAPVLTLPDIRKDFEIFCDASRQGLECVLMQERKVVAYASRQLRPHEVNYPTHDLELAAVVHALKIWRHYLIGNRCEVYTDHKSLKYIFTQTELNMRQRRWLELIKDYDLGIHYHPCKANVVADALSRKAYCNVARIRPDQDRLCRELEKLRLTVVQSGVPASLTVQPTLESQIREAQKNDEGIKELIKRIQEKKDTNFSIDDQGTVWCGPRICVPAKKELRDLILKEAHESAYSIHPGSTKMYQDIKAYFWWAGMKRDVAEYVALCDICQRVKAEHQRPAGLLQPLPIPEWKWEEIGMDFITGLPRTPSGYDSIWVIVDQLTKPAHFVPVKTTYDGKKLAELYMTHVVCRFGCPKKIVSDRGTQFTSRFWKQLHEALGTDLNFSTAYHPQTDGQTERMSPNEAMFGRKCRTPLCWNEVGEALVFGPDILKAAEEQVKLIREHLKTAQNRQKNYADNRRRDLKFEKGDHVYLRVSPLRGMRRFGMSGKLAPRYIGPYLITARRGEVAYQLELPEGLADVHNVFHVSQLKKCLRVPEEQVPLGNIELEKNLTYKGRPIKVLEEAERQTRRKTIKFYKVQWSNHSEDEATWEREDLLHAEFPELLP

SEQ ID NO: 192099 - protein, 1822 aa, Oryza sativa
  Clone ID: PAT_MRT4530_88356C.1.pep
MAVNASFSSHGFGEGHHVAQLRDLARFLGFSCPEYTGYSVDRVPPHCELSVYLYPRGGIHGAGLRPHHFTVARPTLQIAHRLGGSAFRQLPRLPSGHSDARYPCPYSESQPVLTRMVELSEAQATQHDLLLEAYRSLARRYAALEARLAEEGVTSVDTVSWDSGRLCHASHLSSHSSRGSARTPSGPRSPSSRAPYSPVYSPYPHPVSPSYTPGHTPVASSRRGPRFIRTARKRVVGSSTVFRFHYPAPPPPAARAAAGPRQVPPVPSRQPIDVSSTEEPTTGARFGFENGRVEPEENHESANEQSHHSNRSHRTASRNAEVEQPRRSSRSHRTVSRNAEMEQSHRSHRTASHNSGEERLPSPPHVENNMQHLMAVQTQILQGLAAAVAGFQHNAHGNGHPHMSNNRSKLTDFLRSRPPEFSQTVEPVEADDWLKDVDRKLNLVQCTPVEKTLYASHQLRGPAADWWENYCNAHPEPTNIAWDEFATAFRAAHVPESTIDMKKEEFNRLKQGNSSVNEYLSMFNKLARYAPEEVGTDKKKIRKFLKGIAALLLEDARKEATEEYKKRKSNHQGNSSRGAPCPRYGQPMQYHQSVTQANRQPGYAPRPQMNRPAPQPQQRAPSGNTAPNSVTSFKSPQGPSAVQCFRCNQMGHYARQCPQNPTNTNSGHANGSTARTPTPAAAQSRPSSQASGQGSRASNNFGRGRVNHIQAETAQDAPDVVMGMFSVNSVPAIVLFDSGASHSFISQAFVKRNGWKTQNLRVPMIVHSPGRNIRATQICPEVNLRIEEVDFLAKPIVLDSQSLDIILGMDWLAKHKGQIDCAEKSITLQGPGGKQVRFTSNTPTASRSILTCLQVTSLESVPIVCEYPDVFPEELTSIPPDREIEFAIELAPGTAPIAKRPYRMAANELAEVKRQIKELESKSYVRPSSSPWGAPVLLVKKKDGSERMVIDYRALNEVTIKNKYPLPRIDDLLDQLKGARVFSKIDLRSGYHQLKIRSEDIPKTAFSTRYGLYEFTVMSFGLTNAPAFFMNLMNKIFMEYLDQFVMVFIDDILIYSKNEEEHAEHLRLIMEKLRDHQLFAKFLKCEFWLDRVAFLGHVISSNGVEVDPSKVRAVLAWNPPKNVSEIRSFLGLARYYRRFIEGFSKLARPMTELLKKEKKFQWSAACEESFQEMKKRLTTAPVLTLPDIRKDFEIFCDASRQGLGCVLMQERKVVAYASRQLRPHEVNYPTHDLELAAMVHALKIWRHYLIGNRCEVYTDHKSLKYIFTQTELNMRQRRWLELIKDYDLGIHYHPGKANVVADALSRKAYCNVAQIRPDQDRLCRELEKLRLTVVQSGVPASLTVQPTLESQIREAQKDDEGIKELIKRIQEKKDINFSIDDQGTVWCGPRICVPAKKELRDLILKEAHESAYSIHPGSTKMYQDIKAYFWWAGMKRDVAEYVALCDICQRVKAEHQRPAGLLQPLPIPEWKWEEIGMDFITGLPRTPSGYDSIWVIVDRLTKSAHFVPVKTTFDGKKLAELYMTHVVCRFGCPNKIVSDRGTQFTSRFWKQLHEALGTDLNFSTAYHPQTDGQTERVNQILEDMLRACALDFEGTWDRCLPYEEFSYNNSYQASIQMSPNEAMFGRKCRTPLCWNEVGEALVFGPDILKAVEEQVKLIRERLKTAQNRQKSYADNRRRDLEFEKGDHVYLRVSPLHGMRRFGMSGKLAPRYIGPYLITARRGEVAYQLELPEGLADVHNVFHVSQLKKCLRVPEEQVPLGNIELEKNLTYKERPIKVLEEAERQTRRKTVKFYKVQWSNHSEDEATWEREDLLRAEFPELLP

SEQ ID NO: 192100 - protein, 52 aa, Oryza sativa
  Clone ID: PAT_MRT4530_88357C.1.pep
SFEFLPPPHIATFINFAVITTVTTIAPTNSSTTNPTQLTGLVATAPIHLVPR

SEQ ID NO: 192101 - protein, 1764 aa, Oryza sativa
  Clone ID: PAT_MRT4530_88358C.1.pep
MAVNASFSSHGFSEGHHVAQLRDLACFLGFSCPEYTGYSVDRVPPHCELSVYLYPREGIHGAGLRPHHFTVARPTLQIAYQDLSWTALRRLAHDYSHRLGGSAFRQLPRLPSGHSDARYPCPYSESQPVLTRMVELSEAQATQHDLLLEAYRSLARCYTALEARLAEEGVTSVDTISWDSGRLCHASHLSSHSSRGSACTPSGPRSPSSRAPYSPVYSPYPHPVSPSYTPGHTPVASSRRGPRFIRTARKRVVGSSTVFRFHHPAPPPPAARAAAGPRQMASRPRRAARAPARFGFEEGRAEPEANHESANEQSHRSNRSHRTVSRNAEVEQPRRSNRSHRTASRDAEMEQSHRSHRTASHNSGEERLPSPPHVENNMQHLMAVQTQILQGIAAAVAGYQHNAHGNGHPHMGNNRSKLTDFLRSRPPEFSQTVEPVEADDWLKDVDRKLNLVQCTPVEKTLYASHQLRGPAADWWENYCNAHPEPTSIAWDEFATAFRAAHVPESTIDMKKEEFNRLKQGNSSVNEYLSMFNKLARYAPEEVDSDKKKIRKFLKGIAVGMRLQLLAHDFPTFQHMINKALLLEDARKEATEEYKKRKSNHQGNSSRGAPRPRYGQPMQYHQSVTQANRQPGYAPRPQMNRPAPQPQQRAPSGNTAPNSVTSFKSPQGPSAIQCFRCNQMGHYARQCPQNPTNTNSGHANGSTARTPTPAAAQSRPSTQASGQGSRASNHFGRGRVNHIQAETAQDAPDVVMVHSPGRNIRATQICPEVNLRIEEVDFLAKPIVLDSQSLDIILGMDWLAKHKGQIDCAEKSITLQGPGEKQVRFTPNTPTASRSILTCLQVTSLESVPIVCEYPDVFPEELTRMPPDREIEFAIELAPGTAPIAKRPYRMAANELAEVKRQIEELESKGYVRPSSSPWGAPVLLVKKKDGSERMVIDYRALNEVTIKNKYPLPRIDDLFDQLKGARVFSKIDLRSGYHQLKIRSEDIPKTAFSTRYGLYEFTVMSFGLTNAPAFFMNLMNKIFMEYLDQFVVVFIDDILIYSKNEEEHAEHLRLIMEKLRDHQLFAKFSKCEFWLDRVAFLGHVISSNGVEVDPSKVEAVLAWNPPKNVSEIRSFLGLARYYRRFIEGFSKLTRPMTELLKKEKKFQWSAACEDSFQEMKKRLTTAPVLTLPDIRKDFKIFCDASRQGLGCVLMQERKVVAYASRQLRPHEVNYPTHDLELAAVVHALKIWRHYLIGNRCEVYTDHKSLKYIFTQTELNMRQRRWLELIKDYDLRIHYHPGKANVVADALSRKAYCNVAQIRPDQDHLCRELEKLRLTMVQPGVPASLTVQPTLESQIREAQKDDEGIKELIKRIQEKKDTNFSIDNQGTVWCGPRICVPAKKELRDLILKEAHESAYSIHPGSTKMYQDIKAYFWWTGMKRDVAEYVALCDVCQRVKAEHQRPAAHFVPVKTTYDGKKLAELYMTHVVCRFGCPKKIVSDRGTQFTSRFWKQLHEALGTDLNFSTAYHPQTDGQTERVNQILEDMLRSCALDFEGTWDRCLLYAEFSYNNGYQASIQMLPNEAMFGRKCRTPLCWNEVGKALVFGPDILKSAEEQVKLTRERLKTAQNRQKNYADNRRRDLEFEKGDHVYLRVSPLRGMRRFGMSGKLAPRYIGPYLITARRGEVAYQLELPEGLADVHNVFHVSQLKKCLRVPEEQVPLGNIVLEKNLTYKERPIKVLEEAERQTRRKTIKFYKVQWSNHSEDEATWEREDLLRAEFLELLL

SEQ ID NO: 192102 - protein, 170 aa, Oryza sativa
  Clone ID: PAT_MRT4530_88359C.1.pep
FFHDRFVVVEMDRKRYKQMSRRCGNSPIIFACIGIDPPLPVVVWSPAAATGAAARSRGGSTNGGRGGIKGGKAWVICSWASADSSRPSPAQLTRNLRLRMAAGAWQWRAGGERERAPHGGAEGGGGGASATSGKPGRRRLTETIAIGLTGAAGEQRKEAMCGGILILGEA

SEQ ID NO: 192103 - protein, 1848 aa, Oryza sativa
  unsure (1)..(1848): unsure at all Xaa locations
  Clone ID: PAT_MRT4530_8835C.1.pep
MPRYKPEYLFGVEGFVQELRTMSFVIGFGTVPFYAQIRHDRHEEKCRVKVTLNSNSEDIPSVMFEAGGRNYIHACQEVARIAIGELRDRYSDQLADTEYRYHPRQPQGSDRGXEGIENDATTRHLVEMLWAMDESRAETVLAAQDREDRNRGKICKLEDKVDRLEKELAALKGEAPPQKARIRLTARKRALFVPRYQLAPKVRVVEKEVAPADPPVIIISSDEEEESKRNCSKIEWVATQDDEDEPNEPSIDLRCSEELDNGNGPNLNNPNNNNNGENPTLAQVLAQQTQLMNMMMQQLQNQQNQGNNHAPPQNKLAEFLRVRPPVFSSTTNPVEAGDWLHAIEKKLDLLQCTDQEKVSFASHQLHGPASEWWDHFRLNRTTAEPITWLEFTAAFRKTHIPSGVVSLKKKEFRSLTQGSRSVTEYLHEFNRLARYAPEDVRNDEERQEKFLEGLNDELSYPLMTEDYSDFQKLVDKAIHQEDKYNRMEQKKRRIAHFKAQQGNNQKPRLTLGPQSMPHGGSSSVVRPQHQFFNNNAGNNIRNQAPRPVAASTQQQPAKREQGSKPVVCFNCGDPGHYADKCPKPRHVKVVPAQSNSAVPASKARVNHVAAAEAQDAPDVILGTFLVNSVPATVLFDSGATHSFLSMSFAGNHGMEVEDLRCPLMVSTPSNQALSLQRSPSVRIEIQGVPFLANLILLESKDLDVILGMDWLARHKGVIDCANRKVTLTSNDGRVVTVHALSSEFLRSRLNQITLEEIPIVRGYPDVFPDDLPGMPPKRDIEFRKDLVPGTTPIHKRPYRMAANELAEVKRQVDDLLQKGYIRPSSSPWGAPVIFVEKKDHTQRMCVDYRALNDVTIKNKYPLPRIDDLFDQLKGATVFSKIDLRSGYHQLRIKEYGLFECTVMSFGLTNAPAFFMNLMNKVFMEYLDKFVVVFIDDILIYSKTKEEHEEHLRLALEKLREHQLYAKFSKCEFWLSEVKFLGHVISAGGVAVDPSNVESVTNWKQPKTVSEIRSFLGLAGYYRKFIENFSKIAKPMTRLFQKDVKYKWSEECEQSFQELKNRLISAPILILPDPKKGFQVYCDASKLGLGCVLMQDGKVVAYASRQLRPHEKNYPTHDLELAAVVHALKIWRHYLFGTRTEEFERLNLGIVSIGFVAALEAKPTLIDQVREAQTNDPDIQEIKKNMRRGKAIGFLEDEHGTVWLGERICVPDNKDLKDAILKEAHDTLYSIHPGSTKMYQDLKERFWWASMKREIAEYVAVCDVCQRVKAEHQKPAGLLQPLKIPEWKWEEIGMDFITGLPKTSLGHDSIWVIVDRLTKVAHFIPVKTTYSGSRLAELYMARIVCLHGVPKKIVSDRGSQFTSNFWKKLQEEMGSKLNFSTAYHPQTDGQTERVNQILEDMLRACALDFGGSWDKNLPYAEFSYNNSYQASLQMAPYEALYGRKCRTPLLWDQTGERQVFGTDILREAEEKVKIIQERLRVAQSRHKSYADNRRRDLSFEEGDYVYLRVTPLRGVHRFHTKGKLVPRFVGPYKIVSRRGEVAYQLELPQSLAEVHNVFHVSQLKKCLRVPTEEANLEQIEVQEDLTYVEKPIRILETNERRTRNRVIRFCKVQWSNHSEEESTWEREDELNEGFEFVSDSSFPNLPSSSPVAVGLRLRLRAPLKGSPWSPLPAATLAFASRRRSRPSAPCAAVVPAVAIAREGRRRVRRRVAVLVRPFAVAEDRRSVIAAVDPKSFAASSSSPSPSVDLPPPFASSRRRSPASMRRPSRPSCPSRRRRGDVIADAIKFVLHSVVSGESVFTGEEFEEFQGQQGNSWFGMVYSWFGDRTVQPGWLFRMVGPIQQDAALQA

SEQ ID NO: 192104 - protein, 1504 aa, Oryza sativa
  Clone ID: PAT_MRT4530_88360C.1.pep
MASRPRRAARAPARFGFEDGRVEPEANHESANERSHHSNRSHRTASRNAEVEQPRRSNRSHRTASRDAEIEQSHRSHRTASHNSGEERLPSPPHVENNMQHLMAVQTQILQGLAAAVAGFQHNAHGNGHPHTNNNRSKLTDFLRSRPPEFSQTVEPVEADDWLKDVDRKLNLVQCTPVEKTLYASHQLRGPAADWWENYCNAHPEPTNIAWDEFATAFRAAHVPESTIDMKKEEFNRLKQGNSSVNEYLSMFNKLARYAPEEVDTDKKKIRKFLKGIAVGMRLQLLAHDFPTFQYMINKALLLEDARKEATEEYKKRKSNHQGNSSRGAPHPRYGQPMQYHQSVTQANRQPGYAPRPQMNRPAPQPQQRAPSGNTAPNSVTSFKSPQGPTTVQCFRCDQMGHYARQCPQNPTNTNSGHANGSTARTPTPAAAQFRPSSQASGQGSRASNNFGRGRVNHIQAETAQDAPDVVMVHSPGRNIRATQICPEVNLRIEEVDFLAKPIVLDSQSLDIILGMDWFAKHKGQIDCAKKSITLQGPGGKQVRFTSNTPTASRSILTCLQVTSLESVPIVCEYPDVFPEELTSMPPDREIEFAIELAPGTAPIAKRPYRMAANELAEVKRQIEELESKGYVRPSSSPWGAPVLLVKKKDGSERMVIDYRALNEVTIKNKYPLPWIDDLFDQLKGARVFSKIDLRSGYHQLKIRSEDIPKTAFSTRYGLYEFTVMSFGLTNAPAFFMNLMNKIFMDYLDQFVVVFIDDILIYSKNEEEHAEHLRLIMEKLRDHQLFAKFSKCEFWLDRIAFLGHVISSSGVEVDPSKVEAVLAWNPPKNVSEIRSFLGLAGYYRRFIEGFSKLARPMTELLKKEKKFQWSAACEDSFQEMKKRLTTAPVLTLPDIRKDFEIFCDASRQGLGCVLMQERKVVAYASRQLRPHEVNYPTHDLELAAVIHALKIWRHYLIGNRCEVYTDHKSLKYIFTQTELNMRQRRWLELIKDYDLGIHYHPGKANVVADALSRKAYCNVAQIRPDQDHLCRELEKLRLTVVQTGVPASLTVQPTLESQIREAQKDDEGIKELIKRIQEKKDTNFSIDDQGTVWCDSRICVPAKKELRDLILKEAHESAYSIHPGSTKMYQDIKAYFWWAGMKRDVAEYVALCDICQRVKAEHQRPAGLLQPLPIPEWKWEEIGMDFITGLPRTPSGYDSIWVIVDRLTKSAHFVPVKTTYDGRKLAELYMTHVVCRFGCPKKIVSDRGTQFTSRFWKQLHEALGTDLNFSTAYHPQTDGQTKRVNQILEDMLRACALDFEGTWDRCLPYAEFSYNNSYQASIQMSPNEAMFGRKCRTPLCWNEVGEALDRQKNYADNRRHDLEFEKGDHVYLRVSPLRGMRRFGMSGKLAPRYIGPYLITARRGEVAYQLELPEGLADVHNVFHVSQLKKCLRVPEEQVPLGNIELEKNLTYKERPIKVLEEAERQTRRKTIKFYKVQWSNHSEDEATWEREDLLRAEFPELLP

SEQ ID NO: 192105 - protein, 90 aa, Oryza sativa
  Clone ID: PAT_MRT4530_88361C.1.pep
FFFFFFYRRLDPTGIRSGPPAGRPSRPPKFNSSSGFPESRRLHVGGGFIPVSRISTLLYYSLLYRRQRVLQPVRKFFPVITKNRSVTVWA

SEQ ID NO: 192106 - protein, 1851 aa, Oryza sativa
  Clone ID: PAT_MRT4530_88362C.1.pep
MAVNASFSSHGFGEGHHVAQLRDLARFLGFSCPEYTGYSVDRVPPHCELSVYLYPRGGIHGAGLRPHHFTVARPTLQIAYQDLSWTALRRLAHDYSHRLGGSAFRQLPRLPSGHSDARYPCPYSESQPVLTRMVELSEAQATQHDLLLEAYRSLARRYAALEARLAEEGVTSVDTISWDSGRLCHASHLSSHSSRGSARTPSGPRSPSSRALYSPVYSPYPHPVSPSYTPRHTPAASSRRGPRFIRTARKRVVGSSTGFRFHYPAPLPPAARAAAGPRQMASRPRRAARAPARFGFEDGRTEPEANHESANEQSHHSNRSHRTASRNAEVEQPRRSNRSHRTASRDAEMEQSHRSHRTASHNSGEERLSSPPHVENNMQHLMAVQTQILQGLAAAIAGFQHNTHGNGHPHISNNRSKLTDFLRSRPPEFSQTVEPVEADDWLKDVDRKLNLVQCTPVEKTLYASHQLRGPAADWWENYCNAHPEPTNIAWDEFATAFRTAHVPESAIDMKKEEFNRLKQGNSSVNEYLSMFNKLARYAPEEVDTDKKKIRKFFKGIVVGMRLQLIAHDFPTFQHMINKALLLEDARKEATEEYKKRKSNHKGNSSRGAPRPCYGQPMQYHQSVTQANRQPGYAPRPQMNRPAPQPQQRAPSGNTAPNSVTSFKSPQGPSAVQCFRCNQMGHYARQCPQNPTNTNSGHANGSTARTPTPAAAQSRPSSQASGQGSHVSNNFGRGRVNHIQAETAQDATDVVMGMFSVNSVPAIVLFDSGASHSIISQAFVKRNGWKTQNLRVPMIIHSPGRNIRATQICPEVNLRIEEVNFLAKPIVLDSQSLDIILGMDWLAKHKGQIDCAKKSITLQGPRGKQVRFTSNTPTTSRSILTCLQVTTLESVPIVCEYPDVFPEELTSMPPDREIEFAIKLAPGTAPIAKRPYRMAANELAEVKRQIEELESKGYVRPSSSPWGAPVLLVKKKDGSERMVIDYRALNEVTIKNKYPLPRIDDLFDQLKGARVFSKIDLRSGYHQLKIRSEDIPKTAFSTRYGLYEFTVMSFGLTNAPAFFMNLMNKIFMEYLDQFVVVFIDDILIYSKNEEEHAEHLRLIMEKLRDHQLFAKFSKCEFWLDRVAFLGHVISSNGVEVDPSKVEAVLAWNPPTNVSEIRSFLGLAGYYRRFIEGFSKLARPMTELLKKEKKFQWSVACEDSFQEMKKRLTTAPVLTLPDIRKDFEIFCDASRQGLGCVLMQERKVVAYASRQLRPHEVNYPTHDLELAAVVHALKIWRHYLIGNRCEVYTDHKSLKYIFTQTELNMRQRRWLELIKDYDLGIHYHPGKANVVADALSRKVYCNVAQIWPDQDRLCRELEKLRLTVVQSGVPASLTVQPTLESQIREAQKDDEGIKELIKRIQEKKDTNFSIDDQGTVWCGPRICVPAKKELRDLILKEAHESAYSIHPGSTKMYQDIKAYFWWAGMKRDVAEYVALCDVCQRVKAEHQKPAGLLQPLPIPEWKWEEIGMDFITGLPRTPSGYDSIWVIVDRLTKSAHFVPVKTTFDGKKLAELYMTRVVCRFGCPKKIVSDRGTQFTSRFWNQLHEALGTDLNFSTAYHPQTDGQTERVNQVLEDMLRACALDFEGTWDRCLPYAEFSYNNSYQASIQMSPNEAMFGRKCRTPLCWNEAGEALVFGPDILKTAEEQVKLIRERLKTAQNGQKNYADNRRRDLEFEKGDHVYLRVSPLRGMKRFGMSGKLAPRYIGPYLITARRGEVAYQLELPEGLADVHNVFHVSQLKKCLRVPEEQVPLGNIELEKNLTYKKRPIKVLEEAERQTRRKTIKFYKVQWSNHSEDEATWEQEDLLRAEFPELLP

SEQ ID NO: 192107 - protein, 1799 aa, Oryza sativa
  Clone ID: PAT_MRT4530_88363C.1.pep
MAVNASFSSHGFGEGHHVAQLRDLARFLGFSCPEYTGYSVDRVPPHCELSVYLYPRGGIHGAGLRPHHFTVARPTLQIAYQDLSWTALRRLAHDYSHRLGGSAFRQFPRLPSGHSDARYPCPYSESQPVLTHMVELSEAQATQHDLLLEAYRSLARRYAALEARLAEEGVTSVDTISWDSGRLCHASHLSSHSSRGSARTPSGPRSPSSRAPYSPVYSPYPHPVSPSYTPGHTPVASSRRGPRFIRTARKRVVGSSTVFRFHYPAPPPPAARAAAGPRQMASRPRRAARAPARFGFEDGRVEAEANHESANEQSHHSNRSHRTVSRNAEVEQPRRSNCSHRTVSRDAEMEQSHRSYRTASHNSGEERLPSPPHVENNMQHLMAVQTQILQGLTTAIASFQHNAHGNGHPHMGNNRSKLIDFLRSRPLEFSQTVEPVEADDWLKDVDRKLNLVQCTPVEKTLYASHQLRGPAADWWENYCNAHPEPTNIAWDEFATAFRAAHVPESTIDMKKEEFNRLKQGNSSVNEYLSQFNKLARYAPEEVDTDKKKIRKFLKGAPRPRYGQPMQYHQSVTQTNRQPGYAPRPQMNRPAPPPQQRAPSGNTAPNSVTSFKSPQGPSAVQCFRCNQMGHYARQCPQNPTNTNSGHANGSNARTPTPAAAQSRPSSQASGQGSRASNNFGRGRVNHIQAETAQDAPEVVMGMFSVNSVPAIVLFDSGASHSFISQAFVKRNGWKTQNLRVPMIVHSPGRNIRATQICPEVNLRIEEVDFLAKPIVLDSQSLDIILGMDWLAKHKGQIDCAEKSITLQGPGGKQVRFTPNTPTANRSILTCLQVTSLESVPIVCEYPDVFPEELTRMPPDREIEFAIELAPGTAPIAKRPYRMAANELAEVKRQIEELESKGYVRPSSSPWGAPVLLVKKKDGSERMVIDYRALNEVTIKNKYPLPRIDDLFDQLKGARVFSKIDLRSGYHQLKIRSEDIPKTAFSTRYGLYEFTVMSFGLTNAPAFFMNLMNKIFMEYLDQFVVVFIDDILIYSKNEKEHAEHLRLIMEKLRNHRLFTKFLKCEFWLDRVAFLGHVISSNGVEVDPSKVEAVLAWNPPKNVSEIRSFLGLAGYYRRFIEGFSKLARPMTELLKKEKKFQWSAACEDSFQEMKKRLTTAPVLTLPDIRKDFEIFCDASRQGLGCVLMQERKVVAYASRQLRPHEVNYPTHDLELAAVVHALKIWRHYLIGNRCEVYTDHKSLKYIFTQTELNMRQRRWLELIKDYDLGIHYHPGKANVVADALSRKAYCNIAQIRPDQDHLCKELEKLRVTVVQSGVPASLTVQPTLESQIREAQKDDEGIKELIKRIQEKKDTNFSIDDQGTVWCGPRICVPAKKELRDLILKEAHESAYSIHPGSTKMYQDIKAYFWWAGMKRDVAEYVALCDICQRVKAEHQRPAGLLQPLPIPEWKWEEVGMDFITGLPRTPSGYDSIWVIVDRLTKSAHFVPVKTTYDGKKLAELYMTHVVCRFGCPKKIVSDRGTQFTSRFWKQLHEALGTDLNFSTAYHPQTDGQTERVNQILEDMLRACALDFEGTWDRCLPYAEFSYNNSYQASIQMSPNEAMFGRKCRTPLCWNEVGEALVFGPDILKSAEEQVKLIRERLKTAQNRQKNYADNRRRDLEFEKGDHVYLRVSPLRGMRRFGMSGKLAPRYIGPYLITARRDEVAYQLELPEGLADVHNVFHVSQLKKCLRVPEEQVPLGNIDLEKNLTNKERPIKVLEEAERQTRRKTIKFYKVQWSNHSEDEATWEREDLLRAEFPELLP

SEQ ID NO: 192108 - protein, 1199 aa, Oryza sativa
  unsure (1)..(1199): unsure at all Xaa locations
  Clone ID: PAT_MRT4530_88364C.1.pep
MGNNRSKLTDFLRSRPPEFSQTVEPVEADDWLKDVDRKLNLVQCTPVEKTLYASHQLSGPAADWWENYCNAHPEPTNIAWDEFATAFRAAHVPEITIDMKKEEFNRLKQGNSSVNEYLSQFNKLARYAPEEVDTDKKKIRKFLKGIAVGMRLQLLAHDFPTFQHMINKALLLEDARKEATEEYKKRKSNHQGNSSRGAPRPRYGQPMQYHQSVTQANRQPGYAPRPQINRPAPQPQQRAPSSDTAPNSVTSFKSPQGPSAVQCFRCNQMGHYARQCPQNPTNTNSGHANGSTARTPTPAAAQSRPSSQASGQGSRASNNFGRGRVNHIQAETAQDAPDVVMGPGGKQVRFTPNTPTASRSILTCLQVTSLESVPIVCEYPDVFPEELTRMPPDREIEFAIELAPGTAPIAKRPYQMAANELAEVKRQIEELESKGYVRPSSSPWGAPVLLVKKKDGSERMVIDYRALNEVTIKNKYPLPRIDDLFDQLKGARVFSKIDLRSGYHQLKIRSEDIPKTTFSTRYGLYEFTVMSFGLTNAPAFFMNLMNKIFMEYLDQFVVVFIDDILIYSKNEEEHAEHLRLIMEKLRDHQLFAKFSKCEFWLDRVAFLGHVISSNACEDSFQELKKKLTTAPVLTLPDIRKYFEIFCDASRQGLGCVLMQEQKVVAYASRQLRPHEANYPTHDLELAAVVHALKIWRHYLIGNRCEVYTDHKSLKYIFTQTELNMRQRRWLELIKDYDLGIHYHPGKANVVADALSRKAYCNVAQIRPDQDHLCRELEKLRLTVIQSGVPASLTVQPTLESQIREAQKDDEGIKELIKRIQEKKDTNFSIDDQGTVWCGPRICVPAKKELRDLILKEAHESAYSIHPGSTKMYQDIKAYFWWAGMKRDVAEYVALCDICQRVKAEHQRPAGLLQPLPIPEWKWEEIGMDFITGLPRTPNGYDSIWXGCPKKIVSDRGTQFTSRFXNFSTAYHPQTDGQTERVNQILEDMLRACALDFEGTWDRCLPYAEFSYNNSYQASIQMSPNEAMFGRKCRTPLCWNEVGKALVFGPDILKSAEEQVKLIRERLKTAQNRQKNYADNRRRDLEFEKGDHVYLRVSPLRGMRRFGMSGKLAPRYIGPYLITARRCEVAYQLELPEGLANVHNVFHVSQLKKCLRVPEEQVPLGNIELEKNLTYKERPIKVLEEAERQTRRKTIKLYKV

SEQ ID NO: 192109 - protein, 1809 aa, Oryza sativa
  Clone ID: PAT_MRT4530_88365C.1.pep
MAVNASFSSHGLGEGHHVAQLRDLTRFLGFSCPEYTGYSVDRVPPHCELSVYLYPRGGIHGAGLRPHHFTVARPTLQIAYQDLSWTALRRLAHDYSHRLGGSAFRQLPRLPSGHSDARYPCPYSESQPVLTRMVELSEAQATQHDLLLEAYRSLARRYAALEARLAEEGVTSVDTISWDSGRLCHASHLSSHSSRGSARTPSGPRSPSSRAPYSPVYSPYPHPVSPSYTPGHTPVASSRRGPRFIRTAWKRVVGSSTVFRFHHPAPPPPAARAAAGPRQMASRPRRAARAPARFGFEDGRVEAEANHEPANEQSHHSNRSHRTSPRNAEVEQPRRSNRSHRTVSRDAEMEQSLRSHRTASHNSGEERIPSPPHVENNIQHIMAVQTQILQGLTTAIASFQHNAYGNGHPHVGNNRSKLTDFLRSRPPEFSQTVEPVEADDWLKDVDRKLNLVQCTPVEKTLYASHQLRGPAADWWENYCNAHPEPTNIAWDEFATAFRAAHVPESTIDMKKEEFNRLRQGNSNVNEYLSQFNKLARYAPEEVNTDKKKIRRFLKGVAVGMRLQLLAHDFPTFQHMINKALLLEDARKEATEEYKKRKSNHQGNSSRGAPRPRYGQPMQYHQSVTQANRQPGYAPRPQMNRPAPQPQQRAPSGNTAPNSVTSFKSPQGPSAVQCFRCNQMSHYARQCPQNPTNTNSGHANGSTARTPTPAAAQSRPSSQASGQGSRASNNFGRGRVNHIQAETAQDAPDVVMGMFSVNSVPAIVLFDSGASHSFISQAFVKRNGWKTQNLRVPMIVHSPGRNIRATQICPEVNLRIEEVDFLAKPIVLDSQSLDIILGMDWLAKHKGQIDCAEKSITLQGPGGKQVRFTPNTPTASRSVLTCLQVTSLESVPIVCEYPDVFPEELTRMPPDREIEFAIELAPGTAPIAKRPYRMAANELAEVKRQIEELESKGYVRPSSSPWGAPVLLVKKKDGSERMVIDYRALNEVTIKNKYPLPRIDDLFNQLKGARVFSKIDLRSGYHQLKIRSEDIPKTAFSTRYGLYEFTVMSFGLTNAPAFFINLMNKIFMEYLDRFVVVFIDDILIYSKNEEEHAEHLRLIMEKLRDHQLFAKFSKCEFWLDRVAFLGHVISSNGVEVDPSKVEAVLAWNPPKNVSEIRSFLGLAGYYRRFIEGFSKLARPMTELLKKEKKFQWSAACEDSFQEMKKRLTTAPVLTLPDIRKDFEIFCDASRQGLGCVLMQERKVVAYASRQLRPHEVNYPTHDLELAAVIHALKIWRHYLIGNRCEVYTDHKSLKYIFTQTELNMRQRRWLELIKDYDLGIHYHPGVPASLTVQPTLESQIREAQKDDEGIKELIKRIQEKEDTNFSIDDQGTVWCGPRICVPAKKELRDLILKEAHESAYSIHPGSTKMYQDIKAYFWWAGMKRDVAEYVALCDICQRVKAEHQRPAGLLQPLPIPEWKWEEIGMDFITGLPRTPSGYDSIWVIVDRLTKSAHFVPVKTTYDGKKLAELYMTHVVCRFGCPKKIVSDRGTQFTSRFWKQLHEALGTDLNFSTAYHPQTDGQTERVNQILEDMLRACALDFEGTWDRCLPYAEFSYNNSYQASIQMSPNEALFGRKCRTPLCWNEVGEALVFGPDILQSVEEQVKLIRERLKTAQNRQKNYADNRRRDLEFEKGDHVYLRVSPLRGMKRFGMSGKLAPRYIGPYLITARRGEVAYQLELPEGLADVHNVFHVSQLKKCLRVPEEQVPLGNIELEKNLTYKERPIKVLEEAERQTRRKTIKFYKVQWSNHSEDEATWEREDLLRAEFPELLP

SEQ ID NO: 192110 - protein, 1736 aa, Oryza sativa
  unsure (1)..(1736): unsure at all Xaa locations
  Clone ID: PAT_MRT4530_88366C.1.pep
MAVNSSFSSHGFGEGHHVAQLRDLARFLGFSCPEYTGYSVDRVPPHCELSVYLYPRGGIHGAGLRPHHFTVARPTLQIAYQDLSWTALRRLAHDYSHRLGGSAFRQLPRLPSGHSDARYPCPYSESQPVLTRMVELSEAQATQHDLLLEAYRSLARRYAALEARLAEEGVTSVDTISWDSGRLCHASHLSSHSSRGSARTPSGPRSPSSRAPYSPVYSPYPHPVSPSYTPGHTPVASSRRGPRFIRTARKRVVGSSTVFRFHYPAPPPPAARAAAGPRQTQILQGLAAAIAGFQHNTHGNGHPHMSNNRSKLTDFLRSRPPEFSQTVEPVEADDWLKDVDRKLNLVQCTPVEKTLYASHQLRGPAADWWENYCNAHPEPTNIAWDEFATAFRAAHMPESTIDMKKEEFNRLKQGNSSVNEYLSMFNKLARYAPEEVDTDKKKIRKFLKGIAVGMRLQLLAHDFPTFQHMINKALLLEDARKEAIEEYKKRKSNHQGNSSRGAPRPRYGQPMQYHQSVTQANRQPGYAPRPQMNHPAPQPQQRAPSGNTAPNSVTSFKSPQGPSAVQCFRCNQMGHYARQCPQNPTNTNSVHANGSTARTPTPATAQSRPSSQASGQGSRASNHFGRGRVNHIQAETAQDAPDVVMGMFSVNSVPAIVLFDSGASHSFISQAFVKRNGWKTQNLRVPMIVHSPGRNIRATQICPEVNLKIEEVDFLAKPIVLDSQSLDIILGMDWLAKHKGQIDCAEKSITLQGPGGKQVRFTPNTPTASRSILTCLQVTSLESVPIVCEYPDVFPEELTSMPPDREIEFAIELAPGTAPIAKRPYRMAANELAEVKRQIEELESKGYVRPSSSPWGAPVLLVKKKDGSERMVIDYRALNEVTIKNKYPLPRIDDLFDQLKGARVFSKIDLRSGYHQLKIRSEDIPKTAFSTRYGLYEFTVMSFGLTNAPAFFMNLMNKIFMEYLDQFVVVFIDDILIYSKNEEEHAEHLRLIMEKLRDHQLFAKFSKCKFWLDRVAFLGHVISSHGVEVDPSKVEAVLAWNPPKNVSEIRSFLGLAGYYRRFIEVFSKLARPMTELLKKENKFHWSASCEDSFQEMKKRLTTAPVLTLPDIRKDFEIFCDASRQGLGCVLMQERKVVAYASRQLRPHEVNYPTHDLELAAVVHALKIWRHYLIGNRCEVYTDHKSLKYIFTQTELNMRQRRWLELIKDYDLGIHYHPGKANVVADALSRKAYCNVAQIRPDHDHLCRELEKLRLTVVQSGVPASLTVQPTLESQIREAQKDNEGIKELIKRXIQEKKDTNFSIDDQGTVXKELRDLILKEAHESAYSIHPGSTKMYQDIKAYFWWAGMKRDVAEYVALCDICQRVKAEHQRPAGLLQPLPIPEWKWEEIGMDFITDLPRTPSGYDSIWVIVDRLTKSAHFVPVKTTFDGKKLAELYMTHVVCRFGCPKKIVSDRGTQFTSRFWKQLHEALGTDLNFSTAYHPHTDGQTERVNQILEDMLRACALDFEGTWDRCLPYAEFSYNNSYQASIKMSPNEAMFGRKCRTPLCWNEVGEALVFGPDILKSAEEQVKLIRERLKTAQSRQKNYADNRRRDLEFEKGDHVYLRVSPLRGMRRFGMSSKLAPRYIGPYLITARRGEVAYQLELPEGLADVHNVFHVSQLKKCLRVPEEQVPLGNIELERNLTYKERPIKVLEETERQTRRKTIKFYKVQWSNHSEDEATWEREDLLRAEFPELLP

SEQ ID NO: 192111 - protein, 144 aa, Oryza sativa
  Clone ID: PAT_MRT4530_88367C.1.pep
MTSQAVSYGSGARPRGLTDWNSETEWIERDVSRSDTATWPYSLALPPHLGRRKGSQGASGCHVTPLGPSRCLAPRPSPSYHTVTGLSLVTSGRTGSRAPTFAPVPGGVEAGLSPVSGGRWRWVPLEDGRPLSFRAKAQTVVRSE

SEQ ID NO: 192112 - protein, 98 aa, Oryza sativa
  Clone ID: PAT_MRT4530_88368C.1.pep
HARPRMAAPIQSPIIDATTSPHRALRTRASLPSALMRDLVLLAQHTYRISTLVASTESILVGSVFGAVTAPPGSTTVEVTQDSMEGSSSPPPTDTTFS

SEQ ID NO: 192113 - protein, 55 aa, Oryza sativa
  Clone ID: PAT_MRT4530_88369C.1.pep
ATVRLGTRIRMQPSQLLSPSRMVLLVTECMVLCSLIALNFHCSALVKLHYSILCL

SEQ ID NO: 192114 - protein, 362 aa, Oryza sativa
  Clone ID: PAT_MRT4530_8836C.1.pep
MKIPSSFNQCLQNQPTGMVSLVDRSGNKWSAELTSDSEGFFFVHGWKEFVRDNSIQCGQFLVFTYDKRSQFSVTVFEPSGIDKISTFSAHPSKNVIIKTESDEGGMVTAAITTEKMAPALKENNGITGKRTRDVDYLMEDRVVVFKKSSEANVCESSRRKRAGASAGKSKVTSTSHNSTRGSSCSSDEDNSSSKSPNPPFLMRFLSGEVSRRGRCVSKGQRQLTVISQRRPVTEAEKDHALQRAREFKSKNPFAVQIMMESYVYVGFFMNIPCEFVRECLPHTNKRITLWDPQGKAWEVNYVYYSDRSVGSFSGGWGKFAVGNNLEKFDVCVFELVQKDNIKVHIYRVVPEITPHKLRSDPK

SEQ ID NO: 192115 - protein, 99 aa, Oryza sativa
  unsure (1)..(99): unsure at all Xaa locations
  Clone ID: PAT_MRT4530_88370C.1.pep
YGWFMPLPLLMNVIIFMADCFICCXIDYFTDTASLIGIIVFVFGLPLPHRPWCLCFHDWPIMLPLKDVFLFIIIQLLPSPSLIGVIVFTTTKIFVSFDG

SEQ ID NO: 192116 - protein, 191 aa, Oryza sativa
  Clone ID: PAT_MRT4530_88371C.1.pep
MAVQAGTPATPISPQVISGAFVQQYYHILHETPDQVYKFYQDASIVGRPDSNGVMKYVSTTADINKIILSMDFSNYLTEIETADAQLSHQDGVLIVVTGSLTSEGICRRFTQSFFLAPQESGGYVVLNDIFRFIVERPPVAISQVSQENENNQNTATLPETDPNPAGDGMISEPVAVENNVAEGGSDKFHG

SEQ ID NO: 192117 - protein, 851 aa, Oryza sativa
  Clone ID: PAT_MRT4530_88372C.1.pep
MLSLQQQGGGDPRPQQPAAAPALLGGADWLGFGRAAAELDESVASSPASFLLPPAPPVDARAQAQPEPKPKQLGAVDVERHLALAHQNYRSGKYKEALEHGNIVYEKNPRRTDNLLLLGAIYYQIRNYDMCIAKNEEALAIDPNFAECYGNMANAWKEKGDVDLAIRYYLTAIQLRPNFCDAWSNLASAYTWKGRLNEAAQCCRQALAINPRLVDAHSNLGNLMKAQGFIQEAYNCYIEALRIDPQFAIAWSNLAGLFMEAGDLDKALLYYKEAVKLKPSFADAYLNQGNVYKTMGMSQEAIISYQRAVQARPDYAMAYGNLATIYYEQGQLDIAIRCYNQAIICDPQFVEAYNNMGNALKDAGRVEEAIRNAMFRDAEETIRKQIKMSVLPSVQPFHAIAYPIDPMLALEISCKYAAHCSLIASRFGLPSFVHPPPVPVKAEGKHCRLRVGYVSSDFGNHPLSHLMGSVFGMHDRDNVEVFCYALSQNDGTEWRQRIQSEAEHFVDVSTMALRLRPDFPEATCNLLHTLQCVCDWENRNAMFRDVEEIIRKQIKMSVLPSVQPFHAIAYPIDPMLALEISCKYAAHCSLIASRFGLPSFVHPPPVPVKAEGKHCRLRVGYVSSDFGNHPLSHLMGSVFGMHDRDNVEVFCYALSQNDGTEWRQRIQSEAEHFVDVSAMTSDMIARIINQDKIQILINLNGYTKGARNELCALQPARTDILWAGLPMITLPLEKMATRVAGSLCLATGLGEEMIVSSMKEYEDRAVDLALNPAKLQALTNKLKEVRMTCPLFDTARWVRNLERALDPEIFDTWCNILKRVPNSALWLLRFPAAGETRVRAHAADRRDISHM

SEQ ID NO: 192118 - protein, 128 aa, Oryza sativa
  Clone ID: PAT_MRT4530_88373C.1.pep
VSPLCNAHTTGTDILWAGLPMITLPLEKMATRVAGSLCLATGLGEEMIVSSMKEYEDRAVDLALNPAKLQALTNKLKEVRMTCPLFDTARWVRNLERAYYKMWNLYCSGRHREPFKVIEDDNEFPYDR

SEQ ID NO: 192119 - protein, 74 aa, Oryza sativa
  unsure (1)..(74): unsure at all Xaa locations
  Clone ID: PAT_MRT4530_88375C.1.pep
RTRGSQSSPSIWPRPPSQQRSLLPSXEERSSRVAQPLXGDGLLVASSAAAGASAAARVGVVQMTSEGDLDANYA

SEQ ID NO: 192120 - protein, 167 aa, Oryza sativa
  Clone ID: PAT_MRT4530_88376C.1.pep
SLLPSCKESPAMAMVAAASPFPFESTPPMAATATSSSSSSSSSSSSSSSSSTTSVTTGTGASVSRRPPPLPSVRTASRSNSPCSSSCRWYSAASAHARRSPSSSARTASSSLRCARSAAASLPTVSAPSPSRRSSAGRSSNTSWALPCPSSSCGARAAMGASSKRET

SEQ ID NO: 192121 - protein, 101 aa, Oryza sativa
  Clone ID: PAT_MRT4530_88377C.1.pep
DDVSCGACSLIILHVTPNQLRIRRDLHIKFSLKPALSGRLSSTARTWNGASIATAMEEGKASTDMFFSSLKEQKRLQGESKNGRREDADGVCAWHESGRVG

SEQ ID NO: 192122 - protein, 296 aa, Oryza sativa
  unsure (1)..(296): unsure at all Xaa locations
  Clone ID: PAT_MRT4530_88378C.1.pep
MYGGMLAAIVMMLFMVDPVLQHVTILLDLCGFAILSFGNLQIPAAIVREELARMRLTQHDSFGXGVLYIVASTLEVFSFIHRRSLVRHGGFTGEXESVNLYYAYAFDKYMEGGVFAPKRINLSNFAIDSINSDMSKNQLYGIRMMHTFLQRDPTRAQLLEKLTTSTQTKARLINMLDWTDGNHHTTVGKKQKEKRNRGCNGGSNGLLRVEGSKDPPAPTLPPPLTVGTTAVGSGGGGGGGGGDEGGERWRRSHELDEIGSLAPCKTANERSRETNLQRQKETKSIPNLCIHTPIQR

SEQ ID NO: 192123 - protein, 559 aa, Oryza sativa
  Clone ID: PAT_MRT4530_88379C.1.pep
MAEDAAAAAMAAASLSDDLEPATDRTRIRSILADGAARAGERVVVGGWVKTGREQGKGTFAFLELNDGSCASNLQVLVDAAVHPLAPLTATGTSVLVEGELKKPPEGAKQRVELRVDRVIEVGEVDPAAYPLPKTKLTLENLRDVVHLRSRTNTIGAVARIRHQLACATHRFFDENGFLYVHTPIITTSDCEGAGEMFQVTTLFSHAEKVEKELKENPAPSESDIEAARVVVKEKGDAVAQLKAAKASKQEITAAVAELNKAKENVSRLEERSKLKPGIPYRDDGTVAYENDFFKRQAFLTVSGQLQVETYACALSSVYTFGPTFRAENSHTSRHLAEFWMVEPEIAFANLQDDMNCAERYVQYLCKWLLEHCREDMEFMVKNYDKTAIERLELVSSTPFQRISYTKAVELLKNVTDKKFENKVEWGIDLASEHERYLTEVIFKKPVIVYNYPKEIKAFYMRLNDDQKTVAAMDVLVPKVGELVGGSQREERLDLLKTRIQDAGLPLEPYEWYLDLRRFGSVKHSGFGLGFERMILFATGLENIRDVIPFPRYPGRADL

SEQ ID NO: 192124 - protein, 241 aa, Oryza sativa
  unsure (1)..(241): unsure at all Xaa locations
  Clone ID: PAT_MRT4530_8837C.1.pep
EFPGRPRVRTHLDMIAEIQMDPIAVNAXLEAXDLHYNCTHAEEVRVDRGALHHFGLLGLADRRHRXDGEQTACVLIRTKGSEGVXTTHLCHDEHRXALPTTSYRRIEGNSLTGAXDAETLYLRVLGEHIXIMIASEQVGRHTVMRGLYPTRGHLRQRRLXLFNNATRARVTAXKLVAHNRDSCYNQCYMAYTTTLFYVTLFSMITLSLLTCTSLLTTTSAASYWTVLYYSIASHHKVIWLC

SEQ ID NO: 192125 - protein, 104 aa, Oryza sativa
  Clone ID: PAT_MRT4530_88380C.1.pep
PIKGVVGLPPPCRKKGVPFSLLERKAPFGLFVSKKTAFVLCLPPVKNKAKLEFTKILGAIKANFTPNFYEVRKKWGGGVMGSKSQAKTKAREKLLPKKAAHRMP

SEQ ID NO: 192126 - protein, 136 aa, Oryza sativa
  Clone ID: PAT_MRT4530_88381C.1.pep
HSPQRQEGEGQGVQQKHLSARHHPQVRLEAPMALLPRGTGAIPRRGRLFLDLLNGQMGGARRALPHFPGSQLTVNLPGGAPSIPCRTIHMEALLEDPPGTPPPRAPQIVDIIPCILRGCRHFCKGYFPRCLCISQN

SEQ ID NO: 192127 - protein, 96 aa, Oryza sativa
  Clone ID: PAT_MRT4530_88382C.1.pep
MRRLVTGVWFEDVGSNGCFLQQRSASSRSSVGQCAPSMNEMILLYDKFLPSPFVNDCYMRSISLKFFDGDECDCDEIYQFEVFVMVTTVTAMSKPP

SEQ ID NO: 192128 - protein, 131 aa, Oryza sativa
  Clone ID: PAT_MRT4530_88383C.1.pep
GSNCMARRIHDNSSPEVQVRVLDLIWGIKLWMRKCNCAANARAASETRRRCAAQSLQRKRAASFGRFAPLPSAPMRRSLPLWWVVLVFLFLDRELAATAHVQDGERWRQMGGRALGHRRRRRRWRRRPRVR

SEQ ID NO: 192129 - protein, 1848 aa, Oryza sativa
  Clone ID: PAT_MRT4530_88384C.1.pep
MAVNASFSSHGFGEGHHVAQLRDLSRFLGFSCPEYTGYSVDRVPPHCELSVYLYPRGGIHGAGLRPHHFTVARPTLQIAYQDLSWTALRRLAHDYSHRLGGSAFRQLPRLPSGHSDARYPCPYSESQPVLTRMVELSEAQATQHDLLLEAYRSLARRYAALEARLAEEGVTSVDTISWDSGRLCHASHLSSHSSRGSARTPSGPRSPSSRAPYSPVYSPYPHPVSPSYTPGHTPVASSRRGPRFIRTARKRVVGSSTVFRFHYPAPPPSAARAAAGPRQMASRPRHAARAPARFGFEDGRVEAEANHESANEQSHHSNRSHRTVSRNAEVEQPRRSSRSHRTVSRDAKMEQSHRTASHNSGEERLPSPSHVETNMQHIMAVQTQILQGLTTAIASFQHNAHGNGHPHVGNNRSKLTDFLRSRPPEFSQTVEPVEADDWLKDVDRKLNLVQCTPVEKTLYASHQLRGPAADWWENYCNAHPEPTNIAWDEFATAFRAAHVPESTIDMKKEEFNRLKQGNSSVNEYLSQFNKLARYAPEEIDTDKKKIRKFLKGIAVGMRLQLLAHDFPTFQHMINKALLLEDARKEATEEYKKRKSNHQGNSSRGAPRPRYGQPMQYHQSVTQANRQPSYAPRPQINRPAPQPQQRAPSGNTAPNSVTSFKSPQGPSAVQCFRCNQMGHYARQCPQNPTNTNSGHANGSTARTPTPAAAQSRPSSQASGQGSRASNHFGRGRVNHIQAETAQDAPDVVMGMFSVNSVPAIVLFDSGASHSFISQAFVKRNGWKTQNLRVPMIVHSPGRNIRATQICPEVNLRIEEVDFLAKPIVLDSQSLDIILGMDWLAKHKGQIDCAEKSITLQGPGGKQVRFTPNTPTASRSILTCLQVTSLESVPIVCEYPDVFPEELTRMPPDREVEFAIELAPGTAPIAKRPYRMAANELAEVKRQIEELESKGYVRPSSSPWGAPVLLVKKKDGSERMVIDYRALNEVTIKNKYPLPRIDDLFDQLKGARVFSKIDLRSGYHQLKIRSEDIPKTAFSTRYGLYEFTVMSFGLTNAPAFFMNLMNKIFMEYMDQFVVVFIDDILIYSKNEEEHAEHLRLIMEKLRDHQLFAKFSKCEFWLDRVAFLGHVISSNGVEVDPSKVEAVLAWNPPKNVSEIRSFLGLAGYYRRFIEGFSKLARPMTELLKKEKKFQWSAACEDSFQEMKKRLTTAPVLTLPDIRKDFEIFCDASRQGLGCVLMQERKVVAYASRQLRPHEVNYPTHDLELAAVVHALKIWRHYLIGNRCEVYTDHKSLKYIFTQTELNMRQRRWLELIKDYDLGIHYHPGKANVVADALSRKAYCNVAQIRPDQDHLCRELEKLRLTVVQSGVPASLTVQPTLESQIREAQKDDEGIKELIKRIQEKKDTNFSIDDQGTVWCGPRICVPAKKELRDLILKEAHESAYSIHPGSTKMYQDIKAYFWWAGMKRDVAEYVALCDICQRVKAEHQRPAGLLQPLPIPEWKWEEIGMDFITGLPRTPSGYNSVWVIVDRLTKSAHFVPVKTTYDGKRLAELYMTHVVCRFGCPKKIVSDRGTQFTSRFWKQLHEALGTDLNFSTAYHPQTDGQTERVNQILEDMLRACALDFEGTWDRCLPYAEFSYNNSYQASIKMSPNEAMFGRKCRTPLCWNEVGEALVFGPDILKSAEEQVKLIRERLKTAQSRQKNYADNRRRDLEFEKGDHVYLRVSPLRGMRRFGMSGKLAARYIGPYLITARRGEVAYQLELPEGLADVHNVFHVSQLKKCLRVPEEQVPLGNIELEKNLTYKERPFKVLEEAERQTRRKIIKFYKVQWSNHSEDEATWEREDLLRAEFPELLP

SEQ ID NO: 192130 - protein, 67 aa, Oryza sativa
  Clone ID: PAT_MRT4530_88385C.1.pep
GGIGNDKAVWLRCSRISSVGRTRILLRPSTRQSLENEQRVPLGGQRRPRHLPCCGDYRRPSRGRRHN

SEQ ID NO: 192131 - protein, 1141 aa, Oryza sativa
  unsure (1)..(1141): unsure at all Xaa locations
  Clone ID: PAT_MRT4530_88386C.1.pep
MGHYARQCPQNPTNTNLGHANGSTARTPTPAAAPSRPSSQASGQGSRASNNFGRGRVNHIQAETAQDAPDVVMGMFSVNSEPAIVLFDSGASHSFISQAFVKRNGWKTQNLRVPMIVHSPGRNIRATQICPEVNLRIEEVDFLAKPIVLDSQSLDIILGMDWLAKHKGQIDCAEKSITLQGPGGKQVRFTSNTPTASRSILTCLQVTSLESVPIVCEYPDVFPEELTSMPPDREIEFTIELAPGTAPIAKRPYRMAANELAEVKRQIEELESKGYVRPSSSPWGAPVLLVKKKDGSERMVIDYRALNEVTIKNKYPLPRIDDLFDQLKGARVFSKIDLRSGYHQLKIRSEDIPKTAFSTRYGLYEFTVMSFGLTNAPAFFMNLMNKIFMDYLDQFVMVFIDDILIYSKNEEEHAEHLRLIMEKLRDHQLFAKFSKCEFWLDRVAFLGHVISSNGVEVDPSKVEAVLAWNPPKNVSEIRSFLGLAGYYRRFIEGFSKLARPMTELLKKEKKFQWSTACEDSFQEMKKRLTTAPVLTLPDIRKDFEIFCDASRQGLGCVLMQERKVVAYASRQLRPHEVNYPTHDLELAAVVHALKIWRHYLIGNRCEVYTDHKSLKYIFTQTELNMRQRRWLELIKNYDLGIQYHPGKANVVADALSHKAYCNVAQIRPNQDRLCRELEKLRLTVVQSGVPASLTVQPTLESQIREAQKDDEGIKELIKRIQEKKDTNFSIDEQGTVCTKMYQDIKAYFWWAGMKRDVAEYVALCDICQRVKAEHQRPAGLLQPLPIPEWKWEEIGMDFITGLPRTPSGYDSIWVIVDRLTKSAHFVPVKTTFDGKKLAELYMTHVVCRFGCSKKIVSDRGTQFTSRFWKQLHEALGTDLNFSTAYHPQTDGQTXRVNKILEDMLRACALDFEGTWDRCLPYAAFSYNNSYQASIQMSPNEAMFRRKCRTPLCWNEVDEALVFGPDILKAVEEQVKLIRERLKTAQNRQKSYADNRRRDLEFEKGVHVYLRVSPLRGMRRFGMSDKLAPRYIGPYIITARRGEVAYQLELPEGLADVHNVFRVSQLKKCLRVPEEQVPLGNTELEKNLTYKERPIKVLEEAERQTQRKTIKFYKVQWSNHSEDEATWEREDHLRAEFPELLP

SEQ ID NO: 192132 - protein, 261 aa, Oryza sativa
  Clone ID: PAT_MRT4530_88387C.1.pep
AISVLNVKALVPVTLDVAAANYTKWRGLFLVALSKYALTEHVLSDEHLPHRADWKQMDCVVLAWLYCTISTDLLQEVLSVDTTARLVWITLEHQFLGNCEHRAITLTADFHHFQQGDLNVADFCRKLKAMADQLGDLGEPVKDRTLVLTALRFRRREPRRWWRRRQRWRELPQSLSSRRKWRREARRRQRRHSAFTHPPTSTSPSHIVVGDGSTIPVTSVGQANFRHSNHSFTLRDILCSSPPTATTLAASTTSDVLWHRH

SEQ ID NO: 192133 - protein, 71 aa, Oryza sativa
  Clone ID: PAT_MRT4530_88388C.1.pep
MKEIQVKLQLLMFLTLSTGEVKDQPGTEVKDGSQFEKKTFSRMHEGETVQVSYKVYIPKKSPALARRKLQR

SEQ ID NO: 192134 - protein, 1504 aa, Oryza sativa
  Clone ID: PAT_MRT4530_88389C.1.pep
MASRPRRAARAPARFGFEDGRVEAEANHESANEQSHRSNRSHRTVSRNAEVEQPRRSSRSHRTVSRDAEMEQSHLSHCTVSHNSGEERLPSPPHVENNMQHIMAVQTQILQGLTTAIASFQHNVHGHPHVGNNRSKLTDFLRSRPPEFSQTVEPVEADDWLKDVDRKLNLVQCTPVEKTLYASHQLRGPAADWWENYCNAHPEPNNIAWDEFATAFRAAHVPESTIDMKKEEFNRLKQGNNSVNEYLSQFNKLARYAPEEVDTDKKKIRKFLKGIAVGMRLQLLAHDFPTFQHMINKALLLEDARKEATEEYKKRKSNHQGNSSRGAPRPRYGQPMQYHQSITQTNRQPGYAPRPQINRPAPPPQQRAPSGNTAPNSVTSFKSPQGPSAVQCFRCNQMGHYARQCPQNPANTNSGHANGSTARTPTPAAAQSRPSSQASGQGSRASNHFGRGRVNHIQAETAQDAPDVVMGMFSVNSVPAIVLFDSGASHSFISQAFVKRNGWKTQNLRVPMIVHSPGRNIRAIQICPEVNLRIEEVDFLAKPIVLDSQSLDIILGMDWLAKHKGQIDCAEKSITLQGPGGKQVRFTPNTPTASRSILTCLQVTSLESVPIVSEYPDVFPEELTTNELAEVKRQIEELESKGYVRPSSSPWGAPVLLVKKKDGSERMVIDYRALNEVTIKNKYPLPRIDDLFDQLKGARVFSKIDLRSGYHQLKIRSEDIPKTAFSTRYGLYEFTVMSFGLTNAPAFFMNLMNKIFMEYLDQFVVKCEFWLDRVAFLGHVISSNGVEVDPSKVEAVLAWNPPKNVSEIRSFLGLAGYYRRFIEGFSKLARPMTELLKKEKKFQWSAACEDSFQEMKKRLTTAPVLTLPDIRKDFEIFCDASRQGLGCVLMQERKVVAYASRQLRPHEVNYPTHDLELAAMVHALKIWRHYLIGNRCEVYTDHKSLKYIFTQTELNMRQRRWLELIKDYDLGIHYHPGKANVVADALSRKAYCNVAQTRPNQDHLCRELEKLRLTVVQSGVPASLTVQPTLESQIREAQKDDEGIKELIKRIREKKDTNFSIDEQGTVWCGPRICVPAKKELRDLILKEAHESAYSIHPGSTKMYQDIKAYFWWAGMKRDVAEYVALCDICQRVKAEHQRPAGLLQPLPIPEWKWEEIGMDFITGLPRTPCGYDSIWVIVDRLTKSAHFVPVKTTYDGKKLAELYMTHVVCRFGCPKKIVSDRGTQFTSRFWKQLHETLGTDLNFSTAYHPQTDGQTERVNQILEDMLRACALDFEGTWDRCLPYAEFSYNNSYQASIQMSPNEAMFGRKCRTPLCWNEVGEALVFGPDILKSAEEQVKLIRERLKTAQNRQKNYADNRRRDLEFKKGDHVYLRVSPLRGMRRFGMSGKLAPRYIGPYLIAARRGEVAYQLELPEGLADVHNVFHVSQLKKCLRVPEEQVPLGSIELEKNLTYKERPIKVLEEAERQTRRKTIKFYKVQWSNHSEDEATREREDLLRAEFPELLP

SEQ ID NO: 192135 - protein, 69 aa, Oryza sativa
  Clone ID: PAT_MRT4530_8838C.1.pep
MALLEEELRYLMVHQTVQLDPTGIFSLRRLSLGSMDDGCGAGRTTTAKRGDGGEDQKLGGWNVPSWVRT

SEQ ID NO: 192136 - protein, 86 aa, Oryza sativa
  Clone ID: PAT_MRT4530_88390C.1.pep
LGLAIAAQEGTIKSSWGVPNNLQHISYEGPRQHYDGQDGAPGRPTILESKHEPGLISIASEQALVMLTSGQILTHTRLNRIADLKA

SEQ ID NO: 192137 - protein, 1771 aa, Oryza sativa
  Clone ID: PAT_MRT4530_88391C.1.pep
MTVLLLCNKETSVAMIFCLPVIPALFPGTGIDEQMAVNASFSSHGFGEGHHVAQLRDLARFLGFSCPEYTGYSVDRVPSRYELSVYLYPRGGIHGAGLRPHHFTVARPTLQIAHRLGGSAFRQLLRLPSGRTDTRYPCPYSESQPVLTRMVELSEAQATQHDLLLEAYRSLARRYAALEARLAEEGVTSVDTASWDLGRLCHASHLSSHSSRGSVRTPSGPRTPSSRVPYSPVHSPYPHPVSPSYTPGHTPVASSCRGPRFIRTVRKRVVGSSTVFRFDHPARPPPAARAAAGPRQVPPISSRQPIDVSSTEEPTTGAHFGFEEGRVEPEANHESANEQSHHSNRSHHTASRNAEVEQPHRSNRSHRTVSRNAEVEQSHRSPRAAIHNSREERIPSPPHVENNMQHLMAVQTQILQGLATAIAGIQHNAHGNGHPHTGNNRSKLTDFLRSRPPEFSQTVEPVEADDWLKDVERKLNLVQCTPVEKTLYASHQLRGPAADWWENYCNAHPEPTNIPWDEFAAAFRAAHVPESTIDMKKEEFNRLKQGNTSVNEYMSQFNKLARYAPEEVDTDKKKIRKFLKGVTHMINKRLLLEDARKEATEEYKKRKSTHQGNSSRGEPRPRFGQPMQYHQSVTQANRQPSYAPRPQMNRLAPQPQQRAPSGNTAPNSVTSFKSPPGLSAVQCFRCNQMGHYARQCPQNLTNSNSGHTNGSTARTPTPAAAQSRPSTQASGQGSRASNNFGRDRVNHIQAETAQDAPDVVMGMFSVNSAPAIVLFDSGASHSFISQAFVKRNGWKTQNLRVPMIVHSPGRDIRATKICSEVNLRIEEVDFLAKPIVLDSQSLDIILGMDWLAKHKGQIDCAERSITLQGPGGKQVRFTPNTLTASRSILTSLQATSLESVPIVCEYPDVFPKELTEMPPNREIEFAIELALGTAPIAKSPYRMAANELAEVKKQIEELESKGYVRPSSSPWGAPVLLVKKKDGSERMLKIRYEDIPKTAFSTRYGLYEFTVMSFGLTNAPAFFMNLMNKIFMEYLDQFVVVFIDDILIYSKNEEEHVEHLRLIMEKLRDHQLFAKFSKCEFWLDRVAFLGHVISSNGVEVDPSKVEAVLAWYPPKNESEIRSFLGLAGYYRRFIEGFSKLARPMTELLKKEKKFEWSAACEDSFQEMKKRLTTAPVLTLPDIRKDFEIFCDASRQGLGCVLMQERKVVAYASRQLRPHEVNYPTHDLELAAVVHALKIWRHYLIGNRCEVYTDHKSLKYIFTQTELNMRQRRWLELIKDYDLGIHYHPGKANVVADTLSRKTYCNAAQIWPDQDRLCRELEKLRLTVVQSGVPASLTVQPTLESQIREAQKDDEGIKELIKRIQKMKDTDFSIDDQGTVWCGPRICVPAKKELRDLILKEAHESAYSIYPGSTKMYQDIKAYFWWVGMKRDVAEYVALCDICQRVKAEHQRPAGLLQPLPIPEWKWEEIGMDFITGLPRTPSGYDSIWVIVDRLTKSAHFVPAKTTFDGKKLAELYMTHVVCRFGCPKKIVSDRGTQFTSSYQASIQMSPNEAMFGRKCRTPLCWNEVGKALVFGPDILKSAEEQVKLIRERLKTAQNRQKNYADNRRRDLEFEKGDHVYLRVSPLRGMRRFGMSGKLAPRYIGPYLITARRGEVAYQLELPEGLADVHNVFHVSQLKKCLRVPEEQVPLGNIELEKNLTYKERPIKVLEEAEPAHPLVLASQRVRARADAARCFPRARAVVADRPVAAAVSLCTRLSPVSPLRSKPPRRH

SEQ ID NO: 192138 - protein, 128 aa, Oryza sativa
  Clone ID: PAT_MRT4530_88392C.1.pep
MFFAGPEFPGIGTPFGEEGKYVEVVKLPAAGNVAGRGRGSRLEKGPAAREEKDGISRRWGRRRGVRLAMFRPLGYEVVGPFFGPHGATGLRKANTKDRNNHLDNATASCWSESVTHSTEDLSDEGSTA

SEQ ID NO: 192139 - protein, 1718 aa, Oryza sativa
  Clone ID: PAT_MRT4530_88393C.1.pep
MAVNASFSSHGFGEGHHVAQLRDLARFLGFSCPEYTGYSVDRVPPRCELSVYLYPRGGIHGAGLRPHHFTMARPTLQIAYQDLSWTALCRLAHDYSHRLGGSAFRQLPHLPSSHADARYPCPYNESQPVLTRMVELSEAQATQHNLLLEAYCSLARRYAALEAHLAEEGVTSVDTVSWDSGRLCHASHLSSHSSRGSARTPSGPRSPSSRAPYSQVYSPYPHPVSPSYTPGHTPVASSRRGPRFIRTARKRVVGSSTVFCFDYPAPPPLAARAVGGPRQMASHPHRAARTPACFGFEEGRVEPEANHESANEQSHQSNRSHRTASRNAEVEQPHRSNRSHHTASRNTEVEQSHRSHRTASHNSGEERIPSPPHVENNMQHLMAVQTQILQGLAAAIAGFQHNAHGNGHPHMGNNRSKLTDFLRSRPPEFSQTIEPIEADDWLKDVDRKLNLVQCTPVEKTLYASHQLRGPAADWWENYCNAHPEPTNIAWGEFAMAFRAAHVPESAIDMKKEEFNRLKQGNNGVNEYLSQFNKLARYAPEEVDTDKKKIRKFLKGIAVGMRLQLLAHDFPTFQHMINKTLLLEDARKEATEEYKKRKSNHQGNSSLGAPHPRYGQPMQYHQSVTQANRQPGYAPRPQMNRPAPQPQQHTPSGNTAPNSVTSFKSPLGLSAVQCFRCNQMGHYARQCPQNPTNTNSGHANGSTARTRTPAAAQSRPSSQASGQGSRASNNFGRGRVNHIQAETAQDAPDVVMVHSPGRNIRATQICPGVNLRIEEVDFLAKPIVLDSQSLDIILGMDWLAKHKGQIDCAERSITLQGPGGKQVRFTSNAPTASRSILTCLQVTSLESVPIVCEYPDVFPEELTSMPPDREIQFAIELAPGTAPIAKRPYRMAANELAEVKRQIEELESKGYVRPSSSPWGAPVLLVKKKDGSERMVIDYRALNEVTIKNKYPLPRIDDLFDQLKGARVFSKIDLRSGYRQLKIRSEDIPKTAFSTRYGLYEFTVMSFGLTNAPAFFMNLMNKIFVEYLDQFVVVFIDDILIYSKNEEEHAEHLRLIMGKLRDHQLFAKFSKCEFCKVEAVLAWNPPKNVSEIRNFLGLAGYYRIFIEGFSKLARPMTELLKKEKKFEWTAACEDGFQEMKKRLTTVPVLTLPDIRKDFEIFCDASRQGLGCVLMQERKVVAYASRQLRPHEVNYPTHDLELAAVVHALKIWRHYLIGNRCEVYTDHKSLKYIFTQTELNMRQRRWLELIKDYDLGIHYHPGKANVVADALSRKTYCNEAQIWPAQDRLCRELEKLKLTVVQSGVPASLTVQPTLESQIREAQKDDEGIKELIKRIQEKKDTDFSIDDQGTVWCGPRICVPAKKELRNLILKEAHESAYSIHPGSTKMYQDIKAYFWWAGMKRDVAEYVALCDICQRVKAEHQRPAGLLQPLPIPEWKWEEIGMDFITGLPTTPSGFGCPKKIVSDRGTQFTSRFWKQLHEALGTNLNFSTAYHPQTDGQTERVNQILEDMLRACALDFEGTWDRCLPYAEFSYNNSYQASIQMSPNETMFGRKCRTPLCWNEVGEALNYADNRRRDLEFEKGDHVYLRVSPLRGMRRFGMSGKLAPRYIGPYLITARRGEVAYQLELPESLADVLNVFHVSQLKKCLRVPEEQVPLDNIELEKNLTYKEIPIKVLEEAERQTRRKTIKFYKVQWSNHSEDEATWEREDLLRAEFPELLP

SEQ ID NO: 192140 - protein, 159 aa, Oryza sativa
  Clone ID: PAT_MRT4530_88394C.1.pep
MGSGMGGGSGWPAKRGGERLLGLGGEGKMVSERVKGTSSLKFDDYRSLNDSDVIELSVGSGNDGRNKAVDVTALGGDTHTGGFRPSCAVGARRPLPSTAAPLSSALNSVRCAVIRSPPPSLYTIGRAVVVVHHQPLVVVLTTSAERRFGEEVLDRMRGG

SEQ ID NO: 192141 - protein, 96 aa, Oryza sativa
  unsure (1)..(96): unsure at all Xaa locations
  Clone ID: PAT_MRT4530_88395C.1.pep
SSHGDMVNRRKLRGDEQVHSMWSRVGKRRQKDCRNILDEIKVIYRQENTKNTITKGSIKGVGKPKVFDQCLEELGXPPYQPLWXFFGKYAYSAPTK

SEQ ID NO: 192142 - protein, 210 aa, Oryza sativa
  Clone ID: PAT_MRT4530_88396C.1.pep
MRGAALNAGCTACLLPSVDGAGRSSLLLLQGGGSGWPAKRGGERLLGLGGEGKMVSERVKGTVKGFDATNGFGFITPDDDGEDLFIHQSSLKFDDYRSLNDSDVIELSVGSGNDGRNKAVDVTALGGDTHTGGFRPSCAVGARRPLPSTAAPLSSALNSVRCAVIRSPPPSLYTIGRAVVVVHHQPLVVVLTTSAERRFGEEVLDRMRGG

SEQ ID NO: 192143 - protein, 1416 aa, Oryza sativa
  Clone ID: PAT_MRT4530_88397C.1.pep
MEQSHRSHHTASHNSGEERLPSPPHVENNMQHLMAVQTQILQGLTTAIASFQHNAHGNGHPHMGNNRSKLTDFLRSRPPEFSQTVEPVEADDWLKDVDRKLNLVQCTPVEKTLYASHQLRGPAADWLENYCNAHPEPTNISWDEFATAFRAAHVPESTIDMKKEEFNRLKQGNSSVNEYLSQFNKLARYAPEEVDTDKKKIRKFLKGIAVGMRLQLLAHDFPTFQHMINKALLLEDARKEATEEYKKRKSNHQGNSSRGALRPRYGQPMQYHQSVTQANRQPGYAPRPQMNRPAPQPQQRAPSGNTAPNSVTSFKSPQGPSAVQCFRCNQMGHYARQCPQNPTNTNSGHANGSTARTPTPAAAQFRPSSQASGQGSRASNHFGRGRVNHIQAETAQDAPDVVMGMFSVNSVPAIVLFDSGASHSFISQAFVKRNGWKTQNLRVPMIVHSPGRNIRATQICPEVNLRIEEVDFLAKPIVLDSQSLDIILGMDWLAKHKGQIDCAEKSITLQGPGGKQVRFTPNTPTVSRSILTCLQVTSLESVPIVCEYPDVFPEELTSMPPDREIEFAIELAPGTAPIAKRPYRMAANELAEVKRQIEELESKGYVRPISSPWGAPVLLVKKNDGSERMVIDYRALNEVTIKNKYPLPRIDDLFDQLKGARVFSKIDLRSGYHQLKIRSEDIPKTAFSTRYGLYEFTVMSFGLTNAPAFFMNLMNKIFMEYLDQFVVVFIDDILIYSKNEEEHAEHLRLIMEKLRDHQLFAKFSKCEFWLDRVAFLGHVISSNGVEVDPSKVEAVLAWNPPKIVSEIRSFLGLAGYYRRFIEGFSKLARPMTELLKKEKKFQWSVACEDSFQEMKKRLTTAPVLTLPDIRKDFEIFCDASRQGIGCVLMQERKVVAYASRQLRPHEANYPTHDLELAAVVHALKIWRHYLIGNRCEVYTDHKSLKYIFTQTELNMRQRRWLELIKDYDLGIHYHPGKANVVADALSRKAYCNVAQIRPDQDHLCRELEKLRLTVVQSGVPASLTVQPTLESQIREAQKDDEGIKELIKRIQEKKDTNFSIDDQGTVWCGQRICVPTKKELRDLILKEAHESAYSIHPGSTKMYQDIKAYFWWAGMKRDVAEYVALCDICQRVKAEHQRPAGLLQPLPIPEWKWEEIGMDFITGLARTPSGYDSIWVIVDRLTKSAHFVPVKTTYDGKKLAELYMTHVVCRFGCPKKIVSDRGTQFTSRFWKQLHEALGTDLNFSTAYHPQTDGQTERTAQSRQKNYADNRRRDLEFEKGDHVYLRVSPLRGMRRFGMSGKLAPRYIGPYLITARRGEVTYQLELPEGLADVHNVFHVSQLKKCLRVPEEQVPLGNIELEKNLTYKERPIKVLEEAERQTRRKTIKFYKVQWSNHSEDEATWEREDLLRAEFPELLP

SEQ ID NO: 192144 - protein, 1829 aa, Oryza sativa
  Clone ID: PAT_MRT4530_88398C.1.pep
MPTVMGGCEMAVNASFSSHGFGEGHHVAQLRDLARFLGFSCPEYTGYSVDRVPPHCELSVYLYPRGGIHGAGLRPHHFIVARPTLQIAYQDLSWTALRRLAHDYSHRLGGSAFRQLPRLPSGHSDARYPCPYSESQPVLTRMVELSEAQATQHDLLLKAYRSLARRYAALEARLAEEGVTSVDTISWDSGRLCHASHLSSHSSRGSARTPSGPRSPSSRAPYSPVYSPYPHPVSPSYTPGHTPVASSRRGPCFIRTARKRVVGSSTVFRFHHLAPPPPAMASRPRRAACAPARFGFEEGRVKPEANHESANEQSHRSNRSHRTVSRNAKVEQPCRSNRSHRTASRDVEMEQSHRSHRTASHNSGEECLPSPHHVENNMQHLMAVQTQILQGIAAAVAGYKHNSHGNGHPHMGNNRSKLTDFLRSRPPEFSQTVEPVEADDWLKDVDRKLNLVQCTPVEKTLYASHQLRGPAANWWENYCNAHPEPTNIAWDEFATAFRAAHVPESTIDMKKEKFNRLKQGNSSVNEYLSMFNKLARYALEEVDSDKKKIRKFLKGIAVGMRLQLLAHDFPTFQHMINKALLLEDARKEATEEYKKRKSNHQGNSSRGAPRPRYGQPMQYHQSVTQANRQPGYAPRPQMNRSAPQPQQHAPSGNTAPNSVTSFKSPQGPSAVQCFRCNQMGHYARQCPQNPTNTNSGHANGSTARTPTPAAAQSRLSTQASGQGSRASNHFGRGCVNHIRAETAQDAPDVVMGMFSVNSVPAIVLFDSGASHSFISQAFVKRNGWKTQNLRVPMIVHSPGRNIRATQICPEVNLRIEEVDFLAKPIVLDSQSLDIILGMDWLAKHKGQIDCAEKSITLQGPGGKQVRFTPNTPTASRSILTCLQVTSLESVPIVCEYPDVFPEELTRMPPDREIEFAIELAPGTAPIAKRPYQMAANELTEVKRQIGELESKGYVRPSSSPWGAPVLLVKKKDGSERMVIDYRALNEVTIKNKYPLPRIDDLFDQLKGARVFSKIDLRSGYHQLKIRSEDIPKTAFSTRYGLYEFTVMSFGLTNAPTFFMNLMNKIFMEYLDQFVVVFIDDILIYSKNEEEHAEHLRLIMEKLRDHQLFAKFSKCEFWLDRVAFLGHVISSNGVEVDPSKVEAVLAWNPPKNVSEIRSFLGLAGYYRRFIEGFSKLARPMTELLKKEKKFRWSAACEDSFQEMKKRLTTAPVLTLPDIRKDFEIFCDASRQGLGCVLIQERKVVAYASRQLRPHEVNYPTHDLELAAVVHALKIWRHYLIGNRCEVYTDHKSLKYIFTQTELNMRQRRWLELIKDYDLGIHYHPGKANVVADALSRKTYCNVAQIRPDQDHLCRELEKLRLTVVQSGVPASLTVQPTLESQIREAQKDDEGIKELIKRIQEKKDTNFSIDNQGTVWCGPRICVPAKKELRDLILKEAHESAYSIHPGSTKMYQDIKAYFWWAGMKRDVAEYVALCDICQRVKAEHQRPAGLLQPLPIPEWKWEEIGMDFITGLPRTPNGYDSIWVIVDRLTKSAHFVPVKTTFDGKKLAELYMTHVVCRFGCPKKIVSDRGTQFTSRFWKQLHEALGTDLNFSMAYHPQTDGTWDRCLPYAEFSYNNSYQASIHMSPNEAMFGRKCHTPLCWNEVGEALVFGPDILKSAEEQVKLIRERLKTAQNRQKSYADNRRRDLEFEKGDHVYLRVSPLRGMRRFGMSGKLAPRYIGPYLITARRGEVAYQLELPEDLADVHNVFHVSQLKKCLRVPEEQVPLGNIVLEKNLTYKERPIKVLEEAERQTRRKTIKFYKVQWSNHSEDEATWEREDLLRAEFPELLP

SEQ ID NO: 192145 - protein, 54 aa, Oryza sativa
  Clone ID: PAT_MRT4530_88399C.1.pep
TTGRRGVHVGLLSCHLLRPSKSMRDSHRGHEQDKELDRPANNHRQRGTQSTASS

SEQ ID NO: 192146 - protein, 381 aa, Oryza sativa
  unsure (1)..(381): unsure at all Xaa locations
  Clone ID: PAT_MRT4530_8839C.1.pep
CEFLHLNFNLKSDLLRQPRGKGARTGSTGVGPTRQPHGPRWTGCTRLTPAGAVGPTRQPHPRARAADGRAPHGSRGTRPKAATPAQPTGGGAPAPRWSPPATTGAAERRPREGREGGSETAVHGSPRVDGDNGNGDRSGERRRRGSGRRGRRRSGGRRSKRGGGGGRGRRGRGGAEGGDAETGEGPGRRRRWTGARRRRRRERTTARARFRRGERAASGGNGGGRHGERLNSVGXGREXPXEGESAAEDPXAIDXTGEVCWSVSKRIRGREREREKWGERERESRGVISPSLLRAGAAECGGIRGGGGARARARRRLRREVGDDGWAPPVSEGGGRARPSAARARGKAGWAAGERREREGARPSRPKRGXGGKRLFRVFFF

SEQ ID NO: 192147 - protein, 108 aa, Oryza sativa
  Clone ID: PAT_MRT4530_883C.1.pep
MAAASGIRILSKKFTPLLCRSSVARTGMALAKTNHTSTPFVNSLNGAKIPFSSSSIIKDSHSFRQSWHPRTPEPNTDEEFTIQWRMRFLANFLFLVYASGFIAHKRRN

SEQ ID NO: 192148 - protein, 631 aa, Oryza sativa
  Clone ID: PAT_MRT4530_88400C.1.pep
MTKPPSPPPQQTAATTARGFEVTCVKDLLPLLQGVPVTYRFEKHNAKLEGTVAAGGYACACPAYAGCDYRGKVLSALQFEKHAGVTSKNQNGHIFLRNGRSLYELFHKLREVPAEKFPEAFRMAAGVPMTVLAAAAAAAAEEAPRERGLGPGPVAAEQPPASATPRPRPTMEMLTEEEKAGLSLLGLRASGSRTEINSMDGIEGLATEAIGNAPSSDHAMLDAEEMGNAAAQRPRNSGLSTTTTVKVPVTARNNHAMPDANEVRNADGGRSATLAVKLEVTSGSDHAMSDAKELKNADYEQPRDSVLATTSAVKVRIGAANDHAMPDAEQTRNPVLEQPWDSSMLITAPVKVRVTETKYRPESILKDVRGLLSTGLLEGFRVTYKKNEIMNACEFEQHSASFQLEKDYFDDAPSDPCSTQSSQESNIALTDSLKDSTSNASSILNWSSFRRRSDRQFKRGGTETSTPILSRSPEKEISDLSTSTSMKSEETPSENTAGLLTTDGIKHNSAGPVALRSTSSECDPINMTFPLSISVTVIQDPPPDHNVDSNSKDLGQPKVRYRSIYTSDGLTLHELALKLQDGLSSNVNIDELPTLTSGEALCLKFLGELDGAYNKNMVTEPGYPKIEIRLL

SEQ ID NO: 192149 - protein, 122 aa, Oryza sativa
  Clone ID: PAT_MRT4530_88401C.1.pep
MAVNASFSSHGFGEGHHVAQLRELARFLGFSCPEYTGYSVDRVPPRCELSVYLYPRGGIHGAGLRPHHFTVARPTLQIAYQDSWTALRRLAHDYSHRLGGSTFQQLPCLPSSCTDARYPCLS

SEQ ID NO: 192150 - protein, 842 aa, Oryza sativa
  Clone ID: PAT_MRT4530_88402C.1.pep
MAAGVPMTVLAAAAAAAAEEAPRERGLGPGPVAAEQPPASATPRPRPTMEMLTEEEKAGLSLLGLRASGSRTEINSMDGIEGLATEAIGNAPSSDHAMLDAEEMGNAAAQRPRNSGLSTTTTVKVPVTARNNHAMPDANEVRNADGGRSATLAVKLEVTSGSDHAMSDAKELKNADYEQPRDSVLATTSAVKVRIGAANDHAMPDAEQTRNPVLEQPWDSSMLITAPVKVRVTETKYRPESILKDVRGLLSTGLLEGFRVTYKKNEIMNACEFEQHSASFQLEKDYFDDAPSDPCSTQSSQESNIALTDSLKDSTSNASSILNWSSFRRRSDRQFKRGGTETSTPILSRSPEKEISDLSTSTSMKSEETPSENTAGLLTTDGIKHNSAGPVALRSTSSECDPINMTFPLSISVTVIQDPPPDHNVDSNSKDLGQPKVRDNTLHPMLFKEGGLPDYTLLTYKLKNGEVQYTPSQFEKHVGMGRRRQPYRSIYTSDGLTLHELALKLQDGLSSNVNIDELPTLTSGSGKEYSTTSRPIIVPLKRTLQERVLTVESCYMCRKPHTVLGVISVDMIVFCNQCERALHVKCYNNGLQKPKAPLKVLGEYTQFNFMCCEKCQLLRASLHEGLKKREDIAFLRRIRYNICWQLLNGTNMRSDVQHQVIEIFKDAFAETAPQDIDDIRNMVNSKDTTGEKDFRGIYCAVLTTSTFVVSAAILKVRTEEVAELVLIATHNECRKKGYFSLLLSLIEAHLKAWNVRLLTAPVDPEMAPIWSEKLGYTILSDEQLVLANNSNLSNNSTDIALLMLCLLTEAFYADGTSLGDVCEPKLGAEITCLRRPITRFLG

SEQ ID NO: 192151 - protein, 411 aa, Oryza sativa
  unsure (1)..(411): unsure at all Xaa locations
  Clone ID: PAT_MRT4530_88403C.1.pep
PCGGSTRRALGFGERDAVHARGSWRTRXCGGPTRSLMARGGLRPRAGPEGAAGXGQLDPVLAELAPTWRLRGCHVGRREVEEDAGRNGRRTVAANGGANHGDTGEREHTRRLHGLRGDEPMARIRRRMLDGGGLRRRQPAVREGGNGDDATGDRFGRARASTRLRESVASVGLGGATPSEAGDERVLRSTGGDGGEHTASGGNGRGGTSXLRGGXSCYYPNLRGGDGTRRKNGGRHYRAGRAQAPPAHATAVVGERDGNGVGEKWGRLGGEKGREGAWVYKAAMSVWKPTLGGQGSEPALGGRGPNGDRXGGEDDAGGRKKGKRGREREEGERAMRQXGEGALPPSLGSTREEGRGQVNDDGDDGXGGLERSDDTGGRRGXALTVAATGRSATIKHTHGGANWVWVRGVHW

SEQ ID NO: 192152 - protein, 1571 aa, Oryza sativa
  Clone ID: PAT_MRT4530_88404C.1.pep
MASRPRRAARAPARFGFEDGRVEPEENHESANEQSRRSNRSHRTASRNAEVEQPRRGSRSHRAVSRDAEMEQSHRSHRTASHNSGEERLPSPPHVENNMQHIMAVQTQILQGLTTAIASFQHNAHGNGHPHVGNNRSKLTDFLRSRPPEFSQTVEPVEADDWLKDVDRKLNLVQCTPVEKTLYASHQLRGPAADWWENYCNAHPEPTNIAWDEFATAFRAAHVPESTIDMKKEEFNRLKQGNSSVNEYLSQFNKLARYAPEEVDTDKKKIRKFLKRIAVGMRLQLLAHDFPTFQHMINKALLLEDARKEATEEYKKRKSNHQGNSSRGTPRPRYGQPMQYHQSVTQANRQPGYAPRPQMNRPTPPPQQCAPSGNTAPNSVTSFNSPQGPSVVQCFRCNQMGHYARQCPQNPTNTNLGHANGSIAKTPTPAAAQSRPSSQASGQGSRASNHFGRGRVNHIQAETAQDAPDVVMGMFSVNSVPAIVLFDSGASHSFISQAFVKRNGWKTQNLRVPMIVHSPGRNIRATQICPEVNLKIEEVDFLAKPIVLDSQSLDIILGMDWLAKHKGQIDCAEKSITLQGPGGKQVRFTPNTPTASRSILTSLQVTSLESVPIVCEYPDVFPEELTSMPPDREIEFAIELAPGTAPIAKRPYRMAANELAEVKRQIEELESKGYVRPSSSPWGAPVLLVKKKDGSERMVIDYRALNEVTIKNKYPLPRIDDLFDQLKGARVFSKIDLRSGYHQLKIRSEDIPKTAFSTRYGLYEFTVMSFGLTNAPAFFMNLMNKIFMEYLDQFVVVFIDDILIYSKNEEEHAEHLRLIMEKLRDHQLFAKFSKWEFWLDRVAFLGHVISSNGVEVDPSKVEAVLAWNPPKNVSEIRSFLGLAGYYRRFIEGFSKLARPMTELLKKEKKFHWSTACEDSFQEMKKRLTTAPVLTLPDIRKDFEIFCDASRQGLGCVLMQERKVVAYASRQLRPHEVNYPTHDLELATVVHALKIWRHYLIGNRSNVVADALSRKAYCNIAQIRPDQDHLCRELEKLRLTVVQSGVPASLTVQPTLESQIREAQKDDEGIKELIKRIQEKKDTNFSIDDQGTVWCGPRICVPAKKELRDLILKEAHESAYSIHPGSTKMYQDIKAYFWWVGMKRDVTEYVALCDICQRVKAEHQRPAADSHDSASRLLPAKVEIGSLESHLGSPAEPAKGGLRGLPVRSPTLRHLPIPEWKWEEIGMDFITGLPRTPNGYDSIWVIVDRLTKSAHFVPVKTTYDGKKLAELYMTHVVCRFGCPKKIVSDRGTQFTSRFWKQLHEALGTDLNFSTAYHPQTDGQTERVNQILEDMLRACALDFEGTWDRCLPYAEFSYNNSYQASIQMSPNEAMFGRKCRTPLCWNEVGEALVFGPDILKSAEEQVKLIRERLKTAQNRHKNYTDNRRRDLEFEKGDHVYLRVSPLRGMRRFGMSGKLAPRYIGPYLITARRGEVAYQLELPEGLADVHNVFHVSQLKKCLRVPEEQVPLGNIELEKNLTYKERPIKVLEEAERQTRRKTIKFYKVQWSNHSEDEATWEREDLLRAEFPDLLP

SEQ ID NO: 192153 - protein, 41 aa, Oryza sativa
  Clone ID: PAT_MRT4530_88405C.1.pep
LFFTLSSLLSPLLFIEHMLSHDLKETPYGKVYSVAWANAWA

SEQ ID NO: 192154 - protein, 196 aa, Oryza sativa
  unsure (1)..(196): unsure at all Xaa locations
  Clone ID: PAT_MRT4530_88406C.1.pep
MASSPSAAATERSARSTFPELEGFRVAALRGFRRVFAHSAPIFFERGIAIEATKEFSSLSVEPCEGELIVVTVFEIKEDEVVPEGLDGVPYANPAVVCARYSDEEYFQXSKEIYYQRYGRYNIDRIWRDDILPCRAYLRHCGVLAAKNLGEPAYSNFLDHTYLGDRTTTIREYLATTGAGIMEEEPPESLKSRYGG

SEQ ID NO: 192155 - protein, 351 aa, Oryza sativa
  unsure (1)..(351): unsure at all Xaa locations
  Clone ID: PAT_MRT4530_88407C.1.pep
HRPQTRVASPEKGGAWVERRPPPPSLGSQVWREEAAPRPTWHFPERVAPGVEWRLPPPRLGVGPVPTETRGRRPPLAPRGPPPRGDRARGRAVPAPSCDRGRAPPSPDPLSSSTRTELARAEHRVQRRPPTPRASSGHRRLLPPPPSNRRPAPPPPTAGRRIWPTGRGSGHRGLLPPPPPDHWPALPPPPSDHRPLDLAYRVRIWPPRPLPPQPXPLPPLPPDCRPPDLAYRARIQPPRPLPPPPAXPSLRPDRWLPPPPPRHDHRPRNVWGTQIWRLSPDRQSPPPPPHRHLPDPAAASSTALATVGSGGLYPNRRRRPPSPSPASFTGCANFHCQISDWVILMVACVDL

SEQ ID NO: 192156 - protein, 198 aa, Oryza sativa
  unsure (1)..(198): unsure at all Xaa locations
  Clone ID: PAT_MRT4530_88408C.1.pep
GXVCKRVGPCXREEEEEEENGDGGGVDPAAESSSAKLYEDVPEMPLMALNHISRLCKSIGAWVRFYVKALGFVLIHRPPALDFNGAWLFNYGVGIHLVQRDDARRAPDVNPGDLDPMDNHISFQCEDMGMMEKRLNEMGIEYMKRTINEEEGSPIDQLFFKDPDGFMIEICNCENLELVPAGAFFLLRLPRDXHNPPL

SEQ ID NO: 192157 - protein, 134 aa, Oryza sativa
  unsure (1)..(134): unsure at all Xaa locations
  Clone ID: PAT_MRT4530_88409C.1.pep
NPSRLLQSPSSWSLSPSSSSSAAVVVVAVVVAVAVVVIAAFRHDRLPSQPXPPLSAASPRRGWGRRRHRHQIRCGREARGVRGSCRRRMRPXPPPPPPDPPAVAVAGPIXAREARERVRERTVGRKRGIWSGPA

SEQ ID NO: 192158 - protein, 60 aa, Oryza sativa
  Clone ID: PAT_MRT4530_8840C.1.pep
MPHLRPTACDQDNEEALTLGLGRPLVGPHPNGPMRDTQARSSCSTVRSESGCAGDGALRA

SEQ ID NO: 192159 - protein, 171 aa, Oryza sativa
  Clone ID: PAT_MRT4530_88410C.1.pep
KLVDPPGCRSIEDIARELGFHGNPFLQGLVVSIFIVGAFFGSLGSSALVDNFGCKRTLQIDSIPLILGALLSAQADSLDEMLLGRFLVGIGIGINTVLVPLYVSEVAPTKYRGSLGTLCQIGTCLGIIAAFSLGIPSESDPHWWRTMLYAACVPGVLIVAGMQFAVESPRW

SEQ ID NO: 192160 - protein, 251 aa, Oryza sativa
  Clone ID: PAT_MRT4530_88411C.1.pep
MATAARLLLLLFLTAAASAWEMNIRLPTEMLNGGEAVVAPIIHALRPLLGSGGQLAARAGVACDSWRLGVEAHNVIGWKTAIAYAESLQLSGNGKEIWVFDIDETSLSNLPYYAKHGFGATLYNDTSFREYVAEGSAPALPETRRLYRRLLQLGVKPVFLTGRTEDQRNITVTNLRRQGYSGWMELLLKPAVHAAGELQGSAVAYKSGERQKLEDAGFTILGNIGDQWSDILGTPEGARTFKLPDPMYYIG

SEQ ID NO: 192161 - protein, 76 aa, Oryza sativa
  Clone ID: PAT_MRT4530_88412C.1.pep
TFELNSGGRVPFPFPVSLCFGGLTLSNPTQRPCLPNLVGGLVNLVFPPGVFKSCGCLAKRVSSGFSMMNHGTLPNA

SEQ ID NO: 192162 - protein, 129 aa, Oryza sativa
  unsure (1)..(129): unsure at all Xaa locations
  Clone ID: PAT_MRT4530_88413C.1.pep
WKPVVGRYRRCRGRRCRSGGRARRGAPWTTRSRRSTSSRAPRQRRRSPPSXSRRWRRRRREAPRRRRCHCPHHAHCPHHAHSVXRQRQRRRRRRRRRRYPREPGIGGGALPGNGGGGATSCHGRRRRWQ

SEQ ID NO: 192163 - protein, 58 aa, Oryza sativa
  Clone ID: PAT_MRT4530_88414C.1.pep
RVASASAPATTLVLSLSLSPLVYKKDGPHWPHPRRPLDEGGIECVCWWDPPPRRRWAH

SEQ ID NO: 192164 - protein, 168 aa, Oryza sativa
  Clone ID: PAT_MRT4530_88415C.1.pep
MQNSTSPLYTPRSTGQNMLILRQPSLQNMLILRQPSLLCKRHPPQFPIVISVAGKTVASVVVSDRTDSALAILTNDSRASEPGSPAGHQRVPHNGIRRLHSVEHLACVVTSGQHEAYRLQLGQCGRHERVGGVTRACSAPRAGCGVGWRRHAAAMRAMSEVAAKAKEK

SEQ ID NO: 192165 - protein, 1820 aa, Oryza sativa
  Clone ID: PAT_MRT4530_88416C.1.pep
MAVNASFSSHGFGEGHHVAQLRDLTRFLGFSCPEYTGYSVDRVPPHCELSVYLYPRGGIHGAGLRPHHFTVARPTLQIAYQDLSWTALRRLAHDYSHRLGGSAFRQLPRLPSGHSDARYPCPYSESQPVLTRMVELSEAQATQHDLLLEAYRSLARRYAALEARLAEEGVTSVDTISWDSGRLCHASHLSSHSSRGSARTPSGPRSPSSRAPYSPVYSPYPHPVSPSYTPGHTPVASSRRGPRFIRTARKRVVGSSTVFRFHHPAPPPPAARAAAGPRQMASRPRRATRAPARLGFEDGRVEAEANHEPANEQSHHSNRSHRTAPRNAEVEQPRRSNRSHRTVSRDAEMEQSLRSHRTASHSSGEERIPSPPHVENNIQHIMAVQTQILQGLTTAIASFQHNAHGNGHPHVGNNRSKLTDFLRSRPPEFSQTVEPVEADDWLKDVDRKLNLVQCTPVEKTLYASHQLRGPAADWWENYCNAHPEPTNIAWDEFATAFRAAHVPESTIDMKKEEFNRLKQGNSNDNEYLSQFNKLARYAPEEVNTDKKKIRRFLKGIAVGMRLQLLVHDFPTFQHMINKALLLEDARKEATEEYKKRKSNHQGNSSRGAPRPRYGQPMQYHQSVTQANRQPGYAPRPQMNRPAPQPQQRAPSGNTAPNSVTSFKSPQGPSVVQCFRCNQMGHYARQCPQNPTNTNSGHANGSTARTPTPAAAQSRPSSQASGQGSRASNNFGRGRVNHIQAETAQDAPDVVMGMFSVNSVPAIVLFDSGASHSFISQAFVKRNGWKTQNLRVPMIVHSPGRNIRATQICPEVNLRIEEVDFLAKPIVLDSQSLDIILGMDWLAKHKGQIDCAEKSITLQGPGGKQVRFTPNTPTASRMPPDREIEFAIELAPGTAPIAKRPYRMAANELAEVKRQIEELESKGYVRPSSSPWGAPVLLVKKKDGSERMVIDYRALNEVTIKNKYPLPRIDDLFDQLKGARVFSKIDLRSGYHQLKIRSEDIPKTAFSTRYGLYEFTVMSFGLTNAPAFFMNLMNKIFMEYLDQFVVVFIDDILIYSKNEEEHAEHLRLIMEKLRDHQLFAKFSKCEFWLDRVAFLGHVISSNGVEVDPSKVEAVLAWNPPKNVSEIRSFLGLAGYYRRFIEGFSKLARPMTELLKKEKKFQWSAACEGSFQEMKKRLTTAPVLTLPDIRKDFEIFCDASRQGLGCVLMQERKVVAYASRQLRPHEVNYPTHDLELAAVVHALKIWRHYLIGNRCEVYTDHKSLKYIFTQTELNMRQRRWLELIKDYDLGIHYHPGKANVVADALSRKAYCNVAQIRPDQDHLCRELEKLRLTVVQSGVPASLTVQPTLESQIREAQKDDEGIKELIKRIQEKKDTNFSIDDQGTVWCGPRIFVPAKELRDLILKEAHESAYSIHPGSTKMYQDIKAYFWWAGMKRDVAEYVALCDICQRIKAEHQRPAGLLQPLPIPEWKWEEIGMDFITGLPRTPSGYDSIWVIVDRLTKSAHFVPVKTTYDGKKLAELYMTHVVCRFGCPKKIVSDRGTQFTSRFWKQLHEALGTDLNFSTAYHPQTDGQTERVNQILEDMLRACALDFEGTWDRCLPYAEFSYNNSYQANIQMSPNEAMFGRKCRTPLCWNEVGEALVFGPDILKSAEEQVKLIRGRLKTAQNRQKNYADNRRRDLEFETGDHVYLRVSPLRGMKRFGMSGKLAPRYIGPYLITARRGEVAYQLELPEGLADVHNVFHVSQLKKCLRVPEEQVLLGNIELERNLTYKERPIKVLEEAERQTRRKTIKFYKVQWSNHSEDEATWEREDLLRAEFPELLP

SEQ ID NO: 192166 - protein, 123 aa, Oryza sativa
  unsure (1)..(123): unsure at all Xaa locations
  Clone ID: PAT_MRT4530_88417C.1.pep
AGGVFFFLFFFFFLLLFFLLFFSPFVFILSLSNEILFFYQPLIFIHTSIFIGVSTGAKXPXITYPPQNTNCPPPNDHLFYFFSPNLHTLQFPFPPXPQHLTHXFPNLXXTPPPPPXSNHLFKP

SEQ ID NO: 192167 - protein, 1732 aa, Oryza sativa
  unsure (1)..(1732): unsure at all Xaa locations
  Clone ID: PAT_MRT4530_88418C.1.pep
MASRPRRAARAPARFGFEDGRVEAEANHESANEQSHHSNRSHHTVSRNAEVEQPRRSNRSHRTVFRNAEMEQSHRSHRTASHNSGEERLPSPPHVENNMQHLMAVQTQILQGLTTAIASFQHNAHGNGHPHVGNNRSKLTDFLRSRPPEFSHTVEPVEADDWLKDVDRKLNLVQCTPVEKTLYASHQLRGPAADWWENYCNAHPEPTNIAWDEFAMAFRTAHVPESAIDMKKEEFNRLKQGNSSVNEYLSMFNKLARYAPEEVDTDEKKIRKFLKGIAVGMRLQLIAHDFPTFQHMINKALLLEDARKEATEEYKKRKSNHQGNSSRGAPRPRYGQPMQYHQSVTQANRQPGYAPRPQMNRPAPQPQQRAPSGNTAPNSVTSFKSPQGPTVVQCFRCNQMGHYARQCPQNPTNTSSGHANGSTARTPXPAAAQSRPSSQASGQGCXDIVMGMFSVNSIPAIVLVDSGASHSFISQAFVKRNGWKTQNLRVPMIVHSPGRNIRATQICPEVNLRIEEVDFLAKPIVLDSQSLDIILGMDWLAKYKGQIDCAEKSITLQGPGGKQVRFTPNTPTASRSILTCLQVTSLESVPIVCEYPDVFPEELTRMPPDREIEFAIELAPGTAPIAKRPYRMAANELAEVKRQIEELESKGFVRPSSSPWGAPVLLVKKKDGSERMVIDYRALNEVTIKNKYPLPRIDDLFDQLKGARVFSKIDLRSGYHQLKIRSEDIPKTAFSTRYGLYEFTVMSFGLTNAPAFFMNLMNKIFMEYLDQFVVVFIDDILIYSKNEEEHAEHLRLIMEKLRDRQLFAKFSKCEFWLDRVAFLGHVISSNGVEVDPSKVEAVLAWNPPKNVLEIRSLLGLAGYYRRFIKGFSKLARPMTELLKKEKKFQWSAACEDSFQEMKKRLTTAPVLTLPDIRKDFEIFCDASRQGLGCVLMQERKVVAYASRQLRPHEVNYPTHDLELAAVVHALKIWRHYLIGNRCEVYTDHKSLKYIFTQTELNMRQRRWLELIKDYDLGIHYHPGKANVVADALSRKAYHNVAQIRPDQDHLCRELEKLRLTVVQSGVPASLTVQPTLESQIREAQKDDEGIKELIKRIQEKKDTNFSIDNQGTVWCGPRICVPAKKELRDLILKEAYESAYSIHPGSTKMYQDIKAYFWWAGMKRDVAEYVALCDICQRVKAEHQRPAGLLQPLPIPEWKWEEIGMDFITGLPRTPNGYDSIWVIVDRLTKSAHFVPVKTTFDGKKLAELYMTHVVCRFGCPKKIMSDRGTQFTSRFWKQLHEALGTDLNFSTAYHPQTDGQTERVNQILEDMLRACALDFEGTWDRCLPYAEFSYNNSYQASIQMSPNEAMFGRKCRTPLCWNEVGEALAFGPDILKSAEEQVKLIRERLKTAQDRQKSYANNRRRDLEFEKGDHVYLRVSPLRGMRRFGMSGKLAPRYIGPYLITARRGEVAYQLELPEGLADVHNVFHVSQLKKCLRVPEEQVPLGNIVLEKNLTYKERPTKVLEEAEHDIIVASSTQSAVSALLQDLKEDFALKDLGDLHYFLGIEVNKVNDGLLLSQGKYTADLLKKTNMSDCKPFNTPLSTSEKLSLHEGDLLGSSDATQYRSIVGALQYLTLTRPDISFSVNKVCQFLHAPTTVHWATVKRILRYLKYTASLGLKFEKSKSGLVSAFTDADWAGSLDDRRSTGGFAIYLGSNLVSWSARKQATVSRSSTEAEYKALANVTAELMWI

SEQ ID NO: 192168 - protein, 1815 aa, Oryza sativa
  unsure (1)..(1815): unsure at all Xaa locations
  Clone ID: PAT_MRT4530_88419C.1.pep
MGGCEMAVNASFSSHGFGEGHHVAQLRDLTRFLGFSCPEYTGYSVDRVPPHCELSVYLYPRGGIHGAGLHPHHFTVARPTLQIAYQDLSWTALRRLAHDYSHRLGGSAFRQLPRLPSGHSDARYPCPYSESQPVLTRMVELSEAQATQHDLLLEAYRSLARRYAALEARLAEEGVTSVDTISWDSGRLCHASHLSSHSSRGSARTPSGPRSPSSRAPYSPVYSPYPHPVSPSYTPGHTPVVSSRRGPRFIRTAWKRVVGSSTVFRFHHPAPPPPAARAAAGPRQMASRPRRAARAPARFGFEEGRVEPEANHESANEQSHRSNRSHRTVSGNAEVEQPRRSNRSHRTASRDAEMEQSHRSHRTASHNSGEERLPSPSHVENNMQHLMAVQTQILQGIAAAVAGYQHNAHGNGHPHMGNNRSKLTDFLRSRPPEFSQTVEPVEADDWLKDVDRKLNLVQCTPVEKTLYASHQLRGPAADWWENYCNAHPEPTNIAWDEFATAFRAAHVPESTIDMKKEEFNRLKQGNSSVNEYLSMFNKLARYAPEEVDSDKKKIRKFLKGIAVGMRLQLLAHDFPTFQHMINKALLLEDARKEATEEYKKRKSNHQGNSSRGAPRPRYGQPMQYHQSVTQANRQPGYAPRPQMNRPAPQPQQRAPSGNTAPNSVTSFKSPQGPSAVQCFRCNQMGHYAXCPQNSTNTNSGHANGSTARTPTPAAAQSRPSTQASGQGXPDVVMGMFSVNSIPAIVLFDSRASHSFISQAFVKRNGWKTQNLRVPMIVHSPGRNIRATQICPEVNLRIEEVDFLAKPIVLDSQSLDIILGMDWLAKHKGQIDCAEKSITLQGPGGKQVRFTPNTPTASRSILTCLQVTSLESVPIVCEYPDVFPEELTRMPLDREIEFAIELAPGTAPIAKRPYRMAANELAEVKRQIEELESKGYVRPSSSPWGAPVLLVKKKDGSERMVIDYRALNEVTIKNKYPLPRIDDLFDQLKGARVFSKIDLRSGYHQLKIRSEDIPKTAFSTRYGLYEFTVMSFGLTNAPAFFMNLMNKIFMEYLDQFVMVFIDDILIYSKNEEEHAEHLRLIMEKLRDHQLFAKFSKCEFWLDRVAFLGHVISSNGVEVDPSKVEAVLAWNPPKNVSEIRSFLDLAGYYRRFIEGFSKLARPMTELLKKEKKFQWSAACEDSFQEMKKRLTTALVLTLPDIRKDFEIFCDASRQGLGCVLMQERKVVAYASRQLRPHEVNYPTHDLELAAVVHALKIWRHYLIGNRCEVYTDHKSLKYIFTQTELNMRQRRWLELIKDYDLGIHYHPGKANVVADALSRKAYCNVAQIRPDQDRLCRELEKLRLTVVQSGVPASLTVQPTLESQIREAQKDDEGIKELIKRIQEKKDTNFSIDNQGKVWCGPRICVPAKKELRDLILKEAHESAYSIHPGSTKMYQDIKAYFWWAGMKRDVAEYVALCDICQRVKAEHQRPAGLLQPLPIPEWKWEEIGMDFITSLPRTPNGYDSIWVIVDRLTKSAHFVPVKTTFDGKKLAELYMTHVVCRFGCPKKIVSDRGTQFTSRFWKQLHEALGTDLNFSTAYHPQTDGQTERVNQILEDMLRACALDFEGTWDRCLPYAEFSYNNSYQASIQMSPNEAMFGRKCRTPLCWNEVGEALVFGPDILKSAEEQVKLIRERLKTAQNRQKSYADNRRRDLEFEKGDHVYLRVSPLRGMRRFGMSGKLAPRYIGPYXGEVAYQLELPEXKKCLRVPEEQIPLGNIVLKKNLTYKERPIKVLEEAERQTRRKTIKFYKVQWSNHSEDEATWEREDLLRAEFLELLP

SEQ ID NO: 192169 - protein, 165 aa, Oryza sativa
  Clone ID: PAT_MRT4530_8841C.1.pep
HHLLLMRPRAAFSSRPPPLSSSPCRRALPTTAIASRLLCSHHASSPPEDASASASPSIVADLLDYLNESWTQFHATAEAKRQLLDAGFTLLSENDDWDLQPGGRYFFTRNMSCLIAFAVGEKYKLGNGFNIIAAHTDSPCLKLKPRSASFKSGHQMVNVQTYGGG

SEQ ID NO: 192170 - protein, 95 aa, Oryza sativa
  Clone ID: PAT_MRT4530_88420C.1.pep
VSWCEMEWRRPKVLKLVLISENQAYAILVGITHKTSIQSLLLSGHTSLSIEWTNNIHTGFRACLEQLLAAAASHIISSFSKQFRLSPRFLESVVV

SEQ ID NO: 192171 - protein, 1851 aa, Oryza sativa
  Clone ID: PAT_MRT4530_88421C.1.pep
MAVNASFSSHGFGEGHHVAQLRDLARFLGFSCPEYTGYSVDRVPPHCELSVYLYPRGGIHGVGLRPHHFTVARPTLQIAYQDLSWTALRRLAHDYGHRLGGSAFRQLPRLPSGHADARYPCPYSESQPVLTRMVELSEAQATQHDLLLEAYRSLARRYAALEARLAEEGVTSVDTISWDSGRLCHASHLSSHSSRGSARTPSGPRSPSSRAPYSPVYSPYPHPVSPSYTPGHTPVASSRRGPRFIRTARKRVVGSSTVFRFRHPAPPPPAARAAAGPRQMASRPRRTARAPVRFGFEDGRVEAEANHEPANEHSHHSNRSHRTVSRNAEVEQPRRSSRSHRTVSREAELEQSHRSHRTASHNSGEERLPSPPHVENNMQHIMAVQTQILQGLTTAIASFQHNAHGNGHPHVGNNRSKLTDFLRSRPPEFSQTIEPVEADDWLKDVDRKLNLVQCTPVEKTLYASHQLRGPAADWWENYCNAHPEPTNIAWDEFATAFRVAHVPESTIDMKKEEFNRLKQGHSSVNEYLSQFNKLARYAPEEVDTDKKKIRKFLKGIAVGMRLQLLAHDFPTFQHMINKALLLEDARKEATEEYKKRKSNHQGNSSRGAPRPRYGQPMQYHQSVTQANRQSSYAPRPQMNRPAPPPQQRAPSGNTAPNSVTSFKSPQGPSAVQCFRCNQMGHYARQCPQNPTNTSPGHANGSTARTPTPAAAQSRPSSQASGQGSRASNHFGRGRVNHIQAETAQDAPDVVMGMFSVNSVPAIVLFDSGASHSFISQAFVKRNGWKTQNLRVPMIVHSPGRNIRATQICPEVNLRIEEVNFLAKPIVLDSQSLDIILGMDWLAKHKGQIDCAEKSITLQGPGGKQVRFTPNTPTASRSILTCLQVTSLESVPIVCEYPDVFPEELTRMPPDREIEFAIELAPGTAPIAKRPYRMAANELAEVKRQIEELESKGYVRPSSSPWGAPVLLVKKKDGSERMVIDYRALNEVTIKNKYPLPRIDDLFDQLKGARVFSKIDLRSGYHQLKIRSEDIPKTAFSTRYGLYEFTVMSFGLTNAPAFFMNLMNKIFMEYLDQFVVVFIDDILIYSKNEEEHAEHLRLIMEKLRDHQLFAKFSKCEFWLDRVAFLGHVISSNGVEVDPSKVEAVLAWNPPKNVSEIRSFLGLAGYYRRFIEGFSKLARPMTELLKKEKKFQWSTACEDSFQEMKKRLTTAPVLTLPDIRKDFEIFCDASRQGLGCVLMQERKVVAYASRQLRPHEVNYPTHDLELAAVIHALKIWRHYLIGNRCEVYTDHKSLKYIFTQTELNMRQRRWLELIKDYDLGIHYHPGKANVVADALSRKAYCNIAQIRPDQDHLCRELEKLRLTVVQSGVPASLTVQPTLESQIREAQKDDEGIKELIKRIQEKKDTNFSIDDQGTIWCGPRICVPAKKELRNLILKEAHESAYSIHPGSTKMYQDIKAYFWWAGMKRDVAEYVALCDICQRVKAEHQRPAGLLQPLPIPEWKWEEIGMDFITGLPRTPSGYDSIWVIVDRLTKSAHFVPVKTTYDGKKLAELYMTHVVCRFGCPKKIVSDRGTQFTSRFWKQLHEALGTDLNFSTAYHPQTDGQTERVNQILEDMLRACALDFEGTWDRCLPYAEFSYNNSYQASIQMSPNEAMFGRRCRTPLCWNEVGEALVFGPDILKSAEEQVKLIRERLRTAQNRQKNYADNRRRDLEFEKGDHVYLRVSPLRGMRRFGMSGKLAPRYIGPYLITARRGEVAYQLELPEGLADVHNVFHVSQLKKCLRVPEEQVPLGNIELEKNLTYKERPIKVLEEAERQTRRKTIKFYKVQWSNHSEDEATWEREDLLRAEFPELLP

SEQ ID NO: 192172 - protein, 100 aa, Oryza sativa
  Clone ID: PAT_MRT4530_88422C.1.pep
NKISQIDARAFQHYQSLITVYDLYISSSFHWSCLQFPKGDDQMCHGMADAPLTFVMYGCGTAVARHCSPVPGGRRAVERHLLVQVGRRRGRQVPGATSKN

SEQ ID NO: 192173 - protein, 136 aa, Oryza sativa
  unsure (1)..(136): unsure at all Xaa locations
  Clone ID: PAT_MRT4530_88423C.1.pep
FDGELRLGQLLIIPLPHVFIIMAQTQGCSYIAFSSNPDSMVGPMAXKGSIFRALPADVVAYAYRFSLQGASWLQPNWADELGVFVXSHAHESPRVISVSASPSNVNLRLGLLRMVFEINHQQYKSACCNRNEIMKG

SEQ ID NO: 192174 - protein, 1792 aa, Oryza sativa
  Clone ID: PAT_MRT4530_88424C.1.pep
MMAVNASFSSHGFGEGHHVAQLRDLARFLGFSCPEYTGYSVDRVPPHCELSVYLYPRGGIHGAGLCPHHFTVARPTLQIAYQDLSWTALRRLAHDYSHRLGGSAFRQLPHLPSGHSDARYPCPYSESQPVLTRMVELSEAQATQHDLLLEAYRSLARRYAALEARLAEEGVTSVDTISWDSGRLCHASHLSSHSSRGSARTPSGPRSPSSRAPYSPVYSPYPHPVSPSYTPGHTPVASSRRGPRFIRTARKRVVGSSTVFRFHYPAPPPPAARAAAGPRQMASRPRRAARAPARFGFEDGRVEPEENHESANEQSHHSNRSHRTVSRNTEVEQPRRSSRSHRTVSRDAEMEQSHRSHRTASHNSGEERLPSPPHVETNMQHLMAVQTQILQGLTTAIASFQHNAHGNGHPHMGNNRSKLTDFLRSRPPEFSQTVEPVEADDWLKDVDRKLNLVQCTPVEKMLYAFHQLRGPAADWWENYCNAHPEPTNIAWDEFATAFRAAHVPESTIDMKKEEFNRLKQGNSSVNEYLSQFNKLARYAPEEVDTDKKKIRKFLKGIAVGMRLQLLAHDFPTFQHMINKALLLEDARKEATEEYKKRKSNHQGNSSRGTPRPRYGQPMQYHQSVTQANRQPGYTPRPQMNRPAPPPQQCAPSGNTAPNSVTSFKSPQGPSAVQCFRCNQMGHYARQCPQNPTNTNSGHANGSTARTPTPAAAQSRPSSQASRQGSRASNHFGRGRVNHIQAETAQDAPDAVMGMFSVDSVPAIVLFDSGASHSFISQAFVKRNGWKTQKLRVPMIVHSPGRNIRATQICPEVNLRIEEVDFLAKPIVLDSQSLDIILGMDWLAKHKGQIDCAEKSITLQGPAGKQVRFTPNTPTASRSILTCLQVTSLESVPIVYEYPDVFLEELTRMPPDREIEFAIELAPGTAPIAKRPYRMAANELAEVKRQIEELESKGYVRPSSSPWGAPVLLVKKKDGSERMVIDYRALNEVTIKNKYPLPRIDDLFDQLKGARVFSKIDLRSGYHQLKIRSEDIPKTAFSTRYGLYEFTVMSFGLTNAPAFFMNLMSKIFMEYLDQFVVVFIDDILIYSKNEEEHAEHLRLIMEKLRDHQLFAKFSKCEFWLDRVAFLGHVISPNGVEVDPSKVEAVLAWNPPKNVSEIRSFLGLAGYYRRFIEGFSKLARPMTELLKKEKKFQWSAACEDSFQEMKKRLTTAPVLTLPDIRKDFEIFCDASRQGLGCVVMQERKVVAYASRQLRPHEVNYPTHDLELAAVVHALKIWRHYLIGNRCEVYTDHKSLKYIFTQTELNMRQRRWLELIKDYDLGIHYHPGKANVVADALSRKAYCNVAQIRPDQDHLCRELEKLRLTVVQSGVPASLTVQPTLESQIREAQKDDEGIKELIKRIQEKKDTNFSIDDQGTVWCGPRICVPAKKELRDLILKEAHESAYSIHPGSTKMYQDIKAYFWWAGMKRDVAEYVALCDICQRVKAEHQRPAGLLQPLPIPEWKWEEIGMDFITGLPRTPNGYDSIWVIVDRLTKSAHFVPVKTTYDGKKLAELYMTHVVCRFGCPKKIVSDRGTQFTSRFWKQLHEALGTDLNFSTAYHPQTDGQTERVGEALIFGPDILKSAEEQVKLIRERLKTAQNRQKNYADNRRHDLEFEKGDHVYLRVSPLRGMRRFGMSGKLAPRYIGPYLITARRGEVAYQLELPEGLADVHNVFHVSQLKKCLRVPEEQVPLGNIELEKNLTYKERPIKVLEEAKRQTRRKTIKFYKVQWSNHSEDEATWEREDLLRAEFPELLP

SEQ ID NO: 192175 - protein, 1680 aa, Oryza sativa
  unsure (1)..(1680): unsure at all Xaa locations
  Clone ID: PAT_MRT4530_88425C.1.pep
MTVLLLYNKETSVAVIFYLPVIPALFPGTGIDXQMAVNASFSSHGFGEGHHVAQLRDLARFLGFSCPEYTGYSVDRVPPHCELSVYLYPRGGIHGAGLRPHHFTVARPTLQIAHRLGGSAFRQLPRLPSGHSDARYPCPYSESQPVLTRMVELSEAQATQHDLLLEAYRSLARRYAALEARLAEEGVTSVDTISWDSGRLCHASHLSSHSSRGSARTPSGPRSPSSRAPYSPVYSPYPHPVSPSYTPGHTPVASSRRGPRFIRTARKRVVGSSTVFRFHYPAPPPPAARAAAGPRQVPPVPSRQPIDVSSTEEPTTGARFGFEDGRVEAEANHESANEQSHHSNRSHRTISRNAEVEQPRRSNRSHRTASRDAEMEQSHRSHRTASHNSGEERLPSPPHVENNMQHLMAVQTQILQGIAAAVAGYQHNAHGNGHPHMGNNRSKLTDFLRSRPPEFSQTVEPVEADDWLKDVNRKLNLVQCTPVEKTLYASHQLRGPAADWWENYCNAHPEPTNIAWDEFATAFCAAHVPESTIDMKKEEFNRLKQGNSSVNEYLSMFNKLARYAPEEVDSDKKKIRKFLKGIAALLLEDARKEATEEYKKRKSNHQGNSSQGAPRPRYGQPMQYHQSVTQANRQPGYAPRPQMNRPAPQPQQRAPSGNIAPNSVTSFKSPQGPSAVQCFRCNQMGHYARQCPQNPTNTNSGHANGSTARTPTPAAAQSRPSTQASGQGSRASNHFGRGRVNHIQAETAQDAPDVVMGMFSVNSVPAIVLFDSGASHSFISQAFVKRNGWKTQNLRVPMIVHSPGRNIRATQICPEVNLRIEEIDFLAKPIVLDSQSLDNILGMDWLAKHKGQIDCAEKSITLQGPGGKQVRFTPNTPTASRSILTCLQVTSLESVPIVCEYPDVFPEELTRMPPDREIEFAIELAPGTAPIAKKPYRMAANELAEIKRQIEELESKGYVRPSSSPWGAPVLLVKKKDGSERMLKIRSEDIPKTAFSTRYGLYEFTVMSFRLTNAPAFFMNLMNKIFMEYLDQFVVVFIDDILIYSKNEEEHAEHLRLIMEKLRDHQLFAKFSKCEFWLVRVAFLGHVISSNGVEVDPSKVEAVLAWNPPKNVSEIRSFLGLAGYYRRFIEGFSKLARPMTELLKKEKKFQWSAACEDSFQEMKKRLTTAPVLTLPDIRKDFEIFCDASRQGLGCVLMQERKVVAYASRQLRPHEVNYPTHDLELAAVVHALKIWRHYLIGNRCEVYTDHQSLKYIFTQTELNMRQRRWLELIKDYDLGIHYHPGKAKVVADALSRKAYHNVAQIRPDQDHLCRELEKLRLTVVQSGVPASLTVXPTLESQIREAQKDDEGIKELIKGIQEKKDTNFSIDNQGTVWCGPRICVPAKKELRDLILKEAHESAYSIHPGSTKMYQDIKAYFWWAGMKRDVTEYVALCDICQRVKAEHQRPVGLLQPLPTPEWKWEEIGMDFITGLPRTPNGYDSIWVIVDRLTKSAHFVPVKITYDGKKLAELYMTYVVCRFGCPKKIVSDRGTQFTSSYQASIQMSPNEAMFGRKCRTPLCWNEVGEALVFGPDILKSAEEQVKLIRERLKTAHRQKNYADNRRCDLEFEKGDHVYLRVSPLRALASKGQTGSGRPRSVPPRARDPPRAVRPGPRAVSLVHRSPLSSPPVRALGRLLGRPAH

SEQ ID NO: 192176 - protein, 224 aa, Oryza sativa
  Clone ID: PAT_MRT4530_88426C.1.pep
MSSENGENGHGAADEVVEPYQQTPRPGPKLNERILSSLSRRSVAAHPWHDLEIGPDAPAVFNVVVEITKGSKVKYELDKKTGLIKVDRILYSSVVYPHNYGFIPRTLCEDNDPMDVLVLMQEPVLPGSFLRARAIGLMPMIDQGEKDDKIIAVCADDPEYRHFNNLSELSPHRLQEIRRFFEDYKKNENKEVAVNDFLPAPTAREAIQYSMDLYAQYILQSLKR

SEQ ID NO: 192177 - protein, 1851 aa, Oryza sativa
  Clone ID: PAT_MRT4530_88427C.1.pep
MAVNASFSSHGFGEGHHVAQLRDLSRFLGFSCPEYTGYSVDRVPPHYELSVYLYPRGGIHGAGLRPHHFTVARPTLQIAYQDLSWTALRRLAHDYSHRLGGSAFRQLPRLPSGHSDARYPCPYSESQPVLTRMVELSEAQATQHDLLLEAYRSLARRYAALEARLAEEGVTSVDTISWDSGRLCHASHLSSHSSRGSARTPSGPRSPSSRAPYSPMYSPYPHPVSPSYTPGHTPVASSRRGPRFIRTARKRVVGSSTVFRFRHPAPPPPAARAAAGPRQMASHPRHAARAPARFGFEDGRVEPEENHESANEQSHHSNRSHHTVSRNAEIGQPRRSNRSHRTVSRDAEMGQSHRSHRTASHNSGEERLPSLPHVENNMQHIMTVQTQILQGLTTAIASFQHNAHGNGHPHVGNNRSKLTDFLRSRPPEFSQTVEPVEADDWLKDVDRKLNLVQCTPVEKTLYASHQLRGPAADWWENYCNAHPEPTNIAWDEFATAFRAAHVPESTIDMKKEEFNRLKQGNSSVNEYLSQFNKLARYAPEEVDTDKKKIRKFLKGIAVGMRLQLLAHDFPTFHHMINKALLLEDARKEATEEYKKRKSNHQGNSSRGAPRPRYGQPMQYHQSVTQANHQPGYAPRPQMNRPAPQPQQRAPSGNTAPNSVTSFKSPQGPSAVQCFRCNQMGHYARQCPQNPTNTNSGHANGSTARTPAPAAAQSRPSSQASGQGSRASNHFGRGRVNHIQAEIAQDAPDVVMGMFSVNSVPAIVLFDSGASHSFISQAFVKRNGWKTQNLRVPMIVHSPGRNIRATQICPEVNLRIEEVDFLAKPIVLDSQSLDIILGMDWLAKHKGQIDCAEKSITLQGPGGKQVRFTPNTPTASRSILTCLQVTSLESVPIVCEYPDVFPEELTRMPPDREIEFAIELAPGTAPIAKRPYRMAANELAEVKRQIEELESKGYVRPSSSPWGAPVLLVKKKDGSERMVIDYRALNEVTIKNKYPLPRIDDLFDQLKGARVFSKIDLRSGYHQLKIRSEDIPKTAFSTRYGLYEFTVMSFGLTNAPAFFMNLMNKIFMEYLDQFVVVFIDDILIYSKNEEEHAEHLRLIMEKLRDHQLFAKFSKCEFWLDRVAFLGHVISPNGVEVDPSKVEAVLAWNPPKNVSEIRSFLGLAGYYRRFIEGFSKLARPMTELLKKEKKFQWSVACEDSFQEMKKRLTTAPVLTLPDIRKDFEIFCDASRQGLGCVLMQERKVVAYASRQLRPHEVNYPTHDLELAAVVHALKIWRHYLIGNRCEVYTDHKSLKYIFTQTELNMRQRRWLELIKDYDLGIHYHPGKANVVADALSRKAYCNVAQIRPDQDHLCRELEKLRLTVVQSGVPASLTVQPTLESQIREAQKDDEGIKELIKRIQEKKDTNFSIDDQGTVWCGPRICVPAKKELRDLILKEAHESAYSIHPGSTKMYQDIKAYFWWAGMKRDVAEYVALCDICQRVKAEHQRPAGLLQPLPIPEWKWEEIGMDFITGLPRTPSGYDSIWVIVDRLTKSAHFVPVKTTYDGKKLAELYMTHVVCRFGCPKKIVSDRGTQFTSRFWKQLHEALGTDLNFSTAYHPQTDGQTERVNQILEDMLRACALDFEGTWDRCLPYAEFSYNNSYQASIQMSPNEAMFGRKCRTPLCWDEVGEALVFGPDILKSAEEQVKLIRERLKTAQNRQKNYADNRRRDLEFEKGDHVYLRVSPLRGMRRFGMSGKLAPRYIGPYLITARRGEVAYQLELPEGLADVHNVFHVSQLKKCLRVPEEQVPLGNIELEKNLTYKERPIKVLEEAERQTRRKTIKFYKVQWSNHSEDEATWEREDLLRAEFPDLLP

SEQ ID NO: 192178 - protein, 192 aa, Oryza sativa
  Clone ID: PAT_MRT4530_88428C.1.pep
CPATRRRRRCSTRASAHSSPSSASSSWPSSSTPVRPPVTPPPARRPTRSPRSRGSSSSAASASAPTTSPCSRRSRTTPPPPPRPADAGLIGRGDAKAAADCCAVCLDELGEGAVVRMLPSCKHYFHATCVDVWLLSRATCPVCRGSPGQEKVRHFRPRVPLTAAAAAAPVRAVAAQGGRRRRRCRYVESQRR

SEQ ID NO: 192179 - protein, 308 aa, Oryza sativa
  Clone ID: PAT_MRT4530_88429C.1.pep
MMAVNASFSSHGFGEGHHVAQLRDLARFVGFSCPEYTGYSVDRVPPRCELSVYLYPRGGIHGAGLRPHHFTVARPTLQIAYQDLSWTALRRLAHDYSHRLGGSAFRQLPRLPSGHADARYPCPYSESQPVLTRMVELSEAQASQHDLLLEASRSLARRYAALEARLAEEGVTSVDTVSWDLGRLCHASRLSSHSSRGSARTPSGPRSPSSRAPYSPVYSPYPHPVSPSYTPGHTPVASSRRGPRFIRTARKRVVGSSTVFRFDYPTPPPPAARAAAGSRQVPLVPSRQPIDVSSTEEPTTGGSQADEE

SEQ ID NO: 192180 - protein, 142 aa, Oryza sativa
  Clone ID: PAT_MRT4530_8842C.1.pep
WIRRREGHRTCPPASPPPEGRALPPATVEPSHGLMARERRREAERRRRPSPLAEGAPPTPRSSLPAAAPQPVVDRCSPGSLGMASHVEGEGERRRHGGVVGRGRAWLSRRLGGRAPPALGSGAFNYLPLLDVAINYLLYLFQ

SEQ ID NO: 192181 - protein, 1710 aa, Oryza sativa
  Clone ID: PAT_MRT4530_88430C.1.pep
MVNLCRLSKCLVMKAWRSPDVADPHGLVIRVSNVVRVKCTPSAEVNKLFEQSCPRSWADLMGSARPGWPFEKLLARVAVEKLLAGSHGFGEGHHVAQLRDLARFLGFSCPEYTGYSVDRVPPHCELSVYLYPRGGIHGVGLRPHHFTVARPTLQIAYQDLSWTALRRLAHDYSHRLGGSAFRQLPRLPSGHADARYPCPYSESQPVLTRMVELSEAQATQHDLLLEAYRSLARRYAALEARLAEEGVTSVDTVSWDSGRLCHASHLSSHSSRGSARTPSGPRSPSSRAPYLPVYSPYPHPVSPSYTPGHTPVASSHRGPRFIHTARKRVVGSSTVFRFDYPAPPPPAARAAVGPRQMASRPRRAARAPARFGFEGGRVEPEANHESANEQSHHSNRSHCTASRNAEVEQPHRSNRLHHTASRNAEVEQSHHSHRTASHNSGEERLPSPPHVENNMQHLMAVQTQILQGLAAAVAGFQHNAHGNGHPHMSNNRFKLTDFLRSRPPEFSQTVEPVEADDWLKDVDRKLNLVQSHVPESTIDMKKEEFNKLKQGNSSVNEYLSMFNKLARYTPEEVDTDKKKIRKFLKGIAVGMRLQLLAHDFPTFQHMINKALLLEDARKEATEEYKKRKSNHQGNSSPGAPRPRYGQPMQYHQSVTQANRQPGYAPRPQMNRPAPQPQQRAPSGNTAPNSVTSFKSPPGPSSVQCFWCNQMGHYARQCPQNPTNTNSGHANGSTARTPTPAAAQSLHSPGKNIRATQICPEVNLRIEEVDFVAKPIVLDSQSLDIILGMDWLAKHKGQIDCAEKSITLQGPGGKQVRFTSNTPTASRSILTCLQVTSLESMPIVCEYPDVFPEELTSMPPDREIEFAIELAPGTAPIAKRPYRLAANELAEVKRQIEELESKGYVRPSSSPWGAPVLLVKKKDGSERMVIDYRALNEVTIKNKYPLPRIDDLFDQLKGARVFSKIDLRSGYHQLKIRSEDIPKTAFSTRYGLYEFTVMSFGLTNAPAFFMNLMNKIFMEYLDQFVVVFIDDILIYSKNEEEHAEHLRLIMEKLRDHQLFAKFSKCEFWLDRVAFLGHVISSNSVEVDPSKVEAVLAWNPPKNVSEIRSFLGLAGYYRRFIEGFSKLARPMTELLKKEKKFQWSAACEDSFQEMKKRLTTAPVLTLPDIRKDFEIFCDASRQGLGCVLMQERKVVAYASRQFRPHEVNYPTHDLELAAVVHALKIWRHYLIGNRCEVYTDHKSLKYIFTQTELNMRQRRWLELIKDYDLGIHYHPGKANVVADALSRKAYCNIAQIRPDQDRLCRELEKLRLTVVQSGVPASLTVQPTLESQIREAQKDDEGIKELIKRIQEKKDTDFSIDDQGTVWCGPRICVPAKKELRDLILKEAHESAYSIHPGSTKMYQDIKAYFWWAGMKRDVTEYWKWEEIGMDFITGLPRTPSGYDSTWVIVDRLTKSAHFVPVKTTFDGKKLAELYMTHVVCRFGCPKKIVSDRSTQFTSSYQASIQMLPNEAMFGRKCRTPLCWNEVGEALVFGPDILKAAKEQVKLIRERLKTAQNRQKDYADNRRRDLEFEKGDHVYLRVSPLRGMRRFGMSGKLAPRCIGPYLITARRGEVAYQLELPEGLADVHNVFHVSQLKKCLRVPEEQVPLGNIVLEKNLTYKERPIKVLEEAERQTRRKTVKFYKVQWSNHSEDEATWEREDLLRAEFPELLP

SEQ ID NO: 192182 - protein, 73 aa, Oryza sativa
  unsure (1)..(73): unsure at all Xaa locations
  Clone ID: PAT_MRT4530_88431C.1.pep
MGAVASRGQEDAARVAAGREHMKRCRERRRLMREAVRLRXHLAASHXAYLRSLTHXASAXSRFGFGEPXPVSD

SEQ ID NO: 192183 - protein, 268 aa, Oryza sativa
  Clone ID: PAT_MRT4530_88432C.1.pep
MAQDDEDVGLALGLSLGSGGHRRQRESRDEAPSSAAASLLTLRLPAESGGQPQVVVKREVVRAEEEEYEYEYERALYSSSAAAADDDEGCNSRKKLRLSKEQSALLEDRFKEHSTLNPKQKVALAKQLNLRPRQVEVWFQNRRARTKLKQTEVDCELLKRCCETLTEENRRLHRELQQLRALTHSTAAGFFMATTLPVPAATLSICPSCERLATAAAAGASPTAAADRTNKPTAPHLFSPFANAHGKDGQWAWAVGKDGDVDGGAHRR

SEQ ID NO: 192184 - protein, 254 aa, Oryza sativa
  unsure (1)..(254): unsure at all Xaa locations
  Clone ID: PAT_MRT4530_88433C.1.pep
MAGFVAPGGGLPGTASGRRGGGSVGGWSGGVAEEAAAWPCLQWQAVAVARSDRSAGAGGGCGGGGGCGAGGRVAADDRRPDWRERRVRWXGGRHGARGAADGDGGRLGARGAADGGRPDWRERCIRWRRPAWRERRSRRWGRXPRCEEELPVGVVRSSTHQGXPARDAGAGVPHVGRAXVMVEHRCVSRGFAGGERQVKTQLGCSXTDNDGSFPLLRALSCCLTPQGRLSGKSPVLTSLSPDGWRRRFFRRFSS

SEQ ID NO: 192185 - protein, 60 aa, Oryza sativa
  Clone ID: PAT_MRT4530_88434C.1.pep
FFFWKTEEPQLSYSCVCLQTRKFGRCPGVTRCKVTTQISCWCLQKHLEYCHTSAQQSKST

SEQ ID NO: 192186 - protein, 157 aa, Oryza sativa
  Clone ID: PAT_MRT4530_88435C.1.pep
VDPRRGQEPVSGLAIFRPPAKMVGAINTVSRPLAPIPLSTAIPTTPARPITIATLGLAPIDDQAIAPGNQPTTDGRLATILILLAILSKARKVALGNMNPIGNSLGKKSLVHHPNSAPIGSATPGNGPPTATTKISTSTPAGKYIFNDPKSSPTIKS

SEQ ID NO: 192187 - protein, 132 aa, Oryza sativa
  Clone ID: PAT_MRT4530_88436C.1.pep
MAAKAALVLAVSLLVVAMAVACPDCPSPKPPAPRPKPPTPHYGGGSSCPRDALKLHVCANVLGLVKAKVGAVSPYEPCCSLLDGLVDLDAAVCLCTAIKANVLGIKLNLPIDLSLILNNCGKICPSDYQCVH

SEQ ID NO: 192188 - protein, 102 aa, Oryza sativa
  Clone ID: PAT_MRT4530_88437C.1.pep
MEAKIGATAMVLLLLAFGVVGEAKTHEYRSHTFKGVCIHDDLWKYCVRFILSAMKAKVAATALFLLLLTFGGEAKICHDPSQTFKGMCLSNSNCISSCISED

SEQ ID NO: 192189 - protein, 127 aa, Oryza sativa
  Clone ID: PAT_MRT4530_88438C.1.pep
MCFRRKSRVQATARRRRIAERRVPRAAGFRHSSASPHVRGTRDRWFVYPYLPRVELLCGLGSLPCAVVLVSRTPGWPVDRHVGEFTVQCLGDSDNVLCVGMIIKRALSVTGGHPAQYGPVAELSVKR

SEQ ID NO: 192190 - protein, 86 aa, Oryza sativa
  Clone ID: PAT_MRT4530_88439C.1.pep
PLIDCGLIGHHLSMCIYTKKFFIIESITCFIVYGRPSQRYKTLLNVLTEPHTMQVTTTVFEWVGAYFAWGVLVRNGPSPLRVAGGS

SEQ ID NO: 192191 - protein, 58 aa, Oryza sativa
  unsure (1)..(58): unsure at all Xaa locations
  Clone ID: PAT_MRT4530_8843C.1.pep
MSLLCVVPGGPERCLAVFLPXLPAVASVPXLPPPRLFLGAPXVFVPCSGSVXXXXXXV

SEQ ID NO: 192192 - protein, 142 aa, Oryza sativa
  unsure (1)..(142): unsure at all Xaa locations
  Clone ID: PAT_MRT4530_88440C.1.pep
IPFSKKKRKTKGRAEMTKTHGGSYLARKKLEVTVIQAGGDHPPSILRKLKFTTCPVCSTPPSLGGGEKHFYTTTTTFVDGGGLLRPGEASLRGXLSNPGAVGPGMDGXRLRAAPPPPPWQMEEGPAFPSTPWAKGAVACPPG

SEQ ID NO: 192193 - protein, 160 aa, Oryza sativa
  Clone ID: PAT_MRT4530_88441C.1.pep
MGDWIFAPESKSSTTVVLVRERLGRASYQAPNDESYGRAAARQAYHTDEVPPSAANADLSTPPSTRSRSRSRAPHRLTSLPSPATRLTALRGRGNGGTRAAEPRDGAWASCCLLGLGFRAARPKISGRSARGRAGLHQLGVSYRVGISLFTISHLRVEFN

SEQ ID NO: 192194 - protein, 108 aa, Oryza sativa
  Clone ID: PAT_MRT4530_88442C.1.pep
MSSLPFFLPLLSLLPHLVAAPPRAGRARRPSEPAQADKKCALFYGVTISEEQARSGIVVRVNSAAQSEFKLLFFEQEFDGGYGLALQVPRFNARVRVLSQASWTTPSP

SEQ ID NO: 192195 - protein, 65 aa, Oryza sativa
  Clone ID: PAT_MRT4530_88444C.1.pep
LLIQNWVENFFFLKKGSGDCKGAFLFYGSLVRKTLPRVLYVVLNKGFLNPRCFGVVKTLFWPGKK

SEQ ID NO: 192196 - protein, 1218 aa, Oryza sativa
  Clone ID: PAT_MRT4530_88445C.1.pep
MEIDDIVAPPATFPGCHPACPSSSLGVTDLDGRPRCSVRLAAATDHRLAAEVATKIAVCATAPHGTTPQDPHKAAQPAHPTQLGLNGEEGASIEQVIAEYVAMFDGPLPAHVIAALTTIFGIDDEEQETMDAALISLVGEDIISWNVRGLNSPARCNAVHELMLDTKCTLACFQETKLQSIDDGLARFLGGYKLDKFAFKPARGTRGGILLLWSSGDFDVQEFRIGRFSISAQITDIRSGVTFLLTGVYGPTRHHLKDSFLRHIRRLRPSPGEGWLILGDFNMIYCARDKNNSNLNLARMRRFRVVIDRWPSDHCPLVLSNPQGPHRPRTFKFENFWTRVPGFKDKVKDIWSQPSSHTEPMHRLNQKLQRTAVGLRDWTKGICSEAKLQFHMALNVIQRLDVAQEHRELSPPETRLRAALKRKVLGLASIERARKKQASRVTHIREGDANTKFFHLRVNARRRRNTIQRLKKDSGWAVTHGEKELTIHDHFASFIGRPGPRPKELNWETLDITPIDLATLGEPFTEEEVHRAIKEMPADKAPGPDGFTGAFFKVCWEIIKDDILLVFSSIYNLRCAHLNLLNSANIVLIPKKDGAESVSDYRPISLIHSIAKIFAKMLELRLRPHMHELISVNQSAFIKGRSIHDNYLFNDVATSANILHRFGTATGLVTNLQKSQVAAIRCGNIDLEEVLQGVPARRANFPLKYLGLPLVLGRLRKTDLQPVFDKISGRIASWRGKNMAAAGRTTLVKSVLSAQPIYLLTALKVMKESLEQLDKQRRRFLWAGTGDITGGKCKGDLGVLSLEKFTRALRLRWLWNEWRDPSKPWVGLETPCDGVDRDLFAASTKITVGDGNTTRFWDSAWINGRRPKDLMPLVYEISKNRKKSLRQGKEDDSWVHDLTLDAGSSITINLLDQLVRLWEAVRNVHLDSEEPDQIVWKFTSSGHYTAFSAYHAQCLGAPNTNFNSLIWKVWAPGKCKFHAWLIIQNRVWTSDRLATRGWRNNGHCPLCRCDTETALHLVAMCRYTKRIWRLVATWAGYQQLEPAQWEEARYGKPYFLVSWAYMSYTHFLAKHCHTCGQQATICLPCHTYNKLSYANVRQQPNRPTTQMENKLSTTTEGEELKSAAQVVADVLAENTKKNRFLQNVGFNNAQPRFSEQSTETELEAEKRANAELRAQVADLSNKVQESEQARIKDREEMKRSQSEMEAKLNLLLSQIRPS

SEQ ID NO: 192197 - protein, 719 aa, Oryza sativa
  Clone ID: PAT_MRT4530_88446C.1.pep
MSQLGEPATRPEEDTCFIPTSYAIDEELREWSETAVVSWAARAPPTTEPRDVEQAFLDEFKLRRGEVAVSLHHPQAFLIKFQHRRHCEEALAKGYVKRHGIEIHFIKWRSLKSALGVALMFRVRLCLDGVPMHAWAADIAERIIGRTCALEQIETDVVHPVESGNTRSIDLWAWTANPSTIPKRMWLGFTKRAKDPNLAPLFAVENPLEHWQRGVRHPVLFHLEEIHDYTAATIDLEGQGSFQPAKRRLPPWSLGVLDGEQVPGRVFEDFPHHPPPPRSVHERLGGRDRDDERREARRPERRSDRDAIDGRADRPRRGRAVRGGHLHDEGDHDDEDDWDGERDDRDGCADRDGRHARDQGGRGGRGRRRGSGNDHPRPWRRNDRDDDRDDRGRDLGRGRDDRRGSDNNYRRERTRSPRRWDRGGANRSGGGTRRTADPVYDSSKLMNIPLLHKSANQAEVGEFRLLHALHNSSFLCQEPQTNTLSPVSQLQWLSIIADKAATPALSGRPAKPRIEAWFQNAAWEPIPVEHAFARIKSALPPPTSTTTCQQVEEALLRIELAAAATDPPVGEPFPQIDSPPPRVTSPALAQGPVATKIAVCATLHMGRRLKIRTRQHSQPTRRSERIAKQPARPTMERCQRVLFKRLGVLNGEEGASIEQVIAEYVAMFDGPLPAHVIAALTTIFGIDDEEQETMDAALISLVGEGIADAAEDAEDTVAA

SEQ ID NO: 192198 - protein, 345 aa, Oryza sativa
  Clone ID: PAT_MRT4530_88447C.1.pep
MAAADGDEDWEICNCDGFVYKRRRVLHPPDLEDAAATAATSSAPGPPPEAVLRRRRRQALLRLRARYLDELSRWESLSSDVLAPLPAAPAADLPPRPPSDPVAASPPPGSSSSSSDLPSSTASSPRSSSKNVSMAEVTEQLLKRLTEVCDEIDEFCHAHEAALVDAVTDLPVWGDPRELMNSLCSPAELPHKLQIELTENNYYTLLNACSKNEIFQDAIWLTAAQAPIGQSGMPVASCHKLKLHQHLHPISKELMLGHIVLHLMHMPTLCLTSRLMGMLANHLQNVYSNYHGYQAAYGRGGAATDAVSVIQTSGGAATVVVAQAADPPSVLLMVHFTPNPLEELR

SEQ ID NO: 192199 - protein, 249 aa, Oryza sativa
  Clone ID: PAT_MRT4530_88448C.1.pep
MALKKLYQKKSLIFQWNPNFGQLDMNNCTNSTNKFGRTTLVKSVLSAQPIYLLTTALKVTKESLEQLDKQRRRFLWAGTGDITGGKCKRDLSKPWVGLETPCDGVDRDLFAASTKITVGDGNTTRFWDSAWIDGQRPKDLMPLVYEISKNRKKSLRQGKEDDSWVHDLTLDAGSSITINLLDQLVRLWEAVRNVHLDSEEPDQIAWKFTSSGHYTASSAYHAQCLGAPNTNFNSLIWKVWAPGKYKFHA

SEQ ID NO: 192200 - protein, 409 aa, Oryza sativa
  Clone ID: PAT_MRT4530_8844C.1.pep
MALLQRLLVALLRVLVAGEHAAGDAMPSPASGGGGAAVNVEARYARVFCFGNSLTDTGNNPLLPATAGGPSTSPPYGMTFFHRPTGRSSDGRLLIDFIVKALRAPQPTPYLAGKTAADLLAGTNFAVGGATALEPAVLARMGIVSAVPVSLSNETRWFQDALQLLASSINARRRIAETSLFFFGEIGVNDYFLALASNHTVEQAAATLVPDIVGVIRSAVIDAIVAGARTVVITGMIPLGCEPQLLALFPAGSAADYDPDTGCNARFNKLAEVHNRELTRMLRQLRRAFPAAAVHYADFYRPVTAIIASPAKYGFGDTPLAACCGGGGNPYNFDFAAFCTLRASTLCADPSKYVSWDGIHYTEAVNKFVARSMLRRALIPMPKPNPSLSMPLSSSREHTGQETSRELAT

SEQ ID NO: 192201 - protein, 32 aa, Oryza sativa
  Clone ID: PAT_MRT4530_88451C.1.pep
LMHIRLLLHWTFTSINKQFAILQLKIKPCLFL

SEQ ID NO: 192202 - protein, 215 aa, Oryza sativa
  unsure (1)..(215): unsure at all Xaa locations
  Clone ID: PAT_MRT4530_88452C.1.pep
LAPVEVENSLKVFGYTFSSRSEKKNEKMKKNETNRPQPRRRPPATRAARPRPAAPGRRSPSPPPASARASSSRPVAVAPYRRRYRSPPPXPPPARHRHAAPPVAACRHPAAAAARHRRRRPLGIGRGGERTGGKEDCRGSXVAFSCRYSKKLEGSGSFGIEWSCGAAKTQLHPXSSFFRSSSANSTPKKGGSGSFGTTPAPDKLEXGARAMPNGA

SEQ ID NO: 192203 - protein, 67 aa, Oryza sativa
  Clone ID: PAT_MRT4530_88453C.1.pep
MAHSYMMPHRPWSRTGAEVMRGEKLRLSSDWECGPGVADTCEAPPSERNALVLASGGGGDLSQNVGW

SEQ ID NO: 192204 - protein, 86 aa, Oryza sativa
  Clone ID: PAT_MRT4530_88454C.1.pep
MSVAANARRERDGGGKRRREEATAAARPEAATAGQGALTTGGYIVIVVDRRASEEMGRRSANEEVRRWPGDLAMAGERGGKAAARR

SEQ ID NO: 192205 - protein, 1849 aa, Oryza sativa
  unsure (1)..(1849): unsure at all Xaa locations
  Clone ID: PAT_MRT4530_88455C.1.pep
MKRIPLTRSSSRSKPATMSFRVNLERHGLVPMAVNASFSSHGFGEGHHVAQLRDLARFLGFSCPEYTGYSVDRVPPRCELSVYLYPRGGIHGAGLRPHHFTVARPTLQIAYQDLSWTALRRLAYDYSHRLGGSAFRQLPRLPSGHANARYPCPYSEFQPVLTRMVELSEAQATQHDLLLEAYRSLARRYAALEARLAEEGVTSVDTVSWDSGRLYHASHLSSHSSRGSARTPSGLRSPSSRAPYSPVYSPYPHPVSPSYTPGHTPVASSHRGPRFIRTARKRVVGSSTVFRFDYPAPTPPAARAAVGPRQMASRPRRAARAPARFGFEEGRVEPEANHESANEQSHHSNRSHRTTSRNAEVEQPRRSNRSHHTASRNAEMEQSHRSHRTASHNSGEERLPSPPHVENNMQHLMAVQTQILQGLAAAVAGYQHNAHGNGHPHMGNNRSNLTDFLRSRPPEFSQTVEPVEADDWLKDVDRKLNLVQCTPVEKTLYASHQLKGPAADWWENYCNAHPEPTNIAWDEFATAFRAAHVPESTIDMKKEEFNRLKQGNNSVNEYLSMFNKLARYAPEEVDTDKKKIRKFLKGIAVGMRLQLLAHDFPTFQHMINKALLLEDARKEATEEYKKRKSNHQGNSSRGAPRPRYGQPMQYHQSVTQANRQPGYAPRPQMNRPAPQPQQRAPSGNTAPNSVTSFKSPLGPSAVQCFRCNQMGHYARQCPQNPTNTNSGHANGSTARTPTPAAAQSRPSSQASGQGSRASNNFGRGRVNHIQAETAQDAPDVVMGMFSVNSVPAIVLFDSEASHSFISQAFVKRNGWKTQNLRVPMIVHSPGRNIRATQICPEVNLRIEEVDFLAKPIVLDSQSLDIILGMDWLAKHKGQIDCAEKSITLQGPGGKQVRFTSNTPTASRSILTCLQVTSLESVPIVCEYPDVFPEELTSMPPDREIEFAIELAPGTAPIAKRPYRMAANELAEVKRQIEELESKGYVRPSSSPWGAPVLLVKKKDGCERMVIDYRALNEVTIKNKYPLPRIDDLFDQLKGARVFSKIDLRSGYHQLKIRSEDIPKTAFSTRYGLYEFTVMSFGLTNAPAFFMNIMNKIFMEYLDQFVVVFIDDILIYSKNEEEHAEHLRLIMEKLRDHQLFAKFSKCEFWLDRVAFLGHVISPNGVEVDPSKVEAVLAWNPPTNVSEIRSFLGLAGYYRRFIEGFSKLARPMTELLKKEKKFQWSTACEDSFQEMKKRFTTAPVLTLPDIRRDFEIFYDATRQGLGCVLMQERKVVAYASRQLRPHEVNYPTHDLELAAVVHALKIWRHYLIGNRCEVYTNHKSLKYIFTQTELNMRQRKWLELIKDYDLGIHYHPSKANVVTDALSRKAYCNVAQIRSYQDRLCRELEKLRLTVVQSGVPASLTVQPTLESQIREAQKDDEGIKELIKRIQEKNDTNFSIDDQGTVWCGPRICVPAKKELRDLILKEAHESAYSIHPGSTKMYQDIKAYFWWAGMKRDVAECVALCDICQRVKAEHQRPAGLLQPLPIPEWKWEEIGMDFITGLPRTPSGYNSIWVIVDRLTKSAHFVLVKTTFDGKKLAELYMTHVVCRFGCPKKIVSDRGTQFTSKFWKQLHEALGTDLNLXTAYHPQTDGQTERXYQASIQMSPNEAMFGRKCRTPLCWNEVGEALVFGPDVLKAAEEQVKLIRERLKTAQNRQKNYADNRRRDLEFEKGDHVYLRVSPLRGIRRFGMSGKLAPRYIGPYLITARRGEVAYQLELPEGLAYVHNVFHVSQLKKCLRVPEEQVPLGNIELEKNLTYKERLIKIFEEAERQTRRKTIKFYKVQWSNHSEDEATWEQEDLLRAEFPELLP

SEQ ID NO: 192206 - protein, 132 aa, Oryza sativa
  Clone ID: PAT_MRT4530_88456C.1.pep
ERCRASPRRRITPCWASSPSRYLGCLQICAKRGNVCLHRHLRRGLSKEGGLMLDPWRQIFTRWLEFSSCIKDVSTSHSWRTESVCLLASYVAHRVSFAFFTNKIHLVVVFGVAMVFVLISLKNNSRNLKWCC

SEQ ID NO: 192207 - protein, 61 aa, Oryza sativa
  Clone ID: PAT_MRT4530_88457C.1.pep
IWLEAGKLGCPLWLWYVENKAVRPVSVYVISRLMLASVFLKFATKVAAIKIQKKGFNDTIK

SEQ ID NO: 192208 - protein, 1851 aa, Oryza sativa
  Clone ID: PAT_MRT4530_88458C.1.pep
MAVNASFSSHGFGEGHHVAQLRDLSRFLGFSCPEYTGYSVDRVPPHCELSVYLYPRGGIHGAGLRPHHFTVARPTLQIAYQDLSWTALRRLAHDYSHRLGGSAFRQLPRLPSGHSDARYPCPYSESQPVLTRMVELSEAQATQHDLLLEAYRSLARRYAALEARLAEEGVTSVDTISWDSGRLCHASHLSSHSSRGSARTPSGPRSPSSRAPYSPVYSPYPHPVSPSYTPGHTPVASSRRGPRFIRTARKRVVGSATVFRFHYPAPPPPAARAAAGPRQMASRPRRAARAPARFGFEDGRVEPEENHESANEQSHHSNRSHRTVSRNAEVEQPRRSSRSHRTVSRDAEMEQSHRSHRTASHNSGEERLPSPPHVETNMQHLMAVQTQILQGLTTAIASFQHNAHGNGHPHMGNNRSKLTDFLRSRPPEFSQTVEPVEADDWLKDVDRKLNLVQCTPVEKTLYASHQLRGPAADWWENYCNAHPEPTNIAWDEFATAFRAAHVPESTIDMKKEEFNRLKQGNSSVNEYLSQFNKLARYAPEEVDTDKKKIRKFLKGIAVGMRLQLLAHDFPTFQHMINKALLLEDARKEATEEYKKRKSNHQGNSSRGAPRPRYGQPMQYHQSVTQANRQPGYAPRPQINRPAPQPQQRAPSGNTAPNSVTSFKSPQGPSAVQCFRCNQMGHYARQCPQNPTNTNSGHANGSTARTPTPAAAQSRPSSQASGQGSRASNNFGRGRVNHIQAETAQDAPDVVMGMFSVNSVPAIVLFDSGASHSFISQAFVKRNGWKTQNLRVPMIVHSPGRNIRATQICPEVNLRIEEVDFLAKPIVLDSQSLDIILGMDWLAKHKGQIDCAEKSITLQGPGGKQVRFTPNTPTASRSILTCLQVTSLESVPIVCEYPDVFPEELTRMPPDREIEFAIELAPGTAPIAKRPYRMAANELAEVKRQIEELESKGYVRPSSSPWGAPVLLVKKKDGSERMVIDYRALNEVTIKNKYPLPRIDDLFDQLKGARVFSKIDLRSGYHQLKIRSEDIPKTAFSTRYGLYEFTVMSFGLTNAPAFFMNLMNKIFMEYLDQFVVVFIDDILIYSKNEEEHAEHLRLIMEKLRDHQLFAKFSKCEFWLDRVAFLGHVISSNGVEVDPSKVEAVLAWNPPKNVSEIRSFLGLAGYYRRFIEGFSKLARPMTELLKKEKKFQWSAACEDSFQELKKRLTTAPVLTLPDIRKDFEIFCDASRQGLGCVLMQEQKVVAYASRQLRPHEANYPTHDLELAAVVHALKIWRHYLIGNRCEVYTDHKSLKYIFTQTELNMRQRRWLELIKDYDLGIHYHPGKANVVADALSRKAYCNVAQIRPDQDHLCRELEKLRLTVVQSGVPASLTVQPTLESQIREAQKDDEGIKELIKRIQEKKDTNFSIDDQGTVWCGPRICVPAKKELRDLILKEAHESAYSIHPGSTKMYQDIKAYFWWAGMKRDVAEYVALCDICQRVKAEHQRPAGLLQPLPIPEWKWEEIGMDFITGLPRTPNGYDSIWVIVDRLTKSAHFVPVKTTYDGKKLAELYMTHVVCRFGCPKKIVSDRGTQFTSRFWKQLHEALGTDLNFSTAYHPQTDGQTERVNQILEDMLRACALDFEGTWDRCLPYAEFSYNNSYQASIQMSPNEAMFGRKCRTPLCWNEVGEALVFGPDILKSAEEQVKLIRERLKTAQNRQKNYADNRRRDLEFEKGDHVYLRVSPLRGMRRFGMSGKLAPRYIGPYLITARRGEVAYQLELPEGLADVHNVFHVSQLKKCLRVPEEQVPLGNIELEKNLTYKERPIKVLEEAERQTRRKTIKFYKVQWSNHSEDEATWEREDLLRAEFPDLLP

SEQ ID NO: 192209 - protein, 1759 aa, Oryza sativa
  Clone ID: PAT_MRT4530_88459C.1.pep
MWSYLSYVWMKFQGNRSLSARAGNRTPVMAVNASFSSHGFGEGHHVAQLRDLARFLGFSCPEYTGYSVDRVPPHCELSVYLYPRGGIHGAGHFTVARPTLQIAYQDLSWTALRRLAHDYSHRLGGSAFRQLPRLPSGHSDARYPCPYSESQPVLTRMVELSEAQATQHDLLLEAYRSLARRYAALEARLAEEGVTSVDTISWDSGRLCHASHLSSHSSRGSARTPSGPRSPSSRAPYSPVYSPYPHPVSPSYTPGHTPVASSRRGPRFIRTARKRVVGSSTVFRFCHPAPPPPAARAAAGPRQTQILQGLTTAIASFQHNAHGNGHPHVGNNRSKLTDFLRSRPPKFSQTVEPVEADDWLKDVDRKLNLVQCTPVEKTLYASHQLRGPAADWWENYCNAHPEPTNIAWDEFATAFRAAHVPESTIDMKKEEFNRLKQGHSSVNEYLSQFNKLARYAPEEVDTDKKKIRKFLKGIAVGMRLQLLAHDFPTFQHMINKALLLEDARKEATEKYKKRKSNHQGNSSRGAPRPRYGQPMQYHQSLTQANRQPGYAPRPQINRPAPQPQKHAPSGNTAPNSVTSFKSPQGPSAVQCFRCNQMGHYARQCPQNPTNTNSGHANGSTARTPTPAAAQSRPSSQASGQGSRASNHFGRGRVNHIQAETAQDAPDVVMGMFSVNSVPAIVLFDSGASHSFISQAFVKRNGWKTQNLRVPMIVHSPGKNIGATQICPEVNLRIEEVDFLAKPIVLDSQSLNIILGMDWLAKHKGQIDCAEKSITLQGPGGKQVRFTPNTPTASRSILTCLQVTSLESVPIVCEYPDVFPEELTRMPPDREIEFAIELAPGTAPIAKRPYRMAANELAEVKRQIEELESKGAPVLLVKKKDGSERMVIDYRALNEVTIKNKYPLPRIDDLFDQLKGARVFSKIDLRSGYHQLKIRSEDIPKTAFSMRYGLYEFTVMSFGLTNAPAFFMNLMNKIFMEYLDQFVVVFIDDILIYSKNEEEHAEHLRLIMEKLRDHQLFAKFSKCEFWLDRVAFLGHVISSNGDEVDPSKVEAVLAWNPPKNVSVIRSFLGLARYYRRFIEGFSKLARPMTELLKKEKKFQWSTACEDSFQEMKKRLTTAPVLTLPDIRKDFEIFCDASRQGLGCVLMQERKVVAYASRQLRPHEVNYPTHDLELAAVIHALKIWRHYLIGNRCEVYTDHKSLKYIFTQTELNMRQRRWLELIKDYDLGIHYHPGKANVVADALSRKAYCNVAQIRPDQDHLCRELEKLRLTVVQSGVPASLTVQPTLESQIREAQKDDEGIKELIKRIQEKKDTNFSIDDQGTVWCGSRICVPAKKELRDLILKEAHESAYSIHPGSTKMYQDIKAYFWWAGMKRDVAEYVALCDICQRVKAEHQRPAGLLQPLPIPEWKWEEIGMDFITGLPRTPSGYDSIWVIVDRLTKSAHFVPVKTTYDGKKLAELYMTHVVCRFGCPKKIVSDRGTQFTSRFWKQLHEALGTDLNFSTAYHPQTDGQTERVNQILEDMLRACALDFEGTWDRCLPYAEFSYNNSYQASIQMSPNEAMFGRKCRTPLCWNEVGEALVFGPDILKSAEEQVKLIRERLKTAQDRQKNYADNRRRDLEFEKGDHVYLRVSPLRGMRRFGMSGKLAPRYIGPYLITARRGEVAYQLELPEGLADVHNVFHVSQLKKCLRVPEEQVPLGNIELEKNLTYKERPIKVLEEAERQTRRKTIKFYKVQWSNHSEDEATWEREDLLRAKFPELLP

SEQ ID NO: 192210 - protein, 458 aa, Oryza sativa
  unsure (1)..(458): unsure at all Xaa locations
  Clone ID: PAT_MRT4530_8845C.1.pep
MARRGHHHHLAEVALLASASEDLAAVGAGEREGWLDDPAVLPSLAPRARALAVASAARSVLAVVPVAGVGGGVTVRPALGPDDGRISAVEWVPLVGEDAEEAGGEGVAVAVGTDAGWLLFYSLAGDLLHKQSIYPSKILKLNFRERKENAWEDSGSDELSVVFPGVIARFDGADLQLLVICXNMLQKSLHEVKSHLWKDKSEQEDAEEDSSFGRIPFQIWNLLXIAGQSSQRHYCAITVGEDAVVSAYRLSEDRSRSIVGAILSRGVAATFSTISSLSKIIWRSEPSPTKKSRPKPQSFAKTSPLTCLKDSPRKGERLTLSPSGTLAAITDSLGRILLLDTHALVAVRLWKGYRDASCLFVEMLLNKDKASSSLHTEYTKSDYCLCLAIHAPRKGIIEIWQMRTGARLLTIPCPKGSRILQPSTRFMSSPFSSLYSPLEVYLFNGDSGQLSVLNRHIG

SEQ ID NO: 192211 - protein, 72 aa, Oryza sativa
  Clone ID: PAT_MRT4530_88460C.1.pep
HGRSPPWPPPLAVAPSMSPLRFAAWGWRRMPPPPTCAPRLSPPPPPATTNFFHPHPPPPSKLADGNASRFPL

SEQ ID NO: 192212 - protein, 112 aa, Oryza sativa
  Clone ID: PAT_MRT4530_88461C.1.pep
MAATASRCPLYVTAPVRGVGVEENAAACKEWDVGNTINSCVASAWGGRDGRDLTFFSRRGRRGARRRLALCGEEDKRGGVCQVKCLPHLRPAPLAAAAAGDDEFLPPASPSS

SEQ ID NO: 192213 - protein, 1572 aa, Oryza sativa
  Clone ID: PAT_MRT4530_88462C.1.pep
MASRPRRAARAPARFGFEDGRVEAEANHESANEQSHHSNRSHRTVSRNAEVEQPRRSNRSHRTVFRNAEMEQSHRSHRTASHNSGEEHLPPPPHVENNMQHIMAVQTQILQGLTTAIASFQHNAHGNGHPHVSSNRSKLTDFLRSHPPEFSQTVEPVEADDWLKDVDRKLNLVQCTPVEKTLYASHQLRGHAADWWENYCNAHPEPTNIAWDEFATAFRAAHVPESTIDMKKEEFNRLKQGNISVNEYLSMFNKLARYAPEEVDTDKKKIRKFLKGIAVGMRLQLLAHDFPTFQHMINKALLLEDARKEATEEYKKRKSNHQGNSSRGAPRPRYGQPMQYHQSVTQANRQPGYAPRPQMNRPAPQPQQRAPSSNTAPNSVTSFKSPQGPSAVQCFRCNQMGHYARQCPQNPTNTNSGHANGSTARTPTPAAAQSRPSSQASGQGSRASNHFGRGSVNHIQAETAQDAPDVVMGMFSVNSVPAIVLFDSGASHSFISQAFVKRNGWKTQNLRVPMIVHSPGRNIRATQICPEVNLRIEEVDFLAKPIVLDSQSLDIILGMDWLAKHKGQIDCAEKSITLQGPGGKQVRFTPNTPTASRSILTCLQVTSLESVPIVCEYPDVFPEELTSMPPDREIEFAIELAPGTAPIAKRPYRMAANELAEVKRQIKELESKGYVRPSSSPWGAPVLLVKKKDGSERMVIDYRALNEVTIKNKYPLPRIDDLFDQLKGARVFSKIDLRSGYHQLKIRSEDIPKTAFSTRYGLYEFTVMSFGLTNAPAFFMNLMNKIFMEYLDQFVVVFIDDILIYSKNEEEHVEHLRLIMEKLRDHQLFAKFSKCEFWLDRVAFLGHVISSNGVEVDPSKVEAVLAWNPPKNVSEIRSFLGLAGYYRRFIEGFSKLARPMTELLKKEKKFQWSAACEDSFQEMKKRLTTAPVLTLPDIRKDFEIFCDASRQGLGCVLMQERKVVAYASRQLRPHEVNYPTHDLELAAVVHALKIWRHYLIGNRCEVYTDHKSLKYIFTQTELNMRQRRWLELIKDYDLGIHYHPGKANVVADALSRKAYCNVAQIRPDQDHLCRELEKLRLTVVQSGVPASLTVQPTLESQIREAQKDDEGIKELIKRIQEKKDTNFSIDNQGTVWCGPRICVPAKKELRDLILKEAHESAYSIHPGSTKMYQDIKAYFWWAGMKRDVAEYVALCDICQRVKAEHQRPAGLLQPLPIPGWKWEEIGMDFITGLPRTPSGYDSIWVIVDRLTKSAHFVPVKTTYDGKKLAELYMTHVVCRFGCPKKIVSDRGTQFTSRFWKQLHEALGTDLNFSTAYHPQTDGQTERVNQILEDMLRACALDFEGTWDRCLPYAEFSYNNSYQASIQMSPNEAMYGRKCRTPLCWNEVGEALVFGPHILKSAEEQVKLIRERLKTAQNRQKNYADNRRRDLEFEKGDHVYLRVSPLRGMRRFGMSGKLAPRYIGPYLITARRGEVAYQLELPEGLADVHNVFHVSQLKKCIRVPEEQVPLGNIELEKNLTYKERPIKVLEEAERQTRRKTIKFYKVQWSNHSEDEATWEREDLLRAEFPELLP

SEQ ID NO: 192214 - protein, 141 aa, Oryza sativa
  unsure (1)..(141): unsure at all Xaa locations
  Clone ID: PAT_MRT4530_88463C.1.pep
MQIFGKTLTGQTITLXVDRSDTMLNAKGNIQDKEGMLADQXRVIYGGKQLEDGRTLGDYNMQKELTLDLVLRLRGGMQIFVKTLTGETITLDGEGVDTIHNVKGKIQDKEGIRADQESPFSPLAPEDATTLADYTLKGVHP

SEQ ID NO: 192215 - protein, 112 aa, Oryza sativa
  Clone ID: PAT_MRT4530_88464C.1.pep
HEAILDPEEHRRFRSFTLDFSYPRVPSSVRNAWPAIQPGDRISGGIQWHRNVAPHGHSSAVAGYGANTYSGQGSSSSGPPVFAGPNLPPGGCLAGVGAATDSSCALSLLSTQ

SEQ ID NO: 192216 - protein, 100 aa, Oryza sativa
  Clone ID: PAT_MRT4530_88465C.1.pep
MAGGPWCVGNRSYNGTLLPGDGIRPEVVALPKDGLSLAGAMEGGQFRLQEKLMGGEAGDAYRGPIPEETLRAAHAFDSCIHLAIRRYKWDYKEKHLQPDT

SEQ ID NO: 192217 - protein, 1116 aa, Oryza sativa
  Clone ID: PAT_MRT4530_88466C.1.pep
MGRRGASAGTCRVLLAWLMHFTVQEGARTCFISFGNFGRVLWFFRGHRLAKELDSKSGAKNQKVVRKNRLCAEEMAPTTEIKEKSPSQVNCGGVSKDPNPCSYSSSSPSSCKPSVVKFISPSARLQAIQCYNLQRKTQDFLGIFELNSMSSVENPSNGRSNGHAPANASAATANSAQATQQGQTEQNPCDAGSEADLLWKLRKYLVLLAILAAAITFQAGLGPPGGFWQQDQHGYHAGDVVLRYSYPRRYLVFFYCNTTAFGASLIVLILLLVKELSRDAIWLRSLQFAMVLGLLGLMGAYAAGSCREVRTSVYIWALLVGIFAYITLHVVFFRHLAPQWLCEIFYTIRKHWKEILGSIHGDGGTDKTGETGDSEKTKRLEQNRSFLLVLATLAATVTYTAGLNPPGGFWPDDNKPSHLAGDPVLRDHYPRRFKAFLVCNATAFAGSLVIIIMLLSNTAVDHVVKSNALRLCVLVSLFGLMGAYAAGSCREVHTSIYVFALVGAVFLYLCIQWIEHMVPIPCIKSSMEWVGKKKTHLLQKLGSFIMRGTRNPTEESRSTPRAQNPVNNRRSGTSDTAKDDVEKLRTYLLLLGILAATVTYQAGLNPPGGFWQDNNGHTAGDPILEAINPKRYKAFFYCNATAFVASLVIIILLQSQLITVGAMKRHILQTAMALDLFGLMGAYAAGSSRKFSTSVYVFILVLVVFTYFTLHVLLSMALKTQLKTKIEHVPNLFHRFTRFCFRRTEGGSDDGRSDSVELQNEEKDLEKRRKFLMMLAILAASITYQSGLSPPGGFWSDNDRHRAGDPVLHDEFPGRYRIFFYFNATAFMASLAVILLLVNKRLCDKGLKSYALRACVLVDLISLMGAFAAGSCRRVSTSIYVILVVAAVFAYVMIQILVLQVAEQKVDLLKKRRSGFESQQRSMTLTGPTGSTDKKRTEHKWRKDLMLIGTLAVTVTYQAGLLPPGGLWPSDQGNHYAGDPILKVTHPIRYKVFFYCNATAFMASTVMVILLLNNTISKYKRSLLAMKTAMVLDLLGLLGAYAAGSCRKFKTSAYIFALVIAVFIYIVIHVLLSFDEVALLVKEKGKKWMPCLKMWDQIETGASDQPSATQSGAPPV

SEQ ID NO: 192218 - protein, 74 aa, Oryza sativa
  Clone ID: PAT_MRT4530_88467C.1.pep
GEWPSVFLKLQGCITCLATKTKCWWTNERRETISLCIQTYEEVNLLCIYRSNLGKHRKTKRTKVRMGMPPRVCC

SEQ ID NO: 192219 - protein, 634 aa, Oryza sativa
  unsure (1)..(634): unsure at all Xaa locations
  Clone ID: PAT_MRT4530_88468C.1.pep
MAAYFTGGGAGTDVVQAAGTDGLQTLYLMNPSYVGFTDAAAAPGGGAAAANMVFLNSAVSTLTPASFSHHHQPTPAAQHFVGIPLQSGYNLWGPDATGGNDVSPPRHGAQQQAPAAAGTSAAAVSPVLSLSSREAAPPVTVAAAAAAAAVPGGTDQEKVVMRSRYLKAAQELLDEAVSVSKGAATAVKKKEDSEGGVSGGGGGAEDGGGSKSGAAAEMSTAERQELQMKKSKLLNMLDEVEQRYRQYHRQMQGVAAAFEAAAGAGSATTYTSLALRTISRQFRCLRDAIAAQVRAASRGLGEDCGDDEGGGGGGRTTVGSRLRFIDHQLRQQRAMQQLGMVHXPPPVGAAGGGWRPQRGLPERAVSVLRAWLFEHFLHPXSNWFINARVRLWKPMVEEMYAEETKAKEEEEEEHDAAAAAAGDRGGVAEQAPSKPDDSAGIGMSSSSPAVAASRSVGVHAGDQHAQASFYGGGGGGDDPFQCRIKKARTTTADEPAAAAAFHVSGEAAVSHRELLMKFTEAGGEGVRTGHPHVNDDDDDVPGGAGGYSLFTAAQYGHQFGSDHFAFAGHGGGGGGGVSLTLGLPHGADQTPASFLIGAGAGSDGGGAPVTTAGYDMNMQSTKSLAAQLMRDFVA

SEQ ID NO: 192220 - protein, 82 aa, Oryza sativa
  Clone ID: PAT_MRT4530_88469C.1.pep
TWIDASKFLNPHYFLMAEMKAHTFGIFRRTKKIYIEMLKPKPANSRVWETTFTMLLHWTKHNCVTGKPSCGSNKSNVHKNFT

SEQ ID NO: 192221 - protein, 493 aa, Oryza sativa
  Clone ID: PAT_MRT4530_8846C.1.pep
MEPKSSSSSHYLQPSATLPSTRRNSFQGVGAEAGGGGGGMNPFGPTFSDPLCSLNLKETSEFVRSSFPMATMARSNSSNGATGNGGHGYHRETSTASSSSSSSASAQRRRAEQQQQQVPATPGRPLLFFNSSSPAHHQLVSARRSVPSKWEDAEKWVRQASSDHHGGHHHHHGKGSKLQEEKRASAVRRSVDADVTALALYTAPAAEVFLKDKFTDNVEPSKESFVFRSSYCEPTKNTAAQAVAAGNGIDHRRDIGTEMTPLGSSTTSRCHTPIKSTSPARHNTPASRSGPLVPYAGGGGGAGQDISDLADCHFAKLDLGAQFDAMLINWSSKEEEEEEVSKSLRHFEASVAAVGEKRGGAGDCRWEDDDRAKSCIRYQREEAKIQAWINLESAKAEAQSRKLEVKIQKMRSNLEEKLMRRMTTVHRRAEEWRATAQAQHLQQLKRAAEQVRRAKATSHHHHHHHLAGSNASCGCFPCNGSNNIISGNLLNYY

SEQ ID NO: 192222 - protein, 1232 aa, Oryza sativa
  Clone ID: PAT_MRT4530_88470C.1.pep
MWGLHKSYPPPLFLFVSVGRELAAVAGASSNSIHSLLLPFPAASLLAAAVHQPASGGDPGVALERRQRRAREGHSGGGGGDRGRRGRLAVGRKKTSHENGRVLATLGPATALSTAALDALSAGHDAPASAVLPPCPRTRKGRLRLATATHVGILSKMAAFGGGFFCTCGGSVEGSGGRASGSGGSDRGLVIHRVVKEAGGAANYPLLTRTNYNDWSLLMKIKLQARCLWGAIDPGGVELHEDRMALDAICSAVPPEMISTLATKASAKEAWDCIRILRVGDDRIRKASAQKVRMEYESLVLRDGETVEDFAMRLTSTVNQLATLGDPEPADKVVEKYLRVARPRFTQLVLSIETLLDISTLSLEEVTGRLKAAEDAMPLPSSSSDNAGKLYLTEEEWLERHNKKEQEAKKNSGSPSNRGKRRGGKGRNGGGAGVGGAKNTNSGAARREDKCRNCGKYGHWAKDCRSKPKRDEQAHVAQDDEPTLLLLTGGVITHACEQEHAPAPSAPTPSSDPIYLEEKKLFAALDDAAKRDPGRWIVDSGASNHMTGCRTAFSDIDTGITGNVRLGDGSVVRIEGRGTVLFSCKNGEHRTLSNTYLIPRLAANIISVGQLDETGFKVEAEDGVMRIWDEQRRLLARIHRNPGRLYVLDVELARPVCLTARIGDEAWKWHARFGHINFTALRKMGREQLVRGLPAVSQVDQLCEACLAGKHRRTPFPQQAQQRSLEPLQLLHGDLCGPISPPTPSDNRSSSKSIGGKTPYELWNGSPPAVHHLRTFGCLAHVKTTTPNVKKLDDRSKPMIFVGYEPGSKAYRCYDPASRRVHISRDVAFDEEAQWRWDGETASELDFTIEYTTVYHPAVVNAPRADSEQPELPTPSATSTSPCTPAATAGTTATSAEFATPPTIAADDLDADHDDAPLRFRRVDEILGPATPPGLAVREFDDELMMASAEEPASLAEAQQQDCWRQAMLDEMKSIEENGTWLLVDPPPRQRPIGLKWVFKTKKDAAGNITKHKARLVAKGYVQRQGIDYDEVFAPVARLESVRLLLAYAASEGWAVHHMDVKSAFLNGELKEEVYVAQPPGFVVDGKEQKVLRLVKALYGLRQAPRAWYTKLDASLLSLGFHRSASEHAVYMRGANARRLVVGVYVDDLVITGGNHSELDQFKKEMRETFQMSDLGLLRYYLGLEVSQTDEGITLSQGAYAKKILEAAGMVGCNPSQTPMEPRLKLTCLSIT

SEQ ID NO: 192223 - protein, 45 aa, Oryza sativa
  unsure (1)..(45): unsure at all Xaa locations
  Clone ID: PAT_MRT4530_88471C.1.pep
LDPPFKARGDPFLSPGAAPPKXGVRIXTLVLGRFPGGNRWGLTVC

SEQ ID NO: 192224 - protein, 381 aa, Oryza sativa
  Clone ID: PAT_MRT4530_88472C.1.pep
MEAAAATAAQGRRDWSSLPLDMLVLVLEYRLGWSTHPSFASTCRHWRSAVSPFYPAWITPLLLSAADVGVTSARYYSPYYHKCFQIADTLVKVPNARICCSTGRRLTLCSPKSILQADLVLLAGSTIHELPKPTPPFDSSPDFIVYDDRARRMYCVNTTSALRLARAIQQDDGQWGPWELTGFGPQILAAPTSNPVLHGGLLYVLGEDGELAVYDPCNHGDSFKVLDKPGSFGIEHQVDSHLFESDQAGALMAVLVGYSGAPVHVVKLNEETMEWEKMRSLEGHALFTGTYTTMLRKTKLRLMHNKVFLPRLYDWPETIHVDLVIRDSEIAFVPKSYSSSATREITSDINIWSCEFGQHEAREFWGSERVDYSIWVDFSTN

SEQ ID NO: 192225 - protein, 699 aa, Oryza sativa
  Clone ID: PAT_MRT4530_88473C.1.pep
MVRYKSCLPPPPFPRRRCGGPQAVETREWHWSGDSDVRAKARAAAVAEIEAAVEVLPLRPRTRKGHLHLATATHVGILSKMAASGGGFFCTYGGGVEGGRSSTGGEGGGTTRRRGGAAPMNTSQFMDKQILGLAASASTSSGVGVGGGGPELLDLMSPNPQEEGEDRLRRRHSSSNGSADDVLPSYDFQPIRTTAPSAAASASAAPASWGSLDSGSKAASASYNLKSAGVLEPHVLKKVSHEEDRSNFGTVTMADIDRTMKKYSDNLLHALEGVSSRLSQLEGRTHHLENSVDDLKITIGNYNGSTDGKLRQLENMLREVQAGVQILRDKQEIVETQLHLAKLQPPKSDALASDNVGSSQTDSHQHAVAPQQAAIQPQHQALTSSQPLALPALPAPNAPPPPPTLQSQPPSQYPGHLPHSQVPPVPPSAPVPSVPALPRDPYYAPPAQPTETMHQQYQAPPVPQPQAPPAPPQQYQTPPQFPQYSQPPQSGMVNPSTPLPPAAPQQPEEAMSYAPPQSYPPNVRPPSPYMPPPSGPAPPFYGQNQSMYEPPVGRPNSGPPPSYGAGGYGPQGGSGFSESYGYSGSPSHRGNAGMKSSPSPFAPSGPSSGGSGNYGRLPTAQILPQAVPINSSPSGSSGNRVPVDDVVEKVATMGFSREQVRATVRRLTENGQNVDLNVVLDKLMNDSDVQQPQKGWFGR

SEQ ID NO: 192226 - protein, 1494 aa, Oryza sativa
  unsure (1)..(1494): unsure at all Xaa locations
  Clone ID: PAT_MRT4530_88474C.1.pep
MWGLHKSYPPPLFLFVSVGRELAAVAGASSNSIHSLLLPFPAASLLAAAVHQPASGGDPGVALERRQRRAREGQSGGGGGDRGRRGRLAVGRKKTSHENGRVLATLGPATALSTAALDALSAGHDAPASAVLPPCPRTRKGRLRLATATHVGILSKMAAFGGGFFCTCGGSVEGGRSSAGEGGGGTTDGRGQHAEPADNGTVGNKPYTMYLGNLTSGIRARFRAWTRDRALEGVFMPRGRTHSPRRRSASPSVHVSGSGGRASGSGGSDRGLVIHRVVKEAGGAANYPLLTRTNYNDWSLLMKIKLQARCLWGAIDPGGVELHEDRMALDAICSAVPPEMISTLATKASAKEAWDCIRILRVGDDRIRKASAQKVRMEYESLVLRDGETVEDFAMRLTSTVNQLATLGDPEPADKVVEKYLRVARPRFTQLVLSIETLLDISTLSLEEVTGRLKAAEDAMPLPSSSSDNAGKLYLTEEEWLERHNKKEQEAKKNSGSPSNRGKRRGGKGRNGGGAGVGGAKNTNSGAARREDKCRNCGKYGHWAKDCRSKPKRDEQAHVAQDDEPTLLLLTGGVITHACEQEHAPAPSAPTPSSDPIYLEEKKLFAALDDAAKRDPGRWIVDSGASNHMTGCRTAFSDIDTGITGNVRLGDGSVVRIEGRGTVLFSCKNGEHRTLSNTYLIPRLAANIISVGQLDETGFKVEAEDGVMRIWDEQRRLLARIHRNPGRLYVLDVELARPVCLTARIGDEAWKWHARFGHINFTALRKMGREQLVRGLPAVSQVDQLCEACLAGKHRRTPFPQQAQQRSLEPLQLLHGDLCGPISPPTPSGNRYFLLLVDDYSRFMWLSLLPSKDGAAAAIKRIQAAAERKSGKKLRALRTDRGGEFLVHHFADYCAELGVRRETTAPYSPQQNGVVERRNQSVVGTARSMLKAKGLPXTTPNVKKLDDRSKPMIFVGYEPGSKAYRCYDPASRRVHISRDVAFDEEAQWRWDGETASELDFTIEYTTVYHPAVVNAPRADSEQPELPTPSATSTSPCTPAATAGTTATSAEFATPPTIAADDLDADHDDAPLRFRRVDEILGPATPPGLAVREFDDELMMASAEEPASLAEAQQQDCWRQAMLDEMKSIEENGTWLLVDPPPRQRPIGLKWVFKTKKDAAGNITKHKARLVAKGYVQRQGIDYDEVFAPVARLESVRLLLAYAASEGWAVHHMDVKSAFLNGELKEEVYVAQPPGFVVDGKEQKVLRLVKALYGLRQAPRAWYTKLDASLLSLGFHRSASEHAVYMRGANARRLVVGVYVDDLVITGGNHSELDQFKKEMRETFQMSDLGLLRYYLGLEVSQTDEGITLSQGAYAKKILEAAGMVGCNPSQTPMEPRLKLSKLSTSPCVDATDYRKIVGSLRYLVNSRPDLAFSVGYVSRFMEKPTTEHLAAVKRVLRYVAGTINRGCSYRRKKGAVHLVGFSDSDVADDVDKREITTGVIVCLGKQPLTGWFGR

SEQ ID NO: 192227 - protein, 54 aa, Oryza sativa
  unsure (1)..(54): unsure at all Xaa locations
  Clone ID: PAT_MRT4530_88475C.1.pep
FPNPPITRXIHGAVQHIYLQQVSFVLFCQHRIMRNFRCVHSVMLSIILYXIKFI

SEQ ID NO: 192228 - protein, 138 aa, Oryza sativa
  Clone ID: PAT_MRT4530_88476C.1.pep
MAWLEEDEGEGDTRRLYKAMPCCRRRRDGKEPVETYEVWADNLQEELALTRDVVNEFPFVAMDTESSASAPVAGRRSQASSRAADLYGLQVLADGIQRKREMKRGEVGREEEEENGIELPRKRHVNATLDEDRVKLAT

SEQ ID NO: 192229 - protein, 244 aa, Oryza sativa
  Clone ID: PAT_MRT4530_88477C.1.pep
MRYGEVVHFSHPHHRLRLEHADTPFRCDGCREVGIGARFRCPFAGCDHDLHRQCALPLSPPPPPLRHPFYPRCAFVFLARAPGAPGTRYCNACGRDVAGFVYHCRACGFDLHPCCATLPHVLDAAAGAASGGGGRRREAVPAPEGDGGVPPSWNGVGRHKGGVAGGGNVYDGVTVAGSGGYRVPVIRGAAKSSHASRGGSYWGRKGKVKRCCEIAGFAAQVVISAVLGDPTALIAGVIGSLIAR

SEQ ID NO: 192230 - protein, 274 aa, Oryza sativa
  Clone ID: PAT_MRT4530_88478C.1.pep
MRYGEVVHFSHPHHRLRLEHADTPFRCDGCREVGIGARFRCPFAGCDHDLHRQCALPLSPPPPPLRHPFYPRCAFVFLARAPGAPGTRYCNACGRDVAGFVYHCRACGFDLHPCCATLPHVLDAAAGAASGGGGGGARLYLHPKATAACHRCGHRGRSWTYRSSCKSYSLHVACVMDMLVESWNGVGRHKGGVAGGGNVYDGVTVAGSGGYRVPVIRGAAKSSHASRGGSYWGRKGKVKRCCEIAGFAAQVVISAVLGDPTALIAGVIGSLIAR

SEQ ID NO: 192231 - protein, 424 aa, Oryza sativa
  Clone ID: PAT_MRT4530_88479C.1.pep
MAASSSSSSSAGRRLAGNLSLRPGVASIIPGLPDDVAAVILCLLTFPDQSRLRATSRAWRLLLSAATLLPLRRSLRLPRRHLLCLFPTDPSLASPILLDPAAPTAWWSLPPIPCSPQHYGLANFAAVAVGGQIYVLGGSRFDARSYPLDNPSPSAAAYRLDLALSRHRWERLPDMRVPRGSFACAPAPSGGVIVAGGGSRHPTFPSYGSRTSGVELYDAAARAWRVTAAMPRDRAGCVGFVAHGAGDGREDEFWVMGGYDGYTTVGGVVPSDVYCRDAVALGLWSGKWREIGDMWEEWERERLGPVAVISAEDGRVTEVFMLDGHDIFRYNFSSNSWSKEATLRRKIPSTQSCGFIAMNGELYVLTSAKLPVETSSPWKQSKKRLALEFQVYNPAAKMWRVLTTHPPVNVPIDFRTAALCTVEL

SEQ ID NO: 192232 - protein, 1234 aa, Oryza sativa
  unsure (1)..(1234): unsure at all Xaa locations
  Clone ID: PAT_MRT4530_8847C.1.pep
DPPAGAENGTSTTSAPEKDPSAASSCPSDGSTSRQEQLLRRRGPGHKTKGHDLQTCKVFLDVEAEIRACKERGIQHXASPTRDVYCPIHKAKTHDLSSCKVLLSAMKTSLPKVPQSRISFRDADKEQGAATTSDRFVGVIDIDPHETSVLHLLEDXASSSTSTLRDVYAIDVTGTSRGGNTETEEQLATPAQHIRAINAIPRETPYDPVLNADLDQWTERLRESVANISNAFEEAAARAPSKQPLTRGADEELPDQRVSPHQSTPPPRGASDLRDHLNMRREARHTQDNENRSRHRISSQHHENIERRGHPSGNXDHDGRHDRREQRLPGDASRGKRNNDDRGRRRDNDDWXRRGSREPGRNPXNRTPEPSDSSSSSSSDRHPRRVYDRRQPTAPGGGCVAFTRTVRDVRWPKKFLPGAIEKYDGSTDPEEFLQVYSTILYAAGADNNALANYLPAALKGSARSWLVHLPPYSISSWADLWQQFVANFQGTYKRHTIEDDLNALTQNSGESLRDYIRRFNECRNTIPEITDASVIRAFKSGVRDRYTTQELATRRITTARKLFEIVXKDTPESSKKKSRKNGKRKAQAEILAAKYIDPPKHPDPQGDDTRKTWCPIHKSDKHSLETCLVFKKALARQLALDKCKRVRVVEKAAEAATQDSDLAYPDSDLHVSHIFGGSTXRYPIMVEPTIRNIKVARVLIDGGSSINLLFASTLDAMGIPRSELTPTDQPFHGITPESSSKLLGKIMLPVTFGQANNFRTEQITFDXAEFDATYNAIIGRTALAKFXPKGTITIQGNAKLAVQCDKRXLDMVEQTPNPPATAEPPKKVSKPXKTPKPDSAIKIVPLFGASLDDKXELTVITFLRDNVDVFALXPSDMPGVPMEVIEHKLMVRPDAKPVKQKLRRFTPDRKQAIXEELDKLLKAGFIREVLHPEWLANPVMVHKANGKWRMCVDFTDLSKACPKDHFPLPRIDQLVDSTAGCELLSFLDAYSGYHQISMAKEDEEKIAFIMPFGVFCYVMMPFGLXTAGNTFQRTVQGALNDQLGHNVKAYVNGIVVKTKKNNSLIDDLRETFDNLQRYRLMLNPEKCTFRVPSGKLLGFLVSGRGIEANPXKIKAIENMKSPTRLXEVQKLTGCMAALSRFVARMGERGQPFFAVLKKQDKFVCTQEAEDAFIALKCYLSNPPVLVAPQPNEELFLYIAATPYSVSTVIVVEREKVQRQVYYVSEALHDTKARR

SEQ ID NO: 192233 - protein, 64 aa, Oryza sativa
  unsure (1)..(64): unsure at all Xaa locations
  Clone ID: PAT_MRT4530_88480C.1.pep
PSVSFSLVSRSVGRSSGCAWATADTCSSMNPEFDYFLKLFLIGDSGVGKXCALLLRLADYSYSG

SEQ ID NO: 192234 - protein, 431 aa, Oryza sativa
  Clone ID: PAT_MRT4530_88481C.1.pep
MGRRIFHCLESHSPRHAVQCTGEDQEKYYDELVSYLEEELGLKMHKARRFDLDCTNHLVKHHPMLPDRNLSAQAQIDSDTINESPQALPTNISSQIVSCSVDEAPQALPTSSSPISNNTEGLSLQALPTSSESAAGVTIDDLHSFCSQEFITDPVNRLSDRIDSEYVLLVNPAMPHLLGNSSDATDLDCTNQLVENHPKLPDQNLSAQAQIDGDTINEAPQALPTSVGSQIGGCSVDETLQALPASSSLISSNTENLSPQALPTSSESAAGVTIDDLRSLCSQEFFTDPVVVHAFNSQDPHLLGEGTHWSLLVFDRNLGGRPCLAHHDSSPGDANLRAARRLAASLLPYLPPETKCTKAPTPKQNNGTECALYMIKCAEVICGWWRNHAAGGSESHWLGVVARGVTMDSVDNLRAQLIHDIGQLLNGSSSS

SEQ ID NO: 192235 - protein, 107 aa, Oryza sativa
  unsure (1)..(107): unsure at all Xaa locations
  Clone ID: PAT_MRT4530_88482C.1.pep
GGGPPRGDREGGPTQAPPKAXEPEGEGPERRHRRGEPAPQGRAGRRWKRTGPRXKTPQEGMGGKPPPPVSQMAGPGLRGPSLQGKLAPPPPGGPRGPPKKSRFFGFG

SEQ ID NO: 192236 - protein, 343 aa, Oryza sativa
  unsure (1)..(343): unsure at all Xaa locations
  Clone ID: PAT_MRT4530_88483C.1.pep
DPSASSASRRPTRPRPPPCSQRGGARSGAPPAPSTSPCASPSPTTGAATATASATTPSPPAMTPSSAPRRRRSPPPPPQPEAEAATSRGSPWTFGRRPWMSSASAPARRPSTTTTTTARSGVSSGCSTWTSATSRRRPSAASSTPRRRSPPCTSTPSPSTGWSTAATASASRRPPPRSCWRGAGRTRSPTATGEAAAHWGPAPSRSTRRGSDRSGTRATRGASPSPRRRTWRVPTSTSSTTCTPPPPRAATSSGASSAASAASGPSSSRXATSSTSPSPAGRRAPSSSSRSPTSSTSSWKGTTNPRARRPPRWPSATCSGAAPPRATSRSTSPRRRRASATPP

SEQ ID NO: 192237 - protein, 127 aa, Oryza sativa
  Clone ID: PAT_MRT4530_88484C.1.pep
MPHPSKTKRQSSCSSPSFSLPPSSFLPKWQGSQALFPPLFAFFPDHNRCHHLPLLDRKRRASRASLTTNLLAPATASSLPRCVNGRVSLGVGLVKLGAALPWPRARRAQSRAVVGPQLIDHPHQHRP

SEQ ID NO: 192238 - protein, 148 aa, Oryza sativa
  Clone ID: PAT_MRT4530_88485C.1.pep
QSLPSGMLFKAGRHPLQLIISCSLASLCISETMSSRETPSLCSIFFSCCLLITSFTRTTPPAVSAAAAAAAAAAAFAMSAAGSSESETAASRCSLRISPPSIPMILISLSLSSWITRQLPMAMMRLKSRRRFLRVVNFLRRFRRKMRA

SEQ ID NO: 192239 - protein, 230 aa, Oryza sativa
  unsure (1)..(230): unsure at all Xaa locations
  Clone ID: PAT_MRT4530_88486C.1.pep
SXXXWQGNFPGXRKXPXVFLVXPGGRXKKXRQGELLXXXLAAKXXKRLFPPXLGPVPQLGXENXEXGFPPGXXXKXGGTXLPXDSVLXLYLPXPEXGFAPXXXXPKPETWKXKPLAPFWPQTGGTPVXKKALRFXTLGISTIYPPHWFSPLKPLGPLWKXKTKETGSPWKRKTSQTKGXFGLVPPQGETLNWGPWGKKLPFIPCLKKPWGQANRGPPXRIPLALAFGAWP

SEQ ID NO: 192240 - protein, 170 aa, Oryza sativa
  Clone ID: PAT_MRT4530_88487C.1.pep
MKELKWNGQRMSWDLNWRVARRFRVKVPGTSGQRLGKFSLYLGARKFRPEHTGDLSASSGRWGERRKKRTPSNPSLSSSSSSSAAAGEEVEGEVGYRNPFSPAADYTDAPLQPSLRPAPAHSSFLSRRLPHMHHSSPPYGRRPRTVSFPVAASEMRRGEIGGRGGRRGGD

SEQ ID NO: 192241 - protein, 109 aa, Oryza sativa
  Clone ID: PAT_MRT4530_88488C.1.pep
VKAYVYGKIAQVVSKNCEFRVVATKTPFAFQPKSSVLFLEYQRQFTMLVKSRLQFQITMIKLERSIFLFPNFAPEKKGPVGALEGDMGPVDPLAGYREPMGSAGGDNGF

SEQ ID NO: 192242 - protein, 266 aa, Oryza sativa
  Clone ID: PAT_MRT4530_88489C.1.pep
PPPAAMSNPKGSKMLQFVNYRMRVTIQDGRQLVGKFMAFDRHMNLVLGDCEEFRKLPPSKSSKTTGEREERRTLGLLLLRGEEVVSMTVEGPPPPDESRAKAAGAGAAMAGPGVGRAAGRGVPAGQMLQAQPGLAGPVRGVGGPAPGMMQPQISRPPMPNLSAPPVAYPQVVRPPPGQMPPPMRPPQMPIPFQRPPGVPPAFPGGPPPPPGPFMRGPPPMGPPQVRPGMPGGPPPGMRPGMPPPPFRPGMPPPPPGPQQPGQNPPQ

SEQ ID NO: 192243 - protein, 160 aa, Oryza sativa
  Clone ID: PAT_MRT4530_8848C.1.pep
MHAVARHLWGHVLSSAPTNEHDCSVTGLPMNSGGATEARSLYVPPPLEPEETLVALKLSPGQKASTFPDTHAAGRHHPLHWDSAPTQLELDLNPLEEVGILQAAVGSNFSFSNSKEAVRGRGLATYTLSRRVPASGDAEDFVPDCGSHLGMVGKEQEERG

SEQ ID NO: 192244 - protein, 100 aa, Oryza sativa
  unsure (1)..(100): unsure at all Xaa locations
  Clone ID: PAT_MRT4530_88490C.1.pep
QIEYLLSYKRVPCLEYNKVGFVYRENHRSRGYYDGMYWTMXNLPMFGYTDATHVLKELEEANKAYPDAFDRIIRFHNVRQGLLMRFIGYMPPGCDESGGN

SEQ ID NO: 192245 - protein, 105 aa, Oryza sativa
  unsure (1)..(105): unsure at all Xaa locations
  Clone ID: PAT_MRT4530_88491C.1.pep
SNHHRTVGRLRAVAPPPVAPSPVDEPAAASPPRARRLPPPTPGEPTAPAASFPRSGGGEGLSPPASPWPPPLXSPPPAAPSSSPPLPPLLEPAADNGSXPPRPPL

SEQ ID NO: 192246 - protein, 35 aa, Oryza sativa
  Clone ID: PAT_MRT4530_88492C.1.pep
THLIYFFPNKAEVLFTRFLCCAKLVGPGLDSVLLP

SEQ ID NO: 192247 - protein, 173 aa, Oryza sativa
  unsure (1)..(173): unsure at all Xaa locations
  Clone ID: PAT_MRT4530_88493C.1.pep
MGHTEGGTNSDPTLKKKNHDPFFFRPCGFLPPPSEFLTLLLDFYDLHLLHLNPNSIAFLGIFTHLREAYLGVQPFLDLFRYFYKVRFMEQSRINSSPLVFPYPADSXQSDKSPGFFSPPMIESLRLLIAKIKDLWDRGLAGHKIVGNFVRRWNQPHQAHAHPAYEYTGNEDMT

SEQ ID NO: 192248 - protein, 58 aa, Oryza sativa
  Clone ID: PAT_MRT4530_88494C.1.pep
FFFFFFFFFFFFFFFFFFFFFATNLSNSQCEVSWGRGYSSNLIAAIAIPHLPYEIIMK

SEQ ID NO: 192249 - protein, 91 aa, Oryza sativa
  unsure (1)..(91): unsure at all Xaa locations
  Clone ID: PAT_MRT4530_88495C.1.pep
PSWLTGHRLSRNPKKNGLRPHECHXGNFRSRGGFEFCTSEEDEPXERCFANALRGQQTFYWLFDSDDFCRENXRLSYSESSRRWIYETYDE

SEQ ID NO: 192250 - protein, 39 aa, Oryza sativa
  Clone ID: PAT_MRT4530_88496C.1.pep
MAQDMQEDRRKLSSRGGHIPNFGKKNCVMSLEHARVFLS

SEQ ID NO: 192251 - protein, 297 aa, Oryza sativa
  Clone ID: PAT_MRT4530_88497C.1.pep
MDRQLQLGPIHRCLLSFSLLDPFFVPGSTSQKKAEHDYAPLVSLSSVGCRPLVIILGKNAIKMKRTIIVKVDLECERCYAKIDRVLTRIRDKGEFVIDDIEFDVKHNKVIVSGPFDPDKLADKLCCKACKIIKEIEIVDLPPPPPPPAPEPEPEPPKKEEPQPPPPKEEEKPEPPPAVIIVEPPAPAPEPEPEPPKKEPPPPPPPKQEPCPPPPKVVEVPYPWPYPYPFPSWPSDCCCHHGHGGCHCCSCGKAPEPAPAPAPPPPQYIPCYPPQQPYPCGGYRIVCEEDPSYACAIM

SEQ ID NO: 192252 - protein, 211 aa, Oryza sativa
  Clone ID: PAT_MRT4530_88498C.1.pep
PLTKQSWKKRRSTPGRRRRVRHLLRLDHLRDDPLRARARLGVVIRRQLVAPPTAAPAASRPPTAAPAPTAAPAASRPPTAAPATAAPATIALATAAPATVAPAASRPPKAAPATIALATAAPATAAPATIALATVAPATAAPATAAPAASRPATAAPADSRPPTAAPRAPRRPRRRQTRRGGGGRTDAWLLLLLLGFSAGKSIVSLPSHRV

SEQ ID NO: 192253 - protein, 83 aa, Oryza sativa
  Clone ID: PAT_MRT4530_88499C.1.pep
MADRVHPMPAPPPAYYSPPLEHAAAATETTPLHPNFRGARATYPGTYIMHIPKDQVLRVPTPDQPRRYKKLAARPDPDDAPAR

SEQ ID NO: 192254 - protein, 402 aa, Oryza sativa
  unsure (1)..(402): unsure at all Xaa locations
  Clone ID: PAT_MRT4530_8849C.1.pep
MAAYQTGPVSEPPMLNTEIITQKVTGFNTETTTKEKPIGYLDVFVHQARDIHNICIYHKQDVYAKLCLTSDPDVSCSTKVINGGGRNPVFDDGLRLDVRTVDASLKCEIWMLSRVRNYLEDQLLGFALVPLADIVMADGKLVQEFSMTSTDLLHTPAGFVQLSLSYVGCSPDVIPIPAPNKSALVVNGSGNDSSVPCELEKIEFPDLNVVNENQIMVSKYFEMETLSYEDSVKVDNPKLVQSDAAVPGTELFNKNLDEYREGSPQSCVSTTXTPQPHLSLHIQFLSHQTPSLQHLPLXSQREKSQDVTDGEADSSDVPLKGEVVKPVISINLNPGESVVQEDIVNMYMKSMQQFTESLAKMKLPLDVENSSPSTENNTDSITAEKPSPSKGSRVFYGSRAFF

SEQ ID NO: 192255 - protein, 157 aa, Oryza sativa
  unsure (1)..(157): unsure at all Xaa locations
  Clone ID: PAT_MRT4530_884C.1.pep
MAPWRLQRGGVGGVRRRRCTAAAAAAPEGDGDDDGVAPGGGTEQRRRRFGKAAAPXWRRGLRDLGRPIGLVAWPAWARSAAAWAGDAERRRRPGRXGGTWARGLASPGVLRSAWRRAPSPFPPFHSPSRPPPPPHPAAATSRSTTRRRFPRPGSYSA

SEQ ID NO: 192256 - protein, 308 aa, Oryza sativa
  Clone ID: PAT_MRT4530_88500C.1.pep
MAIASSSSSLLLLMFLAFLDHGAAVANLSSIEAAVRDRAFQLFRRTSEIVAVDVPAVLAGAGVEASATRVRSSALWADGVNATVPGLAVAVPPRVVPAPFARRVAIVFVRFLGDASSWLFDAPPGYALAAPVVALLAFDASGPNGGVALRALGAPVRVEFRDISPASGFNATAARCLTFSSGGGKAVAAHAVAMEPGPSCVVSGTATGHYGVAVRVETPPPPPPPRPPPVRERWWVWKVGATAGGVAAASFLAVTVVGAVRWRRRRRREEMERRAMCGEELGRMAVRGSRMPSAKMVRTRPELVEELS

SEQ ID NO: 192257 - protein, 41 aa, Oryza sativa
  Clone ID: PAT_MRT4530_88501C.1.pep
DHASCVTLMNFCLNSPPVLRLILFQVEATKTGAELLVMNLC

SEQ ID NO: 192258 - protein, 57 aa, Oryza sativa
  Clone ID: PAT_MRT4530_88502C.1.pep
MVEARGSHTTTSNDAGDDNRSDSSAGAMLGLQWRCPCCGSDAFIGCDVIALPLQRPQ

SEQ ID NO: 192259 - protein, 73 aa, Oryza sativa
  Clone ID: PAT_MRT4530_88503C.1.pep
FFFFFFSPQTSDTPIGVSQTHTHIGASTWWGVWRHHSSHATLGSFGPPRSSQQPSLSLHLWPHTITHLSISQG

SEQ ID NO: 192260 - protein, 110 aa, Oryza sativa
  Clone ID: PAT_MRT4530_88504C.1.pep
MARGGPSGDGANSESTLASTSSASASPMPPSPLLISSAALSPSSSGCRSVEWGDTALTSTMTSSLAAARHLVLASERRRGGANGGHQQVEGDAANSPKARTTADGNGRRR

SEQ ID NO: 192261 - protein, 66 aa, Oryza sativa
  Clone ID: PAT_MRT4530_88505C.1.pep
LRKKSSLLALIHLDLFTIYSFAKRKGGHRGGRPEIGRLAMVGRFLSPVIWREKTKRLGQALRSPRA

SEQ ID NO: 192262 - protein, 74 aa, Oryza sativa
  Clone ID: PAT_MRT4530_88506C.1.pep
KLHSDSPLVQDCNLQDTCLSVIPLQQMSPHDHLLPPQIRLPQRPHAPLRRHCFPSPWIGSDRIESAARGRRSRR

SEQ ID NO: 192263 - protein, 76 aa, Oryza sativa
  Clone ID: PAT_MRT4530_88507C.1.pep
GLPMCDYEGFFAATSQSQESRSLRRLLPDLHCLQTCLVYDRHHTLALCPIRVSSPQKFASGLSYALPYETLSETAD

SEQ ID NO: 192264 - protein, 612 aa, Oryza sativa
  unsure (1)..(612): unsure at all Xaa locations
  Clone ID: PAT_MRT4530_88508C.1.pep
MDLEAKFDLLLKTISDNEKKRVEGEERTRAEYLELRKTVESRIPAVEKKAETLGESVQSLNAKVDHLEGNLLRQVKSEAFGSTAAGGAPGNSKQDQAADKSGATATPMFGMKDNFSIPHINFGSEPETPSPGSGSASFNLSNSIPPMICPQFSGDNPQMWKANCEQYFDVYGIQSVYWVKIATLNFCGNAAFWLQSVRNQICGISWTGLCELVCTRFSKDRQQALIRQWIHIRQEGFVSEYVEKFDSLMHQLLAYDNSLLPVYFVTKFVEGLRSDIRVVVLVQRPQDLDSACAVALLQEEALEGIKFNQYRKPDSSIPVRSFQKTPALAHTATPQKQFTPQHTEDKRGTESARAREEKLAALKSYRRSKGLCFTCGERWSRDHKCGSAVQLHVVQELLDALQDETPDGDPETPSDSNSDLMAISQQALWGTESSKSIRLRGLVQGSELLMLLXGCRWWMQGLNFISNFRLLHLGSYDIILGHXPQTTHCSVISTEQYLGMVKQGSIMHIVQLSASDPVTKEPLPSDVQELINSFQDVFSEPTGLPPKRYCDHSIPLILGAAPVSQRPYRFNPALKNEIEKQVAEMLQSGVIQPSSSPFSSPALLVKKKDGTW

SEQ ID NO: 192265 - protein, 185 aa, Oryza sativa
  Clone ID: PAT_MRT4530_88509C.1.pep
MAGVSCFYHPEHLVTEHHYGEGSGSGSGNPCAACERVVTGDGYRCEHGECDFHVHRSCLALPASFALHERHEHELTLTRLTGSRWCNVCDVISHAGCRMYACAPCNFSAHPRCTPVLDGAHQQPQPPQQQEGEEKRSVGVRAAKVALKIGVAVGLTAVDVGTTGGLATVGSLVIAPIVRRAIDKI

SEQ ID NO: 192266 - protein, 919 aa, Oryza sativa
  Clone ID: PAT_MRT4530_8850C.1.pep
MPISTGPAIIGSKNGVVTTPVDNPMSKDPPAEAENGTSTTPEPEKDPKAAKSCPFRKKYEPTRTTFGATRTWCLIHKTSKHTLQACSVFLNVRAEIRACKERGIQHTSPTRDVYYPIHKAKTHDLSSCKVLLSAMKTSPPKVQQSRISPGNTDKEQGAATTTDRFVGVIDIDPHEPSVLHLLEDQASSSTSTPHDVYAIDGTSTSGGGTYKRHAIEDDLHALTQNLGESLRDYIRRFNECRNTILEITDASVIHAFKSGVRDRYTTKELATRWITTTRKLFEIVDRCAHADDALRRKNDKPKIGDEKKPTKDAPKSSRKKSRRSGKWKAQAEVLAAEYVDPPKHPNPQGDDTKKIWCPIHKTDKHSMETCLVFKKALTKQLALEKGKRVRVVEKAAEAATQVSDSAYPDSDLHVSHIFRGSTAYSSKRENKKVEHEVCSTWQGAMSKMKWSEQKIEFSKTVHPKTTVTPGRYPIVVEPTIRNIKGNAKLEVQCDKRSLDMVEHIPNTPTTSELPKKPSDMLGVPREVIEHKLMVRPDAKPVKQKLRRFALERKQAIREELDKLLKAGFIREVLHPEWLEWLANPVMRTVQGALNDQLGHNVEAYIDEIVVKTKTSDPLIDDLRETFNNLRRYRLMLNLEKCTFGVPSGKLLGFFVSGIGIEASPKKIKAIENMKSPTRLKEVHKLTGCLRHFAAIKPQVLADFVADWTMPENRSDSQTDSETWTMAFDGALNNQGAGAGFILTSPSGEQFKHAIHLNFRATNNIAEYEGLLARIRAAAALGVKRLIDYCIGLGVKICFASVSHPQSNGQVERANDIVLQGIKTHVYDRLMSHDKKWDEELLSALWAVRTTPTTSNKETPFFLVYGSEAMLPTELRHQSTRVQKYSEEEQEDQHSDDVNLLEEHRERVAVRAVGYQQTLR

SEQ ID NO: 192267 - protein, 79 aa, Oryza sativa
  Clone ID: PAT_MRT4530_88510C.1.pep
GQYMAIKTNAKALVGPLAGKNSVFGALPVEVVANGYGFSREQARSLKTNRGEGPGAFTPRFHHQYSPGLWNGSESGPSG

SEQ ID NO: 192268 - protein, 182 aa, Oryza sativa
  unsure (1)..(182): unsure at all Xaa locations
  Clone ID: PAT_MRT4530_88511C.1.pep
FFFFFDTDRLMDGIFLATDNYSVPLIYVYSLCKXTKPIQXTIAVHHNHNAQVPNPLLSFARSITVSPSNHTQLGAESHAPCGPHLILRCPFQNTHSIKQLGPGGLVASNPSPTTPXYSSQAVISITRXKHPNLTNIHTTLHCHTTQWTTKGSITPPHISFVQCPHTRAHITLSRFNHIPHCG

SEQ ID NO: 192269 - protein, 85 aa, Oryza sativa
  Clone ID: PAT_MRT4530_88512C.1.pep
HYKFYNKPKRVFAQLWQKDSRLKMYKDESLLDRWSMNFRYLPRLEFRRNTPSFRASPQEDPLVLCTSLLGQQCHFLALSTFITFP

SEQ ID NO: 192270 - protein, 870 aa, Oryza sativa
  Clone ID: PAT_MRT4530_88513C.1.pep
MEERVQWYQYYSVVRSNWLKTMSWYEPTVLDCNIRRRSLYCCFFSLFLAPYSPVRIGSGRLKAKRKCFAFSWSVSQKPQNDFVKEEIQHLQSDLWQLQTTLPKMRNLVEILEWQIYKKPAAELLPHIKDALLDAEDIIDEFNYYELKAKIEGRIEECLTSSGCQEFYMSVIRGSFNRVKEIQEKLDHLHRQSMDLGLHCAAQRFDKIVRPETSSFLNSQIFGRQEEEKMVLELLGVQLQANAGYKRKRSSRVEVLPIVGLGGVGKTTLAQQICKNQMVKAHFDMILWACVSDDFNAKRLTKEVIQSSKKETSFDNLDSLQSILKDTVELKRFLLVLDDIWDDVMADGGQDWQRFCAPLSNALQGSMILITTRSQKVADKSELWKLEQDRTDILPALRLSYMYLPPHLKRCFSFCAVYPKDYRFEKDTLVDIWLAEGFVEHASSFPTVTVVQQYFEELLSRSFFQKVTHGKYVIHDLMHDMAQLVSQDECFIIRNANDLRTIPSNVRHLSIFTKRYIGCHDLMGLCRSLPCDFGNLISLRKFRAKNFSYLPGEDSRMQFLRGERIKVLKYVNQVQGSLLVNLPGLKSKKNIGLTVLKKENNLYSLHISQFAEDARYEQEQLEVCENLHPHPDLQHLEVTGYQGENFCPSWFLPDNLPNMISLIFEECHNAKKISLHRLPCTGFQYLINLYIIECTNLSSIEQFLQPCHIPAIKMISIKGCQELSLISAERFGGFRFLEALVIRDCPRISWENGLALPPTLTSLSLVRCGDISKWIPDCLLNLSSLVRLQLVGLSGTMFIPGSIWRNNLPLLDYLEICNFQELRFTGVPEAIEEINNVLIDKCPMLKELKQPFSRGDVTFLWGIPTSKWYLS

SEQ ID NO: 192271 - protein, 398 aa, Oryza sativa
  Clone ID: PAT_MRT4530_88514C.1.pep
MAAAVVLLRRLRGVTAAPRRAAAALPLTTSVRGVSDSTEPLTIETSVPYKSHIVDPPPREVATTARELATFFRDMSAMRRAEIAADSLYKAKLIRGFCHLYDGQEAVAVGMEAATTRADAIITAYRDHCAYLARGGDLAALFAELMGRRGGCSRGKGGSMHLYKKDANFYGGHGIVGAQVPLGCGLAFAQRYRKEAAVTFDLYGDGAANQGQLFEALNMAALWKLPVVLVCENNHYGMGTAEWRASKSPAYYKRGDYVPGLKVDGMDVLAVKQACKFAKQHALENGPIILEMDTYRYHGHSMSDPGSTYRTRDEIAGIRQERDPIERVRKLLLAHDFATTQELKDMEKEIRKQVDTAIAKAKESPMPDPSELFTNVYVNDCGLESFGVDRKVVRTVLP

SEQ ID NO: 192272 - protein, 403 aa, Oryza sativa
  Clone ID: PAT_MRT4530_88515C.1.pep
REPVARTWERREPATRGSGAVVVARHGQRRRDAAAHGRRRGGSRLPGRGRGGSRRRADLEWREQSAASRAPPCPAATDTLKAGQVLSAGDKLVSRNGKFALGFFNPSANISKSSDNISSSWYIGIWFNKIPVFTVVWVANRERSIAEPDFKLTQLKISQDGNLAIVNHANESIIWSTRIVNRTEASMNTSVLLHDSGNLVIQSTSNAVLWQSFDYPTDVALPNAKIGWNKVTGLNRVGVSKKSLIDMGTGSYSVQLYTNGTRRVTLEHRNPSIEYWYWSPDESGMKIPALKQLLYMNPQTRGLVTPAYVNSSEEEYYSYNSSDESSSTFLLLDINGQIKFNVWSQDKHSWQSLYTQPVDPCRSYDTCGPFTICNGNSQPFCDSGADEIVNVHADDQPRSSAHV

SEQ ID NO: 192273 - protein, 947 aa, Oryza sativa
  Clone ID: PAT_MRT4530_88516C.1.pep
MRRRADVVVKGASGADVGEEGAGNARIWSRRRRSSWPATEGCGSARTSSWREPTAWTWERSEPAARGSGAEGAVGGVAVVVIVEEGGRRWRGGMRRRTDVVVEGAGCADVEEEGAGGARIWSGGSSGPHKASLKWSDFRRRRLTVNFMPAPPCPAATDTLKAGQVLSAGDKLVSRNGKFALGFFNPSANISKSSDNISSSWYIGIWFNKIPVFTVVWVANRERSIAEPDFKLTQLKISQDGNLAIVNHANESIIWSTRIVNRTEASMNTSVLLHDSGNLVIQSTSNAVLWQSFDYPTDVALPNAKIGWNKVTGLNRVGVSKKSLIDMGTGSYSVQLYTNGTRRVTLEHRNPSIEYWYWSPDESGMKIPALKQLLYMNPQTRGLVTPAYVNSSEEEYYSYNSSDESSSTFLLLDINGQIKFNVWSQDKHSWQSLYTQPVDPCRSYDTCGPFTICNGNSQPFCDCMENFTRKSPRDWDLGDRTGGCSRNSPLDCTRNTSSTDIFHPLIHVTLPRNPQTIQEATTQSECAQACLSSCSCTAYSYQNTSTCSIWHDELFSVNQDDGIEIHSQDVLYLRLAAKDLQSLRKNKRKPIVAVVTTISIIILVLIIMLMVLVMVWRNRFKWCGVPLHRSQGGSGIIAFRYSDLDHATKNFSEKLGEGGFGSVFKGVLRDLTVVAVKRLDGARQGEKQFRAEVSSIGLIQHINLVKLIGFCCQGDKRLLVYEHMLNGSLDTHLFQSNATILTWSTRYQIAIGVARGLSYLHQSCHECIIHCDIKPQNILLDESFTPKIADFGMAVFVGRDFSRVLTTFRGTVGYLAPEWISGVAITPKVDVYSYGMVLLEIISGMRSLPNVHSSNSHHAAYFPVQAISKLHEGDVQSLVDPRLSGDFNLEEAERVCKVACWCIQDNEFDRPTMGEVVLVLEGLQEFDMPPMPRLLAAITRSSNVAEM

SEQ ID NO: 192274 - protein, 93 aa, Oryza sativa
  unsure (1)..(93): unsure at all Xaa locations
  Clone ID: PAT_MRT4530_88517C.1.pep
MLEKLWDDVVAGPRPETGLXXLRXAAXTRPLXSTXMAXAXRAEWRSXGRXRCRRPRXDAGDAVVFVPDDXDDYNAAGXQXVXXRVPXGSNLAS

SEQ ID NO: 192275 - protein, 145 aa, Oryza sativa
  Clone ID: PAT_MRT4530_88518C.1.pep
MDRIDLNRFIIPRSNNVWSTYCALYVRADSFHILQRIARYDQLRNKRITPRNMDCMISINYMCIRHQRPYFAQLAEEEEEVAHLHVEGANWSGGGTYNSSAAPASSTAAHRVQRIGKEGGRWAAKGQGSEEVATLGYRDANEQES

SEQ ID NO: 192276 - protein, 49 aa, Oryza sativa
  Clone ID: PAT_MRT4530_88519C.1.pep
LICQRLDHPMIMNVIFTFFLNLVDASSFSQNSRWGEKKKQPNPSEGGQA

SEQ ID NO: 192277 - protein, 2026 aa, Oryza sativa
  unsure (1)..(2026): unsure at all Xaa locations
  Clone ID: PAT_MRT4530_8851C.1.pep
RSTDPWYKRYPLGKTXGIESHRQHIHHSLRNPRSNVPQYPLYPVYGFPPSTVARHVGGLGAQGSTSMTSSLLDDSVNPAINQGSSNSTMLVWTQVGEIVFPVYTTMPILTGPAMAGSESDVVTTPTDSMSKDPPVKAENGTSTTSEPEKDPNVAQSCPSDKKYEPTRTTSEATRSWCPIHKTRKHTLQACWDFLDVQAEIRACRERGNQXTSLTRDVYCPIHKTKNHDLSSCKVLLSVMRTSPPKVXQSQISPRDTDKEREAAAISDRFVGVLDIDPHEPSVLHLLEDQASSSTSTPCDVYTVDGTSTSRDGNTEAEYQVATPAQHIRTINAILRETPYDPVLNADLDQWTERLRESVANLSNAFEEAAARAXQSNRRLAALIGNXPAQRTPPRQATLLPRGASDLRDHLKGRREARRAQGNESRSQRRVSSRHRENGDNRHNRREHDNREQRVPGDTGRGRRRNDDDDGDQRQNNNGGRRQGSREPERTPEPSXTSDRHPRRTHDRRQPTAPGDGCRAFSRALRDVRLPERFRPGAIEKDDRSTDPEEFLLVYSTVXYAAGADDNAVANYLPEALKGSARTWLVHLLPYSFSSWADLWQQFVANFQGTYNCHAIEDDLHALTQNPGESLRDYIWRFNECRNTIPEITDASVIRAFKSGVRDRYTTQELATRRITTARKLFKIVDRCAHADDALRRKNDKPKIGGENKLAKDAPESSKKKSSKSGKRKARTEVLAAEYADPPKHSDPQGNDTKKIWCPIHKSDKHYLETCFVFKKALVKQLALKKGKRVRVVEKVAEATTQDSDSTYPDSDLHVSHMFXVPRRRYPIVVEPTIRNIKFARVLIDGGSSINLHFASTLDAMGIPRSELTPTDQPFHGITPQSSSKPLGKITLPMTFSQANNFRTEQITFDVAEFDTAYNAIIGRIALAKFMAASHYAYQILKMPGPKGTITIXGNAKLAVQSDKRSLDMVEHTPNPPATAEPPKKVSKTNKTPKPDGAIKIVPLSSANLDKTVLALIIFLRDNADMFAWQPSDMSGVPREVIEHKLMVRTDAKPVKQKLRRFAPDRKQAIREELDKLLKVGFIREALHPEWLANPIMVRKANGKWRMCVDFTDLNKACPKHHFPLPRIDQLVDSTAGCELLSFLDAYSGXHQISMAKEDKEKTTFITPFGVFCYVKMPFGLITAGNTFQRTVQGNNVEAYVDDIVVKTKTSDSLIDDLRETFDNLRRYRLMLNLEKCTFGVPSGKLLGFLVSGRGVEANPEKIKAIENMKSPTRLKEVQKLTGCMAALSRFVARMGERGQPFFALLKKQDXEAEDVFIALKSYLSNPPVLVAPQPNEELFRYIAATPYSVSTVIVVEREKVQRPVYYVSEALYDAKTRYPHIQKLFYTVIMISRKLRHYFQAHRVTVVSSFPLGEVMINKDIIGRITKWVVELSQFDVHFVPRTTFRSQVLADFVADWTMPDNRSESQTDNEIWTMAFDGALNSQGVGAGFILTSPSGDQFKHAIHLNFRATNNTAEYEELLAGIRAAAALGVKXLIVKGDSELVANRVHKEYKCSSPELSKYLAEVRKLEKRFDGIEIRHIYRKDNIEPDDLAWRASRREPLKPGTFLDVLTKXANNEDSTVVPDIDSGATKAVHVVADIETTDDXRTPLIRFLNSDELPKDDAEADKITRQAKIYCMIGNDLYKKAPNGVLLKCISFDNGKHLLLDIHEGICKSHAAGRTLVGKAFRQGFFWPTTLKDACDMXTHKATSASAPDYPSYLAVLVLGARHTRTIPMRTGRLXFLFVAIDKFTKWIEAMPTGEIKADNAIKFIKGIFCRYGLPHRIIIDNGSQFISADFQDYFIKLGVKICLASVSHLQSNGXVERTNGIVIQGIKTLLWAVRTTPTTSNKERPFFLAYGSEAMLPTELRHQSTRVQKYSDENQEEQXSDDGNLLKEHRERVTVRAASYQQALRRYHEKRIRARTLSIGDYILRRVQSQARRNKLSPKWEGPYTITQVLRPGAFKIADGDGRELANSXNIDQLHNFYV

SEQ ID NO: 192278 - protein, 55 aa, Oryza sativa
  Clone ID: PAT_MRT4530_88520C.1.pep
QFKFCPSLIALLMLLNFYFVLSIISSCSLIFTFAIPNCSLMPPIVFYIRHCSFHL

SEQ ID NO: 192279 - protein, 290 aa, Oryza sativa
  Clone ID: PAT_MRT4530_88521C.1.pep
MAEMVVIRPLVSLLKEKVSSYLVEQYKVMKGMEEQPLKNVSYEVIDVFDEFKYEALRRDAKKKGHYNKLGMDVISLFPSRNPIVFRYRMSKKLSKVVRTMDVLVRQMNDFGFTQRQQVTPSMQWRQTDSIMIDSDKDIASRSRNEEKEKIIKILVEQEGNGGLMVLPIVGMGDDFDIGNIARNICHSQEKNHEKALQDLQKELSGQRYLIVLDDVWNRDADKWGKLLTCLKQGGRGSTILTTTRDAEVARVMTMGVPGAYNLEKLGNKYMKEIIQSRAFRVQKPNSDELD

SEQ ID NO: 192280 - protein, 60 aa, Oryza sativa
  Clone ID: PAT_MRT4530_88522C.1.pep
NQGAAQGSDYVLSSNNNENTYYKKILYKMNSLTLDTEIQVYHFLGKGRTTGPISKKVPFP

SEQ ID NO: 192281 - protein, 48 aa, Oryza sativa
  unsure (1)..(48): unsure at all Xaa locations
  Clone ID: PAT_MRT4530_88523C.1.pep
KKKKXXPPPKKXRXXDKKXGQPLNSILQHLHLFKHDYDFCKLLKNVFQ

SEQ ID NO: 192282 - protein, 108 aa, Oryza sativa
  Clone ID: PAT_MRT4530_88524C.1.pep
IDPSFAAVRRRACPAAAPNGDTNLAPLDVQTQNAFDNAYYGNLLVRRGLLHSDQVLFNGGSQDALVRQYAANPALFAADFAKAMVKMGNIGQPSDGEVRCDCRVVNDS

SEQ ID NO: 192283 - protein, 341 aa, Oryza sativa
  unsure (1)..(341): unsure at all Xaa locations
  Clone ID: PAT_MRT4530_88525C.1.pep
WPPHSCIGCCRSSSSSHSSTSPADGGTPPPPRRAGATRPPVVSPRDLCMGRLVEALEKVGYRDGETLFGAPYDFRQAPAAPGKPCRAFSRFRRQLRALVEHASRTNGDQPVVLVSHSQGGYFALEFINRSPMAWRRRHVKHFVMASTGAGGFVLGLQSLVSGVSDASPMGLAGRSLACKFTSLPSPKVFDRDTPLVVTRDKNYXELLTAVGLPAYEVTLYKTRALPVAMNFRAPAVPTTCINGVGVPTTEKLVYWDGDFSQAPEILYGDGDGVVNSASILALDTVIGEDPRQGYYKSVKIAGTSHDGVVSDGAALERLVSEIPRENFVQASKEEDSRVAQL

SEQ ID NO: 192284 - protein, 82 aa, Oryza sativa
  Clone ID: PAT_MRT4530_88526C.1.pep
MRLSSSSARVSTELELTQTSTLELGSLTTLFVRRPSPLTRCRPSCRTAAVVVPAIVALASPIIRAAVAVDPPDCAPGGEFPA

SEQ ID NO: 192285 - protein, 527 aa, Oryza sativa
  Clone ID: PAT_MRT4530_88527C.1.pep
MGELKRLYLRPQQVAEEENEIHVGYEDDQFGGCSCWASNMGLVKDGAADLEEGTLEIGMEYRTVSGVAGPLVILDKVKGPKYQEIVNIRLGDGTTRRGQVLEVDGEKAVVQVFEGTSGIDNKYTTVQFTGEVLKTPVSLDMLGRIFNGSGKPIDNGPPILPEAYLDISGSSINPSERTYPEEMIQTGISTIDVMNSIARGQKIPLFSAAGLPHNEIAAQICRQAGLVKSLEKGKHAEGGEDDNFAIVFAAMGVNMETAQFFKRDFEENGSMERVTLFLNLANDPTIERIITPRIALTTAEYLAYECGKHVLVILTDMSSYADALREVSAAREEVPGRRGYPGYMYTDLATIYERAGRIEGRSGSITQIPILTMPNDDITHPTPDLTGYITEGQIYIDRQLHNRQIYPPINVLPSLSRLMKSAIGEGMTRRDHSDVSNQLYANYAIGKDVQAMKAVVGEEALSSEDLLYLEFLDKFERKFVTQGAYDTRNIFQSLDLAWTLLRIFPRELLHRIPAKTLDQYYSRDATH

SEQ ID NO: 192286 - protein, 134 aa, Oryza sativa
  Clone ID: PAT_MRT4530_88528C.1.pep
IIDAHCLIFLRGKIEMLLCVRYWTQKQFLFFLKALAIADIDKQEKILTLACLADLPKKKKSLRPATSPPAVSRRVVVATSPGRPLADACDPLHGPVSHVLGVRRASAALATGRLMPLPHRRHGRGDHLLHPRRG

SEQ ID NO: 192287 - protein, 353 aa, Oryza sativa
  Clone ID: PAT_MRT4530_88529C.1.pep
MASLLIASTGGAHRLAWKDAAALGPAPRLARPWPAAVAAPAPLLRTSTADITSLRVITAVKTPYLPDGRFDLEAYDSLINMQIDGGAEGVIVGGTTGEGHLMSWDEHIMLIGHTVNCFGAKVKVVGNTGSNSTREAIHATEQGFAVGMHAALHINPYYGKTSIEGLISHFEAVLPMGPTIIYNVPSRTGQDIPPAVIEAVSSFTNLAGVKECVGHERVKCYTDKGITIWSGNDDECHDSRWKYGATGVISVASNLIPGLMHDLMYEGENKTLNEKLFPLMKWLFCQPNPIALNTALAQLGVVRPVFRLPYVPLPLEKRVEFVRIVESIGRENFVGENEARVLDDDDFVLVSRY

SEQ ID NO: 192288 - protein, 1123 aa, Oryza sativa
  Clone ID: PAT_MRT4530_8852C.1.pep
MSYYVDPRTSVPQYPPYPVYGHPPLAVARQVGGLGAQGSTTMTSNFFDDSVDPGINQGSSTSTMLVRTQVGEIIFPVYTTMPISTSPVMAGSESDVATTPTDSMLKDPPAEAENGTSTTSEPDKDPNTAQSCPSDKEYEPTRTTSEATRSWCPIHKTRKHTLQACWVFLDVQAEIRACREHGIHRTSPTHDVYCPIHKTRNHDLSSCKVLRSAMRMPPPKVQQSQISPRDADKERGAATISDRFVGVIDVDPHEPSVLHLLEDQASSSTSTPHDVYAIDGTSTSRGGNTETEDQEVTPAHHIRTINAILRETPYDPVLNDDLEHNAFEEAAARVPPEQPPTGGANGELPEQRASPRQATPPPRGTSDLRDHLNGRREARRTRDNENRSRHRVSSRRHENEEQGGHLSENQDHDNRHNRREHDNREQRMPGDTRRGCRRNDDDDGDQCRDNNGLWQQFVANFQGTYKRHTIEDDLHALTQNPDESLRDYIRCFNECRNTIPEITDASVIRAFKSGVRDHYTTQELVTRRITTARKLFEIVDCCAHENDALRRKNDKPKTGGEKKLAKDAPESSKKKSHRSGKRKAQTEVLVVEYVDLPKHPDPQGDDTKKIWCPIHKSDKHSQKGTRKATGIGEGQARRYPIVVEPTIRNIKVARVLIDGGSSINLLFASTLDAMGIPRSELTPTDQPFHGITSQSSSKPLGKITLRVTFGQANNFRTEQITFDVAEFDIAYNAISGRTALVKFMATSHYAYQVFKMPGPKGTITIQGNAKLAVQCDKRSLDMVEHTPNPPATAEPLKKVSKTNKTPKPDGAIKIVPLSSANPGNTVKIRASLDPSDMPGVPREVIEHKLMVRPDAKPVKQKLWRFAPDRKQAIREELDKLLKASFIREVLHPEWLANPVMVCKANGKWRMCVDFIDLNKACPKDHFPLPRIDQLVDSTAGCELLSFLDAYSGYHQISMAKEDEEKTAFITPFGVFCYIKMLFGLITAGNTFQRTVQGALNDQLGNNVEAYIDDIVVKTKTSDSLIDDLRETFDNLRRYCLMLNPEKCMFGVPSGKLLGFLVSGSGIEANPEKIKAIENMKSPTRLKEVQKLTGCMAALSRFVARMRERGQPFFALLKKQDKFL

SEQ ID NO: 192289 - protein, 136 aa, Oryza sativa
  unsure (1)..(136): unsure at all Xaa locations
  Clone ID: PAT_MRT4530_88530C.1.pep
MASHKPDAQRACSCSLKARMLAKKLERGATLQGXAPSAETVXMVVRVVAYDDKLVKTVKTIASPXRGILAMYEXNATCXKRLAELIMKHRVNRRLTVPCLQTYRSXAQTINDAIVVEETMYHATVYRQMSVMILTE

SEQ ID NO: 192290 - protein, 44 aa, Oryza sativa
  Clone ID: PAT_MRT4530_88531C.1.pep
EHQSIKGKINQYLRDVLTIHNRYYKKLLQCITANAIACNRVIYL

SEQ ID NO: 192291 - protein, 50 aa, Oryza sativa
  Clone ID: PAT_MRT4530_88532C.1.pep
AAYEPYLIGYLLAFKGDLNFLHYRGINPIMHLRLGEVLSLKKKKKKKRGA

SEQ ID NO: 192292 - protein, 140 aa, Oryza sativa
  Clone ID: PAT_MRT4530_88533C.1.pep
LQTDLAPSTPARPQATAARRSPPPHARTPPPPQARTSPPSVRRRHHKPARRRRRRTTRTPAACRPPPRAATPHAAATRPARCSLQAAASRSRAPAAARRLAPPRHPPPYRASPRLLSQRRQTLPVAAPSFAGRGGGRRRW

SEQ ID NO: 192293 - protein, 144 aa, Oryza sativa
  unsure (1)..(144): unsure at all Xaa locations
  Clone ID: PAT_MRT4530_88534C.1.pep
FPSIALRIMVHVYIVLRSLXVLSRRRMIFAVNVLELFFLFCLAVKKNCLGMMKTGFVTRYCYGLWAILLVQLCLPCLSWLTLMLFFLHSSVIDSSFVLSVDLVSSDKNIIVAAWLCDLISMFFDSWYVTDLFVIPYCAGSSFVT

SEQ ID NO: 192294 - protein, 326 aa, Oryza sativa
  Clone ID: PAT_MRT4530_88535C.1.pep
MAATNNVGAGALPVVDLAPFLATGDDEGGVARASASATGAVREACRDYGFFRAVNHGVPAELMARALELSAAFFALPDEEKAKARPVEGSEAPLPAGYARQPAHSADKNEYLLAFDPQLGFNLYPDEPSGFREALEELYGKLTELGVLIQEILNKCMGLPPGFLKEYNGDRSFDFIAALRYSPATAEENNGVSEHEDGNCITFVLQDGVGGLEVLKDGAWVPVDPVEGSIIVNIGDVIQVLTNGKMKSATHRVVRKPAVHRHSLVFFFNVHGDRWVEPLPEYTEKIGEAPRYRRFLYSEYQQLRMRNKTHPPSRPEDVVHITHYAI

SEQ ID NO: 192295 - protein, 48 aa, Oryza sativa
  Clone ID: PAT_MRT4530_88536C.1.pep
LTIQIDRRSMVQEEPSFVTDGYSHLERPCQFLTNKNEVYDAEFKLDIY

SEQ ID NO: 192296 - protein, 116 aa, Oryza sativa
  unsure (1)..(116): unsure at all Xaa locations
  Clone ID: PAT_MRT4530_88537C.1.pep
KSRFPSXPPTFIEVVKIQYNVDVGHAIVEAYSRVLVGVAFSILSRVAEILLEDDLIKKPNTPLATLKFDLSSDVYLAGITETPPGHIRRSLMDQISLVDGSLDAVVRKKGVKQLRW

SEQ ID NO: 192297 - protein, 67 aa, Oryza sativa
  Clone ID: PAT_MRT4530_88538C.1.pep
RTPTATILDSRTLSSSCAHHHHRCYGGYRVDRHGGPVHLARVERLNGQPQCHQGAPLVVSTSAAFVP

SEQ ID NO: 192298 - protein, 343 aa, Oryza sativa
  unsure (1)..(343): unsure at all Xaa locations
  Clone ID: PAT_MRT4530_88539C.1.pep
IHPIVIRIRVVIVKERNRTPTMANNSSYGENVRRKSHTPSAIVIGSGFAGIAAANALRNASFEVVLLESRDRIGGRIHTDYSFGFPVDLGASWLHGVCEENPLAPIIGRLGLPLYRTSGDDSVLFDHDLESYALYDTKGHQVPQELVEKIGKVFETILEETGKLREETKEDISIAKAIAIVMERNPHLRQEGIAXHDVLQWYLCRMEGWFATDADAISLQGWDQEVLLPGGHGLMVRGYRPVINTLAKGLDIRLGHRVVEIVRHXSRVEVTVSSGKTFVADAAVIAVPLGVLKANTIKFEPRLPEWKEEAIRXLSVGVEYRISLHFSEVFWPNVELLGVVSCV

SEQ ID NO: 192299 - protein, 153 aa, Oryza sativa
  Clone ID: PAT_MRT4530_8853C.1.pep
MYLLFSFSLSLLLLVFFFLQPIEGRGRAVGATALRWLTGCDVGVHACSRARRTWGGRWLAERVKELAGTATTGARPWQQKEWRWWLDVVAKREGKGEKWVHLVEANTMAQGLGLWRCGRGDRLMVAVAGQGRRERRELQALMWGEEGDLAGYL

SEQ ID NO: 192300 - protein, 135 aa, Oryza sativa
  Clone ID: PAT_MRT4530_88540C.1.pep
STSDDTSTADNTSTSNDTSTSDVSASSDDTFTADNTSTSVVSSATNNTSFSDHTSTSDDSTSSDDTTNDTLGTTAANGGTATNTSDDSANTARDTGTGETALLNNATLSGSEDTASTDSSLGFSGISNREAQGSN

SEQ ID NO: 192301 - protein, 124 aa, Oryza sativa
  Clone ID: PAT_MRT4530_88541C.1.pep
MDTGEVSPRRGGMSHGCDGEGAAWLDMERRLQDMGARVRVSSSCELWMGRTQGEEETMEEEEKQQRKGEEKKESFWEAKDGSASAWMLDGTMEDGMCLYDKGEKRVHTVTCTNQEPWFTLHVVH

SEQ ID NO: 192302 - protein, 62 aa, Oryza sativa
  Clone ID: PAT_MRT4530_88542C.1.pep
RHLRFSTNMARPLATPIAGGETALLPQTLPLLHLFTGGDPPYGALRLLCASVLQTPRSLSHR

SEQ ID NO: 192303 - protein, 449 aa, Oryza sativa
  Clone ID: PAT_MRT4530_88543C.1.pep
MADASSTKSPRKRRSQELKVGHGIHHAPGAKKEKYSCLDLLPVGLGEPKEEEASRTDNISLPEEILGTIVSLLYTRDAARTQAISRQWLPLWGSTSLNLDMNALSVHEHKRIDIAGSILAAHRGPVHRLVLISDCLECCNTTFEDWLKLPGMKNNLSHLDFRFATGNTTPADQANDMTYSLVISALRFSSTLEVVSFSSCCFRDDMINQPLHFPKLRKLNLHSVATSEDALHAVISACPTLESLHVNYTIGLRRLHRSASLRSICVGTTHGLNQEVVFQEVVVEDAPLLERLMPTLLDDGPPSIREMPPVSVSVPTVKILVLQSVGPNLAAVVNILKYFPCLEKLYIKITLQSTAKNELRNYVPGPVHCLEHHLKSIVLKRYQAKTPVVNFAKFFILNAKVLKALRHPERWRQWCVDMSPLRSDPRAMAVGVGIGEKRKRVRVAVGKRT

SEQ ID NO: 192304 - protein, 85 aa, Oryza sativa
  unsure (1)..(85): unsure at all Xaa locations
  Clone ID: PAT_MRT4530_88544C.1.pep
KIQKQXKMVLGLDCFGVLERKRSKPSPKQQEAEDAKMQKGAVEVGGSSKAGEKMEEKEKSKKGKECRGAPLLVPHFPCRSTHGLL

SEQ ID NO: 192305 - protein, 159 aa, Oryza sativa
  unsure (1)..(159): unsure at all Xaa locations
  Clone ID: PAT_MRT4530_88545C.1.pep
FRGRVGQNKKIYCPDITKIIYVFRLLAIAVCSASAHTVVLGLSSRHRQLRSCVLLHHQALSRYHEYVGRQKPTAVGLYSHSDACQLRHTAVCRHAALWAQQCHCPDSDIVEAIAQAVQLQECGELYSDRNAGQAXALWPTDAPRTYGMYPTHYGAPRTI

SEQ ID NO: 192306 - protein, 108 aa, Oryza sativa
  Clone ID: PAT_MRT4530_88546C.1.pep
MAGGGSAASGVGGRAATLGGRRQLAGQVQAAARRRGHAASYWTWGSRSACPSTHGSQNVAVEMEEEEGQMEEHVVQELGEECVEENFEGITEFNPDYIISDPGLRASP

SEQ ID NO: 192307 - protein, 167 aa, Oryza sativa
  unsure (1)..(167): unsure at all Xaa locations
  Clone ID: PAT_MRT4530_88547C.1.pep
SSPVNSWEGYDINRYTFSTRAXIGEKQSYFGFIEEIWEIDYGLTMQFLIFKCQWVKYPNRVSIDKFGITIVDLANVGHKDDPWVLANRVAHVFYVTDLANLKKEIVLSGKQKILGVDGVEDVEDYNQYDSMPLYTXFVQKIKLVEASTQKTMKPYMHKDGVGKNVKE

SEQ ID NO: 192308 - protein, 153 aa, Oryza sativa
  unsure (1)..(153): unsure at all Xaa locations
  Clone ID: PAT_MRT4530_88548C.1.pep
MVACPQIQATQCFTKQQQPIIYQIRHLQPGSHISLFAGDEVGGRPVRARKLNSINKSRPPKXGGPARAERVPDGRQEHRGLLHALGSGWGLARLHQRAISLGGRPPPRAPGRGGRAGRPGASPVAAAVLVPPHSRRRASQPDESDRRGEARRS

SEQ ID NO: 192309 - protein, 55 aa, Oryza sativa
  Clone ID: PAT_MRT4530_88549C.1.pep
MGVGVGVGMAVIPWRSIQISGITGKGSRRARQTAHTIERAEATSEKNRDLGLPAV

SEQ ID NO: 192310 - protein, 199 aa, Oryza sativa
  Clone ID: PAT_MRT4530_8854C.1.pep
MTIQNYTSANFCHAEQCGVAASVCHAQESWRDKITTWHNLPVCQFFMDDCLQQLIDRIDAGEGELLKNLSQPANISTSLKQRAVLVDEIWHAAGDAGSDIDWYVKRTVLGGIYSTSEVYMLTDNSPDFRDTWTFVSRRIKDALDLQKTFQEDDPEPEPDEAPSVLAGADDVGVGRGHDTGCRPDEARAAAMRAPPSQGT

SEQ ID NO: 192311 - protein, 56 aa, Oryza sativa
  Clone ID: PAT_MRT4530_88550C.1.pep
IDIRDKPRQTQYGACGGRQKGSSAISDLDEFVLEEEDYLVVDYMLVIYAAKSMTAR

SEQ ID NO: 192312 - protein, 69 aa, Oryza sativa
  Clone ID: PAT_MRT4530_88551C.1.pep
FIIRTPPSHTSKPRMAGGASQLILPRRNNKEGRPSTPCSIAVRRRPSISSGSSPEKLDRSDALGSGQYR

SEQ ID NO: 192313 - protein, 80 aa, Oryza sativa
  unsure (1)..(80): unsure at all Xaa locations
  Clone ID: PAT_MRT4530_88552C.1.pep
PGIGYPTYLLPRCRSFEKRQCVGPGTVDQQVRRGCCRXVAAIDTXWCKCDALNHMLRIIYSESGAVYAVHYMVIEFLGCR

SEQ ID NO: 192314 - protein, 92 aa, Oryza sativa
  unsure (1)..(92): unsure at all Xaa locations
  Clone ID: PAT_MRT4530_88553C.1.pep
KRXEHGRTREAWAPRGXARSQRTRGARARGWLGSAWLGPGCWAXAGREEGEGSGLPGRKERKTKGGERDLDCGPRGREGDFGPDLAQREEGD

SEQ ID NO: 192315 - protein, 212 aa, Oryza sativa
  Clone ID: PAT_MRT4530_88554C.1.pep
MEYYVSKGVFGWVIRLPFSLRFWLLCIVLLLVGIPEFRSLIVIYAVCLPGQVFLKAQPYVQSSLAVRSNHKLTFSLDFPVRLPLVVNPDTIEPVQVLARRVLKKGAGTSEQVLVRWTGQMSEDATWEDAGMLRQQFPTAPAWGQADFDGGRNVADSTVSGTVPDLAIYANPVKKIPVRARRANVGMGLSCVVKMRLYKHLWCGEGVSNMKWM

SEQ ID NO: 192316 - protein, 85 aa, Oryza sativa
  Clone ID: PAT_MRT4530_88555C.1.pep
MEMGIFIHVRAPELSGHTQCTKVQSNLGLPHQFAYASKAEIVPRDGTCALQRAWVTSCGALQPPYHYLVVRPRVVVSGPHKKKVP

SEQ ID NO: 192317 - protein, 39 aa, Oryza sativa
  unsure (1)..(39): unsure at all Xaa locations
  Clone ID: PAT_MRT4530_88556C.1.pep
XDKKLSCFMIEAXNLYVICVSVSIQFLDTQLWXYSGQLV

SEQ ID NO: 192318 - protein, 45 aa, Oryza sativa
  Clone ID: PAT_MRT4530_88557C.1.pep
MSRYERSLRPTGLRTRSSLISRPIEVVRGPLRYWSKTTHSRTSTI

SEQ ID NO: 192319 - protein, 359 aa, Oryza sativa
  Clone ID: PAT_MRT4530_88558C.1.pep
MASYTMTPATDGDDDETTCIRALELMFTFVVPMTLKATIELGLLDALTGGGHALTADELAAAAQLPAEAASSVDRMLRLLASLDVVRCPPTDTGGEAAVRRYTPAPVCRWFAGERSLAPLAMFLLDDDYLSTWNQLPAAVAGGDGQVAFEKARGMPMFEYMGTNRRLNTLFNQAMVQQSTVVIGKLLERFQGFDGVSVLVDVGGGTGATLEMITSRYKNITGVNFDLPHVIAQAPSLPGVKHIAGNMFESVPNGDAIFLKSMLHLHNDEDCIKILKKCHQALTHNGKVIAVEILLPAIPEPVPTAQNPFRMDMIMLNNHWGGKERTEPEFAKLAVECGYTGVFQATYIFANYWALEFSK

SEQ ID NO: 192320 - protein, 82 aa, Oryza sativa
  Clone ID: PAT_MRT4530_88559C.1.pep
YSLVLPPQSANRRSGRGVEASGCHVMPLGPLHRFAPRPSPSRHLAGGASEEGAQAEPPLMSATPQLPPVAFNTVRQTCGVLS

SEQ ID NO: 192321 - protein, 1507 aa, Oryza sativa
  unsure (1)..(1507): unsure at all Xaa locations
  Clone ID: PAT_MRT4530_8855C.1.pep
MSYYVDPRTNGPQYPLYLVYGYPPSTVARQVGDLGAQGSTTMISSLLDDSVNTGIYQGASTSTMLVWTQVGEIIFPVYTTMSISTSPAIIESENGVVTTPVDSMSKDPPTEAENGTSTISKPEKDPNAAKSCPSHKKYEPTRTTSGVTKAWCPIHRTSKHTLQACSVFLNVQAEIRACKERGIQRTSPTHDVYCPIHKAKTHDLSSCKVLLSAMKMSLPKASSSTSTPRDVYAIDGTSTSGGVNTGTADQSVTLTSAHHIRTLNAILNEIPFDPVLNADLDQWAERLRESVANLSNAFAEAAARTPPEQPWADGANREQPDQRSPPCQATPPPRGTSDLHDHLNGRREAQLTQDNENRSRHRVSSRHRENEEQGGRPSENRDRDDRHNRREHTNHEQRVPCDTSRGRHRDNDNDGDQRRDNNDGRRRGSQEPERRPRNRSPEPSDSSSSSSSSSSLSSDRHPRRAYDRRQPTAPGGGCRAFTRTLRDVRWPKKFRPGAIEKYDGSTDPEEFLQVYSTVLYAAGADDNALANYLPAALKGSARSWLVHLLPYSISSNTIPEITDASVIRAFKSGIRYRYTTQELATRRITTARKLFEIADRCAHADDALRHKNNKSKTGEEKKPAKDAPESSKKKSRRSGKGKAQTEVLTAEHIDPPKHPYPQGDNTKKIWCPIHKTDKHSLETCFVFKKALTKQLALEKGKRVRVVEKTTEAATQDSDSAYPDSDLHVSHIFGGSMAYSSKREYKKVEYEVCSTWQGAASKMNWSEQKIEFSEADHPKTAVTPGRYPIVVEPTIQNIKVARVLIDGGTSINLLFASSLDAMGIPRSELTPTDQPFHGITLESSSKPLGKITLPITFDVAKFDTAYNAIIGRTALAKFMAASHYAYQVLKMPRPKGTITIQGNVKLAVQCVKRSLDMVEHTPNPPAAVEPPKKPSNMPGVPMEVIEHKLMVRLDAKLVKQKLRRFAPDRKQAIREELDKLLKAGFIREVFHPEWLANPVMVRKANGKWRMCVDFTDLNKACPKDHFPLPRIDQLVDSTAGCELLSFLDAYSGYHQISMAKEEEEKTAFITPFGVFCSVKMPFGLITAGNIFQCTVQGALNDQLGHNVDAYVDDIVSXCTFGVPXGKLLGFLVSGRGIEANPEKIKAIENIKSPTRLKEVQKLTGCMAALXQEAEDAFIALKHYLSNPPVLAAPQPNEELFLYIVATPYSPTGXMPENRSDSPTDSETWTMVFDGALNSXEQGATNSTAEYEGLLAGIRAAATTLGVKRVIVKGDSELVTNQPSVKEASDDGSTVVPDISLGATEEEHVVADIETTDDWRTPLTKFLSSDELLEDDAEAENITRQAKIYRMIGNDLYKKAPNRVLLKCISSDDGKHLLLDIHEGICGSHTGGRMLVGKAFRQGFFWPTALKDACDMVQRCEACHFHSKHIRLPAQALQTIPLTWPFSCWGLDILGPFPRGQGGYKFLFVAIDKFTKWIEATPTGEIKADNAIKFIKGXFCRYELPHRII

SEQ ID NO: 192322 - protein, 194 aa, Oryza sativa
  unsure (1)..(194): unsure at all Xaa locations
  Clone ID: PAT_MRT4530_88560C.1.pep
MRMTRSTAASTVGHLSSLCLRLHCQPSELTLSPPLACRARSASASTVGHSSFQSSGATVVGGGNNERELGDGNSTGEIGDGDGDGAVEIGXEDGELAKDTGGSSERERRGERDQEHCATVASSILPLNSITHRWRDGGRTNDALCLHLHCRSPELAARDHPSSLRRCHRPPELDPPPPPLPATRAHSASAATRL

SEQ ID NO: 192323 - protein, 135 aa, Oryza sativa
  unsure (1)..(135): unsure at all Xaa locations
  Clone ID: PAT_MRT4530_88561C.1.pep
MRMTRSTAASTVGHLSSLCLRLHCQPSELTLSPPLACRARSASASTVGHSSFQSSGATVVGGGNNERELGDGNSTGEIGDGDGDGAVEIGXEDGELAKDTGGSSERERRGERDQEHCATVASSILPLNSITHRWR

SEQ ID NO: 192324 - protein, 144 aa, Oryza sativa
  unsure (1)..(144): unsure at all Xaa locations
  Clone ID: PAT_MRT4530_88562C.1.pep
AQFDVFAKRVERAEPVRDEIASAPTPVLNAIFQNSLGSNSEDGIEIFDKLRSSPSKYFKSIKEDATRGASQALAMTKSLYPRVDITAAXDGFADGTSEEHALELIDEAXEFAREIAVDVLENFRDNNLFNKKYLQIGSQHKSSW

SEQ ID NO: 192325 - protein, 53 aa, Oryza sativa
  Clone ID: PAT_MRT4530_88563C.1.pep
AKSLLCTKVSLFSICVRYGGLLFLWVLMRLLVMHGRISQVGISTRRKDKQHYQ

SEQ ID NO: 192326 - protein, 43 aa, Oryza sativa
  Clone ID: PAT_MRT4530_88564C.1.pep
YIEYILYYINNKHVCALIRVTDQQIKLYHCRYICEDHGLMHCR

SEQ ID NO: 192327 - protein, 229 aa, Oryza sativa
  Clone ID: PAT_MRT4530_88565C.1.pep
MEDWVMGSESGWTSPAFEELLPQLPRGEQLRLETHLHDRDRRWRRMRYNNTPPPSSTKIRRQEKERDTWMIPHVQNALRHYNARHPGGEFDVVKPLMQARVVFKGQHWFHINFWARSRSSNKIKRFFAELHYKPLITISGFVSWEQLLPDPLPAPVAIVETCTIIEEPLDQYKRSCAFCPAGFDILHPKGDPIVGNQHDVLNPGSREPRDCAALVASGHAASRRLSVAS

SEQ ID NO: 192328 - protein, 126 aa, Oryza sativa
  unsure (1)..(126): unsure at all Xaa locations
  Clone ID: PAT_MRT4530_88566C.1.pep
RFWFSPRGDVFKNKTMGAPQDNGGPNKKPPGGGGEKKGVGPQKGQKKNPPKVLFGDSKGQGEGPKPFKKKFFFLKKGGQNLGIPPPSXGGGPPRLGPPPSLCCKGGPPPQGFQKGLKPQGGGRVFF

SEQ ID NO: 192329 - protein, 116 aa, Oryza sativa
  unsure (1)..(116): unsure at all Xaa locations
  Clone ID: PAT_MRT4530_88567C.1.pep
DAEGGDSAAGRRSGEEGEAAGGGRRHGRERTAAGRGGAATGELGKRQKLENGRRGSHFIAEGNEPATGGAGNGGGIGGRRPWKVAGNGATVPGEXEHESRENKGGIEEEGKGINSP

SEQ ID NO: 192330 - protein, 88 aa, Oryza sativa
  Clone ID: PAT_MRT4530_88568C.1.pep
MARELAEILSPDTSPSPDAAAGKPTLSSSPSPASSSPRNRYSRPPPRRRPPARDRGSPRDDGGGGAGEATFAGEAAREMQRKSARHGD

SEQ ID NO: 192331 - protein, 70 aa, Oryza sativa
  Clone ID: PAT_MRT4530_88569C.1.pep
LFLRQTHKRCYLIESQELSYCARCIIVMTDSLYHIKQCNKSNISILTPNNYQVKTVLPDSFVTIEYYPNS

SEQ ID NO: 192332 - protein, 283 aa, Oryza sativa
  unsure (1)..(283): unsure at all Xaa locations
  Clone ID: PAT_MRT4530_8856C.1.pep
FFSAVAPPPPPPPPTPPPPPPPRVPTLQPPPSVRAPAAPASSSARPGRALRPPPRPPPGPRRAGGAGCAGEQEKVLRASLLHVPRMGWSDXAMIAGARDVGVSPAIVGAFPRKEAALVEFFMDDCLQQLIDRIDAGEGELLKNLVLSERLSKLVRMRLEMQGPYISKWPQALSIQSQPANISTSLKQRAVLVDEIWHAAGDAGSDIDWYVKRTVLGGIYSTSEVYMLTDNSPDFRDTWTFVSRRIKDALDLQKTFQEAAYLAEAVGAGMGGSLQGVLNRLFKK

SEQ ID NO: 192333 - protein, 65 aa, Oryza sativa
  Clone ID: PAT_MRT4530_88570C.1.pep
ESSSRLQSGVREDSQMTNQAPGAQAGTSYSVSDIMADAGTMAYLSFGDNRTLRFDTCARRASMNT

SEQ ID NO: 192334 - protein, 1491 aa, Oryza sativa
  Clone ID: PAT_MRT4530_88571C.1.pep
MAAEPSEPDASQEPAPAAAPAAAIGGPNPCCAKLWRKYQKSEASRAALREGLKLLQGENDKLLKERSELSRELEDCRKPVTIEAYGILVMILHLRLETSVCNEERLRGDSAEAARISESDARDMLEKEIIELKAQNSALQQSQSVCKDGNELIRITELEEEIRRLKQVLVEEKKKSNSEKKNAEEEKGKVLELQRLLNMETHKSEEYKRLSDTERKAANGLRASCEKLRSEASEARERLVAQVKKTEEANKRAEEEKQKAAREKKCANSEKSLAEKNKNLIETERKKLTEEKSRAECLFAKLEEQKKLNEDLRVRIEVERKNAVDQKNHIDHLSQKLEEEKERSENLQRKLEKLCAVKDTTSFGKHGQQRIDVVTEGANIRLLKEKLKLKKQQLKHAKNVSKLDKAKNALVRRELQRLKQDWIQLLSRFNMLDEHLAADGVEGIHVLTELKRHPEIHNFEQNLLPHNSAPYFGLPSGIVPFSSSVPRDYTSYQLPRESCTRPISGTSSELEPPFGSSLRTKSKSPHRSSCPTSISDKKLMDSQGKDRLLVPASTDIRRKQSSMVPELTSKDGNDTRKPSDRALPVVSGDPFQQKALQSSMFGATEVTDKMPKGDKKRKRTKMSLKSTDCLSSKHKRLHLEMKAHDSTSNGILCSDDRSRVQQGSSIMPVVNEDDVQTRRRKCYVIAGKTPFLSVPAKVPFAEAGNAYAVSKFPSLLSFEEMIKGDCLKLLDLDNDADEERYRRAMQRTLSPDLPIILPQATKAPTHEKSHHLSDMMPNAFEYERDCPSSGANATDLEMRPNLLGVEGPAIQKLIQSTGKLGHNRIDCHDNVKQLRANDNDKSNSVVNISCSTKLDNVPTKRSLSCILHEDQAQNVVASPTDVPSNTSNSHPNSTLDLQHSHKEASNENSSNQIHSSSISDSGQQNIVGGCKTKAAGLTDLNLNSIIGLRHGDKRSPMCFVGLVSMKKRNIIRMFRYWETLIAEARETSEEAFVDTPLFERISSEPLLLLEEKVALIISLLLWDICRVITADPVLDGNFASSVFALTVKSYMETRWAFLKSNQLDVPVSLIEDFLVKREVVVCNKTGHVISDVDRYSLLDDETGIQVSTEPATIDQFISACALLASICVKVERMDIVLEVSYKVLLMGKSNLSWTLLAIHIIGSMCGDKFLSKSSNFLMTTIRLVVLLLEAKNNSLCLLSSYVQSNRPAVFPTCAHCLFDVVDSVSVDGFISSLLDELHLCSQQWNSCSNTNKIIARCSPHLGSSGLEVNCGEPCYISKQVKLSEDGHNHTAGRDLCYFAEITSLLELFGNYMSCEWTYNNVVVRLLKILESCTCEEYSAALLILLSQLGRIFNRKTYSENSQELSWFFVDDVGYEQRAVSDLRNHLSVLMRTKVSNSRNMPVQLSAIGALLSLLPLAFDKIVAHSGQLPDLYVLQGRQISEWQSVLTTVLELPLDLAFYGLAKKFLVVFWVFLAEEANVLDLMCEDSNAEP

SEQ ID NO: 192335 - protein, 352 aa, Oryza sativa
  Clone ID: PAT_MRT4530_88572C.1.pep
METAAAAPPRVQALADAGVSFLPAQYVQPPELRPDPTTTTHRRAPTAASLSVPVVDLSSPGAGDAVRRACAEWGAFHVVGHGVRPGLLDAMRGAGLAFFRSPMEEKLRFACDQARGAAAEGYGSRMLANDDSVLDWRDYFDHHTLPDSRRDPTRWPDFVPGYRDTVVKYSDSMKDLAQKLLRIVSESLNLPPSYIEEAVGEVYQNITVSYYSPCPQPDLALGLQSHSDMGAITLLIQDDVGGLEVLKDGLWIPVPSLPDGILVILADQTEIITNGRYKSAVHRAIVNADRARLSVATFYDPSKSRKICTAPQLVCKEHPQKYRDVIYGDYVSSWYSKGPEGKRNIDALLIEQ

SEQ ID NO: 192336 - protein, 84 aa, Oryza sativa
  Clone ID: PAT_MRT4530_88574C.1.pep
SIYCTNCCSNIYRLCIIAFCRELDSLATHNIFLWQLAEYCEYSPLLLLTIFQIRVKRRTPMTMTMMTLITHKILRGYTSLARMY

SEQ ID NO: 192337 - protein, 52 aa, Oryza sativa
  Clone ID: PAT_MRT4530_88575C.1.pep
NIAIGQFHLFSSFCPLYTYISPHKCECSPPLELLKSEADALFDIKKKKKGRK

SEQ ID NO: 192338 - protein, 66 aa, Oryza sativa
  Clone ID: PAT_MRT4530_88576C.1.pep
NMTLPHAISSAYPKEIKDFPPWFIAESYSSTNGAVPVPDNYNRVRVGSELLRIISIQAVVHQDIDS

SEQ ID NO: 192339 - protein, 90 aa, Oryza sativa
  Clone ID: PAT_MRT4530_88577C.1.pep
MEKGRKEAPARERGGGTMRGAPSSPPPLHIHILSSSQATTAGFSGGGGGSTAVHGGDGDGRRARSCDGRQLSGGAATAMGGAVEGLDGNG

SEQ ID NO: 192340 - protein, 1034 aa, Oryza sativa
  Clone ID: PAT_MRT4530_88578C.1.pep
MEHERGGGGRGRGRGRGGGRGGGGGDGRGGGYGGAGGGGVGGRGGRGPPGGGGGRGYEPGGGRGYGGGGGGGGRGYGGGGGGGGYESGGGRGYGGGGRGYESGGGRGPGGGGRGHESGGGGGRGGNVWAQPGRGRGGAPAPAPAPAPAARRIQDEGAARSSGTVERLASTEVVRVQPPAPPVAVSRSGTRVPMRRPDGGGSVSKAKVKLLVNHFIVKYRQASTVFHYDIDIKLDISSPKASDKELSKGDFLTVKDELFKDESFRRLSSAVAYDGKRNLFTCAELPDGLFRVKVRSRTYIVSVEFKKKLPLSQLSELPVPREVLQGLDVIVREASSWRKIIIGQGFYSQGRSVPIGPDVVALKGTQQTLKCTQKGLILCVDYSVMPFRKAGPVLDLVQKSVRYLDYRTTLNKHQLDTLKNELKGQRVTVNHRRTKQKYIVKGLTDKPASQITFVDSESGQTKKLLDYYSQQYGKVIEYQMLPCLDLSKSKDKQNYVPIELCDLLEGQRYPKASLNRNSDKTLKEMALIPASSRKEEILELVNADDGPCRGEIAQQFGISLDVQMMEVTGRTLPPPSLKLGTSSGQPPKFNIDQPNCQWNLTRKRLAEGGVLQCWGVVDFSADSGQYALNGNMFIDKIVRKCCDLGVQMNRNPCIVQLLDMEVLSDPHQLFEELNKAKQAAASKKQKLQLLFCPMSDQHPGYKTLKLICETQLGIQTQCFLSFLANKQQGQDQYMSNLALKINGKIGGSNIQLFGESLPRISGAPYMFIGADVNHPSPGNVESPSIAAVVASVDQGASKYVPRIRAQPHRCEVIQHLGDMCKELIGVFEKRNRVKPQRIIYFRDGVSDGQFDMVLNEELADMEKAIKTKDYSPTITVIVAKKRHHTRLFPKDLNQQQTKNGNVLPGTVVDTGVVDPAAYDFYLCSHNGLIGTSRPTHYYSLLDEHGFASDDLQKLVYNLCFVFARCTKPVSLATPVYYADLAAYRGRLYYEGMMMSQPPPSSAASASSASSSGAGASDFRSFPALHEDLVDNMFFI

SEQ ID NO: 192341 - protein, 66 aa, Oryza sativa
  unsure (1)..(66): unsure at all Xaa locations
  Clone ID: PAT_MRT4530_88579C.1.pep
TLLSNFIPGSWLNYFAISQEKKKKKNVKESRTNPIXLWPPXPKFRPAWDLILAGRVSRRAXRRCPS

SEQ ID NO: 192342 - protein, 741 aa, Oryza sativa
  unsure (1)..(741): unsure at all Xaa locations
  Clone ID: PAT_MRT4530_8857C.1.pep
LGVTLLRFLISGRGIEANPEKIKAIENMKSPTRLKEVQKLTGCMAALSRFVAMMGERGQPFFALLKKQDKFVWTQEAEDVFIALKRYLSNPPVLVAPQPNEELFLYIAATPYSVSTVIVVEREKVQRPVYYVSEALHDAKTRYPYIQKLLYAVIMTSRKLRHYFQAHRVTVVSSFHLGEVVRNKDIVGRIAKWVVEQSQFDVHFVPRTAIKSXVLADFVADWTMPDNMSDSQTDSETXTMAFDSALNSQGAGVGFILTSPLGDQFKHAIHLNFRATNNTAEXKGLLAMIRAAAALGANRLIVNGDSELVANQVHKDYKYSNPELPKYLAEVRKLEKRFDGIEVRNVYRKDNIEPDDLARRASIREPLEPGTFLDALTKPSMKEENDEGSIVVPDISSGATGAEQVVADIETTDDWRTLLNKFLSSDELPEDDAEAEKITRQAKKGPNGVLLKCISFDDGKHLLLDIHEGICXGQTLVGKAFRQGFFXPTALKDACDMVQRCEACQFHSKYTRLPAQALQTXTPLTWPFLCWGLDILGPFPRGQGGYRFLFMAIDKFTXWIEATPIGEIKADNAIKFIKGIFCRYGLXPHRIITDNGSQFISADFQDYCIGLGVKICFASVSHPXSNGQVKRANGIVLQGIKTRVYDRLMSHDKKWVEELPSILWAMRTTPTTSNKETPFFLVYGLEAMLPTELRHQSTRVQKYSDEEHEEQRSDDVNLLEEHRERVDVRAANYQXALRRYH

SEQ ID NO: 192343 - protein, 754 aa, Oryza sativa
  Clone ID: PAT_MRT4530_88580C.1.pep
MAEPAAAAAAAEAPATVGQAVIPLVNRLQDIVARLDGGGGGGLELPQVAAIGGQSSGKSSVLEALVGRDFLPRGPDICTRRPLVLQLVRHSAPEEWGEFLHAPARRFHDFDQIKREIQLETDKEAGGNKGVSEKQIRLKIFSPNVLDITLVDLPGITRVPVGDQPSDIESRIRSMIMQYIKHPSCIILAVTPANADLANSDALQLAKLADPDGSRTIGVITKLDIMDRGTDARNFLLGNVIPLKLGYVGVVNRSQEDINFKRSVKDALAFEEKFFSTLPAYHGLTHCCGVPQLAKKLNTILLKHITYMLPGLKSRINSQLVAVAKEHAAYGDTAESTAGQGVKLLNILRKYCEAFSSMVEGKNKVSTDELSGGARIHYIFQSIFVKSLEEVDPCKSITDEDIRTAIQNSDGPKGPMFLPELPFEILVRRQISRLLDPSLQCANFIYDELVKMDYINTSHPNFVGGNKVVELARQEILPPKAPTSVTIPKDGTAISPEIQLTSDRSQKSRAIFARDATRGATSDQGVQPDADTENTGTSVAGRNQRGHSLVAGSSSSKSVARVHSLDNLISIIQLREPPITLKPSENQPAQDATEVAIVKLLIKSYYDIVRKSIEDAVPKAIMHFLVNHTKRELHNVLIRKLYRENLLDEMLRETDEVIIRRQRIQETLQVLEQAHRTLEEFSLEAEKVEKGYSPAEYATGLPKIHGLSNGDPSIIYASSPNHNRKKASHEDQHGSVASYSSTSYPDANGGLLST

SEQ ID NO: 192344 - protein, 338 aa, Oryza sativa
  unsure (1)..(338): unsure at all Xaa locations
  Clone ID: PAT_MRT4530_88581C.1.pep
GRVGLVAVAKERAAYGDTAESTAGQGVKLLNILRKYCEAFSSMVEGKNKVSTDELSGGARIHYIFQSIFVKSLEEVDPCKSITDEDIRTAIQNSDGPKGPMFLPELPFEILVRRQISRLLDPSLQCANFIYDELVKISRGCLTSELQKYPILKKRMGEAVSNFLRDGLRPAETMITHIIEMEMDYINTSHPNFVGGNKVVELARQEILPPKAPTSVTIPKDGTAISPEIQLTSDRSQKSRAIFARDATRGATSDQGVQPDADTGTSVAGRNQRGHSLVAGSSSSKSVARVHSLDNLISIIQLREPPITLKPSENSLHRDAXEVAIVKLLIXSYYDIVR

SEQ ID NO: 192345 - protein, 191 aa, Oryza sativa
  unsure (1)..(191): unsure at all Xaa locations
  Clone ID: PAT_MRT4530_88582C.1.pep
MEGSNLKSAALLEQLRVHLASGAGKELVEKIGFVYQLNISPKKLAFDEEVFVVDLKKGVVSKGPYEGKPDATFSFTDDDFLAISSGKLNPQMAFIMGKLKIKGSISAAQKFTPDIXPQAIQTVGLSGVRQLIQTGSWSSNFSLKNSSEMFLWYHRDAVGVPLELVFIRCGKYWTVQILLPRSYFLNNKLHE

SEQ ID NO: 192346 - protein, 170 aa, Oryza sativa
  unsure (1)..(170): unsure at all Xaa locations
  Clone ID: PAT_MRT4530_88583C.1.pep
RTRPPTRPLKSAALLEQLHVHLASGAGKELVEMIGFVYQLNISPKKLGFDEEVFIVVDLKKGVVSKGPYEGKPDATFSFTDDDFLAISSGXKLKIKGSISAAQKFTPDIDLPQAIQTVGLSGVRQLIQTGSWSSNFSLKNSSEMFLWYHRDAVGVPLELVFIRCGKYWPV

SEQ ID NO: 192347 - protein, 80 aa, Oryza sativa
  Clone ID: PAT_MRT4530_88584C.1.pep
LQHLQVWPQLPRLLLLLLQLNLSSSSPGCMRIYRMDPATVDQSFDRGLTLLALVLSLYVGRPCLSPRRLNKAVVGDVSVW

SEQ ID NO: 192348 - protein, 82 aa, Oryza sativa
  unsure (1)..(82): unsure at all Xaa locations
  Clone ID: PAT_MRT4530_88585C.1.pep
GQGHDNDPSAGSPTETLLRLLLPLNDRVQWTSRDVGGGEPPPSPRSGEXPDHSIGRSERRSGQREGTHATRADDSRLLSIPS

SEQ ID NO: 192349 - protein, 178 aa, Oryza sativa
  Clone ID: PAT_MRT4530_88586C.1.pep
MVSNNKDDNDDDVEAGLTVAAAAARRSSPDQPSPWWDDEAIWLRWEELTSSEQIRKLRTTVTVLLCVSVVIGLCAAAAQAMFVPATTTALSSAGVGVLFFLAPFSLYMRLMLRPCLVEDMHRGTLACLVAAPVLLHTAAVAYLQLMGRGQVAFAALGVWLVDVAAAAALGWCFWNDRR

SEQ ID NO: 192350 - protein, 39 aa, Oryza sativa
  Clone ID: PAT_MRT4530_88587C.1.pep
SVFFPHRAHHFGFYFFFFFFLKKQHICSLVRSYSLCPKK

SEQ ID NO: 192351 - protein, 229 aa, Oryza sativa
  unsure (1)..(229): unsure at all Xaa locations
  Clone ID: PAT_MRT4530_88588C.1.pep
MASWAGRRTRGSRPRSNPPSTPAAAAAPQPGAATATARRHSPPRTALPAPGRRLLLGXRGERMLARRRSPPRRRSRRRRMPPPQQQARRVLDARSRSMTAGEAAAGAGCRRARRGRGQAAPRPSSPRRAPAAARAPSRSRAARPRCAPSPAPTARSRRAGATGSSAGACGSGGGHPYMSHDRPCRPLVVGGSLARCPLFLVLPPPPPPPPPFPHPLHRRRGTRPRVARP

SEQ ID NO: 192352 - protein, 551 aa, Oryza sativa
  unsure (1)..(551): unsure at all Xaa locations
  Clone ID: PAT_MRT4530_88589C.1.pep
MEGGKPTVITNAEGQRTTPSVVAYTKGGPRLVGQIAKRQAVVNPENTFFSVKRFIGRKMAEVDDEAKQVSYHVVRDDNGNVKLDCPAIGKQFAAEEISAQVLRKLVDDASKFLNDKITKAVVTVPAYFNDSQRTATKDAGRIAGLEVLRIINEPTAASLAYGFEKKNNETILVFDLGGGTFDVSVLEVGDGVFEVLSTSGDTHLGGDDFDKFYFCWVFYFGAMTHETPKVVDWLASKLNKDEAVDLLKDKQALQRLNEAAEXAKMELSTLSQTNISLPFITATADGPKHIETTLSRAKFEELCSDLIDRLKTPVTNALRDAKLSVDNLDEVILVGGSTRIPSVQELVKKITGKDPNVTVNPDEVVSLGAAVQGGVLAGDVKDVVLLDVTPLSLGLETLGGVMTKIIPRNTTLPTSKSEVERMVEEADKFAQEDKEKRDAIDTKNQADSVVYQTEKQLKELGDKVPAPVKEKVDAKLNELKEAIAGGSTQSMKDAMAALNEEVMQIGQAMYNQQPNAGAAGPTPGADAGPTSSGGKGPNDGDVIDADFTDSN

SEQ ID NO: 192353 - protein, 585 aa, Oryza sativa
  unsure (1)..(585): unsure at all Xaa locations
  Clone ID: PAT_MRT4530_8858C.1.pep
MLNPEKCMFGGPSGKLLGFLVSGRGIEANPEKIKAIENIKSPTRLKEVQKLTGCMAALSRFVARMGERGQPFFALLKKQDKFVWTQEAEDVFIALKCYLSNPPVLVAPQPNEELFLYIVATPYSVSTVIVVKREKVQRPVYYVSEALHDAKTRYSQIQKLLYAVIMTSRKLRHYFQAHRVTVVSSFPLGEVVRNRDVVGCIAKWVVELSQFDVHFVPRTTIKSQVLADFVADWTMLDNRSDSQTDSETWTMAFDGAFNSQGAGTGFILTSPSGDQFKHAIHLNFRATNNTAEYEGLLIGIRAAAALGVKRLIVKGDSELVANQVHKDYKCSSPELSKYLAEVRKLEKRFDGIEVRHVYRKDNIEPNDLARRASRREPLEPGAEHVIADIETTEDWRTPLIKFLSTDELPEDDAEAEKITRQAKIYCMIGNDLYKKVPKGVLLKCISFDDGKHLLLNIHKGMCGSHAAGRTLVGKAFRQGFFWPTARKDACDMVQRCEAFQFHSKHTRLPAQALQTIPLTWPFLCWGLDILGPFPRGQGGYKFLFVAIDKFTKWIEAMPTGEIKADDAIKFIKGXFCRYRLPHRII

SEQ ID NO: 192354 - protein, 861 aa, Oryza sativa
  Clone ID: PAT_MRT4530_88590C.1.pep
METYQPGRCRRLAADHHRRGILAAGSASCYPYAANPYRMAPAASLLRHVGAGGGAMNTAFTETTTNGGGDASYSIGPSLSLRQHHTGVGGAGDRTTVFAGGDALAANYPYSYAIPVPYSAQGWHRIGAGGGRNTALPNFDVAPYFATADLHHIGGGGDHNTAFFPNIDDLAMNAFSLAAPNQYSAAEFYYNSAGGEQNIEEFYYNGASGVQNMVPPYMDTLTANAFSFTTPGHYSATEFYYNNADGEQNIEEFYYNAVGHEQNIVSPNMDTLTANTFSFATPIHYSAAEFYYNGASGEQNIEEFYYNGASGVQNMVPSTVDTLTANTFSFTTPGHYSATEFYYNGAGDEQNIEEFYYNGVGGEQNTVSPNMGTLTANAFSFATPAHYPAVEFYYNGVGGSRTSRNSTTMVQVEFHQISAGAEQNMVSPNTDNLAMNAFSFATPFNHSAAEFFHHIGASGERNTVCPNNDTHLAANAFSFVAPVHYSDANADLLLHVVDAGGEQDTVAANVDVLGIPPAPASITNAIVKSVWRENYREQFKLVVDALNQPRRHLYIAVDMEFAADATTNIRRRPADAEDHGFSGKLTGLAEHLGIRRTGGAAHHAGSDALLTLSCFFKIFRSLSGQQLHQLDARRGLLAGLEEWNMAIKCARHIDDHTRNIKVIEVVAENLGEEARRIGELVDSNFSIIGVEVNQVVIHPQLDRKAYEMVIAFMNPEGMLAYGRAWKFCISRFTSDNGNVLNLKQLAELVQSCGATDNPDVSWVTFHGSDVICRLIRSANGGVIPSSISGESFLPSLYDVALIVRRFLGIGTLPTTERNGGIFDVARALELKAIEADKEAERVLLTLRCFMRLAEMESAVQW

SEQ ID NO: 192355 - protein, 1366 aa, Oryza sativa
  Clone ID: PAT_MRT4530_88591C.1.pep
MEAALESARAKDTKERLAGVERLHEALDAAARQRGLTAGEVTALVDTCMDLIRDANFRVAQGGLQALSAAAVVAGDHFKIHLNALVPAAVERLGDGKQPVREAARQLLITLMEVSSPTIIVERAGSYAWTHKSWRVREEFVRTVATAVGLFASTELPLQRVLLSPVLQLMNDSNQSVRDAAIYCIEEMYTHMGSQFHEELQRHNLPPYMLREINSRLERIEPKVPTSDGNIMQYKAVESRSVSVNPKRGSPRTKSTPRESTLFGGDTDITEKPVEPVRVHSEKELLREFEKIAATLVPEKDWSVRIAAMQRIEALVYGGAIDYPSFLMLLKQLVPPLSTQLSDRRSSIVKQACHLLNVLSKELLGDFEPCAELFIPMLFKLVVITVLVIAESADTCIKTILRNCKISRILPRIADTAKNDRSAVLRARSCEYALLILEYWADAPEIQRSADLYEDLIKCCVADAMSDTINDEDGVVHKRYASPSLRERFVQPSRSLSHASGTSALGYGTSAIVAMDKTAAISSDSSFSSNTLRLSQSKTVGRSSERSLESVLNSSKEKVSAIDHLSLQNSALLDSSVPSTINASARNGGSRLLESMTTQLGTRERSRSPYLGNISSESMTSLSLPFPRRSLERPQEGGRMDEGSDIRSTRRFPQTQNYVDMPYRDAIHRDSHNNHVPNFQRPLLRKQVMSRASASIRHSFDDSQVQSGDVSGYTDALASLSDALSEGLSPSSDWVVRVSAFEFIRNLLQQGQRGIQEITQNFEKVMKLFFRHLDDPHHKVAQAAFSTLAELIPACKKPFESYVERILPYVFSRLIDPKELVKKPCSSTLDVVGRTYAIDMLLPALVRSLDEQRSPKAKLAVLEFANKSFSKYTVDSEGYSNSGFLKLWLSKLAPLVHEKNAKLKEASISGIISVYSHFDSTAVLNFILNLSVEEQNLLRRALKQYTPRIEVDLVNYLQSKKDRPRPKSYDQADYGTSSEDGYALASKKSYPFGRYSSSSLDAEGGKWMNSVQESTPRNAPMARTTSDMSIDHTSQSIELDTGSEVLLTRSRESKNNTSSLVETARSWPNYPEKTDAPLDDETAISTPRLDLSHRAASDGHNAVGSTAEENVQEGDIAVKLSSIKTTLHADNELSIPQLLHQISNGTEVSSLEKREALQQLVKASVDNDISIWAKYFNQILTAVLEVLDDSDSSTREIALSLVAEMLNNQSGAMEESIEIVLEKLLHVTKDMVAKISNEANQCLNVLLAKYDPFRCLAVVVPLLVSDDEKTLVVCINSLTKLVGRLSEEELMNQLPTFLPALFDAFSNQSPDVRKTVVFCLVDIYIMLGKAFVPYLEGLNSTQLRLVTIYANRISQARSGAPIDANQ

SEQ ID NO: 192356 - protein, 344 aa, Oryza sativa
  unsure (1)..(344): unsure at all Xaa locations
  Clone ID: PAT_MRT4530_88592C.1.pep
TPSVVAYTKGGERLVGQIAKRQAVVNPENTFFSVKRFIGRKMAEVDDEAKQVSYHVVRDDNGNVKLDCPAIGKQFAAEEISAQVLRKLVDDASKFLNDKITKAVVTVPAYFNDSQRTATKDAGRIAGLEVLRIINEPTAASLAYGFEKKNNETILVFDLGGGTFDVSVLEVGDGVFEVLSTSGDTHLGGDDFDKKVVDWLASNFKKDEGIDLLKDKQALQRLTEAAEKAKMELSTLSQTNISLPFITATADGPKHIETTLSRAKFEELCSDLIDRLKTPVTNALRDAKLSVDNLDEVILVGGSTRIPSVQELVKKITGKDPNVTVNPDEXVVSLGAAVRVGVLA

SEQ ID NO: 192357 - protein, 144 aa, Oryza sativa
  Clone ID: PAT_MRT4530_88593C.1.pep
MCEISRYRMKEWWRIIGRFGLSSAQKNAYCSSTSPQQRRHANTLLRRFRDKIIQTWRHEETREMILNVSAMLGLVAVVAVVGCIMKPHFEAQLEKLAQAFVLLFLLALLQAMVEMQKERRQKSLEDDHADDSEESKKKLKPTKT

SEQ ID NO: 192358 - protein, 142 aa, Oryza sativa
  unsure (1)..(142): unsure at all Xaa locations
  Clone ID: PAT_MRT4530_88594C.1.pep
LFSYSSGNIFSNSDDPDESNGIRPWEAXARRWAVTRADGXRRRRRRSRGDGGGRWAGVGGGGKWLRDSGSGGXWWRIRRQGAAEDGEDGGAGALARSIEEERGVGEGRXGGLAGAVDSFRPTSESGRRHVGWWRQRHSARER

SEQ ID NO: 192359 - protein, 416 aa, Oryza sativa
  unsure (1)..(416): unsure at all Xaa locations
  Clone ID: PAT_MRT4530_88595C.1.pep
VGDGVFEVLSTSGDTHLGGDDFDKFYFCWVFYFGAMTHETPKVVDWLASNFKKDEGIDLLKDKQALQRLTEAAEKAKMELSTLSQTNISLPFITATADGPKHIETTLSRAKFEELCSDLIDRLKTPVTNALRDAKLSVDNLTKVILVGGSTRIPSVQELVKKITGKDPNVTVNPDEVVSLGAAVQGGVLAGDVKDVVLLDVTPLSLGLETLGGVMTKIIPRNTTLPTSKSEVFSTAADGQTSVEINVLQGEREFVRDNKSLGSFRLDGIPPAPRGVPQIEVKFDIDANGILSVAAIDKGTGKKQDITITGASTLPKDEVERMVEEADKFAQEDKEKRDAIDTKNQADSVVYQTEKQLKELGDKVPAPVKEKVDAKLNELKEANGGGSTQSMKDAMAAFNPRVMQIXQAMYNQAANA

SEQ ID NO: 192360 - protein, 85 aa, Oryza sativa
  Clone ID: PAT_MRT4530_88596C.1.pep
HARPSWCCRPVFRGHRIAYYKILPLESSFLSLSSVCVSMPIGGLPGAGLGVVFSTHWCIFLSPAWCKSPSNRPSLFSIYLIKKNN

SEQ ID NO: 192361 - protein, 74 aa, Oryza sativa
  Clone ID: PAT_MRT4530_88597C.1.pep
SELNGQFFFKTLKVSIFSKFLSKENPYQFLLKLLVFIYIFTQYSFGQRDALKNHETIKNVSNAIKMLGVSCLEQ

SEQ ID NO: 192362 - protein, 170 aa, Oryza sativa
  unsure (1)..(170): unsure at all Xaa locations
  Clone ID: PAT_MRT4530_88598C.1.pep
GGPRARAGRRGAAGRGRLDPVLAEVAPTWRLRGCHAGRREVEEGVSRNGWRTAAANGGANHGDTGESEHTGRXRGTRGDELTARIRRRECDGGGLWWRQPAVREGGNGDGAMGVRFLCTRASTRLRESIPCAELGGNAPREAGDERRYRARAATAASTQRAAATGAGSNG

SEQ ID NO: 192363 - protein, 1089 aa, Oryza sativa
  Clone ID: PAT_MRT4530_88599C.1.pep
MVRIHEPFGSFQAPRFPSSKSPASSVQHRDIDRQSQELLNGMVTPPSVMFEESVGNNKNENQDDSIWLKEKWAIGEVWDTFLLVIFEVLFARNVCSFTTFVPAMEVIGIRNSIAILSDWPGDWSGLEKFHDLPLNMQAFEIYHLIHVTFEICTEMRISSPYHFGPSEEIDRWCKFMSIVAIVHTFYGNLWMRDGVFITEIQDRWQDKIQLDIMDNILVVCKSTLADDESASEVSSGSDSDSDCILGDDCPSDDDEEAAQIHKRFKELKEKLKTGKVDKLDDVVFEAGAEQDGNDTPSFDSDDEESVEEVASDEEVSARKLIKYPRFKEKPGVPTFELGMTFSCKKQFKKAITAYGLAERKAINFVKDDPKRVRARCDWPSCPWVCLLSKNSRTDGWQIATLENSHLCPSRRDNKLVTSSRIAEKYGKFIVANPSWKLAHMKATVQEEMFADVNISKLKRAKSITMKKAINAAKWQYQKLYNYQLELLRSNPGSTVVVDREVDMDPPVFKRIYICLDACKKGFLAGCRKVIGLDGCFFKGAKNGELLCAIGKDANNQMYPIAWAVVHKANKEEWHWFCGLLCSDLQVGDGSGWVFISNQQKEIINAMDKWAPQAEHRICARHIYANLKRHFYDNEHQKFWKCAKAPCITLFDLAMAELVQLTTPAVQTILNNHPQHWSRAWFRSGSNCDLVDNSMCESFNKWILEARFFPIITMLETIRRKVMVRIHDQRTISGRWTTSVCPNILKKMNVYITESAFCHATCNGGDSFEVKHHDNRFTVHLDKKECSCRYWQLSGLPCPHAISCIFFKTKTNSLDEYIAECYSVKEFKKIYSQCLEPVEGMSSWPEDDKEPLNAPGYIKMPGETRRESNEPLKATKLSRIGSIIRCSKCKQIGHNKSTCNKHHGGGSSTPDSLQVVNPADNLMLSNTQQSSKQSRKRKSRTAANTNSASQSRKTVSSKQKALVELHAHSQGSTSATIKVTSGQAFVNVSTQESAKFKPKKLTPVARLNGILMQSRKPSGSFGSSCSSINNFLKSSAGTTKMKMKMNNLVKEKWAIGEFVCHLSEGIDSGSYVAAPGSTKDLSNNQKKNQE

SEQ ID NO: 192364 - protein, 80 aa, Oryza sativa
  Clone ID: PAT_MRT4530_8859C.1.pep
MAFRNSVGIEEEKAPDIRNARVLVSRSTEIIHQRNTDIAAASNTFGRLHEKTPHVTPRKREPSRHALPPPLSWDSALPKL

SEQ ID NO: 192365 - protein, 388 aa, Oryza sativa
  Clone ID: PAT_MRT4530_885C.1.pep
MAPPRPSPAARLLREYGWDLLLGSIAAFYAVMVPYTKVEESFNVQAMHDILYHNYHIEKYDHLEFPGVVPRSFIVRIVLGSIILMTLRLLRVQVKRKFGHHAEAFYLILTATQFHLLFYSTRPLPNVLALAFVNLTYYFWFKGNHRRTLQALIVAAVIFRCDMILLLGTIGLALLLVGALLDRRIVPYILPVFSFVVLYSKLPHKELRFIMASIPMLNVSASLAASRIYNNRKKTGWKLLYVLMIGGFLSSLGYSGVTFMASYNNYPGGYALKALHEADSVMKDKIVHIDAFTAMSGVSRFCESEYPWRYSKEEKISIEEYQERNFTYLLNEHRHISGYKCLFAVDGFSRAKIQPRIPLLSLVKEPKVFAHGNTRDPDILSLNWPGCP

SEQ ID NO: 192366 - protein, 98 aa, Oryza sativa
  unsure (1)..(98): unsure at all Xaa locations
  Clone ID: PAT_MRT4530_88600C.1.pep
VHLFYGTITTLFKLSLRNCSLEGPAXWSGIPQRGYLDLSWNQLRGSIPSGRPASXITTIDLSHNLVHGSLTGSPSGLANLQRLSLDTNSLCCTAPSYV

SEQ ID NO: 192367 - protein, 96 aa, Oryza sativa
  Clone ID: PAT_MRT4530_88601C.1.pep
FSALKHQQSSKQSRKRKSRTAANTNSASQSRKTVSSKQKALVELHAHSQGSTSATIKVTSGQAFVNVSTQESAKFKPKKLTPGLLLLMPPWESDKL

SEQ ID NO: 192368 - protein, 83 aa, Oryza sativa
  Clone ID: PAT_MRT4530_88602C.1.pep
HNICHTLLLHLAFRKKTARCGENTKRRPISITARRKYSNTYVRYCTRSSNLSRRGKPVHLFESALHLGLIRSAMTLGCQLANH

SEQ ID NO: 192369 - protein, 108 aa, Oryza sativa
  Clone ID: PAT_MRT4530_88603C.1.pep
MDNILVVCKSTLADDESASEVSSGSDSDSDCILGDDCPSDDDEEAAQIHKRFKELKDKLKTGKVDKLDDVVFEAGAEQDGNDTPSFDSDDEESVEEVASDERVLLKTH

SEQ ID NO: 192370 - protein, 424 aa, Oryza sativa
  Clone ID: PAT_MRT4530_88604C.1.pep
MSRRQEICRNFQRGSCKYGAQCRYLHASPHQQQQQQQAKPNPFGFGTGSRQQQQPSFGSQFQQQQQQQQKPNPFGFGVQGANAQSRNAPGPAKPFQNKWVRDPSAPTKQTEAVQPPQAQAAHTSCEDPQSCRQQISEDFKNEAPIWKLTCYAHLRNGPCNIKGDISFEELRAKAYEEGKQGHSLQSIVEGERNLQNAKLMEFTNLLNSARPSQTPSFPTMSSFPEVKNNSSFGASQTNGPPVFSSFSQIGAATNIGPGPGDCVTNLLPPFHNFSNEVWSFEYVAESCAFTSIFVAVYHGRILETRGSGQPFGSFQAPRFPSSKSPASSVQHRDIDRQSQELLNGMVTPPSVMFEESVGNNKNENQDDSIWLKEKWAIGEVWDTFLLVIFEVLFARNVCSFTTFVPAMLHDDTKELYNKQENLQE

SEQ ID NO: 192371 - protein, 413 aa, Oryza sativa
  Clone ID: PAT_MRT4530_88605C.1.pep
MDHLSCVVEHFPYAYIFLKELYCHPSADVFDPSIIGYCLKNRPVFPFGVLEEGGGVPIHGFFGLVHSYQSQRSLSDRENFSKQAGSLILVYKNIQEAISRLQTTTKSRILVVGGTGYIGRHVVAASARLGHPTTALVRDLAPSDPAKAQLLHTFRDAGVTLLHGDLHDHASLLRAVRDADVVISAVRATQVPDQTRLIDAIKEAGGGRVRRFIPSEFGMDPGRGASAAVEPVRSMYGSKVGIRRAVEAAGIPHTYVACNYFAGFALPSIGQFMPKAAPVDSVVILGEGHTKVVFVEEGDIGTYTVLAAVDPRAENKTLHIRPPANTMSHDELVSMWEKKTGKKLERVYVPEDAVLTKIKELEYPKNVLVSIAHAAYCRGEMSSPLDDPQDVEATQLYPEIQYTTVDEYLNTLL

SEQ ID NO: 192372 - protein, 66 aa, Oryza sativa
  Clone ID: PAT_MRT4530_88606C.1.pep
MDAGRVDLTRRREEARRGKEVELTTISPSSDVTGEEMWCLSSSIVYTTAMVCANPCFMGIASSFRD

SEQ ID NO: 192373 - protein, 82 aa, Oryza sativa
  Clone ID: PAT_MRT4530_88607C.1.pep
GNLGSLFNRHTLNTNKTKPSSFLLLQVLVLPNSSAPSTSTLQKQNKKKRIQTAYPSPPLPPIHLHSSPPTITNSQQTRIKFS

SEQ ID NO: 192374 - protein, 91 aa, Oryza sativa
  Clone ID: PAT_MRT4530_88608C.1.pep
HAFDDAWVVTRVALFKTVMSVNLFRDRVFDAVVTAHNAILRTVDSDQLLYLFDSTPAFNETIVLSFHLYDDQSQDYIGRYDVKAMRCITHG

SEQ ID NO: 192375 - protein, 430 aa, Oryza sativa
  Clone ID: PAT_MRT4530_88609C.1.pep
MADRPRRPWAAADDNVLYEVVRRIPCEIDRRRMSRICHSWRVALRRVRAPAPPPPLPWLLLPRAGGRPPTFSCALSGFRTHPFLVPRGAHRARYFGSYDGEWVFLAVDGQGNQAQEYPRRVAQDHVLVNLNNFHYFNLPNRIRFGAVVVYPSPQHWYYRKMAIVAATLSCKPTEQGCIVAGFLEYFPFPGHAEQHVAFWRIGDDMVLPPFWEGMNREADWFRPPMEDLIFYGGAFLFLDRGEHILACEERPVFQEYGVELVPVGMFFQPRVHDKNETVLARYLVESRKNLLMVVKLTSGRQHLPTSAFRVFRKKKLNNGEEDEPLYNGMFQFQYYWSELDKLEGRMLFVGRGCSRSYEAGDRYSGMEEGVYFLDDRSFRKPIMAFDRDADELPYRCSDNGKWSKSPSPHVDRCFPARGPSIDSPPVWILP

SEQ ID NO: 192376 - protein, 1622 aa, Oryza sativa
  unsure (1)..(1622): unsure at all Xaa locations
  Clone ID: PAT_MRT4530_8860C.1.pep
ESTDGRSPTQIELSRYYIVWSPISPSSSWRSTDPRYKRDPXGRTKGIESHRQHNHHSLRNSRTNVPQYPLYPVYGYPPSIVARQVGGFGTQVSSSFVDNSVNPSINQGVSTSTMLVWTXVGKLVFLVYTTVSISTGPSMTGSENTVVTTLDGSMSKNPPSEVENGTSTTSKPEKDPNAAKSCPSDENHEPTRTISEATRSWCPIHKTRKHTLQACWVFLDVQAEICACKERGIQCTSPTRDVYCHIHKTKNHDLSSCKVLLSAMRTSPPKVQQSQISLRDADKEQGATVISDRFVGVIDVDPHELSVLHLLEDQASSSTSTPCDVFVIDRTSMSARANAXAEDQVVTPAQHIRAINAILRETPYDPVLNDDLAQWTERLRESVANLSNAFEGAAAGVPTEHPPIGGANGELPGQRASPRQATPPPRGTSDLRDHLNGRREARRARDNENRSRHLVSSRRRENEERGGHPSKNQDRDNRHERDDREQRMPGETDQGRHQNDDDDGDRRRDNNGGRRQDSREPRRHPRIRTPEPSDSSSSSSSSXSDRHPRRTYDHRQPTAPGGGCRAFSRALCDVRXPERFRPRAIXKYDGSTDPEEFLQVYSIVFYAAGADDNVLVNYLQAALKGSARLWLVHLPPYXISSWADLWQQIIANFQGTYKRHAIEDDLHALTQNLGESLRDYVRRFNGCRNMIPEIIDASVIRAFKTGVRDRYTTQELATRQITTARKLFEIVDRCAHADDALRRKNDKPKKGGEKKPAKDAPESSKKKSRKSGKRKAQTEVLVAEYAEPPKHPDPQRDDTKKIWCLIHKSDKHSLEACFVFKKPLAKQLALEKGKRVRVVEKATEAATQDSDSAYPDSHIHVSHIXRRFHGILLEARVQKSGARSLFDMAGGYPQDEVXLSRRSNSLKQTTPRLLLTPTDQPFHGITPQSSSKPLGKITLPVTFGQANNFRTEQITGFDTAYNAIIRRTALAKFMAGSHYTYQVLKMPGPKGTITIQGNAKLAGQCDRRSLDMVEHTPNPPATAEPPKKVSKTNKTPKPDDAIKIVPLSSAIPDKTELALITFLYDNADVFAWQPFDMPGVPREVIEHKLMVRPDAKPIKQXMRRFAPDRKQPIREELDKLLKAGFIREVLRPEWLANPVMVRKANGKWRMCVDFTDLNKASPKDHFHLPRIDQXMAKEDEEKTTFITPFGVFCYFKMPFGLITVGNTFQCTVQGALNDQLGNNVETYVDDIVVKTNTSDSLIDDLRETFDNFRRYRLMLNPEKCTFGVPSGKLLGFLVSGRGIEENPEKIKAIENMKSPTKLKEVQKLTGCMAALSTFVARMGERGQPFFALLKKQDKFVWTQEAEEAFIALKRYLSNPPILVAPQPNEELFLYIAATPYSVSTIIVXREKVQRPVYXVSEALHNAKTRYTQIQKLLYAVIMTSRKLRHYFQAHRVIVVFSIPLSEVVRNKDIVGRIAKWVVELSXFDVHFVPRTTIKSQVLANFVADWTMPENRLDSQTDSETWTMAFDGALYSQGAGEGFILTSPSGDQFKHAIHLNLKATNNTAEYEGLLAGIRAAAALGVKRLIVKGDSELVVNQVHKDYKCSSPELSKYLAXEKRFDGIEVRHVYRKDNIELDDLAR

SEQ ID NO: 192377 - protein, 499 aa, Oryza sativa
  Clone ID: PAT_MRT4530_88610C.1.pep
MGTELSLTSSVPLLLLLLFPLLCFLCLRHGSTRKQPRADGLKAYPIVGILPHFVRNQHRLLEWSAGVVARCPTHTMSFNFKGFGLIAGAITGNPANVEHIVKTNFQNYSKGEYVVSVMEDFLGHGIFNSDGDQWLWQRKAASYEFNKRSLRNFVVDTVRSEVVDRLLPLLTRAERDGRTLDEQDVLERFAFDNICCVAFDEDPACLAEDSMASPQSAKFMRAFSDAQNAVMDRFMSPVKSRWRFKRLFNMEPERQMREALATIHGFAERIVRERRERGEAGLARSDDFLSRFAASGEHSDESLRDVVTNFLIAGRDTTSSALTWFFWLVSGRPDVEDRIAREIRAVRASSGSTDAAAFSFDELREMHYLHAAITEAMRLYPPVAMDSHCCQNDDVLPDGTFVGKGWQVTYSAYAMARLEELWGADCEEFRPERWLDEDGVFRPESPFKYPVFHGGPRMCLGKEMAYIQMKSIAACVFERFSFRLSSGYYPFFRLIVAKL

SEQ ID NO: 192378 - protein, 72 aa, Oryza sativa
  Clone ID: PAT_MRT4530_88611C.1.pep
DVDAQLDGQSIGLRSSGQTAVSNGDVGDQIRQASPTRADSGIYISIINGSDWSSSATRGDILAVQNDPPVWH

SEQ ID NO: 192379 - protein, 869 aa, Oryza sativa
  unsure (1)..(869): unsure at all Xaa locations
  Clone ID: PAT_MRT4530_88612C.1.pep
MTTVVTATMAVTRHDPKKQPHAHGLKSYPVVGTLPHFAKNKDRFLEFITEIMKRSPTHTLSFKALGLTGGVITANPANVEYTLKTNFGNYPKGELAVSMLVDFLGHGIFNSDGEQWQWQRKAASYEFNKRSLRNFVVDTVRSEVVERLLPLLERAERDGRTLDVQDVLERFAFDNICHVAFDEDPACLAXEDSMASPQSAKFMRAFSDAQNAVMDRFMSPVKSRWRFKRLFNMEPERQMREALATIHGFAERIVRERRERGEAGLARSDDFLSRFAASGDHSDESLRDVVTNFLIAGRDTTSTALTWFFWLLSGRPDVEDKIVREIHAVRRASGGTGDPTFNLDELRDMQYLHAAITESMRLYPPVAMDSHSCKEDDFLPDGTFVGKGWFVSYSAYAMARVEDIWGADCEEFRPERWLDEAGAFRPESPFKYPVFHAGPRMCLGKEMAYIQMKSIVASVLERFSLRYAGGEGHPGFVLWLTLRMKGGLPMQDTKKQPAGSNGLKSYPVVGTLPHFAKNRHRFLEWSTDVMKRSPTHTMTFKALGLTGGVITANVANVEHILKTNFSNYPKGELSVSLLEDLLGHGIFNSDGEQWLWQRKAASYEFNQRSLRSFVVDTVRFEVVERLLPLLEWARRDGRTLDVQDVLERFAFDNICHVVFHEDPACLAEDSMVSSQSAEFIRACSDAQNAIIARFMSPVKSLWRVKRLFNLDPERRMRDALTTIHGYADRIVRERRARGEAGLARSDDFLSRFAAGGEHSDESLRDVVTNFLIAGRDSTSSALTWFFWLVSGRPDVEDKIVREIRAVRRASSSGGQAARRSAPTSCATCTTCTRPSRRRCGCTRPWPWTRTAARRTTSCRTARSWGKGGR

SEQ ID NO: 192380 - protein, 106 aa, Oryza sativa
  Clone ID: PAT_MRT4530_88613C.1.pep
MALDGITIRMAIFRATYWLRSWAQLQMCDEDGELLKVACQVFAWVKEKRPSVRNAWMIEEVDWGPNQDLLQVFFHLTMSLLVYRRQEIKFYTGLAFSARSTGFWHG

SEQ ID NO: 192381 - protein, 276 aa, Oryza sativa
  Clone ID: PAT_MRT4530_88614C.1.pep
MAERGGGGERGGERGGFGRGFGRGGRGDRGRGGRGGRRGPRQEEEKWVPVTKLGRLVKENKIHKIEEIYLHSLPVKEHQIVEQLVPGLKDEVMKITPVQKQTRAGQRTRFKAFVVVGDGDGHVGLGVKCAKEVATAIRGAIILAKLSVVPVRRGYWGNKIGKPHTVPCKVTGKCGSVTVRMVPAPRGSGIVAAHVPKKVLQFAGIEDVFTSSRGSTKTLGNFVKATFDCLMKTYGFLTPDFWRETRFIKTPFQEYTDLLARPKGLVIEAPAEKIEA

SEQ ID NO: 192382 - protein, 58 aa, Oryza sativa
  Clone ID: PAT_MRT4530_88615C.1.pep
FPVQKYMSQAKVRRFFPTWTWMNVVSLACLVVSLLAAGGFIQGLIKSVAHFKPFRVSS

SEQ ID NO: 192383 - protein, 279 aa, Oryza sativa
  Clone ID: PAT_MRT4530_88616C.1.pep
MESLSNVLARQPMMEVFQEVEFAALRIWKSGSYLHADEDGRSVYVGSLPRDGGGDSRHCAVWAVEPPIDAAAPLPQYVRLRGAYGRYLGAPDSYGSPLPFLSVDAAQRDRDRVEMDAIIWQPVACSGSDVVGGRDARGVVLLRDREMTRCGARVDGGGSDWRSNRWVGHFRQVPAGFGAGRLRSLEAVTVYSQSSKLVSESNCRGCAVCVAGGGRHGCGVVYQLGVAMDVEISTEARWLELTARITVHQGFCVMIRRQGCGGAGVGQRKSERYGDNFFG

SEQ ID NO: 192384 - protein, 54 aa, Oryza sativa
  Clone ID: PAT_MRT4530_88617C.1.pep
IPQPSALIWIAPQFPRSRHLSFKDPHGSIKLRALIAQHTSTHSENVNITEHVAV

SEQ ID NO: 192385 - protein, 39 aa, Oryza sativa
  Clone ID: PAT_MRT4530_88618C.1.pep
KTGKKLLFHHMIIFYIFPHLSLVNYILLHIFFLMFFGGQ

SEQ ID NO: 192386 - protein, 149 aa, Oryza sativa
  Clone ID: PAT_MRT4530_88619C.1.pep
KNVPPSGPKKHPRVINSTTHCRLSNTPPYLSHRTPRQNTPPAPSNRNSLPPAGRRIPPPRVWKFKSQGFPDTMFFNPPRSQGNPRTPGSRETGKLYGAPPGPRKPQIGPYPPPMAWFPKGVAHEPPERIYHLEGAPVGSYRAPPPASKG

SEQ ID NO: 192387 - protein, 74 aa, Oryza sativa
  Clone ID: PAT_MRT4530_8861C.1.pep
PKALCHKFFCEGFGQGKPLSVFWSFGQIENGLKPKRIKRSKLRPPKFNKGWNNIMCSIIFSPIKVSSTKKKKKA

SEQ ID NO: 192388 - protein, 78 aa, Oryza sativa
  Clone ID: PAT_MRT4530_88620C.1.pep
LMGILHVIEIPMTYFKFYKIIMVYLKRPLLLKIWGTPVPFFDYFPTPFSFPSHMWVPFPHFFLHPGRPQKDNGSSGSR

SEQ ID NO: 192389 - protein, 246 aa, Oryza sativa
  unsure (1)..(246): unsure at all Xaa locations
  Clone ID: PAT_MRT4530_88621C.1.pep
CGPLFACVKLLIRPSRSYYSGPNCSRCVVFWYYERAHQNKPQPEETIVYNKRCHRGHVSMHAFKEWPHPLTXLMRFDGYSRSNYFTIFRRYSXLFAFTLLGVNVDKSINTEDSPNVFHINGVVHHRIGSLLPQHDRTPQFAQLYICDTSNEINKRKSSSXSCNANGDNADRTIVHQLTSTXCLINTSNPLVQTFRMACDRLFSPKLPSVAICLIETISSPSDRYSLPTTNELATFIVGELTMQLYQ

SEQ ID NO: 192390 - protein, 336 aa, Oryza sativa
  Clone ID: PAT_MRT4530_88622C.1.pep
MGDVLMHYVTRSNSQNAIWEDAYQVITQDPEDCLTLIHRSYIYNVNMAIESAKVLHRQIDSIMVTTDGLKPSTLTGSAPGQRLAVTDDFESPVTGEGLSEVRATSNGPQLKPVTGIRIINHSSNNWNNMNITRQNSWVKEDLLAMDLSSLCVTGGKPTHVDAGGDDLGAEETKKRRSTYVDGGGGSGVKKGEGGGDQQPWSPGVPDPVVPNHLETGSGAHHLEAITGDHHRSSGTKKRSPELRDEEDPSEISRIQQGWEGRCGCAGAADGGRGGGRGPTTAAVSTARGSAAIDTSSRASASAHASRPPAPPTMEPAMEAASLGPNTVRPSAGARGE

SEQ ID NO: 192391 - protein, 100 aa, Oryza sativa
  Clone ID: PAT_MRT4530_88623C.1.pep
RKCRCAAIRRMVRSYEESMPMPLEQGWSSWSSEYYGGKGLLLEQGYYGEGLLKEGYLGEKQQQPGMTRVRLTRARQYGGQLPSMCRVEPQQLKKFAAGQY

SEQ ID NO: 192392 - protein, 70 aa, Oryza sativa
  unsure (1)..(70): unsure at all Xaa locations
  Clone ID: PAT_MRT4530_88624C.1.pep
SEEAAPQCQVALPRGEXGPRWGGGHSFPKTSRRRLPPNVTCPPSPEGSEARDGVAATPFFYIGRRMMPPH

SEQ ID NO: 192393 - protein, 383 aa, Oryza sativa
  unsure (1)..(383): unsure at all Xaa locations
  Clone ID: PAT_MRT4530_88625C.1.pep
MAADHLVVAMLLLLALSPPAVADDTAVLGRKGGVVEGQAAGPGRYAVILDAGSTGTRVHVFRFDNKLDLLKVGDNIELFAKVDPGLSSYAGRPQDAANSILPLLDKANTVVPARLMNKTPLKLGATAGLRLIGDEKANQILEAVRDVVHTKSKYQYNPNWINVLEGSQEGSYIWVALNYLXGLLASRSLRERMDHLATGMLRGFSGNFTYNGKQYDATAAPQGADYHKCREEVVKLLKVNAPCETKNCSFNGVWNGGGGAGQDDLYVASAFYYIASHVGFINSDAPSAKSTPATFKAVAEKVCKLSVKEAKVEYPNVRDHAYLCMDLIYEYSLLVDGFGLHPSKEITLVDKVKHGEYYIDAAWPLGTAIEAVSPKKRLREIYK

SEQ ID NO: 192394 - protein, 136 aa, Oryza sativa
  Clone ID: PAT_MRT4530_88626C.1.pep
MGLDEARRDLRECLRMMADDDRRCVARRGEPRQKERGKPAERMARGARATSLYPCGLREGGPLQQREESTYTTRCPDPKLCLASTPRAEVRARAEGPRLPTGACSSTLFGGWSNVEGWGCGPRPRVGHALTGSMTR

SEQ ID NO: 192395 - protein, 128 aa, Oryza sativa
  unsure (1)..(128): unsure at all Xaa locations
  Clone ID: PAT_MRT4530_88627C.1.pep
VTDKVYLLSYDLWNIPIRYTFAYTDRFHVHXRNPSKIMENISTSQAISKVLLGNLSWGQDDPRYKRXPREGCKASNFITNTPTIVCETGVRGAKSLEDLVELIDYDLTLVPTYPNTQLIRSTSITHRH

SEQ ID NO: 192396 - protein, 212 aa, Oryza sativa
  Clone ID: PAT_MRT4530_88628C.1.pep
MAALLGALRGKLHGCALRLRGDSLPVVVSVLAVAALCATALSRVVVFFLPLVASTSLCCAAAYLLVAASEPDQEGAAGAAAAKEVVLVRGDRAEVGVLQVFDGANATVYAAAADADAMRVGCFLHYRPRGAGGGGGWTKRGVDEDGEEVVFAGRLAAVCGGDGDDVEEELAALRVDRLAEGVWDSYFGGWSRWNYVTDGHYYDEDATIFLDS

SEQ ID NO: 192397 - protein, 143 aa, Oryza sativa
  Clone ID: PAT_MRT4530_88629C.1.pep
TRIEGSHLEGTDPSGCKIAASMRRVNRAHRGPRSSLRRCCPRRPSDGADEQRCDGAAPRDCFHGRGNKEMKFDGAMPEMWLTGEIRNRGGDEAEQAQPGAHARCSTDGLCGLDAALSRAPGRHGRRSHTARIHRLVGEVQQDE

SEQ ID NO: 192398 - protein, 2089 aa, Oryza sativa
  unsure (1)..(2089): unsure at all Xaa locations
  Clone ID: PAT_MRT4530_8862C.1.pep
VSTDGRSSTQTRLGLYCIVRGTISLSPTWRSTDPRYIRDPLGRTXDIEYHRQYTHHSLRNPRTNGPQYPLYPVYGYPLSTVAHQVGELGAQGSTIMISSLLDDSVNTGINQGASTSTMLVWTQVGEIVFPLYTTMPISTGPAIIGSENGVVTTPVDSMSKDPPAEVENGESTTSKPEKDPNVVKSYPSHKKYEPTRTTSGATKAWCPIHRTSKHTLQACSVFLNVQAEVRACKERGIQRTSPTHDVYCPIHKAKTHDLSSCKVLLSAIKTSPPKVQRSRISPRDEDKEQGAATTSDRFVRVIDIDPYEPSVLHLLEVQASSSTSTPRDVYAIDGTNTSGGGHTGTADQSVTPTPAQHIRTLNAILNESPFDPVLNTDLDQWAEXLRESVANFNNAFAEAAARAPPEQPPTGGANGEQPDQWTPPRQATPPPRGTSDLRDHLNGRREARLTQDNENRSQHRVSSRHRENEEQGGRPSENRDRDDRHQRVPRDTSXGRRRDNDDDGDRRRDNNYGRRXGLQEPEHHTRNRAPEPSDSSSSLSSSSSSSSDRHPRXAYDRRQPTAPGGGCKAFTRTLXDVRWPEKFRPGAIEKYDGSTDPEEFLQVYSTVLYAAGADDNALTNYLPVALKGSARSWLVHLPPYSISSWADLWQQFVANFQGTYKRHAIKDDLHALTQNPGESLRDYIQPFNECRNTIPEITDASVIRVFKSSVRDRYTTQELATRHITTACKLFEIVNXCAHADDALRRKNDKSKTGEEKKPAKDTPESSKKKIRRSGKQKAQTEVLIAEHVDPPKHPNPQGDDTKKIWCPIYKTDKHSLETYFIXKKALTKQLALEKCKRVRVVEKAAEATTQDSDSAYPDSGLHVSHIFXVPRRRYPIVVEPTIQDIKVARVLIDGGSSINLLFASTLDAMGIPRSELTPTDQPFHGITPESSSKPLGKITLPMTFGQVNNFRTDHLTFDFAKFDTAYNAIIGRTALVKFMAVSHYAYQVLKMPRPKGTITIQGNAKLAVQCDKRSLDMVEHTPNPPAIAEPPKKVSKTNKTPKPDGAIKIVPLSSANPDKTELALITFLCDNADVFAXQPSDMPGVPREVIEHKLMVRPDAKPVKQKLRXFAPDRKQAIXEELDKLLKAGFIRXVLHPEWLANPVMVRKANKKWRMCVDFTDLNKACPKDHFPLPRIDQLVDLTASCELLSFLDAYSGYHQISMAKEDEEKTAFITPFCVFCYVKMPFGLITAGNTFQRTVQGALNDQLGHNVEAYVDDIVVKTKTSDSLIDDLRETFDNLRRYRLMLNPEKCTFGVPSGKLLGFLVSERGIEANPEKIKAIENMKSSTRLKEIQKLTGCMAALSRFVARMGERGQPFFVLLKKQDKFVWTQEAEDAFIALKRYLSNPSVLVAPQPNEELFLYIAATPYSVSNVIVVKREKVYYVSEALHDAKTRYPQXQKLLYAVIMTSRKLRHYFQAHIVIVVSSFPLGEVVRNKDVVGRIAKWVVELSQFDVHFVPRTAIKSQVLTDVVIDWTMPENRSDSQTDSETWTMAFNGALNSQGEGAGFILTSPSRDQFKHAIHLNFRATNNTAEYEGLLAGIKATATLGVKRLIVKGDSELVANQVHKDYKCSSPELSKYLAEVRKLEKRFDGIKVRHVYRKNNIELDDLARRASRREPLEPGTFLDILTKPSVKEASDDGSTVVPDISSGATEAEHVVADIETTDDWRTPLTEFQSSDELPEDDAEAEKITRQAKIYXCMIGNDLYKKAPNGVLLKCISSDDGKHLLLDIHEGICGSHAGGRTLVGKAFXKGFFWPTALKNACDMQTHKTAIASAPDYPSYLAVLVLGARYTRTIPTRTGRLQVPXVAIDKFTKWIEATPTGEIKADNAIKFMKGIFYRYGLPHRIITNNGSQFISADFQDYCIGLGVKICFASISHPXSNGQVKRANGIVLQGIKTLLWAVRTTPTTSNKETPFYLVYGSEAMLPTELRHQSTRVQKYSDEEQEEQRSDDVNLLEEHRERVAVRGAGYXXALRRYHEKHIRARTLSISDYVLRRVQSQAGCNKLSPKWEGPYTITQVLRPGAFKSADGDGRELANSXNIDQLCKFYV

SEQ ID NO: 192399 - protein, 1238 aa, Oryza sativa
  Clone ID: PAT_MRT4530_88630C.1.pep
MAFYLMAGGGVKAAGVVASEVKVCDVVVWELLSVDPLNYDDTPIEGIRKILEELSGERIMRSSKIPTAKWSIGAGAKRQRTVTAAARRTATGATQHGDGGRVGARWRAEQGRGSWGGTFTDIYAEVPGRREGYVMKLLSVDPSNYDDAPIEGIRRILQEFSGERIPRSSKIPTGKIDWIRMGTTVATNALLERKGERIALCVTRGFRDLLQIGNQARPNIFDLKVSKPSNLYEEVVEVDERVELVGGGDGERDDGLSVKGISGELVRVAKPVDVEALKPLLKGLLDKGIRCLAVVLMHSYTYPQHELLIEKLSLEMGFKHVSLSSSLTPMVRAVPRGLTASVDAYLTPVIKEYLSGFMSRFEGGGEQVNVLFMQSDGGLAPERRFSGHKAVLSGPAGGVVGYSQTLFQLETSKPLIGFDMGGTSTDVSRYDGSYEQVLETQIAGAIIQAPQLDINTVAAGGGSKLKFQFGAFKVGPDSVGAHPGPVCYRKGGELAITDANLILGTVIPEYFPSIFGPNEDLPLDYDATKKAFEILAVEINSHRKSQDPSAKDMTVEEIALGFVNVANEAMCRPIRQLTEMKGHDTKNHALACFGGAGPQHACAMARSLGMSELLIHRYCGILSAYGMGLADVIEDLQEPYSAIYNVDSAAEASRRVDLLVKQVKEKLIEQGFGEDSIRTHSYLNLRYEGTDTAIMVKQPERESGSDYADEFVKLFQQEGHHAEIGGITPGSMPPFSKSIWEEGAAIKAFKLVERGVFQEEGIIHLLQSPSYDELTNHKIPGTRKIQDNLSDLHAQVAANQRGITLIKELINQYGLITVQSYMNHVQNNAEEAVREMLKVVASRVEKENGSCVIEDEDYMDDGSVLHLKLTLDSSKGEATFDFEGTSPEVYGNWNAPEAVTAAAVIYCLRCLVDVDIPLNQGCLAPVKILIPKGSFLSPSDKAAVVGGNVLTSQRVTDVVLMAFQACACSQGCMNNLTFGDDTFGYYETIGGGSGAGASWDGTSGVQCHMTNTRMTDPEIFEQRYPVLLHRFSIRENSGGSGFHRGGDGLVREIEFCQPVVVSILSERRVHAPRGLKGGRNGARGANYLVKKDGRRVYLGGKNTVMVNAAHLVDSTEVVGHFQKVLTSRGKFCICSIAIGVIVEVIIMFPIQHRFPVDAGMFPEHKYEIVRIIQREGHLCGMTGNGMNALALKKADIGTANIARASTEEGRHRAHGARLRGTHAESACAICDETKACGF

SEQ ID NO: 192400 - protein, 150 aa, Oryza sativa
  unsure (1)..(150): unsure at all Xaa locations
  Clone ID: PAT_MRT4530_88631C.1.pep
MRTLPTSSRGRGCPGGELGVPAEKTETGATASSACALGPRAPPTPSSMPPPLELAPCRPERRRRPAPASACXPRPKAMLPVVFVNGDQTVDLATVTVPPPSPLACRLRSSPVGRISVTGADSRAHTFSLSSSAHSIQLPPSSITAAADAP

SEQ ID NO: 192401 - protein, 67 aa, Oryza sativa
  Clone ID: PAT_MRT4530_88632C.1.pep
MNKTSSQIYLLELDSKGERALSSTVSAASSPGNQRDPTEPAVKDGAFGLQKLLSGTASLDNQALRVV

SEQ ID NO: 192402 - protein, 200 aa, Oryza sativa
  Clone ID: PAT_MRT4530_88633C.1.pep
LSSPISNVRSTAGGLFPSMGQNGEGPYLKGTKELSFTKGESGLKKGTRPAGYDSLPMYFNMGSVDTPMKEYRSSLLKTEVNKTTPFQVKDSVGKGEFDFGSRAEKPFILSGTGAGQNGHSKISDNAGFHEVHIQKTKVPPKENVLSFGKKSSVDEAPPGKGVSRWRSDESSEDEDDKRTSGYMESGASLATRRRARFSRR

SEQ ID NO: 192403 - protein, 75 aa, Oryza sativa
  Clone ID: PAT_MRT4530_88634C.1.pep
FFFFFFHHQPNWGQASFIACHATPPLTAPATPTVTFQQGTPAHQAIHSIHHTGNASGQAPPSFILFHCQHTHHHV

SEQ ID NO: 192404 - protein, 78 aa, Oryza sativa
  Clone ID: PAT_MRT4530_88635C.1.pep
VYPVGAFDPLGLADDLDTFAELKVKELKNARLAMFSMFGFFVQAIVTGKGPIENLFGRVAGPVANNAWAYATIFVPGK

SEQ ID NO: 192405 - protein, 138 aa, Oryza sativa
  Clone ID: PAT_MRT4530_88636C.1.pep
LRPTEHRHHQHPPEDKHRDLPWVHCQPLDHSLAIPAPQSTQQFPRNHEMARRRSSVVRGAVRPKQGRLAVGDARRCSTSGTPRPAAPDSPQQQQQQREHLLSTPRHPHRPRSPAAAAQPRSPGVRHPAGGVILFLPRA

SEQ ID NO: 192406 - protein, 59 aa, Oryza sativa
  Clone ID: PAT_MRT4530_88637C.1.pep
MAERSLRRRGKRTVLLRWNRASTWYGWGFGDFTVASQRLSQPLLSLRWTVGRLKVPRMD

SEQ ID NO: 192407 - protein, 637 aa, Oryza sativa
  Clone ID: PAT_MRT4530_88638C.1.pep
MANLPDAEFRPELFLPHGTNIEIPWNGRSPRADFTFQDWHYQDRVLGRVLVKARYKIVSDMPRKLVMSDAMAYGGQDEDLPTIWEMIPPNPHLNEHKHQGNWGNNANHDIKHNHNGLEHEIDHMREQQDENDMLVEPIPGEQQDSITALGDSPSPAKRQKTSRIDNPVVRALQFSVIDEASQPAPITPKPRKSRPKVPITSANLRRSPRFLGQDKMDLAFDVPKKKSKVQPIKKFKFEAGKGLPPPIPVLTAAEDWVFSTSSRHETWNLTNIYGPCAGELRNNFVSWLYNLEVDLNQNWIFMGDFNFIRSVKNRNLPGGDVNDIMLFNEIISNVGLTEIPLTGMAYTWSNMQDQPLLQQLDWVFTSTAWNLAFPNTSATALSKYISDHAPCLISIETSVPRANLFRFENFWVDMPGFQDLVQQSWNTNVRSSNQTVILNGKLKNLKRKLKFWSKRLSNLHTLITNCNEVLVFLDSIEEQRPLLIHEWNFRSILKNHILVLLKYKNEFWRKRYTARWVKFGDENPSFFQASATDSYRRNKISHLKLDDNRIVTTHEEKAQAQFNTYFQRMGTAVLSENHLNLNGLLHTDTDLNHLTSIPSEEEMNNIIKNMPLDRAPGPDGFNGLFLKKCWHIISADF

SEQ ID NO: 192408 - protein, 92 aa, Oryza sativa
  unsure (1)..(92): unsure at all Xaa locations
  Clone ID: PAT_MRT4530_88639C.1.pep
GFPLRAPVREALDKVYPXGAFDPLGLADDPDTFAELKVKELKNGRLAMFSMFGFFXQAIVTGKGPIENLFDHVADPVANNAWAYATNFVPGK

SEQ ID NO: 192409 - protein, 476 aa, Oryza sativa
  Clone ID: PAT_MRT4530_8863C.1.pep
MAKHKQDEMACRAAAAGADGNIGEDRGHLPPHERLSSTPCREASPPSEPTPIAPMVVLKITIFSIHGMRGNLPPLAAVTAAAANGAAVLLPLPHAKQLHARLLVSGPAPPDHDLRLRLLLLRSYAARGDLATAARLLDEAPPPSPLLHNALIRAHARRLDLRAALALFARMRRSRSSAATATAPDAHTFACVLRACADCSRPDVARVVNGIVVCAGMSSHPVVGSALVSAYAKLGPVGDARRVFDGLPEPDLVLWNCMMSGYGYRGMWNDGLDLFSAMRKAGERPDGVGAHTDIRVSSSLMDAYSKCGFADLAYGVFFQMPDKNLVMYNTVISNLGSHGFAMKAIEVLDEMVSDKLKPDSVTFSALLAACCHAGLLEEGWKLFRRMRDEFNMAVKTEHYVYIVRLLATFGQLKEAYGLIQTMPAPADSDKASYRVMLSNLYASQEMWWDAEEVREELWNEDVHKNTGISWVGNARK

SEQ ID NO: 192410 - protein, 150 aa, Oryza sativa
  unsure (1)..(150): unsure at all Xaa locations
  Clone ID: PAT_MRT4530_88640C.1.pep
SHASRLTCGEAVWFKAGAQIFSEGGLDYLGNPNLVHAQSILAIWAVQVVLMGFVEGYRVGGGPFGEGLDKVYPGGAFDPLGXLADDPDTFAELKVQXESSNGRLAMFSMFGFFVQAIVTGKGPIENLFDHVADPVANNAWAYATNFVPGK

SEQ ID NO: 192411 - protein, 542 aa, Oryza sativa
  Clone ID: PAT_MRT4530_88641C.1.pep
MPTRKKGLARNATTEHINPPNSRKSSRSTQAAAAEHKVNDLITSSSKKQIGGGLLKKNRALRGGKKLNSIYDSAGTGNDVAGVPSSSFFNHKQSHENDEDRSCDSIFSPSFHNQKEDVTDCLSEGLVHEEVIHEPVQNAEYVTNSISCNTFDGLSKHSYDIHMQSACGSTLEGDEFSELGSLSPEVSAIYLAMQHSKLECIDEQSQDSTSTDGCADPDETVELDYFDPYAFIKDLPDLSLVVPKFQPVLLPKQTRSCPRTTLVLDLDETLVHSTLEPCEDSDFTFPVHFNLREHTIYVRCRPYLKEFLETVASMFEIIIFTASQSIYAEQLLNILDPKRRLFRHRVYRESCLFVEGNYLKDLSVLGRDLARVVIVDNSPQAFGFQLDNGVPIESWFDDRNDRELLTLLPFLQSLVGVEDVRPCIARKFNLHRTAQHTIDYPLGPKTMLNESMGEGDAAYAKRVLLTRRRATTSPGGSPPPSPPMAADWFWSATRAPWLGRRRRRGAVGAEEMRSLWWGWISTAATRRPSTRRWARRGAASTA

SEQ ID NO: 192412 - protein, 71 aa, Oryza sativa
  unsure (1)..(71): unsure at all Xaa locations
  Clone ID: PAT_MRT4530_88642C.1.pep
PFXPXXPPXGFXSXSXLXXSPXGFXSXPFXXXXXXPLXXPLXGSCPXXCFLXXXXXXPXXXXFXXXXXLYE

SEQ ID NO: 192413 - protein, 84 aa, Oryza sativa
  Clone ID: PAT_MRT4530_88643C.1.pep
FSEDIAFLDTLSFKELWIIGKCHNGATVPGKILLNRLLKVLCDNWRQDLTQIWMETRYYEGLYYDVLRKPLKKIFMRKIEASEL

SEQ ID NO: 192414 - protein, 80 aa, Oryza sativa
  Clone ID: PAT_MRT4530_88644C.1.pep
MTAGSVGAARATLAGWGGAVEMTGGCVGYTTSPSTPQQHAHQAATITRIIVIITTMIILLQSVILGRQNEMEASRRARHS

SEQ ID NO: 192415 - protein, 57 aa, Oryza sativa
  Clone ID: PAT_MRT4530_88645C.1.pep
MESWKDVAVWSRDELDVAQCCPAFGSEARSSVVASIAAGHHSPATAINRHGVIVVLH

SEQ ID NO: 192416 - protein, 231 aa, Oryza sativa
  Clone ID: PAT_MRT4530_88646C.1.pep
MESVVVAGDLAAAPAPATPMWFVALVAVGLHAAVVWAGTFLAWLRRAFLRPGKGLCRRYGEWAVVTGATDGIGRAVALELARRGLHLVLVGRNPGKLSGVCKEVRAAAPACKVRTVVFDLAAPGDDDVGGGELSRGVARVAAAVEGLDVGLLVNNAGATYPCAAYFHEVPDAVWEAVLRVNVVAATRIARALVPAMAAKGRGAVVNVGSGSPVVVPAFPLYAVYAATKAYL

SEQ ID NO: 192417 - protein, 1384 aa, Oryza sativa
  Clone ID: PAT_MRT4530_88647C.1.pep
MISGGNAAFWLQSIRQQIVGITWQTLCELVCARFTRDRQEALIRQWFHAQQSSSVSEYVEKFDSIMHQLMAYDSALTPVYFVQKFIEGLRDEIRGAVMLQRPQDLDSACSIALLQEEILEGIKTVSSKRTESSSSIRQVPRTNQFSPVNHSPRTPTVVMTEDKRAIDASKAKDDRLASLKAYRRSKGLCFVCGESDTTGTDEGDPSMLMAISQQALWGTESNRSVRLRGWVQGAELLMLIDSGSSHSFIDLGVGKKLPGISPLPKPVTVKVADGGTMSCTHEIVDCSWWMQGHNFKNTFKLLQLGSYDVILGMDWLERFSPMQVDWVNKWMDVELSGKIVRLFGITPHTTTCCPITSDQLEGMAKCGSILCLVQLASVLQTTTDPIPASVQQIIQEFSSVFEEPKGLPPKRACDHSIPLIPDAKPVNLRPYRYNPALKDEIEAQVAEMLQSGVIQHSQSAFSSPALLVRKKDGTWRLVIDYRQLNAITVKSTYPMPVIDELLDELSGAKWFSKLDLRAGYHQIRMKAGEEYKTAFQTHTGHYEYKVMSFGLTGAPATFQGAMNATLQSVLRKFALVFFDDILIYSPDLESHLDHIKQVLSLLQRHQWQVKLSKCSFAQQQLTYLGHIISGAGVSTDPSKVQEVVDWAIPTTPKKLRGFLGLAGYYRKFVKGFGIISKPLTQLLRKGVPYKWSAETDKAFQTLKQALVTAPVLALPDFNQPFTVETDASDSGIGAVLSQGGHPIAFISKALGPRTKGLSTYEKECLAILMAVEHWRSYLQIGEFTILTDHNSLMHLSDQRLHTPWQHKAFTKLLGLSYKICYRKGSTNAAADALSRKFQDESELNLVSSCTPTWLLDVAKGYETDQFSLDLLTALALKPDAKPGYTLQSGIIKYKGRIWIGQNSTMQNALLAAFHASPIGGHSGFPVTYSKLKKLFAWPGMKQQTKQFVQTCQICLQAKPDRAKYPGLLQPLPVPEGSWQVVTLDFIEGLPRSSSYNCILVVVDKFSKYGHFLPLSHPFTAIDVAKTFMLNIYKLHGLPQTIISDRDKIFTSQLWEQLFTRSGTQLHLSTAYHPQSDGQTERVNQCLEIYLRCFTHATPSKWAVWLHLAEFWYNTAFHSALNTSPFEVLYGHPPRYFGIHSEDCAIPELQVWLKERRLMHSLIQQHLNRAQQHMKNMADKKRSFRSFELGDWVYIKLQPYVQSSVAARANHKLAFRYFGPFQVIQKFGSVAYKLQLPTTSSIHPVFHVSQLKAAKGFQGALHSTLPSSDDAFQYPIMLLDNRLIKKGNTTVSQVLIQWSDTAVEDATWEDLEDLRARFPEALAWGQATFQGEGIVKASGEEEPSASAKLKMKPVPDGEQEGGEEDLRPARVIRPNRKYVGPEWAM

SEQ ID NO: 192418 - protein, 212 aa, Oryza sativa
  Clone ID: PAT_MRT4530_88648C.1.pep
MKYLRRLEEYHVKKEGIGFELSELGDLTELGGELKIFNLENVTTREEANEAKLMIKTNLKTLKLVWSVVQRTTRSDVLDGLQPPPNLKTLVIINHGGSVGPSWLCSYICVKYLKSFHLEGVCWGNLPLFGQLVQLEELTLKSISGIHQFGPDFGGVTQKSISHLKKVELINMPDLVEWVGGAHCHLFSKITSIKCENLSIFYLSIYLLSIIY

SEQ ID NO: 192419 - protein, 138 aa, Oryza sativa
  Clone ID: PAT_MRT4530_88649C.1.pep
MPGLGGGERWGFELRDQKKKCIGVLCELEDDPITGYGVLETHSMSRVAQRSLDDGGSGFGLRKMLDPAINLPCVHAQGEAYGAVARPGLLQIDGDGHDVLAAALRACSRTTESAAVFPAIGCTNWTAVKRNGIGMEVG

SEQ ID NO: 192420 - protein, 50 aa, Oryza sativa
  Clone ID: PAT_MRT4530_8864C.1.pep
RLGSREFMPYPTVIYPISNGMYTFQKLSGVVSANTSVLAMARLLMWYHIT

SEQ ID NO: 192421 - protein, 644 aa, Oryza sativa
  Clone ID: PAT_MRT4530_88650C.1.pep
MGPIHPRPTKLGNPVNHSRLPSLALCPGSSSSSTSQVPAKERQTSGSNHLWFVPNATPPPTAPPTAHDLHAAAAASASASPCRCAPRVTRCRPLTPLRRKIRHRFEQKLVVLRGRKGEGFRAILGDIMMKQIFGRRKNAKSADKDFFSGTSPSVLDQVSGLGVADRATSNLGSQPPIISSTGLSYGSGNRVENPNTRTNGNLYSSSFQPLPSFKDVPNSEKQNLLIRKLKLCCIVFDFTDPTKNIQEKEMKSQTLLEIVDYVVSATVKFPEIVMLEITRMISANLFRTLISPPREKKVLQAFDLEEDEAVMDPAWSHLQIVYELLLKFIQSPETDAKLAKRYIDHSFILRLLDIFDSEDPREREYLKMTLHRIYGKFMVYRPFIRKAINNIFYQFIYETEKHNGIAELLEILGSIINGFALPLKEEHKLFLVRTLIPLHKPKCIALYHQQLSYSITQFVEKDCKLADTVIRGLIKYWPITNSTKEVMFLGELEEILDATQPAEFQKCMVPLFRQIACCLNSSHFQVAERALFLWNNDHIENLIRQNSKVILPIIFSALEKNVIEHWNQAVKSLSLNVQKLFSDRDPELYKECLRKYEENKAKEKDHKLKQESVWKRLEEVASAKATSGEAVLISPSLARTSSLV

SEQ ID NO: 192422 - protein, 469 aa, Oryza sativa
  Clone ID: PAT_MRT4530_88651C.1.pep
MAESRIFGGLKPTKSRLLGPTIRGPPPNGAATHAPRRILFSFSPESQWLGQSSTRACLPPLRSPCLPAPSAASPAYPRLASSAASASAPARLRSRITLPGGRSPVPPMDPAASAAESSSLSSRDVAAMPDSPPRRAARHRRAQSEILLGAALPDDIAFDADLGVVGEVGGGGGDDYEEEEEDDEEEEMEGAGGSRMFEMFLEAGGKLETPEPAAPLPPPPARPRHQHSMSMDGSTSLASSAAGVAGRMGADAKKAISDAKLAELALVDPKRAKRILANRQSAARSKERKMRYIAELERKVQTLQTEATTLSAQLSMLQRDTTGLTSENSDLKIRVQTMEQQVRLQDALNDRLRDEIQQLKVATGQVNANCGKVGNFGLSSFGGANPQGYQRSHIQSLLAAQQLQQLQIHSQHQQQQMHLQQHHHLSTVQQQLLQEGLPLPGDLKMKGIVAASHAQNAGASESHALRSEP

SEQ ID NO: 192423 - protein, 863 aa, Oryza sativa
  unsure (1)..(863): unsure at all Xaa locations
  Clone ID: PAT_MRT4530_88652C.1.pep
RSLILAKQELVNESKAVVVWDGGVGEVLEHESQELDLPLKVLDNTETTYDTXSALGEDLERYEIPSISDIERQREEEEKEEEXSFKEVSYKKKAKSKMEEPVVTSRMSPRHKDLAAIPVPKRAEILAXKKNLGNTDHDELNKIVVAANISLGNNELEIDRTIDTIKAKELVQAKLAELRWKKEEENKTXMKLRPKRSIIKGXSQTLRGETESCVGTIQEERCEEENSITNSDSVRKHHVGAYFLSCVIKNKRDNFTWEVMVVYGPVNDSLKPAFMEYLSWHILNKHIPFVIGGDFNMYRFASEKSNSNLNTRSMELFNNFISNFDLSDLHRCGPTFTWTNKQDPPTQEVFDRVVVSADWEAKYPNSILSFLLQVGSDHTPLIFDTRENLERKPSYFRFESAWLTKEGFKDLVIQKMIPRYGSYIMTYWNKKQTEFKKFLRGWGMNLNRKXLLKNDLQSLLKNLDTQADERELSMEEWNKRYELEEDLEHLYEMEELFXHKRCGVQELLYGDRNTEFFHRMANGRKRKCTITSLEEDGRVLNTKEELTYHILEYWKSLLRAEELSTVHLSQMVWQEELRLHETQKSQFIRPFKIDELDKVLKEAKLNTAPGLDGFNVYFYRVFWPEIRNDLFEMLLMLHNGDLDLKRLNYGVISLIPKSCDPTNIKQFRPICVLNECLKFLSKVVANRLTEVIHTIISPTQTAFIPRRFILEGCVILHEVLHELKIKKQKGIIMRIDFEKAYDRVSWSFLFEVLQKKKFPEIWIDWIKACDIGGRVCVNTSGERSEFFKTYRGLRQGDPLSPLLFNLVSDVLAAIFDSAKKNGLLTGLVPDIFAGGITHLQYADDTVIFIPYDSSQIRTTKFLL

SEQ ID NO: 192424 - protein, 87 aa, Oryza sativa
  unsure (1)..(87): unsure at all Xaa locations
  Clone ID: PAT_MRT4530_88653C.1.pep
MVGCEHMVLMVVLMTIKDRFTIFGCETLTVPTTSQHGQQLYLLHSMIHCGAPDXEVAEISPQGSLGSPCLVXYKGVIMIQEWCAMVD

SEQ ID NO: 192425 - protein, 104 aa, Oryza sativa
  Clone ID: PAT_MRT4530_88654C.1.pep
PALVVFVKCAALVLAGPTKLFQVPPPFPFIKAVSVIPCTPFNSSDNAPPLSSWAGPLLNPRGGGGPYPQTRPLLSNRGASFWDEIFSRCLFCLKKTNVHYQKNK

SEQ ID NO: 192426 - protein, 87 aa, Oryza sativa
  Clone ID: PAT_MRT4530_88655C.1.pep
KLTVGISLMPSPFARCSPRFLTRSALSSRWSFAVCVLIISYSFTLHLVGASYGSRLCAVWPLLGGQVQFPLCVSGPHGPLMSPMLPA

SEQ ID NO: 192427 - protein, 400 aa, Oryza sativa
  Clone ID: PAT_MRT4530_88656C.1.pep
MISTEEDSDSFQDDSEELQMQVTKKTLKRVISLAETFIAIATGILAAAFSAGKDVHLHRHVLAAGGCFLVVTYLSALLLIYMKLFLSDHRRLRRWHVRSLQLLCVTSGASLVATNSLLLVLIGEGNGLLSLNLLPVQGIVGVLAYHATPTEGSARDEAFEAQVKSARKVALFAAATAFAVQTTLVFGAFSNAALQAMGGRRLDLSVSFLASALSVFLVVATCMPLGFRNQGARDKVLSIVRYLKKGVMAVLAVTAVTLGQEFLGGAAALALFPEITVAAMYYAVSMPADEAAAAADRKMEVLPTVVVATFGFGMLGAAYAALFGTPEYDLYTKALAFTLLTAVVSSLGRVAGPLCNAQRDKSSAAWVTFLSSILPIVEMLVAVPLAAKVMVDFLAVPGNG

SEQ ID NO: 192428 - protein, 178 aa, Oryza sativa
  Clone ID: PAT_MRT4530_88657C.1.pep
MSALSSSSTSMSAGVTFALVDDDPGVDEMRWVKPGGGELGEYRHVDVYPGVVKGKRGMVAAVVALVDGRLSGIGHDLFLQIDAASSYRDFAGWFRVFRGTYGDPLSPLLFILAIDPLKAVLLKATDFGMLAQLNGRTAHLRTSLYANDVAMPKHLGGLGVLDLDRFARALRLRWLWYE

SEQ ID NO: 192429 - protein, 238 aa, Oryza sativa
  unsure (1)..(238): unsure at all Xaa locations
  Clone ID: PAT_MRT4530_88658C.1.pep
MPWHSIPYPRGTTLLYWTRADAHATKRTSVPLLEGGGRKKKEEGEGLPLDHPXVGAHVHPPPIDQGNNGSNHTSLPLDHAGVDVHMPVLAQLTTTGFHPRISSTHGSSSTKAKVTPADIDVDDDDKADIADTARINKDNEYLYEFIYPHMKICLKDFDDDDKGLEGEVPSYKECGARTEDSPHIASQALPCWRDLHPRISALHAFRTLSFRENVYTPVVCDITILLEFFDCFQQTGIP

SEQ ID NO: 192430 - protein, 262 aa, Oryza sativa
  unsure (1)..(262): unsure at all Xaa locations
  Clone ID: PAT_MRT4530_88659C.1.pep
DPLSPLLFILAIDPLKAVLLKATDFGMLAQLNGRTAHLRTSLYANDVAMFVRPTVNDMRHLTQILHSFGEVTRFRINISKSQIASFHCTGIDLQEILXVFPANVTGFRIKYVGLHLTVSKLKKKXVHIQPLLDKYKTRLAPRQGKMMTTTGRKSLTKSVLTAQTIYHLIAIKVPDSMLHSIDKMRRKFLWARGEDISGRGRXGECKVNWDRICRPKHLGGLGVLDLDRFARALRLRWLWYEXMEPDKPWSGTVSQCRQQPDE

SEQ ID NO: 192431 - protein, 265 aa, Oryza sativa
  Clone ID: PAT_MRT4530_8865C.1.pep
MPSSTAVVPAAAEASSRIILVHGTGHGGWCWYRVATLLRAAGHRVHAPDLAASGADARRLRDDDAPTFDDYSRPLLDAVRALPDGERAVLVGHSFGGMSVALAADTLPDKVAAAVFVAALMPDCASPRPDVIEKLPLTDWVDCATDEEHAPPSVLFGPEFMRRKLYQLSPEEDITLSRSLVRVSSYYVDDMRRQPPFGEDRYGAVRKVYVVCGKDQAIVEAYQRRMIAGCPVEEVREIAGADHMAMFSAPVELAGHLADVANTYT

SEQ ID NO: 192432 - protein, 123 aa, Oryza sativa
  unsure (1)..(123): unsure at all Xaa locations
  Clone ID: PAT_MRT4530_88660C.1.pep
IPCGRGVVVVGGARRPPPCGGGGGRGIWRAAVAPTRIQRQWPSTQESSGGGHPRTDPAAGXPSPRAGSSSAPLPFLPSLDPAEGRGVGGVAAGGERGSDGGWRGGQREAGGTVAIGWKPTAGF

SEQ ID NO: 192433 - protein, 1128 aa, Oryza sativa
  Clone ID: PAT_MRT4530_88661C.1.pep
MGVGGEKFQLGTVGALSLSVVSSVSIVICNKALMSSLGFNFALWMKFFEHKPFDSRTVMGFGVLNGISIGLLNLSLGFNSVGFYQVQDDKAGYHPMHCYFGDSFLQEEVQFFIVLSCLISVSVNFSTFLVIGKTSPVTYQVLGHLKTCLVLTFGYVLLHDPFSWRNILGILIAVVGMVLYSYFCTLEGQQKNAEVSPQQAKEGDSAPLISDSLSKVENGGGVVDDEPLKLRAYQIYQNSGKSDENGPNKMRGFIGCNALPVCLHLARCNTILPPFFFCENCDLGYFKTGRGRRSSVVAGAELVVAVAAVIAVGGGTVVTTVAEVGGGMTASDGYPRVWQTAASGRAAAFGGGVRDRLGAERRSRWQRRPARRERRRRRRWRPAWHERRGRWREAGLAREARPMEEAGLAREARPAVEKATSVRGGAVGGCGAVFGARRLAAPGRGEGGTVAVVPHVGRVRGARLLPPPPGGGMLAKMQSCRWILAYLLVVLVSLHGGANGFYLPGTFMHTYTPNEVISAKVNSLTSIETELPFSYYSLPYCKPPEGVKKSAENLGEILMGDQIDNSPYRFRVNVNESVYLCTTDPLTKEQAELLKKRARDLYQVNMILDNLPVMRFTEQNGVTIQWTGFPVGYNPMGSNEDYIINHLRFKVLVHQYQAQGDVVITSEDGVAMVESDRKSGFQIVGFEVVPCSVRRDPEAMSKLKMYDKVDSVKCPLELEKSQAIRENERITFTYDVEYVKSNIKWPSRWDAYLKMDGAKVHWFSIMNSMMVVFFLAGIVFVIFLRTVRRDLTRYEEMDKEAQAQMNEELSGWKLVVGDVFREPCCSKLLCVMVADGIQITGMAVVTIVFAALGFLSPASRGMLLTGMIILYLFLGIIAGYVGVRVWRTIKGTSEGWKSVAWLTSCFFPGIVFVILTVLNSILWGKKSTGALPISLFFTLLALWFCISVPLTLIGGLLGTRAASIEYPVRTNQIPREIPERKFPSWLLVLGAGTLPFGTLFIELFFILSSIWLGRFYYVFGFLFIVLFLLVIVCGEVSLVLTYMHLCVEDWKWWWKAFFASGSVAFYVFLYSINYLVFDLRSLSGPVSATLYLGYSLIMALAIMLSTGAIGFLLSFYFVHYLFSSVKID

SEQ ID NO: 192434 - protein, 157 aa, Oryza sativa
  Clone ID: PAT_MRT4530_88662C.1.pep
MEGLGGQAEAPEERARRGELTEGRHDDEKRLAMRSGVTTGYRSMVAAEFQRRETTTEGWTGFSSQLRCRGRLRRGPATLGSMRRLRRRSKQGGNPLVHGDGNLPAGFGAKEPVAGVELTLAKPREATAQGGVDQRGGAALLEMVAALEREGLAGRDG

SEQ ID NO: 192435 - protein, 986 aa, Oryza sativa
  Clone ID: PAT_MRT4530_88664C.1.pep
MAAGWMGKVVTRVKCDSQVLRPSVYDHCRTGHPTATNKPEDPTNEDDENEHKNVQAANAILSALSGSEFNRVDDIESAKVIWDTLRNLHEGTDSVRESKVEILKGQFERFVILDGESPSDMYDRLNKIVNEIKGFGSKDMIDEVVVKKMIRAITPRNSILVTIIRERPDYKTLTPYDLLGHTLAHDMLKQESKEVIQFINQSSTTSIKKEDLALKGSSSKHYSNKSSGRHSARVCYMCKEPEHFIADCPHINEEKKKIEKKVEKKEKHKHSKHDHYGQSHLGMIFGSDSESSSSNEEGVATFAVKPSSAPRLFNYSSDEDAPICLMAKKPKVPSSLKSFNVDLVSDEEDDVQDEVMDEELFKSITKESLPHLSEFLGRIEDQYATLERQEALLIREKERSHELKGPQIGTTATFTELGKREKVASVNALCKLFDQPTAIQQWSTVTALISSYATARRRGHGSFPSAASHGCRSGGSRLSACGGAARRRRLWQRHLLPLLRRRQHPGGGPFYLVRQTTASEAVKAATAATADRSSSVVSDGEYYALAQCRADVPAGDCSRCLAACLGVIGGSGDDLCEKAAVRYDDRCLLRFAKGDDFTGFDVDEHTATVFDGGRSGLTVAEEVPTRLLATVAAAAPASRSRTAAGIASYGGGGSLYGLAQCTTQIPAPDCARCLRGALSRLSEDFNSTAAGMQLLRSSCMLRYGSSLFFNQSSPLLPVAHLAIAPAGGGAGPPAAAPPSPGHRPARARTIAISAGQPGYQTLVNSTGKFAERNKLGSGGCGTVYKGILHNNEEIAVKKLTRKDLREVEREVSLVAQLQHENIVKFLGHCFRHDKMFLVYEYLSNGTLSRYFKSDCQKLDWPKWLNIIRGIARGLSYLHRDSGKDIVHRDLKPSNVLLIPTSMQRLLTLILQDHTTGTKAMRALKREQAPRKNTTRIYWFHCFSLKWIHSSRTVCGRGILYQIGCVQFRRDDSGDHSWSEHQQVRQR

SEQ ID NO: 192436 - protein, 200 aa, Oryza sativa
  unsure (1)..(200): unsure at all Xaa locations
  Clone ID: PAT_MRT4530_88665C.1.pep
MHRCSTITQPLPTCGTTATVPPSPLPGAASLRAPKTAPHPPTAPPRTEVAFSTAGRASRAKPASSIGRASRANPASLHRPRLSCQAGLHLRRLRLSRRAGLRCHRLRLSAPSRSLTPPPNAAARPDAAVCHTLGXPSEAVMPPPTSATVVTTVPPPTAITAATATTSSAPATTLLRRPLPPHRQRHRRSALPPSIELLTL

SEQ ID NO: 192437 - protein, 81 aa, Oryza sativa
  Clone ID: PAT_MRT4530_88666C.1.pep
MGAHVSRRVDPPSLTSGAVAGAGRSAAPDFGSEGDGRAATAAGSGGHSAPYAHCLHKHTHNANRYLYRPFVQMASSTAWEI

SEQ ID NO: 192438 - protein, 85 aa, Oryza sativa
  Clone ID: PAT_MRT4530_88667C.1.pep
MDISRTNEGYTSCGPVVEMSWHRAGVLLLGAQSCLPVPGVPAVAKAQHTQRQTGNSGRLGRRPQALDGRHELYTKAFIFKELLFW

SEQ ID NO: 192439 - protein, 97 aa, Oryza sativa
  Clone ID: PAT_MRT4530_88668C.1.pep
MGEEDSAVEADLLNASVSTLTTGETNIDSFRQHYTGAEERAAMPIRSRKRARRRHAMPLRRRGHEPPVARVEAEALSKSTSTSTSTSTTLSSSFPAR

SEQ ID NO: 192440 - protein, 426 aa, Oryza sativa
  unsure (1)..(426): unsure at all Xaa locations
  Clone ID: PAT_MRT4530_88669C.1.pep
MGNAQASASSTSSPRFSMASRAFSRQELDDLRALFVSLAAQSQTGGRAISRPVFLEYFGIRGALGDRLFQLVARESGGGEGVTFEDXLIVSKATYERGTRDEVDEFIYQLCDVTGDEVLERSDLETILASIRETIFSENKEAGEGSNKRTFEAFINSAVFSKDAEGVARKSMSLSDFRSWCILIPSLRKFLGSLLMPPDSGRPGFQVPALHYLENISPDLLLLNKEYAWHIGGGFSQQEVQEWRLLYHSSLHGQSFNTFLGNVTNGDAQTVIIVKDTEGFVFGGYASHPWERHSDFYGDMKTFLFKLYPEASIFRPTGGNRNLQWCAVNFSSDSIPNGIGFGGQPHHFGFFLSANFDQGHSFTCTTFTSPALSKTNRFRPEVIECWGIQTKGALDEKAELVKGTVLERFKEDRNMLKLVGLANASD

SEQ ID NO: 192441 - protein, 408 aa, Oryza sativa
  unsure (1)..(408): unsure at all Xaa locations
  Clone ID: PAT_MRT4530_8866C.1.pep
TEADLVCQPRRAADKRTPLDTTRVAHVETTRLPSGHTKADTTRSPPARVNDYRHRYTGTGVDDRTTSXGRHRKGEDGAARXRKPYHHATRRGNDNDERARRRQTGTTETNGEGTASAAILGQRRDAAGTRLDDAEPRTNTRTGLXGSLDERGRRTRTARRRDERHDDRERREDDDDGDDRDRRGGDEDSWQRLHGDEDDVEHAAATLVKVVVQRGDEPTRRKERPARRRRRSGEVRARRRWCRGXERRRGAEEGGGDVGRRSGDVAEAAGGGEVVATPLDAGEDASPVLSPRNGGLTEGEGAAARPREKTARPGGARARRGRRLEVAGAKEREGRRRERSSGGHLAKRRASRGGGGGGDAGGGDGAAGRRSGEAGEAAGGXGRQRGRERATVGRWLETTGELGKRLKR

SEQ ID NO: 192442 - protein, 81 aa, Oryza sativa
  Clone ID: PAT_MRT4530_88670C.1.pep
HWIVTEMTTCCSPGQSVHTSEQFAASFEDGSSSSTATPPDAPMPPMQTNRTANALLPLASGYDDECFTAALAGGYMGLDGT

SEQ ID NO: 192443 - protein, 255 aa, Oryza sativa
  Clone ID: PAT_MRT4530_88671C.1.pep
MVLCSMRKSFKDSLKVLEADIQHANTLASDFSRDYDGACLQMRMSYSPAAQFFLFLVQWTDCSLAGALGLLRILIYKVYVDGTTTLSTHERKASIREFYAVIFPSLMQLHKGISDVDDRRQKAICTERYRRRDEDESKRHVSEIDVEREEECGICMEMNNKVVLPNCSHAMCMKCYRQWRSRSQSCPFCRDSLKRVNSGDLWMLTDDRDVIDMATITRENLRRLFMYIEKLPLVAPDNIFYAYDSHRMFLVVGCG

SEQ ID NO: 192444 - protein, 106 aa, Oryza sativa
  Clone ID: PAT_MRT4530_88672C.1.pep
FFFFFFFFFFFFFFFFFFFENQKTQHLKLLGRKGNQKIKTPNKKAPPPLKMGQLDTLKPNNFKCSPNPTRWGKTPLWGKTTQARSQTPMPTKNGLDRGSRPHPGSI

SEQ ID NO: 192445 - protein, 49 aa, Oryza sativa
  Clone ID: PAT_MRT4530_88673C.1.pep
MGREAKEVNGGFHRKQRTYLRWEQWIKKLQFITIGSRSKAREAGTGSIS

SEQ ID NO: 192446 - protein, 94 aa, Oryza sativa
  unsure (1)..(94): unsure at all Xaa locations
  Clone ID: PAT_MRT4530_88674C.1.pep
HASVNNKVVLPNCSHAMCMKCYRQWRSRSXSCPFCRDSLKRVNSGDLWMLTDDRDVIDMATITRENLRRLFMYIEKLPLVAPDNIFYAYDSHVK

SEQ ID NO: 192447 - protein, 193 aa, Oryza sativa
  Clone ID: PAT_MRT4530_88675C.1.pep
MHGNGMMALASSISRSSKVHYYCGKDHHKVCKFAAIHAYSSASSLPTNVNIMVLMIQVKGINRSDVSKRQGIMSGFAKGSYKSLGSHPIRDGNSSLSPLYSDRALATGDSKRSNMAFPGGADPCGDGITASIHRLFLSSRLPMRDTSIVGIDGADNRTLQHVWSSGDGAESVIPLIQQAGTLILVSLSGACLA

SEQ ID NO: 192448 - protein, 1098 aa, Oryza sativa
  unsure (1)..(1098): unsure at all Xaa locations
  Clone ID: PAT_MRT4530_88676C.1.pep
MAGVPSDLVSRPELSYCMVAGTVEVERLHVLYTVRSVVAWTGEGQHVDLNTIADDVHSAYRIHRNDIQVTKYHLENFFLTFTIHGDREAVLQEPRLVTRSGREYFFRPWDEKKNAEAADIIEGVPMHARTEDSVAKLIGPWCSVHYIEEDTRRRNYNRTFDVWVWTSDPSSIPKVLRLTVTRPDEEGHPMNTPFPDLEPEQPAPREPKKGLTYPVIIHLRWLTPCTPLTLLSHALXSPVFILSAAGQGSQATTRGKGEQTADVFFAELSTPVLQPLLPVPGHKQHRPCRNKVTISAHRHSARLATKARXNTKLETIAQEILANKFGVLDDNKRLDTQIKNLYLQQXKKPLSPAAVKTIAALVEKGGCKSVRLRGGRKLAAQSCFILYWNIRGLNNPAKKDSVKLLIDDMKGSIVCLQETKLXVVSDSVVLRTLGSRFVSEFAFLPAIGTRGSMLLACDDNFFSLSDVVLXQYSLSATITMKMESISWSITVVYGPQLEEQKIEFLEELQELEANMRPAXLLIGDFNLIYKAAYKNNDRLYRRMMQRFKGAIDRLXYKITXTGRRFTWARDGTNPTQTKIDRAFCTPDWDTLFGMAHMSGLSSSCSDHAPLFIVGCEQREINMNFRFEAFWLKLPDFMETVAKSWNRPIRSINPFAKLHLKLCRLARDLRRWSKSHIGDLRLRLAIANEVIFQLDVAQEDRTLSDEEQCLHKDLKISQTXRQILMKKISKKPSLIWQQKRHQGLMDSXGSFFKKAWEVIKSDIILAVSHLGDLNSDRLQDLNLANICLIPKKEEAFRVYDFRPISLMHCFAKILSKILANRLAPKLNELISQNQSAFIRKRAIHDNFLYIQNMIRLHSRXKKPSLFIKVDISKAFDSVSWAYLLETLQNFGFGQKWRNWVSNLLGTSSSRILLNGNPGEHIYHALANLFGWQRHFRCSLYADDVALFAKPSEDELTVLKRILQFFAQISGLXHNMNKTEIYPISCSGLDLDGILTSFPGNRKSFPCKYLGLPLHTRKLRKIDLQPLVDKIGSRIPGWKGMFFTSAGREVLVKSTLTSTPIYHLAVLPQNKGTIAYLTPFRSEGVWVGGSGGLMGCGAAL

SEQ ID NO: 192449 - protein, 91 aa, Oryza sativa
  Clone ID: PAT_MRT4530_88677C.1.pep
SNYNSGLLHRSNAHAIWFINLKHSDSAGDRRQKAAAGVSSTALEASPPTARRLPMSSSGAVVIASPSAAAARGGIRRLVAAGDGENRGPGR

SEQ ID NO: 192450 - protein, 430 aa, Oryza sativa
  unsure (1)..(430): unsure at all Xaa locations
  Clone ID: PAT_MRT4530_88678C.1.pep
MAQAVLRDYLAPYVANVPIRPXSNTGDANFQIKTGLIILMQASSSCGKADEDVDAHLQQFLELYDTIVIRQVANESIPEAWETLHEYILAYLHHGMDDWLIVQNFYNRMIPAAYDHIDSAVEGAFFSLIVACATDLIERMGMNTVNETDMLVAKMDLLMKRLDERACDKVEVSGSVLHEQQQQQQQQQQQQQRFLIAVQNVLVLWDSVILTGVLGGLPHCHFAMLAHSSQWTQAQGPESNMQNVSYSLLVTHIVQFALLVVVLLLVAKIERHGESRHIRPVTTSAQLGVETQQFEGVMLVDPISCIPPYATLIELPADPFPPDNISSIPSLKKCKKSKGTNVVITDTDRRSARLNKLTKGFLSPNPNVAIGKARGKSAKILKLIAEQSGIISSLRPLPPSFFNPDEGNELERWSWVLAAPQLHSRHNSWS

SEQ ID NO: 192451 - protein, 59 aa, Oryza sativa
  Clone ID: PAT_MRT4530_88679C.1.pep
QNRFLKLTSIKGEPQMAGLRFWAKKRPIQGPKNQLKLKKAHRDREKKIPYPQPSNTTSG

SEQ ID NO: 192452 - protein, 307 aa, Oryza sativa
  unsure (1)..(307): unsure at all Xaa locations
  Clone ID: PAT_MRT4530_8867C.1.pep
VNPKATEAVAGPALLHHAHPCLGASAREKLHYKPSRCPRWLVAGPTRQRDKEXRSTVDRDHXAVHRRSTRTDGPDQPELIGRPRDGAAGHGHGSGRPGRATARGGAVTGGDNRRWRTRATAAHAGGGGAHGRRRGGGGMRASHPGGGRSGGRRRRQRXPATFRERETAADGRRGEDESGDDWRTRRDCRATDDGCGTGEGDGTARGGLKRRRGASGGGXATVALVGSGEGGSVVDWRNEEVAGARLGEVKPTVAVARLGGGXRGEERRPEFGGKRRREVTRWGGRERARGAREFGENGRGGPGGCFL

SEQ ID NO: 192453 - protein, 74 aa, Oryza sativa
  Clone ID: PAT_MRT4530_88680C.1.pep
SASTYNSQQVLYQHPHTIHNWYFTGILVIQMLKPKKGQENKTHGTSYDSLTMDNTSPLHLNSQLSELRTDATDS

SEQ ID NO: 192454 - protein, 134 aa, Oryza sativa
  unsure (1)..(134): unsure at all Xaa locations
  Clone ID: PAT_MRT4530_88681C.1.pep
GSRFPHIMDKPLRPALSTLSCTHQSGQQPXPAQLYISHQLSLPSDSQQQQRANSLTHLGVCLEIVAPKFPNWSNQSTRSKQRHSYTCHPCVIIPTRFRPGNQRGAIPAGVNPRFKVXPKLLYLGXKEALEDPLC

SEQ ID NO: 192455 - protein, 42 aa, Oryza sativa
  Clone ID: PAT_MRT4530_88682C.1.pep
HWYLSTKGGKLLRRTGNIILPFQQAFVLRLTRSGADPDRWVN

SEQ ID NO: 192456 - protein, 103 aa, Oryza sativa
  Clone ID: PAT_MRT4530_88683C.1.pep
FCSSKIHHLTYPLTHSFRSMPAGNHFPNTPSKFEFYYIHFFFFPSPNSLTFFSFVLHKKKTKENPGGDFFHRPIIGFTSLNLLSFLRCPGPYEIDHTLNLTAF

SEQ ID NO: 192457 - protein, 327 aa, Oryza sativa
  Clone ID: PAT_MRT4530_88684C.1.pep
MASNIGIAETKNARRRSEAASSTAVDAAREEATMAYVEAHGGRKDKLLVSSERPRVRVRADALRCLAVPLSRDGPERQITGVLLDAALDLLRRRQAGRRRRRNGRRVLLGSVEEQDWLEYVSSLPPRTAAAAGHDADMSATGARYLAHDTVLFPVNHQSHFFVAALDVAAGEYRILDSSNYGRRFGPRFYDAAMSKIRGGVARCVAAAGRAGAEADAGGWKLRMVAGLPAQTDESSCGLFAIKCMELWDGEKLERGFTMDDVHELRRKLAGELIFWELNEMQEVKDEIEFMARKMMMMMSSSSPLRNCGDRVKLATLGGAGGVRVCY

SEQ ID NO: 192458 - protein, 579 aa, Oryza sativa
  Clone ID: PAT_MRT4530_88685C.1.pep
MGLEESQKHLLGLNYHELQSLCKQYNLPANKSHSQLASSLALFLEVAKVAIKEVRKVKEMMVIDLFCMLLDISSLVFNNIRNSFSIDQLAMDSGTRVSSTPVSINNGKVDCFSHSPPRQVIASNVHSQSADGIGKNLGTQEHPIHLDSTAKVDDEISPETSYQAPNVVETVTDIGSGSSHKISENAKSSFEFFVMSDEGLDLVVDLNSTPSMLLDSLKKEVFIPSSTCRSEPGNFSHFISSLTTKDDSNNSISSSGNITVDIQNKGDDSIAPCTNSSLGSTGGDNSHSEPYLPDATAVNSMSFASTLPGTSLEISGSQEGVPVVSSSCLTSMTANALNNEVLPQESVVLSKCPERNHAPLAYDSTHPTGNKDTVNPVKIGCTQNVVADTDRAGAFSSGGVVRSASNENFCPTSEEKHETLNVPGAQLTPNGNTHEVILENEPVEAVPVDEDRGCHDRLSMSCQLARQTVTKLPVTDAQSEASSADHCIAGSFKPTSPTPSPAASIKLLTFNFLVQGNAFSSKHDAESAQSSDELEELESKTPSSFEPPRNILLSLRSASAKQTKPTLPRRSARLVPKYY

SEQ ID NO: 192459 - protein, 511 aa, Oryza sativa
  Clone ID: PAT_MRT4530_88686C.1.pep
PGVDFDEVFAPVARLESMRMLLARAAQAGWPVHHMDVKSAFLNGELTEEARHAWNAKLDTSLLSLGFRRNDCEHTVYGRGSGDSRLLVGVYVDDLIITGNVVMEIDRFKAEMMSLFKMSDLGPLSFYLGIEVEQVADGVRLLQKLYAQCILERAGMQGCNSCSTPMEPHLKLTKASTAAMVDATQYRSIVGCLRYLVHTRLDLAFFVGYVSRFMEVPTTEHDVAVKRILCYVAGTVDFGCYYNRMEMPPELVGYCDADMAGNVDTRKSTSGVVFFLGANPVSWQSIKQKVVALSSCEAEYIVAMTAACQGIWLAQLLREIEQEEPQSFKLLVDNKSAITLSKNPVFHDRSKHIATCYHFIHECVEDGRAQVEFIGTDGKVADILTKALGRVCFQELRPRIGVVEDSWQRPILATNSLANFRLKLRRLARDIKRWSRNQVGDIKLQLAVASEVIFQLEETLDLAQLEDDITEEELKVTVFSMPPEKALGPDGFIGVFFKAAWEIIKEDLLTT

SEQ ID NO: 192460 - protein, 604 aa, Oryza sativa
  Clone ID: PAT_MRT4530_88687C.1.pep
MAYKLPKKGNHNHDENRRGYDDKFKAIIADERTYKWNYLKDKQKKVTLQIPVLYPSKSSIRPPFTQLTDKNIGPMAKGDSKSNHVLAPMLRKEGLLANSIEKSNPQLTSPIRAHPIHALVRTKKGIPARSVLKSNPQPIRPKQMRGSVRGVSLKGQSTMANDNSGEELKSCKVKNYSISKESAKELMVHKGNSYEDNKCDKICGEVTMGDRKHHVNLGSTKSLKRDYIPSTCGDHYKDNTKGNEVPNPSPLTKDGPKKHDRDECEDYKNLRPTKKRRRYIVNVDEEDDYDDKNPMDIKDSTKVAMPIAAESIKRQFYHCIQPIDEPIWSGIFKIGGNDYIPFSAHLSTKSCKKVWDLSVSIPSIVQVTKLSRSVVWPKSLEASSPTDDSIGLYFFPPKMRLDKGMDQLVKEIVEKDMALSAVIGEAQMLMFPSTLLPEKYRTFQGKHYLWGVFKRRGGDEQQAAAMAAEQQRGSDQRVKQEQENTQFQGDETQQRIKKPNSNLQETAVIKQQPSSPSSSSVTAAHIGVDVVQEKSTAASGGRPAVPAGSHGRVIGLVVRQTPGVEELIQQMRRGGALLATMEGEMMGGFEANDDDGAKKFKMVE

SEQ ID NO: 192461 - protein, 1344 aa, Oryza sativa
  unsure (1)..(1344): unsure at all Xaa locations
  Clone ID: PAT_MRT4530_88688C.1.pep
SGRSGDGWVAGPRGSEAAAGGQSNPVLFVLRPFVGSERKAKQVGGSGRAATGERDNGRKAVTGGGRSGRGLVLRRVVKEVGGSANYPILTKTNYSDWSLLMRVMLQARGLWEAVETGDVDFQEDRMALEAVLKAVPADLLPVLAVKETAKDAWDAIKTMRVGVDRVRKSKAQELRKQFDANEFKEGESVEFSVRLSGLVNNLAVLGFQLEESKVCEKFLHVVPDHLEQIALSIETRLRNAEERRPKKKSGDEGGKLYLIEEQWAARAKERQSGEGSLGKKAGNNRRRRGGRKKSKAAADGERGARDTHDQGRDKCKNCGCLGHXAKDCRQPKKQVAAHIAHGEEEDDEPALLMAHAIELAPPPSASPPPAGLLDLDEPKVFAPLHRQEHVDTGVWHLDTGGTNHMPGVRDIFAELDTAVRGKVRFGNGSVVAIEGQGKIIFECRNGEHRALTGVYYIPKLNANLVSLGQLDENGCNVRIFHGVCTIRDTARQLLARVQRTRNQLYLIKITVARPMCLSARTQEAAWLWHARFGHLYFDALRRLARQDMVRGLPQIDQVEQLCDCCVITKQRRSPFPWRSLFCAEDRLELVHGDLCGPISPATPGGKKHFLLLVDDASRYMWLALLQNKREAAVAIKRFQARSEAESGCRLKLLRTDNGGEFTSAEFAAHCAESGVKRQLTAPYSPQQNRVVERRNQTILGMAQSLLKAKSVPACYWGEAVTTAVFLLNRAPTKCLDNKTPYEAWFGRKPAVGHLRTFGCLAYVKDVRPHVTKLQDRNKPTVFLXYVEGSKAYKLFDPKSGRVQVTRDVVFDEGASWDWDATDGMHSPPSSDFSVEYIVTQEPERAELSTPTLATPRHGAVAHDAPSLTASLLNARSPRFVSPPQDGDDNLDADADDCPPRYRSIDGILGXAYTPGLATRDLADGELYLLAAEEPTTFGEAEHHQEWRRAMLQEISSIEDNKTWRLVDLPPGHRAIGLKWVYKIKKDARGMITKHKARLVAKGYMQQPGVDFNEVFAPVARLESVRMLLARAAQVGWPVHHMDVKSAFLNGELTEEVYVKQPPGFIVDGREHQVLRLDKALYGLRQAPRVWNAKLDASLLSLGFRRNDCEHAVYGRGSGDSRLLVGVYVDDLIITGNVAMEIDRFKAEMMSLFKMSDLGPLSFYLGIEVEQVADGIRLSQKSYAQRILERAGMQGCNSCLTPMEPRLKLTKASTAAPVDATQYRSIVGCLWYLVHTRPDLAFSVGYVSHFMEAPTTEHDAAVKRILRYVAGTVDFGCYYKRMETPPELVGYCDADMAGDVDTRKSTSGVVFFLGANPVSWQSIKQKVVALSSCEAEYIAATTAAC

SEQ ID NO: 192462 - protein, 55 aa, Oryza sativa
  Clone ID: PAT_MRT4530_88689C.1.pep
MERDGPCDGLCRFRIHLGMRVDCPLPVGSGGAMTCWWIVSCGYSGASMARVKLFE

SEQ ID NO: 192463 - protein, 83 aa, Oryza sativa
  unsure (1)..(83): unsure at all Xaa locations
  Clone ID: PAT_MRT4530_8868C.1.pep
MVPGGEEAAARKRYDALMQVRAKAVKGKGAWYWAHLEPVLVPPPGSGVPPKAARLRCVLCAATFSASNPXXTASEHLKRGPQL

SEQ ID NO: 192464 - protein, 167 aa, Oryza sativa
  unsure (1)..(167): unsure at all Xaa locations
  Clone ID: PAT_MRT4530_88690C.1.pep
MADDGLDNTAGAVASELPEIKLFGQWSCDDVHINDMALHDYTSVKDKYARYVPXSAGRFAAKRFRKAQCPIVERLTNSLMMHGRNNGKKLMAVRIVKHSFEIIHLLTGENPLQVLVTAIINSGPREDSTRIGRAGTVRRQAVDVSPLRRVNQAIWLLCTGAREAGFR

SEQ ID NO: 192465 - protein, 131 aa, Oryza sativa
  Clone ID: PAT_MRT4530_88691C.1.pep
RYGDVSPKVDVYAFGVVLYELISAKEAIVRSTESSSDSKGLVYLFEEALNSPDPKEGLRTLIDPKLGEDYPIDSILKLTQLAKVCTQEDPKLRPSMRSVVVALMTLSSTSEFWDMNNLYENQGLVNLMSGR

SEQ ID NO: 192466 - protein, 163 aa, Oryza sativa
  Clone ID: PAT_MRT4530_88692C.1.pep
MDVPWLLVAHGSVTALVVVSFLCGQWPIFEGTFVQRINHFLTFGAYHHLLRLVHAACGNGARDLVLGVESYCCDRPNPILQIFYVAIIGVTYFIIVQTSFQYIPGYYVSGLHRYLSIVAVAIGALLFVLTSFSDPGTVTAENVSQYLSAYPYDGIIFEEKECS

SEQ ID NO: 192467 - protein, 401 aa, Oryza sativa
  Clone ID: PAT_MRT4530_88693C.1.pep
MASSSAAPILLLELAAAVLLVLQRVAAADAVVTTFPGDAAALASLKSAVDAATVPAYSCLASWDFARDPCAAFPCGVRCYAPPNSSSYHRVTGVSLDPAGYSGTLPATVLASLPFLAFLSLASNRFHGALPAGSPLPPSLRVLDLSGNAFSGEIPASLFTPASSLEELYLSRNALTGAIPPQVASLGSLKRMELQHNGLTGTLPRMDAMRSLAYLDLSGNALSGSLLDAPGRLPGSLVSVVARGNGFAGPLQAAALAALPAMRVLDLTGNAVSGAVPGAAFAHPSLQQLRLGSNKLGAVEEAPDGGASSQLVELDLGGNRLTGRLPGCVAAMPRLAVVGLDRNMFAGGIPDQYAARAAADGPTDKWVPFVRLMLQGNFLCGALPSQLRQLKEDGAVVEETV

SEQ ID NO: 192468 - protein, 48 aa, Oryza sativa
  Clone ID: PAT_MRT4530_88694C.1.pep
KKIIHLHVHNKNRGNMSNLQLSSCIRSDILGDAMKLDICNTTHWQIIK

SEQ ID NO: 192469 - protein, 56 aa, Oryza sativa
  Clone ID: PAT_MRT4530_88695C.1.pep
TTVKITTMRLPKTEETLRMPTAHVTMQTNHADTLIGQNAHNERLHLLEDLYMTFPL

SEQ ID NO: 192470 - protein, 68 aa, Oryza sativa
  unsure (1)..(68): unsure at all Xaa locations
  Clone ID: PAT_MRT4530_88696C.1.pep
MVWKWPWYIYGYRSNPQAHGYTIVAFHPEVFQVPXRARETTRFASXYDTSSWPSTXAKYXPVPSQKIA

SEQ ID NO: 192471 - protein, 89 aa, Oryza sativa
  Clone ID: PAT_MRT4530_88697C.1.pep
MDLLNNVSKEENNAKSAAAACPKESRHGFHLKKPFSGNGHNLVRHLYAANLLVHCLPWPCMSSASFHALCAGHTQISLPMRHSCTSHLY

SEQ ID NO: 192472 - protein, 460 aa, Oryza sativa
  Clone ID: PAT_MRT4530_88698C.1.pep
MASCINGGELHVRVVHRRLVKASDESIRPHVLAVSNLDLIPRTIQVSMFCIYPKPSTGGDFHDVVAAFAAGLPSLLNHFFPLAGRIVSNPCSGLPEIHCHNQGAELVVGEADVALASLDYGTVGASVGKILLPYAGDVALSVQVVSFACGGFTVAWGTNHVVVDGSALSMLVSAWSELARSGTLAAGARPNHDRSVFRPRSPPSYGASLDEAFTPLDGARQAADIARLREQARATRVQAVSAYLWKALAAVVGSRDARCRMVWWVDGRRRLTLSSSPELRAAMRSYVGNVTTFAVAEATMEEIQRKPLAEVASMARDAIAAPAYGEHFQELVDWVEEHKAGKQRYIDTASVGLGSPAVSVTAFASFEVDTDFGHGHAAMALPTSSSSARLCTGFVQIAARPGGGDGSWIASALLWPRLAAALESDERLGRIFKPVTAEYLGLRPASGSSAKRAGMITSKI

SEQ ID NO: 192473 - protein, 62 aa, Oryza sativa
  Clone ID: PAT_MRT4530_88699C.1.pep
MALTLAPLKVKQEDGKKAFLVGPEPGSSDPISLFGRGGKFVRALFHLRKETEYPVSGFRAKV

SEQ ID NO: 192474 - protein, 351 aa, Oryza sativa
  unsure (1)..(351): unsure at all Xaa locations
  Clone ID: PAT_MRT4530_8869C.1.pep
LDLLRQPRGGARGPGPREWGPRGSLTVHGGPGAPGXTPAGAVGPTHQPHPRARAADGRAPHGSRGARPKAATPAQPTGGGAPAPRWGGKGETNRRSTAHPGSTATTGTATGAEEGGGAARVDGDGGVPAVGGRNGGVDEVGEVAAKPKEAAPKREKVRGDDGGKPELGGDGGERERRRELDSGGERERRVAETVEGGTGSVYIGLGVREGGRMRGKRARKIRPPLMRRRGLGGKIPNESEEEREGKMGGKREGITGNISPLLIARGADGSGGICGGGGARARARRRERREEGDDGWAPPVSEGGGRARPSAARARGGGRMGRGEEEXRGKEMGRAGPRGGGGKRLFRIFLF

SEQ ID NO: 192475 - protein, 134 aa, Oryza sativa
  Clone ID: PAT_MRT4530_886C.1.pep
AAFFFFFFIQQTKQYSACIKKELDTWKWCDHYYMEYYGVKIALGRDVPFSRLISESTPKKGGKVCIKCIIDIAPIGCFPHSSGCEFLSTRSIWNWKSTSFPIAAFRRLLCPSSSSRRLFFPLSLARHLPHGLIQ

SEQ ID NO: 192476 - protein, 276 aa, Oryza sativa
  Clone ID: PAT_MRT4530_88700C.1.pep
MDDGPCGESEGGGDAAAKAVGAKDAGEGDEPKEEEEDGRDREEEEEEAAKRGWSEIRLAIEELSAVDVERRGGKPPPPLPPPPTLTFLALSHLLLQVLDKIGPTMAVLRLDVQRNIERLQELYLLDPSKYYNLEEILEKEVDEGTARKVDSCARAILWLTRSMDFTIALLQRLEEDSDQKCFAQLVESAYMVTLKPWHGWISSAAYKIAMKLIPDRKMFINLLVGKCQDCAALKEEIRKLAKLLKPFLDDIHAMMFFKIPYSIFNKLIWQNEKISQ

SEQ ID NO: 192477 - protein, 432 aa, Oryza sativa
  Clone ID: PAT_MRT4530_88701C.1.pep
MVIINSTRFDFLDIIEPVTTYTDGYLLSLNLGMPPQVFQVYLDTGSDLTWVPCGTNSSYQCLECGNEHSTSKPIPSFSPSQSSSNMKELCGSRFCVDIHSSDNSHDPCAAVGCAIPSFMSDLCTRPCPPFSYTYGGGALVLGSLAKDIVTLHGSIFGIAILLDVPGFCFGCVGSSIREPIGIAGFGKGILSLPSQLGFLDKGFSHCFLGFRFARNPNFTSSLIMGDLALSAKDDFLFTPMLKSITNPNFYYIGLEGVSIGDGAAIAAPPSLSSIDSEGNGGMIVDTGTTYTHLPDPFYTAILSSLASVILYERSYDLEMRTGFDLCFKIPCTHTPCTQDELPLINFHFLGDVKLTLPKDSCYYAVTAPKNSVVVKCLLFQRMDNDDDDDDVGGANNGPGAVLGSFQMQNVEVVYDMEAGRIGFQPKDCALHS

SEQ ID NO: 192478 - protein, 48 aa, Oryza sativa
  Clone ID: PAT_MRT4530_88702C.1.pep
MGRVAKNRACSCGADVVAGSQGPAVAGRQERIGQGLATGAPKSRTASS

SEQ ID NO: 192479 - protein, 149 aa, Oryza sativa
  Clone ID: PAT_MRT4530_88703C.1.pep
MTGISRHTIMRAHRMMAHGAATADWRTEDSPTGQWWHVAQWMLVQHPSGLAMSSGSGAKEWDGMGSSPNDEEDVTWSSTLRFWWWWPSASSGDGRLDALVEEGAVVECLWDLGILEEGQGGTWVVTDIEEPATGIALNLKKTWKGFPFS

SEQ ID NO: 192480 - protein, 79 aa, Oryza sativa
  Clone ID: PAT_MRT4530_88704C.1.pep
MRGMNSVVVCISEHLLRLHASGCGRLQLPRPHRGEEPWRGSVNAKICVFRINRERIANLSPWALDTVDLGMLTCGAPPA

SEQ ID NO: 192481 - protein, 66 aa, Oryza sativa
  Clone ID: PAT_MRT4530_88705C.1.pep
AFDPYSQYPQQMPPQAPYGGTSSVLFCPIWIKSIQSLSKRPILTICKELLVFIYFIVNQLHISNKL

SEQ ID NO: 192482 - protein, 63 aa, Oryza sativa
  Clone ID: PAT_MRT4530_88706C.1.pep
YRPWDIRSVQYHLNAEVLEYRCSLGSEMISYKGIRIPSEPYVYPTRLVLSGHIAVDFLGSSIT

SEQ ID NO: 192483 - protein, 134 aa, Oryza sativa
  unsure (1)..(134): unsure at all Xaa locations
  Clone ID: PAT_MRT4530_88707C.1.pep
MAPSVWKLVLASAVVSFVLALYDGAEDDEVRATAVVEPFVIXLILIVNVVTKVWQESNAEKALEALXEIQSEDAIIKLDARWSHGLPARDLIGGDLVFLTIIDKSASARNILMKVNSNVNLMQGRIYSNTTGVR

SEQ ID NO: 192484 - protein, 153 aa, Oryza sativa
  unsure (1)..(153): unsure at all Xaa locations
  Clone ID: PAT_MRT4530_88708C.1.pep
MAPSVWKLVLASAVVSFVLALYDGAEDDEVRATAVVEPFVIXLILIVNVVTKVWQESNAEKALEALXEIQSEDAIIKLDARWSHGLPARDLIGGDRGKGSTRCGRTASSSGIPSAAGGGRQRRRWSLGGLCCGSKGRVLMLLSQQRQQQHALP

SEQ ID NO: 192485 - protein, 240 aa, Oryza sativa
  Clone ID: PAT_MRT4530_88709C.1.pep
MMLKQHMESVVPKPPIQLDDIQYLDILQKVFLDTKPSHAKETSTNTATTLGEDHIKEILNNHKIALDIVRELLRWSQLPEGNSVKELAKGVLQGVRDQNSVIDAAISETEEKMNENPRDTKAKGTNAAIQETNEKVGEISSAIKFSLFIKGIVDKIKVPLERKRTLFILIDDRGYISEWEGIKNALSLLDCSNGNAVIVITNNNQKAQGFCSTPWEPITYSLVGLYYDIVLKMTSQRENE

SEQ ID NO: 192486 - protein, 39 aa, Oryza sativa
  unsure (1)..(39): unsure at all Xaa locations
  Clone ID: PAT_MRT4530_8870C.1.pep
VKLASVCKLCTALXKVINXIQNNVIIYYHIVXLLPFPFG

SEQ ID NO: 192487 - protein, 181 aa, Oryza sativa
  Clone ID: PAT_MRT4530_88710C.1.pep
MATTDGPTLLATSQSDLSAQAPWYRSYPLFLAFSVIPRFLAPLLASAELISLPSSPIAPGHAFTADFAALATLAVALAWRAAAPWRDGVVAQTPPHQVAALLISTAPSAMEIKAAATGDKAKALAVVGIDDGVQHVSEEEDEPLASKVKVTKTCFPDRWYIDKRDGVDYERRCSTEEEAKP

SEQ ID NO: 192488 - protein, 36 aa, Oryza sativa
  Clone ID: PAT_MRT4530_88711C.1.pep
FYPTIQSVKSSLGIPSKFASVNLLSLVYVFGDPPLF

SEQ ID NO: 192489 - protein, 130 aa, Oryza sativa
  unsure (1)..(130): unsure at all Xaa locations
  Clone ID: PAT_MRT4530_88713C.1.pep
GVRISCMRLIRFGYAEWRSCRRPDQVSXYLYISRVVASTQYTXINLGLCLFLCTAPSLVVYSIPLVDVXRSGKQVFVTFTFDALYREKVVIXVFGSASRDCSMFNHNGSSSSSLTCCTPSSMPTTASAFC

SEQ ID NO: 192490 - protein, 84 aa, Oryza sativa
  unsure (1)..(84): unsure at all Xaa locations
  Clone ID: PAT_MRT4530_88715C.1.pep
QKRPRXXTXXAVXDAILTDLXYPVEIVGKRLRTKEDNSKTLKVVLXEKERGGVDYRLDTYSEVYRRLXGRSVVFEFPQTGASDY

SEQ ID NO: 192491 - protein, 168 aa, Oryza sativa
  unsure (1)..(168): unsure at all Xaa locations
  Clone ID: PAT_MRT4530_88716C.1.pep
TRSGAGSAAYCGRGRRRRRRSTRGARAATAAATTTRREATPSPPRRRRRPTTAPRRARATPPSPPPPAPAAPRARAARRRRRRRRPARRRTPPPSXPVALQEQRPPRRVLGLILLPPPPPQRHVPRRRRRXSSTPPPRRRAAAPAPPRAARTGSSPAPAWREVAACTV

SEQ ID NO: 192492 - protein, 64 aa, Oryza sativa
  Clone ID: PAT_MRT4530_88717C.1.pep
ITCSLFLWMCVRANYVLSTVCSSHVADVLYVNASPEVSSGAGFTHSFASQVASMPSKITLRSCI

SEQ ID NO: 192493 - protein, 89 aa, Oryza sativa
  unsure (1)..(89): unsure at all Xaa locations
  Clone ID: PAT_MRT4530_88718C.1.pep
ISEWRSIFLKDGKIVCLPGMLAMFLSSWECKCILSSLVDKLDMSRIQSCQISRLFLSQHDFSGQVHEVMKSAYVEXVKESMAHVNVSKL

SEQ ID NO: 192494 - protein, 136 aa, Oryza sativa
  Clone ID: PAT_MRT4530_88719C.1.pep
TLVMHNDARFVDAKMMLTSPISLGYLKQQQDNQPPITMPKIRGRFVLAGGGRKLPKFQTMCMSWKNKEERWLRREIEQRRRRGRRQRTRGGDDSGGRKAGEQRRKRWRERGGGGGGEKGNDGTLQSHEGRIELRHG

SEQ ID NO: 192495 - protein, 319 aa, Oryza sativa
  Clone ID: PAT_MRT4530_8871C.1.pep
MESPTWPGTFGDVGPEGEVSALLLISPRGGRVAPAPAPRDERTATFPRRACPRQKWSRGSGRADRVHGKWGPRVSPTVHGGPGARGWRRSAPWVPRVSRTRGRGRMTAGPTWQPRGRARRRPRRHGRRERRARAPMVTAGDHRRGGAAPERAERRGESERRSSAHPGTTTTTRTAAGVEESGGAARDDDDDGAPTVGERNGGADEVDGDAAMPREVAPSREEDRSDDGGEPERRKATARFGMPRATVLRHGAADGVGGNTAKRMEVSPSREGDRSDVGGEPKVDGDGGERGARREHESDGESERRAAETEERSTGSKYI

SEQ ID NO: 192496 - protein, 38 aa, Oryza sativa
  Clone ID: PAT_MRT4530_88720C.1.pep
PFPIIIPSPSPVRPPETTLTSNGPSAFMPTPIWVILDF

SEQ ID NO: 192497 - protein, 38 aa, Oryza sativa
  Clone ID: PAT_MRT4530_88721C.1.pep
LIINKSLLLLSKKLVKLYQYITVYWLAVSSRKVLKPSK

SEQ ID NO: 192498 - protein, 120 aa, Oryza sativa
  unsure (1)..(120): unsure at all Xaa locations
  Clone ID: PAT_MRT4530_88722C.1.pep
GGQARAAADSCWERAAAAAAADGGGRRATAVRRGSGAGGLPICLDWVXLCERLCHRGRGLQGHQHASTSTAIAPAAAVLPPSGKDLKNLDADFVKQATLFDLIVVFRPFRNIQGNVIPKS

SEQ ID NO: 192499 - protein, 181 aa, Oryza sativa
  Clone ID: PAT_MRT4530_88723C.1.pep
MHSLLQSGDKGQEGERNNDLMETATWRCRRTMTSPPRSDEASPVEPEREAAGEVEEHKRLGKRCAQRVHQRRRRHEREVRRHELSRRLPGTRYHGYQVSWVSTFDVAIPVQAPELSVDNRVVFLLEFVPGEIRDSAFVSPDSIRRHRKGLAVLIPEVDIRRLVLAYVGLYVDLLSSMVGVD

SEQ ID NO: 192500 - protein, 100 aa, Oryza sativa
  Clone ID: PAT_MRT4530_88724C.1.pep
MSLLSSSSPRSAAAPRSNVAAPLVGRGARRRRSVPPSNCGRPFRSVDPELLPVPRRPNSRRRRRRGCRPPASSPAKLLPANVSEEWRRLEIERKILENST

SEQ ID NO: 192501 - protein, 469 aa, Oryza sativa
  unsure (1)..(469): unsure at all Xaa locations
  Clone ID: PAT_MRT4530_88725C.1.pep
MAKLTGMRCERGSRSRKRRWRGLGEELQGVTNSNKLLFLSGAGNNPNSGEGRRIRVPGGKISSTPLIIVGDGREKNSENIRPLKSMKIPASDNGRSSARSSRRESIGRMPVCANASRRGEAARRRDTYPVPTRYRYLVAGVAPLQPEQYNTGWYRRKGCKVAAQHYRHGEADGWRGVAAVQHCRVGVEGQRSSRSSSAGARRRDNSHAASPPRCAFLSWQEQLCVAPSSPSPVEEGEQDAGEAPPHGYRYHMPNSSRLNLGRTHHIPCPIRKQPADIGGVPDKERQPEFYMETTSTTRIVSILVSLVLLGQRDTYGYKYKTPXEERGHTHHRIHGTIDQDTRSTYKPTYAKTRRRISTSGISTASPLRCLRILSGETKALSLISPGTDSRRKTTLLSTNXFRGPNLYKNHRLHLFYLSLAYILVPTIPILCKYRNRDIKCAHTPAIHSDSSNGRRRLRGAEPNPSTSTS

SEQ ID NO: 192502 - protein, 524 aa, Oryza sativa
  Clone ID: PAT_MRT4530_88726C.1.pep
MDSGGNSVNSAVESVAESPAPASPASNPTAPAVVTKGRGLWWWRFIPPFTRFPRPRVTPPFSHFRYQLSDYASRRLPEAPPSPPVQTKLDPDLGFLIASAGFSVGAGGADSDNSDDRASKSSTNAAAPRHDFSFGGGFGRERDRPRSRAPGAAAHAKGIRTARTRGAHGARAATPTPSIVEPENSRSSVESNLRSSAAAHARQSSAGISSNGVHKVLYDDDDDDDDDAEQSDGEPPSEEAARSGAGGFYRENGSVVGRLVKGSSDSDADDHGYDERSIGKGENGEIHSGLDPYVQSIAMLRSAEEAIENEIQKFIEMRNETCENSANNHSETEWSSSCHFDESTEELSEKLKLLESRLNEASTLINDKDSEILELDVLNHKQPKQHVLCNTELLSLQSDMDQLFLEKMEAETQCFILTRASQAWNPLTEDQAAIFDIQKSLPEDHKQLEAKLRHTENRALMLEEMVEKLEAQCKDLARTSEILKLQARASRASLFCSVQFVLLFIAVGTFLVRLWPSSSEFVPT

SEQ ID NO: 192503 - protein, 788 aa, Oryza sativa
  Clone ID: PAT_MRT4530_88727C.1.pep
MDAEAGVGGADQLPWRQHYRNLLLLAYQSFGVVYGDLSTSPLYVYKSTFSGRLRRYQDEQTVFGVLSLIFWTFTLIPLLKYVTIVLSADDNGEGGPFALYSLLCRHAKLSFLPNQQSADEELSTYYRNGFTSRHGSLPWLRRFMEKHKNARTVLLLIVLCGASMMIGDGILTPAISVLSSMSGLKVRATGLHDRSVVLLSCIVLVGLFALQHRGTQKVAFMFAPIVVIWLFCIGGIGLYNIIHWNPRIYQALSPYYIVKFFRTTGWLLFTPYSWGIICILVVLYFGCEAMFADLGHFTSASVRLAFITIIYPCLILQYMGQAAFLSKNILDMPTGFYDSIPGPIFWPVFVVATLAAVVGSQAVISATFSIVKQCHSLGCFPRVKVVHTSRWIYGQIYIPEINWILMVLCVAVTVAFRDITLIGNAYGVACMTVMFVTTFLMALIMIFVWQKNIIFALSFFLLFGSVEVVYLSSSLMKVTQGGWVPLVLALIFMSVMYIWHYGTRKKYQYDLQNKVSMRYILSLGPSLDVVRVPGIGLIYTELVTGVPNIFTHFTTNLPAFHEVLVFLCVKSVPVPYVSPDERYLVGRIGPRAYRMYRCIVRYGYKDVQRDDDNFENMLVMNIGKFIMMEAEDASSSASYDTANEGRMAVITTSDDYDSPLAVRDSNDLADSMTMRSTKSESLRSLQSSYEQESPNVSRRRRVRFELPEEDDMDQQVKDELLALVEAKHTGVTYVMGHVYIKARKNSSFFKRFAIDVGYSFLRKNCRGPSVTLHIPHISLIEVGMAYQV

SEQ ID NO: 192504 - protein, 396 aa, Oryza sativa
  Clone ID: PAT_MRT4530_88728C.1.pep
MEILCAFLDSVSSYIVADAELHEHTEVLVFQDIIIRQKYQKKGLDCTKPTPSWVLAATKLYDFAYLLMSLQRTTTEGCKCERRHMPLNLAYIKVVLPPPKSTCIDRFISWGDKTRATHSDIATMCVSKTSKYTHQDRGKIGKLGHGSQRGDVYRRLESEASKSAVESLVGNGRNGRTLTERRRGLRRGGGDGDLAPFPFPHHRRRKGRAPSEGRAYGPRLEGDAIDEGATQHILFSFLVCSTVIIVSSFCASVALVTAVDVGDGHFSTITSPRTKNDSLCIASADAPFSLPVVISTGIVNTYRTRTTTVSPHTGMALLIVTSESDVATAVGVDIIGAKPPQLAGESNRLCTTKSPNNGLRMSEKDMVSAVLTSIITVMAKVAVPKIKRTRRDNRQG

SEQ ID NO: 192505 - protein, 67 aa, Oryza sativa
  unsure (1)..(67): unsure at all Xaa locations
  Clone ID: PAT_MRT4530_88729C.1.pep
LPRVSRSGGPYRCKYEGCGMEYKTHQGMGGHVAGHIXNRDKLAAAGGSGGAGAGKTEGKHPCNVCGK

SEQ ID NO: 192506 - protein, 2279 aa, Oryza sativa
  Clone ID: PAT_MRT4530_8872C.1.pep
MPRYKPEYLFGVEGFVQELRTMSFVIGFGTAPFYAQIAHDRHEEKCRVKVTLNSNSEDIPSVMFEAGGRNYIHACQEVARIAIGELRDRYSDQLADTEYRYHPRQPQGSDRGSYLETEGIENDVTTKHLVEMLWAMDESRAETVLAAQDREDWNRGKICKLEDKVDRLEKELAALKGEAPPQKARIRLTARKRALFVPRYQLAPKVRVVEKEVAPAQADPPVIIISSDEEEESKRNNSKIEWVATQVDKDEPSIDLRCLEELETTAEPITWLEFTAAFRKTHIPSGVVSLKKKEFRSLTQGSRSVTEYLHEFNRLARYAPEDVRNDEERQEKFLGGLNDELSYPLMVGDYPDFQKLVDKAIRQEDKYNHMEQKKRRIAHFKAQQGNNQKPRLTLGPQSMPQGGSSSVVRPQRQFFNNNAGNNIRNQAPRPVAAPAQQQPAKREQGSKPVVCFNCGDPGHYADKCPKPRRVKVVPAQNNSAVPASKARVNHVAAAEAQDAPDVIFLVNSVPATVLFDSANELAEVKRQVDDLLQKGYIRPSSSPWGAPPSPSLGKTTVVLAKSSPSSFAPSPSPEITGAASPSSTRRFPPLPPCRRRRPLVFRRRLGHRWYTSDQSKTIRIAVPAVMGGSNNVFPPGLEWYIPGLEIELCSRDGCSEWLGLYNRMPRYKPEYLFGVEGFVQELRTMSFVIGFGTAPFYAQIPHDRHEEKCRVKVTLNSNSEEVPSVMFEAGGRNYIHACQEVARIAIGELRDRYSDQLADTEYRYHPRQPQGSDRGSYLETEGIENDATTRHLVEMLWAMDESRVETVLAAQDREDRNRGKICKLEDKVDRLEKELAALKGEAPPQKARIRLTARKRALFVPRYQLAPKGWDVSACVCLLLSVRKLFPPVSLLVPCPCQMVNTRSNGNGPNNNNNNNNGENPTLAQVLAQQTQLMNMMMQQLQNQQNQGNNHAPPQNKLAEFLRVRPPVFSSTTNHVEAGDWLHAIEKKLDLLQCTDQEKVSFASHQLHGPASEWWDHFRLNRITAEPITWLEFTAAFRKTHIPSGVVSLKKKEFRSLTQGSRSVTEYLHEFNRLARYAPEDVRNDEERQEKFLEGLNDELSYPLMTGEYSDFQKLVDKAIRQEDKYNRMEQKKRRIAHFKAQQGNNQKPRLTLGPQSMPHGGSSSVIRPQRQFFNNNAGNNIRNQVPRPVAAPTQQQPAKREQGSKPVVCFNCGDPGHYADKCPKPRRVKVVSTQSNSTVPASKARVNHVAAAEAQDAPDVILGTFPVNSVPATVLFDSGATHSFLSMSFAGNHGMEVEDLRRPLMVSTPSNQALSLQRSPSVRIEIKGVPFLANLILLESKDLDVILGMDWLARHKGVIDCANRKVTLTSNDGRVVTVHALSSESLRSRLNQITLEEIPIVREYPDVFPDDLPGMPPKRDIEFRIDLVPGTTPIHKRPYRMAANELAEVKRQVDDLLQKGYIRPSSSPWGAPVIFCGKERSYPEDLKSATVFSKIDLRSGYHQLRIKEEDIPKTAFTTRYGLFECTVMSFGLTNAPAFFMNLMNKVFMEYLDKFVVVFIDDILIYSRTKEEHEEHLRLALEKLREHQLYAKFSKCEFWLSEVKFLGHVISAGGVAVDPSNVESVTNWKQPKTVSEIHSFLGLAGYYRRFIENFSKIAKPMTRLLQKDVKYKWSEECEQSFQELKSRLISAPILILPDPKKGFQVYCDASKLGLGCVLMQDGKVVAYASRQLRPHEKNYPTHDLELAAVVHALKIWRHYLFGTRTEVYTDHKSLKYIFTQPDLNMRQRRWLELIKDYDMGIHYHPGKANVVADALSRKGYCNATEGQQLPLELFKEFERLNLGIVSRGFVAALEAKPTLIDQVREAQINDPDIQEIKKNMRRGKAIGFLEDEQGTRVKAEHQKPAGLLQPLKIPEWKWEEIGMDFITGLPRTSSGHDSIWVIVDRLTKVAHFIPVKTTYSGSRLAELYMARIVCLHGVPKKIVSDRGNQFTSNFWKKIQEEMGSKLNFSTAYHPQTDEQTERVNQILEDMLRACALDFGGSWDKNLPYAEFSYNNSYQASLQMAPYEALYDRKCRTPLLWDQMGERQVFGTDILREAEEKVKIIQERLRVAQSRHKSYADNRRRDLSFEEGDYVYLRVTPLRGVHRFHTKGKLAPRFVGPYKIVSRRGEVAYQLELPQSLAGVHNVFHVSQLKKCLRVPTEEANLEQIEVQEDLTYVEKPIRILEIDERRTRNRVIRFCKVQWSNHSEEESTWEREDELKSAHPHLFASSSESRGRDSV

SEQ ID NO: 192507 - protein, 685 aa, Oryza sativa
  Clone ID: PAT_MRT4530_88730C.1.pep
MAPRKLNPASTTGPDPGRIDDDTTGFLGASLVDDDELAKLVTSSAVVEGQEFAPGKAVVPKPGDNRKVVFAVFFEAGLRFPCSMLLPEILRLFQVELPQLSPSALVRIAIFDWACRTTGFEPSAELFGTVFYATVNSKTVTVNAAMLKWDRHWMAMWFYYSIPFEAGSDAAKALRWRRRAISLNRKPKIAVDGAMEARFALLRKVCSRLSCRDLVEEFCMLRIFPLSQSWQVEVDQDKEVDGLPKLVMPVGANGESMLFLCASVFRSSCLRGRKVAVESDEEEEEEEDVEAGSEDDGSHGYTPSPTTVKSAAGSHVSPTRSQDIVVANTLLAISSTVAKPVMTARRKKKKGKVAQVGRGFLDSDGSDGTLTSPVLRRASSRGRRMSLPPASDTEAATGGSASAPAAKANVAEDERVEAVPSPVRQREGKAPAVEASVSDVIAPTDGLGLFTELNEFAESYVAVESLFVQGLAAHLSAKKSALERLDGYGLRLRMIEEDLHHKENERRVLAETLKKANAENRSLCSDLETALKRDAERDRQLASAEEKIKSLEARLVSAEAVATTVVPATESAKQAYYTLRLALNDLGAWAEGAPGEGGTTFNFSDWMQEAAGSVVEVAGAYGDCCTRVSAGFVLSLMHAHGCDHIGSFPDFVKDEWPSNTQCSGAALRAFRKGFWEDGGRDCAKT

SEQ ID NO: 192508 - protein, 194 aa, Oryza sativa
  Clone ID: PAT_MRT4530_88731C.1.pep
MRWLGSEEGNFVFGSSKQTDVVHVHVNPVQPMPSHLQHKYAICSKKERLHVLLSLLEKDAPKSGIIFVAEQSEKSKKAGHPPSTTVVVEFLRTTYMGSLEEVKGKGFLLVSTDIASRGFDLPQTSHIYNFDLPKTAIDYLHRAGRTGREPFSKLACSVTTLITEDEHFVLQRFQNELKFHCEELPVESMFAFNL

SEQ ID NO: 192509 - protein, 96 aa, Oryza sativa
  Clone ID: PAT_MRT4530_88732C.1.pep
IQSCGGCSMRVTLNLRAKDIKACDSHDLINLERSACANTHTLKLGHCLHALLPLKMWGRLQIISSVHKDPSMARFEACQTTYSIEAKSWANAQNLK

SEQ ID NO: 192510 - protein, 178 aa, Oryza sativa
  unsure (1)..(178): unsure at all Xaa locations
  Clone ID: PAT_MRT4530_88733C.1.pep
ILEDEWFKKGYKRPEFDEKYDTTLDDVDAVFNDSEEHHVTEKKEEPEALNAFELISMSAGLNLGNLFDSEQEFKRETRFTSKCPPKEIVRKIEEAAKPLGFDVQKKNYKICSPCLRIPRPGNXLNVATEILQVAPSLHMVEVRKAKGDTLEFHKFYKNLSRTLKDVVWKSDDLQNQLS

SEQ ID NO: 192511 - protein, 438 aa, Oryza sativa
  Clone ID: PAT_MRT4530_88734C.1.pep
MSTTKVKRRVGKYELGRTIGEGTFAKVKFARDTETGDPVAIKILDKEKVLKHKMVEQIKREISTMKLIKHPNVVRIYEVMGSKTKIYIVLEYVTGGELFDTIVNHGRMREDEARRYFQQLINAVDYCHSRGVYHRDLKPENLLLDSYGNLKVSDFGLSALSQQIKDDGLLHTTCGTPNYVAPEVLEDQGYDGAMADLWSCGVILFVLLAGYLPFEDSNLMTLYKKISNAEFTFPPWTSFPAKRLLTRILDPNPMTRVTIPEILEDEWFKKGYKRPEFDEKYDTTLDDVYAVFNDSEEHHVTEKKEEPEALNAFELISMSAGLNLGNLFDSEQEFKRETRFTSKCPPKEIVRKIEEAAKPLGFDVQKKNYKLRLEKVKAGRKGNLNVATEILQVAPSLHMVEVRKAKGDTLEFHKFYKNLSRTLKDVVWKSDDLQNQLS

SEQ ID NO: 192512 - protein, 56 aa, Oryza sativa
  Clone ID: PAT_MRT4530_88735C.1.pep
TRPEFNKIFKAIKANFNDKFHKVKKKWEGGVMGSKSQAKTKAREKLLPKEAPHRMT

SEQ ID NO: 192513 - protein, 68 aa, Oryza sativa
  Clone ID: PAT_MRT4530_88736C.1.pep
FLCKNRYVLVASYWILQMFGSFYPCIYTYLALLYIYINHCTCTNVTQNVLIVVVVKKKKKKKKKKKKK

SEQ ID NO: 192514 - protein, 192 aa, Oryza sativa
  Clone ID: PAT_MRT4530_88737C.1.pep
MVVRRLGGAGRALLSRQALSLPNLRRRASNSWAAVRDTFFSTKEVFESHRVVFTVGTSIASVLTAWAGYSLRHMQQSRIDKRLNSIEQSLKDTHKVEHEEIKKIVTSSNISTPACVATALTTSVVGYALGWRGGTWYARRGFRREQQKLMGQINSHHRWHWRPFSKLKNRLRRNRPAAKTVEAPRLTGESTI

SEQ ID NO: 192515 - protein, 73 aa, Oryza sativa
  Clone ID: PAT_MRT4530_88738C.1.pep
LIRQVFRFLPLCAVHPGNSPGDYSPPVFMKHAKVAMANITKIYQKVYTVTLYMPALWLQLRLKRLVASLIKLI

SEQ ID NO: 192516 - protein, 237 aa, Oryza sativa
  unsure (1)..(237): unsure at all Xaa locations
  Clone ID: PAT_MRT4530_88739C.1.pep
MLPSTEAVCGSGCLTLSPSLQLVQWPAKFQPNLLEKYDGPVDLTEYLQILXTAIQAADSDEKVMANYFPIALKAQGSSQMMNLLESSIYSWEDLRHQFMANFQGTFPLPGMEVDLNALRXGMDETLXPFLQRFSQVCNTIPHIAHHVVIHAFRSGVCNKRMLEKMALIVAQLFSLANRCGQKEVVRCGTTVGGAPMASLPKPPPPPRPKTRGSYNCGRCGLPKKGHVCAAGGPAPTP

SEQ ID NO: 192517 - protein, 831 aa, Oryza sativa
  unsure (1)..(831): unsure at all Xaa locations
  Clone ID: PAT_MRT4530_8873C.1.pep
MVYSWFGDRSVQPMPRYKPEYLFGVEGFVQELRTMSFAIGFGTAPLYAQIPHDRHEKKCRVKVTLNSNSEDISSVMFEAGGGNYIHACQEVARIAIGELRDRYSDQLADTXYRYHPRQPQGSDHGSYLETEGIENDATTRHLVEMLWAMDETRAKTVLAAQDREDQNRGKICKLEDKVDRLEKELAALKGEAPPQKARIRLTARKRALFVPRYQLAPKVRVVEKEVTPALADPPVVNVSDDEGEESKRTHSKIEWGATQDDGDEPNEPSIXLRCPEDLDDGNGPNINNNNNNGENPTLAQVLAQQAQLMNMMMQQLQNQQNQGNNYAPPQNKLAEFLRVRPPTFSSTTNPVEAGDWLHAIEKKLDLLQCTDQEKVSFASHQLHGPASEWWDHFRLNRTTAEPITWLEFPAAFRKTHIPSGVVSLKKKEFRSLTXGSRTVTEYLHEFNRLARYAPEDVRTDEERQERFLEGLNDELSYPLMTGDYHDFQKLVDKAIRQEDKYNRMEQKKRRIAQFKTQQGSNQKPRLTLGHQSMPQGGSSSVVRPQRQFFNNNAGNNIRNQAPRPVAAPTQQQPAKREQGSKPVVCFNCGDPGHYADKCPKPRRVKVVPTQSNSTVPASKARVNHVAAAEAQDAPDVILERIHQTEFITMGSSGYFCGKERPYPENLKGATVFSKIDLRSGYHQLRIKEEDIPKTAFTTSTLAPSSIEPPSPPLLQPCAAAVPVIVVAREDCRRGRQVAAVLVRLFVAAEDRRSTVAAVDPIFSAVSTSSPSPSVGLPPLLWSPRHHHRAAAAAFLSFLCLVSGGDGVKGGGVRIRVHQTQRHGEVEPAGTG

SEQ ID NO: 192518 - protein, 125 aa, Oryza sativa
  Clone ID: PAT_MRT4530_88740C.1.pep
MVLLWHRHRRRRERDPLRRWKRASQASVRRERCLWYEEELGGQPHPDITASGGEGGICCSSGGGCGQRGALPCGRRKKGRPVRCPPLDNTTGRGGEAGEHRGSHLLLPRLQSIGREPSKSFGKPT

SEQ ID NO: 192519 - protein, 364 aa, Oryza sativa
  unsure (1)..(364): unsure at all Xaa locations
  Clone ID: PAT_MRT4530_88741C.1.pep
SVEQVIREFQDRFQERTELPPNWQFDLHIPLLPFAKTVTKKTYRYSPRRKDEIEQQVVQNAEXRIIYTSTSPFASPVLLVKKKDGXWRFCVDYRXLNDITVKNKYPIHVVDELLDELAEANSLTKQDLRSGYHQIRLINEHDEHKRACRTHQSLYEFRVIPFGLTNAPATFQGLMNTVKKFVLVFVDDILTYNKTLDDHVKHLRMVLTLLQQHQLFVKESKCSFAQQELKYFDHIIGTNGVAIDLEKVKVVQXWQVPRNLKQLKDFLGLAGYYGKFIQVYGVMTKPLTTLLKRNSSNLXSDAQKQAFEAVNQALSGAPVLALPDFTKEFVVETDASDKAILAVLMQQGHPLAFISNALEIKSQA

SEQ ID NO: 192520 - protein, 235 aa, Oryza sativa
  unsure (1)..(235): unsure at all Xaa locations
  Clone ID: PAT_MRT4530_88742C.1.pep
MKVDVVAQVDMNEPSVVEDSDCHDRKLTVGLCEEDGIDGRIGRSLYALTIEASTHRIMKGLRWDEMDEFVLTVSTVWGRSSSAVLGSERSSGGGVRGGGGGCRQAAVVDETEAAAGAEARRLPDLRGAXRRCSRRWRRSWWWRSRRWRRSWRRRRARWRGGSRIXEEWRQCSRRWRCSRTSGGARGGGSGHGGGGGGGARGRAEVAAGVDEAAALREAMTLADARRSSQRWRMAR

SEQ ID NO: 192521 - protein, 268 aa, Oryza sativa
  Clone ID: PAT_MRT4530_88743C.1.pep
MATHPASPVAGGEKATPPSTPPPVRLAGGAAAAIQPNSPRFFFSSLAAASASASSPHRRIAIAVDLSDESAFAVKWSVQNYLRPGDAVVLLHVRPTSVLYGADWGSIPVSVDDDDSAPDAAQHANAHAATRDEPEEAKKKREEDFDAFTSTKAQDLAQPLVAAQIPFKIHIVKDHDMKERLCLEAERLGLSAMIMGSRGFGASRRAGKGRLGSVSDYCVHHCVCPVVVVRYPDDGAAAGGGEAVGDELRTVPEDEPVYHEAPEGQKEN

SEQ ID NO: 192522 - protein, 46 aa, Oryza sativa
  Clone ID: PAT_MRT4530_88744C.1.pep
PSVFFERLRINGALGWRAINVLMTRGLNRMVSVSSSQQIFSRATHP

SEQ ID NO: 192523 - protein, 93 aa, Oryza sativa
  unsure (1)..(93): unsure at all Xaa locations
  Clone ID: PAT_MRT4530_88745C.1.pep
GKSPHRRRRISPSSRARRPRRRLRLLRCRRISGVRAAAARSPFLHLDLSDLDLSPSRRPPRDAVPRRRRATTTTRXPPPWPPRNAAAACQRHA

SEQ ID NO: 192524 - protein, 45 aa, Oryza sativa
  unsure (1)..(45): unsure at all Xaa locations
  Clone ID: PAT_MRT4530_88746C.1.pep
ETTLAVAQNSPQDFVDLHNSARRVEGVGXVVWDDAVSAYAENYSA

SEQ ID NO: 192525 - protein, 67 aa, Oryza sativa
  Clone ID: PAT_MRT4530_88747C.1.pep
MAINEALRLNWNLQREKAMVGDVPRRQRGATNSSISRICQPSLRRWAPRLRQSARFAGPVFKDAGDC

SEQ ID NO: 192526 - protein, 122 aa, Oryza sativa
  Clone ID: PAT_MRT4530_88748C.1.pep
GKSPRRRRRISPSSRARRPRRRLRLLRCRRISGVRAAAARSPFMHLDLSDLDLSPSRPPHETPRHDDDAPRRRRATPPFSTPGNAVCGWHRQAAAAYAVPTQPYSACVFFVLPFIRLRAVWH

SEQ ID NO: 192527 - protein, 321 aa, Oryza sativa
  Clone ID: PAT_MRT4530_88749C.1.pep
MAAVAAVFLAFVLCFYIFVCAKRYRGGAPPAEGGVAARLWFLLGGGGGGGGAAGSGDAAWCYDGGLDEASMAKLPCRVVGKGEEAVDCAVCITELAAGETARVLPRCGHGFHVACVDMWLKSHSTCPLCRCPAVDEPPPAAPPPVVAPPEADPESPNFPTNVLFFGSQDELLRIEKKLVDLGGKIVELAASMVLQSSWPNKQQTAKPATSKNWRNGDSPANHLQITSSSDLLCDATGKYIFFVRRKFRYSAFTKSKDSFLIHMRLSCCMEMFQFQSHPDTERMILAIWGLKLTSATDIKYLLRWVWTIIDTNRDEQLVAEM

SEQ ID NO: 192528 - protein, 277 aa, Oryza sativa
  unsure (1)..(277): unsure at all Xaa locations
  Clone ID: PAT_MRT4530_8874C.1.pep
MTSPPAAAARRLGLAXLAGERRHGGANGRHQRVADGTANSPATKATAEEERTATATKKKRRRSSAXRRRRCSGGLQRQRRGGRGRRRLGDHDGGLPERRRRLERRRRTAGATATTAALGHTALGRFRRREAKAKVAAGRGDTGEPFKGARRRRRRPTAAGDEKESSGKSNPKQTRIHEFPNDFSRCFQRRKGRGDLEDHFSSIDSAGEGKDRPNWKXGGGGAALGFRPEEDDDLTGGPHLSAXRTRGRRRLRTGXGWAEEREKGFGPTFGPKPKETF

SEQ ID NO: 192529 - protein, 60 aa, Oryza sativa
  unsure (1)..(60): unsure at all Xaa locations
  Clone ID: PAT_MRT4530_88750C.1.pep
RRPEGDRCRLLRPSAARSDHDRELYRSISCDTCTFFWLLVVYVSGYFCIVSTSFLEVXDR

SEQ ID NO: 192530 - protein, 55 aa, Oryza sativa
  Clone ID: PAT_MRT4530_88751C.1.pep
LILLFTLVLTCSGLSNQHTMTPEIAVHGFPADNFTRSGSRGINLSRLSLGVELNE

SEQ ID NO: 192531 - protein, 76 aa, Oryza sativa
  unsure (1)..(76): unsure at all Xaa locations
  Clone ID: PAT_MRT4530_88752C.1.pep
LAVDEPEVXVGALPAESEDXVQVASAPPPPXPXRAMLRIDRSRKGRKGGCGGGGVREQRCPLAVAREASRILAWXS

SEQ ID NO: 192532 - protein, 556 aa, Oryza sativa
  Clone ID: PAT_MRT4530_88753C.1.pep
MGMLALRRLMAAQRDRRRRRKAQARNGAITSMAKRKGTFLRGGDSSQGAKRLRYSGPYLTEDIWRHIHSLMPLRDAARAACVSQAFLRSWRRYPNLILTTETLGLEQKKHWKVHMARYFTRVDHILKNHSGIGVKRFQLVCGRRKLICRLNNWLQIAISSGIEEITLSLPSEYSFPCSLLSGGSGRSLQHLELVNCAFRPMAGLGCSRNLTKLHLHSVLITDDELACFLSECFALKHLDLSYCRELVYLKIPCLLEQLSYLNVDLCHLQMIESKAPNLSSLIYSGNLIELSLGQSSQVKTLDINFYDKTNFLCYVITKLQNIVPNLESLTIYSDDERINTPMVDAKFLHLKYLEIYFDGLDGSDEAFPPEYDYLSLVSVLHASPVLDTFILSVQQGGMKHDSVSGDTTTNLRTMPGHKHERLKEVMIIGFCSATSMVELTCHILENTTSLETITLDAVCDVHDLENIGRCCTTTIRKTGSCYPLRREMILEAHRGVMAIERYIRGKVPSIVELTIREPCTWCHDLERLDALEKENRSHYSPPHLKLEDISLLLKPV

SEQ ID NO: 192533 - protein, 81 aa, Oryza sativa
  Clone ID: PAT_MRT4530_88754C.1.pep
MFWHVPGISAASPVDTILDKENFKLEDLLDEDEIIQECKALNTRLINLYYFSFRVLFLCSCFLVQFLFWDTVFPLHFFFLP

SEQ ID NO: 192534 - protein, 158 aa, Oryza sativa
  unsure (1)..(158): unsure at all Xaa locations
  Clone ID: PAT_MRT4530_88755C.1.pep
STLFHSNNLPCTGWFGLYSQHXHRTHTQTLSVITRNNAGVHTVIAKSSSQVAHWVIISSPGLCQQGQPTGAQSGHFACTHTRVTTHFHXGAHINFIGVXAFVTIVPHFPFPPIAWSFSAPXKGXGIRARAXWCTAGLHRTSIMPQYIXXASPVVHKNA

SEQ ID NO: 192535 - protein, 44 aa, Oryza sativa
  Clone ID: PAT_MRT4530_88756C.1.pep
SEKVSIDIVLFLFAGLGFGVGFAIAILLTWGTSRSLSLALRLSQ

SEQ ID NO: 192536 - protein, 175 aa, Oryza sativa
  Clone ID: PAT_MRT4530_88757C.1.pep
MALPVHYLSVLQLPKWAIKDIERKCRGFLWKGQEEALRLQWPARSLEQRERPWTLAAFKLGNDVNLMFRSVVKYIGALSNEAMGEFFQLWDEVHDFSLLPSPDEIRWKLTGDGKFSAASAYDVFFIAAEDCSYGELLWRSRAPSRTVTADLLTGGLQRDAVFGRATKWTSTVPSC

SEQ ID NO: 192537 - protein, 148 aa, Oryza sativa
  unsure (1)..(148): unsure at all Xaa locations
  Clone ID: PAT_MRT4530_88758C.1.pep
DGARAHHSHLTDAAXRPDAPSALSPNTRLXRLIARDDLAEATRLVDRSRGEAPGAAVAALKTNANVPPVLRRRAGSGEADELDDGEGEAAANRGQRLPPHTALPPASPPFFFLVPSAAGLFRRRLQPVPYTVTANRWESASPHPSTSD

SEQ ID NO: 192538 - protein, 260 aa, Oryza sativa
  Clone ID: PAT_MRT4530_8875C.1.pep
MATTGAGEEAMRAAGSGCTEARMARTTPLRCRRRRRRRETMSQASDGTSIGEDERGATSRRGGMGGRKDAGDEEDGEAGAATAFRRNRGPAGVEGGVAEPREVVATSAGARETRQWRPEVDQWRQRHCFAGEDASPVLSPRNGGLTEGEEVAARPREKTARPDGAPARRERRLEAAGAEEREGRRRERASGGHRAKRRAGRGGGGGGDAGGGDGAAGRRTVEAAQAAGGGRRRGRERRAAGRWLGTTGRLGRGLKRENGG

SEQ ID NO: 192539 - protein, 171 aa, Oryza sativa
  unsure (1)..(171): unsure at all Xaa locations
  Clone ID: PAT_MRT4530_88760C.1.pep
TLALDPRRPAALRLAGGGSLSGKSSSRPPRPDQQRDSQQVSVIRPSRVKTIHQVLXASLCPVNLSNFLLLVLMATSNPFLGGGALLSTDIKLNGQNYQEWELSARMLLRSIGQASHLTDDPPDEKTDATKIKAWKTADDRVMGFIFMSVEVPIRMSFRHHSTAKEMWDYLK

SEQ ID NO: 192540 - protein, 1414 aa, Oryza sativa
  Clone ID: PAT_MRT4530_88761C.1.pep
MEQASEDDGTSSSIDLESSSEVIKSSNIGPLLHVVLYTVEFQKRGLPRYALVDEFMIHGPCGNQNRACPCMKKGECSKHFPKSFQEETMMDEFGFTIYKRRNNGRYVVKNGIKLYNRWVVPYNLELLKKYQAHINVEWCNKSNMIKYLFKYVTKGADRTKAFFEISGNASNKTSESSTSPRNEIQECIDARFLSTCESHWRAFELDIHYRMPSVERLTVHLPNMNFVRYKKGSDLQSLLSSPAVKKTLLTEWFEANRKYSSAHTLTYCDFPREWTWDGSSCSWRPRTPCEKIGRMYYVSPVSDELYYLQMLLMILKGAMSYADVRTYDGVVYPTFKQACEARGLLESDNECHLLFDEAIVYASSGQLRQLFVTVVMFCSVGNVQSLFENYWTYFTDDIQRRVRTALSNPSYIIPSDRLLSLLMKELHTVFSNSGGSIDDYDLPRAAIYSDDIVGNRMVDEELAPDAAALASEANLNIPRLNTDQRKFFDTIIQRTPSNSIVPFGGKVIILGGDFRQILPVIRKGSRASIVDASITNSPLWRHVTLLRLTINMRLLHGDLGEQGCRDLKDFSDWVLVLGDEPTWVDIPDDLLIKTSGDKIKAIIDEVFPRFIDNYTNHCYLACRAIVCPNNSTDDQINDSIVDMIPSEPKEYLSCDTISKSSEHLPDFDILYPPEFLNSINVNNFPSHKLVLKKGVTIMLLRNLNQSMGLCNGTRSTSREGIRILIEDEDEVCCSQTRNVVYHEVLEAVSSMMGELQIASLELGDGNPTLRIRISWLWEYHDQNDETNLHHIGLVLVDQKKFKPLITEGKVYLLTYYRVKPCTKHYWPVDNKLAITFTWWSTVEECVDVPDNFAQYAYSLTPFNELRSLVDRKDSFTGNVSLSGNSACKWYINIDTPDAKSLAASVEGSYEPIKWLDLPAGPAAHNNGEEKTIAEIRELHPFKFKTTKPYGSTYRCGNNKCPPVVSASPRFKLSVIAGGHIADTTFIVFGRLAQRLIGRSVDALVMENPTGKDHIPREITDLLEKEFVWNVSFTENTISSGIVAFQVNRIIKGGQNYSLALLQSPSGSQASSVVPSMALSPAASQDVSVGQHTETETPSVGFTDAQLALVSPSTGTQEDKNIDNEFASKTPGEDVAADNEDYDQDDEHLSLTQKAPDSAAKSTISKAYKKRPRPSPGTGAAKKLFKDNDAGGTDDAAGSSNMEHNQDREVTRPITQPSTYVKKRPLAAAKFSNRKETSQLLADIIYQNAIVVRVHGAGNPTTTQISAMLGFVCDCQVDDFALLPFRHRIYITIFMDHDQQEEQYEKALNQKTYTFRTTKLEFQPFKMNFDSTISPLRQRVILALEGVPPEQWNKEAIIELLDNCCRIEELYEEHHIQDLSMFRLAAWTTNCDLIPKIIEWNIDTNQPGQQSTDLN

SEQ ID NO: 192541 - protein, 107 aa, Oryza sativa
  unsure (1)..(107): unsure at all Xaa locations
  Clone ID: PAT_MRT4530_88762C.1.pep
LILQDTGXXXTXXXAATAEPSNXPNQXAIIRSGXXPXXTXXXACYXXXXXAXHCXGXXSAXLAXXYXILHXICXWFLXXNXXTXRXKSEXPXFXXXKXXXIRXXLVP

SEQ ID NO: 192542 - protein, 2266 aa, Oryza sativa
  Clone ID: PAT_MRT4530_88763C.1.pep
MAAVGVSFVSLLNAAASHCQLPMVSYLWELDGDGMLLAGVELVLPAEDLGKSSARKFFWVAATDPLIVSHEMVAQQAVRFLQAKYGFTIHDYNFEMLLSYRKVASSAVDAALAAAACLARFQARYGALDLPCDSYLQAPIFDAIGSRGLQSCHASTSSAQIAFPDTQQQYPAAVAEPVIETSGGCDPTVAIAKSPRPTADDILPLPKDYVASLKALYPERSYYGGPSHECPYCGAVFWYQERVKKGTVLSQRKIVYNLCCRGGKISLPELKHPPSLLAELLKFDGGVRSKRFLRQIRSYNSLFAFTSLGANIDKTINNGTAPCVFKINGVVHHRIGGLLPQQGAPPKFAQLYIYDTENETANRMNIFERDNLSDEPDPEIVRDLGSMLDEHNDLVKAFRFARDRLKDHGDQKVALRLLGCDSRDEIQYNLPTSGEIAGIVVGDYSAGQYTYDVMVQSSNARLRRVSALHPSYMALQYPCFSRMGIVDAIDHGLDSGDSVGQRYVLPSSFTGGRRYMVQNYQDAMAICRVFGSPDLFVTFTCNSKWQEIYDALLFEPGQLPSDRSDMIVRVFNMKVNEFIADIREGKTFGPVLAVLYTVEFQKRGLPHIHCLVWLAAENAEFSAPIVDGFISAEIPDVLTDPLGYALVDEFMIHGPCGNQNRACPCMKKGECSKHFPKSFQEETTMDEFGFTIYKRRNDGRYVVKNGIKLDNIWVVPYNLELLKKYQAHINVEWCNKSNMIKYMFKYVTKGADRTKAYFEISGNASNKTSESSTSPRNEIQEYIDARFLSTCESHWRAFEFDIHYRMPSVERLAVHLPNMNFVRYKKGSDLQSLLSSPAAKKTMLTEWFETNRKHTSAHTLTYCDFPREWTWDSSSRSWRPRTPCEKIGRMYYVSPVSGELYYLRMLLMIVKGAMSYADVRTYDGIVYPTFRQACEARGLLESDNEWHLLFDEAIVSASSGQLRQLFVTVVMFCSVGNVRSLFEKYWTYFTDDIQRRVRTALSNPSYIIPSDRLLSLLMKELHTVFSNSGGSIDDYDLPRAAIYSDDIVGNRMVDEELALDAATLATEANLNIPRLNTDQRKIFDTIIQRVDENKPGFFFVYGHGDRTLRDLLSEQTPSNSIVPFGSKVIVLGGDFRQILPVIRKGCRDLKDFGDWVLALGDGRLTATKKIDESEPTWVDIPDDLLIKTSGDKIKAIIDEVFPRFADNYTNHCYLACRAIVCPNNSTVDQINDCIVDMIASEPKEYLSCDTISKSSEHLPDFDILYPPEFLNSINVNNFPSHKLVLKKGVTIMLLRNLNQSMGLCNGTRLLVTSLGHRLLECVILTGSNIGETTFIPRIALTTTSPKWPFTLQRRQFPVRICYAMTINKSQGQTLSRVGVYLKKPVFTHGQLYVAVSRSTSREGLRILIEDEDEVCCSKTINVVYHEVLEAVSSMMGGLQIASLEPGDGNPTLRIRISRLWEYRDQNDESILHYIGLVLVDQKGSSIAAMIYPPCDNKFKPLITEGKVYLLTYYRVKPCTKHYRPVDNKLAITFTWWSTVEECVDVPDNFAQYAYSLKPFNELRSHVDRKDSFTDVIGIITEISSVTTVQTRIKDGDSLKRNVYIRNAELDLFPKFETFLCQIILYSVEGSYEPIKWLDLPSGPAAHNNGEEKTIAEIRELHPFKFKVVLTVTILWKQKHEFLVTVVIKKLNMEYSWWYTACDICKKTAKPYGSSYRCGNNTCPPVVSASPWFKLSVIAGDHTADTTFIVFGRLAQRLIGRSVDALVMENPTGKDYIPREITDLLEKEFVWNVSFTENTVSSGIVAFQVNKIIKGGQNYSLALLQSPSGSQASSVVPSMALSPVTSQDVSVGQHTETETPSVGFVDAQLPLVSPSTATQKDKNIDDEFASKTPGEDVAADDEDYDQDDEHLNLTQKAPGSAAKSTTSKAYKKRPRPSPGTGAAKKLFKGNDADSTDDAAGSSNMEHNQDREVTRPITQPSTYAKKRPLAAAKFSNKKETSQLLADIIYQNAVVVKVHGAGNPTTTQISAMLGFVCDCQVDDFALLPFRHRMYIAIFMDHDQQEEQYEKALNQKTYTFRTTKLEFQPFKMNFDSTISPLRQRVILALEGVPPEQWNKEAITELLDNCCKIEELYEEHHIQDLSVFRLAAWTSNCDLIPKIIEWNIGTNQPGQQSTDLNWKPNGDLSIVLIHIEKLFDYSDPTNGNEDNPEALIEYENKVHHLPIIKRFQWLPGRIDSDYGPIEGGTPLVPRQQLPDNLHEEQPFDHPQ

SEQ ID NO: 192543 - protein, 142 aa, Oryza sativa
  Clone ID: PAT_MRT4530_88765C.1.pep
MEHLRTALWITNNGGLAHWTRTEELAEGSGGGKLTRASLQVAWRELDRPICVRFNAHSVRRVRQGIQTAHTVLDCWEGCYRGPTGKFFSDVDSYTFLDVRHLDPATARWPLFGVNIYTRREMAKFFHAKSRFHKSQDHGIPL

SEQ ID NO: 192544 - protein, 159 aa, Oryza sativa
  unsure (1)..(159): unsure at all Xaa locations
  Clone ID: PAT_MRT4530_88766C.1.pep
VRGGEPPTVAAVSSYPSRRAPPHYRWPPALLLVIVRLHAAGGCXLHPPRXRLSSWSPVAVVSNLCTIGSPRGHSAPPPFFPSRQDLGGREGEEQXPPPGAASXTALPLPPFSRICEGGEASRAGVRXHXPLAGSAPGIRKERWAGEVRGGRVGKGEXER

SEQ ID NO: 192545 - protein, 217 aa, Oryza sativa
  Clone ID: PAT_MRT4530_88767C.1.pep
MAELMRRLVAHHGCAASLVTFSGLASPTSVSSVAAIMDLDEATHDCQRRSIRGDEASGGRARRSGRRAVVDLKSFLTNGRRAERWRASAAAGCERSGDERMRQQLAEASVSLARAGEVSPATPWGGVAYRGRACGGGVGELGVSWAGAFPFPCSFSFPSTTASGCRRGMRRVTRRSVVETGGCRRDPLDLNESLKQDGGSRCAIYKVMDLSDTRAQL

SEQ ID NO: 192546 - protein, 1698 aa, Oryza sativa
  Clone ID: PAT_MRT4530_88768C.1.pep
MAIPIVGGHVLTTKFVFAFKLGYIRFDLRRKGSNQLARSEPKGNLFGPALELSRSLRPVRVFCVNRGVQLYPQDTIPHMLPCPEVPPRYYKGGNRDKTRRTTLPNQTYPPQVSPPPCAKLGSPFSRLGKSSYSRDQYQGPNCTIASTFAMCWEIRLDQSGIQDEDRYGNRARIGYDPNWLQTGLAEFESNRDILCNFLRDKCGQKSAAKTYAELAPSIIVPITLDKLTTEQRDELEQMMSNVKDQFMNSFQETRRGTIVQKYKLKVVAADEAGSGSSQGDKGDVPQDGTVEDFGADGNQEPLQFNNFQDRIDYAVQHALINQSGVLVNTLTNMVKTVVDDSQLADLAFQGLIAPIKEKFSAQDFESLSHLTQKVTLHEQRFAKAKKNFKKINHVYPYMYGSDDEDDDSEVAAAEWVKSKKVIPCQWVKSSGKEEKFDFDITKDDKIFDLLLREKQIQLPAGHVIPSAEELGKRRYCKWHNSSSHSTNNCKVFRQQIQAAIEGGKIKFDDSKKQMKVDGNPFPINKVHTSRRTADGGMNRNFHMNSTRIINKYQRKYDKQHEKYHEKDDGFDPHWDCEFFRFCWNEGMRLPSIENCPGCSEDTGSSSRSYNRGIFTKNQKRRVQRLRNREQFQRVHQEINHRLRKTKTKQEWRVKSTVVSADEVEAEKAKRVLKGKALASASVNMVFMLPAEFEARQADVDDVEEASAKLVLSPEQAVFEKPEGIENWHLKPLYINGFVNGKPISKMMVDGGAAVNLMPYATLRKLGRNPDDLIKTNMILKDFGGNPSETKGVLNVELTVGSKTVPTTFFVIDGKGDKIKIVPADSRLKMQSPNCYFEGVVEGSNVYTKDAVDDLDDKQGQGFMSADDLEEIDIGPGDRPRPTFISKNLSSGFRTKLIELLKEYRDFFAWEYHEMPRLSRSIVEHRLPIKLGVRPYQQPPRRCKADMLVAVKAEVARLYDAGFIRPCRYAEWISNIVPVIKKNDKVRVCIDFRDLNKATPKDEYPMPVADQLVDAASGHKILSFMDGNAGYNRIFITEEDIHKTAFRCPGAIGLFEWVVMTFGLKSAGATYQRAMNYIFHDLIGWLVEVYIDDVVVKSREVENHIADLRKVFERTRKYGLKMNPTKCAFGISAETRYSPVEKLCLCLYFSCTKLRHYLLSNECIVICKADVVKYMLSALIFKGRVGKWIFALTEFDLRYESPKAIKGQAIADFIVDHRDDSIDSVEIVPWTLFFDGLVCTHGCGIGLVIISPRGASFEFACTIKPYATNNQAEYEAVLKGLQLLKEVEADAIEIMGDSLLVISQLAGEYESKNDTLMVYNEKCRELMSGFRLVTLKHVSREQNIEANDLAQGASGYKPMLRDVEIEVATITADDWRYDVFQYLRNPSQLASRKLRNKALKYTLLDDELYYRMIDGVLLKCLSADQAKAAIGEVHEGICGTHQSAHKMKWLLRRVGYFWPTMLEDYFRYYKRCQDCQKFRAIQRAPASAMNPIIKPWPFRGWGMDMIGQINPPSSKGHKFILVATDYFTKWVEAIPLKKVDSGDAIQFVKEHIIYRFGIPQTITTDQGSIFVSDEFVRFADSMGIKFSSPYYAQANGQAEASNKSLIKLIKRKISDYPRQWHTRLAEALWSYRMACHGSIQVSPYKLVYGHEAVLPWEVRIGSRRTDLQDGLTVDEYYNLMVDEREDLVQSRLRALEKVT

SEQ ID NO: 192547 - protein, 87 aa, Oryza sativa
  Clone ID: PAT_MRT4530_88769C.1.pep
MENAIPWRGIGDASNVEAGAPELAPNLDARAAFEGREAGVWRVGRRGCGGWRGGSRQGRVAGKDMPGGSRRLAADQEDDDNDVPPPH

SEQ ID NO: 192548 - protein, 121 aa, Oryza sativa
  Clone ID: PAT_MRT4530_8876C.1.pep
MAGSWSFRRRCGTEAEMRTAAARGGGGDGGAERWRRRRDGGGASGRRKRRRERATAAEAAGCRFLNMWRVKVGAQAGKPHRGTSTHRQKHIPHHRAADVDGGATLLPPAYYPKARQVNTHI

SEQ ID NO: 192549 - protein, 217 aa, Oryza sativa
  Clone ID: PAT_MRT4530_88770C.1.pep
LMMTHACRVSIPVVVVDVGEVGEVGDGAVADEEGALPVDALHVGALLAGLQHPPRELLELLLPAVGVVRLAHPLHLVHQLVRDAISARARCHGSASGGVASWIAHVHIVLCIYKPSLIVVVNLCSSSSTTATSTRPQWWPDEGRLDPHKHQPPCRVDLVDVVRFEAPPRRGPPDGGRGEAASHRRREEEEELKLEAAGWGEAGPPTVGGEEMWSPTK

SEQ ID NO: 192550 - protein, 205 aa, Oryza sativa
  Clone ID: PAT_MRT4530_88771C.1.pep
MAASQYMDSVAAGLRSSLIPLHPGVGVKLPFRLPLRWDVWVEEIEKAAVDGARAAGGGRLGERCSGGGQGIGGLSSSVSQLQRRPTRMEMGGFGGIVAGGASMVGESKSGSGARRWGLELRPVVDGDAMALTRAKPPWVAMFPFSIATDRYMRPLRLRSTLYMASFHLMQQRGVDDQDGALVVVAPAAGLERGRATRRPTSSSSA

SEQ ID NO: 192551 - protein, 59 aa, Oryza sativa
  Clone ID: PAT_MRT4530_88772C.1.pep
GVTSYLSSTENTNVVRACQVRCPYKYTQRVFYMHVKIAKLKNANVNILLLFTRRAKIKC

SEQ ID NO: 192552 - protein, 156 aa, Oryza sativa
  unsure (1)..(156): unsure at all Xaa locations
  Clone ID: PAT_MRT4530_88773C.1.pep
PRRPANGIYNYHMNLSVCSLVPDFWGVGQLXPMMPVSRLTEKPXHQRTLVDLTCDSDGKVEKFFRDAVTLPLHPLDDAAAYHGGYYVAALLSGAYQEALACSTTCQCSTLVRVESAGXGGAFKIVYVELGPTAEEVIGTMRYHVKNDISDVIEKVA

SEQ ID NO: 192553 - protein, 55 aa, Oryza sativa
  unsure (1)..(55): unsure at all Xaa locations
  Clone ID: PAT_MRT4530_88774C.1.pep
KKIGXHNISIIFTKNSSLKLVKLRVKSQSVSQPSGSDKKKMCGTLSHFEISQKRD

SEQ ID NO: 192554 - protein, 467 aa, Oryza sativa
  Clone ID: PAT_MRT4530_88775C.1.pep
MGGAGEGDGQTEPLLEKLSNSSSSEIDKRTAYQVMSSRPTPHMLAHRTRETDQLEGTAWTATAHIITAVIGSGVLSLAWSVAQLGWVGGPAAMVLFAGVTLVQSSLLADCYIFHDPDNGVVRNRSYVDAVRAIQKANCYHREGHDAPCSVGGDGYYMLMFGLAQVVLSQIPGFHDMAWLSVLSAAMSFTYSLIGFGLGVAKVITNGVIKGGIGGIAMVSATQKVWRVSQAIGDIAFAYPFASVLLEIEDTLRSPPPESETMRTASRASIAVTTFFYLCCGCFGYAAFGDATPGNLLTGFGFYEPYWLIDFANLCVAVHLLGGYQARTGFEISVYSQPVFAAVERRMGGAGAGVVEVAVPAAVAWPSRWRRGCRVNVYRLCFRTAYVAATTALAVWFPYFNQVVGLLGAFTFWPLSIHFPVEMYLVQKKVAPWTPRWLAVRAFSAACLATGAFASVGSAVGVFSSKTS

SEQ ID NO: 192555 - protein, 53 aa, Oryza sativa
  unsure (1)..(53): unsure at all Xaa locations
  Clone ID: PAT_MRT4530_88776C.1.pep
MNNLQLERKLKLSDAYRXYHYFFCMQFKNPSFFYALDFGKDSCLRNVFWADAK

SEQ ID NO: 192556 - protein, 74 aa, Oryza sativa
  Clone ID: PAT_MRT4530_88777C.1.pep
PRRGVGLWLLCRPFFFTTGRTLSIDFFIVRNTYGHEVQTVENTVPTHRQSIHDDVGSILQAHEFWTEKSSVLLG

SEQ ID NO: 192557 - protein, 73 aa, Oryza sativa
  Clone ID: PAT_MRT4530_88778C.1.pep
VCSAKPIVLCLFTKPKDHRSRPLSRPVRLPRHPTFAIVEPSSSSVAAAIPSPHRARGSHSVLSVDRLCEHGTR

SEQ ID NO: 192558 - protein, 629 aa, Oryza sativa
  Clone ID: PAT_MRT4530_88779C.1.pep
MDMQIGVGVTAVRTVADLFYLAHMILKFRTAFVAPSSRVFGRGELVRDPDQIAIRYLKNDFIIDLAAMLPIPQVIIWFVIPAVNNSSANHTNNTLSMIVLIQYIPRVFLIVSLNSKIVKSSGVVTRTAWAGAAYNLLLYTLASHVLGALWYLLSIERQYTCWMDVCTRENGTNPAIPKCYMSYLDCKTLEDPIRMDWHSRSEIDHQCLLPEATYVYGLFADALNLDVAKVNFWDKYLYCLWWGFRNLSSYGQNLENSTYRGETIFCILICIMGLVFFSHLIGNMQTYLQSMTVRLEEWRVKRRDIEEWMRHRQLPLELQERVRRFFQYKWLATRGVDEESILQSLPLDLRREIQRHLCLALVRRVPFFSQMDEQLLDAICERLVSSLSTKDAYIVREGDPVSEMLFVIRGELESSTTDGGRTNFFSSITLRPGDFCGEELLTWALMPNPSLNFPQSTRTVRSVTEVEAFALRAEDLKYVANQFKRLHSKRLQHAFRYYSHQWRSWGACFVQGAWRRYKKRKLARELSKQEELYYMQGQGGDDGDGHDDSDSAPLLGAGVGAGGDHRDGAAAGAAHLGATFLASKFAKNTKKSAAAHHGKARMEDVSSIKFPKLAKPDEPDFSLSSDDVL

SEQ ID NO: 192559 - protein, 376 aa, Oryza sativa
  Clone ID: PAT_MRT4530_8877C.1.pep
MGILAYLFLLVVAIIGVFAVLASLLDPIHGFYLRSIKEALEWAEFIFTWTSSLYFILPISRQNLKFSSNWNDVMEKLVFFSNATNWASTFYDCFTPLTLWLEGIYSGIVLLLFVLFIGNLDENWGRIMIEFSGVAIQMAGIFCFVMIKVSRDDNYTMKEAQKQSIMALVIFKIFSFIILTFIKAKLVPTEDNVVIPRAFAAIGCLIQFVLMLSSPIGRWLDNNFNDDEPTTRKIKLSAALIRLITLSFDCWLFTVRGYWSSPLKKPLAEMTATNLVFTSIVVVCRYIGPNKLRNFCVDIWNWLRAVPEKLQGKWNSFIQWKTDNWTPFTNTVKVALQSFCTGCCAMFQTGWNALKNRVSQCIEDMWNILAGPGGMH

SEQ ID NO: 192560 - protein, 158 aa, Oryza sativa
  Clone ID: PAT_MRT4530_88780C.1.pep
MGSGMEAARRVLEHPTPTDASSAAALPSGFYDAFVLRGIRVEAAEPGRLLCRFTVPSRLLNSGGFLHGGATASLIHLVASAVFHTTGNSSSSSSSTSPLEMNISYLDAAFPDEEIEIEAKVLRAGKAVGVALVDLKKKSGKLIAQARYSNYLAPSSKL

SEQ ID NO: 192561 - protein, 73 aa, Oryza sativa
  Clone ID: PAT_MRT4530_88781C.1.pep
LGRSFLRFHLWSGRNNWWIHLVGTLKDSNCSSIKWIEINGKGGLSHIWIEPNEKKKKEVCGILAIRYIICMWC

SEQ ID NO: 192562 - protein, 189 aa, Oryza sativa
  unsure (1)..(189): unsure at all Xaa locations
  Clone ID: PAT_MRT4530_88782C.1.pep
MGSGMEAARRVLEHPTPTDASSAAALPSGFYDAFVLRGIRVEAAEPGRLLCRFTVPSRLLNSGGFLHGGATASLIHLVASAVFHTTGNSSSSSSSTSPLEMNISYLDAAFPDVCICLXFCFPSPTLGTGLLHFSLMIFVSHSQEEIEIEAKVLRAGKAVGVALVDLKKKSGKLIAQARYSNYLAPSSKL

SEQ ID NO: 192563 - protein, 1006 aa, Oryza sativa
  Clone ID: PAT_MRT4530_88783C.1.pep
MAAYRGRRDYGGGWWSASAGSGRMTLAAVMATRAPRPAFIRREAIRAAEAAADEVVLRVQPTEEAERTRQGIIGYLKLLFGTALGCEVFAFGSVPLKTYLPDGDIDITILGNTAPDSTFISEVRGILELEEQEDGADVAITGLQFIDAEVKLIKCVIDNIVVDISFNQIGGVTTLCLLELVDHEVGNDHLFKRSIMLIKAWCYHESHILGAHRGLISTYALEVLVLYIFNIFHKSLHSPLEVLYKFLEYFSKFDWDKYCISLNGPVPLSSLPNLTGESYSVEPSGIHDELLFGPNGSCDRLIVLKKDSDGSNMNFRPKYLNIIDPIKSSNNLGRSVSKGSFYRIRGAFSFGAQNLSQILMLPTDLIPTEIFGFFVNTLKSHGRGKRSDVGNNGSFEPSLDPESEYALWEDSSDVKESDMSEDENRSPDLQRTSDSCFYNKVSGDSFSSHSPFSQEKGNNMKRHYDCAREEYLPLGRSSMEQHIYANNQSQILTPSTRINTLDISNSCPAETNRSDLHEEKLPLSHFSPSNLLDLSGDLDLHLECLRKVQYHLESMFDWLIQEASFSGAVNNDSFNIPTQSSFSNTDGRALRPLLVSSAYTQRGNLSRVYCSHSTREISQKSVSRTEVQVNAVCQQNVALPSGTNNRLALPPSPVADSEKSPVSPLHNTVDIVGTHGAGMHTLNNVSLLSGTDVLSNAFAQLSFPAVNSVDYKYCWSYTTTNNRATSSQKTNRGKGGTGTYIPRMNYHTYKERIFYYNGRSQREMLPDRPFKIKTNPIGYIRRRSSPEMGCSSSSNGGITFENTSHTPSKKQDHSSKSTVTAEGSFAQERAPASQEWNICTNMNMVDSQKPGNDEDLVRPNNESRELRTLHPSEVQNREMTASSSSSVELPHCVGNGLQESNTSQPSSPATEASSPIKTSLVEGLEFGSFEPILGTSFLCEKFCEEFPPLPARKWPAVAAVSTPVTVSSSPAETGSKPEGLYQLRDEADFPPLKAGARNGFNHRVGR

SEQ ID NO: 192564 - protein, 60 aa, Oryza sativa
  Clone ID: PAT_MRT4530_88784C.1.pep
SHRVVSQQGVDTPSACRAVGVEVAVSVEKKCVMPCCRGQYGKYVSRVSRSRRCKWSCRSV

SEQ ID NO: 192565 - protein, 189 aa, Oryza sativa
  Clone ID: PAT_MRT4530_88785C.1.pep
VDSRGSPIRGLSKAERQEYAPPAGSGFISGFSSISGRSLIDKISSARDSPFGPTSYLSAQARVVDDYTMSQIILKELNGGDTSRMLIVITGASHVIYGSRGIGVPARVSKKMPKKDQVVVLLDPERQSIRREGEIPVADFLWYSAAKPCSRNCFDRAEIARVMNAAGRRPEALPQLFILVFEFQKCAPE

SEQ ID NO: 192566 - protein, 100 aa, Oryza sativa
  Clone ID: PAT_MRT4530_88786C.1.pep
GGGGFNFFFFFFWFFFFFFFFFFFFFFWGKNFNYSNQQAKTIPKFITGHTREWGTPYLTNHKKRRGHTTKNRKGQEQPCRGGRKTQGRPTRSGGPGGATR

SEQ ID NO: 192567 - protein, 58 aa, Oryza sativa
  Clone ID: PAT_MRT4530_88787C.1.pep
VCTEEYLRNECSAVHAVNASHCMHVVVSRGTLEWMYVHVLLIKNSPPWCYLIIHYLCV

SEQ ID NO: 192568 - protein, 638 aa, Oryza sativa
  Clone ID: PAT_MRT4530_88788C.1.pep
MAEERESFESQWAPSDVIEENLKEMVVHGILPAKEIIGWRPAFGEAFPTPDTHKVVVFSHFFYGGFSLPTSRFFRGILNFYGISLHHLNPNSIVHIANFIQAYEAFLGIRPHFALFCRIFFLKPQPNKSKPCVVGGAGFQLKGTLSQKYFSMPFKTSNKGWHANWFYVQNPETALPEYSCLPPVYQDTWNSLPMGDEAAQAVELMERMLKLKEQGLQGEQITRHFIKSRLAPIKERSRMAFEFDGKHDPNREGPDSLDFKVMKERMYKIFSNTIVVSYSHLLPVMPYNAFNPPPPEFALMKSDPPIAQRRSPRHQTGQGSGGPKIRSEAQPNTSNPAGQSDSRKRKLVLSDDEGDDAKKPGDRETTRKLPKQAIPKKKTSSRPMPKIRKSSRNKAKTATLEQLVPHLGNLEAVRDQLHEAKELAKKTEHDLRDRIAQLQESNFELSGSSKVSAVQAAKMSQLEKQIQTLESDKAELARQRDSALKEVEDRKIKSQAQFDVLVGKIKRLEGARDEVANAATPLVQAMFFNNNGPSTFDASEIFDKLRVAPDTYFKNIKEAGSMGASLALAMTKSLYPKIDIDAVDGFVNGTSEEAALDLINDAQKAADKIAVDVVERVQDTDLQPTGPDGSDDEKTDTD

SEQ ID NO: 192569 - protein, 40 aa, Oryza sativa
  unsure (1)..(40): unsure at all Xaa locations
  Clone ID: PAT_MRT4530_88789C.1.pep
ISVSGTISKNMXRFVKXVHXSHRLPEPNPRIDLPDLSNSC

SEQ ID NO: 192570 - protein, 239 aa, Oryza sativa
  unsure (1)..(239): unsure at all Xaa locations
  Clone ID: PAT_MRT4530_8878C.1.pep
RPGPLGSREGTPEGGLPGTADGRGTRPLPEGPGRXPPARRSGTRERGGKGEANGTVFGSPRSTATTGTAAEAEEGGGAVRDDDDDGAPAVGERSEGADGVGDNAAKPMEVAPSREEDRSDDGGETELGGDGGERGARRELDSDGESERRAAETEERSTGDDFIASGGREGGRRERKPAVEFSGSIDAPAEIAGFKSDESEGEREGKAGETGEGIAGSNSPLFMARGEGGMRRIRRRRRR

SEQ ID NO: 192571 - protein, 56 aa, Oryza sativa
  Clone ID: PAT_MRT4530_88790C.1.pep
MTATVGWIWQCPTQEQWILPPSAQEGENPLVSTSEAATRVFFAEVLTNGDEDTSLS

SEQ ID NO: 192572 - protein, 778 aa, Oryza sativa
  Clone ID: PAT_MRT4530_88791C.1.pep
MEAATKIKNCADLDDFHEKVMLILDGLRVVVALPLPADLLILLASAAESISGRPAAGCQTRCGDVSIPYPFGIGPNCSHGKGFEIACDTRTRNGSGELVPTLAAANGTIHVQSLFVAPIPEVKVMLPVAYQCYNSSDSVTESFFGAVDLNNNGVYRISDKRNMFVVLGCNTMAYTNNGDSHGKGPYAGLYYTGCVSYCNDSSSAQDGMCAGIGCCHVDISPGLSDNVVTFGEWSRYFQVDFNPCNYAFLVAKDEYNFQRSDLQKDLNRTKPVWLDWAIRDGGNSSASSSCPAPEVREKMPPEYACVSDNSECVNSTNGPGYYCKCSKGYEGNPYLVGGCNDIDECARSDEYPCHGDCRNTVGDYHCKCRTGYQPRGGGPKIDECSQKFPLPAQIALGISLGFSFLIVAALFTLMMLQKRKINEYFKKNGGSILQKVDNIMIFSKDDLKKITKNNSHVIGQGGFGKVFKGTLEDNTMVAVKTSIEVNEARKEDFTNEVIIQSRMMHNNIIKLLGCCLEVDVPMLVYEFAANGSLQDILHGDANRSLLLTLDIRLDIAIESAEGLKYMHSSTNCTIRHGDVKPANILLTDKFVPKISDFGTSKLLTVDKDFTMFVVGSMGYIDPIFHKTGRLTQKSDVYSFGVVLLELISRKPTIYGENFSLIIEFQKAYDEVHSGRAMFDKEIAVEEDIFILEEIGKLAMECLKEKVEERPDMKEVAERLVMLRRARKHGQGSYNLSPRHHEEISIETTPTSFGADFSTNSSVSLSATCTPERKELYKL

SEQ ID NO: 192573 - protein, 406 aa, Oryza sativa
  Clone ID: PAT_MRT4530_88792C.1.pep
MAATIQSVKARQIFDSRGNPTVEVDICCSDGTFARAAVPSGASTGVYEALELRDGGSDYLGKGVLKAVDNVNSIIGPALIGKDPTEQTVIDNFMVQQLDGTKNEWGWCKQKLGANAILAVSLALCKAGAIIKKIPLYQEFMILPTGASSFKEAMKMGVEVYHNLKSVIKKKYGQDATNVGDEGGFAPNIQENKEGLELLKTAIEKAGYTGKVVIGMDVAASEFYTEDQTYDLNFKEENNDGSQKISGDSLKNVYKSFVSEYPIVSIEDPFDQDDWVHYAKMTEEIGDQVQIVGDDLLVTNPTFPCWLQYSNQFDLQRVAKAIKDKACNALLLKVNQIGSVTESIEAVKMSKRAGWGVMTSHRSGETEDTFIADLAVGLSTLLRIEEELGAAAVYAGAKFRAPVEPY

SEQ ID NO: 192574 - protein, 100 aa, Oryza sativa
  Clone ID: PAT_MRT4530_88793C.1.pep
CVWCPSMFNRNENHLHDVSLCVDMASGCHQRDKCGDIPVTHTKDIPVLPGEATLLSSTGESVPCDVKHSCSRLSHSHMRSWRIYMFASDTYAYAWVVGRT

SEQ ID NO: 192575 - protein, 372 aa, Oryza sativa
  unsure (1)..(372): unsure at all Xaa locations
  Clone ID: PAT_MRT4530_88795C.1.pep
RGGRKKKKKKKKKKKKKKKKKKKKKKKKLGKGVSKAVDNGNSVIAPALIGKDPTSQAELDNFMVQQLDGTKNEGGGGKQKLGANAILAGSLAICKVGAIIKKIPLYQHIANLAGNKQLVLPVPAFNVINGGSHAGNKLAMQEFMILPTGAASFKEAMKMGVEVYHNLKSVIKKKYGQDATNVGDEGGFAPNIQENKEGLELLXQQLSGDSLKNVYKSFVSEYPIVSIEDPFDQDDWEHYAKMTAEIGEQVQIVGDDLLVTNPTRVAKAIQEKSCNALLLKVNQIGSVTESIEAVKMSKRAGWGVMTSHRSGETEDTFIADLAVGLATGQIKTGAPCRSERLAKYNQLLRIEEELGAAAVYAGAKFRAPVEPY

SEQ ID NO: 192576 - protein, 113 aa, Oryza sativa
  Clone ID: PAT_MRT4530_88796C.1.pep
KKAGEDAFKRSGLGYPIVPPGPLQEKPGGQGALFFDQGNRISQGFSCPHVPNICVKPLHDSPARNKSFYVCSGFVVNQGNELYELGAPFPDKANNFFSPAFFVLKKNPCLICF

SEQ ID NO: 192577 - protein, 198 aa, Oryza sativa
  unsure (1)..(198): unsure at all Xaa locations
  Clone ID: PAT_MRT4530_88797C.1.pep
KLSSSSHGGDDRVRQGAPDLRQQGQPHRRGRCVLLRWNLCKQKLGANAILAVSLAICKAGAIIKKIPLYQHIANLAGNKQLVLPVPAFNVINGGSHAGNKLAMQEFMILPTGAASFKEAMKMXVEVYHNLKSVIKKKYGQDATNVGDEGGFAPNIQENKEGLELLKTAIEKAGYTGKVVIWMDVAVFEXYNDKDKTYD

SEQ ID NO: 192578 - protein, 716 aa, Oryza sativa
  Clone ID: PAT_MRT4530_88798C.1.pep
MLSRGRCFPAASRIRPLVRAFCDVPPSLQDAAAGVPSSQDHTEKVDDVKARPDELDIAIVGGGMVGLAVACALSNMPLTKHLRVGIIDSNPALKSRNYLKKDGVPDSRVSTITPATISFFRDIGAWDHVQQQRHAFFGKMQVIYLACPDEMICSVWDYTGLGYTRYSARDVGKEYLGCVVENKVLCNSLLLRLQEENGDIEKMIYPTRLISLALPSKSRQAPTREAISSGYPPEELNRSNLVKLELSDGQTLYSKLVVGADGSKSNVRQTAGIKTTGWNYPQSAIICTVEHITENDCAWQRFLPSGPIALLPIGDNYSNIVWTMSPEESLRHKSMSPEDFVKSVNNALDFGYGPHPHSGSLDYYMEKLFSDIGSTAASTKECFEVPPKAIGVVCERMAFPLSLKHSHDYISKRLALVGDAAHTVHPLAGQGVNLGFGDAAALAKVIAEGVSVGADFGDISLLKRYENNRKAANVAMAALLDGFQKMYSVDFGPLNVLRAAAFHGAQYISPLKKNIISLQSSTSFARRYSFSRFLRVIHLSVPSYSYHGNHIIYQFERNGAIGECIIRVWNHGPSVQPCKCPICRRLINLLVPANVSIDNDDDPQIQHVLGEVQHYNRIFGGTPRNLTQRLQDLPFFIRRLFRELLDPQRTLPLVFRARMVMMVALSAIYVLSPIDILPENVLGLFGFFDDFLVLLIVFLHLAAVYRSLLLYRHGGH

SEQ ID NO: 192579 - protein, 200 aa, Oryza sativa
  Clone ID: PAT_MRT4530_88799C.1.pep
MLACLQDSRGSPAKAIQEKSCNALLLKVNQIGSVTESIEAVKMSKRAGWGVMTSHRSGETEDTFIADLAVGLATGQIKTGAPCRSERLAKYNQARLRRSLVRLLSTLVPSSAHPWSPTKLDVVPGTCDLLYREALVWNRMPIYVMGHGANTNNLLTFHRMPIYVMGIWGQGPIPGDAVQMPYLFELEVFPSGQRRATTSL

SEQ ID NO: 192580 - protein, 53 aa, Oryza sativa
  Clone ID: PAT_MRT4530_8879C.1.pep
LSSLAPLVCIFIVYSCSILPIILNLPKLFLHAFSSGNLSTLKSIFCSKPFSSC

SEQ ID NO: 192581 - protein, 1445 aa, Oryza sativa
  Clone ID: PAT_MRT4530_887C.1.pep
MASKSRFVVGSHVWVEDPDEAWMDGLVEEINENDLVVNCTSGKKVTINVGSAYPKDTESPRGGVEDMTRLAYLHEPGVLQNLKSRYALNEIYTYTGNILIAVNPFQRLPHLYNNHMMGIYKGAEFGELGPHPFAIADRSYRLMINNRISQAILVSGESGAGKTESTKMLMQYLAFMGGKAQAEGRSVQQQILESNPVLEAFGNAKTVRNNNSSRFGKFVEIQFDDNGKISGAAIRTYLLERSRVCQISDPERNYHCFYMLCAAPSEDCKKYKLGEAKTFHYLNQSNCIELDGLDDSKEYTDTRRAMSIVGISSDEQFRGLPKISYFHPLLGHGLATFYRCDEKGLEESLCKRVMATRGESITKNLDPRAAALSRDALSRIVYSRLFDWLVNKINSSIGQDPDSKILIGVLDIYGFESFKTNSFEQFCINLTNEKLQQHFNQHVFKMEQEEYTKEEIDWSYIQFVDNQEILDLIEKKPGGIIALLDETCMLRNSTHETFAEKLYQKFKDNPHFSKPKFSRSDFTIHHYAGNVAVSGYLESWCLYGITRLCIVMHVTYQTDLFLDKNIDYAVNEHQILLNASKCSFVSSLFPPCEESTKSTKFSSIGSSFKQQLQSLLETLSAIEPHYIRCIKPNNVLKPAIFENSNVLQQLRCGGVLEAIRISCLGYPTRRTFFEFINRFGILQPKVLGRSHDEVAATKMLLGKANLTGYQIGKTKVFLRAGQMAELDALRTEILGLSAKKIQTKVRSHVARKKYVMLQHFATQLQASHCRCYLVLSNYKRMMKAIITTQCAWRGRVARRELRELKVAAKETGALQAAKSKLEKEVEELTWRLQLEKRIRYASIIICATYNIDYTCPFIADVEEAKAQENKKLQLQLQDLQMQLNDTKELLKREKESTKAEMEKTLVPEICVDTTQVNELTAENNRLKALVVSLETNIEEMKQKFGETDNVRDEWCKKATDAESQINELKSMMQSLQEKLNSTEAENHVLRQQAMRTRPDNMPLLNMHRKSVIPLTYTPSSSKCFILVVKCACHVHILMTPHGTSMEYGRTSYIERQQESVEALINCVVENVGFSEGKPVAAVTIYKCLLHWRTFEAEKTNVFDRLIQIFGSAMQKQESNADLAYWLSNSSSLLIILQKSLKPVGSSVTTPLKRTQTQTSFLGRMVFRASNITVDMDLVRQVEAKYPAFLFKQQLTAFVEGLYGMIRDNVKRDISSVLTLIIQTPRSAKAGLLTDQGNNWQAIVNHLNDLLKTLQENCVPSIFARKIFTQIFSFINAQLFNSLLVRRECCSFSNGEYVKQGLQELEAWCTQAKPESYLTETLTVIFKKFRISYDEIINDLCTALSVQQLYKICTQYWDDKYNTESVSEEVLNEMKTLMNGKDASDGTLKSLMNEKDASDGTFLLNEEISMPLSLEEIGDSMDAKEFQNVVPPQQLLDNPAFQFLKS

SEQ ID NO: 192582 - protein, 64 aa, Oryza sativa
  Clone ID: PAT_MRT4530_88800C.1.pep
PILAIPTYDPRVRPLVRAHPKKKKNKKKKKKKGGHYKEMQAYIPLHPTEITLLYMPPKFRGGPL

SEQ ID NO: 192583 - protein, 103 aa, Oryza sativa
  Clone ID: PAT_MRT4530_88801C.1.pep
KARACNALLLKVNQIGSVTESIEAVKMSKRAGWGVMTSHRSGETEDTFIADLAVGLSTGQIKTGAPCRSERLAKYNQLLRIEEELGAAAVYAGAKFRAPVEPY

SEQ ID NO: 192584 - protein, 79 aa, Oryza sativa
  Clone ID: PAT_MRT4530_88802C.1.pep
TLVSVSVYSIAPANEHHACLGSRCISGVRFSAGFSLPPCVPACVLDRSAVMCIALNLSVYCAGPPFRLPPLFIHFVFVY

SEQ ID NO: 192585 - protein, 131 aa, Oryza sativa
  Clone ID: PAT_MRT4530_88803C.1.pep
MAATIQSVKARQIFDSRGNPTVEVDICCSDGTFARAAVPSGASTGVYEALELRDGGSDYLGKGVLKAVDNVNSIIGPALIGKDPTEQTVIDNFMVQQLDGTKNEWGWCKQKLGANAILAVSLALCKAGAII

SEQ ID NO: 192586 - protein, 273 aa, Oryza sativa
  Clone ID: PAT_MRT4530_88804C.1.pep
MDPLSDEALAIVVPIVVYWLYSGLYMALGHSISMDKYRLHSKEEEDAKNLVSKRDVVMGVLLQQLVQAAVAAATFTLAGERRTTTATTASPSSWLAVAARFAVGMVVLDGWQYAWHRWMHTNRFLYRRVHSWHHRLVAPYAFGAQYNHPAEGLLLDTVGGAVAFLASGMSPRASVVFFSLCTAKGVDDHCGLWLPAASPLQRVFRNNAAYHDVHHQRRGGRYNFSQPFFVTWDKVLGTHMPYVVEERPGGGLQVRPVAMSPSSATAAAGASGK

SEQ ID NO: 192587 - protein, 112 aa, Oryza sativa
  Clone ID: PAT_MRT4530_88805C.1.pep
TPTRVAKAIQEKSCNALLLKVNQIGSVTESIEAVKMSKRAGWGVMTSHRSGETEDTFIADLAVGLATGQIKTGAPCRSERLAKYNQLLRIEEELGAAAVYAGAKFRAPVEPY

SEQ ID NO: 192588 - protein, 193 aa, Oryza sativa
  Clone ID: PAT_MRT4530_88806C.1.pep
MGSGSFLKLLANNFDVLAGPLVSLAYPLYASVRAIETKSPVDDQQWLTYWVLYSFITLFELTFAPVIEWLPFWSYAKLFFNCWLVLPCFHGAAYVYDHFVRPMFVNRQIVNVWYVPRKENLSKPDDVLSAAERYIEQNGPEAFEKLISKSTRPSTSKRSTKQSILEEVESEHMARAERESWGENPFYDKNYRC

SEQ ID NO: 192589 - protein, 449 aa, Oryza sativa
  unsure (1)..(449): unsure at all Xaa locations
  Clone ID: PAT_MRT4530_88807C.1.pep
MAATIVSVKARQIFDSRGNPTVEVDVCCSDGTFARAAVPSGASTGVYEALELRDGGSDYLGKGVSKAVDNVNSVIAPALIGKDPTSQAELDNFMVQQLDGTKNEWGWCKQKLGANAILAVSLAICKAGAIIKKIPLYQHIANLAGNKQLVLPVPAFNVINGGSHAGNKLAMQEFMILPTGAASFKEAMKMGVEVYHNLKSVIKKKYGQDATNVGDEGGFAPNIQENKEGLELLKTAIEKAGYTGKVVIGMDVAASEFYNDKDKTYDLNFKEENNDGSQKISXGDSLKNVYKSFVSEYPIVSIEDPFDQDDWEHYAKMDQLKIGEQVQIVGDDLLCHQPXRVAKAIQEKSCNALXLLKVNQIGSVTESIEAVKMSKRAGWGVMTSHRSGETEDTFIADLAVGLATGQIKTGAPCRSERLAKYNQLLRIEEELGAAAVYAGAKFRAPVEPY

SEQ ID NO: 192590 - protein, 92 aa, Oryza sativa
  unsure (1)..(92): unsure at all Xaa locations
  Clone ID: PAT_MRT4530_88808C.1.pep
MAAVANGGAAPEWRVTVPEGATXTXEREAGRCRRAAXGWAWQLVSCVAALGSRASGLAGRVWKIGADDPRRAVHGVKVGLALALVSVFYYTR

SEQ ID NO: 192591 - protein, 167 aa, Oryza sativa
  unsure (1)..(167): unsure at all Xaa locations
  Clone ID: PAT_MRT4530_88809C.1.pep
TPCPFAALCDVSLISMPQLVSEHVSSIVESPFIEFKHVIHIASENEEFKLLSFLNTWSYIQFDDLCLLNCLDKKLFASYLNELQVGLQEGECCGFSATKILGSNHMTIKKXSSPDVVINKDKFNRLNDKVKSRTVSNQEGEDGEDTTSLDMTMTNLCIHQPKVHMFY

SEQ ID NO: 192592 - protein, 383 aa, Oryza sativa
  unsure (1)..(383): unsure at all Xaa locations
  Clone ID: PAT_MRT4530_8880C.1.pep
MSRVSTSWGFVXSRVNKPGERSARTGSTGVGPTRQPLGPRWTGRTRLTPAGAVGPTRQPHPRARAADGRAPPGSHGARPKAASPARPTGGGAPAPLWSPAAAIGTAERRPRERREEGSEAAVLGSPRVDGGDGNGDRNGERRRRGSDRRGRRRSGGRRAKRRSGRGRRRRGEAEGGDAEAGGGPGRRRRRTGARRRRRRERTTARAXFRRGERAASGGNGGGRHGERLYSAGRERERPEGKETAAAISGAIDAPAKIAGAXIRTNPRERERGKRGKRGRESRGVISPSXWCAGMAGCGGIRGGGGARARAXRRVRREDRDDRWAPPVSEGGGRARPSAARARGEAEWAAGRRGEREGTGPSRPKKGRGGGKRLFRVFLFIKSF

SEQ ID NO: 192593 - protein, 340 aa, Oryza sativa
  unsure (1)..(340): unsure at all Xaa locations
  Clone ID: PAT_MRT4530_88810C.1.pep
MAAMAAAAVPSDRPPLPWRARLLVGAVSVLHSASLRRDGTVNRFLLSLFDRVVPPNPAPDAAGVASSDHAVSDDLRVRMFFPGAAARDGGGDHLPVVVYFHGGGFVFHSVASAQFDALCRRFASAHPRXVVGSVDFRLAPEHGFPGAXYDDGKGGLRWVLAGAGGALPSPPATVFVAGDSAGGNVAHHVVARTPSSVSGLIALQPFFAGETPTASEQRLRDAPFGSPERISWLWRAFLPPGATRDHEAANVPAALRRDAERRRAFPPTMVCVGGWDAHQDRQRDYADALRAAGGAEEVVVAEFPDAIHAFYIFDDLADSKRLLTEVTAFVNRRRAAAAAS

SEQ ID NO: 192594 - protein, 69 aa, Oryza sativa
  Clone ID: PAT_MRT4530_88811C.1.pep
PTRTPTRPPTRPPPVKIKKKACCSFLLLSCASSPSPTLVLVIPMRSPPATQRTRGEIYIAYHRWFFSLF

SEQ ID NO: 192595 - protein, 138 aa, Oryza sativa
  Clone ID: PAT_MRT4530_88812C.1.pep
MAGKQPVGKGGVRGGRERRTVAGEAATAKVTMTTVVKAAMVGATASMASVAWEVATGAVPPPPNLVPCCHVKTMKRCSLLPISVLPRSGEDDEMGAARSSKQQVGREEKDGAGEDEEDTINSKSTRQRLVAPMIPPIS

SEQ ID NO: 192596 - protein, 448 aa, Oryza sativa
  unsure (1)..(448): unsure at all Xaa locations
  Clone ID: PAT_MRT4530_88813C.1.pep
SRYEVDMPRIEAILAPLEAELKLARQEIAKLQDDNRALDRLTKQKEAALLEAERTVEXHLAKAAMVDDMQNKNQELMKQIEICQEENKILDRLHRQKVAEVEKLSQTVRELEEAVLAGGAAANAVRDYQRKVQEMNEERKILDRELARAKVTANRVAVVVANEWKDANDKVMPVKQWLEERRFLQGEMQQLRDKLAIAEGQMTLRHLDWGKSRLASDIDFAVMXSEDNPSVRFNLAARSHFVKAVHXGCIGWRTLSSSLXNLDRSPSPALFASRSFDGGTRSLDRGKVLGNGPHLLNRSTDAVRDCETTDDWKAANTEEKGSEATNSSSTDTVSGVLYDMLQKEVISLRKACHEKDQSLKDKDDAIEMLAKKVDTLTKAMEVEAKKMRREVAAMEKEVAAMRLDKDQENKAKRPGNFKGPGTTSQAPHGRVVNILLSQYIRVTLSRSI

SEQ ID NO: 192597 - protein, 89 aa, Oryza sativa
  Clone ID: PAT_MRT4530_88814C.1.pep
MTDCHKKLDNLGWSLEAPGGHCYGVLPGRGDSEANKDVILGFVRAELTAMHAALRDLTDLTPAQLDEQAKAGASHATSRTPSTLSWFGA

SEQ ID NO: 192598 - protein, 147 aa, Oryza sativa
  Clone ID: PAT_MRT4530_88815C.1.pep
LIGVAGRRRRLLSRLAHPRQSQVAASGIGYGRSKQVQVQVQAGGFERPPLARLLFRLARLRRSRVAASGIGHGRSTQIQVQVQIQAGGIERPPLARLLLVHPAGGCEEGHGIGRRASRGVLRRRRRRRGRGVGRETVTWRWAGWVLV

SEQ ID NO: 192599 - protein, 95 aa, Oryza sativa
  Clone ID: PAT_MRT4530_88816C.1.pep
STLEDHQLQSLVDVAKGSDQGLSKPDPALYLLTCRELGVKPEHTLMIGDAQGDITMAKGAHAQGAIAIHWPGYAQGNLVGTDATIADLQQIHCQP

SEQ ID NO: 192600 - protein, 77 aa, Oryza sativa
  Clone ID: PAT_MRT4530_88817C.1.pep
GAHASRECFCAGTVGGTITPGLGFFTGGASAFVRLSTYRRGAILWPSVLARVYVKDHSVLGGRRAFFDLPCKKKRRR

SEQ ID NO: 192601 - protein, 117 aa, Oryza sativa
  Clone ID: PAT_MRT4530_88818C.1.pep
MNSMGAAVGGEPRHNKANGGHQKVEKATAILTYTYTMTDGDGRWPAMSLKRRREEIERIPFPQLIWKKEQREGRIGGGDRHGCTGSASVQRLKKELSSEKSEKISESIINHGEFNTN

SEQ ID NO: 192602 - protein, 497 aa, Oryza sativa
  Clone ID: PAT_MRT4530_88819C.1.pep
MAAGDKAGGDDAAAAAAAPLLVSAAGRRRRCPGCLTEERCKADAGIPYLNFFYIWVVCLCSSLPIQSLFPYLYFMIRDLKVAKEEQDIGFYAGFVGATYFLGRTISAVPWGIFADKYGRKPCIVISILSVIVFNTLFGLSTTYWMAIVTRGLLGLLCGILGPIKAYASEVCRKEHQALGISLVTSSRAIALVVGPAIGGFLSQPAKKYPNLFSEESVFGRFPYFLPCFVISVLAAGACVACIWLPETLHMHHDDKEVIDALEAQDATSDLGETTKESGSGRMGHTKSLLKNWQLMSAITLYCVFSLHDTAYLEIFSLWAVSSRKYRGLSFTSQDVGIVLAISGFGVLVYQLAIYPLLAKYVGPIKPFRYAAVLSILLLSTYPFMANLYGLELKVLINIASLLKNMFAATITIACNILQNTAVTQEQRGVANGISVTLMSIFKAVAPAAAGILFSWAQKHITGLFLPGEQILFLMLNMVSVIGFILTFKPFFALPDMR

SEQ ID NO: 192603 - protein, 119 aa, Oryza sativa
  Clone ID: PAT_MRT4530_8881C.1.pep
MVTGANNLTDTDMGRHYPCPSRPIAIPRDSGDGSRLGHLLLTKAASASTSPRHRCLRLLSHRPKWGGAANKEDAASCSGLSFLLPTHQPRSLPPAASSTPLPHHHPAGATAGWRNSALV

SEQ ID NO: 192604 - protein, 178 aa, Oryza sativa
  unsure (1)..(178): unsure at all Xaa locations
  Clone ID: PAT_MRT4530_88820C.1.pep
LNINILSDAKISGLKINFDKSEVFCFGEAKENQLLYSXIFTCKIGELPMTYLGIPIDKKRILNKDWKKAENKMEHKLGCWQGRLQSIGGRLVLINSSLTNVPLYMIYFYRLPQGVRDRMDYFRRRLLWQEDQGIKKYHLVXWPLVCSSIDQVRVWVFLDLDIMNKVLLGKWGYRIANX

SEQ ID NO: 192605 - protein, 137 aa, Oryza sativa
  unsure (1)..(137): unsure at all Xaa locations
  Clone ID: PAT_MRT4530_88821C.1.pep
AGIRHEAQSCRRRREDEEEKAGAGVESKVRCVWFLLVVAVVVAAGCGDRARRGGVRPRALKLAPCAAATQNPRAAVXANCCAQVRSIGRNPKCLCAVMLSNTARSAGVKPAVAMTIPKRCAIANRPIGYKCGPYTLP

SEQ ID NO: 192606 - protein, 56 aa, Oryza sativa
  Clone ID: PAT_MRT4530_88822C.1.pep
AETQASHPWLPDASSHRHARPLFFFFFFFFFFFFFFFFFFFFFFYLSIDLQLSYSC

SEQ ID NO: 192607 - protein, 198 aa, Oryza sativa
  Clone ID: PAT_MRT4530_88823C.1.pep
MVLEFPVNYAPVSATPPSDLTLRLIWPYTCPAMAALSHQWDRRIANRRPRSSSHRRRVDERDASRHCPLLPFHPSYPRQVDELSLRRVVVCVLTQNIYGFTCQYGSAHGMCVPNRPTVFGDMSKWERPTERVTSSIITCNLPSAFDHFQGRLGPNQRHMRSNRGKKAVAGKINSKINFDDRCGIDGGAKRGDRRGNGG

SEQ ID NO: 192608 - protein, 79 aa, Oryza sativa
  unsure (1)..(79): unsure at all Xaa locations
  Clone ID: PAT_MRT4530_88824C.1.pep
QKGGQKHRREGQQSHNQAKRSVKAXGQQKQRQQEGGGNGEQTQAQAQAKRAKNMPTKSGNNPNNNNAPRSIPTVGGAGD

SEQ ID NO: 192609 - protein, 115 aa, Oryza sativa
  Clone ID: PAT_MRT4530_88825C.1.pep
IFHSWNRFIFLFTSFTSLHKTSLNITYRAPSTITFQYTTTFHTLLRFQKKEVTPFDKQSFHFPPLATISNTPTPEKLLIRGSKPGKSCLRLSSLDPPTPYPWGPSLCTLPRTNLP

SEQ ID NO: 192610 - protein, 595 aa, Oryza sativa
  Clone ID: PAT_MRT4530_88826C.1.pep
RARSLRSPPPPSTRSSRIEGSARRRRSDLAGSRRRGPIDRRSVDCLRRVGDGWRRGRRAQLAEERVLVDRIQEEGRAHGERPPRRRRCRRRQEVLRFHLPRLAAVDDRGEDREEVKIVQGTDDSGSHNRLRGLSEDGCTQGGRCVADRLQCFADITTRVIARELKLEETPVSKVMTRNPLFVLSDTLAVEALQKMVQGKFRHLPVVENGEVIALLDIAKCLYDAIARMERAAEKGKAIAAAVEGVEKHWGASVSGPNTFIETLRERMFRPSLSTIISENSKVVTVAPTDTVLTASKKMLEVKVSSAVVAIENKPGGILTSRDILMRVIAQNLPPESTTVEKVMTQTPECATVDTPILDALHTMHDGKFLHLPVLDKDGNVVTVVDVLHITHAAIATVGNSAGSGSEATSAMMQRFWDSAMSIGPLDDDDDSRSEGSTKVASEATDVGRSAFYPASGLSNTFGFKIQDKQGRMHRFNCETSSLTELITSILQRLGDDIDRKNLPQILYEDEDHDKVILSSDSDLVAAVDHARQIGWKSLKLHLDYAGVGRRKRGGGGTSDFEYAGKDAWASAYSAVAAGAALVAGLGVMAYLKRAG

SEQ ID NO: 192611 - protein, 63 aa, Oryza sativa
  Clone ID: PAT_MRT4530_88827C.1.pep
MAYLASVLGALARAECQFGQPSPAAFSPRRAAAFSPVRERKALPLPATCSFVDCHITCTNPGG

SEQ ID NO: 192612 - protein, 284 aa, Oryza sativa
  Clone ID: PAT_MRT4530_88828C.1.pep
MEATGGDVRGADAVEAPWSTECILSHLGAVSTAPAATSSHAGGYTLLRSETPAATDLVNTFMDWAGDAPLDAPPRRLHAAALLRLQARLLALATVSLEDVAGKVILVTGLIRNRRAGCRSCGAQQTIAGAVRVSEDPNCVLSTWRDADNDPCGWLGVTCVDDGGGGRVGDVELANFSLTSYLPSELSLPYNQLAGQIPVAITTLQKLAALLAHNLLSSYIPAEIGRRWRCGGDLGGGFEHGDAHCRMRGACREAAAVAGPVRQWCAGQVASNPVASMKRTQLNE

SEQ ID NO: 192613 - protein, 146 aa, Oryza sativa
  Clone ID: PAT_MRT4530_88829C.1.pep
MSSAKTLARAGSSLLGRLLASPSPLRAGLPPPSLLSRIQPLVPPPPPPQPRPETTVEAYEAQAVARLSSLPGEISFPCGLPSLRFIIEDGKDPVANEPLELLPKRTYQPSTIKRKRTHGFLTRKSTKGGRKVIARRIAKGRHRISV

SEQ ID NO: 192614 - protein, 100 aa, Oryza sativa
  Clone ID: PAT_MRT4530_8882C.1.pep
NNKSIFFFLFSHIPIKQLFFFFTSSNFYFTAGPNFKSNNFPRFFPKRAFPLNHTYFLLKHLHPPPFNLCPTTRRDFNFFPTPHNRQKKKKTPGYTHKTPT

SEQ ID NO: 192615 - protein, 528 aa, Oryza sativa
  Clone ID: PAT_MRT4530_88830C.1.pep
MASHAAVVEIIDDDDDVAAASTPPALHKRSHAVAAAAPDSPDAFSPSPPDPKRRQLAASTIVLDDTPTPPKRRPPPVAADRSASVVADTPRSFVPCSLRNRAIAGDTPDSVLPSPSFHLDAPDSATPGSDVPCSVGLDDIVPETPGFNSPRLARPPAVPGLTSPMTARKFSGVSCPISLDSDDELDDTVYRESLTRTPSNMAKPEHAIQPCTTSCTDKVENAKSTDKKDYSKSNVGYQTNNSACKNNGTTSYNQPPRANSPCEDSTLKEADPFINNHCPQEENALPIEERKKKQQETKKQKEAMKAELAELKKLEKEKKKWESGKLATKCIVAEIDSSVIESGSVGGVLNKSHLVQGFHEKGLCFRVTSNSIKGSILWKMQIPNEFTQDQASTSQVPYILFVLQAEEFCDLKVRRQYPEFTICYVTNKLMSFIKRREQNQYNKTTSNSNSWKRPPVEEALCKLATHYARVRSRHCTDEAEVTEHIVGLTYSLANCKFRQEPLTWYLCMLMVQIFLKVALIKIGLRKVP

SEQ ID NO: 192616 - protein, 118 aa, Oryza sativa
  Clone ID: PAT_MRT4530_88831C.1.pep
KLFPPPGFPPPPLSYLFFPPFRKNFPTSFCFSKNPFFKKGPPFGFFFFLPQKSPFKVFPPPRKTRAPNWAPLVLPPFSSWAIKFPKHPTLCPRGVPPLFLSPIKPPPMGWVLVWANYC

SEQ ID NO: 192617 - protein, 67 aa, Oryza sativa
  Clone ID: PAT_MRT4530_88832C.1.pep
MVECTVAGHVGRREGPILASCSTNAAICCRSAAAADGADDLVSHSGMRHNLKLLALTGSPLAAHLQL

SEQ ID NO: 192618 - protein, 110 aa, Oryza sativa
  Clone ID: PAT_MRT4530_88833C.1.pep
KISPKRCVHARACVHSIRSHVYMYICIYMYVCICVYMYMCIYVCMYMCIYVYIYIYVCIYIYIYICIYIYICIYIYICIYIYIYIYIYIYIYIDTHICKTICIHESIFKY

SEQ ID NO: 192619 - protein, 224 aa, Oryza sativa
  Clone ID: PAT_MRT4530_88834C.1.pep
MHAILAGASRCPAGNTCTRRPGDLGCNTSASGKSARPEEETIVGEEQDVAAPCMHVGMVFISREDAGCTAIAGVAGSTDSLTSSVSSLVLTIDVAASDDFKLVAAVGILITTIVVSFACPCYCRRPWTATGDGLRLIFVTSIVLISSIHPSRFPVAVVTDVLELGPVAGLTHMPPTIIFRRLLSTTCLSLANRWPQHASASDVPELKAATGILWLPLLTCSSSN

SEQ ID NO: 192620 - protein, 167 aa, Oryza sativa
  Clone ID: PAT_MRT4530_88835C.1.pep
RRGKVRNLACFLSSDAVATALALRGLHFVQLQCRRDCALSQRALVQCGWCELRGAKDSEPLLSVNFLAVPSYFQILHLLIALESMYLPAVIRTRMHLVGGAEEIYPRTLLEEDSESLSTGDTDPAVDLCSNKLCSVAQDYVPLEEIARVVVHGLRLKKHQRKRSSMR

SEQ ID NO: 192621 - protein, 481 aa, Oryza sativa
  Clone ID: PAT_MRT4530_88836C.1.pep
MASGGGNKRAWVADLEGGLAGAGAASERALWSKHSVHRVPAAVKDLHPHAYRPQVVSLGPFHHGDQRLVPMEPHKLRVVARFVGRRRRPVAEFVAAVEAAAAELEESYQDLAGEWRGERFLQVMFTDGCFLLEMMRTAKVIGGGGGGKHDEASGAVGGYAHNDPVFGRHGAVYMVPYVRRDMLIVENQLPLLLLQKLVAVETGKESQDLGDVEYEVKKMVLRFISPSCKTPPAKEHRALHPLDLFRKSLLSGQHQRPRGDRGSAGAGRDDRRRDDDEEANGGIIRSAAELYEAGIRFRRSPTASLHDITFRRGVLALPFVVVDDSTEYAFLNLMAFERLHAGAGNDVTAYVLFMDSIIDSARDAALLTARGVIQNAVGSDKAVARLFNGLSKDVVALDGAGGDGELYAVRRAVSRYCRKPCHVWRANLVHTYFRSPWAFMSLAAAVFLLAMTVAQTVYTVLPFYQQGGNGGEATYAAPAPR

SEQ ID NO: 192622 - protein, 119 aa, Oryza sativa
  unsure (1)..(119): unsure at all Xaa locations
  Clone ID: PAT_MRT4530_88837C.1.pep
PPGPTPPAVFLTGGLIAHQGRKVKLGTEGTPAHDLGTDPPGEEIMQKPLPLAVDWQSNHWILXRIWTLGLHGTDLAHVANXLISRTHNGSLLGIDLGGDGHSLVYDSQPXNWGRGPLWG

SEQ ID NO: 192623 - protein, 240 aa, Oryza sativa
  Clone ID: PAT_MRT4530_88838C.1.pep
LLGRRRLNEIKNAGYNVKLSAPLDNVPFSTSPERERIEENVFRNKLEFFAAAKISSSFPPPTLPEIAFAGVSNVGKSSLLNALTRQWGVVRTSDKPGLTQTINFFRLASKLCLVDLPGYGFAYAKDEVKDSWQELVKEYVSTRVGLERVCLLVHTKRGMKPLDYELVDLMERSKTPYQIVLTKTDLVFPIDVARRAVEIQESLKKNKSVVRPVLGRDWALSPVDPEEIESRLAGEAQSGC

SEQ ID NO: 192624 - protein, 1047 aa, Oryza sativa
  Clone ID: PAT_MRT4530_88839C.1.pep
MPPKRVVKEKVTRRKENEAGEDMAVEEGAEPSASIAEEGGPPPASAPAPSLPTSAPVVSGQVPNTADMAKAAAAARALQTRAEVLSTSQPLVSQTVSAQPAMAPTALAAAQVNPDPETQAEADMEAMRQNMTQLQDMLRQMQEQQQAYEAARRAKAASALILQYSAGYVPPQVFPQAPIQPLLPQATQAPVYFAGQPSTAALHVQPQAQRVAAQAHSQPPGQVSQAMAEGASALQAQLQAFLQQFNQPHNISSTTPSAQPEGNTGQGAPSWLPSNQPGPGASPWSQGPQFDFVNVAPAPTARPQAPTPGFGTNQAPNQVAMAWTQTTFDPSMAPHQASPIGAGQPNIMIQPHAQAMTSPFATPYPQQGAVNRVGDEKGLPLSGGIKNRPIPPQFKFPPVPRYSGKTFSTGENRREEQILFDVVDIPYKYNAIFSRATLNKFEVISHHNYLKLKMPGPTGVIVVMGLQPSAASKGDLAIIRAVHIVEAEPHDRPKHAPKPAPHGKVIKIQIDDADPTKLVSLGGDMGEEEAKNILEVLKRNIDIFAWGPDEVGDVSKDLIMHHLAVKPDAKPRKHKLHKMSADRQEAAKAEVQKLLKAGFIQEINHPEWLANPVLIHMNPANIPKTAFITPFGTFCHLRMPFGLRNAGATFARLVYKVLYKQLGRNVEAYVDDIVVKSRKAIDHASNLQETFDNLRAAGMKLNPEKCVFGVRAGKLLSFLVSERGIEANPEKIDAIQQMKPLSSGAGKFTWTTECQAAFDEPKQYLQSPPALISPAPGSELLLYLVASPVAVSAALVQETESGQKPVYFVSKALQGAKTRYIEMEKLAYALVMASCKLVEGHVDKSFEAKEEGMKRYLKAVRSMEKCFAGITVEHLPRGQNEEADTLAKSAACGGPHSLGIFFEVLYAPSVPIESLEVMAIDQAELGNDPEDWRTPFVKYLDCGWLPEDEAEAKRLQLRAAKYKMVSGQLYRSGVLQPLLRCISFAEGEKMAKEIHQGLCGAHQDVRAVASKVFQQGVYWPTVLKVCVEQVKKCESCQRHGRSPTAPQ

SEQ ID NO: 192625 - protein, 216 aa, Oryza sativa
  unsure (1)..(216): unsure at all Xaa locations
  Clone ID: PAT_MRT4530_8883C.1.pep
MASATRQFARAATRATRNGFAIAPRQVIRQQGRRYYSSEPAQKSSSAWIWLTGAAVAGGAGYYFYGNSAPSATAKVFNPSKEDYQKVYNEIAARLEEKDDYDDGSYGPVLVRLAWHASGTYDKETGTGGSNGATMRFAPESDHGANAGLAAARDFLQPVKEKFPWITYSDLXSXXGVCAIQXMLXPAIPYRPGRSDRDVSGCTPDARLPDASKRQD

SEQ ID NO: 192626 - protein, 262 aa, Oryza sativa
  Clone ID: PAT_MRT4530_88840C.1.pep
MARRRARNLARLREVPGPPPPPPPPPPASSSTSDTSPDGRGRVGGCLHCVWEALKRWAFRRRTTSTAPRVAAEPGPAPPKRAAAFIATGNHAWKYQLATARKKEEPDEEEGDDQPQDGDLKDDQVLDNPYQKKKKYKEFNDARAKFSEKFELCHLCFFEGAPRFPWDGVIRRKDVIKHVYENHGLYGAACPENGCAVRFRTEEHRLLHVQNCQELLERRWEGAVGGGAPRRIVEVAGGGNVVRARWPVGRAEDSGSGGRCQG

SEQ ID NO: 192627 - protein, 944 aa, Oryza sativa
  Clone ID: PAT_MRT4530_88841C.1.pep
MGMKIGGKFLQIPYFLIRSMVRASVTLPLHLGQAHGPGSGEDDKLGFGVGAGAVSWVWREVWAVLAQPESLSQERAVGGLSSRDEGEREVPRWMTALAAGYGEGGGVGAADARKMDRCSGIWRKAKWRGGGGVSDYPSVDVMDTHHSDQYAKSSLQLQFRDTSVSFENNNSVLDKHDITSPQVGMTFETADLAYRFYLEYGYRAGFGVSKRTSHSVDGVKYRATFVCYKGGIARIKPGLKARRRLVAKTGCKAMMVVKYNTTENQWEVVFVELEHNHPCNPEMVRFMMCFKDLPDWQREHRPFNAKTRLNPKIHSGRGRPPNQNKDFMVKKTFSQSNYSIEAAGKAGKLRFAEGDVEALLVFFDKMQAQNSNFFYNWDMDDEGRLKNVCWVDARSRAAYQHFCDVVCFDTVYLTYQFVIPLVAFLGINHHGQFVLLGCGLLGDESPETFSWLFKKWLKCMNDKSPEAIITTHSRPVVKAVAEVFPNTRHRYNLWHIMKELPEMSGRVEDKEAISLRMKKVVFDTITSTDFEREWVEMVNQYNLHDNHWLTTLFEERAKWVPAYVKDTFWAGISTVRRSERLEAFFDGYITPETTIKTFIEQFDTAMKLRSDREAYDDFRSFQQRPQVLSGLLFEEQFANVYTINMFQKFQDHLKQLMNVTCTEVSRNGSIVTYTVTVIGKERKYDYKVMYNSAEKEVWCICRSFQFKGILCSHALAVLRQELVMLIPYKYILDRWRKDYKCPEESKETPISPKAIKATGKGTKPENAREDKVDNLYKHGHQYFADIVEMGATDPDAMEYVLSVMKEAKEKVRKFEESRKDRRPGDSPVSTGKRNGKSSRPSNEDGGNGISDSTPATTTVATVAVATSTTMQATPTMVAIAPTSATVPAGMFLVPMHPHPMVFPPFTPAVPPVVAPAVPPPAPAANVGDVASNSTRKRKKRKGNK

SEQ ID NO: 192628 - protein, 238 aa, Oryza sativa
  Clone ID: PAT_MRT4530_88842C.1.pep
MTPAGRGKGKRKGERELAPCLFGEKEEGAGATRQREEELCLRPLEASAWSGGGRVMTTAMTAGRFGAERRHGRQARAGADGGGDWPVGHHGARAREATGGAAIWAASEGNGSEGGGRSARRGSRGRTHRSRKEWAPSGGASNLGLLLPPGRSRAGDGGRYGGGCGNLSGGRVMTGVATMVAMTSAAVAQSQTVGWAWDCRRRRSRNSGGDRLSLKRPTVTLLQPVEGQMRFPWNKTNM

SEQ ID NO: 192629 - protein, 177 aa, Oryza sativa
  Clone ID: PAT_MRT4530_88843C.1.pep
MGRRAARASTDRSHRHRRRGGQNRRLGGPEGAADRGQLDPVAAEVVPTWRLRGCHAGRREVDDDVGRNGRLTAAASDCGGGNRRREKGETATVRRETDSGELEHLRDSGNPLLASDWAELRRARPATSGRYGARAATAASTQREAATGGNVGLETDLGRSRRELALGARGQNGDRGG

SEQ ID NO: 192630 - protein, 165 aa, Oryza sativa
  Clone ID: PAT_MRT4530_88844C.1.pep
MDIPTAVVAAGAGAAAQEIVLASSGRSAATVLAQAEQAVLGGGTVGGGGEGVDEADPDRLGVPLRPHRPEQERLGVQQRHGDADSDSSMVINKNMLKGTKAFSNMFNTKLREVKYPENAPVDNEALVLPPLILTFSPVLSFHPPPGVPSFPPTPVALMSVEDIVM

SEQ ID NO: 192631 - protein, 39 aa, Oryza sativa
  Clone ID: PAT_MRT4530_88845C.1.pep
QGAHAQGARYRGRLQGVGTRRVRLGEVSRHGVVRRSERN

SEQ ID NO: 192632 - protein, 36 aa, Oryza sativa
  Clone ID: PAT_MRT4530_88846C.1.pep
VCVDDPDFCGLVGHVTAQVLLRGSFPSVRIIQLREY

SEQ ID NO: 192633 - protein, 66 aa, Oryza sativa
  unsure (1)..(66): unsure at all Xaa locations
  Clone ID: PAT_MRT4530_88847C.1.pep
VPRLFCFXVNGLNHLXPQALIRYPLYLLRHQSYEWIDSCLLKHVPGRYLFXKKKKKKKKKKKKKKK

SEQ ID NO: 192634 - protein, 78 aa, Oryza sativa
  Clone ID: PAT_MRT4530_88848C.1.pep
AESTEEVVLTIGEEKNITWYVPGSGMINLMTHRTVGCASIECAVNTKPNIVVHCIIKLRLINNYPSKTPTTLVIGLHF

SEQ ID NO: 192635 - protein, 145 aa, Oryza sativa
  unsure (1)..(145): unsure at all Xaa locations
  Clone ID: PAT_MRT4530_88849C.1.pep
MDYAQVSKEHGGFMRFIQVSCLGASASSSRMLGRVGAGEESVLKEFPEATIMRPATMIGTEDRILNRWVQFXKIDSRSTKIQPVYVVDVAAAIVNSLKDDGTSMGKSYGLGGPEIYTVHDLAELMYETICEWPRYIDVPLPIARV

SEQ ID NO: 192636 - protein, 36 aa, Oryza sativa
  Clone ID: PAT_MRT4530_8884C.1.pep
AKFVLDEAVQIHVYNIYMCIVRGTLSLYIYIYIYIY

SEQ ID NO: 192637 - protein, 497 aa, Oryza sativa
  Clone ID: PAT_MRT4530_88850C.1.pep
MAMAAAKGRVLPLLAVAAALAAALLYRAPFSKVSGRFPFPRYSNPRSLLSYEKAEENPFVFAEPGRGGEGRADQRDRRRGLPELPAPATGGGLRHAHLDEPGRAEWEGFSTGTRAAAAGGITTLVDMPLNSYPSTVSEETLKLKLDAAKDKLHVDVGFWGGLVPENALNPSALESLLNSGVLGLKSFMCPSGINDFPMTNSTHIEEGLVTLAKYKRPLLIHAERIPDVQNEDGIDGELDPKAYTTYLKSRPPAWEEAAIKDLQRAMKDTEIGGRSEGAHIHIVHLSDAKTSLGLLKDAKQNGARVSVETCPHYLAFSAEEVPDGDTRFKCAPPIRDSTNRDNLWEALLDGHIDMLSSDHSPSAPDLKLMEEGNFLRAWGGISSLQFVLPVTWSHGKKYGISLNQLASWWSERPAMLAGLKKKGAVLPGYRADIVVWKPEAQFHLDDSHPVYHKHRNISAYLGKQLSGKILSTFVGGNLVFAEDKHAKAACGAPILAK

SEQ ID NO: 192638 - protein, 125 aa, Oryza sativa
  unsure (1)..(125): unsure at all Xaa locations
  Clone ID: PAT_MRT4530_88851C.1.pep
KKKVNYVGQGAIIVFKDIFRRSPKRYESIIPPLCESLTPLNEPKVKAPIFWIIGKYAERISNPAELFXSFLETFPKKPPLVQLQLPPAPVKLFLKKPTEGPHQIKQAVFLQNQNPYFNMHKTFFP

SEQ ID NO: 192639 - protein, 228 aa, Oryza sativa
  Clone ID: PAT_MRT4530_88852C.1.pep
MSALGFMQTNKGSSGGGGRQAPAWPSGGGCGGWWRLVERQRLRRAAAAGRAAVGGRVAAAVEGSGGQIGHFIIYLHRKMTWHAHMVIFDEPRTVYVHMIKSKGLLGQFESRLLLPAAARLLPPPLPPTSRLLPPAAAAATSSRGARRPHRCHRRRILIVVAAAAELVSSLVARLVGNLCVNAAVTLMEVIEAIITTLDQVSTDGLKPSTLTGSAPGQRLVVTDDLSHL

SEQ ID NO: 192640 - protein, 62 aa, Oryza sativa
  Clone ID: PAT_MRT4530_88853C.1.pep
MKIIFVFALLAIVACNASARGGALSPRYRPYRLQSRLLLRRPALPPCRDAVGPPPSLPGPPP

SEQ ID NO: 192641 - protein, 194 aa, Oryza sativa
  Clone ID: PAT_MRT4530_88854C.1.pep
MPRSSSSSKPILGRAMAILALPLTPISKAKGPIARNLLLFKKRGAAGKARRMLSSYGYKPHRHYNYDYVGEYQFSPSSSPLIAYPPGVSSWRRATKKRRSKARMILASLLCGGDGDLDVAVLDGLPRADEPRAAVEWEECRRDGGGAYGEGDQYEEEEEEEDDEGVDGRAERFIERFYEEMRLQRQRSLVQRLL

SEQ ID NO: 192642 - protein, 40 aa, Oryza sativa
  unsure (1)..(40): unsure at all Xaa locations
  Clone ID: PAT_MRT4530_88855C.1.pep
ASLGLDQLVAIGSLYQFIRGGGEGKEAXSEEEKXTPKLRA

SEQ ID NO: 192643 - protein, 57 aa, Oryza sativa
  Clone ID: PAT_MRT4530_88856C.1.pep
LFRRINLLPRFNAPCIVNRVQIIALPYVVFIKRFLRGYFISVNIQVFAFLMSKDFDY

SEQ ID NO: 192644 - protein, 75 aa, Oryza sativa
  Clone ID: PAT_MRT4530_88857C.1.pep
AKGGARLEREEKARRCVVVGVRRRHGGDPTPIRRTQRSKSGAIRVGPSIVTGRRANFYLGGLLYAALYRKIVRGI

SEQ ID NO: 192645 - protein, 50 aa, Oryza sativa
  unsure (1)..(50): unsure at all Xaa locations
  Clone ID: PAT_MRT4530_88858C.1.pep
SGRPIVPRQRPRHRPTVGVGXHGLDSSRCMSCLGRAKTPCRGEGPRPFGH

SEQ ID NO: 192646 - protein, 269 aa, Oryza sativa
  Clone ID: PAT_MRT4530_88859C.1.pep
MEERYEALKELGAGNFGVARLVRDKRSKELVAVKYIERGKKIDENVQREIINHRSLRHPNIIRFKEARYFFQQLISGVSYCHSLEICHRDLKLENTLLDGSPTPRVKICDFGYSKVADVWSCGVTLYVMLVGSYPFEDPGDPRNFRKTISRILGVQYSIPDYVRVSSDCRRLLSQIFVADPSKRITIPEIKKHTWFLKNLPKEISEREKADYKDTDAAPPTQAVEEIMRIIQEAKVPGDMAAADPALLAELAELKSDDEEEAADEYDTY

SEQ ID NO: 192647 - protein, 72 aa, Oryza sativa
  Clone ID: PAT_MRT4530_8885C.1.pep
MKLLKVDHPRSHHTVFLYASLTSIALYTSLTIIVEKTGLAVQPEKTGTSSLTGSVPSKDRSRNRPGVNLADH

SEQ ID NO: 192648 - protein, 334 aa, Oryza sativa
  Clone ID: PAT_MRT4530_88860C.1.pep
MEERYEALKELGAGNFGVARLVRDKRSKELVAVKYIERGKKIDENVQREIINHRSLRHPNIIRFKEVCLTPTHLAIVMEYAAGGELFEQICTAGRFSEDEARYFFQQLISGVSYCHSLEICHRDLKLENTLLDGSPTPRVKICDFGYSKSALLHSKPKSTVGTPAYIAPEVLSRKEYDGKVADVWSCGVTLYVMLVGSYPFEDPGDLRNFRKTISRILGVQYSIPDYVRVSSDCRRLLSQIFVADPSKRITIPEIKKHTWFLKNLPKEISEREKADYKDTDAAPPTQAVEEIMRIIQEAKVPGDMAAADPALLAELAELKSDDEEEAADEYDTY

SEQ ID NO: 192649 - protein, 127 aa, Oryza sativa
  Clone ID: PAT_MRT4530_88861C.1.pep
QSYEPWRTAVGVPAHGGDAVDSECAAPCRARHAKRLLELPSPRRGRNRPEQPASILQVARRGRQVVFFIFLLRSASAAPPRSRVWLPPRRRLRRHARPLPRRRLGLPAEWPRRHPRHMRGIAVSALV

SEQ ID NO: 192650 - protein, 82 aa, Oryza sativa
  Clone ID: PAT_MRT4530_88862C.1.pep
LHHPFFFHTKLINPISRSLPLFFLPLHLAFIFFSSSSSSPAMASTSDSLPSSPSLPTTAGLDAAGGGDQEFSSYQDHQSLFL

SEQ ID NO: 192651 - protein, 78 aa, Oryza sativa
  Clone ID: PAT_MRT4530_88863C.1.pep
MAAAGFGAHGQIRWPVSGTGEGVVAASPLGEEATAITGAGPTGHLRPYLTEAQPVQRTDGGYIGAERWRRGMRRCGRR

SEQ ID NO: 192652 - protein, 430 aa, Oryza sativa
  Clone ID: PAT_MRT4530_88864C.1.pep
MAQWDALVDAALARLASRSLLRATRPIALAPPPAPPETFPCPGPWDRAAVEIRLDRATLHQWLAEGGEGSGQEEKVDEKLILFSGNDYMGLSSHPAIRHAAVKAAEEYGMGPRGSALICGYTTYHKMVEESLAELKKKEDCLLCPTGFSANMAVMTALGNISSLLAAGRKPAEDERIAIFSDALNHASIIDGIRLVERQQEVVSFVYKHCDMSHLELLLSSCSMEKKVVVTDRQVIHPSKFHHLRSIYSLYYLFSMDGDFAPLPELVKLRRKYGFLLVIDDAHGTLVCGENGGGAPELFECENEIDISVGTLSKAAGCQGGFIACSTRWKRLIQSRGRSFIFSTALPVPVVASVYVGSEKAALRAGRDMLRSGFHVTPIRPPTVPPNSCRLRITLSASHSSDDIKRLVDALTPWLPHKHDIQIYAVASKL

SEQ ID NO: 192653 - protein, 77 aa, Oryza sativa
  Clone ID: PAT_MRT4530_88865C.1.pep
MGTRIFIQVRAPELSVDKRVVFLLESVPGEIRDSAFVSPDSIQRHHRGLTVLIPEVDICRRLVLAYVGLYVVASVVL

SEQ ID NO: 192654 - protein, 74 aa, Oryza sativa
  unsure (1)..(74): unsure at all Xaa locations
  Clone ID: PAT_MRT4530_88866C.1.pep
NPDLLAALAVAVPAIVLRTSFRVRCNLKGPSLPSPAAEXNGQEEPPAVVEKKEPVPVQAGPTRRSMPSAPRSPK

SEQ ID NO: 192655 - protein, 332 aa, Oryza sativa
  Clone ID: PAT_MRT4530_88867C.1.pep
MDCEGAAAAEIYRLPEECVAYAISMTTPGDACHSSAVSPAFRAAADSDAVWDSFLPPDHAAILARADDGIAAAGECASKKDLFARLCGRPVLLDDATMSFGLDRRSGAKCVMLSARALSIAWGDDPSRWRWTPGLPGSRFPEVAELLDVCWLEITGKLQLSLLSPATTYAAYLVYSFADYTTGLECNIGMPTPMATVTVVSGAGGTTSRPPAAPATTTTTEQHKICLQHMGEEETIMHRQELVIRLRKAFGRTVRFDPDMDIRCPRPRDGGGGGGGWREVELGEFAVPAAGGEDGVVEVSFKEETGRWKTGLIVQGIELRPKCTSKLIKLDS

SEQ ID NO: 192656 - protein, 130 aa, Oryza sativa
  Clone ID: PAT_MRT4530_88868C.1.pep
MAAAGLSRSGAVSLREGSDSRRGGGGGGFFRQGGGRSGTTAAGSTTAETESGAWWQAVAFQLGANGGRVLFSLLEVDSCGSNLSFYPGHRGGLGKGVMTGLSVGSRRRQGCQGSATFLSRRRFHRWRIEV

SEQ ID NO: 192657 - protein, 63 aa, Oryza sativa
  Clone ID: PAT_MRT4530_88869C.1.pep
DPVHPLIIPAIHAKNAHEVHERLDHAASYNRPFVAVELVVRVHFPDLELKKTTAAPSRRPGHN

SEQ ID NO: 192658 - protein, 141 aa, Oryza sativa
  Clone ID: PAT_MRT4530_8886C.1.pep
RSRIVLSFSPLTPLDEEPLHNIKCHVGTMLCLCGQKQPFCLPQPFPDYLHCIVCAHNILFCALPVVCLAPLWAHFLCTLCTLPVLSPRLYPLSGCSLSFSMLMCLSNPLWSISLFPLVVCTHLLSCSTKYPTTNHTAACDA

SEQ ID NO: 192659 - protein, 669 aa, Oryza sativa
  Clone ID: PAT_MRT4530_88870C.1.pep
MRYLYFHGNASQARPIRHHLLAYLDACASRAHLAELHGRLVRAHLTSDSFVAGRLIALLASPAARHDMRYARKVFDGMAQPNAFVWNCMIRGYSSCEAPRDALAVFREMRRRGVSPDNYTMAAVVSASAAFAGLKWRSNGDAIHALVRRIGFTSDVFVMSGLVNYYGAFRSVEEASKVFEEMYERDVVSWTSMISACAQCGHWDKVLKMLSEMQAEGIIPNKVTIISLLSACGQTQAVDEGRWVYNQVGKFGIEADVDIRNALISMYTKCGCLSDALEAFQAMPARYTKSWNTLIDGFVQNHEHKEALRIFEEMLLHGVTPDGITLVSVLSACAQLGELRKGMHVHSYIKDNGICCDNILTNSLINMYAKCGDMAAAERVFQTMTKKDVVSWTVMVCGYVKGHQFTMAFNLFEEMKIAEVVAHEMALVSLLSACSQLGALDKGREIHSYIEEMNVAKDLCLESALVDMYAKCGCIDTASEIFRKMQHKQTLSWNAMIGGLASNGYGKEAVELFDQMLELQDPKPDGITLKAVLGACAHVGMVDEGLRYFYLMSSLGVVPDTEHYGCIVDLLGRAGMLDEAFHFIKKMPIEPNPVIWGSLLAACRVHHRMDLGKVIGQHIVNVAPNDVGVHVLVSNLHAEESQWDDVEHVRGLMGSRGIEKTPGHSSVQV

SEQ ID NO: 192660 - protein, 231 aa, Oryza sativa
  unsure (1)..(231): unsure at all Xaa locations
  Clone ID: PAT_MRT4530_88871C.1.pep
QWRGSARRLAAASGDRSGGSSGGERGDGARVLEGTGKLGEMGKKREGVAVELKXGRRSSDVAGRGGNRRPTWGVEEEREAGFEIXIPAISGAGASGRDGEVGGGNAGARATWATWPGRRGSXGAAAVEGAAAPAGGRGRARQVGPTRPSRRRAAWLRLDGPSRRLAAPRRAAAPAGLTARGHLAASPLRIPPPGRAAPPPRLAALHRATPPPGRAAAAQARHHRPAATHGK

SEQ ID NO: 192661 - protein, 202 aa, Oryza sativa
  unsure (1)..(202): unsure at all Xaa locations
  Clone ID: PAT_MRT4530_88872C.1.pep
MSRLPSTPSNWTLSVKQIHGGWKGYIAEYQGTXSVSLREHVAFLAMWLERDVLCGSTYGPTANYQHFAQFLVXKKHIPLRKYLLGSVYRMLHSVACNIXEDKVINYGGPWWFMQLWINMYTRPSLALSAFPTTYTDDEDVSTRRKETIQYNFSASPPFSLLLFDEFASQEDKCPRGQVVIFRLSSKDRDRNPHGSHHLVVIL

SEQ ID NO: 192662 - protein, 168 aa, Oryza sativa
  Clone ID: PAT_MRT4530_88873C.1.pep
MAIGQAKTKSSLSTSLSFSCSSTRILGRKRVAVSPAPPPSGGPHSPVRTLRKQRSTRLHMDDAVSLLESLPQDVLIKVLCKVNHSDLRPLLLVSKQVSEATVVAREQHFAFATPSSKAALRGGEEEEEAPGAPKLQRRVARSSPVWGKNLASISVNLFEAFESEVVEM

SEQ ID NO: 192663 - protein, 103 aa, Oryza sativa
  Clone ID: PAT_MRT4530_88874C.1.pep
EFVRHQYSFGASPFLQSVGFQLRTTQVLQQLRLVGHHSPSRDINVVQAIGPQLPLQQFGNFSIARNLAQAQALLAFTFPSTYGIPPWSYRAPDSLPPLGGVLY

SEQ ID NO: 192664 - protein, 121 aa, Oryza sativa
  unsure (1)..(121): unsure at all Xaa locations
  Clone ID: PAT_MRT4530_88875C.1.pep
MCCAILQVSYHRTSEQQSDVDTGTNNHQSNTDVAPVXLACGAKSLHGRQARNADQHNDDGDESKRVQPQARSAALLRVDRTRHDAPHVTLMRILSGALAHGQGAKVKVSDDSRTEQVRKCE

SEQ ID NO: 192665 - protein, 71 aa, Oryza sativa
  Clone ID: PAT_MRT4530_88876C.1.pep
TGSPPSSSRPPSSSLPSRTSPPAGRWRPVERIDEWAPPWERGEGPRVGRASPGSGEETGVRSGSPRRGEVR

SEQ ID NO: 192666 - protein, 178 aa, Oryza sativa
  unsure (1)..(178): unsure at all Xaa locations
  Clone ID: PAT_MRT4530_88877C.1.pep
MARPQQRYRGVRQRHWGSWVSEIRHPLLXSSVALGTFETAEDAARAYDEAARIMCGPRVRTNFPHDVADEAAPPPPPHSAAAASSSFLSAALVAKLHRFNLASVQAAQRGNSNDDDSTTSSSAAASSRAVIPSLPAAAGALGNAAATAEWSGGFLEEQYVDQMIEELLDSNFSMEISC

SEQ ID NO: 192667 - protein, 48 aa, Oryza sativa
  Clone ID: PAT_MRT4530_88878C.1.pep
PPPPNCFEWPPGSSCKTRVFPYGFSQGNGLVPLARRGVDRAIWLDKPP

SEQ ID NO: 192668 - protein, 104 aa, Oryza sativa
  Clone ID: PAT_MRT4530_88879C.1.pep
DSDAFTPSPPLDGALTSALPYRSSPRHHLHLHDADGCGGGGGQEGGAPVRLLHGGEGAERPGPAAQRDGPDVRHHGRLEAQGGRAVRHGGPALAEAPPRYWRLR

SEQ ID NO: 192669 - protein, 69 aa, Oryza sativa
  Clone ID: PAT_MRT4530_8887C.1.pep
MAAAPGVGGGCVGAVARTTAEAVRHNGSVSIGVGQHRRSEDEKTIKTRSQVCFVCGCGVCASKISPLAS

SEQ ID NO: 192670 - protein, 292 aa, Oryza sativa
  Clone ID: PAT_MRT4530_88880C.1.pep
MSQNHEFSTDSGALRNSVCTLEFFHMESPMLDQYRKPEAKKQQAAFSLSYTEHIFGYSIWGFGHRPAGRGVCAMSTSWRDKQQPSLINFIAAFLAANSYRLNFLSISPDFIFNNGELSVAFIFETNWDCQNEGAVFSRVNMLKRQLKHLYVVVAVPTKEQNESFNRSYHKYGMKLGFPTFVPVTDPEMGFEKIVKIAHALGVCKQQDIISRLKNEREQAVQCTDSFLRVLTSIPGIDNHDANALAQAIGSIEAIAKASKKFILENTDLSTDKAETIVRFFRDPQYYLSPKIN

SEQ ID NO: 192671 - protein, 74 aa, Oryza sativa
  Clone ID: PAT_MRT4530_88881C.1.pep
FSQASQASVDRDSPSGWGGFVPLVPPPEVKKCCVKGRMAFIFPSEKFLDPLLRPPVPGLQTILAGWDGGSQGPL

SEQ ID NO: 192672 - protein, 76 aa, Oryza sativa
  Clone ID: PAT_MRT4530_88882C.1.pep
MDASPDASSQVRNGYSANVRQILIWRSWKADAMDWRHNRVDNDERGLGVIDPREERGLGAGTPPPRVVSPSPISHT

SEQ ID NO: 192673 - protein, 42 aa, Oryza sativa
  unsure (1)..(42): unsure at all Xaa locations
  Clone ID: PAT_MRT4530_88883C.1.pep
MKXTXXSNCVXQGPXEFXKWSLLGLXFLXVLLPSXIFFLVFN

SEQ ID NO: 192674 - protein, 36 aa, Oryza sativa
  Clone ID: PAT_MRT4530_88884C.1.pep
VVLSCCLKYERQLFFYLYLPKFHMPHLMLFRLIFNY

SEQ ID NO: 192675 - protein, 180 aa, Oryza sativa
  Clone ID: PAT_MRT4530_88885C.1.pep
MAPLVILTILLLISLPSLSSVAMATGDGGSGGRGPGQRDMLGQKSAVKTCGILEFVRDSSRVRIKSTGTLTHPKASFGPALELSRSPRPRVLRQQTPKRHGAVAVMAAASGLACGREEKGEHARRSLLRLVVAAAAAGASSSPWRGMLAAVQSLAIVTLLPPAAVHLLLLPRKHGREIDG

SEQ ID NO: 192676 - protein, 224 aa, Oryza sativa
  unsure (1)..(224): unsure at all Xaa locations
  Clone ID: PAT_MRT4530_88886C.1.pep
MGGRQIRPARVFQTVTEELNHNILGKKSVPTPPWYNIMQKVPPAETLVRNVTPLIKPSRESTTKIKNIFRPLPIRYLEDELRGIFYRDHPWELARPRVILELDGXDYQHCDWSKGLKQPNTPLTGESVVQYWMWLLENGKETVGNGRRKRKVKWTRVRAYDHVRHQFYRLRQEEQIEKRVAQEEARYVGAYFGQPRIDVSHASKDASSRTGSSLERNRATGAEP

SEQ ID NO: 192677 - protein, 73 aa, Oryza sativa
  Clone ID: PAT_MRT4530_88887C.1.pep
NKQHWTNLEGQAAIRKNDRSFLFYLFIYFATKGVRTTMTYQLSKAGLVQLVHHDVTMESLIFCINMHDCTLER

SEQ ID NO: 192678 - protein, 119 aa, Oryza sativa
  unsure (1)..(119): unsure at all Xaa locations
  Clone ID: PAT_MRT4530_88888C.1.pep
PGSTLRPPTFAHQHFLGLWNEYIRHQSSISSSPFLQSAVFQVINNQLLQQLTLFAQQSHYHFINIVAXIPQHLHLHQYIDLYIDQTLAQAQALLAFNLPSTYSIYPTYYSTPTIITTLD

SEQ ID NO: 192679 - protein, 54 aa, Oryza sativa
  Clone ID: PAT_MRT4530_88889C.1.pep
MKTGEVWVWSVEWRSSIFASIPASSSIKVPLSVVWLEETGIEAKDGVPSWTGSL

SEQ ID NO: 192680 - protein, 901 aa, Oryza sativa
  Clone ID: PAT_MRT4530_8888C.1.pep
MTGFDLPENFQENPEVFFRSVKPRVVPPQKTLPTKKPAVPAPPTFKTMADKTLREFAAPSSENVATGPQLNMGDVDFDLKSSLITMAQASPFCGKPNEDANAHMQWFLEICSTYTVKGVSPDVVRLRLFPFSLLGKAKQWFYANRAVINTWDKCSIVFLSKFFPMGKTNALRGRISSFQQTRDESIPEAWERLQELDEHEKKPQGTVKALDSHVTCEVCGNTGHSGNDCPKTHEEVMYMGNNNNNNNGYHPQGAKTTDALNKKMAANDKILENINVKLDGFASAFQNQLSFNKMIETQLAQLAALVLANETGRIPGQPKPSIENVKVITTRGGHPQQQATTTNNRGGQADGGMQQRDPPQTPGEEEGSEGSEKFDLALCDLGASVSVMPKDVFDKLNFTVLTPTPMRLQLADSSVHYLAGIAEDVPVKIRDCFIPVDFVVLDIDTGKETPLILGRPFLSTAEANIDVGTGSIRFRINGKEEKFEFQPRTEQCSMFRIKMRSRYWKTPVKPKTPAKKEEKLAQKKPPPIPRTKKSLTQASHQPVANPPCVFELLYPNESEQMNLQAYHMLKDREFGHTRAYDPELLRKTGDLRPIRGDELIIMFAKVRKTKVAPVKYMIRQWLESIKYNAPVECTSLITRIANGHGVITTDQIEYIFTVHPYVDETYLMQGHILKHGADGSLIYFFPCTNEIPLPNAGYHLYNCQELTIPLQTIEESRAGTSYRETRNKPRQKHEESSSSTPMQMYEADWEPTGDAPGWTQAPRHNTGGMPCLIPTKLHILNLRVGINKVTLGKVKQCLAGIRCKEIPTRTVGRRRRRHEENLHARLGDEVGRRGNLIYAGSDDQSRQRAKTQQLRSADEAARWEIPRCGRKKQRLATGSQTQRSEGAACRRPPLSSSLTRA

SEQ ID NO: 192681 - protein, 46 aa, Oryza sativa
  Clone ID: PAT_MRT4530_88890C.1.pep
REPNFILFKSCLDGVQPKTPPINMKKKRGSESGRAPSKRGGHLGLI

SEQ ID NO: 192682 - protein, 36 aa, Oryza sativa
  Clone ID: PAT_MRT4530_88891C.1.pep
LNLNYELRLSNFVAIPAIELHIFYRQYQASEIIISL

SEQ ID NO: 192683 - protein, 85 aa, Oryza sativa
  unsure (1)..(85): unsure at all Xaa locations
  Clone ID: PAT_MRT4530_88892C.1.pep
SGGXPQHYAGHINSQPPWKNNLSKISTQQPNIEGANPNPSKLTVALQTHSGTLTLSCPSCTIXSANHCSLXPFRDQTTTGETPPP

SEQ ID NO: 192684 - protein, 420 aa, Oryza sativa
  Clone ID: PAT_MRT4530_88893C.1.pep
MRAAIEQLRVQAAARARGPAGRWIHRGARDYRRGGQGDRSASRPATEAGEARAYTNKGTQTRSPYSKGVPKRRLQEEKRRKTAAAVHQGSKEPRLGFRPAITLEGLRAPKTVPHPPAAPPRTEVASSTTSRASRAKPVSSTGRASRANPASLHRLRLSRQAGLHLRRPRLSRRAGLRCHRLRHSVSSRSPTPPPNNAALADATVCHALGKPSEAAMPPPTTVTVTTSPSPPSPHTQLLPRLHCRILRRCHRLLSHGRCKSAAVADAAVTSHDASSRHCKPPAPPTQPPQRRRRALRCRRDHHRGKTISSAWIRSPMPASPLDPASVANLTATSIPAAISNPAADAPSKRSSMPPARTPSLSPSPPPPPPSSPSSAPATTNCRRHPTTFHPRRHHHQLLPPPHTDPPPAAFPPDPATAARI

SEQ ID NO: 192685 - protein, 93 aa, Oryza sativa
  Clone ID: PAT_MRT4530_88894C.1.pep
MKLDVVVTSAIKLALKKNQRMDPNAKDLANALLSVWWRTAVAQCVAPHTGTGNAKRNGSSMGAEPPRSNRLLQQSGIHRTNPFDPPPHGSPAP

SEQ ID NO: 192686 - protein, 610 aa, Oryza sativa
  unsure (1)..(610): unsure at all Xaa locations
  Clone ID: PAT_MRT4530_88895C.1.pep
CCARRRGAGAACKGVPKRRLQKEKRRKTAAAVHQGSKEPRLGFRPPRPGXVFTRRSPSANLRLMHRCSTTTQTLLTCGAPAPTLPPASLRAPKTAPHPPAAPPCTEXASSTAGRASRAKPASSTGRASRANPASLHQLRLSRQAGLYLRRPRFSRRAGLRCHRLHHSASSRSPTPPSNDAAPADAVVCHALGKPSEAAMPPPTTVTVTTSPSLPSPHTQLLPHLHCHILRRRHRLLSHGRCKSAAVADAAITSHXDASSCRRKPLALPTQPPQRHRRALRCRRNRHRGKTISSAWIWSPMPASPPDPASVASLAATSIPAXISNPTIDAPSKRSSTPPARTPSLSPLPSPPPPSLPSPAPAATNCCHHPATFNPRRHHHQLPPPPHTDPPPAASPPDPAVAARIWAAYVGFASDINAIVVVFRGTQENSIQNWIEDLLWKQLDLDYPGMPEAMVNYGLDGVKLMTFGQPRIGNAAFASFFKKYLPHAIRVTHGHDIVPHLPPYFSFFPQKTYHHFPREVWVHNVGLGSLVYSVEQICDDSGEDPSCCRSVSGSSVQDHIYYLGVSMHAEAWSSCRIVMDYSKLRYRMDINGNIVLSKHLGLSGDLEHSDQ

SEQ ID NO: 192687 - protein, 435 aa, Oryza sativa
  Clone ID: PAT_MRT4530_88896C.1.pep
MGQAHTLFVLLSLPCSFFSSSRPLVAAATTAAAAARSCCEGGAAAAAPRSARGCHQLVTGCAVESPPREGPVRLPPPPAPPPLLCCASSSRKARGRRFHLQKHKMFSFSTFAALPPSQQLCAAASGPSNSMALDLDTSAPNSVALNAHWHADSDSHPRWHGIQRCRRMNSFTREPRRPQPSAPLASPAPSSPPRPRSVAAAAAYGYGGDVLMRPFDTQTLLISAAVVSAVSLSLVLGLKTNKGTQMKSPYSNGVPKRRLQEEKRRKTAAAVHQGSKEPRLGFRPAITLEGRSPTPPPNDAAPVDAAVCHALGKPSEAAMPPPTTVTVTTSPSSPSPHTQLLPRLHCRILRRRHRLLSHGRCKSAAVADAAVKRESQIDLRRPAPIRRLLDERGSLVIWREEISALAVGPGGRRSVRVCYIKREDMYYKLTDHFVY

SEQ ID NO: 192688 - protein, 442 aa, Oryza sativa
  unsure (1)..(442): unsure at all Xaa locations
  Clone ID: PAT_MRT4530_88897C.1.pep
PGERKKIYHHPLRPGEARRVPKRCLQEEKRRKTATAVHQGSKEPRLGFRPAITLEGXTTRQRPQEGELTIVVGPANAGLGFHPPLTTYESTADAPMLHHHSNSADMWGPCTDAPRQPAFVRRRPRHTHRQLHHAPRLRLSCQASLHLRRPRLSRRAGLRYHRLCHSASSRSPTPPPNDAAPADAAIYHALGKPSEAAMPPPTTVTVTITSPSPPSPHTQLLPRLHCRILQRCHRLLNHGRCKSAAVADAAITSHXDASSNCRKPPSPPTQPPQHRRRALRCRLDRHXAAATAPSRPGEAVGARSVAKSSAWIRPPMPASPPDPASVASLAATSIPAAISNPAADAPSKRSSTPPARMPSPSPSPSPSPPSSPSSVPAATNYRRHPATFNPRRHHHQLPPPPHTDPPPAASPPDPAAAARIWAVFAVPRAAPHRDGRGRRRRG

SEQ ID NO: 192689 - protein, 107 aa, Oryza sativa
  unsure (1)..(107): unsure at all Xaa locations
  Clone ID: PAT_MRT4530_88898C.1.pep
SPHTQLLPRLHCRILRHCHRLLSHGHCKSAAVADAAVTSHXDASSRRRKPPTPPTQPPQRRRRALRCRRDRHWGKTISSAWIRSPMPASLLDPTSVASLAATSIPAA

SEQ ID NO: 192690 - protein, 37 aa, Oryza sativa
  Clone ID: PAT_MRT4530_88899C.1.pep
MKNGGATEGKSLGFAEVYLARGGRGMGNIREQKAEYD

SEQ ID NO: 192691 - protein, 119 aa, Oryza sativa
  Clone ID: PAT_MRT4530_8889C.1.pep
MLTFTMMSFLAYGRLLIGIGMSAVADGGSTTTCPTHFTTAASETAITKITGEHGLGETGLDDEQSLLYNFVPKQGSENVWRSMTPEYEGFSSGIARQGVSYEKLYPKMEKVHIIEIKKK

SEQ ID NO: 192692 - protein, 272 aa, Oryza sativa
  unsure (1)..(272): unsure at all Xaa locations
  Clone ID: PAT_MRT4530_888C.1.pep
FFFFFFLIHALNMSIQKNALLFSISSTCATDNGKMEPCHSIMFSVKKSVSPNCKWDLAVSSISHLPPFSFLSPSSLHHCRWWSRADDEGDIPGHSGSRDGALXSETTTRRSRCSRRRQPSLRWESSGLPFSPPPSLTTSAVGGLGSHCRRHRRLRPYLRREAQEPPPPPSLTSSARESLGAAAAVVVLVVVVCEPHRLCPDLARRVTGVVYGDGGGSKDSSGLPMEDASGLELRRHRPRASSLVLPTPDTHLVSPSGEGKKRDGKGGAKVTF

SEQ ID NO: 192693 - protein, 103 aa, Oryza sativa
  unsure (1)..(103): unsure at all Xaa locations
  Clone ID: PAT_MRT4530_88900C.1.pep
SPHTQLLPHLHCHILRRRHRLLSHGRCKSAAVADAAITSHXDASSCRRKPLALPTQPPQRHRRALRCRRNRHRGKTISSAWIWSPMPASPPDPASVASLAATS

SEQ ID NO: 192694 - protein, 64 aa, Oryza sativa
  Clone ID: PAT_MRT4530_88901C.1.pep
RGIDTSIPLLDAIKGLTQIGLHLTLDSQRMVLTKDFNGQRCADHQGGSRQLSWGLAVRPWHFVN

SEQ ID NO: 192695 - protein, 97 aa, Oryza sativa
  Clone ID: PAT_MRT4530_88902C.1.pep
MGQAHTLFVLLSLPCSFFSSSRPLVAAATTAAAAARSCCEGGAAAAAPRSARGCHQLVTGCAVESPPREGPVRLPPPPAPPPLLCCASSSRKARGRR

SEQ ID NO: 192696 - protein, 90 aa, Oryza sativa
  Clone ID: PAT_MRT4530_88903C.1.pep
DHSVLMLFPPFPQKVPSCVVSQVMVILLPFAFSQEKVIMVKLVRASVVGAIAPSQNQSVQKLSCRAEPLQVGLWCKRPQICLSQWFLVLL

SEQ ID NO: 192697 - protein, 348 aa, Oryza sativa
  unsure (1)..(348): unsure at all Xaa locations
  Clone ID: PAT_MRT4530_88904C.1.pep
MERRGLLKAALLVCLIVLCSGREIQVIQRHPSTTIYNPKLAKTLVEYASAIYTADLTQLFTWTCARCGDLIEGFEMMDIIVDXENCLQAYVGFASDINAIVVVFRGTQENSIQNWIEDLLWKQLDLDYPGMPEAMVHRGFYSAYHNTTMRDGVVSGIQKTRKLFGDVPIMVTGHSMGGAMASFCALDLVVNYGLDGVKLMTFGQPRXIGNAAFASFFKKYLPHAIRVTHGHXDIVPHLPPYFSFFPQKTYHHFPREVWVHNVGLGSLVYSVEQICDDSGEDPSCCRSVSGSSVQDHIYYLGVSMHAEAWSSCRIVMDYSKLRYRMDINGNIVLSKHLGLSGDLEHSDQ

SEQ ID NO: 192698 - protein, 68 aa, Oryza sativa
  Clone ID: PAT_MRT4530_88905C.1.pep
FFFYGEPRGVLRVLLILLLDSRGRKQQQRTKKNFMQVPYHHTMSLDPPHLYASLGTQAESSSHPLVSG

SEQ ID NO: 192699 - protein, 39 aa, Oryza sativa
  Clone ID: PAT_MRT4530_88906C.1.pep
GGKRGSSKVPGFLDTDAGLFRGIRKLVYIEKKLMFNHIV

SEQ ID NO: 192700 - protein, 100 aa, Oryza sativa
  unsure (1)..(100): unsure at all Xaa locations
  Clone ID: PAT_MRT4530_88907C.1.pep
HGRCKSAAVADAAITSHXDASSNCRKPPSPPTQPPQHRRRALRCRLDRHXAAATAPSRPGEAVGARSVAKSSAWIRPPMPASPPDPASVASLAATSIPAA

SEQ ID NO: 192701 - protein, 65 aa, Oryza sativa
  Clone ID: PAT_MRT4530_88908C.1.pep
MQLDACAHPFFDELREPNARLPNGRPFPPLFNFKHELANSSQELISRLIPEHVRRQATHNFFNTG

SEQ ID NO: 192702 - protein, 478 aa, Oryza sativa
  Clone ID: PAT_MRT4530_88909C.1.pep
MAVVTATVLRGSGGRRGSRRGRGAAMSSLTAAQFRSLFEMAGGEDISFLFGDDEAAAVAAPVELQGKRGWEEVDQGEGSGAVAAKRQRSPTSSRENSSGSNEGGQEEVSEAAAAMAAAVGRGGGRRLWVKERDSEWWDMVSSPDYPDSEFRKAFRMSKATFEVVCDELAAAVAKEDTMLRAAIPVRKRVAVCVWRLATGEPLRLVSKRFGLGISTCHKLVLEVCAALKAMVMPKVVRWPEAGDAAAIAAHFEAISGISGVVGAIYTTHIPIIAPKSNVASYYNRRHTERNQKTSYSMTVQCVVDSTGAFTDVCIGWPGSNSDEEVLEKSALYLHRGVPGLIQGQWVVGGGSFPLMDWMLVPYTHQNLTWAQHMLNEKVAAVRGVARDAFERLKRRWGCLQKRTEVKLLDLPTVLGACCVLHNICERSGDAVVDADDCAFDLFDDDMVAENAVRSSAAAQARDAIAHNLLHSGGGASFF

SEQ ID NO: 192703 - protein, 693 aa, Oryza sativa
  Clone ID: PAT_MRT4530_8890C.1.pep
MAAAAGEGEAEVTREVISVSTEKAFEGKALPAWSEQITVRSLVVSAVLGTFLSFIVMKLNLTSGIVPSLNVSAGLLAFFLMKTWTSALERCGVFPKPFTRQENTVVQTCVISCSSIAFSGGFGTYILGMSKKIAEGFDEAEAKTSINVEEPSLGRLIAFLFLVSFVGLFSIVPLRKIMIISYKLTYPSGSATAHLINSFHTPQGAIQAKHQVSILFKSFVGSFLWSLFQWFYAAGPGCGFSSFPTFGMVAYSRRFYFDFSATYVGVGMICPYIINFSLLIGSVVSWGIMWPYIESKKGSWYDAGLPKSSLHGLNGYQVFISIAMIVGDGLFNFFSIVLRTAYDLYLKRRGGASKQPQETPFAGATGTERQVLSFDDRRRTQVFLKDQIPTTIAAAAYVLLAAISVVAIPHIFRQLRPKHVVWAYVVAPLFAFCNAYGTGLTDWSLSSSYGKLAIFIFGANIGAKDGGVVAGLAACGLMMGIVSTASDLVQDFKTGYLTLTSPRSMFVSQVLGTGMGCIISPMVFWMFYKANNIGMEEGFPAPYAKIYRGIALLGVNGWDQLPRYCLRFCLAFFLLAIAICALKEVAKQRGWWIQDFIPSALGMAVPFFLGSFFTIDMCVGSLVLFLWSRSDPVRAHTFAPAVASGLICGDGIWSLPSSILSLANVNPPMCMRVFSTATNDKVQLFLRTLPTPP

SEQ ID NO: 192704 - protein, 51 aa, Oryza sativa
  Clone ID: PAT_MRT4530_88910C.1.pep
PWRIYPISALPHHNSNVRLWTLLACMMFLSKMTYFAIGSMEYIHLAQLEYV

SEQ ID NO: 192705 - protein, 35 aa, Oryza sativa
  Clone ID: PAT_MRT4530_88911C.1.pep
SLVASGSANIVNHDVSVKHGTPKMPSRVPHSQWLQ

SEQ ID NO: 192706 - protein, 98 aa, Oryza sativa
  Clone ID: PAT_MRT4530_88912C.1.pep
MGATVPRPTFPASPLHPTHDYPMASMDKQENVRVLGELSPVGDTGNTTTRFPSRMSPSNYWLAPAMAGGTVVAVDLPVAPTRVPRCENCIHFRGPSEV

SEQ ID NO: 192707 - protein, 158 aa, Oryza sativa
  Clone ID: PAT_MRT4530_88913C.1.pep
MTTPHFRPQIVFFDKTAACPPPHRWPRLPTTGTIGHTSLPLVAAPPYRRRGRRRLPLKFRRWLRLSTAGAGAVACPPTSPRLTAASARAPPRTCLPHRQCPEVQPGRSIRCRLVGGLADFNVSASTTSWMSSMNLTASSLSMSHQFPVSVHHLNLFDS

SEQ ID NO: 192708 - protein, 635 aa, Oryza sativa
  Clone ID: PAT_MRT4530_88914C.1.pep
MREPRRPLLPLPLPHLLLVSLLSSSAAAPGAGAGAPPRTGGGGVARSIADMDTKEAVSAKDVSRKEPITGVIALKASMKYFDADFFNDSKLREMEDGAKEFNVPAFRDNRKLVALENGGLHNPSALVFKSSWSDESKISENKSFQYPHTSSVHRPSKDEDIAFMSIIELGELIRTKQVTSRELTAVFLRRLKRYGPIIESVITITDDLAYKQAKEADDLLEQGKYLGPLHGIPYGLKDIIAVPEYKTTWGSRTFENQILDVEASVYKRLKSTGAVLVAKLVTGSLAYDDIWFGGRTRNPWNIEEFSTGSSAGPAASTSAGSETAGSITYPAARCGVTALRTTFGTVARTGVMSISESLDKLGPFCRSAIDCAVVLDAIRGKDAGDPSSREVAIEDPFHVDIRQLTVGYLDSAEMEVVHVLSAKGVKLVPFKLNYTVQSVQSILNITMDVDMLAHFDNWQRERHDDDYEAQDQWPVELRRARLIPAVDYIQAQRARGKLIREVRESFTVDAFIGNVTDWELVCLGNLVGMPVAVVPTGLKSIKNPPEGGTRRRTTVTTGIYAPPDHDHVVSSFSSQDINILCVDMKNSDDELMTCHFDPCIGEQALALAMAYQSVTDHHKQRPAIDDLGPGDDIQR

SEQ ID NO: 192709 - protein, 212 aa, Oryza sativa
  unsure (1)..(212): unsure at all Xaa locations
  Clone ID: PAT_MRT4530_88915C.1.pep
MGLPRLTGSDDNDVGDDVITGDGSDGASSPANYGTTALTKGIYGGGRSTDGDGDEVXYGGDLRLDDDGDAPETYGSDGGADEWRRRLERRRRTARPAAMTAAHGCTVLGLYRQREAKARVAAGSGGLGGPFIGARGRRRSPTAAGDEKESFRVREERGIRIELKSDDFQSDIDDASKRKKVEEISGILSPQSISSDRERGDGIGWAAAARLG

SEQ ID NO: 192710 - protein, 175 aa, Oryza sativa
  unsure (1)..(175): unsure at all Xaa locations
  Clone ID: PAT_MRT4530_88916C.1.pep
QGRKERGRRTAAGTRRLRCPLPLHRASTPTTSTPSTTPPLPTTPTPSTAPPLPTADAVRRALRPRRHRPPRLPSERRRRPPXPPLRPRRRRPPXTAPTSPTPSAAPPLRAPTPSAAPLLRPRRRRPPRHRSDRASASWLPPSLPLPSVSTVWKIWGEKPEREGKRKRNRDRLVGP

SEQ ID NO: 192711 - protein, 165 aa, Oryza sativa
  unsure (1)..(165): unsure at all Xaa locations
  Clone ID: PAT_MRT4530_88917C.1.pep
HSKEVEEALGVETQKLQGAIEDNIILKRKTKRCSQSAXEQMEFNARWCHEQIERLRKDTEEKENEFERLLQEELARAIECDVDSETTENCKLREEQIQRIIDCQVKDAEEFDAEQDELIKTHEEKKANVKMEYMAKDVELEEELYAALTSLMEKHKPDIFQPSSP

SEQ ID NO: 192712 - protein, 238 aa, Oryza sativa
  Clone ID: PAT_MRT4530_88918C.1.pep
MAMKAVIKGGDGGGGCMVVVAHVLAVAATAMVLVWCVHFRGGLALRSHNKQLIFNTHPVLMVLGLVVLAAEAILSYRSLSIIVSSRDARKKVHLGLHAVGLALGGVGIYAVFKYHAEADIPNLYSLHSWIGIATISLYALHWLLAFLTFFFPGASHDTRRSAVPWHALLGLLVFALAVGNAQLGFLEKLTFLQAPPLRLSRYGAEALLVNFTALVVLLLGVAVVLATANVDSTKYTAM

SEQ ID NO: 192713 - protein, 117 aa, Oryza sativa
  Clone ID: PAT_MRT4530_88919C.1.pep
MEWWRTSLRSFSCLVACNGNVVSRWMEIKANEEVGYGGPESNIPLRCWMRCSGQRRNMLASTDGGCGDRQGNKQWRGCDDDWWGQDTMSGTVTGSRPPQLPSSSSSGSGGVKSSEAY

SEQ ID NO: 192714 - protein, 289 aa, Oryza sativa
  Clone ID: PAT_MRT4530_8891C.1.pep
MDPLAPSPSGTAVRAYSNPSNERGKLSIKAASPVSGGGLCEADLKDRRCSMASSQCWENPPALDPAGGGGEVVGDFGGQKAYVAGSAGSKAAVVLISDAFGFEAPNLRKIADKVALFGYFVVVPDFLHGDPYQPDNPNNPGIWLQSHNPKEAFEEAKPVIAALKEKGASFIGAAGYCWGAKVVVELGKVHEIQAAVLLHPSLLAVDDIKEVKCPISILGAEIDKTSPPELLKQFEQILSPNPEIAHFVKIFPGVEHGWAVRYNHDDAAAVKSAEEALEDMMDWFKKYLK

SEQ ID NO: 192715 - protein, 50 aa, Oryza sativa
  Clone ID: PAT_MRT4530_88920C.1.pep
FFFFFFFWIISLFISIEVQKFSTFLENFRCNLFCYKQSHMKNIPKKPILL

SEQ ID NO: 192716 - protein, 1573 aa, Oryza sativa
  unsure (1)..(1573): unsure at all Xaa locations
  Clone ID: PAT_MRT4530_88921C.1.pep
MAAEEGAEPSASIAEVGGAPSASAPAPSASALITALLPSAPATSEQAPRVDEVAKAAAAARALQTRAEILSAGQLLVPPAAPSQPTVAQAALPAVQVQVNSDPETQAEADMETIRQNMARLQDMLRQMQEQQQAYEAARRSRSHRHRCTSPGSRQPQQCTRPPMDKLSRSRPKRNSKLSFSNSISPTTFRVQLPRLVQRGVQVKPNLGASPWSQTPQYDFVNAAQAQTVRPQGPTPGFGTSQAPAQVAMTWSQPVFDPSMATQQVLPIATGQPSTMAQTHAQAVISPFATPYPQQGAANRAGGEKGLPLXSAIEAAHGDENTKAKVIHLALDGIARSWYFNLPANSIYSWEQLRDVFVLNFRGTYEEPKTQQHLLGIRQRPGESIREYMRRFSQARGEEDSKRRQAIQAEYDKASIAAAQAQAQVQVAEPPPLAVRQPQTAIQGQPPRQGQAPITWKKFRTDRAGKAVMAVEEVQALRKEFDAQQASNHQPVRKKQCRNIRQRGNTQDTRPQQGATVEAPREAAQEQPPVEQRQDAQRRVIQVITRADPLGHLSKRQKKMQIRAVHSITSTGEGAPQYMNQPISFGPEDAEGVMFPHQDPLVISAEIAGFEVRRILFDGGSSADVIFAEAYAKMGLPTQALTPAPTSLRGFGGEAVQVLGQALLLIAFGSGENRREEQVLFDVVDIPYNYNAILGRATLNKFEAISHHNYLKLKMPGPAGVIVVDDADPTKLVSLGDGMGKQEAESILAVLKKNIDIFAWGPDEEIVHPEWLANPVLVRKSNGKWRMMPFGLRNAGATFARLVYKVLCNQLGRNVEAYVDDIVVKSRKVFDHASDLQETFDNLRTAGIKLNPEKGIEANPEKIDAIRQMKPPSSTHDVQKLAGRIAALSRFLSKAAERGLPFFKTLRGAGKFSWTPECQAAFDDLKQYLQSPPALISPNPGSELLLYLAASPAAVSAALVQETEFGQKPVYFVSEALQEAKTRYIEMEKLAYTLVMASHKLKHYFQAHKIMVPSQYPLGEILRGKEIFGRLSKWAAELSPFDLHFVARTAVKSQVLADFVAEWTPVSTSEPEPVEQPWIMCSDGSWSHKGAGVAAILISPNGVPVRYAARLQFNTTNNAAEYEAILLGLRKAKALGVRRLLIRTDSKLVASHVDKSFEAKEEGMKKYLEAVRTMEKYFTGITVEHLPRGQNQEADALAKSAASGGPHLPGIFFEVLHTPSVSVDSLVLTIDQVKLGEDPNDWRTPFVKYIETGWLPDDEAEAKRLQIRATKYKLISGQLYRSGMLQPLLRCVSFAEGEQMAKEIHQGLXRWPPSPLRQFGPSPDGDWTSLAQSLRHETAVQKFVWKNIICRFGVPKEFITDNGKQFDSEKFRQMCEGLNLEIKFASVAHPQSNGAAERTNGKILEALKKRLEGAAKGKWPEEMLSVLWALRTTPTRPTRFSPFMLLYGDEAMTPAELGANSPRVVFSGGEEGREVSLELLEGVRVEALEHMRKYAVNTSATYNKKVRPTDLLPGQLVLRKKANPVAVGKLESKWEGPYLIKHKSRTGSFRLATLEGEGLDHSWNAASLKRFYV

SEQ ID NO: 192717 - protein, 71 aa, Oryza sativa
  Clone ID: PAT_MRT4530_88922C.1.pep
SLYKEGSTSNLTTTRRRAKKLHPLGYQIRPIMLHQKQSRTPETKRLWNSLSCTPTKAQNQWNKTTLILMMK

SEQ ID NO: 192718 - protein, 1192 aa, Oryza sativa
  Clone ID: PAT_MRT4530_88923C.1.pep
MAWSQPVFDPSMAAQQASPIGAGQPNAMAQTHAQAVISPFATPYPQQGTANRAGGEKGLPLSGGIKNRPIPLQFKFPPVPRYSGETDPKEFLSIYESAIKAAHGNENTKAKVIHLALDGIARSWYFNFPANSIYSWEQLRDVFVLNFRGTYEEPKTQQQLLGIRQRPGESIREYMRRFSQARCQVQDITEASVINAASAGLLEGELTRKIANKEPQTLEHLLRIIDGFARDKEDSKRRQAIQAEYDKASIAVAQAQAQVQVAEPPPLAVRQPQTAIQGQPPRQGQAPMTWRMFRTDRVGKAVMVVEEVQALRKEFDAQQASNHQQPVRKKVRKDLYCALHGRSSHTTEQCRNIRQRGNAQDARPQQGATVEAPREAVQEQTPPVEQHQDAQRRVIQVITRADPPGQLSKRQKKMQIRAVHSITSVGEGAPQYVNQLISFGPEDSEGVMFPHQDPLVISVEIAGFEVRPDEVGGVSTDLIMHHLAVKPDAKPRKQKLRKMSVDRQEAAKAEVKKLLRAGVIQEIEHPEWLANPVLVRKSNGKWRMCVDFTDLNKACPKDDFPLPRINQLVDSTAGCELMSFLDAYSGYHQIHMNPPDIPKTAFITPFGTFYHLRMPFGLRNAGATFARLVYKVLCNQLGRNVEAYVDDIVVKSHKAFHHASDLQETFDNLRAAGIKLNPEKCIFGVRAGKLLGFLVSERGIEANPEKIDAIQQMKPPSSVHEVQKLAGRIAALSRFLSKAAERGLPFFKTLRGAGKFMAVSAALVQETEFGQKPVYFVSEALQGAKTRYIEMEKLAYALVMASRKLKHYFQAHKVIVPSQYPLGEILRGKEISGRLSKWAAELSPFDLHFGVGIAAILILPNGVLVRLTILAIDQVKLGEEPNDWRTPFVKYLETGWLPDDEAEAKRLQIRATKYKLVSGQLYRSGMLQPLLRCISFAEGEEMAKEIHQGLCGAHQAARTVATKVFRQGVYWPTVLKLITDNGKQFDSEKFREMCEGLNLEIRFASVAHPQSNGAAERTNGKILEALKKKLEGAAKGKWPEEMLSVLWALRTTPTRPTKFSPFILLYGDKAMTPAELGANSPRVVFSRDEGGREVSLELLEGVRVEALEHMCKYAVSTSATYNKKVQPSELLPGHLVLRKQANPVAVGKLESKWEGPYLIKHKSRTGSFRLATQEGEEFDHSWNAASLKRFYV

SEQ ID NO: 192719 - protein, 188 aa, Oryza sativa
  unsure (1)..(188): unsure at all Xaa locations
  Clone ID: PAT_MRT4530_88924C.1.pep
MAQTHAQAVISPFATPYPQQGAANRAGGEKGLPLSGGIKNRPIPPQFKFPPVPRYSGETDPKEFLSIYESAIEAAHGDENTKAKPQTAIQGQPPRQGQAPITWKKFRTDRAGKAVMAVEEVQALRKEFDAQQASNHQPVRKXEQCRNIRQRGNTQDTRPQQGATVEAPREAAQEQPPVEQRQDAQRRV

SEQ ID NO: 192720 - protein, 1100 aa, Oryza sativa
  unsure (1)..(1100): unsure at all Xaa locations
  Clone ID: PAT_MRT4530_88925C.1.pep
CEAKGRVSTCRRRRRLRHVQFALASSSKKDGFTMSSSPPQRPKKPFRPIKLRGYRADGRLTAHQGPISPLDIMXPYKRPFHKGNHLSFRQQLAPTVGTSERNHXERMPPKKVAKEKVTRRKESDTGVGMAAEEGAEPSASVAEVGGAPAPSLLPSARATSEQAPSVNDVAKATAVARALQTRAEILSTSQLLVPQAAPSQPAAAQAALPAMQVQVNSDPETQAEADMEAMRQNMAXLQDMLRQMQEQQQAYEAARRSKVASAPILQYSAGFVPPQVYPQVQPKPAPPQVLQAPMYFVGQPTVAAVPQAATQVQPQPLGQLSQAVAEGASALQAQFQAFLQQINQPHNISNTAPSTRPEGNSSQGALSWLPPNQPNLGTSPWSQVPQCDFTNTAQAQTVRSQAPTPGFGTSQAPSQVAMTWSQLVFDPSMAAQQASPVGARQPNAMAQNHAQAVISPFATPYPQQGTAGRAGGEKGLPLSGGIKNRPIPPQFKFLPVPRYSGETDPKEFLSIYESAIEAAHGDENTKAKVIHLALDGIARSWYFNLPANSIYSWEQLRDVFVLNFRGTYEEPKTQQHLLGIRQRPGESIREYMRRFSQARCQVEDITEASVINAASAGLLEGELTRKIANKEPQTLEHLVRIIDGFAKSEEDSKRRQAIQTEYDKASIAAAQAQAQVKVAEPPPLAVRQPXTAIQGQPPRQGQAPMTWRKFRTDRAGKAVMAVEEVQALRKEFDAQQASNHQQPVRKKYVNQLISFGPEDAEGVMFPHQDPLVISAEIAGFEVWRILVDGGSSADVIFVEAYAKMGLPTQALTPAPASIRGFGGEAVQVLGPALLLIAFGSGENRREEQVLFDVVDIPYNYNAILGRATLNKFEAISHHNYLKLKMPGPAGVIVVKGLQSSAASKGDLAIINRAVHNVEAELHSRPKHVPKPTPHDKIVKVQIDHADPAKLVSLGDGMGEQEAEGILAVLKKNIDIFAWSSDEVGGCXADLIMHHLAVKPDAKPRKQKLRKMSADRQXAAKAVVQKLLRAGVIQEIDHPEWLANPVLVRKSNGKXRMCVDFTDLNKACPKDDFPLPWIDQLMDSTTGTKLMPDSMALCMHH

SEQ ID NO: 192721 - protein, 61 aa, Oryza sativa
  Clone ID: PAT_MRT4530_88926C.1.pep
FDVVDIPYNYNAILGRATLNKFEAISHHNYLKLKMPGPAGVIVVKGLQPSPHKARIAGRRH

SEQ ID NO: 192722 - protein, 113 aa, Oryza sativa
  Clone ID: PAT_MRT4530_88927C.1.pep
PRVRCYACSCKKKKKKKKKKKKKGKKKKKKKKKKKKKKKKRGGRSQSKTKEVSSSLKKVGSNPDKIPFVPIFGFGGDTLIERSTNLDWYKGPPLFEAFDQINEPKRPSNKPLR

SEQ ID NO: 192723 - protein, 203 aa, Oryza sativa
  Clone ID: PAT_MRT4530_88928C.1.pep
MTEEELRELLRSIDCSLAAASHAIQKAADEAEQKLSLQRAGTLMAVDSSSQDAVPPHAAPMDMGDEVQGAQPPPDRWFEEEREPVICSKKKPEPCSAPPPPPPPANRNGVAYEAEQRRACALMVDSQEDAAPPPPPPASGNGVADDGEYINLGGYMIERNRFEAIWREHAIPPPQSLLPESLPDDDGEPLRLWSFDAGERVIL

SEQ ID NO: 192724 - protein, 60 aa, Oryza sativa
  Clone ID: PAT_MRT4530_88929C.1.pep
AWSNLTPAPRSRLSDASNQRRRHPDRRPRPDLPGSPAARPTHYRCANRRGPNRCRQGRPA

SEQ ID NO: 192725 - protein, 56 aa, Oryza sativa
  Clone ID: PAT_MRT4530_8892C.1.pep
KSDLGLIGLAANNKSLAGLPSLRGALGSISLPSPDSQDHLFCWLWLSFSIFIFLQS

SEQ ID NO: 192726 - protein, 93 aa, Oryza sativa
  unsure (1)..(93): unsure at all Xaa locations
  Clone ID: PAT_MRT4530_88930C.1.pep
YVHPYLMLLDSYXKKGDVHNAEKLFSKVRQMGYTGRIRQYQLLLEAYLNAKTPPYGFKERMKADDIFPNRAVASLLAATDPFNRKNAMSELLD

SEQ ID NO: 192727 - protein, 73 aa, Oryza sativa
  Clone ID: PAT_MRT4530_88931C.1.pep
MELIQLPPYSASEAVEAERGRRPGVAAHSASGAARRRGGGATHPGGGRSSARWWGGAARRRSGGSMGKNVHKP

SEQ ID NO: 192728 - protein, 41 aa, Oryza sativa
  Clone ID: PAT_MRT4530_88932C.1.pep
MPNPIIALAWLIDLAANGTSRCPFSSRRLACTRVHLADALA

SEQ ID NO: 192729 - protein, 127 aa, Oryza sativa
  unsure (1)..(127): unsure at all Xaa locations
  Clone ID: PAT_MRT4530_88933C.1.pep
VLAQNCNWAMRXRVLLDAAQGVDYLHKXGCNKSIIHRDVKTSNILLGQNLRAKIADFGLSRTYISDSQSHMXATVAGSMGYIDPEYSHTGWITENNDVYSFGVVLLEVVTGELPILQGHGHIIQRVK

SEQ ID NO: 192730 - protein, 33 aa, Oryza sativa
  Clone ID: PAT_MRT4530_88934C.1.pep
DWLSGITPSFVYDALNLRFAHWSLLYYDVPFLR

SEQ ID NO: 192731 - protein, 47 aa, Oryza sativa
  Clone ID: PAT_MRT4530_88935C.1.pep
ASGRSVLFWMHYSLFIDESSSEVRWMNSPLLSEGRHHFKILMTINIC

SEQ ID NO: 192732 - protein, 171 aa, Oryza sativa
  unsure (1)..(171): unsure at all Xaa locations
  Clone ID: PAT_MRT4530_88936C.1.pep
LCVHLKRANEGRRPPHRTGGATQTAPTPSQPPETHTPTPTRTTTQQTKKTKPRDRHARATQPTQGEAGHQETRTTNAPPNTHPDNTKEDHPHQGHPPAPPPPPGGTAHEGTRPQXPSQQEKKNRRGRERGGGDGPREIRPIDPGGGKIDFCGGIXIGMIGFGIELDDRSGI

SEQ ID NO: 192733 - protein, 208 aa, Oryza sativa
  Clone ID: PAT_MRT4530_88937C.1.pep
MSLWKHLAAAGDGEVETVVELLARPGDGASGAGRGRRGVGHIEAKNRAVDGLLEALNKDEKSVLSVLGRANVAALVQLLTAPATKVREKAATVICQFAESSGCEGLLVSEGALLGCAGSRPPPPRASRSGSRRRHRHSLLPRASRARGDVAAAASRARGAVVAATSRLVRWEPSGHREAVENPMRERRKRKRKRRKKKEMEADMWVTF

SEQ ID NO: 192734 - protein, 79 aa, Oryza sativa
  Clone ID: PAT_MRT4530_88938C.1.pep
MLNQSFLTVIIPRKISWKLMKLLPMSMYASSSNGGSSGIRQPMSKRVAIFRNPRRGARTAHLYNGGVGSSNSSTSTSSS

SEQ ID NO: 192735 - protein, 753 aa, Oryza sativa
  unsure (1)..(753): unsure at all Xaa locations
  Clone ID: PAT_MRT4530_88939C.1.pep
MSSGLKKKGLEWDLNDWRWDSNLFLATPSNASPSKCSRRELGRAEGEIDFGVVDKRRRVSPEDDDGEECINAATTNGDDGQISGQRGRSSEDEMPRQGTCSSSGPCCQVDGCTVNLSSARDYNKRHKFYGNYLTCLVRFHFLQEFDEGKKSCRSRLAQHNRRRRKVQVQAGVDVNSLHENHSLSNTLLLLLKQLSGLDSSGPSEQINGPNYLTNLVKNLAALAGTQRNQDMLKNANSAAIASHTGNYVAKGNSLHDSRPHIPVGTESTAEEPTVERRVQNFDLNDAYVEGDENRTDKIVFKLFGKEPNDFPSDLRAQILSWLSNCPSDIESYIRPGCIILTIYMRLPNWMWDKLAADPAHWIQKLISLSTDTLWRTGWMYARVQDYLTLSCNGNLMLASPWQPAIGNKHQILFITPIAVACSSTANFSVKGLNIAQPTTKXEDLDQSSLSFPFVVAEEDXHIRATSETPKDCTEGFPAARFRWLLSFAVDREFCAVIKKLLDTLFQGGVDLDVQSTVEFVLKQDLVFVAVNKRSKPLIDFLLTYTTSSAPMDGTESAAPAQFLFTPDIAGPSDITPLHIAATYSDTAGVLDALTDDPQQLGIKAWKNARDATGLTPEDYARKRGHESYIEMVQNKIDSRLPKAHVSVTISSTTSTTDFTEKHASQSKTTDQTAFDVEKGQQISTKPPLSCRQCLPELAYRHHLNRFLSTRPAVLSLVAIAAVCVCVGLIMQGPPHIGGMRGPFRWNSLRSGPK

SEQ ID NO: 192736 - protein, 35 aa, Oryza sativa
  Clone ID: PAT_MRT4530_8893C.1.pep
MHGRTGDRTPRPLNATTRSTLPVDRDAAAVASDCG

SEQ ID NO: 192737 - protein, 133 aa, Oryza sativa
  Clone ID: PAT_MRT4530_88940C.1.pep
GFWGNKIGKPPPVPCKVTGKCGSVTVRMVPAPRGSGIVAARVPKKVLQFAGIDDVFTSSRGSPKTLGTFVKATFDCLMKTYGFLPPEFWKEARFSKSPFQEYPDLLAKPSGKSLFLEEERVDASFASFALWMF

SEQ ID NO: 192738 - protein, 547 aa, Oryza sativa
  Clone ID: PAT_MRT4530_88941C.1.pep
MAAPPLLSLSQRLLFLSLSLPKPQLAPNPSSFSPTRAASTAPPPPEGAGPAAPSRGDRFLGTQLAAEAAARVLAPEDAERRRRRREKRKALARKPSAAACYGCGAPLQTADEAAPGYVHPATYDLKKRHHQLRTVLCGRCKLLSHGHMITAVGGHGGYPGGKQFVSADQLRDKLSYLRHEKALIIKLVDIVDFNGSFLARVRDFAGANPIILVITKVDLLPRDTDLNCIGDWVVEAVVKKKLNVLSVHLTSSKSLVGVTGVISEIQQEKKGRDVYILGSANVGKSAFISAMLRTMAYKDPVAAAAQKYKPIQSAVPGTTLGPIQIEAFLGGGKLYDTPGVHLHHRQAAVIHADDLPSLAPQSRLRARCFPANDTDVGLSGNSLFWGGLVRIDVVKALPRTRLTFYGPKKLKINMVPTTEADEFYEREVGVTLTPPAGKEKAEGWVGLQGVRELQIKYEESDRPACDIAISGLGWVAVEPLGVPSSNPDESAEEEDNESGELHLRVHVPKPVEIFVRPPLPVGKAASQWYRYQELTEEEEELRPKWHY

SEQ ID NO: 192739 - protein, 106 aa, Oryza sativa
  Clone ID: PAT_MRT4530_88942C.1.pep
EYTNGSTVLHKLATASIRSTLSCHHSGELKGEKSRSLILLQINKLQYMSTYIMCIRADETSKHAREEDMVYSANLKLGIPISVIQSTHPRPKGKPKNDRTTASIFD

SEQ ID NO: 192740 - protein, 75 aa, Oryza sativa
  Clone ID: PAT_MRT4530_88943C.1.pep
EGRKTEIVLVGIDPNHYKAHNTYVPVTRKGYCEFNKDDYLIVGHSTGFCEPGRARIANDATSLLTAHTVIITQIN

SEQ ID NO: 192741 - protein, 109 aa, Oryza sativa
  Clone ID: PAT_MRT4530_88944C.1.pep
NPKEWIFVHFVDTVEAYLSVPKSSSHDTSKICRANDIRRSNKKPRQHKPVNQKKTKSPSFVACKVATNYGSIWSIAQSTIKIHAGIKICWCKTNLEDLAHNKGVPPSHE

SEQ ID NO: 192742 - protein, 95 aa, Oryza sativa
  unsure (1)..(95): unsure at all Xaa locations
  Clone ID: PAT_MRT4530_88945C.1.pep
LGGKNLLRGLESYLPKPLRQQGHQTARSPNVNDGVNXRPPDHAFLYLLLXILVGPPAPYGPTFPPSKVSRPNVHILEKLIFSVRTNKLVKLVIRS

SEQ ID NO: 192743 - protein, 50 aa, Oryza sativa
  Clone ID: PAT_MRT4530_88946C.1.pep
MEWLVDMAKQRKVKTTIDSKDPLSRAQKAWAKCMQVHVTGKIVVLMGGTE

SEQ ID NO: 192744 - protein, 115 aa, Oryza sativa
  Clone ID: PAT_MRT4530_88947C.1.pep
PPPGLRGSGRPRPGLKRPRRCEPPDGCRPFWPPPPRGRQRSQSPPFPLQCCGPHPVLVRGPRPGRSAPGPPEGGGSAPPPPQKNMGVTFCPPPPHNTFLSGTGPGGPRRKQTPPV

SEQ ID NO: 192745 - protein, 375 aa, Oryza sativa
  Clone ID: PAT_MRT4530_88948C.1.pep
MEFTTSSRFSKEEEDEEQDEAGRREIPFMTATAEAAPAPTSSSSSPAHHAASASASASASGSSTPFRSDDGAGASGSGGGGGGGGEAEVVEKEHMFDKVVTPSDVGKLNRLVIPKQYAEKYFPLDAAANEKGLLLNFEDRAGKPWRFRYSYWNSSQSYVMTKGWSRFVKEKRLDAGDTVSFSRGIGDEAARHRLFIDWKRRADTRDPLRLPRGLPLPMPLTSHYAPWGIGGGGGFFVQPSPPATLYEHRLRQGLDFRASTPPPRWGGRAAGSPVVLDSVPVIESPTTAAKRVRLFGVNLDNPHAGGGGGAAAGESSNHGNALSLQTPAWMRRDPTLRLLELPPHHHHGAESSAASSPSSSSSSKRDAHSALDLDL

SEQ ID NO: 192746 - protein, 332 aa, Oryza sativa
  Clone ID: PAT_MRT4530_88949C.1.pep
MREEEIKWYNRAKSKDIMDGDSNTKYFHLVANGKHRKTIIFQLQDGDQVINGDANLKSHITTYYKGLFGPPDDSTLQFDENRTEDIPQVSLLENDALTQPFSEKEIKEAIFQMEHNNAPDAEDDQIGGHGGHVGIKVNDQIGNNFQTYKGLRQGDHLSPILFNIVADMLALLIKRAKEGLFLSSTLAFQCILENLVTKIGKLLNKELRKNLVVGKIPKGVLQKIDYYRSRFFWQGDDHKKKYRLTRWDIICQPKDQGGLGSIIWRNNVVFDKSSSITYMQVIFRATYWLRLWAQLQRSNENGEFIKVACQKLETMVMQLFANYGWGFTNRLQ

SEQ ID NO: 192747 - protein, 108 aa, Oryza sativa
  Clone ID: PAT_MRT4530_8894C.1.pep
MAVLPQPPFRRRRAHRGQAIPAELGYGAAMAAMRPVPPSAAAAGGWSPELLRTSPGRRRVALGRPSVRAVFPCCSRSVERKKTKEVKVDQDYIKNKNYPEQASHHPIP

SEQ ID NO: 192748 - protein, 400 aa, Oryza sativa
  Clone ID: PAT_MRT4530_88950C.1.pep
MEFTTSSRFSKEEEDEEQDEAGRREIPFMTATAEAAPAPTSSSSSPAHHAASASASASASGSSTPFRSDDGAGASGSGGGGGGGGEAEVVEKEHMFDKVVTPSDVGKLNRLVIPKQYAEKYFPLDAAANEKGLLLNFEDRAGKPWRFRYSYWNSSQSYVMTKGWSRFVKEKRLDAGDTVSFSRGIGDEAARHRLFIDWKRRADTRDPLRLPRGLPLPMPLTSHYAPPSPPATLYEHRLRQGLDFRAFNPAAAMGRQVLLFGSARIPPQAPLLARAPSPLHHHYTLQPSGDGVRAAGSPVVLDSVPVIESPTTAAKRVRLFGVNLDNPHAGGGGGAAAGESSNHGNALSLQTPAWMRRDPTLRLLELPPHHHHGAESSAASSPSSSSSSKRDAHSALDLDL

SEQ ID NO: 192749 - protein, 663 aa, Oryza sativa
  unsure (1)..(663): unsure at all Xaa locations
  Clone ID: PAT_MRT4530_88951C.1.pep
MTNKTLREFAAPSADNVTIGPQINLGDVDFDLKSSLITMXQASPFCGXPNENANAHLQXFLEICSTYTMKGVSPNNVRLRLFPFSLLGKAKKXFYANHATINTWDRCFTTFLSKFFPMEARERLQEYVAACPHHGMDDWLILQNFYNGLTPMSHDHLDTAAGXDFFSKTVRGAIDLIEKMVSNMGWSEERLQTRQRGMHTVKEMEMLAAKMDLLMKXLDDHDKRPQGIVKALDSHVTCEVCGSTGHSGNDCPETHELAMYMGNNNNGYRPQGGQGWNQPCPYYQGANNNGNFSNQPSLKDLVFVQAKTTDALSKKLAANSQLAALVPANESGRIPGQXDSSIENVKVITTRGGKSTCDLPYPNPVGTNKEAPSGTSADKKIQLEKVVPQAYYDTQLLPFPQRNRKPSVDEQFARFVEVIXEDSHQYAVVGCYISANIRTLPQGYPQQQETAPNNGGGQADGAVQQCHTPQVPGKEEXDPGCPTITCSIGAQQFNQAFCDIGASVSVMPMDVFEKLNFTMLAPTPMHLQLADSLVRYPTGIAEDVPVKIRDSFIPDGFVVLDMETGKETLLILVHPFLKTAGANIDVGTGSIRFRINGKEEKFEFQPRTKHCSMVRIKYGPNLQNILVKFMQNFLEKETTFPRNRYWNTLVKPSVPAKKLEQPA

SEQ ID NO: 192750 - protein, 197 aa, Oryza sativa
  Clone ID: PAT_MRT4530_88952C.1.pep
LYMCCCNFRASSSTNFNRSFSTDQRASAIQIDSISAASPAVLSSEPKANNTFRFLVVQSRRSTSVQVRHRTAASKLVLPPGSHLGHVETCVPTGRPKIPPASPAARLRSTQRWTGSTLRPPPSERSRKLAEPPRLRERDRPRAKTARARNTPRDSPSGWSVWCARARGIGWAGRQGEGTGWAVVRRGWRPASRAPRP

SEQ ID NO: 192751 - protein, 616 aa, Oryza sativa
  Clone ID: PAT_MRT4530_88953C.1.pep
MAAVDTPEKPYEGKPAAEARSYWRWQKEDFFPEPSFASWGAYRAALAATPARFRDRFAGRSTDADELGALRRRSENEMRRCLTWWDLTWFGFGSVIGAGIFVLTGQEAHDHAGPAIVLSYVASGLSAMLSVFCYTEFAVEIPVAGGSFAYLRVELGDVAAFIAAANLILESIIGTAAVARSWTSYLASLINKPASALRIQTSLAEGYNELDPIAVVVIAVTATLAILSAKGTSRVNWVASAVHVLVIAFVIVAGFLHAKTSNLTPFMPHGVPGVFRAAAIVYFAYGGFDNIATMAEETKNPSRDIPLGLLGSMSVITAIYCVMALVLSMMQPYTAIDRSAAYSVAFSNVGMRWAQYVVALGALKGMTTVLLVGALGQARYTTHIARSHIIPPVFALVHPRTGTPVHATVLIAAAGACIGLFSSLDVLSSLLSVSTLFIFMMMATALLVRRYYVRGVTSRTHARRLVALLSVVIGSSAGIAAYWGAAPERWVGYTVLVPAWAAGTLGIQLLVPAARAPKVWGVPLVPWLPSLSIATNLFLMGSLGAQAFIRFGVCTAIMLLYYVLVGLHATYDVAHGACSGDDVDEEVYADAAHVDDAKAAAAVAANADVERAGAKI

SEQ ID NO: 192752 - protein, 144 aa, Oryza sativa
  Clone ID: PAT_MRT4530_88954C.1.pep
MDSRKKSPPSTAAGAAPAAANGYFSTVFSASPTANTKDAKQADLYAMLNKQNSKGQNGGGFADGKSHSPTKARGAYKDGKQSYPNESSESPYFGSSVHYGAREFYGNTPPKQGDASPGNQKEQEQNPDGSLATRGDWWQGSLYY

SEQ ID NO: 192753 - protein, 122 aa, Oryza sativa
  Clone ID: PAT_MRT4530_88955C.1.pep
MTPDERKSYIAQRHQEKVLDVAMYIAMALESTQDKDNPKATASEDMSLLVDVPLSAASEDVFWLAAARPSPLLTLARGGRERQRPPHARIRRRLLPLARIWRRRQSPVRIWRRWRWGARILG

SEQ ID NO: 192754 - protein, 212 aa, Oryza sativa
  Clone ID: PAT_MRT4530_88956C.1.pep
MEVEIKLRLPDAGAHRRLSSFLAPRLRRTDAQRNLFFDAAARPLAAATAALRVRLYGLDDRAPSRAVLALKRRPRIDAGVSRVEEVEEPLDPAIALACVDDPASLGGVESPIIRLVSEEYGVGGDAAPFVCLGGFRNTRAVYQLEEGDTLGLVVELDETRFDFGTNYELECETAEPEQAKQVLERLLTVAGVPYEYSRSNKFACFMAGKLLP

SEQ ID NO: 192755 - protein, 84 aa, Oryza sativa
  Clone ID: PAT_MRT4530_88957C.1.pep
NCQLLRLLMDSLSLISFPTSVLFEDSQAFSVGERNRGTGLPYGRTWALVPTRDTQSVPGREALTHALAKSIREKRKEREFQPEI

SEQ ID NO: 192756 - protein, 420 aa, Oryza sativa
  Clone ID: PAT_MRT4530_88958C.1.pep
MGASGKWIKSLVSLKAAPEGTTKGRRWTRLWRSSSSASASASTAGDASESASSEADAFSSVVAAVVRAPPRDFRVIRQEWAAVRVQAAFRAFLARRALKALRGIVRLQALVRGRLVRRQLAVTLKCMNALLGVQERARERRTRCSADGRDSQDAVGERDGRADPIKQAEALILQLLPPFHNEQWCDSQGSVSEVRSKIHMRHDAVAKRERAIAYALSHQPRSSKQSARPSSPARSLRNHESNRCNHDWSYIEGWMATKPWESRLMEQSHAELKCSKNSGELNLAGAQLSNASSVKMRGNRVAAKPPSVLSASSSDFPCDVSSASTSSATPARSDGGHGEGPSYMSLTKSAKARQSCNSPFQIQRQRSGGMSSYKRVALSPLDVQSNACSEFSVTSRKLNSLSLKGRSMTRSLDKENDNLF

SEQ ID NO: 192757 - protein, 776 aa, Oryza sativa
  Clone ID: PAT_MRT4530_88959C.1.pep
MAEAATRGLPPVSPGLPLPEELVVWEILVRLPPKPLLRCRLVCRAWRRLTSTRDFLLAHHRHQPSLPLIAACDYADIMYLIDVLTLTLGRRRGAAARLHPVARYASTADYLDSSCDGLLLISRNTGPPQYSICNPTTRQFGDLPLISGFMFLGLYQHSPTGDYRILLYRAEKVVLEDLIPGHVERDASYVYTLGSNDMPRRIGWAEPEVSMLAGHSRRCRPAQLHGSLLHWYHSIKHMILVFDTTAESFRWMRAPIDKTENELNRELWADVLEMDSTLGLYCCNHDKTIVNIWALQDYEQEVWSIKYQVELPVTCIRGELDVGDSWSVMVSSEDGDEVVVVLVDCGQSVLCFDTDGKLLARLEHDERKSQRPKRVSPPSARLWPRHFTPLAAAAAATGLPPPLSSGVALPEVLVVWDILVRLPPKPLLRCRLVCRAWRRLTSTRDFLLAHHRHQPSLPLVTGCRNGDVLAVDRRRRLLHPVARFDSSVFCVEEASCDGILVLWRKRAIGAHSSVRFSICNPTTRQSGDIPLPLLTGFMLMGLYWHRPTGEYRLLLYRIELPASERLVDVLIPGDRNACYVYTLGSGDLPRCIGWPEAEANGASVLLHGSLHWYKRIEDMILAFDITAESFRWMRSPFGKAVWRAFHGLFEINCMLGMYCCDDGATFVDIWVLEDYEREVWSLKYRVELPVLEIRRELDVKRDLYSVMVSSEDGDVLVLVNCKRAMLYIGTDGKLLASLPHDNDGLSITPVKLRASLVPHAFFPSLLDYVVNASPFV

SEQ ID NO: 192758 - protein, 304 aa, Oryza sativa
  unsure (1)..(304): unsure at all Xaa locations
  Clone ID: PAT_MRT4530_8895C.1.pep
MLTVTPVVTKCTPSPPPLLPPLAPVVPVPSPPPPAPTSSPVRXQGPPPPPPPPAPNSCPSRPAPPPPPPPPLASTSSPPRPAAPSPCQLHTSTSSPARPVPPPPPTLLYNLHFXAPTPPLLTGATSAPSPPPPPLACRSSNQLSAPPPPPPSFSKNNGSIAPPPAPPGGNAKLPGMRGRGPAPPSGPMSRSLQSGQAASRRSNLKPLHWVKVTRAMQGSLWEESQKTDEASKPPVFDMSELEHLFSAVLPSSDGKRSDKSGSRASGSKPEKIHLIDLRRANNCGIMLTKVKMPLPDLMSAILTL

SEQ ID NO: 192759 - protein, 34 aa, Oryza sativa
  Clone ID: PAT_MRT4530_88960C.1.pep
IEVTQSNLRIFLPAKMMCYLSHEKCYISLSSQII

SEQ ID NO: 192760 - protein, 273 aa, Oryza sativa
  Clone ID: PAT_MRT4530_88961C.1.pep
MVPRDRVNAAAAGGGGEGRLVQSGIVNKKCDKKAPKRIHKSEREKLKRDKQNDLFNELGNLLEPDRQNNGKACVLGETTRILKDLLSQVESLRKENSSLKNESHYVALERNELHDDNSMLRTEILELQNELRTRMEGNPVWSHVNTRPALRVPYPTTGVFPVQHLPHLPVTTTAAFPQQLPVIIEQHYAATPRELQLFPESATSEDSEPSQEHGISDHVTRPQPSKDAWQNRSRDAPTVAARESSLNRKIGYKVTLFVLTVFSEMGKSLYSVL

SEQ ID NO: 192761 - protein, 69 aa, Oryza sativa
  Clone ID: PAT_MRT4530_88962C.1.pep
MFFPDADDESDDSDFIDALINPSDPTFPNLTPVAAAVAMASAVGGREWEGGHALVAQPSSLADPLGQPE

SEQ ID NO: 192762 - protein, 203 aa, Oryza sativa
  Clone ID: PAT_MRT4530_88963C.1.pep
MGLVSCFLGDPSTVPEQQYVTVGNYTAYPYSRGHIHITGPEIDDQLDFDVGFLSDEHDIDLKKQVWAYKKAREIMRRTKMYRGEVAAGHPTWPEGSKAASSDLTEALSDVKDIEYSAEDDKAIEQWIRNNVGTTWHSMATCRMAPREQNGVVDERLNVWGTRGLKLADLSIAPENVGANTNNTAIVIGEKAADIIIKDLGLAQ

SEQ ID NO: 192763 - protein, 191 aa, Oryza sativa
  Clone ID: PAT_MRT4530_88964C.1.pep
MEGLVVISQQRNHHNQHSGGRGKMTGPHFSSPPFSHGFRGMNCRSFHSGVCAGLLPSPPPPPARTYSSPEPKTPKQQQQLQRRGGKRSRPISISPSTSPPSRPELWAGPAFSNSPPPSSLPIPKFSLRQNRSISLELPLFERSDEVEVKPHAKSAPSSPVGGSGFDFFNDNETAVATENLRRILHLDISDH

SEQ ID NO: 192764 - protein, 55 aa, Oryza sativa
  Clone ID: PAT_MRT4530_88965C.1.pep
CVLFLIFLGFLFFFFFFFKKKAIIFIKENPQVPLPVNCSNLNECTAYFFFTLFHK

SEQ ID NO: 192765 - protein, 50 aa, Oryza sativa
  Clone ID: PAT_MRT4530_88966C.1.pep
FNEEGVIVNCLHTCMPYIMAHLKKSGCALYYGMAGVLEIILRLFDFMKLY

SEQ ID NO: 192766 - protein, 218 aa, Oryza sativa
  Clone ID: PAT_MRT4530_88967C.1.pep
MSFLEQATERKAPPPARLGSITKLTAASSSFANLFSTFLGPVSSPEPRPRRSFDGGATGVGLGIVAAMSHACLTTEAEPIAIGAAARRRAREEAELSESYTCVITHVAGVDGASGSVRKRVYFGFGDGGGGWLVEADEEPAPAADFLSRCFLCDKRLDGLDIYMYRGEKAFCSSECRCHQMLMDDHADNCGSEALKANDYSASPHSAPLPFSLSVAAA

SEQ ID NO: 192767 - protein, 108 aa, Oryza sativa
  unsure (1)..(108): unsure at all Xaa locations
  Clone ID: PAT_MRT4530_88968C.1.pep
MQLNPKARTRRNKTKAKGWRCAEIVLNVTLSLRGNHHEAYXLNPMTYTKSYCRNRLYRLAPSDSNSADPXVADLDCSRFLLCFHNTLXLRFRLDPIFISDADITKFGR

SEQ ID NO: 192768 - protein, 78 aa, Oryza sativa
  Clone ID: PAT_MRT4530_88969C.1.pep
SKMPLTFPTRVRHSKLDVSLPRRFGSIVSDSPFGDSAIDSDSRTGSCLFGSVLPGSELTGRARCSTSKDLIHTGYTRK

SEQ ID NO: 192769 - protein, 1118 aa, Oryza sativa
  Clone ID: PAT_MRT4530_8896C.1.pep
MALFRKFFYRKPPDGLLEITERVYVFDSCFTTDVFNDDKYQDYIGDIVAQLQCHFADASFMVFNFREGESQSLLANILSSYEMVVMDYPRQYEGCPLVTIEMIHHFLRSGESWLSLSQQNVLIMHCERGGWAVLAFMLAGLLLYRKQYIGEQRTLEMIYRQAPRELIQLLSPLNPIPSQIRYLHYISRRNVSAVWPPGDRALTLDCVILRNIPGFNGEGGCRPIFRIYGKDPLLATSNTPKVLFSTPKRSKYVRLYKKVDCELIKIDIHCHIQGDVVLECISLDADQQREEMIFRVMFNTAFIRSNILMLNRDEIDILWDAKDRFPKEFRAEVLFSEMDSVNQLDSMEVGGIGEKEGLPVEAFAKVQEMFSNVDWLDPTADAAALLFQQLTSSENIQLRKGLLSPNKKDFHLSSISPTKKQSDNVEDKLSNAELSTIYVHKQENNDVQGLIPQKQATIPDEKSGSSVIHEKMISLVHEEITQVVDINTGCLSSLDMTVPSTMNSSRPVLIDQNSKLDDQFGSLQSSSPTMIMSQQFPVSRSSSVLSSDFSPRLLSACPRFHSAPSALGITALLEDHAAFGDTKNSVKVSSAVVKIPSKQSSQQHPITVTPVVTKCTPSPPPLLPPLAPVVPVPSDDQMISQEKDMSQQAQKHPGPMSRSLQSGQAASRRSNLKPLHWVKVTRAMQGSLWEESQKTDEASKPPVFDMSELEHLFSAVLPSSDGKRSDKSGSRASGSKPEKIHLIYATEDFCFIHDGTIDLRRANNCGIMLTKVKMPLPDLMSAILTLDDTILDADQVENLIKFTPTKEEAELLKGYKGDKQVLGECEQFFMELMKLPRVDSKLRVFLFKIQFPSQVSDLKRSLNIVNSSAEEIRGSAKLKRIMQTILSLGNALNQGTARGSAVGFRLDSLLKLSDTRARNNKMTLMHYLSKVLSEKLPELLDFPKDLASLELAAKVQLKSLAEEMQAINKGLEKVEQELTTSENDGPVSEIFRKTLKDFLSGAEAEVRSLTSLYSNVGRNADALALYFGEDPARCPFEQVVITLQNFVRLFVRSHDENCKQLDLEKKKALKEAEAEKTKKEPENAQKTKEPGNDKAKHNNSIKELDISLQSPAQTASAK

SEQ ID NO: 192770 - protein, 49 aa, Oryza sativa
  Clone ID: PAT_MRT4530_88970C.1.pep
ISNFLLNGGLKAMEVLAPSRMLGTGLNLAGSSGYATGEPTTEAQRDRSF

SEQ ID NO: 192771 - protein, 128 aa, Oryza sativa
  Clone ID: PAT_MRT4530_88971C.1.pep
MRGGVKLVGGGGGGVAATSSSAAAGGGGGHPGMWRTPTPYLFLGFAVMMGLIAVALLVLVCTRRKNHGDAGSSASAAASVKVLVPLDREPKVVVIMAGDTAPSFLASAKPLSSFVLPPPPPPAAAGEP

SEQ ID NO: 192772 - protein, 111 aa, Oryza sativa
  Clone ID: PAT_MRT4530_88972C.1.pep
MGAADPAETAAARGPSPPSPFGSPPPPLPPLGDPAEGRGVFSRRPRGQRPEGRVASAAVRRHGGGGSGVGDRSGRRIQRRERATTAAVTAAVFQRLDPSPATARATATDLG

SEQ ID NO: 192773 - protein, 48 aa, Oryza sativa
  Clone ID: PAT_MRT4530_88973C.1.pep
VKNDYQSWRKPSCCIVSRCPLTCKQYCLGNNILTTNLMGKNESLFEGV

SEQ ID NO: 192774 - protein, 116 aa, Oryza sativa
  Clone ID: PAT_MRT4530_88974C.1.pep
AGQTPLRAGSKRRVVGGAPGPVPGVRGPRRVCGPLSKLTRVKKIPPNVVVPRRRWGPKKILAFPLGFFFRDFLCSPCFFYLWIFFRVLFLPKKKKKKKKKKKKKKKKKKKKKNPKK

SEQ ID NO: 192775 - protein, 114 aa, Oryza sativa
  Clone ID: PAT_MRT4530_88975C.1.pep
MSPHAASQLPSRRSGGGGRKGKGGRLTGGGSGDDGGGDGGARRRGNGGAAARERRRGSTGTVARWHESGGAVEREEGRKGEIGGGALASSRSRRVRVSGVGGCVARGRAARRAG

SEQ ID NO: 192776 - protein, 158 aa, Oryza sativa
  Clone ID: PAT_MRT4530_88976C.1.pep
LSHPSGGGGRKGKGGRLTGGGSGDDGGGDGGARRRGSGDTAARERRRGNGGAAARERRRGSTGTVARWHESGGAVEREEGRKGEIGVGTFSRVVGLWGAWVLPVLWWLRVVRSSWGLCGGVARFARRGGALASSRSRRVRVSGVGGCVARGRAARRAG

SEQ ID NO: 192777 - protein, 139 aa, Oryza sativa
  Clone ID: PAT_MRT4530_88977C.1.pep
MHRTRGKEVSVEQAKAVTVEEQRLESAWLQAVEKHAPGILNQMRPERNQVVPRISGEQYHRMPETDTVFPSRQVDKELSNGLKSLNIGSHGLRQNGQMENGYAISPSLLHSNNHLANCDNESVVSEPGAPGCHGLFPCW

SEQ ID NO: 192778 - protein, 268 aa, Oryza sativa
  Clone ID: PAT_MRT4530_88978C.1.pep
MATAARLLPKIQSPASPAVAEARRRRPSSLRLGVTSGPARTLKQKLVAKSAVSVVEGENAFDGVKQDTRPIIVIDNYDSFTYNLCQYMGEVGANFEVYRNDDITVEEIKKLVNILVTCTPQDSGISLQTVQDLGPSTPLFGVCMGLQCIGEAFGGKVVRSPYGVVHGKGSLVHYEEKLDGTLFSGLPNPFQAGRYHSLVIEKDSFPHDALEITAWTDDGLIMAARHRKYKHIQGVQFHPESIITTEGRLMVKNFIKIIEGYEALNCLP

SEQ ID NO: 192779 - protein, 61 aa, Oryza sativa
  Clone ID: PAT_MRT4530_88979C.1.pep
GYEPNDKTKVQKVSMTTISKRIQMAVAQPSTKVQMFMFLDKYTSTDVPAPRSLCMSSSACV

SEQ ID NO: 192780 - protein, 812 aa, Oryza sativa
  Clone ID: PAT_MRT4530_8897C.1.pep
MDGDARARSGDGAGAGPGASGATTSYMSIDGEENGGAGGAKVWVLVLLFSLIVLMLLPSAVRRGGPWGGGGGGGGGGGGYQRGRGGGISLKSGWDVVNLFLVAFAILCGLLGRAGDGESSSGSASTAAAAGAASEGGRREHQVSPSLAAAPAAEAVGEEPSTAEVWASLNTSAAASYGGNNHYGSTGIRRLKSSSSYPELRLDSDGVWGLTSPEAAWRFYDDAELYRTRRPERSWDVDAPQKRTTTTPEVKTIPVDTYEVRRKSLPPKEERRRRRGSIERLPSMAEIAEEERPHPQPQQPVETVTPTPPPLARSRRWNPEMLEVVLEQESRVEETTMPPPPPPLTRSRRWNSERLDAVLDQVARVDETAMPPPLTRSRRWNSERLDLDAVLDQVARVEEETVMPTQTLARSRTWNPEMLDAALEQQQDTLMPPPTLTRSRRWNSERLDAVLEEMRVEEVAPAATPPPPARPRRRSRSVESLPRTEELEAEIVVEEIKYPLPSSSPAMFPPGTPPPPPPLPPATAPRSKKKRSGSVGGAKDLASAIATFYQKKRKSIGIKSKKKHHHNHHHHHHLSDGHYSSPSSDASASPDSTVRTTNPAPAPPRRPPPPPPPPPAAIFYNLFKKGGSKSRRIHSVAPPQPPPPPPPTTRRSRKPPQPPSRPAPPPPPPPQQQPPFYPRRAVVYYTYPLPPPSPPLPPPPPPPPPPMSEGEEEAPPSVTASPAPAYCASPDVNAKADKFIERFRAGLTLEKINSYREKWQRQIQDDSSSAMAVAEEEGEFMVIGSLFDDDDEEDIISLPETPATATAVAVGF

SEQ ID NO: 192781 - protein, 54 aa, Oryza sativa
  Clone ID: PAT_MRT4530_88980C.1.pep
VPPLVPIFARGLKGAKAASRSRCREHDARRYQLVTSFSMRHALSPCNRLTGEVA

SEQ ID NO: 192782 - protein, 157 aa, Oryza sativa
  Clone ID: PAT_MRT4530_88981C.1.pep
PPGCSGGPRHPAFCSWTGVSCVLGRVVALDLSNRSLSRTSLRGGETVAGSARLPSLRRLDLSANGLPGAFPAAGFPAIEVVLRFSANAFSGNVPAGFGQCKLLNDLFLDGNGLTGSLPKDLLQSLNLASNQLNGTLPLSLSTCPMLRVVSVRNNSLS

SEQ ID NO: 192783 - protein, 184 aa, Oryza sativa
  Clone ID: PAT_MRT4530_88982C.1.pep
MGDNASASASVLAPPVGAGEGDAPSFSYLAALGNCPLVAAVLAGAIAQFIKVLTTWYKENRWDAKQLVGSGGMPSSHSATVVALAVAVGLQEGFGSSLFATAAIFASVVMYDAFGVRLHAGKQAEVLNQIVYELPSEHPLAETRPLRELLGHTPAQVFAGGVLGFAVATFTGMIAGLGNTGSLP

SEQ ID NO: 192784 - protein, 1164 aa, Oryza sativa
  Clone ID: PAT_MRT4530_88983C.1.pep
MLLSLYARLSAVPDALALLRSTPRPSVVSYNTVLSALSRAPRHAPEGLRLFRRLHASGLRPTAPSLCALLRTAGELRDRRAGAAAHSQAATLGFLASDIVPTALLQMYSQCGAPRDANQVFDEMATRDGVAWNCVMHCNVRYGYLDRALGQFCRMVRGGLPPTESTLSSVLSGCGRAGDCLRGRVLHGWVVKLEELDPDMPLQNALLDMYSSCGDLDTALRVFERIETPDLVSWNTLIAGFSGVGDGCSAVHAFVQLKAVQFDERVVPDEYTLAAVVSASATLPAMFGGKPLHAEVIKAGLENSVFVGNTLLNMYFTNDDPHSARILFDSITQEDVIMWTEMVAGHSSLGEGELALSHCGLVEKGKFYWFCMMTDGIVPGFKHYTSMALEQDPDDISTHILLSNLYASLGKWDFVAEIRKRMRGLMADKEPGLSWVEMKNVEMSLLSHFCLCLQRKAGSCCRCIRFLHVFVFVLHIHGGHSQMCDPADLASLLAFSDGLDRMGAGLVGWGPNDTSCCSWTGISCDLGRVVELDLSNRSLSRNSFRGVAVAQLGRLPCLRRLDLSTNGLVGAFPASGFPAIEVVNVSSNGFTGPHPAFPGAPNLTVLDITGNAFSGGINVTALCASPVKVLRFSANAFSGDVPAGFGQCKLLNDLFLDGNGLTGSLPKDLYTIPELRWLSLQENQLSGSLDKALGNLSKLTLIDLSYNMFNGNIPDVFGKLRSLESLNLASNQLNGTLPLSLSSCPMLRVVSLRNNSLSGEITIDCRLLTRLNNFDAGTNTLRGAIPPRLASCTELRTLNLARNKLQGELPESFKNLTSLSYLSLTGNGFTNLSSALQVLQHLPNLTSLVLTNNFRGGETMPMDGIEGFKRMQVLVLANCALLGTVPPWLQSLKSLSVLDISWNNLHGEIPPWLGNLDSLFYIDLSNNSFSGELPATFTQMKSLISSNGSSGQASTGDLPLSFVKKNSTSTGKGLQYNQLSSFPSSLILSNNKLVGSILPSFGRLVKLHVLDLGFNNFSGPIPDELSNMSSLEVLDLAHNDLSGSIPSSLTKLNFLSKFDVSYNNLSGDVPAGGQFSTFTEEEFAGNPALCRKFRDAEKTKMEQAREWETGEYEQGQRHLMGGPGGVGDAHAAGVGQPEPVDEVGWWGADGSAISCPWKTAVCNQ

SEQ ID NO: 192785 - protein, 719 aa, Oryza sativa
  Clone ID: PAT_MRT4530_88984C.1.pep
MPPDWSRLGLEEALAAAALLLRSCSPRRAVLRRARAVHALLVVSSTPSSPALTTFLANQLLSLYARLSAVPDALALLRSTPRPSVVSYNTVLSALSRAPRHAPEGLRLFRRLHASGLRPTAPSLCALLRTAGELRDRRAGAAAHSQAATLGFLASDIVPTALLQMYSQCGAPRDANQVFDEMATRDGVAWNCVMHCNVRYGYLDRALGQFCQMVRGGLPPTESTLSSVLSGCGRAGDCLRGRVLHGWVVKLEELDPDMPLQNALLDMYSSCGDLDTALRVFERIETPDLVSWNTLIAGFSGVGDGCSAMHAFVQLKAVQFDERVVPDEYTLAAVVSASATLPAMFGGKPLHAEVIKAGLENSVFVGNTLLNMYFTNDDPHSARILFDSITQKDVIMWTEMVAGHSSLGEGELALMYFVSMLQEGYKVDSFSLSSALNSTTELAGLKQGEMLHAQVVKSGYEGNICASGSLVDMYAKNGALPGAYLVFRNIQRPDLKCWNSIIGGYGNHGNSEMAFKLFGEMIRDGLQPDHVTYISILSACSHCGLVEKGKFYWFCMMTDGIVPGFKHYTSMVSLLGRAGLLDEAVDLMMKSPFAKKCPELWRILLSSCITFRNLSIGVHAAEQALEQDPDDISTHILLSNLYASLGKWDFVAEIRKRMRGLMADKEPGLSWVEMKNVVHVFSADDECHSHIDDCHSELLRLKGNMELLDTCENEFMSSG

SEQ ID NO: 192786 - protein, 1012 aa, Oryza sativa
  Clone ID: PAT_MRT4530_88985C.1.pep
MRGYYCFFHFLVVSVLLHVHGGRSESQTCDPTDLAALLAFSDGLDTKAAGMVGWGPGDAACCSWTGVSCDLGRVVALDLSNRSLSRNSLRGGEAVARLGRLPSLRRLDLSANGLAGAFPAGGFPAIEVVNVSSNGFTGPHPAFPGAPNLTVLDITGNAFSGGINVTALCASPVKVLRFSANAFSGDVPAGFGQCKLLNDLFLDGNGLTGSLPKDLYMMPALRKLSLQENKLSGSLDDDLGNLTEITQIDLSYNMFNGNIPDVFGKLRSLESLNLASNQLNGTLPLSLSSCPMLRVVSLRNNSLSGEITIDCRLLTRLNNFDAGTNKLRGAIPPRLASCTELRTLNLARNKLQGELPESFKNLTSLSYLSLTGNGFTNLSSALQVLQHLPNLTSLVLTNNFRGGETMPMDGIEGFKRMQVLVLANCALLGTVPPWLQSLKSLSVLDISWNNLHGEIPPWLGNLDSLFYIDLSNNSFSGELPATFTQMKSLISSNGSSGQASTGDLPLFVKKNSTSTGKGLQYNQLSSFPSSLILSNNKLVGPILPAFGRLVKLHVLDLGFNNFSGPIPDELSNMSSLEILDLAHNDLSGSIPSSLTKLNFLSKFDVSYNNLSGDIPAGGQFSTFTSEDFAGNHALHFPRNSSSTKNSPDTEAPHRKKNKATLVALGLGTAVGVIFVLCIASVVISRIIHSRMQEHNPKAVANADDCSESPNSSLVLLFQNNKDLGIEDILKSTNNFDQAYIVGCGGFGLVYKSTLPDGRRVAIKRLSGDYSQIEREFQAEVETLSRAQHDNLVLLEGYCKIGNDRLLIYAYMENGSLDYWLHERADGGALLDWQKRLRIAQGSARGLAYLHLSCEPHILHRDIKSSNILLDENFEAHLADFGLARLICAYETHVTTDVVGTLGYIPPEYGQSPVATYKGDVYSFGIVLLELLTGRRPVDMCRPKGSRDVVSWVLQMKKEDRETEVFDPTIYDKENESQLIRILEIALLCVTAAPKSRPTSQQLVEWLDHIAEG

SEQ ID NO: 192787 - protein, 302 aa, Oryza sativa
  Clone ID: PAT_MRT4530_88986C.1.pep
MALARVSPPAFSSPFLIHSLLRPFSSPSSVLRPRVTRVPHHRGFAIAAALSQASPLPSADGDGAVMEAPPRASSRRAWMPACLYYTQGKCSMLNDTLHFEKFNHNLSTDLPVNYSAADKVKSQKLDYFLVLDLEGKVEILEFPVVMIDAQSMEFVDSFHRFVHPTVMSEQRIREYIEGKYGKFGVDRVWHDTAIPFMEVLQEFEDWIEHHKFWKKEQGGALNSAAFITCGNWDLKTKATGMMTMMRELQMPIVGSHHLGIDDAKNIARVVQRMLADGAVMQITAKRQSATGDVKFLFKNRIR

SEQ ID NO: 192788 - protein, 690 aa, Oryza sativa
  Clone ID: PAT_MRT4530_88987C.1.pep
MRKPLVLAVALSAILLLAAAAADVDVTVRDSDLESEETMWDLYERWRRVYASSSQDLPSSDMMKSRFEAFKANARQVNEFNKKEGMSYTLGLNKFSDMSYEEFAAKYTGGMPGSIADDRSSAGAVSCKLREKNVPLTWDWRDSRAVTPVKDQGPCGSCWAFSVVGAVESINKIRTGILLTLSEQQVLDCSGAGDCVFGYPKDAFNHIVNTGVSLDSRGKPPYYPPYEAQKKQCRFDLEKPPFVKIDGICFAQSGDETALKLAVLSQPVSVIIQISDRFHSYHGGVFDGPCGTETKDNHVVLVVGYGVTTDNIKYWIVKNSWGEGWGLWAVLLVATAAAQDVDLTVTDKDLETEESMWNLYKWWCSVYYASSSSRDLADVESRFEAFKANARHVNEFNKKEGMTYRLGLNQFSDMTFEEFAGKFTGGRTGSIAGDLRDGAVTYCKPPAVGYVPPSWNWTKYGVVTPVKNQLTCGSCWAFSVAAAVESINMIRTGNLLTLSEQQILDCSGAGDCNGGYPYDAFDYVIKTGISLDNRGNPPYYPPYENQKQKCRFDPRKPPFVKIDGECLVPSGNETALKLAVLSQPVSVVITISDEFRSYRGGVFRGPCGSNPNVDNHVVLVVGYGVTTDNIKYWIIKNSWGKTWGEYGYIRMERDILNKNGICGITTWAICPLKNKPRLASADAAAAVAAY

SEQ ID NO: 192789 - protein, 49 aa, Oryza sativa
  unsure (1)..(49): unsure at all Xaa locations
  Clone ID: PAT_MRT4530_88988C.1.pep
PPPPYGYNSPIPPTNKYLPPPYYFNSPXPQYQHSPPANSYVXPPLAHQY

SEQ ID NO: 192790 - protein, 78 aa, Oryza sativa
  Clone ID: PAT_MRT4530_88989C.1.pep
VTDWGIALTENRNLARTAPTGVLKGDWQTCPRLQKEGKNHHKLKPQGSTPGGAAPPPPWEQGWLQKPAKGGAGQPCPW

SEQ ID NO: 192791 - protein, 369 aa, Oryza sativa
  unsure (1)..(369): unsure at all Xaa locations
  Clone ID: PAT_MRT4530_8898C.1.pep
EKRVADVIKGEGRRRQAGPTGQRDKGAGPPWTGTTKAVHRXVHGNRWPGSAQTDRAARXAARLGHXHGTKPAXPNDGARRRGHPRRRPATARGGEEGCSPRAATARLQRGSRRRAPRGGNGGPWFPEARXAVAGVRLGVADPREETAQSGVDRGGEATQMEMTNTAAISGRRWCTARGGERGGGLGCAVGVVLERWRGGNKRRPDFPLRWRSWRWRRLGAATAVAAGNGDRSSPECGSAWVRRGESEGEYAGLGKNGETDEGSTGMLFXAREGGIEAGRGGIGRRSGAPTWGGEGINXPIFAGRVGXKGGGCGGDRFHALVGRGGAREPRRRGAKPAAMAAVGAXGRLGKKMTGGASGPTCRGEREGKT

SEQ ID NO: 192792 - protein, 239 aa, Oryza sativa
  Clone ID: PAT_MRT4530_88990C.1.pep
MWYNWLLLYTEWLRRRCYCFVRSCCYKRDYPVGTEEPAQEQRRLVQIRSKTLLSEVLRGIGANEARYSCRAVADGYVGFAEATVYGARGVGEPFVVRAQGISAIRPCDAEESAAHALISVIKKECSVEFDDTNWFDMNRYHVETERLKRALGRARKKCNTLAKKARLLEIGWDRALDSLGSVNQICDDICSFVLGGPDADDLSHREVGVFYDVHRLGEYAESFVDEGLANLTSVAARYI

SEQ ID NO: 192793 - protein, 57 aa, Oryza sativa
  Clone ID: PAT_MRT4530_88991C.1.pep
MVGHRISRSHAGVNLRAAEQDGLRLRGVLPVYHYQKNITVEDYARLAQLYINEITSL

SEQ ID NO: 192794 - protein, 408 aa, Oryza sativa
  Clone ID: PAT_MRT4530_88992C.1.pep
MLAMGSEEWELYPSSFIGAQVIDYGHVSGDMDDDQSGDLAVSMDAVLPDDLLEKVLSFLPVASVIRSGSVCKRWHEIVHARRQTWSKMVPQKPWYFMFTCSEEAVSGFTYDPSLRKWYGFDFPCIEKTTWSISSSSGLVCLMDSEDRSRIIVCNPITKDWKRLVDAPGGKSADYSALAISVTRTSHQYMVAVARCNQVPSEYYQWEFTIHLYESEINTWVSPFTELLIGWRGGDECVICDGVLYYLVYSTGARPPTRQHRHCLLMYDLSTRPTHTSLMSMAIPVPCPLTCGRLMNLNERLVLVGGIGKQDRPGIIKGIGIWELRNKEWHEVARMPHKFFQGFGEFDDVFASCGADDLIYIQSYGSPALLTFELNQKLWKWSLKSPVTKRFPLQLFTGFSFEPRLDIAS

SEQ ID NO: 192795 - protein, 100 aa, Oryza sativa
  Clone ID: PAT_MRT4530_88993C.1.pep
FFFFFFYLPRVCIRPNPFFFEIDFEKELLILNFSRNPSIQWLCTCTALYSNPFRTLVPVRQPSPAHSVCSNISNPSCICIRSPISPMQHASTGTRGVCTP

SEQ ID NO: 192796 - protein, 57 aa, Oryza sativa
  Clone ID: PAT_MRT4530_88994C.1.pep
AIPPGQGSAKKCRVRIKTCIIWNAEQNNTEHHTDIYAEEELTDCATVRKHKKPCSTA

SEQ ID NO: 192797 - protein, 71 aa, Oryza sativa
  Clone ID: PAT_MRT4530_88995C.1.pep
IYKPHAVISKREIYTFQITLHHSTLHTFSHYNHIPGVKTLNNHITRSTHKTCIHNLSCASTSLFNKNYLHN

SEQ ID NO: 192798 - protein, 108 aa, Oryza sativa
  Clone ID: PAT_MRT4530_88996C.1.pep
MEHGSVTDSTASTFSIVEEDHTLANSVRFVLNQDPRVAFCGYSIPHPADNKVNIRVQTTGDPAKDVLKDSLQDLMVMCQHVRGTFDTAVTQFRQNNPTGMNIDQNKKK

SEQ ID NO: 192799 - protein, 212 aa, Oryza sativa
  unsure (1)..(212): unsure at all Xaa locations
  Clone ID: PAT_MRT4530_88997C.1.pep
MGRRPILSSLPFPLGRPKAEAQLSRPPPXLSWGRRQVGPTYRARLPSPXAPTRPATTATPRSRVFRGTSATPARAPVSPAPTPSLSRPRPRSXRPGFDFRIPPLSPPPLXPTSAGDSRLSRPRPDPSLYLSTTATPXLFFPSSPSPPVFSNALAPSPSSPSLSPPLRSPLATARCRAEPRRRRHRVRRRAGHSVHPFFVGIHRRNSLLAVRR

SEQ ID NO: 192800 - protein, 87 aa, Oryza sativa
  Clone ID: PAT_MRT4530_88998C.1.pep
VGFAGWSLTPLPTSLHHGGVAPRHRPLRPLQRRQRARNDKRALKEISALFTTWNTTMAYKAAGSRLLARNGQSIQSKHWLNCHAISF

SEQ ID NO: 192801 - protein, 249 aa, Oryza sativa
  Clone ID: PAT_MRT4530_88999C.1.pep
MARYDRAITVFSPDGHLFQVEYALEAVRKGNAAVGVRGSDTVVLGVEKKSTPKLQDSRSVRKIASLDTHIALACAGLKADARVLINRARVECQSHRLTVEDAVTVEYITRYIAGLQQKYTQSGGVRPFGLSTLIVGFDPYTDKPALYQTDPSGTFSAWKANATGRNSNSMREFLEKNYKETSGKETIKLAIRALLEVVESGGKNIEIAVMTQKDGLRQLEEAEIDEYVAEIEAEKAAAEAAKKGAPKET

SEQ ID NO: 192802 - protein, 96 aa, Oryza sativa
  Clone ID: PAT_MRT4530_8899C.1.pep
KSPPFPFSKRGENQLQILQNNLLQSSQFQGKRGGPKRELISNPVLCNLAGCQNNSCFPPKKNLPNNPKLPEKTFTFLAKIWVTSPKLRVKGGKSPH

SEQ ID NO: 192803 - protein, 109 aa, Oryza sativa
  Clone ID: PAT_MRT4530_889C.1.pep
MAQKIVIKVHMGSDKCRRKAMSLVAATGGVVSVELAGDDRSKVVVVGEVDSVKLTSLLRRKVGPAELVEVGDAKPAKKEEKKEEKKPETVPPYYYYYPYHHYSPYGYIM

SEQ ID NO: 192804 - protein, 220 aa, Oryza sativa
  unsure (1)..(220): unsure at all Xaa locations
  Clone ID: PAT_MRT4530_88C.1.pep
GSVECAPTPGQVVVPLSSPLGREYELLHHKPAGIVLNHWTERSGIHPKAEIDKAAEFRQRHAIATGNDRTKTYXAPSSSSPSXGSRHRDPPKLHLPPLPCSRSCGSXAFTRIRGSLGLDGGGGDGARRTARRHEGGSAAARERPDGDGGARRRRTTRRLRGDGAAASKVAARRQDNGGAWTRGRGRGRGRWSGENGEGGHRRLCPSISVPLTLPAPLSLP

SEQ ID NO: 192805 - protein, 43 aa, Oryza sativa
  unsure (1)..(43): unsure at all Xaa locations
  Clone ID: PAT_MRT4530_89000C.1.pep
FRLCVVFVPIRTSVMXRNMVXCELVYYFKNXAFVLAKKKKXNW

SEQ ID NO: 192806 - protein, 104 aa, Oryza sativa
  unsure (1)..(104): unsure at all Xaa locations
  Clone ID: PAT_MRT4530_89001C.1.pep
KLLXLSKAALSGSPIDGETGRGXVRMRRRGRRRRRRRSAAAISDCCPIAGGHLPRFPPSRSPPPPQPPSLVNPTAPTRMRSSAVRWLGGGGGGEGKPTRXXHVR

SEQ ID NO: 192807 - protein, 70 aa, Oryza sativa
  Clone ID: PAT_MRT4530_89002C.1.pep
SVREAGGRRAERQWAGGRPAWQQSGGGWSGDGQRWPSAAVGGAAMGNGERAQCVKRRRAAGGAMIGGGGW

SEQ ID NO: 192808 - protein, 146 aa, Oryza sativa
  unsure (1)..(146): unsure at all Xaa locations
  Clone ID: PAT_MRT4530_89003C.1.pep
KTTRGERGRQKKXXXNRGXXXAXHXEGXTEHEATTTXEDHHQEQXXNHXDQQRQPRRGGGTNPQPXSQAXXKRQSEAPDTEDEQARRGRXRQXADNDRSRSRSEAPNHKXRSNXRESXADDAGHPKAEXXRGRRRGDKERAEGSQP

SEQ ID NO: 192809 - protein, 71 aa, Oryza sativa
  Clone ID: PAT_MRT4530_89004C.1.pep
FGYKYGYFLPDTDMNMISGFSSDTNSNLDIQKNCFHIRVRSYSILILIRDNPYLFPYSSYPYSFLYPVKKI

SEQ ID NO: 192810 - protein, 109 aa, Oryza sativa
  Clone ID: PAT_MRT4530_89005C.1.pep
RTPAPARSAPAPLPEVIPSRCSAPAPMAAMAMRTLPRKGTASPKTTTPTGKGRASTLEEDIRFLAELAKRHADEARYYRIMALSAVSASGAVFFTLLALRNHVNHLSEC

SEQ ID NO: 192811 - protein, 108 aa, Oryza sativa
  Clone ID: PAT_MRT4530_89006C.1.pep
MAGLVVVATYPNPRSVTVAPTQPDRSAKKVVETASAMPTREGGNGIQDHSEGCTRLHQQHAPLVQVGHLCNLSYGSFSWHIMAALRVLATYMFVLSKWDIYIVLVHMY

SEQ ID NO: 192812 - protein, 359 aa, Oryza sativa
  Clone ID: PAT_MRT4530_89007C.1.pep
MATTQSNDHGAGLLDAQLELYANTLAVVKSMALKTAMDLGIADAIHHHGGAATLPQILTRVTLHPSKIPCLRRLMRVLTLTGVFAVEKPTAADEPPVYALTPVSRLLVSSGNLQQAPIMSLLLHPSCITPFLRIGDWLQRELPGSSIFEHTHGRSLWEVADGDAAFSKVFNDAMVSDSRLVMDVVVREHGDVFRRISSLVDVAGGHGTAAQAIARAFPEVKCSVMDLAHVVAKAPGGTGVEYIAGDMFESIPPANAVFLKWIMHDWGDDECVKVLKNAKKAIPSKDAGGKVIIIDVVVRAGSPDQKHIELQALFGAYMMLINGVERDEKEWKKVFIEAGFSGYKIIPVLGFRSIIEVYP

SEQ ID NO: 192813 - protein, 179 aa, Oryza sativa
  unsure (1)..(179): unsure at all Xaa locations
  Clone ID: PAT_MRT4530_89008C.1.pep
MSPSSKCPDSIMSLNPVFSIALGLRPCAGKRLGAPARRQQVVPPCVPSLRSSPRSSPYLPTSFNSAIPPPSYLLAARSLAGRRSRRXSSPPRADRGATGRRAAPPCARDAAAAAPPCPRPTPPRAVPWQLAPPPLLPAARWPRIAAATAGFWSGNRDRDWGFGSFIEPRVEWSSKEGLP

SEQ ID NO: 192814 - protein, 53 aa, Oryza sativa
  Clone ID: PAT_MRT4530_89009C.1.pep
LFFFFFFFFFFFFFFFFFFFFFFLEKGESFFLRPPNPGPGLTQDPPRGPDQIG

SEQ ID NO: 192815 - protein, 313 aa, Oryza sativa
  unsure (1)..(313): unsure at all Xaa locations
  Clone ID: PAT_MRT4530_8900C.1.pep
IILSGRGARGPGPREVGPTRQPLGPRWTGRTRLAAVGAVGPARQPHPRARAADGRAHLAAARARPKAASPARPTGAARPRPDGHRRRPSARRSSARESGEEGEMEGTVHGSPRDTRTAETTNGVEKRGGAARDDDDGGAPTVGERNGGADEVDGDAAMPREVAPSREEDRSDDGGEPERRKATARFGMPRATVLRQPADEAERRTGSAATRRSGWRCRRVGRRTGATSAANRRERGNRGKRGRETRGIAAGGGRGGRKAMTGGSHPSARVAGGPACQRRTRAGEADGPRGXRERGREKWAEPAQEGKGGGKKE

SEQ ID NO: 192816 - protein, 87 aa, Oryza sativa
  Clone ID: PAT_MRT4530_89010C.1.pep
GCRIRHEAALFPHRRRRRRRRRRRSEGECTCVRVNSQTRPLNGEGSDFLGDRGFIGLHWISIRGVASAFIHSNEEEGLCLIKIAHKE

SEQ ID NO: 192817 - protein, 48 aa, Oryza sativa
  Clone ID: PAT_MRT4530_89011C.1.pep
GVLFNNIPITYNANNLKTNTQFLETFYIDLTPIQYSHFFIPKRDNTRQ

SEQ ID NO: 192818 - protein, 88 aa, Oryza sativa
  Clone ID: PAT_MRT4530_89012C.1.pep
MAHATGGGGGRRPPILYVDAVSVDGSGWESGSGRGSGRQRASRGGERSAASGGGRGWEAERKTEMWHKGEERPSAARQSGGGRGEAAA

SEQ ID NO: 192819 - protein, 84 aa, Oryza sativa
  unsure (1)..(84): unsure at all Xaa locations
  Clone ID: PAT_MRT4530_89013C.1.pep
FFFFFFFFFFFFLKFKXILLXFVSLKLXXQPLNYKILVKSSSSKQALKRGTLGQKKIXGSQPKXPLCLGKFHQGFIHFXFFVQI

SEQ ID NO: 192820 - protein, 143 aa, Oryza sativa
  Clone ID: PAT_MRT4530_89014C.1.pep
MRFGTYEDSYPNLPPLLEVMQARNPGTHMAILDEAEFVEHVQVEFDTLLQRLETRPPVVRPDDVASVLRNFRACAAALLCRVSCGSAADVGASGLAHLPYMPTGDNVLNTPAWGLHVTPQIAARLQRPSHKIHMAGGTSSVPT

SEQ ID NO: 192821 - protein, 142 aa, Oryza sativa
  unsure (1)..(142): unsure at all Xaa locations
  Clone ID: PAT_MRT4530_89015C.1.pep
RPAAGEKAAGARGKRRAAPRRRPAAASTPAITTTAKVVFQDSSMAQFVAPTSMVXGRASSASASTCFVCCSDELRFDAPARAMAVHDALQLGQLYFVLPVSALHRPLSDQDMAALAVKAIAALGASATAASMDSSIYKCGSI

SEQ ID NO: 192822 - protein, 513 aa, Oryza sativa
  Clone ID: PAT_MRT4530_89016C.1.pep
MSGDMPIRLYYGDAPIQICDSGVDLTVYAFHDTSLNAPEHMGLNDVLGWLYNMFGVDPVHDKFVINAVWLVRGQHGWQWRVVEVASTGSWRKFVSKVREKGYSLAIVVQKTTCVDRSGESSHAVVEETPLEGGQAENVWRTEQGRGEEVVEGNTQGEVIVRGTNREANDSDDEEPDSPMRVDAAEENKAVVDQMEVENEEYLALVVEGEYTTLWDNETNIPDDWTTISMSRMKAEFVEHVHVESDTLLQRLEARPPVVRPDDVASILRNFRARAAALLRRVSCRSAADVVQTSGRRPSPPLPRRSSVDRSGLSSSRRGYEAAHTSHGRPSFQHTPAPEYTRGSAGSGVPTSSTAPPRPQVFQTPPYVHPSQGASGSAHFPYMPTGDNVLNTPAWGLHITPRAPEQGHTQHTYDEYSSASTHHGMPAYSPRTAFIEDFFSTDPPQGEVGMDYWHAAPQVTQLTQETKAGQGPDVTPQQAARDRHPPDNLTYPTEQIRRRKKGGPSKRAKGTDRP

SEQ ID NO: 192823 - protein, 768 aa, Oryza sativa
  unsure (1)..(768): unsure at all Xaa locations
  Clone ID: PAT_MRT4530_89017C.1.pep
MSRFFAGFSKGTYRTTGSRQNPIERLAFDTPPVERREFDRAHHPAPRGLSNRGRSTGPSTDPVEQWAFDRPAGEEAEEAPAGRKGLATPSSSEVKVKVGQMFHDKGHLQDAVKRWAFVQKREFRVKKALEMRFGTYEDSYHNLPPLLEVMQARNPGTHMAILDEVNEYGENVLRRAFWSFGCMIEAFRNCIPLLCVDGTFMTGKYRGTILTAIGVDADSHVVPVAFAFVESENTSSWLWFLRHIKMCVVENRPNYMDEKSKKGGIHRVWPAGNRELLFEIRLRDKSGVGIGTTDITLECTLWPEYPQYSWGSAVLAATYAGLCDACVRNNKQSSLPGCPLLLMLWAHERFDIGRPQLDSYANYGLREMYRSGVDDIDDRPTMGSLWTHREPQWVSGTTRRVYTQFVADFDQLTPDRVRWTPYTQHDVNDRAPHGLADLCTRDMQLWMTTCHLVVDVHVEPHNVHRVLKQLGMYQDFPPRDGRPLADSLHRYSRKGLGLSYELVIVTTVQPTVQEWEHAADNLALQTPPDDGSYYGAYLRWYRSVTRWRCFPPQGDSTVPHQAAITDTFAPQPRSAYNSMAEFVEHVHVESDTMLQRLEARPPVVRPDDVASILRNFRXTSGRRPSPPLPRQSSVDRSGPSSSCRGYEAAHTSHGRPSFQHTPAPEYTRGSAGSGVPTSSTAPPRPQXFIEDFFSTDPPQGEVGMDYWHAAPQVTQPTQETEAGQGPDVTPQQAARDRHPPDNLTYLTEQIRRRKKGGPSKRAKGTNRP

SEQ ID NO: 192824 - protein, 220 aa, Oryza sativa
  unsure (1)..(220): unsure at all Xaa locations
  Clone ID: PAT_MRT4530_89018C.1.pep
AFLPCSRCSPSGAAADGSCDSGRLGDGDHAGLGNADRGGGGXGDGGSSGGEGGGGGSGDGEDCGGGFSDGEERRRIQRRRRSSRGRSDGGVRGGGLGAAADLAMVRRRIRRWGGAAAACDEELTGEERRRRARRKSRGGGGSSDGRSGGGFSSCSCSPPAFPLALARRRLILLLFLWRWGGLWWQIRRSVDGDCKRHPSLPSLIPSTKQKIRIVPSYKPN

SEQ ID NO: 192825 - protein, 1565 aa, Oryza sativa
  unsure (1)..(1565): unsure at all Xaa locations
  Clone ID: PAT_MRT4530_89019C.1.pep
MSRDMPIRXLYYADALIQICDNGVDLTVYAFHDTSLNAPEHMGLNDVLGEKGYSLAIVVQKTTCVDRSGESSHAVVEETTLEGGQAENVWRTEQGRGEEVVEGNTQGEVIVRGTNREANDSDDEEPDSPMRVDATEENEAVVDQMEVENEEYLALVVEGEDTTLWDNETNIPDXWTTISMSRMKXWAFVQKREFRXKVSNRTTYDVKCIQGGCPWRVHGYKPQHDTLWVASRVEQHTCLLENTRLVHRNLTAAFVAQMVYSKVVRKTSLSPFTIRHDVEKEYGYEISYDKAWRAKQKALEMRFGTYEDSYHNLHPLLEVMQARNPGTHMAILDEVNEYGENVLRRAFWSFGCMIEAFRNCIPLLCVNGTFMTGKYRGTILTAIGVDADSHVVPVAFAFVESENTSSWLWFLRHIKMCVVENRPNVCVLHDRHAGLLSAIQKLQEDVTQSVPWPDLHSRWCMRHFGANFYRQFRSKRLMDLFKKLCKHNQQRKFDAIWDQLDRLTTTHMEDVRKKPIVARQEEPEGLEPIPNEAPSITRRRKRGRATKCFTEWVEFEPREKWSLLYDTDGSRYGVMTTNLAEVYNWVMKNTRPLPLVAILEGITRGTQKYLCKRYSMASLNLSKPSVKYSPVITQYMDEKSKKGGIHRVWPAGNRELLFEIRLRDKSGVGIGTTDITLECTLWPEYHACKCNCNKTYLLHRPCSHVLAASAKGGVDGNIFVSPYFRKESWEATWRGELRGWRALCDFIRPPPGQANWVPDSNLLVDTKGRRQSRRIKNLMDEAEVKDRSRRMADQYDGQLIDKEIDRNHRSRRLSTGTFCNVLKMRGPDQYWRIDPRWVSRLRAAGLLTFARLVEPSRARSERIHIDAALLSALVDRWRPETHTFHLTVGEMVPTLQDVSYLLGLLITGPAVGPTMVNAGWADDLLASFGGVLPVALEDLTDGHGPTKSWLNQFRQDVFPDDQEEWIVQRHLVAYLLWLFGWVMFTGTHADSVDKHFIHFAEQIAELPIAEIPQYSWGSAVLAATYAGLCDACVRNSKQSSLPGCPLLLMLWAHERFDIGRPQLDSYANYGLREMYRSGVDDIDDRPTMGSLWTHREPQWVSGTTRRVYTQFVADFDQLTPDRVRWTPYTQHDVNDRAPHGLADLCTRDMQLWMTTCHLVVDVHVEPHNVYRVLKQLGMYLDFPPRDGRPLADSLHRYSRKGLGLSYELVIVTTVQPTVQEWEHAADNLALQTPPDDGSYYGAYLHWYRSVTRWRCFPPQGDSTVPHQAAITDTFAPQPRSAYNSMAEFVEHVHVESDTLLQRLEARPPVVRLDDVASILRNFRARAAALLRRVSCRSAADVVQTSGRRPSPPLPRRSSMDRSGPSSSRRGYEAAHTSHGHPSFQHTPAPEYTRGSAGSGVPTSSTAPPRPQVFQTPPYVHPSQGASGSAHFPYMPTGDNVLNTPAWGLHITPRAPEQGHTQHTYDEYGSASTHHGMPAYSPRTTFIEDFFSTDPPQGEVGMDYWHAAPQVTQPTQETEAGQGPDVTPQQAARDRHPPDNLTYPTEQIRRRKKGGPSKRAKGTDRP

SEQ ID NO: 192826 - protein, 118 aa, Oryza sativa
  Clone ID: PAT_MRT4530_8901C.1.pep
MASLSMATTLPSLAGAAPAARKRSGVTYVEGMNAYSGLKALNKVTLLGVRKTADYSFAKVVAKLSPAGGKSRGGAFGAQCNAAGEIFRIAVIMNGLVLVGVAVGFVLLRVEAAVEESE

SEQ ID NO: 192827 - protein, 616 aa, Oryza sativa
  Clone ID: PAT_MRT4530_89020C.1.pep
MWLTNSSHLGRANGVTTPSYRARTARPREQQHTARAMATAAGSATATMQGSATTTTAAGGSATATADPVVGRAAAVDPAMGRTAAADSATGRSGGGMRGGGRGAAANPAMGTVAVCEEELAGEERRWRARRRSRGGGGSGDGAAADSAMGRSCGGLQRGARRGGAAAACEEEVEGRRRIRRWEGAAAAFPLALARRRLILLLFLQRWGGMWRQIWRSVDGDCKRRPSLPSLIPSTKQKIRIVPSYKPNMLPLRISPRAAAARVLVAGELLHLVSKMQPPVAKKVAARVDTMEIKSQIAKKLGAERSEHYFHSLKKFLGGQLGKEEFDKICVATMGRDNIKYHNFLIRSILSNAYLATAPPPPPPPSRQATTGNSQTSTVSVSNGAVANHGVMAGVMRGPALATREARFERPSPLGKSPLGHQGTGEFVSAGSKAPLEVVSVEDGEEVNQAGGSPVYAQSRSPIRAPLGVSFGDPKAQNSRPSIPHPSLICYKNGELPEAQRLLKLLENKLQAEGLSLTQECADVLNSGLNAYLSRLLKSCMGVAKSRGKRVMMNYPNVTTVAVINGVQYQRSTGSADYSYQASLLDLETAVVCNPQLLGGNSSRVRDKISAHLLNG

SEQ ID NO: 192828 - protein, 720 aa, Oryza sativa
  Clone ID: PAT_MRT4530_89021C.1.pep
MGVRQAGLKPRPPRPRCLFDLFEDHIASRRRESPHRRLRGQHGWHWRVVEVASTGSWRKFVSKVREKGYSLAILVQKTTCVDRSGESSHAVVEETPLEGGQAENVWRTEQGRGEEVVEGNTQGEVIVRGTNREANDSDDEEPDSPMRVDAAEENEAVVDQMEVENEEYIALVVEGEDTTLWDNETNIPDDWTTISMSRMKVNDGLDAYWCYDSKQVKVGQMFHDKGHLQDAVKRWAFVQKREFRVKVSNRTTYDVKCIQGGCPWRVHGYKPQHDTLWVASRVEQHTCLLENTHLVHRNLTAAFVAQMVYSKVVRKTSLSPFTIMHDVEKEYGSEISYDKAWRAKQKALEMWFGTYEDSYHNLPPLLEVKQPMVQEWEHAADNLALQTPPDDGSYYGAYLRWYRSVTRWRCFPPQRDSTVPHQAAITDTFAPQPRSAYNSMAEFVEHVHVESDTLLQRLEARPPVVRPDDVARVLRNFRARAAALLRRVSYRSAADVVQTSGRRPSPPLPRRSSVDRSGPSSSRRGYEAAHTSHDRPSFQLTPAPEYTRGSAGSGVPTSSTAPPRPQVFQTPPYVQPTQGASGSAHFPYMPTGDNVLNTPAWGLHITPRAPEQGHTQHTYDEYGSASTHHGMPAYSPRTAFIEDFFSTDPPHGEVGMDYWHAAPQVTQPTQETEAGQGPEVTPQQAARDRHPPDNLTYPTEQIRHRKKGGPNKRAKGTDRP

SEQ ID NO: 192829 - protein, 150 aa, Oryza sativa
  Clone ID: PAT_MRT4530_89022C.1.pep
MLAGEEAEEAPAGRKGLATPSSSEVKGVSGSAHFPYMPTGDNVLNTSAWGLHITPRAPEQGHTPHTYDEYGSASTHHGMPAYSPRTAFIEDFFSTDPPQGEVGMDYWHAAPQVTQPTQETEAGVSPVTYDLSPAGQISLTDINDDLEQQL

SEQ ID NO: 192830 - protein, 87 aa, Oryza sativa
  Clone ID: PAT_MRT4530_89023C.1.pep
SIGHFGKFESANMKNGNTSANDGPVQISVLLVASVLKQCSKKLPQKARGIYDVIRILNDVNGNSEAIKACVDALTLHRKYLVNIQEK

SEQ ID NO: 192831 - protein, 451 aa, Oryza sativa
  Clone ID: PAT_MRT4530_89024C.1.pep
MAPPSRPFYLVYVVIFVAVSLSATAATATAAAVLPRGALPTKSGYLPIPPAANASLYFAFYEATEPVTPLATTPLLVWLEGGPGCSGFLSNFLQIGPYLFAGGSLSPNPFAWNRRFGLLFIDSPLGTGFSVAPSPANIPTNQSVVADHVLAALQSFLSLEPSFRARPLYLTGESYAGKTIPAAGALIVATNPTLPEQKRINLRGVAIGNGMTHPVAEVTTHADIAYFMGLINAKQKRAAEAMQAEAVALTREERWREASAARARLMSWLENATGVVTLLDVEVQQSVAVMAAGLADFLSTAEVKAAVGARPDVAWEACSAAVGAAQEEDVMKSAKRDVEALLHRGASPTATPTPTRVLLYEGIRDVGNGPVCAEAWLRELEWDGLAAFQDAGRAVWRSGGGLAGYVQRHDALVHVAVYGAGHFVPYSQGRVAQEMIEDWVFRKGLFSAGTV

SEQ ID NO: 192832 - protein, 1210 aa, Oryza sativa
  unsure (1)..(1210): unsure at all Xaa locations
  Clone ID: PAT_MRT4530_89026C.1.pep
MSGDMPIRLYYGDAPIQICDSGVDLTVYAFHDTSLNAPEHMGLNDVLGWLYNMFGVDPVHDKFVISAVWPVRGQHGWQWRVVEVASTGSWRKFVSKVREKGYSLAIVVQKTTCVDRSGESSHAVVEETPLEGGQAENVWQTKQGRGEEVVEGNTQGEVIVRGTNREANDLDDEEPDSPMRVDAAKENEAVVDQMEVENEEYLALVVEGEDTTLWDNETNIPDDWTTISMSRMKVNDGLDAHWCYDSKQVKVGQMFHDKGHLQDAVKRWAFVQKREFRVKVSNRTTYDVKCIQGGCPWRVHGYKPQHDTLWVASRVEQHTCLLENTRLVHRNLTAAFVAQMVYSKVVRKTSLSPFTIMHDVEKEYGYEISYDKAWRAKQKALEMRFGTYEDSYHNLPPLLEVMQARNPGTHMAILDEVNEYGENVLRRAFWSFGCMIEAFRNCIPLLCVDGTFMTSKYRGTILTAIGVDADSHVVPIAFAFVESENTSSWLWFLRHIKIQFRSKRLMDLFKKLCKQNQQRKFDAIWDQLDRLTTTHMEEVRKKPIVARQEEPEGLEPIPNEAPSITRRRKRGRVTKCFTEWVEFEPREKWSLLYDTDGSRYGVMTTNLAEVYNWVMKNTRPLPLVAILEGITRGTQKYLCKRYSMASLNLSKPSVKYSPAITQYMDEKSKKGGIHRVWPAGNTELLFEIRLRDKSGVGIGTTDITLECTLWPEYHACKCNCNKPYLLHRPCSHVLAASAKGGVDGNIFVSPYFRKESWEATWRGELRGWRAVCDFTRPPPGQTNWVPDSNLLVDTKGHRQSRRIKNLMDEAGVKDRSRPDFDQLTPDRVRWTPYTQHDVNDRAPHGLADLCTRDMQLWMTTCHLVVDVHVEPHNVHRVLKQLGMYQDFPPRDGRPLADSLHRYSRKGLGLSYELVIVTTVQPTIQEWEHAADNLALQTPPDDGSYYGAYLRWYRSVTRWRCFPPQGDSTVPHQAAITDTFAPQPRSAYNSMXAADVVQTSGRRPSPPLPRRSSVDRSGPSSSRRGYEAAHTSHGRPSFQHTPAPEYTRGSAGSGVPTSSTAPPRPQXDEYGSASTHHGMPAYSPRTAFIEDFFSTDPPQGEVGMDYWHAAPQVTQPTQETEAERDPVELRQFDGYPVEQGQFDSPPVEQGQFDSPACRTGAVRQVLSNGSLPISSPVALWPFDRRPIELHPFDRDLLSRFSPVDHYFCDFP

SEQ ID NO: 192833 - protein, 395 aa, Oryza sativa
  Clone ID: PAT_MRT4530_89027C.1.pep
MAFSGMFSGRVDKEYFVYKAGSGTESPSLRRIPTHDPRYNRGEDIGIIRCGDHGQFFLAALLFTSCNIREFTLHLYSSASDQWTMKSVPLDPSCNLERVDSKYYPALPHKTIQLGGSLLGWVDLWKGILICDVLADHPVVRFIRLPELMPGNYCHDSPHMIRDVHCMGGVIKFIEMEHFLIPTVEPTQEPTQGRRRPGEEANILYDWDLEPPCKEDAPDPDIWLKSFVGWRTVIWDRMVYGNCWNKVCKASYDEIMVPDPSHYEMLSELGDGSAGNLVLMNLSTDSPTLSIGGDNVVHMSSIVKLDRGRSVMMALNLQRKTVEALALYGPERKTCHPYRPCTLSKYLKISPGSFRDWKVNDLPRAISKPVPQPISMRPWRTDLGGSRHQRRAAPY

SEQ ID NO: 192834 - protein, 564 aa, Oryza sativa
  unsure (1)..(564): unsure at all Xaa locations
  Clone ID: PAT_MRT4530_89028C.1.pep
MGVRQAGLKPRPPRPRVRFXFEDHIASCRRESPDHRRDMPIRLYYGDAPIQICDSGVDLTVYAFHDTSLNAPEHMGLNDVLGWLYNMFGVDPVHDKFVINTVWPVRGQHGWQWRVVEVASTGSWRKFVSKVREKGYSLAIVVQKTTCVDRSGESSHVVVEETPLEGGQAENVWRTEQDRGEEVVEGNTQGKVIVRGTNREANDSDDEEPDSPMRVDAAEENEAVVDQMEVENEEYLALVVEGEDTTLWDNETNIPDDWTTISMSRMKVNDGLDAHWCYDSKQVKVGQMFHDKGHLHDAVKRWAFVQKREFRVKVSNRTTYDVKCIQGGCPWRVHGYKPQHDTLWVASRVEQHTCLLENTRLVHRNLTAAFVAQMVYSKVVRKTSLSPFTIMHDVEKEYVYEISYDKAWRAKQKALEMRFGTYEDSYHNLPPLLEVMQARNPGTHMAILDEVNEYGENVLRRVFWSFGCMIEAFRNCIPLLCVDGTFMTGKYRGTILTAIGVDADSHVVPVAFAFVESENTSSWLWFLRHIKMCVVENRPNXCLLSAIQKLQEDVTQSVPWPDLH

SEQ ID NO: 192835 - protein, 243 aa, Oryza sativa
  Clone ID: PAT_MRT4530_89029C.1.pep
NVCSQLALPTIAVKGQCGLSSTPFIPKYFCVQPIDEPNWTGIMKIGTNYIPVGAHFSNKACKKVCELSMSLPQIMKVTELPKLKAWPKSWEKASVPSAESIGLFFFSQNTRSNKEFDDLVKHVIDYDIVLETDVSFAKLLVFPSVVLPAEYRDEDVPEQNALDIVPCKALDQEMALVVSDIHHDNQPSLTTSQVVESEASSDKGPSHPVINSPERPMYLILDTSCKVLKKWSCERMDTKLSML

SEQ ID NO: 192836 - protein, 224 aa, Oryza sativa
  Clone ID: PAT_MRT4530_8902C.1.pep
MALEDRSRDALDGCHPCPAPSPVAEAGGDVDAVFLGFIYNHAPLPPFTPPVPCRSSVIIAKVNVCSVIIANPPGERGGGGGVGERRDGLARLGSVASGWQPGGVGGGATRDGDAAWPRREEGAAKWRSGAAQRGQVVASGRDGWEMGAAVVRWNGGEAVGVVAAAVWRRRGAVGQRPCAAPQPWGKGGGTEVEGGSGVGAGGWRFEVEVIRRCRAYGAGDEAAV

SEQ ID NO: 192837 - protein, 140 aa, Oryza sativa
  unsure (1)..(140): unsure at all Xaa locations
  Clone ID: PAT_MRT4530_89030C.1.pep
MSLLSNSLLLQGRLRHAAASAVAAAAMGRRGVATSTEEYNRRNYANNISEYNTVFGSLTAQRRHYLLRDAYDDMMLDGVQPVRDTFHNLIVGAMKGSRLQDAFYFRDQMKEMGLQPNVNLYNFLISTCXKSKKSDAAIML

SEQ ID NO: 192838 - protein, 154 aa, Oryza sativa
  Clone ID: PAT_MRT4530_89031C.1.pep
ARSRGVRHPAAKTRGETSRRRADGHHHHYPDVPAWIGVVHPLHVAAHPSTGVHQGVSRIRGTHVEHGTTTSAAFIEDFFSTDPPQGEVGMDYWHAAPQVTQPTQETEAGQGPDVTPQQAARDRHPPDNLTYPTEQIRRSKKGGPSKRAKGTDRP

SEQ ID NO: 192839 - protein, 168 aa, Oryza sativa
  Clone ID: PAT_MRT4530_89032C.1.pep
FLNTKIGTNYIPVGAHFSNKACKKVCELSMSLPQIMKVTELPKLKAWPKSWEKASVPSAESIGLFFFSQNTRSNKEFDDLVKHVIDYDIVLETDVSFAKLLVFPSVVLPAEYRVFQGKHYLWGVFKRSKDMAERDALVEQNCTTCLADEDVPEQNALILCHVKPWIKK

SEQ ID NO: 192840 - protein, 133 aa, Oryza sativa
  unsure (1)..(133): unsure at all Xaa locations
  Clone ID: PAT_MRT4530_89033C.1.pep
FPIWKHPTGQLQHHHLKRGLSKEHGARADINQLSTGTDQSVCTXTEHLSNVLSLDAQDYMVFTESKNANGDPITLRPDARSTSAHNQXDGAACTMTAVFLPLKXRKERNLTXKDPAEFMPITLEEASEPLPQH

SEQ ID NO: 192841 - protein, 55 aa, Oryza sativa
  Clone ID: PAT_MRT4530_89034C.1.pep
RWSTTLQLQYGLPLYRVKRKTEICRGPKLTSHKEKIRANTSTHNYFTMMWIINTK

SEQ ID NO: 192842 - protein, 46 aa, Oryza sativa
  Clone ID: PAT_MRT4530_89035C.1.pep
MAAARERLTAYMTLSADSIGRMPIARAYEGRARAPAVLASAGGFDI

SEQ ID NO: 192843 - protein, 73 aa, Oryza sativa
  Clone ID: PAT_MRT4530_89036C.1.pep
RPQQYHSLIYPLQKKYIRPKSKWWYQRMAESGCNNIYHLHFNLEKAFGHLSMKIGSCRIGQHNPKNKLVIMYI

SEQ ID NO: 192844 - protein, 62 aa, Oryza sativa
  Clone ID: PAT_MRT4530_89037C.1.pep
HSLLGFTIGCTVACCWLRPSVQASNCAQIVLHKSPSTHVYAYDLTCLRPVHDYACISFFSYA

SEQ ID NO: 192845 - protein, 87 aa, Oryza sativa
  Clone ID: PAT_MRT4530_89038C.1.pep
PPPRRRQSSPAAKPAVSREGGGEAKQLGGTALARGGRGKADDDAAGGGDGGSAWGSGSGTSVAGSGPPTRGSGRRDGRRGGRGGASG

SEQ ID NO: 192846 - protein, 67 aa, Oryza sativa
  Clone ID: PAT_MRT4530_89039C.1.pep
MLCARADATAAGDAASPLWKRGEGGSTGSGSGCTSCRQVRRRAAAVRVRAAVPRRVEAVAMEFAAET

SEQ ID NO: 192847 - protein, 759 aa, Oryza sativa
  Clone ID: PAT_MRT4530_8903C.1.pep
MAGLRPPSPLVAGLRPSPLVAGLRSSPLVAAAAAPRRGRLRLGCRAPSLGVCFPIRIWIGSHWAQHMRLHMRGQRLWDVLSGELPCPPCPIAPTMPSLASQATDDDREKAKEQFDDAMENYQSQFALYKAWLDEDARASAILVASMEIHLTGEVVTLTSAHLMWTHLRDRYAPTSDALYLAMEEEGYTSWPFFEGIVARVSWLVLALAAVILSVFGSLTGFVFLPLRLLVFLLPLLPLRCLLHSGIIGWDIFVVYSRKPRIQEPSLDASPVAPPRYNFHDRNLVTIRPEDRYGYVATVLAEPCSYRDAVVHQEWQHAMAEELAALERTGTWDLVPLPSHARPITCKWIYKVKTRSDGTLERYKARLVARGFQQEHGRDYDETFAPVAHMTTVRTLLAIASARHWNISQLDVKNAFLNGELHEEVYMRPPQGYLVPEGAISIARDPIKHELTKHIGVDASYTRTQVQATQSRLSLLDRAPAGRAVASSSIAAASSSPACLLFSTETSGSASPPATVALSPLFRIRPPLPRPLCVGRRRHHLSQHRSAVLFPGQATASPEFRRNAVARAGLSFLLVGISSGSPFRHARASAGAAVPSLGTYVAANLSIRLTGVVRPPVPPRPCTGRPHLHHLRHRSRDVVLGNASPSAEHRRGVFHAILASVQPLPAALVVSSPAPVVIVVVLPSFPVVVAPVVVFVLGSASSSVAPAASRLRPRIAAEVVPSPFVSVVPGRLRRTRSASEVEEAVKILENPSQNLSHPLG

SEQ ID NO: 192848 - protein, 137 aa, Oryza sativa
  Clone ID: PAT_MRT4530_89040C.1.pep
MGCWWLVVRSWWWNWWNYGLTVVCPNPTAMDEGSGLVARAGPAAARAKDRDSDMLRHLVVACASSRGKRRSSTTAAWPCYDGEMWWWRRSPPYLTTQDIVGARTIAYPPERLTALQNAGPSLPGPIGLPGRAAHEQV

SEQ ID NO: 192849 - protein, 511 aa, Oryza sativa
  Clone ID: PAT_MRT4530_89041C.1.pep
MKMVSEQQEAFLHLIMRLGYFGITMEVKKALRLGKDLQAFEIETADDARIGPKAAHELASRQVSGSHSLSYSLRDRKNYLRSKRQREMAYGQAGSMLMYFQDKIAENPSFQYALQMDSEEQIANIFWADAKMISDYAHFGDVVSFDTTFGTNNESRPFGVFVGFNHFRETVVFGAALMYDETFDSFKWLFETFLKAHNGKHPKTIYTDQDIAMGKAIEEHFERVVQGKRNTELASEFDSRKKLPRIKMRTPMLLQASKVYTPIIFEAFKGEYERSMAACTKALDGDNEFLVSIGSFEGDLTFEEEYRVVGDPSEQTSICSCGKFNRIGILCGHALKVLDLMNIKSLPAQYILKRWTREARSGIVTDSKGINIIENPMMEASLRYKFLSHRFLTLAQQAASYPECTLLVNNTLDILSKQIEEHLSGCASTSDQSATHKEVMPPNNLLSNARLKKKEEQKTRQKALHVGAATQVAEDSFAMDKEEPGEYMHLISFTQLLTGQINDDLLVDDAF

SEQ ID NO: 192850 - protein, 188 aa, Oryza sativa
  Clone ID: PAT_MRT4530_89042C.1.pep
MAARRSAAARCLPRRGEMLVPCSVPHIGMEFKSPDEAWIFWHHYGGQKGFENPMMEASLRYKFLSHRFLTLAQQAASYPECTLLVNNTLDILSKQIEEHLSGYASTSDQSATHKEVMPPNNLLSNARLKKKEEQKTRQNTLHAGAATQVAEDSFAMDKEESGEYMHLNSFTQLLTGQINDYLLVDDAF

SEQ ID NO: 192851 - protein, 152 aa, Oryza sativa
  unsure (1)..(152): unsure at all Xaa locations
  Clone ID: PAT_MRT4530_89043C.1.pep
RMTTAARLKRRRXLQVGGDGGAPAGNGGDGGVDEVLLLLAMPMVATTTEGGGCNGGVARLDRRXQWRALGQRSRRRSDVLRWQRSGGRGRRRPRDAKEGDGDRRRRPKRRRRPTGLPPAAATQRTTRRRRXRRRQARAKVAADRGGPGDPFL

SEQ ID NO: 192852 - protein, 541 aa, Oryza sativa
  Clone ID: PAT_MRT4530_89044C.1.pep
MAYGQAGSMLMYFQDKIAENPSFQYALQMDSEEQIANIFWADAKMISDYVHFGDVVSFDTTFGTNNESRPFGVFVGFNHFRETVVFCAALMYDETFDSFKWLFETFLKAHNGKHPKTIYTDQDIAMGKAIEEVFPAAWHGLCTFHISQNAAKHLSQGNNGESSILSDLSACMYEYEDVTKFEYEFNIMREKVSKQTWLDSIYKLKEKWAKSYMRNVFTLGMRSTQLSESFNNDLKIHFKSDFDIIRFFKHFERVVQGKRNTELASEFDSRKKLPRIKMRAPMLLQASKVYTPIIFEAFQGEYERSMAACTKALDGDNEFLVSIRSFEGDLTFEEEYRVVGDPSEQTSICSCGQFNRIGILCGHALKVLDLMNIESLPAQYILKRWTREARSGIVTDSKGINIIENPMMEASLRYKFLSHRFLTLAQQAASYPECTLLVNNTLDILSKQIEEHLSGCASTSDQSATHKEVMPPNNLLSNARLKKKEEQKTRQNALHVGAATQVAEDSFAMDKEEPGEYMHLNSFTQLLTGQINDDLLVDDAF

SEQ ID NO: 192853 - protein, 60 aa, Oryza sativa
  Clone ID: PAT_MRT4530_89045C.1.pep
MLLLVASLSILVGDIEDWPASERYTYLMVGHCRCKEVAVHANRLSNPSPKSTASTSIVVL

SEQ ID NO: 192854 - protein, 463 aa, Oryza sativa
  Clone ID: PAT_MRT4530_89046C.1.pep
MGIFKLNLLLKLQRQRQRRRRQIQARNGSVLIHPRDKINAPACQNNTHSWSGQAKCSDPTLPEDISCHIHSLMSMRDAARVACVSRAFARSWRCLPNLDFSEESLGINRSTCKKDEKLGDLTSKIDWILKNHSGIGIKKLIIQVGSVYSRDSSHLAHLDSWLQCAVKPGIEELIVNLSSMNAKYNFPCELLSSGTGDSLRYIYLASCNFHPTRLSYLDVMTCTGLQVIESKAPNLSSIRFEGDLYVQLSLGEPLQIKQLYRLCNDAAFYARTELPSSMPNLERLIIHSDTEMVNTPMVPSKFYHLKYLSIALGGQTYDYLSLVSFFDASPFLETFILNALRERTERATIFGDPSGLRMMPEHRHDKLKCVKIINFSSVKTLVELTCHIVESATALECLTLDTTSGSPRCSVNRLGKCFLMRRETLMEAHRALKAVQTYIELKVPSKVELNVLEPCSRCHALDL

SEQ ID NO: 192855 - protein, 49 aa, Oryza sativa
  Clone ID: PAT_MRT4530_89047C.1.pep
FLYFSFFFFFFSFFFFLIEFFFWETNSSYLFLRVIFIITFAGKAASNLV

SEQ ID NO: 192856 - protein, 68 aa, Oryza sativa
  Clone ID: PAT_MRT4530_89048C.1.pep
MAAGNAVSRRLSEEEARRHREESPSDKEARRGVNDQRGGMAARRIEINRPGQNWQEFFARIGKTREAE

SEQ ID NO: 192857 - protein, 236 aa, Oryza sativa
  Clone ID: PAT_MRT4530_89049C.1.pep
MTPRAKEEAAIPADSCRGDIVGGQPRGPRQLTWKVQRRDESWNNPHCSGTAAKDAVEAVDVSPGITAVIINRCCRLELSPPILVAWTRLIAHLRWIRLGRWKGPSGQQPNKVQARLGLLFHQASSPQGSNQTANAYRFFPHGSWDASFSRCHKPSEGDRMEAAIMRLLPASGIVRLVALVFLLIFSSSLQQQAGVGAIRLHDRKQHGEQWEEERTQMRSFMTMDYSSVRRRRPIHN

SEQ ID NO: 192858 - protein, 1651 aa, Oryza sativa
  unsure (1)..(1651): unsure at all Xaa locations
  Clone ID: PAT_MRT4530_8904C.1.pep
MVEVLEEEVLVHTPAPSRSEDASGSRSPRHRCRNSRTPPRCDPLRREDPTRXGGLALSPPPDGGRPRLVGARRRLTYGDSGSPRGALQVAGALLRHPPVNAEPETPVRRWLDDVANLVTTTQRXLAVGGRSTATGMSRTPXTISSSVKRSARRSAMTSRRSTAPTSSGASGNQRHHDGLYGEQDARINIERRQDERRAARMGEGASSSRVXCSSLRGGPPPTFTPGWTGCRGFVVSLQNVRWPPKFRPNLTEKYDGSINPSEFLQIYTTIIVAAGGGGEGXDRVMANYFPMALKDQARGWLMTQPPDSIHSWEDLCQQFXITNFQGTYPRLGEEAELHTVQWKDDESLRSYIQRFCQVRNTIPCIPAHAVVYAFRNGVRHNRMLEKIASKEPMTTAELFELADKVARKEEAWAWNSPTTGAAAAAAPESTSRSKRRDRRGKRKPARSDDESHVLAAPRKKKTTGNKPSSTAPSSEGRSADKXCSVHNTYRHSLANCRSVKNLADWFRKTDEKRQSRQEGKAPATPANDRRGEAKKKXPADDGDSETVATLDGGGGGXACAHTSRRSFKAMRRELLAVVPTHEAAWNARWSEVKLTFDQSDHPTAPGMKLQPSLPIIGVTPGHTWPLGHVELPVTFSDSNFRTERIDFDVADLNLPYNAILGRPVLVKFMAATHYAYLQMKMQGPSGPITVFGDVKVALAYAEQRADSLAASTEPQAPEASAPRASKKRLTSADEESSLVSFLRANSDVFVWKPSDMPGVPXEVIEHRLAVRPDARPIRQKVRRXAPERQAFIREVTRLLEAGFIREVIHPEWLANPVVVPKANGKLRMCINYTDLNKACPKDPFPLPRIDQIVDSTAGCDILCFLDAYSGNHQIRMVREDEEKTAFITPVGTFCYTTMPFGLKNAGPTFQRMTRITLSNQIGCNVEAYVDDLVVKTRHQDTLLQDLAETFDSLRSTRMKLNPEKCVFGVPGHGKEPGVPLTGDGPSSPHGSEPKAPNPREGPXAPVGGREALTDGPKAYNPEMARDPPEAPEHGRPGPTAPDNKDRPHRKVQRPVYFVSEALRDAKTRYPQAQKMLYAVLMASRKLCHYFQAHRVSVVTSYPLGQILHNREGTGRVVKWAIELAEFDLHFEPRHAIKSQVLADFIAEWTPVDDPVLSNLPSLPGGGGDPNADIRAGHWVMHFDDSLNLHGAGARVTLTSPTGDVLKYVVRLNFRATNNMAEYEGLLAGLRAXAGKGIRRLLVLGDSQLVVNQVSKEYQCTDPQMDAYVYEVRRMERHFDGLELRHVPRRDNAIADELSRIASTRAPLPSGTFEERLAQPSARLDPPREPGSTASAPTPDDPRASGPEGVDPNPPRQVAWMSDIQAYLDNNTLPEDRAETEKLACISKRYVLVEGTLYRRAANGILLKCISREQGIEPIAHAHEDILEPFKAARGGYQHLYVAIDKFTKWPEAYXVVKIDKHSALKFIRGITSRFGVPNRIITDNGTQFTSELFGDYCDDMGIKLYFASPAHPKSNGQVEQANAEILKGLKTKTYNVLKKHGDLWLEELPPXQSRLGLSKLSPMWEGPYKVIGVPQPGSVRLTTEDGTELPNPWNIEHLRRFYLXRRNFLLSRSSGQPPHNPSVCAGLAGGYHCQLLCNFFPFQAIIFFRLS

SEQ ID NO: 192859 - protein, 602 aa, Oryza sativa
  unsure (1)..(602): unsure at all Xaa locations
  Clone ID: PAT_MRT4530_89050C.1.pep
MDISRSLFRRIASRDDNCSDKQKGKYDDIDELKDVAQVDKQLERYQRDTLRAIRPQQVYCMGFFENKNGLYRISRELELSVLTKPLELKIVAKEFENSLKYSGYKYIHQESSDRDIIDNRRHSISELMEKLDHESEIKYYEDKLRDIADEYNNSMKKNYPGLRKKKEKSLAIETPRTQEIKIEQIKSEEPREEIQKLDKVLSEEEQWEVNEKLLLESYEEENNLIEEIENIEEEDNAEQYNDFIDSLDEEGLHNLDNAMEAMEVDLGTGKRKRYGEGSVKNEGERERPARAAGKCPPDREEFSYNYIPGQYRHMGTKRRDFEKPVKFQNQRSDGAILNLAAHDPIDWPNIINIWKCLIVQKYIQNQHNIGSKVEDMITYLETFLGESAKVLWEQLVEKNPNNYEELKRAGSNPHNFANVISNIIIAEDPELGYTTLXNERLKEIEKLTLTSWKGIKEFSQHYLYNATTAKQGYNRGIVERYFNKLPDPLGSMIFEEYKKETEGAEINISQAITFVFKQLRKICTGIQVXRSMKHSDYNFCNKIVQIPLSYGEDKPRSKMIYKHQNRNNNNEDTIQSKASKRALTLHSTVLSSSDFSLPCIVY

SEQ ID NO: 192860 - protein, 735 aa, Oryza sativa
  Clone ID: PAT_MRT4530_89051C.1.pep
MDISRSLFRRIASRDDNCSDKQKGKYDDIDELKDVAQVDKQLERYQRDTLRAIRPQQVYCMGFFENKNGLYRISREVELSVLTKPVELKIVAKEFENSLKYSGYKYIHQDKMSFGFQTKGYEEFKGTNLLISIEFIGRLTNRSASKYKINVNDVIEKMHSKGIKFMSPLIIDSEERAGEKWPISEFIKNKTLSQPENFISYQDSKGNVSIRFTNYKTRASDDLDAESSDRDIIDNRRHSISELMEKLDHESEIKYYEDKLRDIADEYNNSMKSEWPKIRDKKLYFYRELSRIKKQKKEKSLAIETPRTQEIKIEQIKSEEPREEIQKLDKVLSEEEQWEVNEKLLLESYEEENNLIEEIENIEEEDNAEQYNDFIDSLDEEGESAKVLWEQWVEKNPNNYEELKRAGSNPHNFANVISNIIIAEDPELGYTTLQNERLKEIEKLTLTSWKGIKEFSQHYLYNATTAKQGYNRGIVERYFNKLPDPLASMIFEEYKKETEGAEINISQAITFVFKQLRKICTGIQAQRSMKHSDYNFCNKIVQIPLSYGEDKPRSKRIYKHQNRNHNNIRTKKRFLQQSVQPTVIHEQGITFIPYQNNVPYISEVRKCGGVSPKLDNLEVPNLESEERINEYELSENIDNYSFSSYLPKFYGIAREMASQKSEWLTNMSSWRLPQLPRGHGERFNHNFQNNRATTRVIKPLVANKKQKRKSSCLKWPGILFQKFRALRSKDNRKKG

SEQ ID NO: 192861 - protein, 48 aa, Oryza sativa
  Clone ID: PAT_MRT4530_89053C.1.pep
GVPIYTGRSCSTCCTVSSVYHQQFPANNISKSRLHVKLFISSLKFSFM

SEQ ID NO: 192862 - protein, 480 aa, Oryza sativa
  unsure (1)..(480): unsure at all Xaa locations
  Clone ID: PAT_MRT4530_89054C.1.pep
MVVIEAWEATWRGELRGWRAVCDFTRPPPGQANWVLDSXLLVDTKGCRQSRRIKNLMDEAKAKDRSRRKKACILCGENHARKDCAMYNVGKDAARADDVSYLLGLPIAGPAVGPTMVQAGWADDLLANFGGVLPVALEDLMDGHGPTKRTHTDSVDKHFIHYAEQIAELPIAEFPQYSWGSAQANSLPGCPLLLMLWAHERFDIGRPQLDSYANYELREMYKSGVGDLDNRPTMGSLWTHCEDFSPRVGHALADSLQRYSRKGLGLSYELVIVTMVQPTPSGLTTWRASFATSVPVLPHYFVVSPVGARQMWCSRRPVGHHHHYPDIPAWITVVPPRHAAGVHEGGRRTAASRRRPSEGDYGGGYGRDAWGRAVDVPVVPVVLVELELPAPLQQVGQQGRHEAAAAARARGIVGCSKQGGARGVPGEKVREHIGSGGVEREVLAVGEAEVERGGVGARRVPASAGSVVAGLHPLAKFPIM

SEQ ID NO: 192863 - protein, 466 aa, Oryza sativa
  unsure (1)..(466): unsure at all Xaa locations
  Clone ID: PAT_MRT4530_89055C.1.pep
MREGEDRGVSAIRSAEASFSRCGDAGVEVVESGKVGGSDDGVEAVTVGRRGGKAGRESDGGDAGLEAVESGKIGGGDGGVEAMANGKLAGVEAAEGNTQGEVIVRGTNREANDSDDEEPDSPMRVDAAEENEAVKVGQMFHDKGHLQDAVKRWAFVQKREFRVKVSNRTTYDVKCIQDQMCVIVTTVQPTVQEWEHAADNLALQTPPDDGSYYGAYLHWYRSVTRWRCFPPQGDSTVPHQAAITDTFAPQPRLAYNSMAEFVEHVHVESDTLLQRLEARPPVVRPDDVASILRNFRXTSGRRPSPPLPRRSSVDRSGPSSSRRGXASGSAHFPYMPTGDNVLNTPAWGLHITPRAPEQGHTQHTYDEYGSASTHHGMPAYSPCTAFIEDFFSTDHPQGEVGMDYWHAAPQVTQPTQETEAGQGPDVTPQQAARDRHPPDNLTYPTEQIRRRKKGGPSKRAKGTDRP

SEQ ID NO: 192864 - protein, 258 aa, Oryza sativa
  Clone ID: PAT_MRT4530_89056C.1.pep
MGPPLNDLNKFRGKHFWFYRMSGDMPIRLYYGDAPIQICDSGVDLTVYAFHDTSLNAPEHMGLNDVLGWLYNMFGVDPVHDKFVINAVWPVRGQHGWQWRVVEVASTGSWRKFVSKGASGSAHFPYMPTGDNVLNTPAWGLHITPRAPEQGHTQHTYDEYGSASTHHGVPAYSPRTAFIEDFFSTDPPQEEVGMDYWHAAPQVTQPTQETEAGQGPDVTPQQTARDRHPPDNLTYPTEQIRRRKKGGPSKRAKGTDRP

SEQ ID NO: 192865 - protein, 905 aa, Oryza sativa
  Clone ID: PAT_MRT4530_89057C.1.pep
MAAPVPCLPDQASALLQLKRSFNTTVGDYSAAFRSWVAGTDCCHWNGVRCGGSDGHITSLDLSHRDLQASGLDDALFSLTSLEYLDISWNDFSASKLPAIGFEKLAELTHLDLCTTNFAGRVPVGIGRLKSLAYLDLSTTFFLYEQDEENSITYYYSETMSQLSEPSLETLLANLTNLEELRLGMVNMSSNGARWCDAIARSSPKLRVISMPYCSLSGPICHSLSALRSLSVIELHYNHLSGPVPELLATLSNLTVLQLSNNMLEGSISVSNTNFSGTIPASISNLKYLKELALGASGFFGMLPSSIDFSGNMIQGQLPRSLVACRNLEILDIGNNQISDHFPCWMSKLPELQVLVLKSNKFHGKIMDPLYTRDGNNCQFSMLRIADIASNNFSGTLPEELFKMLKSMMTRSDNETLVMEHQYSHGQTYQFTAALTYKGNDITISKILRSLVLIDVSNNEFDGSIPSSIGELALLHGLNMSHNMLTGPIPTQFDNLNNLESLDLSSNKLSDQAAALLQLKRSFNATIGDYSAAFRSWVAVAGADCCSWDGVRCGGAGGRVTSLDLSHRDLQAASGLDDALFSLTSLEYLDLSSNDFGKSQMPATGFEKLTGLTHLDLSNTNFAGLVPAGIGRLTRLSYLDLSTTFFVEELDDEYSITYYYSDTMAQLSESSLETLLANLTNLEELRLGMVVVKNMSSNGTARWCDAMARSSPKLRVISMPYCSLSGPICHSLSALRSLAVIELHYNHLSGPVPGFLATLSNLSVLQLSNNKFEGWFPPIIFQHEKLTTINLTKNLGISGNLPNFSGESVLQSISVSNTNFSGTIPSSISNLKSLKKLALGASGFSGVLPSSIGKMKSLSLLEVSGNLEILDIGNNQISDSFPCWMSKLPVLRVLVLQSNKFIGQL

SEQ ID NO: 192866 - protein, 571 aa, Oryza sativa
  Clone ID: PAT_MRT4530_89058C.1.pep
MGFRQALLNRVRLGRVASSFFSRPHRQPPPRVATVSLSAPEGVRGGASRPERRRRPGGKGWRRPPPVKLRMSGEMPIRLYYGDAPIQICDSGVDLTVYDFHDTSLNALEHMGLNDVLGWLYNMFGGHLQDAVKRWTFDQKREFGVKVSTRTTYDVKCTQAGYPWRVHGYKPQHDNLWVASRVEQHMCLLENTRPVHRNMTAAFVAQMVYSKVVRKTSLSPFTIIHDIEKEYGYEISYDKAWRAKQKALEMRFGTYEDSYHNLPPLLEVMQARNPGTHMAILDEVNENGENVLRRAFWSFGCMIEAFRNCIPLLCVDGTRQAEFVEHVQVEFDTLLQRLETRPPVVRPDDVASVLRNFRACAAALLCRVSCGSAADVVQLSACRASPPLPRCSSVDHSGLSTLRCGYEAAHTSHSRPSFQHTPALEYTRGSAGSGVPTSSTAQPRPQVFQTPPYVHPTQGASGLAHLPYMPTGDNVLNTPAWGLHVTPRALDQGHTQHTYDEYSPRTAFIEDFFSTEPPQGEAGMDYWHAAPQVTQPTQETKAVQAPEMNSFFAYPSNESGQMIRFELCGAL

SEQ ID NO: 192867 - protein, 1019 aa, Oryza sativa
  Clone ID: PAT_MRT4530_89059C.1.pep
MLASMTFAYTSSMPLLAMLLILLIQVQSRSTLADGTSSSASAQPAPCLPGQAWALLRLKNSFDATAGDYSAAFRSWIAGTDCCRWEGIRCGGAQGRAVTSLDLGYRWLRSPGLDDALFSLTSLEYLDISWNDFSASKLPATGFEKLAELTHLDLCSTNFAGRVPVGIGRLKSLAYLDLSTTFFEDELDDENNVIYYYSDTISQLSEPSLETLLANLTNLEELRLGMVNMSRNGARWCDAMARSSPKLRVISMPYCSLSGPICHSLSALRSLSVIELHYNHLSGPVPELLATLSNLTVLQLSNNMLEGVFPPIIFQLQKLTSISLTNNLGISGKLPNFSAHSYLQSISVSNTNFSGTIPASISNLKYLKELALGASGFSGMLPSSIGKLKSLRILEVSGLELQGSMPSWISNLTFLNVLKFFHCGLSGPIPASVGSLTKLRELALYNCHFSGEVSALISNLTRLQTLLLHSNNFIGTVELASYSKLQNLSVLNLSNNKLVVVDGENSSSVVSYPSISFLRLASCSISSFPNILRHLPNITSLDLSYNQIQGAIPQWTWETWTMNFFLLNLSHNNFTSIGSNPLLPLYIEYFDLSFNNFDGAIPVPQKGSITLDYSTNRFSSMPLNFSSYLKSTVVLKASDNSLSGNIPSSICDAIKSLQLLDLSNNNLTGSMPSCLTQNASALQVLSLKQNHLTGELPDNIKEGCALSALDFSGNMIQGQLPRSLVACRNLEILDIGNNQISDHFPCWMSKLPELQVLVLKSNKFHGKIMDPLYTRDGNNCQFSMLRIADIASNNFSGTLPEELFKMLKSMMTRSDNETLVMEHQYSHGQTYQFTAALTYKGNDITISKILRSLVLIDVSNNEFDGSIPSSIGELALLHGLNMSHNMLTGPIPTQFDNLNNLESLDLSSNKLSGEIPQELASLNFLATLNLSYNMLAGRIPQSSHFSTFSNASFEGNIGLCGPPLSKQCSDRSEPNIMPHASKKDPIDVLLFLFTGLGFGVCFGITILVIWGSNNRKQQA

SEQ ID NO: 192868 - protein, 1405 aa, Oryza sativa
  Clone ID: PAT_MRT4530_8905C.1.pep
MPISAGPSMTGNENAVDTTQDDSLSKDPPAEAENRTLTTSELEKDSNAAKPCRSDKSHEPTRITSEATRSWCPIHKTRKHTLHACWVFLNVRAEIRACKERGIQRISPTCDVYCPIHKTKNHDLSSCKVFLSATMTSSPKVQQLGISLRDEDKEQGTTLVSDRFVGIIDISSPEPSVLHLLEDYGSSKRVRRARFRPGAIEKYDGSTDPEEFLQVYSTVLYAARADDNALANYLPTALKGSARSWLMHLPPYSISSCADLCQQFIANFQGTYKRHAIEDDLHALTQNSGESLREYVRRFNECRNTIPEITDASVICAFKSGVRDRYTTQELVTRRITTTRRLFEIVERCAHADDALRRKNDKPKTGGEKKPATDAPESSKKKNRKSGKMKAQAEVLAAEYANPPKRPDPQGSDTKKAWCPIHKIDRHSLEDCLVFKKSLEKHMAFEKGKRVRVVEKDAEVAPQESDTAYPDSNLHVSHIFGGSTAYSSKREYKKVEREVCSTWQGAAHKMKWSEQKIEFSEEDHPKTAVIPGRYPIVVEPTIRNIKVAWVLIDGGSSINLLFASALDAMGISRSELTPTDQSFHGITPQSSSKPLGKITLPVTFGQANNFRMEQITFDVAEFDTAYNAIIGRTALAKFMATSHYAYQVLKMPGPKGTITIQGNTKLAVQCDKWSLDMVEQMPSPPATTEPPKKEFVLITFLRDNADVFAWQPSDMPRVPREVIEHKLMVRPDAKPVKQKLRRFAPDQKQAIREELDKLLKAGFIREVLHPEWLANPVMVRKANEKWRMCVDFTDLNKACPKDHFPLPRIDQLVDSTAGCELLSFLDAYSGYHRISMAKEDGEKTAFITPFGGALSDQLGNNVEAYVDDIVVKTKTSDSLIDDLRETFDNLRRYRLMLNPEKCTFGVPSGKLLGFLVSGRGIEANPEKIKAIENKKSPTRLKEVQKLTGCMVALSRKLRHYFQAHRVTVVSSFHLGEVVRNKDVVGRIAKWVVELSQFDVHFVPRTAIKSQVLADFAADWTMPDNKSDNQIDNETWTMAFDGALNSQGAGAGFILTSPSGDQFKHAIHLNFRATNNTAEYEGLLAGIRAAAALGVKRLIVKGDSELVANQVHKDYKCSNPELSKYLAEVRKLEKRREPLEPGTFLDILTKPSVKEVSGEVSPAAPNISSEATEAEHAVADIETTDDWRTPLIKFINSEELPEDDAEAEKITRKAKICCMIGNDLYKKAPNGVLLKCVSSDDGRHLLLDIHEGICGSHAAGRTLVGKAFRQGFFWPTAIKDACDMVQRCEACQFHNILGPFPRGQGGYRFLFVAIDKFTKWIEAVPTGEIKADNAIKFIKGIFCRYGLPHRIITDNGSQFISADFHDYCIGLGVNVTPGISPYKTRDGLPSDPRGLISATSQSGARQ

SEQ ID NO: 192869 - protein, 1208 aa, Oryza sativa
  Clone ID: PAT_MRT4530_89060C.1.pep
ADAYHNLPPLLEVRQARDPGTHMAILDEVNEYGENVLRRVFWSFGCMIEAFRNCIPLLCVDGTFMTGKYRGTILTAIGVDADSHVVPVAFAFVESENTSSWLWFLRHIKIQFRSKRLMDLFKKLCKQNQQRKFDAIWDQLDRLTTTHMEEVRKKPIVARQEEPEGLEPIPNEAPSITRRRKRGRATKCFTEWVEFEPREKWSLLYDTDGSRYGVMTTNLAEVYNWVMKNTRPLPLVAILEGITRGTQKYLYKRYSMASLNLSKPSVKYSPAITQYMDEKSKKGGIHRVWPAGNRELLFEIRLRDKSGVGIGTTDVTLECTLWPEYHACKCNCNKPYLLHRPCSHVLAASAKGGVDGNIFVSPYFRKESWEATWRAMCDFTRPPPGQANWVPDSNLLVDTKGRRQSRRIKNLMDEAEVKDRSRRMADQYDGQLIDKEIDRNHRSRRLSTGTFCNVLKMRGPDQYWRIDPRWVPRLRAAGLLTFARLVEPSRARSERIHIDAALLSALVDRWRPETHTFHLTVGEMVPTLQDVSYLLGLPIAGPVVGPTMVNAGWADDLLASFGGVLPVALEDLTDGHGPTKSWLNQFRQDVFPDDQEEWIVQRHLVAYLLWLFGWVMFTGTHADSVDKHFIHFAEQIAELPIAEIPQYSWGSAVLAATYAGLCDACVRNSKQSSLPGCPLLLMLWAHERFDIGRPQLDSYANYGLREMYRSGVDDINDRPTMESLWTHREPQWVSGTTRRVYTQFVADFDQLTPDRVRWTPYTQHDVNDRAPHGLADLCTRDMQLWMTTCYLVVDVHVEPHNVHRVLKQLGMYQDFPPRDGRPLADSLHRYSRKGLGLSYELVIVTTVQPTVQEWEHAADNLALQTPPDDGSYYGAYLRWYRSVTRWRCFPPQGDSTVPHQAAITDTFAPQPRSAYNSMAEFVEHVHVESDTMLQRLEARPPVVRPDDVASILRNFRARAAALLRRVSCRSAADVVQTSGRRPSPPLPRRSSVDRSGPSSSRRGYEAAHTSHGRPSFQHTPAPEYIRGSAGSGVPTSSTAPPRPQVFQTPPYVHPSQGASGSAHFPYMPTGDNVLNTPAWGLHITPRAPEQGHTQHTYDEYGSASTHHGMPAYSPRTAFIEDFFSTDPPQGEVGMDYWHAAPQVTQPTQETENATLSNAPVRRISCRTGAVRQPPVEQGQFDSPAWGCSTGPIERQPSDLLTSRALAVR

SEQ ID NO: 192870 - protein, 1607 aa, Oryza sativa
  Clone ID: PAT_MRT4530_89061C.1.pep
MGLNDVLGWLYNMFRVDPVHDKFVINAVWPVRGQHGWQWRVVEVASTGSWRKFVSKVREKGYSLAIVVQKTTCVDRSGESSHAVVEETTLEGGQAENVWRTEQGRGEEVVEGNTQGEVIVRGTNREANDSDDEEPDSPMRVDATEENEAVVDQMEVENEEYLALVVEGEDTTLWDNETNIPDDWTTISMSRMKVNDGLDAHWCYDSKQVKVGQMFHDKGHLQDAVKRWAFVQKREFRVKVSNRTTYDVKCIQGGCPWRVHGYKPQHDTLWVASRVEQHTCLLENTRLVHRNLTAAFVAQMVYSKVVRKTSLSPFTIMHDVEKEYGYEISYDKAWRAKQKALEMRFGTYEDSYHNLHPLLEVMQARNPGTHMAILDEVNEYGENVLRRAFWSFGCMIEAFRNCIPLLCVNGTFMTGKYRGTILTAIGVDADSHVVPVAFAFVESENTSSWLWFLRHIKMCVVENRPNVCVLHDRHAGLLSAIQKLQEDVTQSVPWPDLHSRWCMRHFGANFYRQFRSKRLMDLFKKLCKHNQQRKFDAIWDQLDRLTTTHMEDVRKKPIVARQEEPEGLEPIPNEAPSITRRRKRGRATKCFTEWVEFEPREKWSLLYDTDGSRYGVMTTNLAEVYNWVMKNTRPLPLVAILEGITRGTQKYLCKRYSMASLNLSKPSVKYSPVITQYMDEKSKKGGIHRVWPAGNRELLFEIRLRDKSGVGIGTTDITLECTLWPEYHACKCNCNKTYLLHRPCSHVLAASAKGGVDGNIFVSPYFRKESWEATWRGELRGWRALCDFIRPPPGQANWVPDSNLLVDTKGRRQSRRIKNLMDEAEVKDRSRRMADQYDGQLIDKEIDRNHRSRRLSTGTFCNVLKMRGPDQYWRIDPRWVSRLRAAGLLTFARLVEPSRARSERIHIDAALLSALVDRWRPETHTFHLTVGEMVPTLQDVSYLLGLLITGPAVGPTMVNAGWADDLLASFGGVLPVALEDLTDGHGPTKSWLNQFRQDVFPDDQEEWIVQRHLVAYLLWLFGWVMFTGTHADSVDKHFIHFAEQIAELPIAEIPQYSWGSAVLAATYAGLCDACVRNSKQSSLPGCPLLLMLWAHERFDIGRPQLDSYANYGLREMYRSGVDDIDDRPTMGSLWTHREPQWVSGTTRRVYTQFVADFDQLTPDRVRWTPYTQHDVNDRAPHGLADLCTRDMQLWMTTCHLVVDVHVEPHNVYRVLKQLGMYLDFPPRDGRPLADSLHRYSRKGLGLSYELVIVTTVQPTVQEWEHAADNLALQTPPDDGSYYGAYLHWYRSVTRWRCFPPQGDSTVPHQAAITDTFAPQPRSAYNSMAEFVEHVHVESDTLLQRLEARPPVVRLDDVASILRNFRARAAALLRRVSCRSAADVVQTSGRRPSPPLPRRSSMDRSGPSSSRRGYEAAHTSHGHPSFQHTPAPEYTRGSAGSGVPTSSTAPPRPQVFQTPPYVHPSQGASGSAHFPYMPTGDNVLNTPAWGLHITPRAPEQGHTQHTYDEYGSASTHHGMPAYSPRTTFIEDFFSTDPPQGEVGMDYWHAAPQVTQPTQETEAGQGPDVTPQQAARDRHPPDNLTYPTEQIRRRKKGGPSKRAKGTDRP

SEQ ID NO: 192871 - protein, 288 aa, Oryza sativa
  Clone ID: PAT_MRT4530_89062C.1.pep
MTAYAVLARGMARELVVPHDLCAVVSWATTLVHARLGPRPAERRTAIINRVDEDGRHDSCFADAHAYLATKIDPRALGRFRLSGVGGGGERGRWNSLSMVPATRCPTSSRAWSSGGLPSPRKAARRRERELKIYMNESWSWRGIVHHHPATFDTVAMDPGLKRSIVADLDPGQGVEARIEQQSLTLSGLLNFIDGLWSTSGEERVVVFTLHHQLQGTPRRGAAPAGADGHACSPAWTPRRPRCRRCCCAASDDVDAALRALVEFLQEKKRAMCRSHQEQSSLKVQSLR

SEQ ID NO: 192872 - protein, 66 aa, Oryza sativa
  Clone ID: PAT_MRT4530_89063C.1.pep
WIWCESIDLESDHCHLVVHCLSSGLQQGTVLSLHRRFAWQPHCQITVPASPICWPWCPHVFSTPCS

SEQ ID NO: 192873 - protein, 1058 aa, Oryza sativa
  Clone ID: PAT_MRT4530_89064C.1.pep
MRFGTYEDSYHNLPPLLEVMQARNPGTHMAILDEVNEYGENVLRRAFWSFGCMIEAFRNCIPLLCVDGTFMTGKYRGTILTAIGVDADSHVVPVVFAFVESENTSSWLWFLRHIKMCVVENRPNVCVLHDRHAGLLSAIQKLQEDVTQSVPWPDLYSRWCMRHFGANFYRQFRSKRLMDLFKKLCKQNQQRKFDAIWDQLDRLTTTHMEEVRKKPIVARQEEPEELEPIPNEAPSITRRRKRGRATKCFTEWVEFEPREKWSLLYDTDGSRYGVMTTNLAEVYNWVMKNTRPLPLVAILEGITRGTQKYLCKRYSMASLNLSKPSVKYSPAITQYMDEKSKKGGIHRVWPAGNRELLFEIRLRDKSGVGIGTTDITLECTLWPEYHACKCNCNKPYLLHRPCSHVLAASAKGGVDGNIFVSPYFRKESWEATWRGELRGWRAVCDFTRPPPGQANWVPDSNLLVDTKGRRQSRRIKNLMDEAEVKDRSRRMADQYDGQLIDKEIDRNHRSRRLSTGTFCNVLKMQGPDQYWRIDPRWVSRLRAAGLLTFARLVEPSRARSERIYIDAALLSALVDRWRPETHTFHLTVGEMVPTLQDVSYLLGLPIAGPAVGPTMVNAGWADDLLASFGGVLPVALEDLTDGHGPTKSWLNQFRQDVFPDDQEEWIVQRHLVAYLLWLFGWVMFTGTHADSVDKHFIHFAEQIAELPIAEIPQYSWGSAVLAATYAGLCDACVRNSKQSSLPGCPLLLMLWAHERFDIGRPQLDSYANYSLREMYRSGVDDIDDRPTMGSLWTHREFVADFDQLTPDRVRWTPYTQHDVNDRAPHGLADLCTRDMQLWMTTCHLMVNVHVEPHNVHRVLKQLGMYQDFPPRDGRPLADSLHRYSRKGLGLSYELVIVTTVQLTAEFVEHVHVESDTLLQRREARPPVVRPDDVASILRNFRAALLRRVSCRSAADVGASGSAHFPYMPTGDTVLNTPAWGLHFTPRAPEQGHTPHTYDEYGSASTHHGMPAYSPRTAFIEDFFSTDPPQGEVGMDYWHAAPQVTQPTQETEAGQGPDV

SEQ ID NO: 192874 - protein, 131 aa, Oryza sativa
  Clone ID: PAT_MRT4530_89065C.1.pep
YCCFADAHAYLATKIDPRALGRFRLSGVGGGGERGRWNSLSMVPATRCPTSSRAWSSGGLPSPRKAARRRERELKIYMNESWSWRGIVHHHPATFDTVGMDPGLKRTIGGDLDPGQGVEARVPSLRPARDR

SEQ ID NO: 192875 - protein, 1501 aa, Oryza sativa
  Clone ID: PAT_MRT4530_89066C.1.pep
MSRGCRPSSLISIALLRPAHCPTSSQTPPRRPAGGESWMSGDMPIRLYYGDVPIQICDSGVDLTVYAFHDTSLNAPEHMGLNDVLGWLYNMFGVDPVHDKFVINAVWPVRGQHGWQWRVVEVASTGSWRKFVSKVREKGYSLAIVVQKTTCVDRSGESSHAVVEETPLEGGQAENVWRTEQGRGEEVVEGNTQGEVIVRGTNREANDSDDEEPDSPMRVDAAEENEAVVDQMEVENEEYLALVVEGEDTTLWDNETNIPDDWTTISMSRMKVNDGLDAHWCYDSKQVKVGQMFHDKGHLQDAVKRWAFVQKREFRVKVSNRTTYDVKCIQGGCPWRVHGYKPQHDTLWVASRVEQHTCLLENTCLVHRNLTAVFVAQMVMQARNPGTHMAILDEVNEYGENVLRRAFWSFGCMIEAFRNCIPLLCVDGTFMTGKYRGTILTAIGVDADSHVVPVAFAFVESENTSSWLWFLQHIKMCVVENRPNVCVLHDRHAGLLSAIQKLQEDVTQSVPWPDLHSRWCMRHFGANFYRQFRSKRLMDLFKKLCKQNQQRKFDAIWDQLDRLTTTHMEEVRKNPIVARQEEPEGLEPIPNEAPSITRRRKRGRATKCFTEWVEFEPREKWSLLYDTDGSRYGVMTTNLAEVYNWVMKNTRPLPLVAILEGITRGTQKYLCKRYSMASLNLSKPSVKYSPAITQYMDEKSKKGGIHRVWPAGNRELLYEIRLRDKSGVGIGTTDITLECTLWPEYHACKCNCNKPYLLHRPCSHVLAASAKGGVDGNIFVSPYFRKESWEATWRGELRGWRAVCDFTRPPPGQANWVPDSNLLLDTKGRRQSRRIKNLMDEVEVKDRSRRIADQYDGQLIDKEIDRNHRSRRLSTGTFCNVLKMRGPDQYWRIDPRWVSRLRAAGLLTFARLVEPSRARSERIHIDAALLSALVDRWRPETHTFHLTVGEMVPTLQDVSYLLGLPIAGQAVGPTMVNAGWAHDLLASFGGVLPVALEDLTDGHGPTKSWLNQFRQDVFPDDQEEWIVQRHLVAYLLWLFGWVMFTGTHADSVDKHFIHFAEQIAELPIAEIPQYSWGSTVLAATYAGLCDACVRNSKQSSLPGCPLLLMLWAHERFDIGRPQLDSYANYGLREMYRSGVDDIDDRPTMGSLWTHREPQWVSGTTRRVYTQFVADFDQLTPDRVRWTPYTQPDVNDRAPHGLADLCTRDMQLWMTTCHLVVDVHVEPHNVHRVLKQLGMYSRKGLGLSYELVIMTTVQPTVQEWEHAADNLALQTPPDDGSYYGAYLRWYRSVTRWRCFPPQGDSTVPHQAAITDTFAPQPRSAYNSMAEFVEHVHVESDTLLQRLEDDQLSRAGHRSQPAGSKLATTEEPAQGVPGFDGTQSSTARVLPGVNRGDSRFMGQPPAWPLRAMGKTLAMTWSPPPTASMIAVQIWRDSEGSTSPSYFSVRQGWSFGGHQTFRRLATKTWQPTLPGGDVGGLAPCLGWRDTPEEAAPSPASAARC

SEQ ID NO: 192876 - protein, 1473 aa, Oryza sativa
  unsure (1)..(1473): unsure at all Xaa locations
  Clone ID: PAT_MRT4530_89067C.1.pep
MSGDMPIRLYYGDAPIQICDSGVDLTVYAFHDTSLNAPEHMGLNDVLGWLYNMFGVDPVHDKFVINAVWPVRGQHGWQWRVVEVASTGSWRKFVSKVREKGYSLAIVVQKTKCVDRSGESSHAVVEETPLEGGQAENVWRTEQGRGEEVVEGNTQGEVIVRGTNREANDSDDEEPDSPMRVDAAEENEAVVDQMEVENEEYIALVVEGEDTTLWDNETYIPDNWTTISMSRMKVNDGLDAHWCYDSKQVKVGQMFHDKGHLQDAVKRWAFVQKREFRVKVSNRTTYDVKCIQGGCPWRVHGYKPQHDTLWVASRVEQHTCLLENTRLVHRNLTAAFVAQMVYSKVVRKTSLSPFTIMHDVEKEYGYEISYDKAWRAKQKALEMRFGTYEDSYHNLPPLLEVMQARNPGTHMAILDEVNEYGENVLRRAFWSFGCMIEAFKNCIPLLCVDSTFMTSKYRGTILTAIGVDADSHVVPVAFAFVESENTSXWLWFLRHIKXIQKLQEDVTQSVPWPDLHSRWCMRHFGANFYRQFRSKRLMDLFKKLCKQNQQRKFDAIWEQLDHLTTTHMEEVRKKPIVARQEEPEGLEPIPNEAPSITRRRKRGRATKCFTEWVEFEPREKWSLLYDTDGLRYGVMTTNLAEVYNWVMKNTRPLPLVAILEGITRGTXSISVKEYHACKCNCNKPYLLHRPCSHVLAASXKGGVDGNIFVSPYFRKESWEATWRGELRGWRAVCDFTRPPPGQANWVPDSNLLVDTKGRRQSRRIKNLMDEAEVKDRSRRMADQNDGQLIDKEIDRNHRSRRLSTGTFCNVLKMRGPDQYWRIDPRWVPRLRAAGLLTFARLVEPSRARSERIHIDAALMSALVDRWRPETHTFHHTVGEMVPTLQDVSYLLGLPIAGPAVGPTMVNAGWADDLLASFGGVLPVALEDLTDGHGPTKSWLNQFRQDVFPDDQEEWIVQRHLVAYLLWLFGWVMFTGTHADSVDKHFIHFAEQIAELPIAEIPQYSWGSAVLAATYAELCDACVRNSKQSSLPGCPLLLMLWAHERFDIGRPQLDSYANYGLREMYRSGVDDIDDRPTMGSLWTHREPQWVSGTTRRVYTQFVADFDQLTPDRVRWTPYTQHDVNDRAPHGLADLCTRDMQLWRTTCHLVVDVHVEPHNVHRVLKQLGMYQDFPPRDGRPLADSLHRYSRKGLGLSYELVIVTTVQPTVQEWEHAADNLALQTPPDDGSYYGAYLRWYRSVTRWRCFPPQGDSTVPHQAAITDTFAPQPRSAYNSMAEFVEHVHVESDTLLQRLEARPPVVRCGADVGPTAITTTTPTFQRGSEWSILFTSRVRSGPHISRSSFLSAHPSTGVHQGVSRIRGTHVEHGTTTSADDEYGSASTHHGVPAYSPRTAFIEDFFSTDPPQGEVGMDYWHAAPQVTQPTQETEAGQGPDVTPQQAARDRHPPDNLTYPTEQIRRRKKGGPSKRAKGTDRP

SEQ ID NO: 192877 - protein, 1567 aa, Oryza sativa
  unsure (1)..(1567): unsure at all Xaa locations
  Clone ID: PAT_MRT4530_89068C.1.pep
MSGDMPIRLYYGDAPIQICDSGVDLTVYAFYDTSLNAPEHMGLNDVLGWLYNMFGVDPVHDKFVINAVWPVRGQHGWQWRVVEVASTGSWRKFVSKVREKGYSLAIVVQKTKCVDRSGESSHAVVEETPLEGGQAENVWRTEQGRGEEVVEGNTQGEVIVRGTNREANDSDDEEPDSPMRVDAAEENEAVVDQMEVENEEYIALVVEGEDTTLWDNETYIPDNWTTISMSRMKVNDGLDAHWCYDSTQVKVGQMFHDKGHLQDAVKRWAFVQKREFRVKVSNRTTYDVKCIQGGCPWRVHGYKPQHDTLWVASRVEQHTCLLENTRLVHRNLTAAFVAQMVYSKVVRKTSLSPFTIMHDVEKEYGYEISYDKAWRAKQKALEMRFGTYEDSYHNLPPLLEVMQARNPGTHIAILDEVNEYGENVLRRAFWSFGCMIEAFKNCIPLLCVDGTFMTGKYRGTILTAIGVDADSHVVPVAFAFVESENTSSWLWFLRHIKMCVVENRPNVCVLHDRHAGLLSAIQKLQEDVTQSVPWPDLHSRWCMRHFGANFYRQFKSKRLMDLFKKLCKQNQQRKFDAIWEQLDRLTTTHMEEVRKKPIVARQEEPEGLEPIPNEAPSITRRRKRGRATKCFTEWVEFEPREKWSLLYDTDGSRYGVMTTNLAEVYNWVMKNTRPLPLVAILEGITRGTQKYLCKRYSMASLNLSKPSVKYSPAITQYMDEKSKKGGIHRVWPAGNRELLFEIRLRDKSGVGIGTTDITLECTLWPEYHACKCNCNKPYLLHRPCSHVLAASAKGGVDGNIFVSPYFRKESWEATWRGELRGWRAVCDFTRPPPGQANWVPDSNLLVDTKGRRQSRRIKNLMDEAEVKDRSRRMADQNDGQLIDKEIDRNHRSRRLTTGTFCNVLKMRGPDQYWRIDPRWVPRLRAAGLLTFARLVEPSRARSERIHIDAALLSALVDRWRPETHTFHLTVGEMVPTLQDVSYLLGLPIAGPAVGPTMVNAGWADDFLASFGGVLPVALEDLTDGHGPTKSWLNQFRQDVFPDDQEEWIVQRHLVAYLLWLFGWVMFTGTHADSVDKHFIHFAEQIAELPIAEIPQYSWGSAVLAATYAGLCDACVRNSKQSSLPGCPLLLMLWAHERFDIGRPQLDSYANYGLQEMYRSGVDDIDDRPTMGSLWTHREPQWVSGTTRRVYTQFVADFDQLTPDRVRWTPYTQHDVNDRAPHGLADLCTRDMQLWRTTCHLVVDVHVEPHNVHRVLKQLGMYQDFPPRDGRPLADSLHRYSRKGLGLSYELVIVTTVQPTVQEWEHAADNLALQTPPDDGSYYGAYLRWYRSVTRWRCFPPQGDSTVPHQAAITDTFAPQPRSAYNSMAEFVEHVHVESDTLLQRLEARPPVVXDVVQTSGRRPSPPLHRRSSVDRSGPSSSRRGYEAAHTSHGRPSFQHTPAPEYTRGSTGSGVPTSSTAPPRPQXDEYGSASTHHGVPAYSPRTAFIEDFFSTDPPQGEVGMDYWHAAPQVTQPTQDTEAGQGPDVTPQQAARDRHPPDNLTYPTEQIRRRKKGGPSKRAKGTDRP

SEQ ID NO: 192878 - protein, 89 aa, Oryza sativa
  unsure (1)..(89): unsure at all Xaa locations
  Clone ID: PAT_MRT4530_89069C.1.pep
PTPSPAAAVPRAKPAASTALWDVLTFSGPAPERINGRLAMVGFVSALAVEASRGGGLLXRPAATTVSRGSPTPSPCSSRCWWCRCFSAR

SEQ ID NO: 192879 - protein, 314 aa, Oryza sativa
  Clone ID: PAT_MRT4530_8906C.1.pep
MAAGSSATDSPSSGRSLLLPTLHKHSPCLPPSFPPLATLSPRRNRARAVVLSLRRRRRAPVRRRRRPGPPPVSASPSSGSPRPRRSRPPLRFARRPPERRRPRRPEPRRRLPPLRSPFPSSPSTRGEPWTAHFVSPFPPLSRAPLRRAGGRCRRPSGCGCAASRRLCRRGRLRARPAALAGRPQPPLPSTSPQNPAPSRTRARIQRRGNDPLHVLHHFPHSPRENRRRLTPPPPHIGAPLRRPIPPRPASIPPSRAHKKHPRAPLVRFPIFPEPGILSLALPTPHPRAATLRRTPVAVSRRHSRRRGRRPFHRL

SEQ ID NO: 192880 - protein, 367 aa, Oryza sativa
  Clone ID: PAT_MRT4530_89070C.1.pep
MALEGEQTPGQATEAAREMDGDGGRDGGEWRREVVKWFHSLHHTQFRTNYSLYMPFYDYIYNTMDKSSSTLYESMLKISKEKSLDVVHLTHLTDLQSIYHLRPGFSMFAARGYNQSNWSMITILSPLSWLIAMCTWAFSSSPFAVDRSVLDKNLNMQTWAIPRYSFHYHLKRENKAINDLIGKAIHEADRRGAKVFSLGLLNQGSSLAAAVVSNSVASRTDQVILAGNLDKVARAVAMALCKRNVKIRWEALEVSVAKGIMWRQRGHRGMDGGDIGDGEARATVELTVEKQSSQEVSSQSREDDVLTKALGTEEHRGRTRGIGSSVPWKLGFPQYAWQYKKHKLSKAQKYARLKEQLRAELREELRE

SEQ ID NO: 192881 - protein, 173 aa, Oryza sativa
  unsure (1)..(173): unsure at all Xaa locations
  Clone ID: PAT_MRT4530_89071C.1.pep
RSKDDTGLGIEFSLLLVFLTTTDKSASARNIAVTLHLRVTPKGYRTQGTITRTGFRAVTTCRLPLTNPSDIQQTKKKFSEPGAECTDSSGTPPEFLLGSYTRRERSRMSVKLPGTPPELPLTLYLFLMYKXYNRASYNSTQSCVCWNEXKTSIYRLQMTVRGMGNDQNTLQPP

SEQ ID NO: 192882 - protein, 169 aa, Oryza sativa
  unsure (1)..(169): unsure at all Xaa locations
  Clone ID: PAT_MRT4530_89072C.1.pep
PPAEISRKCLLVFLTTTDKSASARNTAIALHLRVTPKEYRTQGTITTTGFRAVTTCCLPLTNPWDTQETKKKFSDPEVECNDSSGTPPEFLLXSYTRRGRSWMSAKLPGTPPELPLTLYLILMYKKYNRASCNSAQSCVSWXNKKVASLYRLQMTVRCMGNDQNTLQSP

SEQ ID NO: 192883 - protein, 162 aa, Oryza sativa
  unsure (1)..(162): unsure at all Xaa locations
  Clone ID: PAT_MRT4530_89073C.1.pep
KCLLVFLTTTDKSASAQNTAIALHLRVTLKGYRTQGTITRTGFRVVTTCRLPLTNPWDTQQRNKKFSEPGAECTDSSGIPPEFLLGSYTRRGRSRMSAKLSGTPPKLSLTLYLILMYKRYNRASCNSAQSCVSWXNEKVTSLYRLQMTVRGIENDQNTLQPP

SEQ ID NO: 192884 - protein, 250 aa, Oryza sativa
  Clone ID: PAT_MRT4530_89074C.1.pep
MAAAGDGAGGGGEQLTVLGAWGSPFLVRVRLALNLKGLSYEYVEVDLAGKSDLLLAANPVHAKVPVLLHAGRPVCESMLIVEYLDEAFPSSSSSAAAATTILPAADDPYARAVARFWAAFVDGELLSGWMGIYDGGKTGEERAAALARTRAALDALEGALRERAGGRWFGGERVGLVDVALGGFVPAMLASEPTTGVRIVDADRTPLLAAWVERFCALEEAKAAMPPLERLIAAGKKRYADLQAAAAASE

SEQ ID NO: 192885 - protein, 166 aa, Oryza sativa
  unsure (1)..(166): unsure at all Xaa locations
  Clone ID: PAT_MRT4530_89075C.1.pep
VQGGELTAVRTALPPSSQIWRWLLLVFLTTTDKSASARNTDVALHLRVIPKGYXTQGTITGTGFRAVTTYRLPLTNPWDTQQTKKKFSEPGAECTASSGTPPEFLLRNCSRRERSRMSAKLPGTPPELPLTLYLVLMYKKYNRASCNSAQSCVLEMRVSYSIYRQV

SEQ ID NO: 192886 - protein, 100 aa, Oryza sativa
  Clone ID: PAT_MRT4530_89076C.1.pep
RVFLCSIAPRIGSTSSLISPFGFLLPGSGMEFVFPLMWVNVGLYSPSLALVVPRTFRTVSQFLVTCSNCSSSPVGALVSVTGDPVALPSVHTLRTAALFC

SEQ ID NO: 192887 - protein, 168 aa, Oryza sativa
  unsure (1)..(168): unsure at all Xaa locations
  Clone ID: PAT_MRT4530_89077C.1.pep
ISLVCMSRVLVFLMTTDKSASARNTAVALHLRVTPKGYRSQGTIPGRDSRXPLTTCRPSLTNPWDTQQTNKKFSEPGAECTDSSGTPPELPIXSYTYRGRSRMSAKLPGTPPELPLTLYLILMYKRYNRASCNLAQSCVLXSVKESSIYSLHMTVTCMGNDQNALNHH

SEQ ID NO: 192888 - protein, 189 aa, Oryza sativa
  unsure (1)..(189): unsure at all Xaa locations
  Clone ID: PAT_MRT4530_89078C.1.pep
VVGGGCAKGEKGEEGEEEEEEEEDDAMAAMLVFLTTTDKSASARNTAVTLHLRVTPKGYRTQKMITRKGFRAVITCSLPLTNPWDTQQTKKKFSEPGAECTDSFGTPPEFLLESYTRRGRSRMSAKLPGTPPELLLTIYLILMYKRYNRASCNLAQSCVXSEVRERSFIYSLHMTVTAMGNVLNALQPS

SEQ ID NO: 192889 - protein, 97 aa, Oryza sativa
  Clone ID: PAT_MRT4530_89079C.1.pep
MGATRLLATWCKEGRSRVSLGLEELEQKEDWKEEGKMKRERKGKWRYNHPPAKIYSMKKTPATTPTRHRRLLWPTPSAGSRWEREGREAGSGRVGGS

SEQ ID NO: 192890 - protein, 87 aa, Oryza sativa
  unsure (1)..(87): unsure at all Xaa locations
  Clone ID: PAT_MRT4530_8907C.1.pep
PPPAGCXRPQPGVSTGSDRDMVWXILXGRXGXPGXPGRAAPPPALVPPPAGTASCCRRRRLRRPTTXXGTPASSFVNRRRPPPRRDR

SEQ ID NO: 192891 - protein, 178 aa, Oryza sativa
  unsure (1)..(178): unsure at all Xaa locations
  Clone ID: PAT_MRT4530_89080C.1.pep
MGTSLCKISATNTRFAQKCLLVFLATTDKSASAQNTAVALHLRVTPKGYRTQGTITGMEFRAVTTCCLPPTNPWDTQXTKKKFSEPEAECTNSSGTPPEFLLGSYTRRGRSRMSAKLLSTPPELPLTLYLILMYKRYNRASCNSAQSCVRWNEXSSSFYRLQMMVRGMGNDQNTLQLP

SEQ ID NO: 192892 - protein, 167 aa, Oryza sativa
  unsure (1)..(167): unsure at all Xaa locations
  Clone ID: PAT_MRT4530_89081C.1.pep
LTPVSRSLLLVFLTTIDKSASARNTAVALYLRVTPKGYQTQGTITRTGFRAVTTCRLPLTNPVDTQQTRKKFSEPGAECTDSSGTPLKFLLGSYTRRGRSRMSAKLPGTPPELPLTLYLILIYKRYNRVSYNSAQSCVSXNEKVTSLYRLQMTARGMGNEQNTLQPP

SEQ ID NO: 192893 - protein, 186 aa, Oryza sativa
  unsure (1)..(186): unsure at all Xaa locations
  Clone ID: PAT_MRT4530_89082C.1.pep
QLRNNRNSELKIKNIRSRVQSLYRNLCLLVFLTTTDKSTSARNTALALHLRVTPKGYRTQGTITRTGFKAVTTCPLPLTNPWDTQQTKKKFSEPGAECTDSSGTPPKLLLVSYTRRVRSRXSAKLPGTPPELLLTLYLFLMYKRYNRASGNSAQSCVLXMRVDSSLYRLQMTFRGMGNDQNTLQSP

SEQ ID NO: 192894 - protein, 264 aa, Oryza sativa
  Clone ID: PAT_MRT4530_89083C.1.pep
MDIKGFGQHRKMQLSELEEWRDKAYHNAKIYKDKTKRWHDKRIKHKEFKAREKVLLFNSRVKLFGHGKLQSKLMGPYTVVDASSHGAVTLSHNEGNIFKIIKLKLGIVKLEFIVYLKIICMPIILCSLLVTCGDISNRDPMLSRYFKEKTQQSCEETHFRPIRREHMDWRAHKTGATVMERVIIAITANRAHQSVTLPKKNPGGGAQGSVEPPQAPFIPAFHVYASDAFPMTVEGVLVISHSCNRHMEAINRAPLTHSQHTTLS

SEQ ID NO: 192895 - protein, 61 aa, Oryza sativa
  unsure (1)..(61): unsure at all Xaa locations
  Clone ID: PAT_MRT4530_89084C.1.pep
VGLCLTIFXGYPFPNAAFKPSHRTCREWAFHNCVGTSXFALKRTCGLKMENRIQVWCRRCK

SEQ ID NO: 192896 - protein, 437 aa, Oryza sativa
  Clone ID: PAT_MRT4530_89085C.1.pep
MASPSSRAVAVGGALLLLLVFAVPTTFLYLTSAPAASSPSLLLNLKPFGARCAPAAAAAPPLRVFMYDLPRRFHVGMMDASASGFPAWPPSAGGIRRQHSVEYWMMASLQGGGGGGNGSSSEEGREAVRVTDPDAAEAFFVPFFSSLSFNVHGRNMTDPETEADRLLQVELMEILWKSKYWQRSAGRDHVIPMHHPNAFRFLRDMVNASILIVADFGRYTKELASLRKDVVAPYVHVVDSFLNDDPPDPFDDRPTLLFFRGRTVRKDEGKIRAKLAKILKGKDGVRFEDSLATGEGIKTSTEGMRSSKFCLHPAGDTPSSCRLFDAIVSHCVPVIVSSRIELPFEDEIDYSEFSLFFSVEEALRPDYLLNQLRQIQKTKWVEIWSKLKNVSHHYEFQNPPRKGDAVNMIWRQVKHKVPAVNLAIHRNRRLKIPDWWG

SEQ ID NO: 192897 - protein, 100 aa, Oryza sativa
  Clone ID: PAT_MRT4530_89086C.1.pep
MNKRTHMNTRVLLPLPFAAAGPSPSLHHRPPPPGAVAFPLPPPAAPASPPAGPPLPARSGGGEAPPPPPPPLLRREPPPGCRLPSRRRHHRLHRQAAADA

SEQ ID NO: 192898 - protein, 113 aa, Oryza sativa
  Clone ID: PAT_MRT4530_89087C.1.pep
MAKVSVGTKKRRLDFGAFRGWSELAQPAAVELGQRRRYHCVVNREQQQIEAIFSGERSELACYLDASCSWGTRMDSMEEVAFSNVGQLQESTEAEAEGRKTGRFSCGLRQEMG

SEQ ID NO: 192899 - protein, 121 aa, Oryza sativa
  unsure (1)..(121): unsure at all Xaa locations
  Clone ID: PAT_MRT4530_89088C.1.pep
FRLPSAFLGGSRSVSPRSAAPLRPLPXPLPPSAAVASPLAGPPLPARSGGGEAPPPPPPPPPLLRREPPPGXSPSLPPPPPPPPPPGRRRRVRKARGGCERAEGRRREEREETTSPCLRCR

SEQ ID NO: 192900 - protein, 2202 aa, Oryza sativa
  Clone ID: PAT_MRT4530_89089C.1.pep
MGGGGGGDGRRRRPSAGGGGGGGGRGGGWRSGSSAAKDQRLRLGAEELLESRLGFAPYTDSERRLGWLLTFSPSSWEDEDTGKIYSCVDLYFVSQDGSTFKVKYKFPPYFYAATKDKMELEVEAYLRRRYEGDIADIEIIEKEDLDLKNHLSGLKRKYLKIQFDTVQQLMRVRSDLLHVVEKNEEELNAAEAFESIYGVKSLCSDDLVHYDRVERPQDYINCIIDLREYDVPYHVRFAIDNDVRCGQWYDVSVSSSDVLLHRREDLLQRAEVHVCAFDIETTKLPLKFPDAEYDTVMMISYMIDGQGYLIINREVPDVLFSIIIYQISAYYVQIMVYKHSFPVFTTCCLASNKTDYLVLPPFHNCVGEDIEDLEYTPKPEFEGHFKVKNVANELDLLKAWFSHMQEVKPGIYVTYNGDFFDWPFLEKRAAHHGIKMNEEIGFQCDNNQGECRAKFSCHLDCFAWVKRDSYLPQGSHGLKAVTKAKLGYDPLEVNPEDMVRFAMEQPQTMASYSVSDAVATYYLYMTYVHPFIFSLATIIPMSPDEVLRKGSGTLCEMLLMVQAFKANIICPNKHQADLEKFYNNRLLESETYIGGHVECLETGVFRSDLPTKFQLEPSACEQLIANLDRDLQYAISVEGKLDIDSVTNYDEVKDAIKQKLVSLRDHPIREECPLIYHLDVAAMYPNIILTNRLQPPSIVTDVDCTACDFNRPGKNCLRTLEWVWRGETYMAKKSDYHHIKRQIESEMIQAGGVTPSKPFLDLSKPEHLLKLKDRLKKYCQKAYKRVVDKPITEVRNAGICMRENSFYVDTVRSFRDRRYEYKGLNKSWKGKLAEAKANGNSIKIQEAQDMVVLYDSLQLAHKCILNSFYGYVMRKGARWYSMEMAGVVTYTGAKIIQNARLLVDKIGKPLELDTDGIWCVLPGSFPENFTFKTNAGKKLTISYPCVMLNVDVARNNTNDQYQTLNDPVNKLYTTHSECSIEFEVDGPYKAMILPASKEEGVLLKKRYAVFNEDGTLAELKGFEIKRRGELKLIKVFQAEVFDRFLHGSTLEECYTAVASVANRWLDLLDNQGIDISDNELLDFISESSTMSKSLVDYGEQKSCAVTTAKRLAEFLGDSMVKDKGLHCQYIVAREPQISNPVPRVLHPDWLHKKVREKDDRFRQRKLRDMFNPLEKDRGVQNLDGTGDMEDLLTLDGGMRKSHVPNGFGKENKPNDAPSTEAGSKHSKNKQKSITRSNEPLAVHIQNDAADEQVDRSTDYQGWLDAKKRKWKYVREQKKRQRLGAAVTSDGPTNDLFSARNVVIYSFTLMPDKLIYCPHQIIQLASSTLPGHFFAWVVAEGIMFKIPINVPRVFYLNSKAPVTEEFPGRRVKKILPHGRPCFNLIEVVTSEEQFRVEGKKLAAHLAEPDVEGIYETKILPELNAILQIGCVCKVDKSAKRRSIQDGWDLAELQMKTTAECSYLEQTVSFFYLYHSLSEGRGVYVMYFPTSFRIHAVVVNPFRNKELSPSFLEKQYRDACQALGSLHENITFLVDYHTSIDAGSKHVQRMLLEYRQQHPGPVIGVIECPKLQALKSAVRALDDFPCVTIPCNARDNNYQALGWQATAGRTSMQRCAASTQWFNERISLARYAHVPLGNFELDWLLFTADVFFSRALRDQQQVLWISDDGIPDLGGTYEGDTCFADEVIQPALTYPGAYRRVAVELKIHHLAVNSLLKSSQVDEMEGGPIGSFANDMPAGPNGTETEFDDATLCLPAFQVLKQLIQRCISDAVSSGNVFADAILQHLYRWLCSPRSKLHDPALHHLLHNVMKKVFALMLAEFRKLGANVIFANFSKIIIDTGKVDLLSARAYCDSLLKTLQTRDIFEWVELEPLHYWHSLLFMDQYNYGGIQAKMQNATSEGSSDGDNDIDIVSSWNIAEYLPKATQDHFVLIVSEFLYVPWKYMKEQVALRSTTRDETSCTPSITIMAAENLEVQVIGYLRDQISNYFADKLLRIVSDILHHFKGKGKSESVELTNREPDPHTHKGDAALEFIKHICAVLALDQNVQHDILRMRKNLLKLVRVKEFAPEAQFQDPCASFTLPNVICSYCNDCRDLDLCRDSTLQGQEWRCAVPQCGQPYHREQMENALLQDLVCLRCRQVKAAHLSEQCSCGGAFRCKEESSQFLSKMRVFLNVAVSQKFELLQDVVQWILERTENAEVIFIVS

SEQ ID NO: 192901 - protein, 295 aa, Oryza sativa
  unsure (1)..(295): unsure at all Xaa locations
  Clone ID: PAT_MRT4530_8908C.1.pep
MTSAVTSPTAAAARRSGRLGRRTLADERRREDANEEHQHVXDDAANTPVTKTAADEQRTTTATRRKRRKPSGCRRRRCSGDLRRRRRGERGRRRDGDHDDVLPERRRRLERRRRTAGAAATTAKLGHTALELFRRREAKAKVATGRGDSGGPFKGARRRRRRPTATGDGEGNLGLGEKETDPNRTRFHELPKRFSRXFQRRKGRGDPGDHFPPINSAGEGKERPNLERNGGGGSAAARXVSARGRRRXLTGGTHLSATERTRARAARLRTGPTWAGGERERXFGPTFGPKPKENF

SEQ ID NO: 192902 - protein, 63 aa, Oryza sativa
  Clone ID: PAT_MRT4530_89090C.1.pep
LLSVRISVPVFRVLPHCRSVLCRPVPFECHPLSCLMTLILVAALFFKCNLAPLNINYAIFCWP

SEQ ID NO: 192903 - protein, 650 aa, Oryza sativa
  Clone ID: PAT_MRT4530_89091C.1.pep
MATADVSRPSSSAPTAAAAGADGHGAKGSAFRGDGLRPYYQSRIHDLQLQIRQGTDNLSRLEAQRNVLNSQVITLGEELKVLHEPGSYVGEVVKVMGKSKVLVKCCVLVFVHMSVALEIIGEDNILLVHPEGKYVVDVDKSIDITKLSPSTRVALRNDSYMLHLILPSKVDPLVNLMKVEKVPDSTYDMIGGLDQQIKEIKEVIELPIKHPELFESLGIAQPKGVLLYGPPGTGKTLLARAVAHHTDCTFIRVSGSELVQKYIGEGSRMVRELFVMAREHAPSIIFMDEIDSIGSARMQSGSGGGDSEVQRTMLELLNQLDGFEASNKIKVLMATNRMDILDQALLRPGRIDRKIEFPNPNEDSRFDILKIHSRKMNLMRGIDLKKIAEKMNGASGAELKAVCTEAGMFALRERRVHVNQEDFLMAVAKALPDPAAVGYPSFKLILVGDGGTGKTTFVKRHITGEFEKRYEPTIGVEVRPLDFHTSRGKVRFCCWDTAGQEKFGGLRDGYYIHGHCAIIMFDVTSRLTYKNVPTWHKDICRVCDNIPIVLCGNKVDMKNRQVKAKMVTFHRKKNLQYYEISAKSNYNFEKPFLYLARKLTGDMNLRFVEELALLPADVTIDLIAQQKIETEIAAAAAMPLPDEDEDGLMD

SEQ ID NO: 192904 - protein, 206 aa, Oryza sativa
  Clone ID: PAT_MRT4530_89092C.1.pep
MGGRVARDCSESTRNGGFWGVMVVDLEKISGREQHSIGPLVHSGLVGVAFVGSKQIGRLAFLTVFSSSSSAATAGGHHRNVRLVRHFPLLPSSSSPISETPCSPSCSGKHGGAEEDQVDVRREDKARRARVGGPGVQPAQGHGGRQLHQIRYTTSDRIFGDYPLLSRKVRMPSPRTLLTVCHHKTPITLDWSRNPIFGDGKPSQVI

SEQ ID NO: 192905 - protein, 69 aa, Oryza sativa
  Clone ID: PAT_MRT4530_89093C.1.pep
MSDWGPVVIAVVLFVLLSPGLLIQLPGRHHFVEFGNLHTSAMSIVVHSIIYFALITLFVIVIGVHITTD

SEQ ID NO: 192906 - protein, 124 aa, Oryza sativa
  unsure (1)..(124): unsure at all Xaa locations
  Clone ID: PAT_MRT4530_89094C.1.pep
PKEKKANLRDPYSMKHVLNLTASXDAKSKGFPKDARLTNRRLPAGXVSDRRWLLAMLTHXKFEQNRYILLACIELHATLNVALQICTYTQEKNAILLTYPSAGSCNRTGRVXSSKEPRLSDMYT

SEQ ID NO: 192907 - protein, 126 aa, Oryza sativa
  Clone ID: PAT_MRT4530_89095C.1.pep
MARPVKISVAIKRLEPTQQSGTDHTKHGRPQRPSQVSSRDYTINIQRRRGPKNTPPADTQRDPHRAEANQTPPGKAQPKQPQNPFLPRNAPTCYAASTDHNNQNPDHNTRYQTPEKFGPSTPGEAN

SEQ ID NO: 192908 - protein, 113 aa, Oryza sativa
  Clone ID: PAT_MRT4530_89096C.1.pep
MALLSRSNAPAVAMGGRGGGEPTRGRGGRWQETEREKAWSSREWGKPAVSAHREGGGGASEGGGEAGGERRRGRRLGRWDSPKYHSQLRGFAEIPFSFDSPFPRIFVDLFKSI

SEQ ID NO: 192909 - protein, 56 aa, Oryza sativa
  unsure (1)..(56): unsure at all Xaa locations
  Clone ID: PAT_MRT4530_89097C.1.pep
MASDXIEKIKSKIEAANKAVSKIGQHMSGGGSGGSQAGSQGGGDQAPEAEYEEVKK

SEQ ID NO: 192910 - protein, 1515 aa, Oryza sativa
  unsure (1)..(1515): unsure at all Xaa locations
  Clone ID: PAT_MRT4530_89098C.1.pep
MSGDMPIRLYYGDAPIQTCDSGVDLTVYAFHDTSLNAPEHMGLNDVLGWLYNMFGVDPVHDKFVINAVWPVRGQHGWQWRVVEVASTGSWRKFVSKIREKGYSLAIVVQKTTCVDRSGESSHAVVEETPLEGGQAENVWRTEQGRGEEVVEGNTQGEVIVRGTNREANDSDDEEPDSPMRVDAAEENEAVVDQMEVENEEYLALVVEGEDTTLWDNETNIPDDWTTISMSRMKVNDGLDAHWCYDSKQVKVGQMFHNKGHLQDAVKRWAFVQKREFRVKVSNRTTYDVKCIQGGCPWRVHGYKPQHDTLWVALRVEQHTCLLENTRLVHRNLTAAFVAQMVYSKVVRKISLSPFTIMHDVKKEYGYEISYDKAWRAKQKALEMRFGTYEDSYHNLPPLLEVMQARNPGTHMAILDESFGCMIEAFRNCIPLLCVDGTFMIGKYRGTILTAIGVDADSHVVPVAFAFVESENTSSWLWFLRHIKMCVVENRPNVCVLHDRHAGLLSAIQKLQEDVTQSVPWPDLHSRWCMRHFGANFYRQFRSKRLMDLFKKLCKQNQQRKFDAIWDQLDRLTTTHIEEVRKKPIVARQEEPEGLEPIPNEAPSITWRRKRGRATKCFTEWVEFEPREKWSLLYDTDGSSLNLSKPNVKYSPTITQYMDEKSKKGGIHRVWPAGNRELLFEIRLHDKSGVGIGTTNITLECTLWPEYHACKFNCNKSYLLHRLCSHVLAASAKGGVDGNIFVSPYFRKESWEATWRGELRGWRAVCDFTRPPLGQANWIPDSNLLVDTKGRRQSRRIKNLMDEAEVKDRSRRMADQYDGQLIDKEIDRNHRSRRLSTGTFCNVLKMRGPDQYWRIDPRWVPRLRAAGLLTFALLVEPSRARSERIHIDAALLSALVDRWRPETHTFHLTVGEMVPTLQDVSYLLGLPIAGPAVGPTMVNAGWADDLLASFGGVLPVALEDLTDEHGPTKSWLNQFRQDVFPDDQEEWIVQRHLVAYLLWLFGWVMFTGTHADSVDKHFIHFAEQIAELPIAEIPQYSWGSAVLAATYAGLCDACMRNIKQSSLPRCPLLLMLWAHERFDIGRPQLDSYAHYSLREMYRSGVDDIDDRPTMGSLWTHREPQWVSGTTRRVYTQFVADFDQLTPDRVRWTPYTQHDVNDRAPHGLADLCTRDMQLWRTTCHLVVDVHVEPHNVHRVLKQLGMYQDFPPRDGRPLADSLHRYSRKGLGLSYELVIVTTVQPTVQEWEHAADNLALQAPPDDGSYYGAYLRWYRSVTRWRCFPPQGDSTVPHQAAITDTFAPQPRSAYNSMAEFVEHVHVESDTLLQRLEARPPVVRPDDVASVLRNFRXTSGRRPSPPLPRRSSVDRSGPSSSRRGYEAAHTSHGRPSFQHTPAPEYTRGSAGSGVPTSSMAPPRPQXDEYCSASTHHRMPAYSPRTAFIEDFFSTDPPQGEVGMDYWHAAPQVTQPTQETEAGQGPDVTPQQAARDRHPPDNLIYPTEQIRRRKKGGPSKRAKGTDRP

SEQ ID NO: 192911 - protein, 73 aa, Oryza sativa
  unsure (1)..(73): unsure at all Xaa locations
  Clone ID: PAT_MRT4530_89099C.1.pep
GKLHLSIFSQDEHLHCTSPVFHXLXKQDVIFYTGYTTKKKKLGNVTCKXXSFVVTAALVPTEEAAQFAXLQPF

SEQ ID NO: 192912 - protein, 233 aa, Oryza sativa
  unsure (1)..(233): unsure at all Xaa locations
  Clone ID: PAT_MRT4530_8909C.1.pep
MGVEDVLARHSARPRVAKPAQPAGXGARAPMVAGGGHRHGGAAAERGEGKGEKKRRSTAHPRSTATTKKAAGPEEGGGAARVDGVDGVPAVGERNGGGGGVDEVGEDAAKPKEAAPRWEVVRGDDDGGPELGGDGGERERRRELDSGERRKRTEEGITGNNSPLLIARGDDGXGGFGGGGGGSGGRKGMTGGPHPSARVAGGPARQRXARGGRPNGPREEEKEGEGDGPNSAH

SEQ ID NO: 192913 - protein, 857 aa, Oryza sativa
  Clone ID: PAT_MRT4530_890C.1.pep
MAAAVAMRGSSSDGGGYDKVSGMDSGKYVRYTPEQVEALERVYADCPKPTSSRRQQLLRECPILANIEPKQIKVWFQNRRCRDKQRKESSRLQAVNRKLTAMNKLLMEENERLQKQVSQLVHENAHMRQQLQNTPLANDTSCESNVTTPQNPLRDASNPSGLLSIAEETLTEFLSKATGTAIDWVQMPGMKPGPDSVGIVAISHGCRGVAARACGLVNLEPTKVVEILKDRPSWFRDCRNLEVFTMIPAGNGGTVELVYTQLYAPTTLVPARDFWTLRYTTTMEDGSLVVCERSLSGSGGGPSAASAQQYVRAEMLPSGYLVRPCEGGGSIVHIVDHLDLEAWSVPEVLRPLYESSRVVAQKMTTAALRHIRQIAQETSGEVVYALGRQPAVLRTFSQRLSRGFNDAISGFNDDGWSIMGGDGVEDVVIACNSTKKIRSNSNAGIAFGAPGGIICAKASMLLQSVPPAVLVRFLREHRSEWADYNIDAYLASTLKTSACSLTGLRPMRFSGSQIIIPLAHTVENEEILEVVRLEGQPLTHDEALLSRDIHLLQLCTGIDEKSVGSSFQLVFAPIDDFPDETPLISSGFRVIPLDMKTLELIEAFGFKYSLGKIKQDGASSGRTLDLASSLEVGSATAQASGDASADDCNLRSVLTIAFQFPYELHLQDSVAAMARQYVRSIVSAVQRVSMAISPSQTGLNAGQRIISGFPEAATLARWVCQSYHYHLGVELLSQSDGDAEQLLKMLWHYQDAILCCSFKEKPVFTFANKAGLDMLETSLVALQDLTLDRIFDEPGKEALFSNIPKLMEQGHVYLPSGVCMSGMGRHVSFDQAVAWKVLAEDSNVHCLAFCFVNWSFV

SEQ ID NO: 192914 - protein, 1553 aa, Oryza sativa
  unsure (1)..(1553): unsure at all Xaa locations
  Clone ID: PAT_MRT4530_89100C.1.pep
MSGDMPIRLYYGDAPIQICDSGVDLTVYAFHDTSLNAPEHMGLNDVLGWLYNMFGVDPVHDKFVINAVWPVRGQHGWQWRVVEVASTGSWRKFVSKVREKGYSLAIVVQKTKCVDRSGESSHAVVEETPLEGGQAENVWRTEQGRGEEVVEGNTQGEVIVRGTNREANDSDDEEPDSPMRVDAAEENEAVVDQMEVENEEYIALVVEGEDTTLWDNETYIPDNWTTISMSRMKVNDGLDAHWCYDSEQVKVGQMFHDKGHLQDAVKRWAFVQKREFRVKVSNRTTYDVKCIQGGCPWRVHGYKPQHDTLWVASRVEQHTCLLENTRLVHINLTAAFVAQMVYSKVVRKTSLSPFTIMHDVEKEYGYEISYDKAWRAKQKALEMRFGTYEDSYHNLPPLLEVMQARNPGTHIAILDEVNEYGENVLRRAFWSFGCMIEAFKNCIPLLCVDGTFMTGKYRGTILTAIGVDADSHVVPVAFAFVESENTSSWLWFLRHIKMCVVENRPNVCVLHDRHAGLLSAIQKLQEDVTQSVPWPDLHSRWCMRHFGANFYRQFKSKRLMDLFKKLCKQNQQRKFDAIWEQLDRLTTTHMEEVRKKPIVARQEEPEGLEPIPNEAPSITRRRKRGRATKCFTEWVEFEPREKWSLLYDTDGSRYGVMTTNLAEVYNWVMKNTRPLPLVAILEGITRGTQKYLCKRYSMASLNLSKPSVKYSPAITQYMDEKSKKGGIHRVWPAGNRELLFEIRLRDKSGVGIGTTDITLECTLWPEYHACKCNCNKPYLLHRPCSHVLAASAKGGVDGNIFVSPYFRKESWEATWRGELRGWRAVCDFTRPPPGQANWVPDSNLLVDTKGRRQSRRIKNLMDEAEVKDRSRRMADQNDGQLIDKEIDRNHRSRRLTTGTFCNVLKMRGPDQYWRIDPRWVPRLRAAGLLTFARLVEPSRARSERIHIDAALLSALVDRWRPETHTFHLTVGEMVPTLQDVSYLLGLPIAGPAVGPTMVNAGWADDLLASFGGVLPVALEDLTDGHGPTKSWLNQFRQDVFPDDQEEWIVQRHLVAYLLWLFGWVMFTGTHADSVDKHFIHFAEQIAELPIAEIPQYSWGSAVLAATYAGLCDACVRNSKQSSLPGCPLLLMLWAHERFDIGRPQLDSYANYGLQEMYRSGVDDIDDRPTMGSLWTHREFVADFDQLTPDRVRWTPYTQHDVNDRAPHGLADLCTRDMQLWRTTCHLVVDVHVEPHNVHRVLKQLGMYQDFPPRDGRPLADSLHRYSRKGLGLSYELVIVTTVQPTVQEWEHAADNLALQTPPDDGSYYGAYLRWYRSVTRWRCFPPQGDSTVPHQAAITDTFAPQPRSAYNSMAEFVEHVHVESDTLLQRLEARPPVVXDVVQTSGRRPSPPLHRRSSVDRSGPSSSRRGYEAAHTSHGRPSFQHTPAPEYTRGSTGSGVPTSSTAPPRPQXDEYGSASTHHGVPAYSPRTAFIEDFFSTDPPQGEVGMDYWHAAPQVTQPTQDTEAGQGPDVTPQQAARDRHPPDNLTYPTEQIRRRKKGGPSKRAKGTDRP

SEQ ID NO: 192915 - protein, 75 aa, Oryza sativa
  Clone ID: PAT_MRT4530_89101C.1.pep
MGPRELLLSAIFTVFFLLLLCLGCKCIALEIHLHTTKTAVLKDDALLQHSSTDPRHRYLEYFFEETNHAGAGGIM

SEQ ID NO: 192916 - protein, 73 aa, Oryza sativa
  Clone ID: PAT_MRT4530_89102C.1.pep
MSCSFPWGSFCFFLVVLCLPDSNISTSSHGCFVEERTALMDIGSSLTRSNGTAPRSWGRGDDCCLWERVNCSN

SEQ ID NO: 192917 - protein, 1959 aa, Oryza sativa
  unsure (1)..(1959): unsure at all Xaa locations
  Clone ID: PAT_MRT4530_89103C.1.pep
MPPLLGVYDFTAGLPPSPPTGVLAYAVGWSHHRSWASTSSPTGWPSPPPTGVSACTAGLLCRRCWASTTSPPACLRRRRLVPPPTRLAYYAAAVGRLRLHRRLASVAAEWCLRLHGWPIMPPLLGVYDFTAGLPPLPPSGASAYTAGLLCRRCWASTTSPPAYLRRRRLVSSPIRLVGHTTVHGRPRLRRPAGLRRRRLVFPPTRLAYYAAAVGRLRLHRRPASVAADWCPRLYGWLVTPPFMGVHVFADRLAFAAADWIQIQICIKGIHGFKLISYAPGMDQSEHHHRLALTAADWCFRLHGWPLCRRCWASTSSPTGLPSPPPTGVSACTAGLYAAVVGRLRLYRPACLRRCRLVFPPARLAFMPPLLDVYVFTDRLAFAAADWCFRLHGWPLCRRCWASTSLPTGLPSPLPTGVSACTLPLLMDIIVFRRRLVFTTVKVLFGFIKQLIGYNIIAFCHAVGKSFMSLLTRMLYHICHIFPGLMLELLRFNDEPRGDPSLSPVTHTPKSIAQQQTSVLCRFRGGSRWGLTVCQTECTSFEAQDSSRRGFAADPCRLATFSVVRMSGDMPIRLYYGDAPIQICDSRVDLTVYAFHDTSLNAPEHMGLNDVLGWLYNMFGVDPVHDKFVINAVWPVRGQHGWQWRVVEVASTGSWRKFVSKVREKGYSLAIVVQKTKCVDQSGESSHAVVEETPLEDGQAENVWRTEQGRGEEVVEGNTQGEVIVRGTNREANDSDDEEPDSPMRVDAAEENEAVVDQMEVENEEYIALVVEGEDTTLWDNETYIPDNWTTISMSCMKVNDGLDAHWCYDSKQVKVGQMFHDKGHLQDAVKRWAFVQKREFRVKVSNRTTYDVKCIQGGCPWRVHGYKPQHDTLWVASRVEQHTYLLENTRLVHRNLTAAFVAQMVYSKVVRKTSLSPFTIMHDVEKEYGYEISYDKAWRAKQKALEMRFGTYEDSYHNLPPLLEVMQARNPGTHMAILDEVNEYGENVLRRAFWSFGCMIEAFKNCIPLLCVDGTFMIGKYRGTILTAIGVDADSHVVPVAFAFVESENTSSWLWFLRHIKMCVVENRPNVCVLHDRHAGLLSAIQKLQEDVTQSVPWPDLHSRWCMRHFGANFYRQFRSKRLMDLFKKLCKQNQQRKFDAIWEQLDRLTTTHMEENTRPLPLVAILEGITRGTQKYLCKRYSMASLNLSKPSVKYSLAITQYMDEKSKKGGTHRVWPAGNRELLFEIRLRDKSGVGIGTTDITLECTLWPEYHACKCNCNKPYLLHRPCSHVLAASAKGGVDGNIFVSPYFRKESWEATWRGELRGWRAVCDFTRPPPGQANWVPDSNLLVDTKGRRQSRRIKNLMDEAEVKDRSRRTFCNVLKMRGPDQYWRIDPRWVPRLRAAGLLTFARLVEPSRARSERIHIDAALMSALVDKWRPETHTFHLTVGEMVPTLQDVSYLLGLPIAGPAVGPTMVNAGWADDLLASFGGVLPVALEDLTDGHGPTKSWLNQFRQDVFPDDQEEWIVQRHLVAYLLWLFGWVMFTGTHADSVDKHFIHFAEQIAELPIAEIPQYSWGSAVLAATYAGLCDACVRNSKQSSLPGCPLLLMLWAHERFDIGRPQLDSYANYGLREMYRSGVDDIDDRPTMGSLWTHREPQWVSGTTRRVYTQFVADFDQLTPDRVRWTPYTQHDVNDRAPHGLADLCTRDMQLWRTTCHLVLDVHVEPHNVHRVLKQLGMYQDFPPRDGRPLADSLHRYSRKGLGLSYELVIVTTVQPTAEFVEHVHVESDTLLQRLEARPPVVXDVVQTSGRRPSPPLPRRSSVDRSGPSSSRRGYEAAHTSHGRPSFQHTPAPEYTRGSAGSGVPTSSTAPPRPQXDEYGSASTHHGVPAYSPRTAFIEDFFSTDPPQGEVGMDYWHAAPQVTQPTQETEAGQGPDVTPQQAARDRHPPDNLTYPTEQIRRRKKGGPSKRAKGTDRP

SEQ ID NO: 192918 - protein, 336 aa, Oryza sativa
  Clone ID: PAT_MRT4530_89104C.1.pep
MTAFRRNSGDAVAWPGERTALQCRERWWRRRPVHRGRGRGGRRRRSGGDATGRRRGRVSGDFPAKRRADRGRGGSCDAGRGGGAAGGCTGRDSDFTRPPPGQANWFPDSNLLVDTKGRRQSRRIKNLMDEAEAKDHSRRKKACILCGENLAHKDCSMYNVGKDAAAQRPGDRLRAAGLLTFARLVEPSSARPERIHIDAALLSALMDRWRPETHTFHLTVGEMVPTLQDVSYLLGLPIAGAAVGPTMVHAGWADDLLASFGGVLPVALEDLTDGHGPRKSWLNQFRQDVFPDDQEEWIVQRHLVAYQLWLFGWVMFTGTHADSVDKHFIHYAEQIA

SEQ ID NO: 192919 - protein, 371 aa, Oryza sativa
  Clone ID: PAT_MRT4530_89105C.1.pep
ARGTHLNLPRDDGGDGDGDGEGEEAEAARRRAAAGGRRRGEGPPEGEEAEEGEARPGAAVADQEQGQAQGQKRKLARERGQAAQRAVELGEQPPEKLVPRTIENTREPDETVCRPDDQELFAGNDADEFNAVLKQQTTPKVLITTCRFNSGRGPAFIEELMQVIPNSCYVKRGTYELKKIVEYANNRDFTSLVVVHTNRREPDALLIINLPAGPTAHFKLSKLILRKDIKNHGNPTSHKPELVLNNFTTRLGHRVGRYIFEMKENKIASKDKKAKTSESKSQPEKQVICRLQECGPRFTLKLLTLQHGTFDTKNGEYEWVHKAGWQIAACCWVLLLHMAWGSHPIQVRPYVSARTSVQARAYDTEHLHASY

SEQ ID NO: 192920 - protein, 113 aa, Oryza sativa
  Clone ID: PAT_MRT4530_89106C.1.pep
NPKISPNLDFILGLLWHIYIYIREKVGPSKGKKTKINLLQFRRGDKSFKMRGEVGWEQTPSFPYSGYLKLCRGGDGIYIQGTGPNLYIYKLSRGYDFATQFRGPRASGGGGQP

SEQ ID NO: 192921 - protein, 227 aa, Oryza sativa
  Clone ID: PAT_MRT4530_89107C.1.pep
RLCALAACFFLLCSGPHRQPPPRVAIVSLMSGDMPIRLYYGNAHIQICDSGVDLTVYVFYDTSLNAPEHMGSNDLLGWLYNMFEVDPVLDKFVINAMWPVRGQHGWQWRVVEVALTGSWRKFVSKVREKGYSLTILVWKTTFVDRSGESSHAVVEETPLEGAQVENVWRTEQGQREEVVEGNTQAEVIVRDNNREANDSDDEELDSPMRVDAAEENEAVVDPMGTGR

SEQ ID NO: 192922 - protein, 360 aa, Oryza sativa
  Clone ID: PAT_MRT4530_89108C.1.pep
MAKERKRRQPADAPPPGDDDEGRDHRREKKPRKERPDPVLPSQIKNKDKRKEVHAKLKREKKAQKRKLARERGQAAQRAVELGEQPPEKLVPRTIENTREPDETVCRPDDQELFAGNDADEFNAVLKQQTTPKVLITTCRFNSGRGPAFIEELMQVIPNSCYVKRGTYELKKIVEYANNRDFTSLVVVHTNRREPDALLIINLPAGPTAHFKLSKLILRKDIKNHGNPTSHKPELVLNNFTTRLGHRVGRMIQSLFPQEPNFRGRRVVTFHNQRDYIFFRHHRYIFEMKENKIASKDKKAKTSESKSQPEKQVICRLQECGPRFTLKLLTLQHGTFDTKNGEYEWVHKPDMDTSRRRFFL

SEQ ID NO: 192923 - protein, 1944 aa, Oryza sativa
  unsure (1)..(1944): unsure at all Xaa locations
  Clone ID: PAT_MRT4530_89109C.1.pep
MANKFTTKPHVFDGSDFAYWCDKMQSYIMAEDYDVWQKVALPYVIPEQIDTIALKTEFNNNCKARNILLSGISRLDFNRVSHLKTANEIWNALNNFHQEYINFEMKPGEALDDYLGRFNKILSDLRFIDSTYDVNYTQSKVSHYFLSGLDMSIWEMKVTSIQESVDMSTLTLDSLYTKLKTYEMNILSRKVDPKSSALFEEEDLALAANKISRAINNVRYRKRGGSTHCFECGALDHIRSHCPNLWRGKKEDNGGEKTKDNKLKSTFKGKKTKENLKKMFDQVYAAFEPLSDVDGENENEDKGKNISGVCFMARGELDSECKTMRLARKQKNEREIAFAKSKWQKSGFPSRKPALVARKENVWIMDSGCSRHMTGDKNWFSSLKQASKTESIIFDDASISAVLYRFGQGFTQMEGLDFDGTFTPVARIEIYVDDIVFGCSTHALVVEFAETIRREFEMSMMGELSYFLGLQIKQTPQGQTYNLLGICVHVFKLLLVLHIVKRMSGDMPIRLYYGDAPIQICHSEVDLTVYAFHDTSLNAPEHMGLNDVLGWLYNMFGVEPVLDKFVINVVWPVRGQHGWQWRVVEVASTGSWRKFVSKADDSDNEEPDSPMRVDAAEENEAVVDQMEVENEEYIALVVEGEDTTLWDDETNIPDDWMTISMSCMKVNDGLNAHWRYDSKQVQVGQMFHDKCHLKVAVKRWAFDQKREFRVKVSNRTTYKVKCTQAGCPWRVHGYKPQHDTLWVDSRVEQHTCLLENTRLVHRNKTAAFVAQMVYSKVVRKTSLSLFTIMHDVEKEYGYEISYDKAWWAKQKALEMRFGTYEDSYHNLPPLLEVMQARNPGTHMAILDEVNEYGENVLRRAFWSFGCMIEAFKNCIPLLCVDGTFMTGKYRGTILTAIGVDADSHVVPVAFAFVESENTSSWLWFLRHIKIQFRSKRLMDLFKKLCKQNQQRKFDAIWEQLDRLTTTHMEEVRKKPIVARQEEPEGLEPIPNEAPSITRRRKRGRATKCFTEWVEFEPREKWSLLYDTDGSRYGVMTTNLAEVYNWVMKNTRPLPLVAILEGITRGTQKYLCKRYSMASLNLSKPSVKYSPAITQYMDEKSKKGGIHRVWPAGNRELLFEIRLRDKSGVGIGTTDITLECTLWPEYHACKCNCNKPYLLHRPCSHVLAASAKGGVDGNIFVSPYFRKESWEATWRGELRGWRAVCDFTRPPPGQANWVPDSNLLVDTKGRRQSRRIKNLMDEAEVKDRSRRMADQNDGQLIDKEIDRNHRSRRLSTGTFCNVLKMRGPDQYWRIDPRWVPRLRAAGLLTFARLVEPSRARSERIHIDAALMSALVDRWRPETHTFHLTVGEMVPTLQDVSYLLGLPIAGPAVGPTMVNAGWADDLLASFGGVLPVALEDLTDGHGPTKSWLNQFRQDVFPDDQEEWIVQRHLVAYLLWLFGWVMFTGTHADSVDKHFIHFAEQIAELPIAEIPQYSWGSAVLAATYAGLCDACVRNSKQSSLPGCSLLLMLWAHERFDIGRPQLDSYANYGLREMYRSGVDDIDDRPTMGSLWTHREPQWVSGTTRRVYTQFVADFDQLTPDRVRWTPYTQHDVNDRAPHGLADLCTRDMQLWRTTCHLVVDVHVEPHNVHRVLKQLGMYQDFPPRDGRPLADSLHRYSRKGLGLSYELVIVTTVQLTVQEWEHAADNLALQTPPDDGSYYGAYLRWYRSVTRWRCFPPQGDSTVPHQAAITDTFAPQPRSAYNSMAEFVEHVHVESDTLLQRLEARPPVVXDVVQTSGRRPSPPLPRRSSVDRSGPSSSRRGXASGSAHFPYMPTGDNVLNTPAWGLHITPRAPEQGHTQHTYDEYGSASTHHGVPAYSPRTAFIEDFFSTDPPQGEVGMDYWHAAPQVTQPTQETEAGQGPDVTPQQAARDRHPPDNLTYPTEQIRRRKKGGPSKRAKGTDRP

SEQ ID NO: 192924 - protein, 247 aa, Oryza sativa
  Clone ID: PAT_MRT4530_8910C.1.pep
MRPVAELASAPASYAHAANGTAAHSPWQSPVPYLFGGLAAMLGLIAFALLILACSYWKLSGYLDGGSGNGQASGSAAAGEGAEGEKGSAAGAARPALGFREHVVVIMAGDERPTFLAMPATSRPAVELGAAPVASSCGCSHSEEEKKVEEFRTCRQKEKGKCLNSSCFNQLITTSNTGLGNNQKGTQLRFRIPIPAYSIWQQPGTFHIKLVEEHLKKHREFGSLGLPVGRSLNLILLLSHTSTCAGI

SEQ ID NO: 192925 - protein, 460 aa, Oryza sativa
  unsure (1)..(460): unsure at all Xaa locations
  Clone ID: PAT_MRT4530_89110C.1.pep
MRVEKAPFPEGFLRRTKGRGLVVMSWAPQRKVLEHSAVGGFVTHCGWNSMLEALTAGVPMLAWPLYAEQRMNKVFLVEEMRLAVAVEGYDKGVVTAEEIQEKARWIMDSNGGRELRERSLAAMWESRSPRSYPEMSPKKLAVIYPPPGMIGHLVSTVELGKLLVPHGIDVTIVLGGQDDGGAAATASFLADAAATNPELSFHRLPQPTLPCNVPADDYVSRXVFEFARASGPDLXALDVGAELRIPTYFFLTTCIASLAFLLYLPVIQEENTMSFRDLSGDLVHAPGIPPIPADHLPMSQLDRDSVSSRHFLALSEQVCNSHGVMVNSCHSLERRAADAIVAGLCTFPGRRTPPLHCIGPLIKPREEDSTERHQCLAWLDSKTHAGVFLCADGRWDGLVGRLQPLIAVGQSTRLPRNEWVEAGLPGTKRRAWSAGGARRCSRARCARSRVTETARFSDAL

SEQ ID NO: 192926 - protein, 1607 aa, Oryza sativa
  Clone ID: PAT_MRT4530_89111C.1.pep
MGVRQAGLKPRLPSSRCLFDLFEDHIASRRRESPHRRRDMPIRLYYGDAPIQICDSGVDLTVYAFHDTSLNAPEHMGLNDVLGWLYNMFGVDPVHDKFVINAVWPVRGQHGWQWRVVEVASTGSWRKFVSKVREKGYSLAIVVQKTKCVDRSGESSHAVVEETPLEGGQAENVWRTEQGRGEEVVEGNTQGEVIVRGTNREANDSDDEEPDSPMRVDAAEENEAVVDQMEVENEEYIALVVEGEDTTLWDNETYIPDNWTTISMSRMKVNDGLDAHWCYDSKQVKVGQMFHDKGHLQDAVKRWAFVQKREFRVKVSNRTTYDVKCIQGGCPWRVHGYKPQHDTLWVASRVEQHTCLLENTRLVHRNLTAAFVAQMVYSKVVRKTSLSPFTIMHDVEKEYGYEISYDKAWRAKQKALEMRFGTYEDSYHNLPPLLEVMQARNPGTHMAILDEVNEYGENVLRRAFWSFGCMIEAFKNCIPLLCVDGTFMTGKYRGTILTAIGVDADSHVVPVAFAFVESENTSSWLWFLRHIKMCVVENRPNVCVLHDRHAGLLSAIQKLQEDVTQSVPWPDLHSRWCMRHFGANFYRQFRSKRLMDLFKKLCKQNQQRKFDAIWEQLDRLTTTHMEENTRPLPLVAILEGITRGTQKYLCKRYSMASLNLSKPSVKYSPAITQYMDEKSKKGGIHRVWPAGNRELLFEIRLRDKSGVGIGTTDITLECTLWPEYHACKCNCNKPYLLHRPCSHVLAASAKGGVDGNIFVSPYFRKESWEATWRGELRGWRAVCDFTRPPPGQANWVPDSNLLVDTKGRRQSRRIKNLMDEAEVKDRSRRMADQNDGQLIDKEIDRNHRSRRLSTGTFCNVLKMRGPDQYWRIDPRWVPRLRAAGLLTFARLVEPSRARSERIHIDAALMSALVDRWRPETHTFHLTVGEMVPTLQDVSYLLGLPITGPAVGPTMVNAGWADDLLASFGGVLPVALEDLTDGHGPTKSWLNQFRQDVFPDDQEEWIVQRHLVAYLLWLFGWVMFTGTHADSVDKQFIHFAEQIAELPIAEIPQYSWGSAVLAATYAGLCDACVRNSKQSSLPGCPLLLMLWAHERFDIGRPQLDSYANYGLREMYRSGVDDIDDRPTMGSLWTHREPQWVSGTTRRVYTQFVADFDQLTPDRVRWTPYTQHDVNDRAPHGLADLCTRDMQLWRTTCHLVVDVHVEPHNVHRVLKQLGMYQDFPPRDGRPLADSLHRYSRKGLGLSYELVIVTTVQPTVQEWEHAADNLALQTPPDDGSYYGAYLRWYRSVTRWRCFPPQGDSTVPHQAAITDTFAHQPRSAYNSMAEFVEHVHVESDTLLQRLEARPPVVRCGADVGPTAITTTTPTFQRGSEWSILFTSRGASGSAHFPYMPTGDNVLNTPAWGLHITPRAPEQGHTQHTYDEYGSASTHHGVPAYSPRTAFIEDFFSTDPPQGEVGMDYWHAAPQNATLSNCGSSTDILLNCGSSTAQPVERGLFDSPACRTGAVRQVLSNGSLPISSPVALWPFDRRPIELHPFDRDLFSRFSPVDHSPMPEEAPVMRTTFPLSCSLLSGFTNAHKNSRTGTDSGMYTNTTSAATTCISTLWIGR

SEQ ID NO: 192927 - protein, 1241 aa, Oryza sativa
  unsure (1)..(1241): unsure at all Xaa locations
  Clone ID: PAT_MRT4530_89112C.1.pep
MRPETRLDSAVFQLTPTRTRCDLVVIANGRKEKIASGLLNPFVAHLKVAQQQIAKGGYSITLEVDPEIDAPWFTRGTVERFVRFVSTPEVLERVTTIESEILQIEDAITGQGGDNLGLRSVEDYNEKLAECIGGSKTNYDLDGDKSLILYKPGIQPPPPVQNDNATQEENSKVQLLRVLETRKIVLRKEQAMAFARAVAAGFNIDNLGFLITFADRFGASRLMKACTQFTELWRRKHETGQWIEVEPEAMSARSEFPPFNASGIMFMGDNMKQNLETLSISNGDANGEDAAKADQRTAQHSGAPSEYLHGPYQSAYPPWAIHPPYPMQGMPYYPGVNPYYPPPYPPMDDPRYHHSERRVSRKHSSDSKDSETLDDESGQSGSEIESSHGHKLHKKGKRSGKKKPSVVVIRNINVTSKKHGSSESESQTSSDVASEDSDDSHTEYSKRKNKRSSSKKKESRKIILEPGDEYSRDEVAHRQDGDQGNWNVFQSFLLRTEEKTKDNDADLFATERGPPPARRKESRTTDDPLLLVERDSTDFNEGKTIGFNSAHGRIRSRKMLSGDELVISAEGRSFVDGDIKEIEAGGGGYRRGASEDFIVYGQEKPMDSGSYLDPLAEGQYKSPTLMEKNMHSVADESFMIPVRSNSQDNLGPESCTAIDIDVELPGTVKKTTDAKAXDLQKAKKEQEEEQIKRLERLKQERQKRIAARSSTXIQYLHHEDANADDVSLGVEGEVKKLEKDKKLRLQECLDKKKDASARRLPSSKTRLTDAQKRAQNLRAYKADLQKAKKEQEEEQIKMNGPVKQERQKRIAARSSTSNSISTPQQVKVKPSPKTSPSTYKSSKFSDAEPGSFSPLRKLPARTTAESDHQKTGKASKLSDSSTNAVSKSTSSLAAMKKEKNGRNELSSERLKKLAEPKSNALTDRPSNSKFASMDHSRRKSMPEDTQTKKISAIMQLDQRKSATLPELKVKSPRAPSISVKNKTIAREIRDGDPGEVSRISNSDDNVVVEKTVVILENEVVSTPPLILPPGRTSENETSSNDRTQKPSMELEYTAIRAPPSPAVLPEAENPTIHRHNDQGNYEVMTEHLKDETEELTLSAVEKPYQAPFARVTSLENDSATIHAYPHALPVESETPVHAESIRARVLDPVSTVSVEETPEANEKPRNKESKGFRKLLKFGRKSHTSGFTTPLNTISLSVKSNSIDGSMLKTLISRDDSGSSSKASRSFSLLSPFRRQKVIVL

SEQ ID NO: 192928 - protein, 1549 aa, Oryza sativa
  Clone ID: PAT_MRT4530_89114C.1.pep
MSGDMPIRLYYGDAPIQICDSGVDLTVYAFHDTSLNAPEHMGLNDVLGWLYNMFGVDPVHDKFVINAVWPVRGQHGWQWRVVEVASTRSWRKFVSKVREKGYSLAIVVQKTTCVDRSGESSHAVVEETPLEGGQAENVWRTEQGRGEEVVEGNTQGEVIVRGTNREANDSDDEEPDSPMRVDAAEENEAVVDQMEVENEEYIALVVEGEDTTLWDNETNIPDDWTTISMSRMKVNDGLDAHWCYDSKQVKVGQMFHDKGHLQDAVKRWAFVQKREFRVKVSNRTTYDVKCIQGGCPWRVHGYKPQHDTLWVASRVEQHTCLLENTRLVHRNLTAAFVAQMVYSKVVRKTSLSPFTIMHDVEKEYGYEISYDKAWRAKQKALEMRFETYEDSYHNLPPLLEVMQARNPGTHMAILDEVNEYGENVLRRAFWSFGCMIEAFKNCIPLLCVDGTFMTGKYRGTILTAIGVDADSHVVPVAFAFVESENTSSWLWFLRHIKMCVVENRPNVCVLHDRHAGLLSAIQKLQEDVTQSVPWPDLHSRWCMRHFGANFYRQFRSKRLMDLFKKLCKQNQQRKFDAIWEQLDRLTTTHMEEVRKKPIVARQEEPEGLEPIPNEAPSITRRRKRGRATKCFTEWVEFEPREKWSLLYDTDGSRYGVMTTNLAEVYNWFMKNTRPLPLVAILEGITRGTQKYLCKRYSMASLNLSKPSVKYSPAITQYMDEKRGVDGNIFVSPYFRKESWEATWRGELRGWRAVCDFTRPPPGQANWVPDSNLLVDTKGRRQSRRIKNLMDEAEVKDRSRRMADQNDGQLIDKEIDRNHRSRRLSTGTFCNVLKMRGPDQYWHIDPRWVPRQRAARLLTFARLVEPSRARSERIHIDAALMSALVDRWRPETHTFHLTVGEMVPTLQDVSYLLGLPIAGPAVGPTMVNAGWADDLLASFGGVLPVALEDLTDGHGPTKSWLNQFRQDVFPDDQEEWIVQRHLVAYLLWLFGWVMFTGTHADSVDKHFIHFAEQIAELPIAEIPQYSWGSAVLAATYAGLCDACVRNSKQSSLPGCPLLLMLWAHERFDIGRPQLDSYANYGLREMYRSGVDDIDDRPTMGSLWTHREPQWVSGTTRRVYTQFVADFDQLTPDRVRWTPYTQHDVNDRAPHGLADLCTRDMQLWRTTCHLVLDVHVEPHNVHRVLKQLGMYQDFPPRDGRPLADSLHRYFRKGLGLSYELVIVTTVQPTVQEWEHAADNLALQTPPDDGSYYGAYLRWYRSVTRWRCFPPQRDSTVPHQAAITDTFAPQPRSAYKSMAEFVEHVHVESDTLLQRLEARPPVVRSDDVASVLRNFRARAAALLRRVSCRSAADVVQTSGRRPSPPLPRRSSVDRSGPSSSRRGYEAAHTSHGHPSFQHTPTPEYTRGSAGSGVPTSSTAPPRPQVFQTPPYVHPSQGVSGSAHFPYMPTGDNVLNTPAWGLHITPRAPEQGHTQHTYDEYGSASTHHGVPAYSPRTAFIEDFFSTDPPQGEVGMDYWHAAPQVTQPTQETEAGQGPDVTPQQAARDRHPLII

SEQ ID NO: 192929 - protein, 187 aa, Oryza sativa
  unsure (1)..(187): unsure at all Xaa locations
  Clone ID: PAT_MRT4530_89115C.1.pep
DSARASLLRKSTEKSXALXXATTSSFLPSALSARNXGXVKDSAFLGVRLGDXLKLXTXALGXRTXKVSXXXVAIPAHASXAVSSXXVXPASPXGXHTXXXGTAVXSGXSSGLGLPTAKALAEXGXWHXXMGCPXFLXAXRPXXGAGMEKGXYTILHLQLAXLXNVXQFVPHXXGVXIPSNLWCTPPC

SEQ ID NO: 192930 - protein, 159 aa, Oryza sativa
  unsure (1)..(159): unsure at all Xaa locations
  Clone ID: PAT_MRT4530_89116C.1.pep
LLVFFTTTDKSASPWNTAEALHLRVTPKGYRTQGTIIRTEFRVVTTCRLPLTNPWDTQQTKRSFSEPEAECTDSSGTPPEFLLGSYTRXGRSRMSAKLPDTPTXLSLTPYLIIMYKRYNRASCNSAQSCVCWNEXSSSFYRLQMTVRGMGNDQNTMQPP

SEQ ID NO: 192931 - protein, 258 aa, Oryza sativa
  Clone ID: PAT_MRT4530_89117C.1.pep
MGRAPCCEKMGLKRGPWTAEEDRILVAHIERHGHSNWRALPRQAGLLRCGKSCRLRWINYLRPDIKRGNFTREEEDAIIHLHDLLGNRWSAIAARLPGRTDNEIKNVWHTHLKKRLEPKPSSGREAAAPKRKATKKAAAVAVAIDVPTTVPVSPEQSLSTTTTSAATTEEYSYSMASSADHNTTDSFTSEEEFQIDDSFWSETLAMTVDSTDSGMEMSGGDPLGAGGASPSSSNDDDMDDFWLKLFIQAGGMQNLPQI

SEQ ID NO: 192932 - protein, 169 aa, Oryza sativa
  unsure (1)..(169): unsure at all Xaa locations
  Clone ID: PAT_MRT4530_89118C.1.pep
VAFNSIHRKCLLVFRTTTDKSTSARNIAVALHLRVTPKGYRTQGTITGTEFRAVTTCRLPRTNPWDTQNKGKRFSEPGAECTDSSGTPPEFLLGSYTRRGRSRMSAKLPGTPPELALTLYLILMXKRYKRASCNSAQSCVLXMNERSSIYSLHMTVTGMGNDQTTLQPS

SEQ ID NO: 192933 - protein, 74 aa, Oryza sativa
  unsure (1)..(74): unsure at all Xaa locations
  Clone ID: PAT_MRT4530_89119C.1.pep
LRDYNIELYPNSXNPGRFLHEWTIMKCDRXCIKGDGLETQTILERTHLFDLDCWSQSTDILGESSRKLTMRQRS

SEQ ID NO: 192934 - protein, 44 aa, Oryza sativa
  Clone ID: PAT_MRT4530_8911C.1.pep
QPRTLMASSSTSSASVLEKKPKNTIGVSEGGRRPVETMRTAKSF

SEQ ID NO: 192935 - protein, 677 aa, Oryza sativa
  Clone ID: PAT_MRT4530_89120C.1.pep
MEQPTIQNLYAPRADLCEPSCSSKPILSDGYEIGPSFIAMIREQTFSGSISENPYIHHRDFELVCSGLSIVGMTHETVKWKLFPFSLRDKAKQWYTLSVKKFHGEWEELKCKFYLAFFPLTCLINLRLDILISFRQNEKESLGAAWAKFSLLTQSGPDFSLPDHVLLQHFRYALDKESAANLDISAGESFAHKTTAEGRELLDLILENDSFGQSEAIPEVEIIHEEPLHMESEPDSTAESSFQLLQPEEEEIHPPEIPLQFRDDLYKDYGNTLNYSSKIKAHPKHEPFEEVMFVSSFIFSEPIAHLHETERSSSPSMKPKPCPSGLQNVVLIYHQETTQFLHDASLEKENLQATDKLTTSTLEDERKHSTYEHESFSFKIPQDSSSLKESPESCSISAASLCEDHNHLSVLISNMFRSVVVDAYIYHKYCKSHICLTLILQSNVPMVKLVTINKALPGDTPDYHVGTCTFAKKRCILRLYSIVPTDHAFKTQGSCTRGNKKTIKEQCTVTSTLISRSLLLVFLTTTDKSASAQNTAVALHLRVTPKGYRTQGTITGTEFRAVTTCRLPLTNTWDTQQTKKKFSEPGAECTDSSGTPPEFLLGSYTRRGRSRMSAKLPGTPPELPLTLYFIRMYKRYNRASYNSVLSCVCWNEMKTSLYRLQMMVRGMGNDQNTLQPP

SEQ ID NO: 192936 - protein, 347 aa, Oryza sativa
  unsure (1)..(347): unsure at all Xaa locations
  Clone ID: PAT_MRT4530_89121C.1.pep
MMGRSPCCEKEGLKKGPWTPEEDQKLLAYIEQHGHGCWRSLPSKAGLQRCGKSCRLRWTNYLRPDIKRGKFSLQEEQTIIQLHALLGNRWSAIATHLPKRTDNEIKNYWNTHLKKRLAKMGIDPVTHKPRSDVAGAGGGGGGAAXGGAAGAQHAKAAAHLSHTAQWESARLEAEARLAREAKLRALAASATPGAPHLPAPPASAAAAAAAHGLDSPTSTLSFSESAVLATVLEAHGAAAAAAARAAMQPMQAYDEACKDQHWGDVDAADVGFPGAGAGFTGLLLEGSLNQIPRPAGRDAEADGEFQETEEEKNYWNSILNLVNSSSAPMSTAVVVPASHAYSPAPDF

SEQ ID NO: 192937 - protein, 170 aa, Oryza sativa
  unsure (1)..(170): unsure at all Xaa locations
  Clone ID: PAT_MRT4530_89122C.1.pep
TVPRQRRQKCLLVFLTTTDKSASAWNTVVALHLRVTPKGYRTQGTITRTGFRAVTTCRLPLTNPWDTXQTKRRFSEPGVVCTYSSGTPPKFLIESYTRXGRSRMSAKLPGTPPELLLTLYLILVYKXYNRASCNSAQSCLSWXNEKVISLYRLQMTVRGMGNDQNTLQPP

SEQ ID NO: 192938 - protein, 39 aa, Oryza sativa
  Clone ID: PAT_MRT4530_89123C.1.pep
HTCEAVTTYHASLSTMALGTEVTVHFNTADKCITGVLYC

SEQ ID NO: 192939 - protein, 326 aa, Oryza sativa
  unsure (1)..(326): unsure at all Xaa locations
  Clone ID: PAT_MRT4530_89124C.1.pep
MHFPACVQCLQQNTMARCFVLNTGAKIPSVGLGTWQAEPGVVGNAVYAAVKAGYRHIDCAQAYFNEKEIGVALKKVFDEGIVKREDIFITSKLWCTNHAPEDVPVALDSTLQDLQTDYVDLYLIHWPVRMKKGAGFGGQNVLPTDIPATWAAMEKLHDSGKARAIGVSNFSSKKLEDLLAVARVPPAVDQVECHPVWQQTKLRKFCTSKGIHLSAYSPLGSPGTASVKAVGNXLAHPVVVSTAEKLGKTPAQVALRWGIQMGHSVLPKSTHEERIKENIDVYDWSIPEDLFIKLSEIEQMKLIRGEFWTHPEGVYKSIEELWDGEI

SEQ ID NO: 192940 - protein, 278 aa, Oryza sativa
  unsure (1)..(278): unsure at all Xaa locations
  Clone ID: PAT_MRT4530_89125C.1.pep
MAEKTLRYFTAPSTDNVPVGPQINLGDGDFDLNTSLITMAQASPFCGKPNENAXAYLQQFLEICSTYAMKGVSPDAVRIRLFPFSLLGKAKQWFYANRASLXDTWNKCSTAFLSKFFPKGKTNALHIRILSFXQRRDESIPEAWEMLQEYVAAYPHHGMDDWLILQNFYNGLTPLSRDHLDAAAGGAFFSKTVRGVVDLIEKMVSNMGYVPSPLLLATQILHAPPPTPPPRPSSALAATLEKLLAGLASPPRAPATSVAVCPDREYGASRKCHYKAHA

SEQ ID NO: 192941 - protein, 113 aa, Oryza sativa
  Clone ID: PAT_MRT4530_89126C.1.pep
MACCRIVLVFFFFFFFFCVCVLVATTTTMDAVKGTSAAAAGGGGGGRWTELTAGSPARYSAGADEFRGSKRRIPKGPDPIHNRNFMAFRVLNSSRNMDQNGLEWTTVPCMNIP

SEQ ID NO: 192942 - protein, 366 aa, Oryza sativa
  Clone ID: PAT_MRT4530_89127C.1.pep
MNLMESYEIPMECLFPRKCAGNGRKWRSHTALELSTSSSRAVKAGRRARCVHHASALVRPPSFGRLAMFVLILSASRVTQRWREESHQGVQAGGVEEPPLFEAECVHGRIEMRAKKRKRERELLRIALEGAIVESPQAVPISVRGADLESGEGSSDSVTSDAGSAKAAADDVVHIAHALCKVCAKSPKAVNEFVRRVSPATVGRSIDWDLVRDNDSSKATGLGRDPLTSAIVANDSWWESKNAVCTLHDRWSRSPEGAGPLGWRQGFLLSPLPREGAARWVSPGSGERRSGGDADGGSGRARWQSARQAPMASVGRGVVAAVEVADSVGDSGRLGGRQRRKGGSGLGVQERRRILKSTAALWAAEA

SEQ ID NO: 192943 - protein, 164 aa, Oryza sativa
  unsure (1)..(164): unsure at all Xaa locations
  Clone ID: PAT_MRT4530_89128C.1.pep
ICLGKSLLLVFLITTDKSTSAQNTAVALRHRVTPKGYRTQGTITGTGFRAVTTCRLPPTNPWDTQQTKKKFSEPGTECTDSSGTPPEFLVGSYTRRGRSRISAKLPGTPPEFPLTLYLILMXYNRASFNSAQSYVSEMRVNSSLYMLQMPVTAMGNDQTTPQPP

SEQ ID NO: 192944 - protein, 171 aa, Oryza sativa
  unsure (1)..(171): unsure at all Xaa locations
  Clone ID: PAT_MRT4530_89129C.1.pep
FPPHHFKIFQPLLVFLTTTDKSASARNTVVALHLRVILKGYRTQGTITRTGFRAVTTYRLPLTNPWDTQQRKRSFSKPRAECTDSSGTTPEFLLGSYTHRGRSWMSGKLSGTPPKLPLTLYLILMYKRXNRASCNSAQSCVXSEGRERSSIYSLHMTITGMGNDQNALNRH

SEQ ID NO: 192945 - protein, 1620 aa, Oryza sativa
  unsure (1)..(1620): unsure at all Xaa locations
  Clone ID: PAT_MRT4530_8912C.1.pep
MAGSLNRRGLDLTGFVLELRGMCVVLGYPHGVDYQGKQLPEQEGDDAEPHAAWEVTAVILTGSPERTSLAVTAGGDSFSAACQNAALLAIGTLHQRYPDELQHSPYRYHPCRGGARDYATFRDASSEDDATIMHLARMVEAYNAARIDFHRMVRRGLVENNMKILELRXENLQLKKDLDAVEAQLCQLKIAQGEVCRPKRRRVCRSLKITARKSTSRPELVRQSLAWTCFVETPRAEPTPSVPQEEGASGVGSTEDVLLLTFHXTTRRSAVTGKGNHPEGSNHSNHGRPPSPSSPPPPPPPDTNPILTQILAQQANMMAAFLHHIQNPPQHNAPPPPPPPQHSKLAEFLRIRPPTFSSSNNPVDALDWLHAAGKKLDTVQCNDEEKVIFATHQLQGPASLWWDHFQATQPEGXPITWACFTAAFRRTHVPAGVMALKKREFRELKQGNHSVMEYLHEFNSLARYAPEDVWEDEEKQEKFLAGMDPELSVRLVSGDYPDFQRLVDNSIRLEAKHKELESHKRRLANFRNQQGANQMIRYTNPYPGGSSSQQQQQPRSAPRPQFVVRVPQSQQQQSQQGTRAPRPPAPAVQLGQGRRDAQGQQRLCFNCFEPGHFADKCPKPRRQQGQAPPRPNNGGKDVTRGRVNHVTAEDVLTTPDVIVGTFLIHSIPATILFDSGASHSFISVPFVERNXLRVERLRNPLLITTLGGVMTAKYYSPAVPIEIQGIPFPSDLILLDTKNLDVILGMNWLAQFQGVVDRARRTVTLYRGPDQPVVFFAPPTSAGSSVLNQLGLPEIPIVSEFGDVFPEELPSMPPQREIEFQIDLAPGTTPLYKRPYRMAAHELAEVKKQLEELKEKGYIRPSTSPWGSPVIFVEKKDKTKRICVDYRALNEVTIXKNKYALPRIDDLFDQLKGATVFSKIDLRSGYHQLRIREEDIPKTAFTTHYGLYEFTVMSFGLTNAPAFFMNLMNKVFMEYLDKFVVVFIDDILVYLQSEEDHQQHLRLALGKLREHPLYAKLSKCEFWLSEVKFLGHVISAKGVAVDPETVTAVTDWKQPKTVTQVRSFLGLAGYYRRFIENFSKIARPMTQLLKKEEKFVWSPQCEKAFQTLKEKLVSSPVLILLDTRKDFLVYCDASRQGLGCVLMQEGHVVAYASRQPRPHEGNYPTHDLELAAVVHALKIXRHYLIGNRCKIYTDHKSLKYIFTQSDLNLRQRRWLELIKDYDVGIHYHPGKANVVADALSRKSSCNTLGVRGIPPELNQQLEALNLSIVSHGFLATLEAKPTLLDQIREAQKNDLDMHGILKNMKQGKAAGFTEDEHGTLWNGNRCVKAEHQRPARLLQPLQVPEWKWDEIGMDFITGLPKTQGRYDSIWVVVDRLTKVARFIPVKTTYGGNKLAELYFARIVSLHGVPKKIVSDQGSQFTSDIWKKLQEELGTRLNFSTAYHPQTDGQTERLNQILEDMLHACVLDFGKTWDKSLPYAEFSYNNSYQASIQMAPYEALYGRKCQTPLLWDQVGESQVFGTDILREAEAKVRTIRDNLKVAQSRQKSYADTRRRNLEFAVDDFVYLRVTPLRGVHRFQMKGKLAPRFVGPFRIIARRGEVAYQLELPTSLGNVHDVFHVS

SEQ ID NO: 192946 - protein, 125 aa, Oryza sativa
  Clone ID: PAT_MRT4530_89130C.1.pep
GSPFEARFPKGLAFPCQGLPRGGGVPNPFHGPRGSKKPWFPKGPHPKETFLFKNLRPKGQPSIFGSFLCFLESIIGGGAFPGFFFFLEVLCCKEGISCSPVQFFPRVLFFPIVGQGNIKAFFLAF

SEQ ID NO: 192947 - protein, 547 aa, Oryza sativa
  Clone ID: PAT_MRT4530_89131C.1.pep
MAIATAALLSLLAVLRAGGDVDDGGGAIMEPCLAAAGVRNVTARRERDAYDAALRASAQNLRFAGDGVAKPAAVVVPATRGELRDAVRCAREAGLGAVRLRSGGHSYEGVSYTGEDDGGFVVVDLLALDGVRVDAASRTAWVESGATLGQVYQAVAAASPALAFSAGSCPTVGSGGHIAGGGFGFLSRKYGLAGDNVIDAVLIAADGRVLDRAGMGENVFWAIRGGGGGTWGAVYAWRIQLVPVPERVTAFVVNRPGTAESVAELVAAWQHVAPWLPDEFYLSAFVGAGLPEMNRTGISVTFKGLYLGPAHEAVEILTARLPEIGLSDLNPIEMSWIESVVFFSGLPQGSSVSDLTDRVLHKKKYFKAKSDYVRRPMRIGELIRAIDLLSTEPKAYVILDPYGGAMDRIGSASLPFPHRRGNIHGIQYLIEWTANDDDHREEYMDWIRRFYEFMGSYVPNSPRTAYINYMDLDLGMNNWSNLRMYGGDGIPNPEVEAARVWGERNFSLPLSPSYTTLLDSIQNLRFVLPDVSKPVALVIPTSKLDLQ

SEQ ID NO: 192948 - protein, 674 aa, Oryza sativa
  Clone ID: PAT_MRT4530_89132C.1.pep
MSRRQEGARVPAVVGGCRSGGGGGRWTVDGVPPATGAGAAPSTAPGLGRVGDGGEHGRRELKRLRRQRTSGEWATVGGGRWGARAAGAKEAAVGCCPPPPSPPPRSRRRRPPRPCRVPDRDQPSAAPRTPATAAALVSDLVGCGHSHHPQDALPPLRVSTRQCYRERECGRRHWRRSLQRPRKPRCPSHPMLSLSPSLVCLLVLLPFLSLLLLHRSAFPASRSPLLAHLTASSSSRSSASGFAGGDLREIEFSWNHLPFRQSRPPPARLKIAVFSRKWPVASAPGGMERHAHTLHTALAARGHRVHVFTSPPPHTEAAPPRSADGPQLHFLDGDPGVWRCDEAWKLYEAEAENDPFDVIHSESVAVFHRWARGVPNLVVSWHGISLEALHSGIYQDLARGDDERMSPAFNHSLAQSVYRVLSEVRFFRSYAHHVAISDATGEMLRDVYQIPSRRVHVILNGVDEAQFEPDAALGRAFREDLGLPKGADLVFGVSGRLVKDKGHPLLYEAFSKLVLRHPNVYLLVAGKGPWEQRYMDLGRNAKVLGAVPPEKLKAFYNALDVFVDPTLRPQGLDLTLMEAMQCGKPVLATRFPSIKGSIVVDDEFGYMFAPNVESLLEKLEAVVEEGARRAAQRGRACRDYAKTMFAATKMALAYERLFLCVKNDTFCAYPAEFD

SEQ ID NO: 192949 - protein, 159 aa, Oryza sativa
  unsure (1)..(159): unsure at all Xaa locations
  Clone ID: PAT_MRT4530_89133C.1.pep
LLVFLTTTDKSTSAQNTAIALHLRVTLKGYXLRXTITRTEFRAVTTCHLSLTNPWDTQQTKRSFSEPRAEFTDSSGTPPEFLLESYTRRGRSRMSAKLLGTPPELPLTLYLFIMYKRYNKASCNLAQSCVSXSVKETSFYRLQMTVTSMGNDHCALQPS

SEQ ID NO: 192950 - protein, 644 aa, Oryza sativa
  Clone ID: PAT_MRT4530_89134C.1.pep
MGCAQGKPSQGSPARSDGRGIDHLMRKNRYVPVASSRLSDPLPAAAPAAARLLLRPQGQQQDAARGSGRRAATAAVERELQTDQRDGGNDRQTDHHQAMDESSSAAVAEAEATAAAAAVDEEETPAPAPQPAPRREDELVGQGTYSNVYKARERGTGRVVALKKVRFDTSESESVRFMAREMMILRRLDHPNVIRLDGIATSRMHRSIYLVFDFMYSDLTRIICRPDHRLTEPQVGKMLATWIEGGVESGADEVKRKLSTKAINGRVEKGAVPDHEVESKPRAVAVGRSGSWFARPRGTRRIKCYMQQLLSGLQHCHERGILHRDIKGSNLLIDRHGVLKIGDFGLANYYGRRRPLTSRVVTLWYRAPELLLGATDYGVGIDLWSAGCLLAEMFSGRPLMPGRTEIEQLSRIFTLCGSPPDDYWRKMRLPPTFRPPRTYKPSMVDKIAFLPPPALALLATLLALDPAARGTAAQALQSSFFSTPPLPCHLSELPVVYKEEDEVAASHDGRKPKLRERSHKRRDNKPKAEEQHKDKEQNLNSSPSNKEEKIMEDTKKSAQDSKRFSDGQVQEVFPKGSPAPQDQQVPRTNTYSPDNDHHKNHKVVIFNHNLWTLGIVLVYVAKGPLAFWIPGCSMTGLQGGCLHV

SEQ ID NO: 192951 - protein, 203 aa, Oryza sativa
  unsure (1)..(203): unsure at all Xaa locations
  Clone ID: PAT_MRT4530_89135C.1.pep
GPHLSIPLSLFLCSSSSSCTPGVWRCNEAWKLYXEAEAENDPFDVIHSESVAMFHCWARDVPNLVVSWHGISLEALHSRIYQDLTRGEDERMSPASNHSLAQSVYRVLSEVHFFRSYVHHVAISDTTGEMLRDVYQIPNRRVHVILNGVDEAQFEPDAALGRAFREDLRLPKGANLVLGVSGRLVKGADLVLVAVGQISLSLP

SEQ ID NO: 192952 - protein, 125 aa, Oryza sativa
  Clone ID: PAT_MRT4530_89136C.1.pep
MSRRQEEARVPVVVVVAVDLHDHAEYQIETSRPPPLVCPPPPPLLSPTSSAAAIATTHGTRRCRSGIASDPQVITGSHNSTIRLWDLAAGKTALTLTHSRAAAAAAEDDLEFGGGEPGRRGGGWR

SEQ ID NO: 192953 - protein, 142 aa, Oryza sativa
  Clone ID: PAT_MRT4530_89137C.1.pep
HGRCLLVFLTTTGKSASARNTAVALHLRVTPKEYRTQGTINRTGFRAITTCRLPLTKPWDTQQTKVIFNLDTTHKSSTPPEFLLESYTRRGRSRMSAKLPGTPPEHPLTLYLIVMYKRYNRASCNSAQSCVMESRVSSSFYR

SEQ ID NO: 192954 - protein, 219 aa, Oryza sativa
  unsure (1)..(219): unsure at all Xaa locations
  Clone ID: PAT_MRT4530_89138C.1.pep
LFHQVVEQYAFIPQRGRGGGGESHDLVDAVIGGPNSNDVFVDHRNAYMQTEACTYNTAPMVGVFSKLMEVEVERXACARSAXVAGDEQADLKALVANGNANIKVDAGTHPQTAAGHGRLLCSQRSAPHAPPATAAPRLLPRRPARRFAPRLRPAXRPLRPPPTPLRRMGPLLARLRRHREPRRHRQPDARPHQNDRFSLCMPCFSIVSCEDNLAYSSSW

SEQ ID NO: 192955 - protein, 161 aa, Oryza sativa
  unsure (1)..(161): unsure at all Xaa locations
  Clone ID: PAT_MRT4530_89139C.1.pep
FLLVFLTTTQKSASARNTIVALHLXVTPKGYRTQGTITRTGFRAVTTYRLPLTNPWDKQQTKKKFSEPGAECTDSSGTPPEILLESYTRRGRSRMSAKLPDTPPELPLTLYLIPMYKRYNRASCNSAQSCVCXEVREMSSIYSLHMTVTGMRNDLNALNCH

SEQ ID NO: 192956 - protein, 287 aa, Oryza sativa
  Clone ID: PAT_MRT4530_8913C.1.pep
MVSGKLQGVPMPEEPLLVINIWYPGSEDGCIDAGDAKLDARSNVAEATLAVMLIPQPQSPKQQMQRQCLQQQVQAQMQAGIRIRVKVSLFSKSKHLQPQTVRHQVFCRPAQLSHPPIPEATSATYSGYGLQGQFLQGCSTFLVFKVRALRKTEECWLFFKDNSSKVLSQAKSKDRRGETKWLVVKGVSCEPLAKLPQSQVNRFDSKVIKLLASTVQSKISKFQEYPQFWPRSVQAEPVGPVLAKQRNRKVESSQCNRADQSDRPPAPAFFLAIPESRDEIPVRGVDL

SEQ ID NO: 192957 - protein, 217 aa, Oryza sativa
  unsure (1)..(217): unsure at all Xaa locations
  Clone ID: PAT_MRT4530_89140C.1.pep
MNRFLKPHSCPPPPLLPAPGDPGSAAHNAGPRPGXGGESHDLVDAVIGGPNSNDVFVDHRNAYMQTEACTYNTAPMVGVFSKLMEVEVERXACARSAXVAGDEQADLKALVANGNANIKVDAGTHPQTAAGHGRLLCSQRSAPHAPPATAAPRLLPRRPARRFAPRLRPAXRPLRPPPTPLRRLEREKREREDREKRLVRMTCGPHGSTAGTPPSTP

SEQ ID NO: 192958 - protein, 64 aa, Oryza sativa
  Clone ID: PAT_MRT4530_89141C.1.pep
MEAQSHLRNVHSPSQSMSSAQLLTQHSIQPYAARGGNAFFLLKRLLGSYRYVSGGLNVQFPIFF

SEQ ID NO: 192959 - protein, 217 aa, Oryza sativa
  Clone ID: PAT_MRT4530_89142C.1.pep
MAAFNRELTRRGARVDGGGSDWQTNQWVGHFGRVARTFRLMVFNRMSKRVDPIGCFGGVDRFRWRYKEAQEVRVAAVCAFCVEAEPVAEIRVARGGVVLGGVHRSSGRSLRRRRRLPDEELASRTPAAELPGTTADSPRPAVRRLLAGPETQRRRLPEVGGRRLLAGLAQAGHRREAVVVGDGFGTEAAPHWGEARGGRERDRRVEEEIGSIWIDLI

SEQ ID NO: 192960 - protein, 99 aa, Oryza sativa
  Clone ID: PAT_MRT4530_89143C.1.pep
SSLMYIIGPLQLNTKRKIELGRFSFSSLQLYPTIKARFVLSILLLRRGRLWLSPFYLPPRGGGAPGIPKFPPPHFMGILRFTKNPPWGPPPFFLKLLPL

SEQ ID NO: 192961 - protein, 188 aa, Oryza sativa
  unsure (1)..(188): unsure at all Xaa locations
  Clone ID: PAT_MRT4530_89144C.1.pep
KEETPAXXKIXTLFFXFXXPXKGXMPAAPRIFCEGTQRPKXWERRDXXTRXXGPFLSLFXPXDGGMRRRAXXFXGGTXQRXRGRGVTRRRANXERRDXSEXRGFFXXRGGSPPVARRDAAAHGXRCGGXRLRXRGRGGXRRRANLERREQSAASXFFVVVEEGARRRRGGRRRRADVGEEEPAISRPI

SEQ ID NO: 192962 - protein, 1270 aa, Oryza sativa
  unsure (1)..(1270): unsure at all Xaa locations
  Clone ID: PAT_MRT4530_89145C.1.pep
MSGDMPIRLYYGDAPIQICDSGVDLTVYAFYNTSLNAPEHMGLNDVLGWLYNMFGVDPVLDKFVINAVWPKTTCVDRSGESSHAVVEETPLEGAQAENVWRTEQGRGXEVVEGNTQAEVIVRDNNREADDSDDEEPDSPMRVDAAKENEAVVDRMEVENEEYIALVVEGEDTTLWDNETNIPDDWTTISMSRMKVNDGLDAHWRYDSKQVQVGQMFHDKGHLQDAVKRWAFDQKREFRVKVSNRTTYDVKCTQAGCPWRVHGYKPQHDTLWVASRVEQHTCLLENTHLVHRNMTAVFVAQMVYSKVVRKTSLSPFTIMHDVEKEYGYEISYVKAWRAKQKALEMRFGTYEDSYHNLPPLLEVMQARNPGTHMAILHEVNENRENVLRRAFWSFGCMIEAFRNCIPLLCVDGTFTTSKYRGTILTVIGVDADSHVIPVAFAFVESENTSSWLWFLWHIKMCVVQNRPNVCVLHDRHAGLLSTIQKLQEDVTESVPWPDLHSRWSMRHLGANFYRQFRSKRLMDLFKKLCKQNQQRKFDAIWEQLDHLTTTHMEENTRPLPLVAILEGITRGTQKYLCKRYSMASLNLSKPSVKYSPAITQYMDEKSKKGGMHRVWPAGNRELLFEIRLRDKSGVGIGTTDITLECTLWPEYHACKCNCXKPYLLHQPCSHVLVASTKGGVDANHFVSPYFMKEAWEATWRGELRGWRAVCDFTRPPPGQANWVLDSXLLVDTKGCRQSRRIKNLMDEAKAKDRSRMAEQYDVQLIDKEIDRNHRSRRLSRGTFCNVLKMRGPDQYWRIDPRWVPLRAAGLLTFARLVEPSRXALLSALVDRWRLETHTFHLTVGEMVPTLQDVSYLLGLPIAGPAVGPTMVQAGWADDLLANFGGVLPVALEDLMDGHGPTKSWLNQFRHDVFPDDQEDWIVRRHLVAYLLWLFGWVMFTGTHTDSVDKHFIHYAEQIAELPIAEFPQYSWGSAVLAATYAGLCDACLRNSKQXSLPGCPLLLMLWAHERFDIGRPQLDSYANYELREMYKSGVGDLDNRPTMGSLWTHCEPKWVSGTTRRVYTQFVANFDQLTPDRVRXTPYTQHDVNDRAPHGLADLCTRDQALWRTTCHLVLDVHVEPHNVQRVLKQLGMYQDFSPRVGHALADSLQYSRKGLGLSYELVIVTMVQPTVQEWEHAVDNLALQKPPDDGSYYGAYLRXYRSVTRWRCFPPQGDSTVPHQAAITDTFAPQPRSAYNSMAKFVEHVQVESDTLLQRLETRPPTVKTSSRQA

SEQ ID NO: 192963 - protein, 1609 aa, Oryza sativa
  Clone ID: PAT_MRT4530_89146C.1.pep
MVHDGSTVRLSGASWWRWREAGGRRVEPGRQRSRRWRWPWQWLDPGEEGMSGDMPIRLYYGDSPIQICDSGVDLTVYAFHDTSLNAPEHMGLNDVLGWLYNMFGVDPVHDKFVINAVWPVRGQHGWQWRVVEVASTGSWRKFVSKVREKGYSLVIVVQKTTCVDQSGESSHAVVEETPLEGGQDENIWRTEQGRGEEVVEGNTQGEVIVRGTNREANDSDDEEPDSPMRVDAAEENEAVVDQMKVENEEYLALVVEGEDTTLWDNETNIPDDWTTISMSRMKVNDGLDAHWCYDSKQVKVGQMFHEKGHLQDAVKRWAFVQKREFRVKVSNRTTYDVKCIQGGCPWRVHGYKPQHDTLWVASRVEQHTCLLENTRLVHRNLTAAFVAQMVYSKVVRKTSLSPFTIMHDVEKEYGYEISYDKAWRAKQKALEMRFGTYEDSYHNLHPLLEVMQARNPGTHMAILDEVNEYGENVLRRAFWSFGSMIEAFRNCIPLLCVDGTFMTGKYRGTILTAIGVDADSHVVPVAFAFVESENTSSWLWFLRHIKIQFRSKRLMDLFKKLCKQNQQRKFDAIWDQLDRLTTTHMEEVRKKPIVAREEEPEGLEPIPNEAPSITRRRKRGRATKCFTELVEFEPREKWSLLYDTDGSRYGVMTTNLAEVYNWVMKNTRPLPLVAILEGITRGTQKYLCKRYSMASLNLSKPSVKYSPAITQYMDEKSKKGGIHRVWPAGNRELLFEIRLRDKSGVGIGTTDITLECTLWPEYHAYKRICNKPYLLHRPCSHVLAASAKGGVDGNIFVSPYFRKESWEATWRGMADQYDGQLIDKEIDRNHRSRRLSTGTFCNVLKMRGPDQYWRIDPRWVPRLRAAGLLTFARLVEPSRARSERIHIDAALLSALVDRWRPETHTFHLTVGEMVPTLQDVSYLLGLPIAGPAVGPTMVNAGWADDLLASFGGVLPVALEDLTDGHGPTKSWLNQFRQDVFPNDQEEWIVQRHLVAYLLWLFGWVMFTGTHADSVDKHFIHFAEQIAELPIAEIPQYSWGSAVLAATYAGLCDACVRNSKQSSLPGCPLLLMLWAHERFDIGRPQLDSYANYGLREMYRSGVDDIDDRPTMGSLWTHREPQWVSGTTHRVYTQFVADFDQLTPDRVRWTPYTQHDVNDRAPHGLADLCTRDMQLWMTTCHLVVDVHVEPHNVHRVLKQLGMYQDFPPRDGRPLADSLHRYSRKGLGLSYELVIVTTVQPTVQEWEHAADNLALQTPPDDGSYYGAYLRWYRSVTRWRCFPRQGDSTVPHQAAITDTFAPQPRSAYNSMAEFVEHVHVESDTMLQRLEARPPVVRPDDVASILRNFRARAAALLRRVSCRSAADVVQTSGRRPSPPLPRRSSVDRSGPSSSRRGYEAAHISHGRPSFQHTPAPEYTRGSAGSGVPTSSTAPPRPQVFQTPPYVHPSQGASGSAHFPYMPTGDNVLNTPAWGLHITPRAPEQGHTQHAYDEYGSASTHHGMPAYSPRTAFIEDFFSTDPPQGEVGMDYWHAAPQNTTLSNCASSTDILSNRGSSTALPVEQGLFDRTCRTAAFRSPRQSRSGRSIGALSNCTRSTGTYFRDFPRLTTTFAIF

SEQ ID NO: 192964 - protein, 1644 aa, Oryza sativa
  unsure (1)..(1644): unsure at all Xaa locations
  Clone ID: PAT_MRT4530_89147C.1.pep
SPVHPGREFDLFXGPHRQPPPRVATSSXDMPIRLYYGDAPIQICDSGVDLTVYVFHDTSLNAPEHMGLNDVLGWLYNIFGVDPVHDKFVINAVWPVRGQHGWQWRVVEVASTGSWRKFVSKVREKGYSLAIVVXKTTCVDRSGESSHAVVEETPLEGGQAENVWRTEQGRGEEVVEGNTQGEVIVRGTNREANDSDDEEPDSPMRVDAAEENKAVVDQMEVENEEYLALVVEGEDTTLWDNETNIPDDWTTISMSRMKVNDGLDAHWCYDSKQVKVGQMFHDKGHLQDAVKRWAFVQKREFRVKVSNRTTYDVKCIQSGCPWRVHGYKPQHDTLWVASRVEQHTCLLENTRLVHRNLTAAFVAQMVYSKVVRKTSLSPFTIMHDVEKEYGYEISYDKAWRAKQKALEMRFGTYEDSYHNLPPLLEVMQARNPGTHMAILDEVNEYGENVLRRAFWSFGCMIEAFRNCISLLCVDGTFMTGKYRGTILTAIGVDADSHVVPVAFASVESENTSSWLWFLRHIKMCVVENRPNVCVLHDRHAGLLSAIQKLQEDVTQSVPWPDLHSRWCMRYFGANFYRQFRSKRLMDLFKKLCKQNQQRKFDAIWDQLDRLTTTHMEEVRKKPIVARQEEPEGLEPIPNEAPSITRRRKRGRATKCFTEWVEFEPREKWSLLYDTDGSRYGVMTTNLAEVYNWVMKNTRPLPLVAILEGITRGTQKYLCKRYSMASLNLSKPSVKYSPAITQYMDEKSKKGGIHRVWPAGNRELLFEIRLRDKSGVGIGTTDIILECTLWPEYHACKCNCNKPYLLHRPCSHVLAASAKGGIDGNIFVSPYFRKESWEATWRGELRGWRAMCDFTRPPPGQANWVPDSNLLVDTKGRRQSRRIKNLMDEAEVKDRSRRKKAYILCGENHSRKDCSMYNMRGPDQYWRIDPRWVSRLRAAGLLTFARLVEPSRARSERIHIDAALLSALVDRWRPETHTFHLTVGEMVPTLQDVSYLLGLPIAGPAVGPTMVNAGWADDLLASFGGVLPVALEDLTDGHGPTKSWLNQFRQDVFPDDQEEWIVMFTGTHADSVDKHFIHFAEQIAELPIAEIPQYSWGSAVLAATYAGLCDACVRNSKQSLLLGCPLLLMFWAHERFDIGRPQLDSYANYGLREMYRSGVDDIDDRPTMGSLWTHREPQWVSGTTRRVYTQFVADFDQLTPDRVRWTPYTQHDVNDRAPHGLADLCTRDMQLWMTTCHLVVDVHVEPHNVHRVLKQLGMYQDFPPRDGRPLADSLHRYSRKGLGLSYELVIVTTVQPTVQKWEHAADNLALQTPPDDGSYYGAYLRWYRSVTRWRCFPPQGDSTVPHQATITDTFASQPRSAYNSMAEFVEHVHVESDTLLQRPEARPPVVRPDDVASILRNFRARAAALLRRVSCRSTADVVQTSGRRPSPPLPRRSSVDRSGPSSSRRGYEAAHTSHGRPSFQHTPAPEYTRGSAGSGVPTSSTAPPRPQVFQTPPYVHPSQGASGSAHFPYMPTGDNVLNTPAWGLHITPRAPEQGHTHHTYDEYGSASTHHGMPAYSPRTAFIEDFFSTDPPQGEVGMDYWHAAPQVTQPTQETEAGQGPDVTPQQAARDRHPPDNLTYPTEQIRRRKKGGPSKRAKGTDRP

SEQ ID NO: 192965 - protein, 1544 aa, Oryza sativa
  unsure (1)..(1544): unsure at all Xaa locations
  Clone ID: PAT_MRT4530_89148C.1.pep
MGVRQAGLKPRPPRXEFDLFEDHIASRRRESPHRRRDMPIRLYYGDASIQICDSGVDLTVYAFHDTSLNAPEHMGLNDVLGWLYNMFGVDPVXHDKFVINAVWPVRGQHGWQWRVVEVASTGSWRKFVSKVREKGYSLAIVVQKTTCVDRSGESSHAVVEETPLEGGQAENVWQTEQGRGEEVVEGNTXGEVLVRGTNREANDSDDEEPDSPMRVDAAEENEAVVDQMEVENEEYLALVVEGEDTTLWDNETNIPDDWTTISMSRMKVNDGLDAHWCYDSKQVKVGQMFHDKGHLQDAVKRWAFVQKREFRVKVSNRTTYDLKCIQGGCPWRVHGYKPQHDTLWVASRVEQHMCLLENTRLVHKNLTAAFVAQMVYSKVVRKTSLSPFTIMHDVEKEYGYEISYDKAWRAKQKALEMRFGTYEDSYHNLPPLLEVMQARNPGTHMAILDEVNEYGENVLRRAFWSFGCMIEAFRNCIPLLCVDGTFMTGKYRGTILTAIGVDADSHVVPVVFAFVESENTSSWLWFLRHIKMCVVENRPNVCVLHDRHAGLLSAIQKLQEDVTQSVPWPDLYSRWCMRHFGANFYRQFRSKRLMDLFKKLCKQNQQRKFDAIWDQLDRLTTTHMEENTRPLPLVAILEGITRGTQKYLCKRYSMASLNLSKPSVKYSPAITQYMDEKSKKGGIHRVWPAGNRELLFEIRLRDKSGVGIGTTDITLECTLWPEYHACKCNCNKPYLLHRPCSHVLAASAKGGVDGNIFVSPYFRKESWEATWRGELRGWRAVCDFTRPPPGQANWVPDSNLLVDTKGRRQSRRIKNLMDEAEVKDRSRRMADQYDGQLIDKEIDRNHRSRRLSTGTFCNVLKMRGPDQYWRIDPRWVSRLRVAGSLTFARLVEPSRARSERIHIDAALLSALVDRWRPETHTFHLTVGEMVPTLQDVSYLLGLPIAGPTVGPTMVNAGWADDLLASFGGVLPVALEDLTDGHGPTKSWLNQFRXDVFPDDQEEWIVQRHLVAYLLWLFGWVMFTGTHADSVDKHFIHFAEQIAELPIAEIPQYSWGSAVLAATYAGLCDACVRNSKQSSLPGCPLLIMLWAHERFDIGRPQLDSYANYSLREMYRSGVDDIDDRPTMGSLWTHREPQWVSGTTRRVYTQFVADFDQLTPDRVRWTPYTQHDVNDRAPHGLADLCTRDMQLWMTTCHLMVNVHVEPHNVHRVLKQLGMYQDFPPRDGRPLADSLHRYSRKGLGLSYELVIVTTVQLTVQEWEHAADNLALQTPPDDGSYYGAYLRWYRSVTRWRCFPPQRDSTVPHQAAITDTFTPQPRSAYNSMAEFVEHVHVESDTLLQRLEARPPVVRCGEDVGPMAITTTTPTFQRGSEWSILFTSRGASGSAHFPYMPTGDNVLNTPAXGLHITPRAPEQGHTQHTYDEYGSASTHHGMPAYSPRTAFIEDFFSTDPPQGEVGMDYWHATPQNATLSNCASSADILSNRGXFDSPACRTGAVRQVLSNGSLPISSPVALXPFDRRPIELHPFDRDLLSRFSPVDHYFCDFP

SEQ ID NO: 192966 - protein, 533 aa, Oryza sativa
  Clone ID: PAT_MRT4530_89149C.1.pep
MRAQRRAGKKRGRGEEAGGVERARQRWRESGREAAGTAGAVGRAAGESGSGAAALVMLQLFTAGVFVVLVDLHERGRRSSGGRRAAGNYDGARGLRKNVVRQHLLQTIFVLWLIVNTTRGHNMSYRVVTWAFWSLSVFKAAAMVAEFLVGRSNDVASRRRMGVEVIARYMEIEESLAAGDQPANPRTMKGYKYIFHGEATVAPMSRDGDILAQISSSKSVVTIDWVYPWIDDQVGYSELEKDLARDICLAFTLYKLLKLRLYGNWMMYIKTVYGCVRDERPWYNRRRRHLWWKEYIAPPKMNYWEDNLGEYVLLEGFNHRPWVWNLLSWLTLCLVEPRRQGQKRGRTKHLTREVSGAVLLSFKSSSGRLTNGISTLRRHGLSSRLGWACTFPNLTDQILVWHVVTTRCDWASGRGRSRRDDDHHNRLVARRLFNYCAYLVAFVPEMLPDPSYIAQQIFDTTVQQARDHFDGCRTTSSVLARLQEIQDKERCGARVRETSQLHHHREGGAARRPAQDGYGQRGAAVADAGRVLG

SEQ ID NO: 192967 - protein, 154 aa, Oryza sativa
  unsure (1)..(154): unsure at all Xaa locations
  Clone ID: PAT_MRT4530_8914C.1.pep
NLCRGGTLYPHDITNPDHPARISKADTGSPYANERGPRLTSGXVPDHTMPGSPGVLLGTTPLNPHVSWHHGXPRSVVLEIHLVRKHRPRCRVFQVFCKTPSFXIVGYFKLEGRCSDARARRPVHRSTTVTCLARDLELDPRNPRTAGLRALKLH

SEQ ID NO: 192968 - protein, 70 aa, Oryza sativa
  Clone ID: PAT_MRT4530_89150C.1.pep
SIDNDSQKENSLGKYLPNLLDKKLLYFPFNSPTLISSDLRSGRLFDNNTSISLTNSLPSMYFPELLAFIR

SEQ ID NO: 192969 - protein, 118 aa, Oryza sativa
  Clone ID: PAT_MRT4530_89151C.1.pep
MVQEFTVFPAPPFAAAPFDDYERRQQGAWHRHHHPPWALTDEERERRREIEMGDDHANILIVFYKQWRSARYGKAQRGVTVAAGRLGHSVLRAAVRHARDDDAGRPAVGGSKAQVLSR

SEQ ID NO: 192970 - protein, 94 aa, Oryza sativa
  Clone ID: PAT_MRT4530_89152C.1.pep
LSAALLACSLLGYLLRGAVPSPAAASTSAACAPLVAADRRPPAPCCRRLPASPRHHHAHGARPHAPSSNGDAALRLAIPSAPPLFVEDDENVGM

SEQ ID NO: 192971 - protein, 62 aa, Oryza sativa
  Clone ID: PAT_MRT4530_89153C.1.pep
GFLGGRPPPFFWACVPPTGGPLFFKKTYRFKPPPFLNFFMSPGLLLLGPVFPPLKSLFVARN

SEQ ID NO: 192972 - protein, 42 aa, Oryza sativa
  unsure (1)..(42): unsure at all Xaa locations
  Clone ID: PAT_MRT4530_89154C.1.pep
FDTHPIQLLEATSLTSIPLSWNFXFDIHIFLIHIXGPCTXXF

SEQ ID NO: 192973 - protein, 98 aa, Oryza sativa
  unsure (1)..(98): unsure at all Xaa locations
  Clone ID: PAT_MRT4530_89155C.1.pep
RNIVERTFGVIKSQXRILREIPYFLRSDDHTKIIHCALVLHNFRIDSSDMYFLTQNPLYNGYPIXFRCSTLRGWNDVPNRAAAMNTLRDTIADEVYNR

SEQ ID NO: 192974 - protein, 160 aa, Oryza sativa
  unsure (1)..(160): unsure at all Xaa locations
  Clone ID: PAT_MRT4530_89156C.1.pep
LLVFLTTTDKSASARNTAVALHLRVTPQGYRTQGTITRMGFRAVATCHLPLTNPXDTQQTKRTFSESGAEYTDSSGTPPELLLKSXTRRGRSRMSANLPGTPPELPLTLHLFLMYKRYNRASCNSAQSCVXSEVRERSSIYSLHMTVTAMRNDQNALNRH

SEQ ID NO: 192975 - protein, 94 aa, Oryza sativa
  unsure (1)..(94): unsure at all Xaa locations
  Clone ID: PAT_MRT4530_89157C.1.pep
RRRSLKPSKRSSSTATNDHGSQGPPDDHDTHATDIQNITGHTNAEDRWPEXDQNRKGGAIVIPKDRRTADGGAXAKARYKVAAEAQKGGDRQDG

SEQ ID NO: 192976 - protein, 137 aa, Oryza sativa
  Clone ID: PAT_MRT4530_89158C.1.pep
STDKSASARNTAVALHFRVTPKGYQTQGTITGMRFRAVTTCRLPLTNPWDTQQTKKKFSEPGAECTDSSGTPPEFLLGSYTRRGRSRMSAKLPGTPLELPLTLYLILVYKRYNRASCNSSQNCVLEMRVSSSFYRQV

SEQ ID NO: 192977 - protein, 200 aa, Oryza sativa
  unsure (1)..(200): unsure at all Xaa locations
  Clone ID: PAT_MRT4530_89159C.1.pep
VIFDTGPKKHHIKKIGQVKNGNRRPPPTSFTPSPSPSPRQPLLVFLTITYKSASARNTAVALHLRVTLKGYRTQGTITRTGFRAVTTCHLPLTNPWDTQQTKRSFSEPIAEYTDSSGTPPEFLLGSYTRRGRSRMSTKLPGTPPELPLTLDLILMYKRYNRASCNSAQSCVCWNESKXSFYSLHMIVQXMGNDQTTLQPS

SEQ ID NO: 192978 - protein, 368 aa, Oryza sativa
  unsure (1)..(368): unsure at all Xaa locations
  Clone ID: PAT_MRT4530_8915C.1.pep
TCGSTVVLCNRGPKTGPYMAEVGPWWTGRTRLTPAGVVGPTRQPHPRARAADGRAPPGSRGTRPKAALPARPTGGGAPAPRWSPAATSGATERRPREGREGGSETAVLGSPRVDGGDGNGDRSGERRRRGSGXRGRRCSDGRRAKRRSGRGRRGRGEAEGGDAETGGGPGRRRRRTGARRRRRRERTTARAXFRRGEKAASGGNGAERLGERLYTVGRGRERPEGKETGAAISAPLMXAGEDCGSXIRANPREREREKRGKRGRESRGVISPSLWRAGTAGCGGFGGGGGARARAXRRARREVGDDGWAPPVSEGGGRARPSAARARGGGRWAAGERREREGVGPSRPKRGRGGKRTSFRVFLFIKPF

SEQ ID NO: 192979 - protein, 223 aa, Oryza sativa
  Clone ID: PAT_MRT4530_89160C.1.pep
MGGGGGDEREKAKGGGGGGGGGGGGGEYGTFQGPPSYPPPRPPVVGYPQPAPPPGLYGQGDPYYRPRGGYQGIPARDYEAGARGHGHDRLPCCGIGIGWFLFIVGFFLGAIPWYVGAFLLWCSRVDYREKPGYVACAIADIDTIRLIPVHIEMDDVLAWHYDEKGLFLVKSAYKVHRDWERQRQRRGNAATSNESNKPDLFLEEGMEYAGSEKGETLHMEALS

SEQ ID NO: 192980 - protein, 174 aa, Oryza sativa
  Clone ID: PAT_MRT4530_89161C.1.pep
LSVCSSVSTLTTIYSMLVFLTTTDKSASARNTAVALHLRVTHKGYRTQGTITGTEFRAVTTCRLPLTNPWDTQQTKKEFSEPGAECTDSSGTPPEFLLESYTRRDRSRMSAKLPGTPPELPLTLYLILIYKRYNRASCNSAQSCVLEMRVSSFFYRQVLWTPRVLYHPVSNATT

SEQ ID NO: 192981 - protein, 37 aa, Oryza sativa
  Clone ID: PAT_MRT4530_89162C.1.pep
DTDYGGLHNSHMGHKNIRGPEKTLDTRGLAGLIYQTS

SEQ ID NO: 192982 - protein, 67 aa, Oryza sativa
  Clone ID: PAT_MRT4530_89163C.1.pep
GFPKKIKFPKFFNLSAGFFFSFLSKKKKKKFFFFKKKKKKKKKKKKKKKKKKKKKKKKKKKKKKKNK

SEQ ID NO: 192983 - protein, 64 aa, Oryza sativa
  Clone ID: PAT_MRT4530_89164C.1.pep
GQGSIRAKPTRLPRIEGSLAAPGPASLVQGRRSHAGHGHGDGDDGGASEGSKEDPPGTFVCDPT

SEQ ID NO: 192984 - protein, 76 aa, Oryza sativa
  Clone ID: PAT_MRT4530_89165C.1.pep
GTVPCWHEGNMIELSATSSRLRVHEHIQDKKIQQLGGKPTEGFDQRIPWERAKLFYTTTYNHRHLPNIQPFELYLC

SEQ ID NO: 192985 - protein, 65 aa, Oryza sativa
  Clone ID: PAT_MRT4530_89166C.1.pep
TSDEYQCRKQSSKPLKGASCVYGIFLLPLIGTTSGSGRKEYTCVLYIYTRCVVPYNEQRISWFLE

SEQ ID NO: 192986 - protein, 76 aa, Oryza sativa
  Clone ID: PAT_MRT4530_89167C.1.pep
IPIHPGAAPSRLPSPSHPHPSSLHRRAPLPPPPPAPPPAGPAPPLASVPSPPPPPAFPSLVPIVSTPSKMSMQIEE

SEQ ID NO: 192987 - protein, 74 aa, Oryza sativa
  unsure (1)..(74): unsure at all Xaa locations
  Clone ID: PAT_MRT4530_89168C.1.pep
IPIHPGAAPSRLPSPSHPHPSSLHRRAPLPPPPPAPPPAGPAPPLASVPSPPPPGXPPAGPALAPPPGAASTNC

SEQ ID NO: 192988 - protein, 135 aa, Oryza sativa
  Clone ID: PAT_MRT4530_89169C.1.pep
MSEYQNVVGGRLKLKGKALDVKEGGVKKKKKKKQHREESSEAGHGELHQGGSSEVPADPNDELTEADKMGEEGNLQGDYDHLTPAERRYMEQKQKIDMHKLAKVANKSHRDRIQDFNQYLANLSEHYDIPKVGPG

SEQ ID NO: 192989 - protein, 88 aa, Oryza sativa
  Clone ID: PAT_MRT4530_8916C.1.pep
DAWADAWADAWADAWAKKKKKKKKKKKKKKKKKKKKKKKIKKKKKNKKKKNINNKPLILLKAIVQQLQNETVWWFFNLIRFKLKPKLC

SEQ ID NO: 192990 - protein, 129 aa, Oryza sativa
  Clone ID: PAT_MRT4530_89170C.1.pep
EKSVLTGTNRWEIYKWGLNKTAPGTGLPLGALCVVGEGKGLPTKGGLKEWQKKDKDGWAIYPYHQDLPPLFQKMEIGLGTPVQEGPELRGSFGTFQPQKGGKKGPLKGHSVPSNFFRFYWGFQPPGVWG

SEQ ID NO: 192991 - protein, 75 aa, Oryza sativa
  Clone ID: PAT_MRT4530_89171C.1.pep
CLYDGRACFRLTRYIYAILGTQIVKALVRFRSKGISGSPSLLSSSCLLLDSSVERLHSRDMDKGFKIPLFFLLNK

SEQ ID NO: 192992 - protein, 121 aa, Oryza sativa
  Clone ID: PAT_MRT4530_89172C.1.pep
GKPRERPTRPGAHWPEQISPPKTGNIGWKTGKGGPPGMEKNILKALLGVTTKQGGHFKGRLGSHFFLWEARQDPKMGAQGANLGHYPLQIIKTGRLILKKLVPLGEPAGSFSEASGGGEPK

SEQ ID NO: 192993 - protein, 33 aa, Oryza sativa
  Clone ID: PAT_MRT4530_89173C.1.pep
WFGKSLQTRFIFISGWITDPSWDRSCNSLNGWS

SEQ ID NO: 192994 - protein, 484 aa, Oryza sativa
  Clone ID: PAT_MRT4530_89174C.1.pep
MERYKIIKEVGDGTFGSVWRAINKESGEVVAIKKMKKKYYSWEECINLREVKSLRRMNHPNIVKLKEVIRENDMLFFVFEYMECNLYQLMKSRGKPFSETEVRNWCFQIFQALSHMHQRGYFHRDLKPENLLVTKELIKIADFGLAREISSEPPYTEYVSTRWYRAPEVLLQASVYNSAVDMWAMGAIIAELFSLRPLFPGSNEADEIYKICSILGTPNQRTWAEGLQLAASIRFQFPQSGSIHLSEVVPSASEDAISLISWLCSWDPQRRPTAVEVLQHPFFQPCFYIPPSLRFRSTNGYAATPPSVGAKGAVDQKNARRYSVGPLSNGRPAVNYSYLSANTPARAAGVQRKLELDHQVNMNSCQAPEGNHKLTKAEAMNQPWSRPPPAAAAVRSNGNYFTKDQGPRAPDIAEKLSQLTVGSNRVPSLASDKFVDMKARTHGNTMKRPLPPVGTRTWHAPADPFRRPYEMPGDRAFLPRKLVS

SEQ ID NO: 192995 - protein, 98 aa, Oryza sativa
  Clone ID: PAT_MRT4530_89175C.1.pep
NRNPNVQCVSTRSSCYLLYPHHGASVILFLHSSPFVNFFFPRFGQTKPWLVRALEEVDAEEVADGDGGGEGPAGDGKHLFALSLSRRERERAGWTQKE

SEQ ID NO: 192996 - protein, 201 aa, Oryza sativa
  unsure (1)..(201): unsure at all Xaa locations
  Clone ID: PAT_MRT4530_89176C.1.pep
KKKKKKLIHAFKKKNKKKKKKKKKRKNKNKTTKETQIPKXKRASKFQNTRKKNKKKKQKQKNQKQKIKKKKQNTKKTIKETNKKKTQXKKKKNNNKKKKKKKKNKKKKIKQKKXKQNEIKKKKKKXKDKQKWKKKYKTESSRKDQAETNRQPTARVKSGEGEGRGAGRAQLGGGGSGVVSVAPPTARRRSISPHYRSASSR

SEQ ID NO: 192997 - protein, 57 aa, Oryza sativa
  Clone ID: PAT_MRT4530_89177C.1.pep
VDLRCSLRGMPTSAARIFSTGLDRWRPSPPGFRGEQSAINHDAIMHANDDQKLDANR

SEQ ID NO: 192998 - protein, 434 aa, Oryza sativa
  Clone ID: PAT_MRT4530_89178C.1.pep
MAHTAAELAAAAAWRGGGPSGDGTRPEMGGGGGARRARRDGEVIKLFEQPCPRSWTDVSSLPLPVALGVSPLVGSAAAAVVGVCLVRVAGCILGLSELQPKLRTRFTPFSYDTLLSGAVVRRCQIGGRDRPQHPCGTFPLGGRAVDGWQLPLSNPRGRTAPDPSWQSERIMTEVLPVSAFVSRHDLMGLAQQPTCRRLPACAVAVLLAVAASGAAAQGVGSVITEAVFNSMLPNRDNSLCPARGFYTYDAFIAAANSFPAFGTSGGSAELIRRELAAFFGQTSHETTDGTRGSSDQFQWGYCFKEEINKATSPPYYGRGPIQLTGRPDLVSTNAVVSFKTAIWFWMTGQYNKPSSHDVILGRWTPSAADTAAGRVPGYGVITNIINGRFECDVGQNDANVDRIGYYKRYCDMLGADPGSNLDCYNQRDFDSQPS

SEQ ID NO: 192999 - protein, 262 aa, Oryza sativa
  unsure (1)..(262): unsure at all Xaa locations
  Clone ID: PAT_MRT4530_89179C.1.pep
MTTTTTRFVQLAACAAASLLAVAASGAAAQGVGSVITQAVFNSMLPNRDNSQCPARGFYTYDAFIAAANSFPAFGTSGGSAELIRRELAAFFGQTSHETTGGTRGSSDQFQWGYCFKEEINKATSPPYYGRGPIQLTGQSNYQAAGNALGLDLVGNPDLVSTDAVVSFKTAIWFWMTAQGNKPSCHDVILGRWTPSAAEHXAAGRVPGYGVITNIINGGIECGVGQNDANVDRIGYYKRYCDMLGAGYGSNLDCYNQRNFAS

SEQ ID NO: 193000 - protein, 269 aa, Oryza sativa
  Clone ID: PAT_MRT4530_8917C.1.pep
MEVLSSSRFSRVFPSSLLSPVSKPLKPPRHRRRRVQTLSSSSSDAAAAPSTPPPVWPPASLSRLLAAALRGGRAGGELPDLAVGAGAAATAAGGGARIGTLLMSTTAAAVTKARENPYILALAANPTFVSGLVAWAVAQAAKVVLTSFVERRWDLRMLFSSGGMPSSHTALCTALTASVALCHGVSDSLFPVCLGFTLIVMYDATGVRRHAGMQAEVLNKIVEDLFQGHPISERKLKELLGHTPSQKWKNRFDTKIFGASGVTIVPGDS

SEQ ID NO: 193001 - protein, 134 aa, Oryza sativa
  Clone ID: PAT_MRT4530_89180C.1.pep
MVLPMSRATRVAGRLMPEISLLRRGRKSAARGGDDAEVEVSVPANFVCPISLEMMRDPVTAPTGITYDRESVEGWLARGHDTCSVTGRPVRLADLVPNHATRRMIQDWCVANRARGVERVPTPRVPVGEDDAEE

SEQ ID NO: 193002 - protein, 60 aa, Oryza sativa
  Clone ID: PAT_MRT4530_89181C.1.pep
MAAAAPLVRAPLPSSVDPGASQNLEQKLDCLGELMILGEAAAARSSPKQTPTFGPDSKKL

SEQ ID NO: 193003 - protein, 1270 aa, Oryza sativa
  unsure (1)..(1270): unsure at all Xaa locations
  Clone ID: PAT_MRT4530_89182C.1.pep
MAGMDGGGGPSDAPPELSTQELIEQKLILFGVPQEQLQEHQEGLLIYLEEHKELIPEIAKLVLSVGADLLEARKASNKDGDSSNSEACDEILSWLQWLMFNNEPHAMLDDLERSTAGERAVCGSVWGQNDLAYRCRTCEHDPTCAICVPCFQNGNHKDHDYSIMYTGGGCCDCGDTTAWKREGFCSRHKGAEQIKPLPEELASSVGPVLDVLLQFWKERICLVEGPPHAEGDGGNSCKRVAEELTTCVANMLLEFCSCSESLLSFVAQRICECPDLLDALTKAERLLDKKAVKKLHELLLKLISEPAFKYDFAKVFIHYYPVTFGEVIKGCNDSLLEEYPLMPTFSVQIFTVPTLTPRLVREVNLLGVLLGCLTDLFLSCIGEDGHLQTNKWTNLYDATVRLLEDTRYVLSHEEVSKYVAYERPDLTRSWIKLLSLVQGMDPQKRVTSIHGEDENENLSAPFVLGHYLGVCHGSLVKGAFAPPEQHESTDVTICSTATKSIESSENQRLAKVGRVSQNSSCLKAIEGWLAPGIALRGKLSFLDASSSDPHNFMALLEEPLTSNKGKPNINIAEVNAKINEEPRPGDIADIPESFSSSVQDPDNLMLIDQIGLPHPSNMAGKRKMHESSNAADTQLHPENAISYTMTDGSLLYAHPDSRIEELGIINTVGWPHVVFDVSSQETSFHIPLHRMLSFLLRKAMGKCFGEDVKPGHCSVVQTNEFFSQVLRGCEPYGFASIVMEHPLRLRVFCAQVRAGMWRKNGDAAILSAEWYRSVQCPEGNNVTRLSRLEQGLESDLFLLQCCAALSSPELFVKTIQERFGLSNYTSLDLAEQNEMLYLSLQLRKKPQPFSFVCGFMADSIPFYSQIVKSLPRALSSSDQLQNVLDSLAVYSNPSGMKQGKYVLRKTFWKELDLYHPRWNSRELQIAEERYYRFCKVSALNAQLPQWTHVFRPLHNISKIATSKAVLQIVRAVLFYAVYSDPLSVSRAPDNVLVTGLHLLWLALDICESESKRYANQYGMDIVQHDDESWVVLSSYAEEAFPILTYSTELVPPVSGKVKNESMLTLLVSLMHKYKEENDISFSGSKYCNIPSLIESLLKKFANLSKECFSAIRQMAPHIVPSMPQDTSCKQNPGSSDSMDKKAKARQRQAAIMAKMKAEQSKFAESMKSSGSEGQDVPMSEPDVSCSTGVVSEESLPVCSLCRDSDSKSPLCYLILLXRDLDLQPLLRWVIPPGKIQLNQTRYLGPSEGKNQLIPQVLLLLVRRNSLLIQQ

SEQ ID NO: 193004 - protein, 257 aa, Oryza sativa
  unsure (1)..(257): unsure at all Xaa locations
  Clone ID: PAT_MRT4530_89183C.1.pep
DDDDGEVCSACRVPAALLAVAAWRRQGVGSVITQAVFNSMLPNRDNSQCPATGFYTSSAFIAAANSFRRSARAGGAPSSSRRELAAFFGQTSHETTGGTRGSSDQFQWGYCFKEEINKATSPPYYGRGPIQLTGQSNYQAAGNALGLDLVGNPDLVSTDAVVSFKTAIWFWMTAQGNKPSCHDVILGRWTPPAXNTAAGRVPGYGGITNIINGGIECGVGQNDANVDRIGYYKRYCDMLGTGYGSNLDCYNQRNFAS

SEQ ID NO: 193005 - protein, 359 aa, Oryza sativa
  Clone ID: PAT_MRT4530_89184C.1.pep
MARAANRRRRRGGVVYAVVLDDKEGSLVFRFRRKDLFSDDDDPPPAGRRRFPRPVAHFPRGYYHYVFHSFTVSGKQILGVSPFGATVVIEDDGRPGGSGAMRAGPELGTTTCQPILLPIREDMVLVMAYLPQPAGRSNFAVMRRLPDGGGGGGGWRVVPVPEPPLGGPGDYYCRKPAPVVTAYMTIGRRACVSIAGEGTFSLDAGGAAAWRKEGSWELPLHGQAMYVRELGAAIGLGRGPGPYGGVVLWLCACDVEARPPVIRRSWNETFPRELVAAHSQYDCPGNLVYVGDGRFCICWVAGVEHDRPETNDMVARTAVVTMAVRLRRSAGGELQLTKLRYHLMSPQGRRAYFVQPHIP

SEQ ID NO: 193006 - protein, 85 aa, Oryza sativa
  Clone ID: PAT_MRT4530_89185C.1.pep
GFLLKNNPFWPPPAVGGPHFPFRGLYFFWAKGPQFHLPPVGGFPFERNLAQAPPLLAFTGPSKLGFPPGGFGAPRPLPPPGGVFL

SEQ ID NO: 193007 - protein, 156 aa, Oryza sativa
  Clone ID: PAT_MRT4530_89186C.1.pep
KIISSCDISSISAVNPADLYDVHVYTSSGDMFSKTRMFDSTPRSGPKAFVSEYAVTGNDAGRGTLVAALAEAAFLIGLERNSDVVEMASCAPLFINDNDRGFSPDAIVFNSWQHYGCPNYWMLHFFKDSSGATLHPLTIQVSNYDQLAASALTWQN

SEQ ID NO: 193008 - protein, 673 aa, Oryza sativa
  Clone ID: PAT_MRT4530_89187C.1.pep
MGVRRGRLDSSLFHMLVLVCALSQVLFVGLVTGQTAQLSVDASSQNGRTIPDKMFGIFFEELNHAGAGGLWAELVSNRVQVTGFEAGGINTPSNIDPWLIIGDESNIIVETDRSSCFASNPIALRMEVLCGATGTNACPSGGVGIYNPGYWGMNIEKTKVYKVSMYIRSSDSVDLAVSLTSSDGLQNLATHTITAEKGDFAGWTKVEFDLQSSERNTSSRLQLTTTKNGIIWFDQVSVMPSDTYMGHGFRKDLATMLANLKPRFLKFPGGNYVMGNYLLNAFRWSETIGPWEERPGHFNDVWNYWTDDGLGFFEFLQLAEDLDACPVWVINDGASLNEQIPSATIAAFVKDVVDGIEFARGDPKTTWGSVRAAMGHPEPFPLYYISVGNQECSKPYYKEKYVKFYSAIKASYPDIKIISSCDISSISAVNPADLYDVHEYLRWTLTLSLWQVYTSSGDMFSKTRMFDSTPRSGPKAFVSEYAVTGNDAGRGTLVAALAEAAFLIGLERNRFSPDAIVFNSWQHYGCPNYWMLHFFKDSSGATLHPLTIQVSNYDQLAASALTWQNSNDGNTYLKIKVVNFGNKAVNLNIAVAGLENGIQEFGSIKTVLTSGWLRDENSFQQPDKVVPAASPITNAGEKMGVIVDPYSLTSFDLLLDTNTDKYPLLESSFHSSM

SEQ ID NO: 193009 - protein, 50 aa, Oryza sativa
  Clone ID: PAT_MRT4530_89188C.1.pep
GLFTLMPFSTLPKFGKVANKVATFSLLPNFGKYIRNPASCQNFGNYAKIW

SEQ ID NO: 193010 - protein, 101 aa, Oryza sativa
  unsure (1)..(101): unsure at all Xaa locations
  Clone ID: PAT_MRT4530_89189C.1.pep
FVSPQFGIAATPFLQXGGFQLRTTQVWPPPALVAPQSPYWAITIVQPIAQQLHPPQFGDPPFDGNLAQAQALLAFNAPPKYGTPPRDYGAPSPIPPLGGAL

SEQ ID NO: 193011 - protein, 407 aa, Oryza sativa
  unsure (1)..(407): unsure at all Xaa locations
  Clone ID: PAT_MRT4530_8918C.1.pep
MSFRSLIQEMRDEFGSISRHSLRSRSHRGGGGAPRVAAVGPAEAAAMQQSCWAQLPPELLREVLVRIEESEVWWPSRRDVVACAGVCRSWRGITKEIVRVPEASGKLTFPISLKQPGPRDGTLKCFIRRNRTTQTYYLYIGLTEALADDGKFLLAARKCRKPTCTDYLISLDMSDMSKGSNTYIGKLRSNFLGTKFTVYDAHPPYDGAVVSKSRSARVVGLNQVSPRVPAGNYPVSHISYELNVLGARGPRRMNCIMDSIPTSAVQEGGKAPTQTEFPLSGLDSFPSISFFRSKSPRIEIVQLXQLSTQKEEKLVPKNKSPRWHEQLQXWCLNFRGRPRATLASVKNFQLVSSDENGPTNQEQDKVIXLQFGKIEKDLFTMDYRYPISAFQSFAICLRPPTVAFLDS

SEQ ID NO: 193012 - protein, 93 aa, Oryza sativa
  Clone ID: PAT_MRT4530_89190C.1.pep
PIALRMEVLCGATGTNACPSGGVGIYNPGDWGMNIEKTKVYKVSMYIRSSDSVDLAVSLTSSDGLQNLATHTITAEKRDISGCFAFLGTALFP

SEQ ID NO: 193013 - protein, 84 aa, Oryza sativa
  Clone ID: PAT_MRT4530_89191C.1.pep
MAVATGARRRAMLEVKKDQAVEALRGREVWFNSYLRSCCTAMAVVCRELRVPRGNPEESAAGYISWLNGACAQLEGIGKRTTRP

SEQ ID NO: 193014 - protein, 139 aa, Oryza sativa
  Clone ID: PAT_MRT4530_89192C.1.pep
PSSPPRCAPPPPSPPHGRAPPHPPIAPPPPASSRPPTAPAPRAPPAPDPLALATPHPVHPPGAGPVPPTSATRAAPGVARNRRRVRRQCRHHGWDWGAGGRRRTYHPLTKGGGERRFAWLNQGWHPSAPSSTCQLHNHS

SEQ ID NO: 193015 - protein, 835 aa, Oryza sativa
  Clone ID: PAT_MRT4530_89193C.1.pep
MQTTGTYTTRGGVRRRRPPGNGMCGQVAVPANPHKRLRQAALVDGRASPLRVEESSGSGWAALPRTRAATAGTFVRLDAQRSTTQLDQLHQHGHEERAACACQIVLHRTSIVFVISPVGSSSWRLGKLLPATHAETAKNPSRQLPDRQARGDAGLSVGPSGHNCNHRALCAGCAGDSPQRSSQRIRLLCFAIFSPAYTLLSPQRSSLPPSYFARPTSRPHPPAAMAQDAGSAILPASRITAERHMSLIRKIMPEDAAVRAGETRPRPRYPERFFYEVLDFYEIHALHVAPNAVMILAIFAHLCEMFVGAVAELGEEYDAVQDRLRGLRSRGLTAAMVFGDYFPRRIASFQERSSGAWEYTGYNDPMRTHVGERWDWSDEDAKTVVRRVSGLDTVEQTLILDGILPLCSDRDRESILAVTMAVGTGGGRPRRGATGGGVGDGVGSSSRAGGSGGGSSSRAPGPSCGAGRSPSANPKGKRKFSESRPPSPPCGGGAECAADRPPMSHQRPAAAEAGRKKKRLRKMGQMEPCRGELHRAPRVDLQAPPSQRGRRATRLVRLRVHHGRDRPLEGGEDAIRCRWWWHRGPPRGWSRGHSRRERGLEAEAEAERGPDAEAEHGPEAKREATLAAHEVTAAEAESALRLREEAAAECTRTTTATEATVARCAEELWLREEVWWEQDAALAKREAEVNRREASELEAREKELASRGQPGDTDLAIQLATAQDTLADMGRLVQDQAGEIAALHLANDIGPGQLHDAIERLERAGRQVGISMRWDKKLPSTRPALARRLDKMAADLEKLEEEVGEAVKSSSASLVRAEMELVLTSHQARDPDFLP

SEQ ID NO: 193016 - protein, 91 aa, Oryza sativa
  Clone ID: PAT_MRT4530_89194C.1.pep
TGVRRGEEPSRRGEVPAGRWQCWPSGGSGTPGRRRPTGAGLRPPRLRARLGGSGQPGGAAGAPKPRQGPACRLALRTPGHGHEDLRPQNRA

SEQ ID NO: 193017 - protein, 305 aa, Oryza sativa
  Clone ID: PAT_MRT4530_89195C.1.pep
MVPRLFPSLSLLAMLPVAGVVFLAVIVVGRFWRRFIGVAASAPLFVLFNILFLWGVYVFVIRGGTSSLLDMVINAECAMLLFGLYRIFSGDPGIVIYESSFFEEAGCKDFVEAICPSEKFSSLPRVRHCNCCKANVRGYDHHCPAFGNCIDITRCINSGTIRSENPMSVNMVIGTMLFSVLQVLWQLRGEIFQINWKKYPEFQMKEQPQSGRIQQLGKDGLAESADQDGGLLGPSVLLSSSQPPLEIIKYFPDSCGNWNSRRPIWNVRAFLIMRKFFPDSRQKSEFKAGVMQKSEFKAGEYSLIA

SEQ ID NO: 193018 - protein, 156 aa, Oryza sativa
  Clone ID: PAT_MRT4530_89196C.1.pep
FFFFLVTPYSRVEDPRNVSLKLHETLSLRKCEQIRLEIRVFPVSTQETNSSSTPRQGTYSIRLPPQQSPYRTWSTDPNTSSHSTPSATKIPKNNLHKQTTNRDSGTDFADSQEPANHTHREAENRSRRERSPHAKSHSLTRTLTHAPTRRTGGTEQ

SEQ ID NO: 193019 - protein, 63 aa, Oryza sativa
  Clone ID: PAT_MRT4530_89197C.1.pep
SRTSALPGQRRLRRRVQGEDYLPKEDDFALASSPPQGPKKPFRPIKPRGNRAGDRQTAHQGPM

SEQ ID NO: 193020 - protein, 55 aa, Oryza sativa
  Clone ID: PAT_MRT4530_89198C.1.pep
PFFFLKGRCPFLSGKSFFSSPFIFRESFHPHPISLTLGFLAFFVTSFGNFPAKKK

SEQ ID NO: 193021 - protein, 133 aa, Oryza sativa
  Clone ID: PAT_MRT4530_89199C.1.pep
AAFGGGAGADLLGARARGTPRLVQSAPLQAPDIDAARAPVDEFEPVDSGSDLESDDLKSALGKQRRDGKSAPLEPLTKVQRIYIGRLIEKHGDDYKAMFMDIKLNTMQHSVGTLKKLCERYHVVGKSIIHPLK

SEQ ID NO: 193022 - protein, 71 aa, Oryza sativa
  Clone ID: PAT_MRT4530_8919C.1.pep
MVCVITGVLVPDDMIVFSRSRSRDRDSVPARTMAMDGRLARRAQCHVWYRHNASVARCSEYASRPARCRTT

SEQ ID NO: 193023 - protein, 66 aa, Oryza sativa
  unsure (1)..(66): unsure at all Xaa locations
  Clone ID: PAT_MRT4530_891C.1.pep
VGRRRRRMDSSPVCEENRAPVGFSGNRAAAEVAHAAAXANGGGGSSGCGARPEVAACGGASGERRV

SEQ ID NO: 193024 - protein, 136 aa, Oryza sativa
  Clone ID: PAT_MRT4530_89200C.1.pep
MSACHVITISLFPFDLSLGWRLCLSIFNQIHLRHNKFCVKNFSITTNGLGLVNPDRVFSFYDELHAYLASTGIDGVKSIHPMAEYHAAARAVGGCAIYVSDKPGNHDFNLLKKLVLPDGSILRTKLPEMPCHDDPV

SEQ ID NO: 193025 - protein, 109 aa, Oryza sativa
  Clone ID: PAT_MRT4530_89201C.1.pep
MNRMALFLGQARGFQQQNSLEHLCIEGFHALQRLPSFLVTMLSIKILELHGLRGLQSIPDNALPLTLQEFNINNCTSCLSTRVSKDGADWPYVAHVPYIRVNGTTVQNL

SEQ ID NO: 193026 - protein, 753 aa, Oryza sativa
  Clone ID: PAT_MRT4530_89202C.1.pep
MTVGAGVAVQDGGLVALGATVLTEVRDNVLLTPAAGAGMTSGTFVGVRSATAGSRSVFPVGKLRGLRFICTFRFKMWWMTQRMGTSGRDIPFETQFLLVEAADADGSHLAGDGAAAVYTVFLPILEGPFRAVLQGNSDDELEICLESGDPAVESFEGTHLVFVGAGSDPFEVITNSVKAVERHLQTFTHREKKKMPDMLNWFGWCTWDAFYTDVTSEGVMEGLQSLGKGGTGPKFVIIDDGWQSVSMDPAGIASLADNSANFANRLTHIKENHKFQLNGRKGHREENPANGLAHIVNEIKGKHQLKYVYVWHAITGYWGGVRPGADGMEHYESKMQYPVSSPGVQKNEPCDALNSITTNGLGLVNPDRVFSFYNELHAYLASAGIDGVKVDVQNILETLGAGHGGRVLLARKYHQALEASIARNFRDNGIICCMSHNTDNLYSSKRSAVVRASDDFWPRDPASHTIHIASVAYNTVFLGEFMQPDWDMFHSVHPMAEYHAAARAVGGCAIYVSDKPGNHDFNLLKKLVLPDGSILRAKLPGRPTRDCLFSDPARDGKSILKIWNLNEHSGVIGAFNCQGAGWCRVGKKNLVHDEQPATVTGVIRAQDVHHLATVAADGWNGDVIVYSHIGGEVTCLPKNASLPVTLKTREYEVFTVVPLKKLDNGVSFAAVGLIGMFNSGGAVTAVRYVEDAGVEVRVRGSGTVGAYSSAKPARVVVDSEAAEFSYDDGCGLVTFELAVPEQELYSWTISIEY

SEQ ID NO: 193027 - protein, 1043 aa, Oryza sativa
  Clone ID: PAT_MRT4530_89203C.1.pep
MSRATAVSRLARAARAAAAARRHHAGGRDPLRALASLAGDASASAGGGARRPAWFAPPMGRLGGGGLLVPPPPPQRRLFHPTQAARYSTSSSSQITPGEFTEMAWEGVVGAVDAARMSKQQVVEAEHLMKALLEQKDGLARRIFSKAGIDNTSVLQATDEFISRQPKVVGDTSGPIIGSSFVSILDNARKHKKEYADEFVSVEHILRAFTEDKRFGQQLFRDLKIGENELKEAISAVRGSQRVTDQIVFLQRYLFVQLSIHNLRGDSANGNGFVSARWFFMLALKCTQCDCLITLGIITLFMVLLPDPEGKYQALEKYGIDMTELARRGKLDPVIGRDDEVRRCIQILCRRTKNNPVIIGEPGVGKTAIAEGLAQRIVRGDVPEPLQNRKLISLDMGALLAGAKFQGQFEERLKAVLKEITASNGQIILFIDEIHTIVGAGAAGGAMDAGNLLKPMLGRGELRCIGATTLDEYRKYIEKDAALERRFQQVYCGEPAVEDTISILRGLRERYELHHGVKISDGALVSAAVLSDRYITGRFLPDKAIDLVDEAAAKLKMEITSKPIELDEVDREIIRLEMEKLSLKNDTDKASKQRLSKLEADLESLKQKQKNLSEHWEYEKSLMTRIRSIKEETDRVNLEIEAAEREYDLNRAAELKYGTLLSLQKQLEEAENKLMEFQQSGKSMLREEVTDVDIAEIVSKWTGIPVSNLQQSEKEKLLLLEDVLHKRVIGQDIAVKSVANAIRRSRAGLSDPNRPIASLMFMGPTGVGKTELGKTLAEFLFNTENALIRIDMSEYMEKHAVSRLVGAPPGYIGYGEGGQLTEAVRRRPYSVVLFDEIEKAHQDVFNILLQLLDDGRITDSQGRTVSFTNCVIIMTSNIGSPLILDTLRNTSDSKEAVYEIMKKQVIDMARQSFRPEFLNRIDEYIVFQPLDTTEINRIVEIQLNRVKNRLRQQKIHLQYTPEAVEHLGSLGFDPNYGARPVKRVIQQMVENEIALSVLKGDFKEDDTVLVDVSSVAIAKGLAPQKKLVLQRLENANLELVAND

SEQ ID NO: 193028 - protein, 77 aa, Oryza sativa
  Clone ID: PAT_MRT4530_89204C.1.pep
MPPSSPTATTSLRMKRHAACEPEACRAEARHVAAAAASSTRNGAPVLVMMPLDTESKSGSALNRKKAVAASLAALKS

SEQ ID NO: 193029 - protein, 117 aa, Oryza sativa
  unsure (1)..(117): unsure at all Xaa locations
  Clone ID: PAT_MRT4530_89205C.1.pep
IFYKSPPPGRVDGPPPPPPPXPPPGRASGPPPLSPLAGPPPPFQAESPPPPPPHVEPPPSPPGRAITVASSPAELPPPHPPSVEPPPLAGGAAPGPLAAGKGCRIVSLDMILAYFSF

SEQ ID NO: 193030 - protein, 49 aa, Oryza sativa
  Clone ID: PAT_MRT4530_89206C.1.pep
MRSQQQLEWQQQLEWQKQLEAVHLEVLVEVVFLQLRQLELLVETSANKQ

SEQ ID NO: 193031 - protein, 126 aa, Oryza sativa
  unsure (1)..(126): unsure at all Xaa locations
  Clone ID: PAT_MRT4530_89207C.1.pep
SWPRRHWRSLPPGRRRHRATPAQGRRRPTPAPAPPHGRTRAGHARARAVARSHSHRPRALTGAPSHKGRPPPTTXRGAVPPDHRAPPSHGWPPRRRRSGAGLAAPPPPVAGRRSPGRHLPYMARSH

SEQ ID NO: 193032 - protein, 721 aa, Oryza sativa
  unsure (1)..(721): unsure at all Xaa locations
  Clone ID: PAT_MRT4530_89208C.1.pep
MGSRREEERNEKIIRGLMKLPPNRKCINCNSVGPQYVCTNFWTFICLSCSGIHREFTHRVKSVSMAKFTTQEVRSLEQGGNQRARDIYLKDWDWQRMRLPDNSNPDRIREFIRAVYVDKKYAGGKSTDKPVNDSESVKSSENDTRRPSSYHSYSQSPPYDFQYEDRRYGKQVDTLARRPSDRALFDGKLGSFLYSPGRLRDQMHEDRFANESTGSRFSDFSASSTGDIRNDVLSPSSQDTGYSSPSIHHSRNVSSENPPSHRHPNATSQIDFNGVRRSQRTGSSGSFGSFDGSSASNKSVDSGALPDAPTEKPVNSAVNRQSVAPPMAHSAQLYASQSNINSSVSQTAPTRESVQHGRVHMVSVAKPPVSTQPTTSTNQDFFDQSMQHPVNSAAPIDLFAGFNQQAPSVPHRAVDVGSHSVPKETLHDVVVQKAVASSPPVQAEAPSTSHPVHHDLLSLSPLQEPSISSTPPSIDLFAGFDQQLPPTTSVQQSQPAEPSISSTPQSIDLFAGFDQQLPPTTSVQQSQQAAPLVADEGWAFFLDTPQHVSPTSISNVQAQVATAIAAFPPSESLAKGTNQSMLPTSPPNALIPQSYPLMMDQWSLNAEEVKTPVSKETSQPWNAFGASTGNTPNDSFTFNTISQVAPNHFNVPSVPHAEARGPQDLPSSEPERLTPGDITPGFNVSPGDMAGPSFRGPLQQQLDIVXPSQPAKSTIPFGHGI

SEQ ID NO: 193033 - protein, 36 aa, Oryza sativa
  Clone ID: PAT_MRT4530_89209C.1.pep
WGRIAKRLFSHDAAVLSDRMRRSIFACGCDGRMRKW

SEQ ID NO: 193034 - protein, 345 aa, Oryza sativa
  Clone ID: PAT_MRT4530_8920C.1.pep
MARSARARRHVARQLRSAPYPIPSYRWKAMKESNRKKTLPAAQKMDWEDANCSVCMEYPHNAVLLLCSSHDKGCRPYMCGTSHRHSNCLDQFKKAYTKGALLEELPANTVGTNLDSTPLIAGEKNESVDLACPLCRGKVKGWTIVEPARSYLNGKRRTCMQDGCSFVGTYKELRKHVKSEHPLAKPREVDPILEQKWRLLEIERERQDALSTITATMGRAIVFGDYVLDLEDEDDLDDVESDEDDNANGHGTDNTRRMLMFLMRQVARHHQNQRLQNAIGTTGGAEDNYAVSSGANATTPYHYPLEGDDEDDLVMAGGGSTGMVRPERRRRRRRRNRERLFLGAN

SEQ ID NO: 193035 - protein, 145 aa, Oryza sativa
  Clone ID: PAT_MRT4530_89210C.1.pep
MPLPSDQLGFLLRVVLASLHETEDEQPNLPPPAGNGVGTATVKQPKMILDPGDNFSNWDRYIMAILEVATGVQIIYALFREILLPDASELIVGSSYICIPVYVSWIPGSLNLNLMAPPYIFAVLSCPHKRLLDYYASKVVAYEAS

SEQ ID NO: 193036 - protein, 135 aa, Oryza sativa
  unsure (1)..(135): unsure at all Xaa locations
  Clone ID: PAT_MRT4530_89211C.1.pep
SFRPRPWAAGQQQTPRRGPRQRPPPPASSPSPPPASPPSPPCKCRPQPPPSARGSPPPASXLRPPPXAMXALRPSXNSXPXPPRXLRQGPHXGTPPPXXPFSLHAFSFLSLTLPSLPPEVPPPPVLPPGEARGWG

SEQ ID NO: 193037 - protein, 593 aa, Oryza sativa
  Clone ID: PAT_MRT4530_89212C.1.pep
MPAVKVEEEEEERNPVASSPSVSEGSAHAAALASPTAADSIFGRRRKSGPVRRAKGGWTPEEDEKLRKAVDIYNGKNWKKIAESFSDRTEVQCLHRWQKVLDPELIKGPWTQEEDDVIINMVKKHGPKKWSVIARSLNGRIGKQCRERWHNHLDPQIRKEAWTVEEERVLARAHCMYGNKWAEIAKLLPGRTDNSIKNHWNSSLRKKIDDYNTRDILPVHPPVVGDGLKQLPKRPPADNHFDLNKEPIICSRDRLGVVHSDPTSHQRASNLKDFKGCADYLSLGQPVTSCEASAADDSAFDLATQGMRMDSVHDKGTGNNFVCGKVQGINFLGDKGLKINQISDKMGCSRQAKREGEAAINGGGSSLQSEAHSVGSLCYQIPKMEDIAPAQSPVFTANYVPEHSRNVMHSPNGYTTPPTHGKGSDQLSVESILRSAAEKFHGTPSILRRRKRDKPTPAEDNDLKIGRLSSDDFHTPIGKCTTDSPQSFKTAALLSLGPMDEQGSLDVSPPYRLRSKRLAVLKTVQNHLDFSSDEMSICDTTMKSACGNSDCANASSGVSSIQGKKLDEHMIGLETLTMNFAHTTKLDATQPNL

SEQ ID NO: 193038 - protein, 381 aa, Oryza sativa
  Clone ID: PAT_MRT4530_89213C.1.pep
MAAASTTDQGVAVINDSPLCKLLSSGDGRHVTFRVDYAAARRPAVAGRTLRTTCAIGDSGAYRCEASFRLLIGRRKLAAFAVGVSGPRYRDVHKVVVDLVLVDNARSVALQPPTRSMAIQAAAGSNQGGCGLLVSKDYLEENCVQDGVLVAVCSVLFLPELPPCLWLDSLGHRLAAMSNKKDSTLTDVCFDVDGERFNAHRLVMAAQSEVFRSLLFGSDDAETKTETAVVTIDGISATTFKHMLHYIYCNQLPPPATGDGDDDDGEADHVTRIAELQRLLVAADAYGVEALRQACEDTLCAGINMDTVASTLALTEKGSYPKLRGSCLEFLSNTQIYSVATNDECYEVVQSYPDVLTEIRDSCLIYYRYATFVVVTELEDL

SEQ ID NO: 193039 - protein, 62 aa, Oryza sativa
  Clone ID: PAT_MRT4530_89214C.1.pep
PPTLPGSVDGEPSSYLTGEFAVDYGWDTVALSTPTLIILCCVRAGTMAGYKPALTYFPYKYL

SEQ ID NO: 193040 - protein, 52 aa, Oryza sativa
  Clone ID: PAT_MRT4530_89215C.1.pep
MTKTTTMAGLESGGSNTATIGRGGSIVLGLGRGDDDGERVSKRILWRRLLSK

SEQ ID NO: 193041 - protein, 82 aa, Oryza sativa
  Clone ID: PAT_MRT4530_89216C.1.pep
QGIESWRSTTKEPSITCHKPLCVILLLALLSSVFHNHSPQKHQWKGTGHHTTTKGGHGKTVRCCCRIHLAQHLQLAPGCLHT

SEQ ID NO: 193042 - protein, 207 aa, Oryza sativa
  Clone ID: PAT_MRT4530_89217C.1.pep
MAPASLTRLTNPLPCASPSPRCRRRPGRSPPARSAACGVVSRRRAVSEMAILSGAAAAAASCCVDLFFAHMPARAATLEPDVIRYRKLDSGVKLEDVVDGEGPEAREGDVVQFNYVCRRANGYFVHSTVDQFSGESKPVTLALDGKEMIRGLKDVIVGMKTGGKRRALIPPQVGYTDESLQPIPEEFGPRRSLLSHAKEPLVFEVQL

SEQ ID NO: 193043 - protein, 268 aa, Oryza sativa
  unsure (1)..(268): unsure at all Xaa locations
  Clone ID: PAT_MRT4530_89218C.1.pep
GVILTQEKYANDMLKRVGIQDCKPVSTPLLVSEKLSAHEDTLLGLNDATQYRSVVGALQYLTLTRPDIAYSVNKVRQFLHAPTLTHWTVVKRILRYVMXKYTVGHGLEIHKSPSMLVNEFTDVDWAGCVDDRRSIGGFAIYLGSNLVSWSARKQTTVSRSSTEAEYKALANTTAEIMWIQTLVQEIGVETPRTAKIWCDNIRAKHLSANPVFHARTNHIEVDYHFVREKXIEIEYISSKDQVVDGFTKPLAVRQFEDFRNNLNLRSFN

SEQ ID NO: 193044 - protein, 197 aa, Oryza sativa
  unsure (1)..(197): unsure at all Xaa locations
  Clone ID: PAT_MRT4530_89219C.1.pep
WRGGARLGATATCGGGTARRNGDSARRGRGLRRXMATAWREAARGRARGDAARVTPTGDSDARGAARGATRCDARRARHGAAARGSGLEGAVARRRRLAVRGDGARRGSGDGTRRRRRVARQGRGAGPTGHVRGDGTSHGDGQHDSRGDATLARRGVVTATVQQRRQRRGARGAQGSGAAQAGATRGSRGSARRGKG

SEQ ID NO: 193045 - protein, 265 aa, Oryza sativa
  Clone ID: PAT_MRT4530_8921C.1.pep
MADPAAEETVPAPPPTPAVDPAEGASDAPQPVELPADTAAASPEKVSSPPPEPAPAVRSRGFRLLGEDTSVHKALGGGKTADVLLWKDKKTSAVVIGGATVIWILFEVLDYHLLTLLSHVMIGALAILFLWSKATTFIKKSPPDIPVVQIPEDVAVNVSRALRSDINRALHLFREIALGHDLKKFLGVIVALWVLSEVGSCCDFLTLIYVAVLMLHTVPILYDKYQDKVDHFAGRAHSEACKHYEVLDAKVLSKIPRGPVKPKKN

SEQ ID NO: 193046 - protein, 307 aa, Oryza sativa
  unsure (1)..(307): unsure at all Xaa locations
  Clone ID: PAT_MRT4530_89220C.1.pep
MVEVVEHEVVVRTXHSSGSEDASGSSDPRHHHQNSPTPPRHSPRRQEDPNRSGGSALSPPPGGGRPHRARVRRRLTYGDEGSPQXRTSGGGGSSAAPPLSTPTTLSLSARRRARRSALTSKRSTXPTSSWPSESRRHHDDLSIPGGAGCKAVVASLRNVRWPPKFRPNLTEKYDGSINPFEFLQIYTTIIVVAGGDDRVMANYFPMAPKGQVRGWLMTQPPAHTAVYAFRSDVRHNRMLEKITSKEPKTTAXLFELADKVARKEEAWAWNSSGYGAAAVATPEPSSHSKRWDKRRKRKPARSNDEGH

SEQ ID NO: 193047 - protein, 126 aa, Oryza sativa
  Clone ID: PAT_MRT4530_89221C.1.pep
MAILGGAAAAAASCCVDLFFAHMPARAATLEPDVIRYRKLDSGVKLEAALCDPARLTSLAARMIRGLKDVIVGMKTGGKRRALIPPQVGYTDESLQPIPEEFGPRRSLLSHAKEPLVFEVQLLKVL

SEQ ID NO: 193048 - protein, 574 aa, Oryza sativa
  unsure (1)..(574): unsure at all Xaa locations
  Clone ID: PAT_MRT4530_89222C.1.pep
MVEVVEHEVVVRTPILPGVRMQVGVAILDTITRILQLLRAIAPDGRRTPIGEGASSSGVSRPSARGGSPPTSIPGGAGCKAVVASLRNVRWPPKFRPNLTEKYDGSINPFEFLQIYTTIIVVAGGDDRVMANYFPMAPKGQVRGWLMTQPPDSIHSWEDCAXRFITNFQGTYPCPGVEADLHAVQRKDDESLRSYIQRFCXVHNTIPCIPAHTAVYAFRSDVRHNRMLEKITSKEPKTTAXLFELADKVARKEEAWAWNSSGYGAAAVATPEPSSHSKRWDKRRKRKPARSNDEGHVLAADGPSRTPCKEKVTSDKPSITTPPGESRSADKWCSVHNTYRHSLADCRTVKNLAERRVGGEAHFRPERPPDGAHPWREAGPHXSPTIHNVKMKRVSVDGGASLSIISPVAFHALKASGMRLQPSLPIIAVTPGHTWPLGHIELPVTFGDSNNFRIERIDFDVANLNLPYNVVLGRPAVVKFMAATHYAYLQMKMPGPNGPITISGDVKIALACAEQCADSLAAATEPVEAGGFPKASASHASKKRITSGDKVPVKEPLGDDLSKTAKIGGNLDAK

SEQ ID NO: 193049 - protein, 115 aa, Oryza sativa
  Clone ID: PAT_MRT4530_89223C.1.pep
MATVTRAHLEQRLALAKRCSREANIAGVKAAAVATIASAVPTLASVRMLPWAKANINPTGQALIICTAAGMAYFVAADKKILSLARRHSFENAPEHLKNTSFQGAGRPHPAFFRP

SEQ ID NO: 193050 - protein, 61 aa, Oryza sativa
  Clone ID: PAT_MRT4530_89224C.1.pep
MAPSAMATTVTTVAPFHELKSTVGMPVSRLSGISSFFNVSYVRRIRCIQVCPISVIKNFHY

SEQ ID NO: 193051 - protein, 155 aa, Oryza sativa
  Clone ID: PAT_MRT4530_89225C.1.pep
GSHLISLSTTDPTSRRFSPPPSYFTSGLVSSQLHRSCSTMSTTVTRAHLEQRLALAKRCSREANLAGVKAAAVATIASAVPTLASVRMLPWAKANINPTGQALIICTAAGMAYFVAADKKILSLARRHSFENAPEHLKNTSFQGTGRPHPAFFRP

SEQ ID NO: 193052 - protein, 124 aa, Oryza sativa
  Clone ID: PAT_MRT4530_89226C.1.pep
MATVTRAHLEQRLALAKRCSREANIAGVKAAAVATIASAVPTSSFISRAHQLASVRMLPWAKANINPTGQALIICTAAGMAYFVAADKKILSLARRHSFENAPEHLKNTSFQGTGRPHPAFFRP

SEQ ID NO: 193053 - protein, 582 aa, Oryza sativa
  Clone ID: PAT_MRT4530_89227C.1.pep
MAQEGSEASVASSPPAPPPPSSSSSSAAAAASWWRDMHHPYGAASAPSWLPPPSATAPRWPPTMAAAHQHHHHRTSSSGAEDDLSASNATITSFTNTSTTNHSGLSMDSSGEAAAAAAAAAAESHLIWNQVLMGAAGGEVGRSMPAVHDAHDDSENFLELLNSRTLAPELFAEPPACDYLKKMEYGGGGGGGGGGWPEHQFTAAAALEKHLSSAAAAGYGGALAHHHHAAGAPERLTANLSDLVSNWSIAPPNHGHHVGGAAACDNPAVAAAMAAAHGGGNVKQSGSSFLDSGGGGGGAMLQQESSSSTGTGGGGQDFLRPMGLAAGSSSYSSMLGLSSRMYGGGGTATMDVPWGSSNAGAARSLSDLISFGGGAMDKPPPPPPSSAPARTSSADYKKQQGQQEISSPVKTSSSGGGGKEGKKKRSEEAAGSEGSTKKSKHEATSPTSSLKDYNAWGGLDRKEKADAEVDLRSFNTPSWRYCRRHLDQVARVLRNEPRSHIAVASILLPWQPHHRCAPAMSCSHHGVVRAGLPQPPSVFHYRCSRATARSPLRTPVALSSSAYAKLDKEASLGLSEKQTMET

SEQ ID NO: 193054 - protein, 626 aa, Oryza sativa
  Clone ID: PAT_MRT4530_89228C.1.pep
MDGGGGGDPGGRVGEAKADATRAANKRRAPSPAGGGGVEAKRRRKDAMGSSVSGSRSGGGGGRRLRHGRGRRARAFRRKLEEENKNSNNRPRASNVVIAYTPNLIRRYGTLLRNISFLLPYDGQGKAYACPSDKINVFLKWSRCNFCLFFEWAEGDQMMICHMFNTLKEIHISFLINPAFLDESMEVKVTNPLLSFSSNFVEDETWALVKEMLMMMFSPVQEDERAASDLYVFTKSRDSVYFRIFKITSIPAGESENSLVLDEVGLNFCLKLLDVHGAFVGSDCDQALDGLQSQTRNELKLSPDIYYCVPNDKLGCCTLHSVALNNQNYLFFLENGLDLSHFEGFCLTLEEFLERNSFLKIKHIVGSRNDEECNFVRVRAKAIIRSMLSHLVNLFSLGKCLRMGTDLLRRRKILLKGSDVKFFQLEVIAYEEDEAINNVLQVVELVKSCFVGEMIPADLQGDLHDLKENPLKRLESVIDSSSLMSAKEKKGLLVNLHTEYKTNISPAISEDDRDSLFKHIPYLDCWMNRTEDNEYLKLVANLDSKKVALKVNKVGTDKRKPSKNGILQFDFMRNSDVHIPEKALKDGITPFRLSWTDYILTSRYPTYLRAIQKSLEPYMKSRKKLK

SEQ ID NO: 193055 - protein, 93 aa, Oryza sativa
  unsure (1)..(93): unsure at all Xaa locations
  Clone ID: PAT_MRT4530_89229C.1.pep
MWLKFWRPANFLYDKATLLLLMTRSTLHVMAHQADCQCINIVXQVCISYNLQLFNGGSFDQTEAQAQTLLTLNLPSICGIYPNYYSAPRSIAT

SEQ ID NO: 193056 - protein, 141 aa, Oryza sativa
  Clone ID: PAT_MRT4530_8922C.1.pep
APQARQNALACFGTTCTATILLLILGRAEKGYRMLELTLDYASDLNKGTVFSRMHGYAAVYMFGSNGPMHMHGTHADRSGGRNPAWNTALHLPVAACFDTRGLVLHVQLRARRYFGGHRDVGDVIVPLDDLHGGTHDRGEP

SEQ ID NO: 193057 - protein, 331 aa, Oryza sativa
  Clone ID: PAT_MRT4530_89230C.1.pep
MALDPLSPMLFILVMDVLNSVVMLLLKADNVVMFLRPTVNNITIIKQLLDVFGHASGLVTNLQKSSVTPIQCKEEDLEIISNLLSCGVKEFPCTYLGLSLNIKKSSKAKLQFLVDKVADNLPTWKASLMNRAGRLTTVCRPPMYGGLGIHNLELMNWVLRIRWLWLQKTDGARAWQGLDLQVPSNAHVMFNMAMETMVGNGQSILFWSERWIQGRTAEVAANLINLVQKKDIKNHIVAQALENHRWTTEIRGALPVQVIVEYLHLWDLVAEVELQDGISDQYHWKLDKTATVLQTVENECIMWSLARASRLKELIERLVGADPFPFLFSFS

SEQ ID NO: 193058 - protein, 83 aa, Oryza sativa
  unsure (1)..(83): unsure at all Xaa locations
  Clone ID: PAT_MRT4530_89231C.1.pep
YVFTDKPPRLPPTGVSDGWHGRLVTPPLMGVIIFNASSPSPPPNGVLAVGLPSSPSSMVSXHCCWASTSSPPACRHHRRLVSP

SEQ ID NO: 193059 - protein, 234 aa, Oryza sativa
  Clone ID: PAT_MRT4530_89232C.1.pep
MNAFRFLGDMTHLFSVLVLLLKIYATKSCSGVSRKTQELYMLVFVARYMDLFTDYISLYNSVMKVVFITSSAAIVWCMRRHPQVRRTYDKDQDTFRHVVLVAAAFVLALLFNERFTFREICWAFSIYLEAVAILPQLVLLQRSRNVDNLTGQYVFFLGAYRAFYILNWIYRYFTEGHHSRWIPWIAGLVQTALYADFFYYYFLSSITLGVNKQCDFRCLVKTNALQTTPKYQKY

SEQ ID NO: 193060 - protein, 215 aa, Oryza sativa
  Clone ID: PAT_MRT4530_89233C.1.pep
MNAFRFLGDMTHLFSVLVLLLKIYATKSCSGVSRKTQELYMLVFVARYMDLFTDYISLYNSVMKVVFITSSAAIVWCMRRHPQVRRTYDKDQDTFRHVVLVAAAFVLALLFNERFTFREICWAFSIYLEAVAILPQLVLLQRSRNVDNLTGQYVFFLGAYRAFYILNWIYRYFTEGHHSRWIPWIAGLVQTALYADFFYYYFLSWKNNVKLELPA

SEQ ID NO: 193061 - protein, 98 aa, Oryza sativa
  Clone ID: PAT_MRT4530_89234C.1.pep
PVSTRLSPTRSRARAPPAPPPPPPPARPHRHRSPRDGAAPAAVRRRAPSLRRRGGGSGARQCARGIHRGRRRGARRHRTRRGPGPAPNDGGRPHRRGR

SEQ ID NO: 193062 - protein, 157 aa, Oryza sativa
  unsure (1)..(157): unsure at all Xaa locations
  Clone ID: PAT_MRT4530_89235C.1.pep
MRVFFYIKFYFCNKLYKYKXALVLVYGSTQNKSKEQFLTKXTRMCSHENLPIIIWVTLIYYTTEEKNNDNFDNRXPFFNAIIDGLSLSGRNYARANNLSLPTYXKIDRVLMSSPLLLNTNSSSVYNSHKNFKFKLGWLLSRSDIDYLISRSLSFQEP

SEQ ID NO: 193063 - protein, 59 aa, Oryza sativa
  Clone ID: PAT_MRT4530_89236C.1.pep
GGGLFKDTKFSSPFLQNNIFFLGVLKLNSLALVLKTWNWKNLGVPKINSFEKNFFFHNW

SEQ ID NO: 193064 - protein, 59 aa, Oryza sativa
  Clone ID: PAT_MRT4530_89237C.1.pep
YPFVVRSSASESSSLSPLPIIDELLDELAGAGAPATFQGLMNIIFAPFLRKGVLVFIDD

SEQ ID NO: 193065 - protein, 44 aa, Oryza sativa
  Clone ID: PAT_MRT4530_89238C.1.pep
LPRTVPFNNRQEGSRQKRAPKPCPMKLLVLTNVPSIWWLIRWVC

SEQ ID NO: 193066 - protein, 796 aa, Oryza sativa
  Clone ID: PAT_MRT4530_89239C.1.pep
MAAMVGARRALLAARYSPRGALASPVRRVDSPPSLPADRGCLWPLVPHRGAGNFASEQIDGDYHREWGARNDGNYREPHRTDSLSHQVQANLPSTDSSVGADRIRGVSGDGSVNANYRRNPGQPEFPNRHEPYSSARVNNGASGYNDRQPYGSANAQYRSNSAQPSQTGGPYGFANRNEPYTSARVNYEAPGYNDKQPYGGGTTYNQQIANGDLPNSQYSRRQGNNSGVSGYGTGHHYHGSDTYRSGYNTQNNQQAYDSRQYGYGPSGQSYQESTGNDQQVFQQQEVDQRSAGNYANRPGSTSEYPNPSRFNKEHAANFQQGYNGGIGHNVSHAPQSPYVSSKIDAQGNFPGQPMNVNRSVQHNTHAPALYQDGIYRNPLTDSPSIDGLPSGASDVTSGESKVTVEEMDKLCEDGKVKEAVELLALLQEEGTVVHAPQYFKLMQACGDATSLAEARKIHNQISQSALAVDTDINNKILEMYAKCGSMEDAKKLFNTIAQRNLASWNTIISGFVYNGLGDEATDFFDQFKQTGNKPDSTMFTHVFLACGILGSVDEGMLHFESMQKDFGVTPTMEHYVSIVNMLGQSGYIDEACEFVEQMPVEPSIDVWESLMNMCRLNGFLELGNRCAQIVERLDSSRLNDQSKIGLFPVDASELAKEKERKKANAVEARSKVHEYRAGDRSHPEHLKIYEELRYLAAHMKEAGYIADTRFVLHDVDQETKEDALLAHSERLAVSYGLITSAARSPIRVIKNLRSCGDCHTALKIISKLVGRLIIARDAKRFHHFENGVCSCKDYW

SEQ ID NO: 193067 - protein, 616 aa, Oryza sativa
  Clone ID: PAT_MRT4530_8923C.1.pep
MASPPHLPLLLLLLVVVCNAAGGDGARVNPFTAKAAFIRYWNRRVPNNRPHPAFFVAKLSPLQAADAASFAAALPRLLPPLCARAALLCPSASDTETAASLAVGGGGGGGPFKGYSNANFTNYGSGGVGGADGFSAYSPDLNVVGDSFRRYGRDSTRRVDTFASYEAEGNVVTGNFTFYAGAATGGSGSFSGYAADTNVPDSTFTNYDAEANGRRREFTSYSQEANHGSNTFAGYGKNGNGLRETFTTYGNDSNVIASGFTNYGESGNGATDTFTAYGKEGNVPDNTFRSYGAGGNAGVDTFKGYRSESNVGDDSFASYAKGANGNAAEFQNYGGSFNPGTVTFKGYGEGSNPNHHIGFKEYAGSNNSFKGYAKSGVDFKEYHNTSSADAATTMSLEAVSSGHQHLKWSPEPGKFFRETELVSGNTMPMPDIKDKMPPRAFLPRDIAKKIPFKPNAVSEVFGVPLDTAMGKAVTSTVAECERAPSRGETKRCATSAEDIVDFAVEMLGNDMVVRRTASAGATRLQITVGNVTGVDAGKVSRSGWCGPILCQYQVYYCHSVPKVRGCEAGIRAAASDQKINHGVAICHGGNSDWRLTQFAIHAVEGKPGKVENTSSA

SEQ ID NO: 193068 - protein, 661 aa, Oryza sativa
  unsure (1)..(661): unsure at all Xaa locations
  Clone ID: PAT_MRT4530_89240C.1.pep
MSISIENDVNDNCDRNSNGGNGNGSIGNDNINTTTSESRAFCGFSFLRPYRAVRYLRDLQPYILSSIQSASRVPPPEARRTTPRCVNPRLRRVDMRSGAHAPHVVVPLRLAIHLAPSLPACSFGRSRPPPSLISNLSTVDHADAGDASPAYKREKEAMGIGIGIGIGIGIGTGTGAALPFGEASPWSLLGGAVAALLLVWAAQMLEWAWLAPRRMERALRAQGLRGTQYRFLHGDLTEDLRLVTAARSKPVPMDRPHDFIPRVAPLLHRALEEHGVFVPCSDLXRMKIQKATKNGEASKDDLLGLLLQSNMDYYSDEDGKSSKGMTVEEIIDECKLFYFAGMETTAVLLTWTMVALSMHPEWQDRAREEILQVFGRNKPDINGVSRLKVVTMVLHEVLRLYPPVVMMNRRTYKEIELGGVRYPAGVMLSLPVLFIHRDAAAWGHDAGEFDPGRFAEGVARACKDPGAGAFFPFSWGPRICIGQNFALLEAKVALGMILQRFAFQLSPAYAHAPYTVLTLHPQHGVPNTFADKHWKLHVPGIRHSEISISDMKAEHYLLTTAAAVPCIVEVYEYPYSISRAILEYLNLWPAIHSLDDLSKEPDSLIWWWESSGEYSSYSAYLSLFVGTGKGAVLGQADLEVVGASSMALLHVVGGSQLPAIQ

SEQ ID NO: 193069 - protein, 185 aa, Oryza sativa
  unsure (1)..(185): unsure at all Xaa locations
  Clone ID: PAT_MRT4530_89241C.1.pep
LTWTMVXLSMHPEWQDRAREEILQVFGRNKPXDINGVSRLKVVTMVLHEVLRLYPPVVMMNRRTYKEIELGGVRYPAGVMLSLPVLFIHRDAAAWGHDAGEFDPGRFAEGVARACKDPGAGAFFPFSWGPRICIGQNFALLEAKVALGMILQRFAFELSPAYAHAPYTVLTLHPQHGVPVRLRRL

SEQ ID NO: 193070 - protein, 362 aa, Oryza sativa
  Clone ID: PAT_MRT4530_89242C.1.pep
MRIEELPGDSGGGGGDGGGGGGGGALLQLRRGAAAAAAAVEEEGGVVMRVAFDAKRAAVGVGARMLFYPTLVYNVVRNRFEPHFHWWDQVDEHVLLGAVPFPSDVLRLKELGVCGVVTLNESYERLVPRCLYEAHGIENLVLPTRDYLYAPSFENLCRAADFIHRNALCGKLTYVHCKAGRGRSTTVVLCYLVQYKQMTPAEAYEHVRLRRPRVLLASAQRQAVEQFYQLRVKKSGKSICLDSPIMKPPLFLATRNLIAFDEKTFVMVSKSDLEGYDADTLAVNVGSGLWEISLVYRVQFASQAAFAGFSYLWVRCRAPRKNKEALPVPESNNSVGSESCSLEAEQLAKPHPCLLQGVMVNP

SEQ ID NO: 193071 - protein, 234 aa, Oryza sativa
  Clone ID: PAT_MRT4530_89243C.1.pep
LRRWPRSAPLRRRRRLRLPPQRKPPPARTRTSRRRRRRRVPLLSPHPWSLTRARSPILPGRRNRRRRRRRTWCAPPLPRAGIHRRRIARRMIRPMRKRTSRPNPRRRRRRRRRRRIRLRSRGRRGMARRSRRPRGRPSTASGRPRTRCASSRRSRRTAGSTGRCHRPTRSSPPSPAASTTLATAARSSRGRSALSSAVTNPPLRRRAISQARAMTAGSMTSPRASGAARRQRRR

SEQ ID NO: 193072 - protein, 268 aa, Oryza sativa
  unsure (1)..(268): unsure at all Xaa locations
  Clone ID: PAT_MRT4530_89244C.1.pep
MDASSPFSFHELRRQASSYLTDKIRSARLALTDVTPTQLMTEEATSGDASPPNVKTMSLIARQAFEIDEYVRISDILHKRFARFDRRQWREAYKALLLLEHLLTHGPRSVALEFQRDREVIEQMVSFQHIDEXGFNWGMTVKSKSERVLRLLERGPFLEDERERARKIAHEIKGFGSFNLSSAHASGSAAAALRAGAMEHQCYGRSNSRYEGRWRREACVDDGDKENLLVVSMAEAKAEAAAEEPHHYHHPFYGFGQQRPEAMLLLSQ

SEQ ID NO: 193073 - protein, 114 aa, Oryza sativa
  Clone ID: PAT_MRT4530_89245C.1.pep
VEAATSTDVSNLGAPRRGISGACSKDGGHIFTVSLRQLARVLQPGRAPAQAVADQCPANKPGRPPHLHPHRRRRHQKPPITSTRRTVPGKPNVSHFLMGGGDQPQEVHEAEGQT

SEQ ID NO: 193074 - protein, 394 aa, Oryza sativa
  Clone ID: PAT_MRT4530_89246C.1.pep
MASSNVSTVYISVIDDVISKVRDDFISYGVGDAVLNELQALWEMKMLHCGAISGTIDRSKAAPAPSAGTPGAGTTPPVHDLNVPYEATSEEYATPTADMLFPPTPLQTPIQTPLPGTDAGMYNIPTGPSDYAPSPISDVRNGMAMNGADPKTGRPSPYMPPPSPWMTQRPLGVDVNVAYVENREDPDRTGQPPQLTKDFLMMSSGKRKRDEYPGQLPSGSFVPQQDGSADQIVEFVVSKDNAQQLWSSIVNKQGTATKESSTKETIIAPTIPQRDGMDDYNDPFYFQGVPTEDYNTPGESSEYRAPTPAVGTPKPRNDVGDDDEPPLNEDDDDDDELDDLEQGEDEPNTQHLVLAQFDKVTRTKNRWKCTLKDGIMHLNGRDVLFNKATGEFDF

SEQ ID NO: 193075 - protein, 120 aa, Oryza sativa
  unsure (1)..(120): unsure at all Xaa locations
  Clone ID: PAT_MRT4530_89247C.1.pep
VNVICVKTDFIXFLKTSRLXVRRSPIFWSATHIGWXFITIQHHNQSILVTTVGDXSAFCKDAPNFTQVSPKSCIVAATSCDPCSWFGVPLCLTRFHFPSCRSQSSNTSHTLVVRPTPFHP

SEQ ID NO: 193076 - protein, 176 aa, Oryza sativa
  Clone ID: PAT_MRT4530_89248C.1.pep
HHAWATVEAATSTDVSNLGAPRRGISGACSLRAWCRGIYVRISGSDRQGWRTYLHPDYRPSPTSATSTRTNRIDDKLSNNDDGWLEYVSLRQLARVLQPGRAPAQAVADQCPANKPGRPPHLHPHRRRRHQKPPITSTRRTVPGKPNVSHFLNLHIISYTLKLEHAAWLLFITLIH

SEQ ID NO: 193077 - protein, 1790 aa, Oryza sativa
  Clone ID: PAT_MRT4530_89249C.1.pep
MPPTRPKRRRGGSARSRGRKKQKRLDAIHDVAPVSAPPAGAAVVVGGGGESEDSDAEGPRRSTRVRRAPALLDTSPLPSPRRKRARGGGGGGVAGSSGGSSRRRSRGRARGEAGVAREIGEEEEEEEDDEAGNVVWRSRLRDRVKGKAKLDKRVRSLWFDEDYEVELKEEEEVVVEEEEEDEEEGDEEEEEEQVRTLVVDLREGAEEETMGEGSGSLPMRGREVMDREINLTIDLNVEEHEAVEGVNVVEEEDGEKGGEADEEKGDAIGPGNDLHEGKHEEVGDEEGLHEKERTEELGSAVLEGRNGDELPCNENNAEDGTGSSHEHEHLLVQNEQTVEESNLCVEQQMELDGSSPSEQLKEVQQDVQTGGASNVVLPEEAPKEGVRKFPVSEEKQGTMEIKEGRRCGLCGGGTDGRPPKVALHDTVDSDNEAYEGALPSEDPNYDMWDGFGDDPGWLGRLLGPIHDQFGIARVWVHQNCAVWSPEVYFAGLGCLKNVRAALCRGRLLKCSRCGRPGATIGCRVDRCPKTYHLPCSRAEACIFDHRMFLIACNDHRHYFQPQGDKYVELLRKMKIKKMKADIRKVSHDAWRKDIEAEEKWLENCGEDEEFLKREGKRLNRDLSRIAPVYIGGTSENEKAYCGWESVAGLSNVIQSMKEVVILPLLYPEFFSSLGLTPPRGVLLHGHPGTGKTLVVRALIGACSQGNRRIAYFARKGADCLGKYVGDAERQLRLLFQVAERCQPSIIFFDEIDGLAPSRSRRQDQTHNSVVATLLSLLDGLKSRGSVIVIGATNRPDAIDPALRRPGRFDREIYFPLPTFEDRSAILSLHTKKWPSPISGAFLSVIASQTVGYAGADLQSICTQAAINALKRTCPLKEILLSAEKGFEHGRLPLPSILVEERDWLAALAAAPPPCSQREAGIAANDLVSSPLVSYLVPCLLKPLLHLFISLYLDERIWLPSSLLKAFASIKQVIFSSMEKNNVPHTFWSSYLPSLIQQKGIAKRIASILSGYGLIAYQLGNHDSVLNHNEQHEKFDAHRLNSTGSHPKGGLAHKLSGFRALAAGAPRSGQQHLIRCLLHGFVGHTVIHKLDLATMAQEGNGDILSGLTQILQHTIPRFSVNVDSYFTWDEVIDACCLRISHDLVQQHVQLLHDRAHNNHDEQKEVFVPMEISAPGEHRSSGSKEASMLTKYPLNMDKHPSCGVSSREHPTQLGTCSAQQEPPTSNVEDKEDNTEKIDFNEKVATNRSNRIVKDSESLAIMAFGIQILQHPQFSKLCWVTSKLREGPCTDINGPWKGWPFNSCLLQSTTADKSLSGGNNVLKGKEKIPSVRGLVAVGLLAYRGAYASVLEICSEVRKVLELLVGQVRTKILEKRSRYRYFHILSQVAYLDDIMSSWAYTFQRLHSENRRVKTSPKVTVGKSSTRECQGDSNTAEANILGAPAGCSEAQGTPGQHTDDLEVIPAHCPSEMQENSVQHAPGHLEIHGIVCDLDNDNVTSISSINAVEPDLIHSASLDVHTDSLTPADAVINDGQSCGVDNDGQMSRVINGEENHISNIERPESHTVSVADFNELQRKNAVASSTSTDSAGTSRNMVSSEARGSDNERNTDFPVDDVKLGHLVNPQSQDTMKSLSVLKPPCLYKCCPVCFNAVYKMVHDILSNSVRPSLHCLAVDDMHDLLSSWSVNLLATVRKWYTSQGIVGSEENSGEGHCVCSSDNGCVPRECTCHLESNEDAGTIKDESYYLSGQPLSFFFKDGVLIPPDITAPTTLHCSYMRLCVCSIPGSISMFNRISS

SEQ ID NO: 193078 - protein, 90 aa, Oryza sativa
  Clone ID: PAT_MRT4530_8924C.1.pep
ALIQNKSMTKSKNPQISPQVPKAPSEQRSSQNPGHRRAEEGGGNEHGAARRGPPGRSQSPGWGWGAWTRSAGGKLGELAAVCVPGHWCAE

SEQ ID NO: 193079 - protein, 99 aa, Oryza sativa
  Clone ID: PAT_MRT4530_89250C.1.pep
MRECISIHIGQAGIQAGNACWELYCLEHGIQADGQMPGDKTIGGGDDALNTFLSETGAGKHAPRAASDALDPTAIDEGRTGTYRQLLDPEQLIRRSEDA

SEQ ID NO: 193080 - protein, 129 aa, Oryza sativa
  Clone ID: PAT_MRT4530_89251C.1.pep
MVGRGFGGHVHVEDVETNPTVLTTTTNDERRRPATRRATAATRLDGDGGAPVAGGEGEGGAGLPHLRAHLTAATTSGGDGRSGAAARLKTAGGGGELSARGGDSTEHGRPRERGQTKEGDEVVLFIALD

SEQ ID NO: 193081 - protein, 192 aa, Oryza sativa
  unsure (1)..(192): unsure at all Xaa locations
  Clone ID: PAT_MRT4530_89252C.1.pep
GRESSGGTHRAGGEGGRREGGRAGRRAPPPSLARPPRAAPCLARAPARRFAHRPPFATPQALPLLTRPPRAAPPTXLFTPPLAVLNHLSHKRHVGRGPSQREPRRRHRTRSEPILLSTSHEELHFRTLKIRDMTHLGIKGAFAGYIRPHQDHPAYGSSPHKPAPRSPRFGVSAPPPGTHTPALAIPPYGAAN

SEQ ID NO: 193082 - protein, 84 aa, Oryza sativa
  Clone ID: PAT_MRT4530_89253C.1.pep
WKLSLPWLGSDHQVFHRVILVSPAYHSAPFFSAMRLLCCLVPEHIFEHTFVDDKRDPYCQYRQYGESKQKQVGLDKKKKKKNTK

SEQ ID NO: 193083 - protein, 132 aa, Oryza sativa
  unsure (1)..(132): unsure at all Xaa locations
  Clone ID: PAT_MRT4530_89254C.1.pep
EGWGFRLVTLGKLLSRPXQAQSHPRRAAQKPMCSDIPELCLSFMEEHWWLYRIVFXGFYLPPLPNGRCPSPYRSPATAHLFRDSTSNVLFXAHGRSWSQWCSGSCSGITMYSISCLLEIFSPIPMVWLTRDP

SEQ ID NO: 193084 - protein, 115 aa, Oryza sativa
  Clone ID: PAT_MRT4530_89255C.1.pep
MGNELTVLLPGEPWLVPGGQDACPRAGFREPEATTTNLAAAAAAARRRVRRDGAAGRRECERARARAADCRALGIASGKNRSQRQSQPGGRLDMLIVHLVSPPPLARAGPTWLTS

SEQ ID NO: 193085 - protein, 63 aa, Oryza sativa
  Clone ID: PAT_MRT4530_89256C.1.pep
NENHFFLLSVAAKSRPTRTQPSPAHPPRSTASVSLLQDTSSPLLHSPSSIPQKTSQNPRPSPA

SEQ ID NO: 193086 - protein, 276 aa, Oryza sativa
  unsure (1)..(276): unsure at all Xaa locations
  Clone ID: PAT_MRT4530_89257C.1.pep
MRRTTAAAAAAAFPSQPKPPGQPPIGRENSVGXRGKARRRRPLADVAPNNLERVRGAAXPTCNGNVIFTYAHEGWGFRLVTLGKLLSRPXQAQSHPRRAAQKPMCSDIPELCLSFMEEHWWLYRIVFKVNSIFXRLPLSSFSTAASLLPAHRXLSSSGFYLPPLPNGRCPSPYRSPATAHLFRDSTSNVLFXAHGRSWSQWCSGSCSGITMYSISCLLEIFSPIPMVWLTRDPELFNKGLLEENTFATSSHMSTLKEHPKFSLNVQELRCDNAHKK

SEQ ID NO: 193087 - protein, 103 aa, Oryza sativa
  Clone ID: PAT_MRT4530_89258C.1.pep
NNAHFLCNIFLTEHLYFSDHLTIFFYFEMDSFHNEVLFRKCKTIPGKILFITFGFNVCILQCSDSLNITLVGVHSFIIKKELHSIRVKTQTLPFRGLNKSTQV

SEQ ID NO: 193088 - protein, 516 aa, Oryza sativa
  unsure (1)..(516): unsure at all Xaa locations
  Clone ID: PAT_MRT4530_89259C.1.pep
MAVLCSPSPLLTTSILLPCCSSPPDARTGTTVPRHPIGEAGFVVVEVVLAKSQVHCFHCRASVALNHLRAASSLVTLGGCRLLDGLWRSCLVTSPRRLWRRPGAGLNKFDDKRGTQLCQTRRTTTHGRQLSAKPLGAEVVHGSSNGPGADLVAAWRSRRSPSRYVRDVSAEAVGAEMAKLSARYIGAEAVVWIRECGMEYFPGLEDFYEEKHRAPKIASGEAVTGDISSRNWRQRVEEYLGVEPPVAPNGQRLTKTSGVPLSWLRANFSLCPADADDDTLQRYCRAVDSRKNKKVTDWAYYHQDHITHWEKLEANVVPDHGEHNKMEFDAYLAWLHRNYHLVLRPAWMLADIAEDPEDVEEQNEYNTRTREGGMVESGPIRNRVRLQQRCRKLAARLECRSNDAVDQPPGHQKGEEQAEVHVEADEEQEGDDEEADEEEEAEEEEEXGEEEEAVELGASQLEDAPQSLQAGPSQTGLSRPLRRRAPSQDWWYTPGAPRPRTRGRKRELVVSGILQS

SEQ ID NO: 193089 - protein, 80 aa, Oryza sativa
  Clone ID: PAT_MRT4530_8925C.1.pep
MRKVAALLMQDEKGEGELEEVMGRELIAREWTKEDAATDDELWRGAWMMEDASAADVLRRGMDGGGCDRRRRALVWGVDD

SEQ ID NO: 193090 - protein, 200 aa, Oryza sativa
  Clone ID: PAT_MRT4530_89260C.1.pep
ISIGVNDYIHFYIRNISNVQNLYTPWNFNQFLASNMRQELKTLYNVKVRRMVVMGLPPIGCAPYYMWKYRSQNGECAEEVNSMIMESNFVMRYTVDKLNRELPGASIIYCDVFQSAMDILRNHQHYGFNETTDACCGLGRYKGWLPCISPEMACSDASGHLWWDQFHPTDAVNAILADNVWNGRHVDMCYPTNLETMLHS

SEQ ID NO: 193091 - protein, 128 aa, Oryza sativa
  unsure (1)..(128): unsure at all Xaa locations
  Clone ID: PAT_MRT4530_89261C.1.pep
LQQRCRKLAARLECRSNDAVDQPPGHQKGEEQAEVHVEADEEQEGDDEEADEEEEAEEXRGSGEEEEAVELGASQLEDAPQSLQAGPSQTGLSRPLRRRAPSQDWWYTPGAPRPRTNTLALTSGWAEE

SEQ ID NO: 193092 - protein, 63 aa, Oryza sativa
  Clone ID: PAT_MRT4530_89262C.1.pep
MPPTTQCKKLPRSGAHPNFPTATSPQLLGYHPLRLPRSNRCPSVIVASCRNSHYHRGGHRLSH

SEQ ID NO: 193093 - protein, 671 aa, Oryza sativa
  unsure (1)..(671): unsure at all Xaa locations
  Clone ID: PAT_MRT4530_89263C.1.pep
PAASSATDWSPRLHGWSIMPPLLGVYDFTAGLPPLPPTVVLAFMVCWSHHRSRASTSSPXPAGLRRRRLVFPPARLAYYAAAIGHLRLHRRPTSVAADWCPRLYSWSATPPFMGIHVFTXGLPSPPPTGVSAYTAGQLSRRWWASSLSPSTXLHYRRLVSSLLLMDDFVPIXGHLCHHQGEYYKAKIQIQIYIKGIHGFKLISYAPGMDQSEHHXRPPRPPLTGVSACMAGXLCRRCWASTTSPTGXPRPLPTGVSACTVGXYAAVVKRLRLHRPAXLVRRRLVFPPARLAFMPPLLGVYVFTDRXASSAADXCFRLHGWPIMPQLSGVYVFTDRXASSVADWCFRLHGWPIMPPLSGVYVFTDRXASSAADWCFRLHGWPIMPPLLGVYVFTDRPPSPTGRLVRHRLVFPPARLAYYAAVVERLHLHRPAASXRLHGWPIMPPLLGVYVFTDRLAFAAANWCLRLHNWPIMPPLLGVSVFNDRPPRVTPTSAIVFTASHVAATANKRHHLQRKLSTSAANWFLHFHGCMILPVLIGLIVFIAATTTDGHHRLLSPTGYAAADWCFYLHNCASSLPXFTSSRQCNFVVMVERLHLYYLRHRQTLLLLLRKFCYFNNLDISACDAVLFYYNKXLSNIQDFYLDIFNTYLQSSNDYSTTRSYSSRLYVQLFPN

SEQ ID NO: 193094 - protein, 354 aa, Oryza sativa
  unsure (1)..(354): unsure at all Xaa locations
  Clone ID: PAT_MRT4530_89264C.1.pep
WASMSSPXPAGLRRRRLVFPPTRLAYYAAAVGRLRLHRRPASVAADWCLRLHGWPIMPPLLGVYDFTAGLPPSPPSGASAYTGGLLCRRCWASTTSPPACLRRRRVVSPPIRSVGHTTVDGHRHLHRRPASVAADWCLRLHGWPIMPPGHLRFHRRPPSSPPTGVFIIIDGRLCSHIGHFCHHQGEYYKAKNGSVRTPPPARLDRRRLVFPPARLAXMPPLLGVYVFTDRLAFAAADWCFRLHGWPLCRRCWASTSSPTGXLRRRRLVFPPARLAFMPPLLGVYVFTDRLAFAAADWCFCLHGWPLCRRCWASTSSPTGXPRPPPTGVSACTAXYYAAVVGRLRLHRPVAASAA

SEQ ID NO: 193095 - protein, 103 aa, Oryza sativa
  Clone ID: PAT_MRT4530_89265C.1.pep
HNTHHYVHHFIDTTIYISWCTVSRPTHVMCNFAWSSAVPMVYSTQGWPIESHLGMGLYLGIDSIGMIAMHVMHDRLRHGAINLAMILLRFQPHLMTALIRHRM

SEQ ID NO: 193096 - protein, 50 aa, Oryza sativa
  unsure (1)..(50): unsure at all Xaa locations
  Clone ID: PAT_MRT4530_89266C.1.pep
SPVKXPNYLHVNYATDSYNQAHKXHVVRVSSSFFGQIKYMMSIMQKIVMS

SEQ ID NO: 193097 - protein, 261 aa, Oryza sativa
  unsure (1)..(261): unsure at all Xaa locations
  Clone ID: PAT_MRT4530_89267C.1.pep
AGHGLEASQLSGRSAASPLRRLVLATAIADSNNDFIAGLPPSPPTGVIAYTAGLSHHRSWASTSSPPAYLRRRRVVPPPTRLAYYAAAVGRLRLHRRPAFVAADWCHRLYGXWISQNITTGSPRPPPTGVSACTAGLYAAVVGRLRLHRPACLRRRRLVFPPARLAFMPPLLGVYVFTDPFAFPAADWCFRLHGWPLCHRCWASTSSPTGRLVRRRLVFPPARLAFMPPLLGVYVFTDRLAFCAADWCIRLHGWALCPRVG

SEQ ID NO: 193098 - protein, 161 aa, Oryza sativa
  Clone ID: PAT_MRT4530_89268C.1.pep
MIYDAYYNHAAFTKAKGNSVTQLGCSADEKKSNLLSPSEKGRKRDGELYVLVDVVPMLQTFILLCRSSSSSDVALLSLILPLNKKKHRLHQSAFRLPLFILTQTYRLKAEKSYARVQKHETNASFNLTAYATQAARFDNTSKGFSCSSPEPNHLFVNKKFD

SEQ ID NO: 193099 - protein, 694 aa, Oryza sativa
  unsure (1)..(694): unsure at all Xaa locations
  Clone ID: PAT_MRT4530_89269C.1.pep
GERVPPSPPTGALIYTVGWSHHHCWVSTSSPSACLRRRRLVPSPTHLVVHTTVVGHLRLHRPAGHRRRRLVFPPIRLNYYAATVGRLRLHHRPASVAADWCPRLYGWLVTPPFMGVHVFTXAGLRRRRLVFPPARLAYYAAAVGRLRLHRRPAFVAADWCPRLYGWLVTPPFMVVYVFTXGWPSPLPTGVSACTAGLLCRRCWASTTSLPACLRRRRLVCSPIRLVGHTTIYGRPRLHRPAGXAAVDWCXRLHGWPIMPXLLGVYDFTAGLPSPPSTGVSACTADLLCHRXWASTSSPLARLRCRRLVFLPIRLAYYAAVDGCLHYHRPATSAATEENIKKIFGGYSLSLTLQEWISQNITTGLPSSPLTGVLAYTVGLTHRRCWASLSSSTGFVVRRRLVSSPIRLVGYTTVVRHLRLHHQLASVATEWCFRLHDWPIMPPLMGVYVFTDQSPXSAADWCLRLHGWSIMPPLMSVNVFTASLPSPPQTDVSACTAGLLCHRYWASMSSRPXPTSTIVFMAGHIATTANRRHHLQRKLSTSAADWFLHSYGCMILPVLIGLIVFIASRLVXYLSSQLHVFAXFSSVAADSCSLHHGFATLSPWWSDFIFIIFGTGKLNCCYFASFATSPAMTSTEASTSRHALSTMMPCYIITTSGVPIFNISTRTSSTYIFTQAMTTRRQETTVLDSMFSCFP

SEQ ID NO: 193100 - protein, 47 aa, Oryza sativa
  unsure (1)..(47): unsure at all Xaa locations
  Clone ID: PAT_MRT4530_8926C.1.pep
SPRNTRHRSPLKARPPPXPRRKPFCRQVAADAFHAKLLLAATDPCCH

SEQ ID NO: 193101 - protein, 1157 aa, Oryza sativa
  Clone ID: PAT_MRT4530_89270C.1.pep
MARGSALLDGSVLPPSRIVSERQAGLPRRFMPESATGREIVMLGEGRPAPDYPGRSVFFLPFAMAGLVPPFSSFFMDVLEFYDLQMAHLTPNAVMTLAIFAHLCEMFIGVRPSLRLFRWFFTVQSVSPPSVVGGCYFQPRGPVLNCYIPCALRKKWDDWKSDWFYTPLANEARLRLPSQPPAQVSSWRAPVDLGDDYDAVLDRLAGLRSQGLTGAMVYGDYLRRRIAPLQRRARSAWEYTGSEDYMRTHQGVKWDWAPEDFKILVQRVLNLNSVEASLIPQGVLPLCIDPDRASILTIMMGVGASEEEAPKGHDAVGGSRREESTPGGGRASGPRDGGSGSSRPADARGKRKLGGTPPPSPPRGGGAVRASSRRPEGAAPTSQPETERKKKRLRKTGETEPSRGNLISPPMWSFNRPPRSDIPTRSSRHPKSGQSEAEDPAAAEEQRRESDRREAADRLREAEEAAREAARVRQAEDTAREEAARARQAEEAAKEEAARARQAEAMASSEAAHDKAAGASLGPTPSGDAQATASGAARDEAAGASPGPAPSGDAQDQTGSGDIPELSASSGGPSRVAFSPRRLFSSSSVAPLSAEPLLQALAAANTAVLDGFSAQVEALRAERAEREAAWARVEEGRRSVDVMVEVGRKAHRRHVSELEARKAALAEIAREVEEEREAALIATTVMIEAQDTLRLQHGSWEAELKKKLDAAQQQRLHRRPASVAADWCHRLYGWSVTPPFMGVHVFTDRLAFAAADWCFRLHGWPIMPPLLGVYDFTTGLPPSPPTGVLAYTLAYYAAAVGRLRLHRRPASVAAKWCLRLHGWPIVPPLLGVYDFTAGLPSSPPIGASAYTASLLCRRCWASTPSPPACLRRRRLVSPPIRSVGHTTVDGHRHLHRRPASVAADWCLRLHGWPIMPPLLGVFAFIVDRLRRRRLEWISQNITDWLAFAAADWCFRLHGWPLCRHCWASTSSPTGRLVRRRLVLPPARLAFMPPLLGVYVFTDRLAFAAADWCPRLHGWPIMPPLLGVYVFTDRPPRPPPTGVSACTAGLYAAAVGRLRLHRPAASSAADWCFRLHGWPIMLPLLGIYVFTDRPPRPPPTGVFACTAGLLCRRCWASTSSPTGLPSPPPTGVSACTVGLLCCRWWASTSSPTGHRIRR

SEQ ID NO: 193102 - protein, 142 aa, Oryza sativa
  Clone ID: PAT_MRT4530_89271C.1.pep
MAGGDGVKGAAAVVFVDDDDDELFDIDIALLDRHYYHQRRRDDDDEAEDKDGGGGDALLANCLLPVSSVSKAVPVTATTAASSSSASTFLPAVRYGGSRSMLLFNGRGGGGRRLVRRGSNSSARFWLAARGLDAAMGNFQRY

SEQ ID NO: 193103 - protein, 601 aa, Oryza sativa
  unsure (1)..(601): unsure at all Xaa locations
  Clone ID: PAT_MRT4530_89272C.1.pep
QQRLHRRPASVAADWCLRLHGWPIMPPLLGVYDFTAGLPPSPPTGVFACMVGWSHHRCWASTSSPPACLRRRRLVPPSTRLAYYAAAXGRLRLHRRPASAAADWCLRLYGWLVTPPLLGVYVFTXGLPPSPPTGVFAYMVGWSHHRCWASTSSPPACLRRRRLVPPSTRLAYYAAAVGRLRLHRRLASVAADWCLRLYGWLVTPPLLGVYVFTAGLPPSPPIGASVYMAGLLCRRCWASTSSPLAHVRSRRLVFPLTRLTYYAAISGHLRFHRRPPSSPPTGVFIVIDGRLCSHIGHFCHHQGEYYKAKIQIQICIKGIHGFKLISYAPGMDQSEHHXRLASSAADWCFRLHGWPXMPLLLGIYVFTDRXASSATDWCFRLHGWPLXPPLLGVYVFTDRXPSPPPTGVSACTAGLYAAVVGRLRLHRPACXAAADWCFRLHGWPLCRRCWASTSSPTGRLVRRRLVLPPARLAXMPPLMGVCVFTDRPPHPPPTGVTAYTAGLLCRCCWAPTSSSPVVSSAAXLVPLPLRLVIQLPLLMDIIVFRRRLXYAAADWCFYLHNCASSPPDFYLDIFNTYLQSSNDYSTTRSYSSRLYVQLFPN

SEQ ID NO: 193104 - protein, 225 aa, Oryza sativa
  Clone ID: PAT_MRT4530_89273C.1.pep
MGIRDGFSNNKLLDDFGCDRDTPTPGSRPVDRSDLSSSKNSSSGDRDTPTPGPRPVDRSDLSPPKNSSSGDRDRPTPGPRPVDSSNLSPPKNSSSVGYRNLSTSNATINIIVIATIKTDWIVVFTRTTLSRTNDIRTTTDKVNDITTSHDDEETRDPQTSRGPEDKEAVLAGHENVVHLLRWIPFKWSRYDYDWSSTSNVAIIEDHRTTTSNGQDMTTIGLQPAT

SEQ ID NO: 193105 - protein, 430 aa, Oryza sativa
  unsure (1)..(430): unsure at all Xaa locations
  Clone ID: PAT_MRT4530_89274C.1.pep
TDSAISRLPAGLPSPPPTGASTYTAGLLCRCXWASTSSPPGRLVRCRLVFPPTRLAYYAAVVGRPHPHXRLAFAAADWCLRLHGWPIMPLLVGVHIFTXGLPSPPLIGVSAYMAGLLCRRYWASMTSPPAYLHRHRLVFLPTRLAYYAAIVGRLRLHRPVSVATDWCPRLYGWLVTPPFMGIYVFTNRFAFAATDWCLCLHGWSIMTPLVGIFAFTVDRLLSPPTVVTADWCLRLYGWLVTPPSLDVYIFTAGLPSPLPTDRLAFAAADWCLRLHGWPIMLPLLGIYVFTDRLAFTVADWCLRLHGWSIMPLLLGVYVFTAGVPSLPPTGVSAYTLAFAAADWCLRLHGWPIMPPLLGVYVFTDQLPRMTTTGDIVFTASHVAATANRCHHLQHKLSASAADRFLHFHGCMILPVLIGLIVFTAGRLICC

SEQ ID NO: 193106 - protein, 137 aa, Oryza sativa
  unsure (1)..(137): unsure at all Xaa locations
  Clone ID: PAT_MRT4530_89275C.1.pep
LESAGILRQLANYLDANIPNADLIASAIGVASAIIDNVPLVAATMGMYDLTSFPQDADFWQLIAFCAGTGGSMLIIGSAAGVAFMGMEKVDFFWYFRKVSGFALAGYAAGIITYLAAQNLPLSLPTSLAEIPXILGS

SEQ ID NO: 193107 - protein, 649 aa, Oryza sativa
  unsure (1)..(649): unsure at all Xaa locations
  Clone ID: PAT_MRT4530_89276C.1.pep
MGVHVFTDRLAFAASDWCFRLHDWSIMPPLLGVYDFTAGLPPSPPTSVFAYTVXLVTPPFMGVHIFTDRLAFGVADWCFRLHGWPIMPPLLGIYDFIAGLPLPPPTGVSAYTAGLLCRRWGQLRFHHRRLVSPPTRLAYYAAVVGRLRLHRRPASATTDWIQIQICTKGIHGFKLISYAPGMDXQNITTSLPSSSPTGVFAYTVVWSHHRCWASTSSPTGRHVRRRLVFPPAWLTYYVAVVGRLRLHRPAASSAADWCXPRARLACYTTVVGRLRLHRPAASSAADWCFHLHXWPIMPPLLGVYDFTAGLPPLPPSGASAYTAGLLCRRCWASTTSPPACLRCRRVVPPPTRLAYYAAAVGHLRLHRRPASVAAEWCLRLHGWPIMPPLLGVYDFTAGLPPLPPSGASAYTAGLLCRRCXASTTSPPACLRRRRLVPPPTRLAYYAAAIGRLRLHRRPASVAAEWCFRLHGWPIMSPLLGVYVFTDRPPRPPPTGVSACTAGLLYHRCWASTSSPTGRLVCRRLVFPPARXAYYAAVVGRLRLHRPAASPAADWCFRLHGWPIMPLLLGVYVFTDRPPRPPPTGVSACTAGLLCRRCWASTSSPXPACLRCRRLVFPPARLAYYAAVVGRLRLHRPAASSTTDWCFRLH

SEQ ID NO: 193108 - protein, 1369 aa, Oryza sativa
  unsure (1)..(1369): unsure at all Xaa locations
  Clone ID: PAT_MRT4530_89277C.1.pep
MFRQLARQQQRLHRRPASVAADWCLRLHGWPIMPPLLGVYDFTXRPASVAADWCLRLHGWPIMPPLLGVYDFTAGLPPSPPIXVPPPTRLAYYAAAVGRLRLHRRPASVAADWCLRLHGWPIMPPLLGVYDFTAGLPSSPPIGASAYTASLLCRCCWASTTSPPACLRRRRLVPPPTRLAYYAAAVGRLRLHRRPASVAADWCLRLHGWPIMPPLLGVYDFTTGLPPSPPTGVPAYTVGWSHHRXWASSSSPPACLRRRRLVPPPTRLAYYAAAVGRLRFHRRPPXVAADWWLPPTRLAYYAAVVGRLRLHRPAASSAADWCFRLHGWPIMPPLLGVYVFTAGLPSSLPTGVSACTAGXLCRRCWASTSSPTGRLVRRRLVLPPTRLAYYAAVVGRLRLHRPAASSAADWCFRLHGWPIMPPLLGVYDFTTGLPPSPPAGVIAYTVGRPHHRSWASTSSPXPACLRRRRLVSPPTRLAYYAAVVGLPRLHRPXAFIAADWCLRLHGWPIMPPLLGVYDFTTSLPPSPPTGVIAYTVGWSHHRXWASSSTLPACLRRRRLVSSPIRLVGHTTVHGRPRLHRPXAFVAADWCLRLHGWPIMPPLLGFHDFTXGSPSSPLTGVSACTAGLLCRRCWASTTSPPACLRRRRLVSSPTRLAYYAAAVGRLRLHHWPDSAAADWCFRLHGWPIMPQLLGVYDFTTGSPSSPPTGVFAYTAGLLCRRCWMSTSSPLAHLRCRRLVFPLTRLAYYAAVSGHLRFHRRPPSSPPTGVFIVIDGRLCSHIGHFCHHQGEYYKAKIQIQICIKGIHGFKLISYAPGMDQSEHHXRLAFAAADWCFRLHGWPXMPPLLGVYVFTDRLAFATADWCFRLHGWPLXPPLLGVYVFTDRXPSPPPTGVSACTAGLYAAVVGRLRLHRPAASSAADWCFRLHGWPIXRRCWASTSSPTGXLRRRRLVFPPARLAFMPPLLGVYVFTDRLAFAAADWCFRLHGWPLXPPLLGVYVFTDRXPSPPPTGVSACTAGLYAAVXWASTSSPTGLPSPPPTGVSACTAGLYAAVVGRLRLHRPACLRRRRLVFPPARLAFMPPLLGVYVFTDRPPRPPPTGASACTAGLLCRRCWASTSSPTGXLRRRRLVFPPARLAYYATVVGHLRLHRPACXVAADWCFRLHGWPLCRHCWASTSSPTGRLVRRRLVLPPARLAYYAAVVGRLRLHRPAAAXRRRVVPPPARLALPSPLHLVYTATTTYEHHRLPSPTXVMLSPTSAFIFATARLHYQFTSSRQCNFVIMVERLHLYYLRHWQTLLLLLRKFCYFTNHDVFVSLDISACDAMLFYYNKRLSNIQDFYLDIFNTYLQSSNDYSTTRSYNSRLYVQLFPN

SEQ ID NO: 193109 - protein, 404 aa, Oryza sativa
  unsure (1)..(404): unsure at all Xaa locations
  Clone ID: PAT_MRT4530_89278C.1.pep
MSYCHHAITVMIISRLKRSTGHKSLRNSPAACLDPCILDVTLLYTAVARSHGVMISTNCGLTRSSMDLTPMTGLDCRPYPLTAISVIVDRADHTPIKLFRYRLPLGRFLAPGGLLDGPNNVRIQIQICIKGIHGFKLISYAPGMDQSEHHHWLAVAAADWCLRLYGWLVTTPLLGVYVFTDRXASSAADWCFYLHGWXFMPPLLGVXVFTDRXASSAVDWCFRLHGWPIMPPLLGFYVFTDRXLVRHRLVFPPARYHYXMDIIVFRRRLVMPPPAGAFIFTIICLHYRFPTSPTTTSTGASTSRHASPNMMPCYIITTSGVPIFNISTRTSSTCIFTQAMTIRLQEATVLDSMFSCFSTNQRVGGYTNTRLSKFDKLYVKIKQSINQRVNSGSYYLRLRFRTVI

SEQ ID NO: 193110 - protein, 87 aa, Oryza sativa
  Clone ID: PAT_MRT4530_89279C.1.pep
MADRGTSRGGGFASRGGDRGRGRGRGRGRGRGKNEEKEWQPVTKLGRLVKAGKINSMEEIYLHSLPIKEYQIVDNFLPKLKDEVMNI

SEQ ID NO: 193111 - protein, 194 aa, Oryza sativa
  unsure (1)..(194): unsure at all Xaa locations
  Clone ID: PAT_MRT4530_8927C.1.pep
VPPAAVPRPPPAPPRPPHPLPPPRPTDGPPPTRGGPLGKNPGAGAQENTGAGDTRVPTGRPLAPPFQRTACDPMXTGRELPENRRERPPAPLRPASPRPRAPAQLPPTTPPRAGPRPPPPLSRDGSPHIALRPNAPTRPPDPSPRPPAPAGPRTRSPRPPRRQRRRSHTRPRRGRPRARPGISQPPVVLPTRGV

SEQ ID NO: 193112 - protein, 77 aa, Oryza sativa
  Clone ID: PAT_MRT4530_89280C.1.pep
RLRSCCARRVPSCCCPSKHSSFCRRCRFLSGPPPGWVWCLSLFFLCLARPFLIVSVVPGVPASTPSPWLLLCSRADN

SEQ ID NO: 193113 - protein, 89 aa, Oryza sativa
  Clone ID: PAT_MRT4530_89281C.1.pep
LTASGRALERKGKKRRIKNQLHLPCHRIHPPKAPAFSSCPPLFFSLPFRLRLPIASLSISVAPAKNSTHSWPAATADSPRKQGCHEPAV

SEQ ID NO: 193114 - protein, 84 aa, Oryza sativa
  Clone ID: PAT_MRT4530_89282C.1.pep
MAKAMEQERRKLSFRQQTYLLDGLMRVFYRHETMPLLTKYLKLLIAIKLIQNLTLTSVAALFGHAGLARVVALFGHITLADVAG

SEQ ID NO: 193115 - protein, 237 aa, Oryza sativa
  unsure (1)..(237): unsure at all Xaa locations
  Clone ID: PAT_MRT4530_89283C.1.pep
HDLLWETLTGKEHLLFYGRLKNLKGAELEKAVDDSLKNVNLFHGGVGNKQVGKYSGGMKRRLSVAISLIGDPKVVFMDEPSTGLDPASRNNLWNVVKEAKKNRAIILTTHSMEEAEVLXDRLGIFVDGGFQCLGNPKELKARYGGTYVFTMTTSSEHEQEVKQLVQHLSPSANRIYHISGTQKFELPKQEVKIADVFHAVEKAKRQFSIHAWGLVDTTLEDVFIKVAKGAQGVNVIA

SEQ ID NO: 193116 - protein, 610 aa, Oryza sativa
  Clone ID: PAT_MRT4530_89284C.1.pep
MAGSFVAVRGKPRSSPKRSGGGGGADPPLSLAMPTVADLHKTAELEKFLVEAGLYEGEEESAKREEVLREIDQIVKEWVKKVTIQKGYSEQMVKEANAVLFTFGSYRLGVHGPGADIDALCIGPSYVKREEEFFVMLYGALSEMEEVTELQPVPDAHVPVMKFKFRGLPIDLLYASVSLPVIPPDFDISQGSVLCDVDEATVRSLNGCRVADQILRLVPNAEIFRKTLRCLKYWAQRRGVYSNVTGLLGGVSWALLVARVCQLYPNAVPSMLVSRFFRVFTQWQWPNPVMLCAIENDDNLGFAVWDPRKNPRDRSHVMPIITPAYPCMNSSYNVSTSTLRVIMEQFQFGNKICQEIELNKASWSSLFEPFQFFEAYTRYLVVDIVADDDDDLRLWKGWIESRLRQLTLKIERDTKGMLQCHPNPCEYADPSIQCAHCAFYMGLSRKEGMKIRGQKFDIRGTVDEFMHEIGMYTQWKSGMDLAVTHVRKKEIPLYVFEQGCQKTRPPTPICAEQQDQSDKNDSEVCTTTASLVGQLKRKYHSVGGADVDSFKSVRRASVSPACEEASIQLHDDANFGLTNCSTSPHGSEGSTVSGNSCAAVGTIGLVDETS

SEQ ID NO: 193117 - protein, 73 aa, Oryza sativa
  Clone ID: PAT_MRT4530_89285C.1.pep
VHRKQNLHLGRPIQITSCPLKRISPFSVRIVPATTSATSMNSVQLLLAKLSIPSSFLSSFSTTLSEGACSKIV

SEQ ID NO: 193118 - protein, 249 aa, Oryza sativa
  Clone ID: PAT_MRT4530_89286C.1.pep
MAIDDESPLRMAALDRMRQGGGGECDGAENQRWPPWLKPLLATSFFGQCKLHADSHKSECNMYCLDCMNGALCSQCLSYHRDHHAIQIRRSSYHDVIRVSEIQKVLDITGVQTYIINSARVVFLNERPQPRPGKGVTNTCEVCERSLLDTFRFCSLGCKIVGTSGDYRGRKRHAGGGIKKTKKLHKGAAAVPSDSDDSSTTTSGGSDKSSVVQSFTPSTPPATANSYRTGKRRKGVPHRSPFGSLMVEF

SEQ ID NO: 193119 - protein, 95 aa, Oryza sativa
  Clone ID: PAT_MRT4530_89287C.1.pep
PSHNTVKFAERVPKIATPFGKELEKEPKFLKTGNAGMVKKIPPKPMVVGPFFEDPPLGRFAGRDMRQPVAVGVIKNVEKKDPTGAKVTKAAAKKK

SEQ ID NO: 193120 - protein, 59 aa, Oryza sativa
  unsure (1)..(59): unsure at all Xaa locations
  Clone ID: PAT_MRT4530_89288C.1.pep
PKPPWGPRSRCITPLPRSGXRSPRSTHRHRCRRWEGKXXPMAREPGQILLAHCERPEHT

SEQ ID NO: 193121 - protein, 186 aa, Oryza sativa
  unsure (1)..(186): unsure at all Xaa locations
  Clone ID: PAT_MRT4530_89289C.1.pep
XALSRSXAVXAAAAGGAPWRGVXSAGRAAPRRRVALVVRAQSEPEVEPXKEETATSSSSPSPATTPTPSPAAAAPKAKPAAXTKAVGXCWPFHGAGAXXDQXAAGEXGVRVRAGRGSXPRRRAPGPXRQLXPAGVVRRHRRXALRGVLXAAAPPXXPKPRTGVAPPTLERGVHLRARPRLAFEPPP

SEQ ID NO: 193122 - protein, 224 aa, Oryza sativa
  Clone ID: PAT_MRT4530_8928C.1.pep
SSITGLFDCQAWINVHGAESHLDILKDILSQVVLPLNKFKSDMDGWNEEQLVEKIHCYLRGKIFLVVLHDVRDESIWSHIKLAFPDDCSARSAIIITPNNDEVTESFSLYKIFNPDISGYVLTFFLKRAIALLKHQGEDTLWPSVPCMLIHLEPQIFFMKMFLRYLYYNGRRCPFRLEEEQHNAGLLHDYWPRKMVELCFYDLPVKCQNCMLYLSIFPRAEFLQ

SEQ ID NO: 193123 - protein, 220 aa, Oryza sativa
  Clone ID: PAT_MRT4530_89290C.1.pep
MSTFGVPITDETLEAMSRYAGKSISQVDRAREAMRLIHAEGKNLDALQHAVGLKASYGDGVSAMVLVYNATGAALELVDGEGGTMDWYGYVYHEQPPASFQNGQWLAFLHAHPTAQSIGCEAARVFRGPSRDVDGQVRDFMVAWSLPWSATQNSAYTEVREKDHFPNYWGYIKEEKLEKAGKICTDQTDKNCASTVSVGGCTSSEFIAVLQHKFGPLPEE

SEQ ID NO: 193124 - protein, 303 aa, Oryza sativa
  Clone ID: PAT_MRT4530_89291C.1.pep
CRPNPAEARRCRHRRRRSPRSTAASPPPRARRSSAATTVRRARRSQWTASAPFPGEIRMRQLSRHIPPASAPPRDAPGHGQDRLAPAPAPPRHARRHDSLAPASPPRPRHARRDCDSQDNDLAPAPPPPARDGRRGDNGQDNLTPAAAPPRRHNPVGDVPAPAPAPWRPVQGGPRRRHRNRRGQDRPTPAAPPRRPVRNEPLHHRNGHGHGQAVRLAPAAAARRPAVQGVPRRRRTVSPEPSPGRSSCVRRARPPRRPPRTAPASRRRGRAARGRSCRARAPFCPPRRGRRRRHQRRSSCTPP

SEQ ID NO: 193125 - protein, 130 aa, Oryza sativa
  Clone ID: PAT_MRT4530_89292C.1.pep
EKLAGILGYDEFTLCVRAGIHGRLTPLLIDLPRSRETLHIVLVMPNSETDDQLLFPNLNALLLLASVTSHISGSSSSDRGYAVSGSNGLRLPLITLRPNETAPQSSTPHNAYTLPLTDNGTAATAKVQSR

SEQ ID NO: 193126 - protein, 178 aa, Oryza sativa
  Clone ID: PAT_MRT4530_89293C.1.pep
MREWSGLGLWAFFGGVRVGVGVGVDVARCSRQSPREDDLDTCPIFPLTLHQDNDMYAAHDVPACAVAEAEQQPIHLHFYMHDVVTGPGATAAEGLYVFATLDADAPALLFSINNVVLAAGTPYGGSMVAVMGRDDFVRLPVVSGTGRFRMARGYALVRTASEHGKNAVLEIDICLTSF

SEQ ID NO: 193127 - protein, 138 aa, Oryza sativa
  Clone ID: PAT_MRT4530_89294C.1.pep
MDVESRQGPKGGDTMAASEVSVDWRGRPCGSRKHGGMKAAVFVLGIQAFEMMAIAAVGNNLITYVFNEMHYPLSKSANIVTNFIGTVFLLSLLGGFLSDSYLGSFWTMLIFGFVELSGFILLAVQAHLPQLRPPACEH

SEQ ID NO: 193128 - protein, 559 aa, Oryza sativa
  unsure (1)..(559): unsure at all Xaa locations
  Clone ID: PAT_MRT4530_89295C.1.pep
WASTTSPPACLRRRRLMLLPTRLAYYATAVGRLRLHRRPASVAADWCLRLHGWPIMPPLLGVYDFTAGLPPSPPTGVLAYTVGWSHHRSWASTTSSPACLRRRGLVPPPTRLAXMPPLLDEWISQNITDRLAFAAADWCFRLHGWPLCRRCWASTSSPTGRLVRRRLVLPPARLAXMPPLLGVYVFTDRLAFATADWCFRLHGWPLCRRCWASTSSPTGLPLPLPTGVSACTAGLYAAIVGRLRLHRPACLLRRRLVFPPARLAFMPPLLGVYVVTDRPPRPPPTDELGNNINSPPIICLHGWPTTQLPIEDLIVIIGCYIAIDWITDIVIFINILSSLINIANSAAVDGKLRHHSAPPRHLPSSLLAADELPAISAMASEKKQSNPMREIKVQKLVLNISVGESGDRLTRASKVLEQLSGQTPVFSKARYTVRSFGIRRNEKIACYVTVRGEKAMQLLESGLKVKEYELLRRNFSDTGCFGFGIQEHIDLGIKYDPSTGIYGMDFYVVLERAGYRVARRRRCKSRVGIQHRVTKEDAMKWFQVKYEGVILNKAQANTS

SEQ ID NO: 193129 - protein, 1064 aa, Oryza sativa
  Clone ID: PAT_MRT4530_89296C.1.pep
MARGSALLDGSVLPPSRIVSERQAGLPRRFMPESATGREIVMLGEGRPAPDYPGRSVFFLPFAMAGLVPPFSSFFMDVLEFYDLQMAHLTPNAVMTLAIFAHLCEMFIGVRPSLRLFRWFFTVQSVSPPSVVGGCYFQPRGPVLNCYIPCALRKKWDDWKSDWFYTPLANEARLRLPSQPPAQVSSWRAPVDLGDDYDAVLDRLAGLRSQGLTGAMVYGDYLRRRIAPLQRRARSAWEYTGSEDYMRTHQGVKWDWAPEDFKILVQRVLNLNSVEASLIPQGVLPLCIDPDRASILTIMMGVGASEEEAPKGHDAVGGSRREESTPGGGRASGPRDGGSGSSRPADARGKRKLGGTPPPSPPRGGGAVRASSRRPEGAAPTSQPETERKKKRLRKTGETEPSRGNLISPPMWSFNRPPRSDIPTRSSRHPKSGQSEAEDPAAAEEQRRESDRREAADRLREAEEAAREAARVRQAEDTAREEAARARQAEEAAKEEAARARQAEAMASSEAAHDKAAGASLGPTPSGDAQATASGAARDEAAGASPGPAPSGDAQDQTGSGDIPELSASSGGPSRVAFSPRRLFSSSSVAPLSAEPLLQALAAANTAVLDGFSAQVEALRAERAEREAAWARVEEGRRSVDVMVEVGRKAHRRHVSELEARKAALAEIAREVEEEREAALIATTVMIEAQDTLRLQHGSWEAELKKKLDAAQEWISQNITDWLAFAAADWCFRLHGWPLCRHCWASTSSPTGRLVRRRLVLPPARLAFMPPLLGVYVFTDRLAFAAADWCPRLHGWPIMPPLLGVYVFTDRPPRPPPTGVSACTAGLYAAAVGRLRLHRPAASSAADWCFRLHGWPLCRRCWASTSSPTGRLVRRRLVFPPARLAFMPPLLGVYVFTDRPPRPPPTGVSACTAGLYAAAVGRLRLHRPAASTAADWCFRLHGWPLCRRCWASTSSPTGRLVRRRLVLPPARLAYYAAVVGHLRLHRPAASSAADWCFRLHGWPIMPPLLGVYVFTDRLAFAASDWCFRLHGWPIMLPLVGVYVFTDRSPHPPLTGVTACTAGPL

SEQ ID NO: 193130 - protein, 1659 aa, Oryza sativa
  Clone ID: PAT_MRT4530_89297C.1.pep
MAELTAGAVSSLLGLIRNAELMMSGRAKEDMQFIKDEMDSINGTLMYLTENKASHNDQVRVWMRQVRDIAYVADDCITLYRRDLTPPEPGFWPWLRHVPTWLSTVPTRHRLAKKIHELKDRVRDVGERRQRYGVVGEIPTKNAASSSGHGSQTAPSSDAAAATAAADARADEEDDDQNHAATATVVDGRPDRRRALEPRTLEDYCCENLHKWLKEFNTKRGSMVPFIAVEAPRPEDAAAVSSIVSYVAAEAAGFNPAVWVNLPLLHAEFDLPLEPWEILCYILGELKPRSQPVQAQGSRDKRKQKQEEGGKDDKAMGSDDDDDNLQSQASDEKWQVFDEMWEEIEKRNFDDRIEQLKTKIDSIKDKKTTNEIEKTVRSQEKVNLNALVYNKPLGILFLALLPPMPNDVKSVRRALRTLASGEANIIRKIAEALKIHMEVSEVNKIHLSKKQYVNILREVFPTVSSTPLKQDKSTTKSTALGPSAAATMLGKDQIKEIVHKAILDKQLEKHLEVADAIEETKNKIGDIKEKIKVQLVIQGIVDKIKDHLEKDKRTLIILQDDKGFLSSCEETTMNALSLLGYTCADAMVVLFRDILDKCDPDEFCMKMFAHALYAEPNRSNNDLRELYKTLVPQKSLASNASKASPEPDKSNDSTQLVSEESSLCNNAKKIFEFSYNDMPTEYLSCLLYLAIFPQGQSIRRSTLQARWVVEGLITGKDDWPSADCAVRNAERCFDVLIDRWLVYPGDVTAAGKVKSCMVDNLVHEFITKAAKEKQFVKESQLHHLAHHFSIFCNLRLRRSDNIEKFMQNLKYFSPYLQLLKVLDLEGCQSFDKNNHYLEDICNKVLLLKYLSLKDTNVAHLPNAINNLHELEVLDIRQAKVPEIDTNSIMLFNLKRLLAGQVYPSPRYNSTGMYLKRHEETISSSVRIPRKIEKMVKMEVMYSVNVSRDGNMLTEIGKLRQLRKLGVVIDDHDGHLRKLLQVISDLSGSLRSLSITLIGTGSEQAPSSEETSADCLKQHPKLLESLSISGVIDKVQLLPLLAIGQGNRNLAKVTISGTMLKQEDLKKDIAKLHNLCCFRLRHRSYDDEKITFEENEFLELKYLIIEGTNMMSIIFKQGAAPKIEKIILSFTSTTHIAGIVDLPNLKELELKGNNNDRKLVACLAGAPHLSRLTLDGTLLDLNELKILAELPSLRSLILLQQSCVRSSLNFNNGEFSKLNLLVVNCSNITSISFTDEGAAPKLEKITWSFTTKMLSLSGICYLPQLKELELNARRQRRGNDSSTDLMVVLVHHQAYWSNLPNEDAMVLQDGSTNTKHAKTDLIGCIGDGCSHADAFLPSCVVLMDTNAARDCDLRLLRSVSEPPLLGVYDFTAGLPPSPPIGASAYTAGLLCRRCWASTTSPPACLHRRRLVSPPIRSVGHTTVDGHRRLHRRPASVAAEWCLRLHGWPIMPPLLGVYDFTAGLPPSPASGASAYTAGLLCRRCWASTTSPPACLRRRRVVLPPARLAYYAATVGRLRLHRRPASVAAEWYLCLHGWPIMPPLLGVYDFTAGLPPSPPSGAFAYTAGLLCRRCWASTTSPPACLRRRRVVPPPTRLAYYAAAVGRLRLHRRPASVAAEWCLRLHGWPIMPPLLDVYILTVGSPSLPSTGVSAYTADLLCRH

SEQ ID NO: 193131 - protein, 51 aa, Oryza sativa
  Clone ID: PAT_MRT4530_89298C.1.pep
PHVKFASQRRACIQLVPCRHLCLSKECKSKLNFCPLCQSSKILGMEIIYVK

SEQ ID NO: 193132 - protein, 464 aa, Oryza sativa
  unsure (1)..(464): unsure at all Xaa locations
  Clone ID: PAT_MRT4530_89299C.1.pep
GHLHHHCRVAFAAADWCSRLHGWPVMPPLLGVYDFAXRLASAAADWCLRLHGWPIMPPLLGDYDFATXLASAAADWCLRLHDWPIMPPLLSVYDFIAGMPPSPPTGVLAYTIGWSHHRSWASTFSPTDLPLPPPTGVSAYTAGLLCRCWWAPSLSPLTAFIAGFMALSLSLTLQEWISQNITTSLISPPPTGVTACTAGLLCRNCWASTSSPTGRLVRRRLVFPPARLAYYAAVVGRLRLHRPAASSAADWCFRRHGWPIMPPLLGIDVFTDRPPRLPPTGVSACMAGLLCRRCWVSTSSPTGRLIRRRLVFPPARLAYYAAVVGRLRLHRPPXSAADRCFYLHDYASSSPVCFCCLRLVFTSSRLCNFVTMVEQLHLHCLLHRQTHLLLLRKFFYFTNHDVYKIFDISACTSIFNAVLFYYNKWLSNIQDFYLVIFNTYLQSSDDYSTTRSYTSRLYVQLFPN

SEQ ID NO: 193133 - protein, 204 aa, Oryza sativa
  unsure (1)..(204): unsure at all Xaa locations
  Clone ID: PAT_MRT4530_8929C.1.pep
FFFFLKNGIFTLYXGTVHSSKEMSFFCSFFFGLFLSLRGGPFPWPTHKGGPQHRGATHGSNTQAQATHTHSGSCGFPGKPXTTGIATVAHTGQPYLTFHTRLQGNYAAAPKXSXHPGPCQGPXTPGHHTQPTPPISFPTLCLTFPIGHTHGAKSTVHPCPQHSKLRPSLXDKWHVPNXYCASQVAVKDPFPPNSFEAHKHYIYL

SEQ ID NO: 193134 - protein, 143 aa, Oryza sativa
  Clone ID: PAT_MRT4530_892C.1.pep
QLVINRLSASLHELHPLYNKQFNSNVFYAVLFEMNSFNSSSIHSYCISLISVQASNDRSRRATGAPAAGSDAGGGAGGEWKLVVERGERPEELDPRLEPDDVVGGADEQAPRRRALPAGHQPPELPHLPPQRHAAPPRRRRPP

SEQ ID NO: 193135 - protein, 88 aa, Oryza sativa
  Clone ID: PAT_MRT4530_89300C.1.pep
RKPTQPLNCLSSKRQQYTSVTLSSQDDDHHLAHVADNTYKYNSYITTIHEEQVTREGIERYMSSSALQIVHLFFPVEKSYTVLRTQTP

SEQ ID NO: 193136 - protein, 64 aa, Oryza sativa
  unsure (1)..(64): unsure at all Xaa locations
  Clone ID: PAT_MRT4530_89301C.1.pep
TTRTPRQGIICISGNKRNLQAYRREVEERSKKIFSGFSTRLICVDLCVRSXVGRNLQCENDQIG

SEQ ID NO: 193137 - protein, 488 aa, Oryza sativa
  unsure (1)..(488): unsure at all Xaa locations
  Clone ID: PAT_MRT4530_89302C.1.pep
QQRLHRRLASVAADWCLRLHGWPVMLPSLGVYDFTXRLASVAADWCHRLHGWPVMPPSLGVYDFTXRLASVAADWCHRLHGWPIVPLLLGVYDFTAGLSXVIADWCPRLYGWRTPPPLMGLVIYTGLPSSPLPSVFVATDGRLCFHXWPPLSSPXGKYQKAKSSLXSFLYDIFLFLCLTTQNITNGLPSSPPTVVFAYTVVWSHHRCWASTSSPTGLPSPPPTVVSACTTGLLCRRCWASTSSSTGRLVRRRLVCPPARLAYYAVVVGRLRLHQPACXAAADWCLRLHGWPIMPPLLGVYVFTDRPPRPPPTSVSACTAGLLXTPTDAIFFTAGYVAVTANSLFXFHGCMILPVLIGLIFMTAATTTDGHHRLPSLTGYAVADWCFYLHNCASSLPVCFCCRRLVFTSSRQCNFVIMVERLHLYYLRHRQTLLPILRKFCYFINHDVFVNLDISACDAVLFYYNKWLSNIQDFYLDIFNTYLQSSNDY

SEQ ID NO: 193138 - protein, 822 aa, Oryza sativa
  unsure (1)..(822): unsure at all Xaa locations
  Clone ID: PAT_MRT4530_89303C.1.pep
MGVHVFTDRLAFAAADWCFRLHGWPIMPPLLGVNDFTAGLPPSPPIGASAYTAGLLCRRCWASTTSPPACLRRRRVVPPPTRLAYYAAAVGRLRLHRRPASVAAEWCLRLHGWPIMPPLLGVYDFTAGLPPSPPSGASAYTAGLLCRRCWASTTSPPACLRRXEWCLRLHGWPIMPPLLGVYDFTAGLPTSPPSGASAYTAGLLCRRCWASTSSPXPACLRRRRLVFPPARLAXYAAVVGRLRLHRPAASSAADWCFRLHGWPXMPPLLGVYVFTDWLAFAAADWIQIQICIKGIHGFRLISYAPGMDQSEHHRLACLRRCRLVFPPARLAFMPPLLGVYVFTDRRAFVAAEWCLRLHGWPIMPPLLGVYDFTAGLPPSPPSGASAYTAGLLCRRCWASTTSPPACLRRRRVVPPPTRLAYYAAAVGRLRLHRRPASVAAEWCLRLHGWPIMPPLLGVYDFTAGLPPSPPSAACAASPVRRPAAPSPPPASPPPPPRRPALRFARRPPELRSRRRPPLSFAPATSSRLPLLARAPPGRAVFSLGLAAASSFPASPPFRGEITGDASSPTTSGVATTPPSPAVPAASPERRPTSPSPPSASPHRPPPRLLLGFRRNAVAAPVSPSSSSPVSFRPPLPPPRLVGSLHLHHLRHRSGKVALGLASPPSKPLRGPSSSSPIVLVVDVPSVARLVVSRHRLRHRHRSGVSHVVLVSVQPLPAVLVASSPVPVVVVIVLSSFPVSLVVAFVPPSSRSHPSSASVKQVAAAPVLVFVLGSASSSLVPAASRLRSRIAAEAVPSPFVSVVPVCLRRARSSLSFPRLVAWW

SEQ ID NO: 193139 - protein, 111 aa, Oryza sativa
  unsure (1)..(111): unsure at all Xaa locations
  Clone ID: PAT_MRT4530_89304C.1.pep
MVEGSEEPVSSELLPPLRAMRQCCAPKXXPRWMSMATHGVGMPATLGTGSDISAEARDIKSARAPATSGTGRDIRAAPVTLNRQGHGLWSSSSEQEAAAAENGAPKPSQAA

SEQ ID NO: 193140 - protein, 663 aa, Oryza sativa
  unsure (1)..(663): unsure at all Xaa locations
  Clone ID: PAT_MRT4530_89305C.1.pep
MRQPDRQINTHSADSNPQTGVSCATPFYYCRIHVSTVGAPGRGCVELPIEKCDGIDYRRNGEINLDGSNLQSGAAPTDALRPPRHHGHMGAAAYSLLGEISCMHELIQQINIQLAYQAAVVGRLRLHRPACLRRRRLVSLPTRLAYYAAAVGRLRLHRRPASVAAEWCLRLHGWPIMPPLLGVYDFTXRPASVAAEWCLRLHSWPIIMPPLLDVYILTXWLTFVAVDWCFRLHGXPIMPPLVGIFAFTXSTAFVAANWCLHWIHGFKLISXTLQEWISQNITNRPPRLPPTGASACTADLLCRRCWASTTSPTGLPSPPPTGASACTADLLCRRCWASTTSPTGLPSPPPTGVSACTAGLXCRRCWASTSSPTGLPSPPPTGASACTADLLCRRCWASTSSPTGXLRRRRLVFPPARLTYYAAVVGRLRLHQPAASTAADWCFRLHGWPIMLPLLGVYVFTDRPPHPPLTGVTACTAGLLXTPTDAIFFTAGYIAVTTNRHQYLQHKLPTFAMAADCFLHFHGCMILPVLIGLTIFIAAITTDEHHRLPSPTGYVVADXCFYFHNCASSLPVCFCCRRLVFTSSRQCNFVIMVERLHLYYLRHWQTLLMLLRKFCYFTNHDVFVSLDISACDAMLFYYNKRLSNIXDFYLNIFNTYLQSSNNY

SEQ ID NO: 193141 - protein, 389 aa, Oryza sativa
  Clone ID: PAT_MRT4530_89306C.1.pep
MESSLVDTAAATLCLAAAVGGRRRAGSFLNCSCSSKEYRVSASYSIGRMLSGVRSAARKKLFRSEPADLLGISWSPDSPPSNGTDGGHHHHWWTALENNFVLESSEDEYGGVVVDADRLPSDKAAFARSLAASLSYWKSVGKKGVWLKLPVDRSEFVPIAVKKKKGGGFSQICNGDFDIGIWKEGFKYHHAEEAYVMLTYWIPHEEPCMLPANASHQVGVGGFVINDQMEVLVVQEKYCGSSLDGAWKLPTGFILASEEIFTGATREVKEETGVDTEFVDVVAFRHAHNVAFQKSDLFFICMLRPTSNNIKIDETEIQAAKWMPLEEFVKQPFIQGDHMFQKIMDICIQRLRKCYCGLTAHNVISRFDGRRSTLYYNVSEPEDVNCNAS

SEQ ID NO: 193142 - protein, 308 aa, Oryza sativa
  Clone ID: PAT_MRT4530_89307C.1.pep
MAALPASPCSSSSSPSSLFLAPNPCCWKAAPRATVRASASAARRTLSSAWELPGPSAARPAARKPRLEELDTTNMLLRQRIVFLGSPVDDMSADLIISQLLLLDAEDKTKDIKLFINSPGGSITAGMGVYDAMKFCKADISTVCFGLAASMGAFLLAAGTKGKRFCMPNARIMIHQPSGGAGGKVTEMGLQIREMMYEKIKINKILSRITGKPEEQIDEDTKFDYFMSPWEAKDYGIVDSVIDEGKPGLVAPLAGAVPPPKSRVWYLWNASGPTRKIMKNLPSEEKLIQNGNGSASGDDGKFKEISTA

SEQ ID NO: 193143 - protein, 224 aa, Oryza sativa
  unsure (1)..(224): unsure at all Xaa locations
  Clone ID: PAT_MRT4530_89308C.1.pep
MQLAKMPAGAAIHYQPAQPCLIVLLCMEVGHGSHHCYLDRRAGAMDVHTHRIAIEPPIQSSSSSPFSVMLGADASTVDRLAFATADWCLDLHGWSIMPLLMGVHVFTDRLAFADWCFRLHGWPIMPLLLGVYDFTTGLPPSPPTGVLAYTVGWSHHRXWASSSSPPAAGLPPSPPTGASAYTAGLICRRCWASSLSPSTXLRRRRLVSSLLLMDDFVPTLATSA

SEQ ID NO: 193144 - protein, 222 aa, Oryza sativa
  Clone ID: PAT_MRT4530_89309C.1.pep
MENHIASAKETKGDEEHPTGDHAAQTSKVLLANNQIVKLQWRDSEGRAHGIILNKQREAKERDLLVKSLSEYTKLLNRIYRRSQAKSKTLEKLVPHLGTLESIKQELKVSQDAAKAKERQLMDKIGQLQNTNLEYHGSIGDATEIFDKLRNAPDKHFKNINEAAIMGASQVLAMTKSLYLRVDIVVVGDGFADGSSEEQAFELINDAQESARKIATDVLENF

SEQ ID NO: 193145 - protein, 531 aa, Oryza sativa
  unsure (1)..(531): unsure at all Xaa locations
  Clone ID: PAT_MRT4530_8930C.1.pep
MRTPHVNLKDHGRGRGSERTDPYHHATRRGNDNDERARRRQTGXNGDERRGDGFGGDPWTKARRGRHEAXRRGGEDEDDDGGCSDLXRSEDDERERLDGGANATTTGNDERTTTTTTTGTGEGATRAAGSGCTETGTTRNTPQRXTXRRRRRETTSRARMNGTSTTRTIGDDDDGPRRGLDGGETMPRTTLPLRCRRWWWXGRPMHGEEGRAAEQLRXGGRRGSRRRSGETEGRPGWRAMRRRRGRXTATSADALARRPGQPEEMPPRRKEKPARATVFRRSSGEAEVMPGMRAASWSRGRWWRRRPALRGRGRGGRRRRSGGDATGRRRGRVSGDFPAKRRADRGRGGSCEAEGEDGAAGRRSGEERKAAGGGRREGKGRATAGTXVPGVSSRNGGQAGVEEVAAMLXEATTRPDGARARRERRLEXGRRHGRERRTAGREXSGFRGGMALGLAREGERRTAGXREEEDDAGAWAPXVGRRRQRAHARXTCAARGGGAARVGPGDRPRRRGGEAAWAEGGREEGGGGEKK

SEQ ID NO: 193146 - protein, 85 aa, Oryza sativa
  Clone ID: PAT_MRT4530_89310C.1.pep
CSLAVVEKECQVAVALLNFMDCKNTFFQCNNSWRFPVYIAFILPLCWLNYYCSCQLPYLKRKRENPASYITTLPRLFSYVMSTHS

SEQ ID NO: 193147 - protein, 736 aa, Oryza sativa
  unsure (1)..(736): unsure at all Xaa locations
  Clone ID: PAT_MRT4530_89311C.1.pep
MLVMDSRRLSFPVDRPRVHFAGLSSPAPLLITTTTSPPACLRRRRVVPPPTRLAYYAAAVGRLRLHRRPASVAAEWCLRLHGWPIMPPLLGVYDFTAGPPLSPTSGXLAYTAGLLCRRCXASTTSPPACLRRRRVVPPPTRLAYYAAAVGRLRLHRRPASVAADWCFRLHGWPIMPPLLGVYDFTAGPPPSPPSGASAYTAGLLCRRCWASTTSPPARLCRQRVVXSPTRLAYYAAAVRRLRLHRRLAPVAAKWCLRLHGWPIMPPLLGVYDFTXTGRLVCRCWMSTSSPLAHLRCRRLVFPLTRLAYYAAVSGHLRFHRRPPSSPPTGVFIVIDGRLCSHIGHFCHHQGEYYKAKIQIQICTKGIHGFKLISYAPGMDQSEHHHRLAVIAADWCLRLYGCLVTPPLLGVYVFTDRPPRPPSTGVSACTAGLXYTAVVGRLRLHRPAASSAADWCFRLHGWLIMPPLLGVYVFTDRPPRPPPXWCFRLHGWPIMPPLLGVYVFTDRPPRPPPTGVDWCHRLHGXACYXRQLMLSSSRLATSPSPLIGVIIFNXQAVYICCRLVYSLPWLHDSASVDWLYLLHRRSSRLLLXLVPSPLRLVYTATTTDGNHRLPSPTXVMPPPTGAFIFTTARLHYRFTSSRQRNFVIMVERLHLYYLRYQQTLLLLLHKFCYFTNHDVFVNLDISACDAVLFYYNKWLSNIHDFYLDIFNTYLQSSNNYSTTRSYSSRLYVQLFPN

SEQ ID NO: 193148 - protein, 138 aa, Oryza sativa
  Clone ID: PAT_MRT4530_89312C.1.pep
PYPIRPFFWVVRHPTNGSIGHIFSKKILSRSIRVLVWFPLGSPLMVRFESRQLELSQKISFPEGPISPGLFNLRGQAPFGSIPGNTFGYYSCFPIQHSRIFRKSSWFIFSFIHWIGFHPHNIGFYHSIVYISHIDTKP

SEQ ID NO: 193149 - protein, 231 aa, Oryza sativa
  unsure (1)..(231): unsure at all Xaa locations
  Clone ID: PAT_MRT4530_89313C.1.pep
MDQSEYHHWLVFAAADCLRLHGWPIMPPLLGVYVFTNRLTFVAADWCFRLYGWLVTPPLLSVWPACXSPPPTAITACTAGLXYAAVVGRLRLHRPAASSAADWCFRLHGWPIMPPLLGVYVFTDRSPRPPPTGVSACTAGLLCRRCWASTPSQTSRLRRRRLVSPPTRLAYYAAVVDAYIFTDRPLRMTLIXCYRLHGWPRRRHHKYASSPSTQVVYVYDWFLHFHGCRIL

SEQ ID NO: 193150 - protein, 154 aa, Oryza sativa
  unsure (1)..(154): unsure at all Xaa locations
  Clone ID: PAT_MRT4530_89314C.1.pep
WNGRRGAVAAAARGSGSSAARGARRRDSARRGSGDGMRAATGRRWRRRQRWRAARGGMRWAATXRHGVTATMGWRGAGSRRGSGSSTARGGDGTRTRRRDGDGDGDGAAVVARGARWRWDARAARGGTRRRRRGRGDEMAMATVARRQATRATA

SEQ ID NO: 193151 - protein, 47 aa, Oryza sativa
  Clone ID: PAT_MRT4530_89315C.1.pep
SAAFVTKMLFSLQSHLSPLLLMKHLLSHVLSPTYSEIDWFSWTQAWP

SEQ ID NO: 193152 - protein, 65 aa, Oryza sativa
  unsure (1)..(65): unsure at all Xaa locations
  Clone ID: PAT_MRT4530_89316C.1.pep
PDTERRGLYQTDQYTTFFXRKDNANGRDCKSMREYLETNCKRAPTARRPLSWSSRADLEAEESGA

SEQ ID NO: 193153 - protein, 93 aa, Oryza sativa
  unsure (1)..(93): unsure at all Xaa locations
  Clone ID: PAT_MRT4530_89317C.1.pep
RVXFXPVXPGPRPSGWSGHPPGPLFGRLPRAPGRAPRSVAALPNAAHSATRPVKLLRAXXASRLPRHSXPAALLRQHAPGGGFEMQALASLIA

SEQ ID NO: 193154 - protein, 99 aa, Oryza sativa
  Clone ID: PAT_MRT4530_89318C.1.pep
TCQDNNIRNGLLLICWLWTQGLDHGQGEKYVSGISGRRGAFSPIRRSAGVTEGCAATLGLTYDPHSYGRKPRQTVCLVIQSDLAEPELSDESYDALAIC

SEQ ID NO: 193155 - protein, 62 aa, Oryza sativa
  Clone ID: PAT_MRT4530_89319C.1.pep
MASGEAGRLRAKRNAVVASHRRTQPHRWGVVERWCQSLHLVGKSSKAAGWKCKEDDVEMLER

SEQ ID NO: 193156 - protein, 285 aa, Oryza sativa
  unsure (1)..(285): unsure at all Xaa locations
  Clone ID: PAT_MRT4530_8931C.1.pep
MTSPPAAAARRLGRRTLAGERRRFGTNGGHQRVADGTANSPATKATAEEERTATATRSKRRRRSGRRXRRCSDDLRRRRRGGRGRRXLGDHDGGLPERRRXPERRRRTAGATAAMAARGYSALGRYGRREAKARVAAGRGELGGPFKGARRRRRRPTATGDEKERSGSEREKPIRFDLESNTFQADLADVSKGEKVEEIPRIISPLLIQPEKERSGRIXEGNGGGAALXGFGRRPTRGRRRPDRRAPPVSERGRARAGGCGLGRLGRGEREGFWADFRPKAKRRL

SEQ ID NO: 193157 - protein, 58 aa, Oryza sativa
  Clone ID: PAT_MRT4530_89320C.1.pep
IQNPHFPFQLTFAPAVNFSPKGAQNGAKNKGFPLISKPPLFHFRLTFAQTVNFLPMGL

SEQ ID NO: 193158 - protein, 117 aa, Oryza sativa
  Clone ID: PAT_MRT4530_89321C.1.pep
MASGGDDDSVSALRRRPARAVHLLHVSSADDDFASVLRRRLDGGAGAGGGAALPSSCLHAPPRVCLILSLLLLVLQTTRYQVSRVPRYHTWYMEGNMDKLDVGDVLDEQLEVAADAR

SEQ ID NO: 193159 - protein, 134 aa, Oryza sativa
  Clone ID: PAT_MRT4530_89322C.1.pep
GGPPLALPVLFAPPPVVVFVQKAFLFPIPPPPNLPDWPNPRVKKFFPIPILGPPKKKGPFLGSPLPCGALFGEKKNSPFFPFVFFPPCFCLGPPSFPQWVFFLSCDPSKLSGLCALVYPPLFLRIFWISPRPFF

SEQ ID NO: 193160 - protein, 140 aa, Oryza sativa
  unsure (1)..(140): unsure at all Xaa locations
  Clone ID: PAT_MRT4530_89323C.1.pep
AGTPAGAGTLYSGRPTRSFTRGRRRSQFQAVKINKKTVFNGELQLVQIHIVPHHYVVDKNGQLERSAYIEFKTNPIFILRHINGKSSIFRAFSTDVILNAMIDYXEESNMLKHSTGDETVAFTAVQYKSYQDVDKEAESS

SEQ ID NO: 193161 - protein, 187 aa, Oryza sativa
  unsure (1)..(187): unsure at all Xaa locations
  Clone ID: PAT_MRT4530_89324C.1.pep
MDGTDVTFDIGQDIFSAHKCILAARSSVFKAEFFGAMSAKAHRTIKIEDMEAGVFRSLLHFIYTDALPETALDVVMAMXQTSALAWRGKNDRYNVERLKLICEEKLSKHIDSNMVATTLALAEQHSCHGLKEACFKFLSSDANLERMKASEGYEHLKVSCPFVLKELIARFISPEMEAAREITMDLQ

SEQ ID NO: 193162 - protein, 103 aa, Oryza sativa
  unsure (1)..(103): unsure at all Xaa locations
  Clone ID: PAT_MRT4530_89325C.1.pep
TTTSSSASSPTTGARSAAAAAAAXAGTLFKVTVXTSAAATWGTSSRRRRGSGAPSRSTPNCSGGTPAAIGRATSSATAGRSRRTGASPSTTRGAPCSGSASSA

SEQ ID NO: 193163 - protein, 1349 aa, Oryza sativa
  unsure (1)..(1349): unsure at all Xaa locations
  Clone ID: PAT_MRT4530_89326C.1.pep
TRCASRRRRRAGAAPTTGRTRRAPRPPSAPADWGLRCYGWPSLTPRSGVYTCTAGLPPSPPTGASAYTVGWSHHRXWASTTSPPACLRRRRVVXPPPIRLAYYAAAVGRLRLHRRPASVAAEWCLRLHGWPIMPPLLGVYDFTAGLPPSPPSGASAYTAGLLCRRCWASTTSPPACLRRRRVVPPPTRLTYYAAAVGRLRLHRWPASVAADWXPPPTRLAYYAAAVGRLRFHRRPASVAAEWCLRLHGWPIMPPLLGVYDFTAGLPPSPPSGAXKGFMADLLCRRCWTSTSSPLAHLRCRRLVFPLTRLAYYAAISGRLRFHRRPPXVAADWCLHCYXWTTLFPNGSVYVFTXGSPRPPPTGVSACTAGLLCCRCWASTSSPTGRLVRCRLVFPPARLAXYAAVVGRLRLHRPXASTAADWCFRLHGWPXMPPLLGVYVFTDRPPRPPPTGVSACTADLLCRRCWVSTSSPXPACLRRRRLVFPPARLAXYAAVVGRLRLHRPXAFAAADWCFRLHGWPXMPPLLGVYVFTDRPPRPPLTGVSACTAGLLCCRCWASTSSPTGRRIRRXLVSPLARLACYAAAVGRLRLHRRPASVAAEWCLRLHGWPIMPPLLGVYDFTAGLPPSPPSGASAYTADLLCRRCWTSTSSPLAHLRCRRLVFPLTRLTYYAAISGHLRFHRRPPSSPPTGVFIVIDGRLCSHIGHFCHHQGEYYKXIQIQICIKGIHGFKLISYAPGMDQSERHHRLASTAADWCFRLHGWPIMLPLLGVYVFTDRXASSTADWCFRLHGWPLXPPLLGVYVFTDRPPRPPPTGVSACTAGLYAAVVGRLRLHRPAASSAADWCFRLHGWPLCCRCWASTSSPTGRLVRCPLVFPPARLAFMPPLLGVYVFTDRXPSPLPTGVSACTAGLYAAVXWASTSSPTGXLRRCRLVFPPARLAFMPPLLGVYVFTDRLAFAAADWCFRLHGWPLXPPLLGVYVFTDRPPRPPPTDASACTTGLLCRRCWASTSSPTGXPRPPPTGASACTAGLYAVVVGRLRLHRPACLRRCRLVFPPARLAFMPPLLGVYVFTDRPPRPPPTGASACTADLLCRRCWVSTSSPTGXLRRRRLVFPPARLAXYTAVVGRLRLHRPACXAAADWCFRLHGWPLCRRCWASTSSPTGRLVRRRLVLPPARLTYYAAVVGCLRLHRPACLRRRRLVFPPARLAFMDRPPHPPLTAITTDEHHRLPSPTXMLSPTSAFIFTTARLHYQFTSSRQCNFVIMVEQLHLYYLRHWQTLLLLLRKFCYFTNHDVFMSLDISACDAMLFYYNKRLSNIHDFYLDIFNTYLQSSNNYSTTRGYSSRLYVQLFPN

SEQ ID NO: 193164 - protein, 94 aa, Oryza sativa
  unsure (1)..(94): unsure at all Xaa locations
  Clone ID: PAT_MRT4530_89327C.1.pep
MEDDILVKSKGFVILCDRSDRDLVAGVLLVHFVNTERINKVVIYFKSSSICVSPGFGGLTGDLRAVRPAASXRSDRREHGGQTGGGDRRGRRLW

SEQ ID NO: 193165 - protein, 328 aa, Oryza sativa
  unsure (1)..(328): unsure at all Xaa locations
  Clone ID: PAT_MRT4530_89328C.1.pep
MEEERRVLVTGGNGFIGSWIVRILLARGYAVTATYQPGTDAAHLLALDDERLLLLPADLLDAGAISAAAAAGGGCRAGVLHVASXPCTLADPRDPQAELVEPAVRGTLHVLEAARGAGARRVVVTSSISAMVPNPGLAAGELVDERSWTDMEFCKARGKWYPVSKTLAERAAWEYAARWPGFELATILPSTCLGPLLQPTLNASSVVLQRLLQGSTDDQADYWLGAVHVRDVAAAHLLLLEAPTVSGRYLCTNGIYQFSDFARLAARICPAYAHAIHRFEEGTTQPWLVPRDARDAARRLLDLGLVLTPLEEAIKDAEKSLTDKCFLP

SEQ ID NO: 193166 - protein, 551 aa, Oryza sativa
  unsure (1)..(551): unsure at all Xaa locations
  Clone ID: PAT_MRT4530_89329C.1.pep
MEFYLPMLSVWFANGWLPLGRFLAPGGSLDGPSNARIQIQICIKGIHGFKLTSYAPGMDQSEHHHRLASTAADWCFRLHGWPIMPPLLGVYVFTDRLAFAAADWCFRLHGWPXLCRRCWAPTSSPTGXRLCRRRLVFPPARLAFMPPLLGVYVFTDRXPSPLPIGASACTARXLCRRCWASTSSPTGXLRRRRLVVPPARLAFMPPLLGVYVFTDRPPRPPPTGVXTSSPTGLPSSPPTGILACTAGLXYAAVVGRLRLHRPACXVAADWCPRLHGWPLCRRCWASTSSPTGRLVRRRLVLPPARLAXYAAVVGRLRLHRPAASSAADWCFRLHGWPIMPPLLGAYVFTDRLAFVAADRCPRLHGWPLCRRCWXVYVFTDRLAFVAADRCPRLHGWPXMPPLLGVYVFTDRLAFVAADRCPRLHGWPLCRRCWASTSSPTGLPSPPPTGVSACTAGLYAAVVGRLRLHRPAAASAADWCHRLHGWPVITPTDAIFFTAGYIAVTTNRHQYLQHKLPTFAMAADWFLHFHGCMILPVLIGLTIFIAGHLVCC

SEQ ID NO: 193167 - protein, 333 aa, Oryza sativa
  unsure (1)..(333): unsure at all Xaa locations
  Clone ID: PAT_MRT4530_8932C.1.pep
MKIIFVFALLAIAACSASAQFDQQVLSPYNEFVRQQYGIAASPLLQSAAFQLRNNQVWQQLRVVAQQSHYQGINIVQAIAQQLQLQQFDDLYFDRNLAQAQAQALLALNLPSRYGIYPRYYSAPSSITTLGAEGKGHADRVHRSGAHAAASRSTVDQPLGPPEGGHSARPAGGGARAPIVTDGGHRHGGAAAERGEGKGEKRRRSTAHPRSTATTKKAAGAEEGGGAARVDGVDGVPAVGGLGDGVDGVDGGAAKPEEATPGLETVPASGEGRPEVVGDGGERGRRRELDSSEEKARQRVEMGEGGAGXGLNRVGRGRGXPGEEGNRPGGPAA

SEQ ID NO: 193168 - protein, 142 aa, Oryza sativa
  unsure (1)..(142): unsure at all Xaa locations
  Clone ID: PAT_MRT4530_89330C.1.pep
YIFTXRFAFAATNWCHRLHSWPIMPLLLGVYIFTDRPPRPPLTGVSAGRLVRRRLXVSASSPTGLPSPPPTGVFACTAGLLCRRCRASSTSPTGXPRLPPTGVSACTAGLLCRCCWASSTSPTVRLVRRRLASPLKRHLVLT

SEQ ID NO: 193169 - protein, 451 aa, Oryza sativa
  unsure (1)..(451): unsure at all Xaa locations
  Clone ID: PAT_MRT4530_89331C.1.pep
MPRFMHHLFSSNSGRLPFFSSAGDTPTPAGSIRVRVWGWGEGRRGVGEEGRGGFPRGLEGWLWTAENRRWAVDYGGRWASVGGEGKASVWLGGGRQWLRIRRQGATGDGEDGGAEAPRRRRLVEKEWGRRGKGEGACRGCLAGAVDPFWLAGEAGGGTNETSPETTTMRRAGERDTVLVMMRVAGWLTQQPPDQPELLQGKQIWEAQEHFRILDELRDSCFRPSLPTLATSSFSPAPATPILRQRTLRVRFPGDGVGWGWEGEGEGEEFASSRGMAGGGGGPALGGEAPEPRGWGRAIYKQSKKREGGFEYLIRIGGAEVTNIISRSRSNTKKTRPLIKRIQIQICIKGIHGFKLTSYAPGMDQSEHNHRLAVVAADWCPRLYGWVVTPPLLGVYVFTAGLPSPLPTGVSTCTAGLLCRRCWASTSSSTCRLVRRRLVFPPTRXWPVMTPT

SEQ ID NO: 193170 - protein, 723 aa, Oryza sativa
  Clone ID: PAT_MRT4530_89332C.1.pep
MTDNPLYCPYHRYVGHAIEDCIAFKEWLQRAVNEKRINLDADAINPDYHAVNMVSVEPFPQKQREGRRATSWAPLAQVEDQIAKIILTKAPATHVEASHGDNNRPWSVVQRKPQPLSFPPRRPQMKLSPHTHPTSRRWLDPSQRRPPPRFVPFSEGDKSFPRWGRELPTLAQFLPKGWEQSSISTREAMEVDNSTPTPNIAPCNVILTYNDSTSTGSDETFTGREREIFHAELDPEKTKVEESKAPNVDKPTKEASPPGEAPETKTGSKEKPAVDYNVLAHLKRIPALLSVYDALMMVPDLREALIKALQAPEVYEVDMAKHRLYDNPLFVNEITFADEDCGDYGSRALPPFIIAEFMFRQLARQAIDAGHGLEASQLSGRSAASPLRRLVLATAIADSNNDFTAGLPPSPPTGVIAYTVGRSHHRSWASMSSPTGWPSPPPTGVSACTAGLLCRRCWASTTSPPACLRRRRLVSSPIRSVGHTTVDGHRHLHHRPASVAADWCPRLYGRLVTPPLMGIIIYTAGLPPLPPSGASAYTAGLLCRRCWASTTSPPACLRRRRVVPPPTRLAYYAAAVGRLRLHRRPASVAAEWCLRLHGWPIMPPLLGVYDFTAGLPPSPPSGASAYTAGLLCRRCWASTTSPPACLRRRRLVPPPTRLAYYAAAVGRLRLHRRLASVAAEWCLRLHGWPIMPPLLDVYILTVGSPSLPSTGVSAYTADLLCRH

SEQ ID NO: 193171 - protein, 109 aa, Oryza sativa
  unsure (1)..(109): unsure at all Xaa locations
  Clone ID: PAT_MRT4530_89333C.1.pep
RRGRTSSSSLDCEDAPCMVRTGSFKISRIDSTDRGXTCRDYSIVLFENPSADLSXRNQIVMNEHSDVARDAASIKIGSINKNGNYLNQQYLSVPKKARELLVAGSHASN

SEQ ID NO: 193172 - protein, 472 aa, Oryza sativa
  unsure (1)..(472): unsure at all Xaa locations
  Clone ID: PAT_MRT4530_89334C.1.pep
MAGLLSRRCWASTTSPPACLRRRRLVPPPIRTVYHTTADGHLRLHRRPASVAAEWCLRLHGWPIMPPLLGVYDFTAGLPPSPPSGASAYTAGLLCRRCWASTTSPPACLRRRRVVPPPTRLAYYAAAVGRLRLHRRLASVAAEWCLRLHGWPIMPPLLGVYDFTAGLPPSPPSGASACTAGLLCRRCWASTTSPPAXPPSPPTGVFIVIDGRLCSHIGHFCHHQGEYYKAXSEHHHRLASTAADWCFRLHGWPIMPPLLGVYVFTDRLAFAAADWCFRLHGWPIMPPLLGVYVFTDRPPRPPPTGVSACTAGLXYAAVVGRLRLHRPAASSAADWCFRLHGXLLCRRCWASTSSPTGCLDRRRLVFPPARLAXMPLLLGVYVFTDRPPRPPPTGVSACTAGLLCRRCWASTXLPTGRLVRRRLVSPPERLAFMPTLLGVYVFTDRLAFXAADWCFPLHGXLIIPTVVGVYVL

SEQ ID NO: 193173 - protein, 50 aa, Oryza sativa
  Clone ID: PAT_MRT4530_89335C.1.pep
TRILSTKVQKEIAHLCLATNLGCKIWTAGEHFCCVHLLVYFLLVESRVKI

SEQ ID NO: 193174 - protein, 508 aa, Oryza sativa
  Clone ID: PAT_MRT4530_89336C.1.pep
MEEGAKIGREHEQQQQQHGRVNGSGRVAAVGGGSGGGGDEIEIEVAAAAGASPSRQHGGLHGDVQAPTWKRFLAHVGPGFVISIAYLDPSNLQTDLVAGSSHRYSLLWVLLFGFIFVLTVQSLAANLGIITGRHLAELCMGEYPKYVKYCLWLLAELGVIAATIPGVLGTALAYNMLLHIPFWAGVLACGACTFLILGLQGYGARKMEFTISVLMLVMATCFFMELGKVNPPAGGVIEGLFIPRPKGDYSTSDAVAMFGSLVVPHNLFLHSSLVLTRKMPYTSKGRKDASTFFLLENALALFIALLVNVAIVSISGTICANNLSFADTSTCSSLTLNSTYVLLKNILGKSSSTVYGVALLVSGQSCMVATSYAGQYIMQIVLSFVLPFALIPLIKFSSSCTNIGPYKNATSIIRIAWILSLVIIGINIYFFCTSFVAWLVHSDLPRVVNAIISSLVFPFMAAYIAALIYLAFRKVNLSDPFPTNSVSGEIEVQHIQIQEKQEDLGVHL

SEQ ID NO: 193175 - protein, 841 aa, Oryza sativa
  unsure (1)..(841): unsure at all Xaa locations
  Clone ID: PAT_MRT4530_89337C.1.pep
GWPIMPPLLGVYDFTAGLPPSPPSGASAYTAGLLCRRCWASTTSPPACLRRRRLVSSPIWLVGHTTVVGRLRLHRRPASVAADWXPPPTRLAYYAAAVGRLRLHRRPASVAADWCPRLHGWPIMPPLLGVYHFTAGLPPSPPIGASAYTAGLLCRRCWASTTSPPACLRRRRVVPPPTRLAYYAAAVGRLRLHRRPASVAAEWCLRLHGWPIMPPLLGVYDFTAGLPPSPPSGASAYTAGLLCRRCWASTTSPPACLRRRRVVXPPPTRLVYYAAAVGRLRLHRRPASVAADWCLRLHGWPIMPPLLGVYDFTVGLPPSPPSGASAYTAGLLCRRCWASTTSPPACLRRRRVVPPPTRLAYYAAAVGRLRLHRRPASVAAEWCLRLHGWPIMPPLLGVYDFTAGLLPSPPSGASAYTAGLLCRRCWASTTSPPACLRRRRVVPPPTRLVYYAAAVGRLRLHRRPASVAAEWCLRLHGWPIMPPLLGVYDFTAGLPPSPPTGVLAYTXIQIQICIKGIHGFKLISYAPGMDQSEHHXRLASSAADWCFRLHGWPXMPLLLGIYVFTDRXASSATDWCFRLHGWPLXPPLLGVYVFTDRXPSPPPTGVSACTAGLYAAVVGRLRLHRPACXAAADWCFRLHGWPLCRRCWASTSSPTGRLVRRRLVFSPARLAFMPLLLGIYVFTDRPPRPPPTGASACTAGLYAAVXWASTSSPTGXLRRRRLVFPPARLAFMPPLLGVYVFTDRLAFAAADWCFRLHGWPLXPPLLGVYVFTDRPPRPPPTGASACTAGLXYATVXWASASSPTGXPHPPPTGVTAYTAGLXYAAVVGHLHLHRRSSRLLL

SEQ ID NO: 193176 - protein, 619 aa, Oryza sativa
  unsure (1)..(619): unsure at all Xaa locations
  Clone ID: PAT_MRT4530_89338C.1.pep
QQRLHRRPTSVAADWCHRLYGWSVTPPFMGVHVFTDRXPSPPPTGVSACTAGLLCRRCWASTTSPXGLPPSPPTGVLAYTVGXHTTVDGHRHLHXPACLRRRRLVSPPIRXLVTPPLMGIVIYTAGLPPSPPSGASAYTAGLXYAAAVGRLRLHRRPASVAAEWCLRLHGWPIMPPLLDVYILTXWLTFAAVDWCFRLHGXPIMPPLVGIFAFTXSTAFVAADWCLHCYXWTTLFPHWPLPPSPTGRLVRRRLVFSPARLAYYAAVVGRIRLHRPAASSAADWCFRLHGWPXMPLLLGVYVFTDRLASPPPTGVSACTAGLYAAVVGRLRLHRPAXAASAADWCHRLHGWPVITPTDAIFFTVPSPLRLVYTATTTDGHHRFLPPTXYAAVDWCFYLHNCXSSLPVCFCCRRLVFTSSRRCNFVIMVERLHIYYLRHRQTLLLLLRKFYYFTNHDVFVNLDISACNAMLFYYNKISTWTSSTHTFNQVMTIRRQEATVLDSMFSCFPTNQRTFYFNNFKYFGLDELGNNINSPPIICLHGWPTTQLPIEDLIVIIGCYIAIDWITDIVIFINILSSLINIAYSAAVDGKLRHHSRLSLLPLIIITVGCVCRRRLFSSSS

SEQ ID NO: 193177 - protein, 220 aa, Oryza sativa
  unsure (1)..(220): unsure at all Xaa locations
  Clone ID: PAT_MRT4530_89339C.1.pep
CRSAPGWRALPLPEPGTLRCPRCDSTNTKFCYFNNYSLSQPRHFCKACRRYWTRGGXVRNVPVGGGCRRNTKRSTKKSSSSSSRQGGGAGNAAAAATSSSSTTSTSTTATTSSAAAPAAAAAADPPPFLQQGLHGYHFADGDVAAGAALADGGFPRGVASGLLAQLASVKMEEHGTNNGGGVGGGFVGAHEQYWHGGNGGGGWPAEFLSGFSSSSSGNVL

SEQ ID NO: 193178 - protein, 469 aa, Oryza sativa
  Clone ID: PAT_MRT4530_8933C.1.pep
MLLDEPLDFEKEDPLLPKARPAKRKKVIGLDDLLEDFFASGKDDLKAYGIESKHGSKGYNSDDEDKKVKEKEIKFRKFVEEYEEQSKELDAGDDVPQWGQRVFGCQKSPSVLTVTGVENCQLLKSFCANEHLGFDLNIEQGEGFLEGLLVDGWLLKLVLLHGSVEDSIASWALTKLLYSCNKKFRVAASDFWDSVLSLNEADKLSVDIGHFPSYSVLKSAILNYGYIFDNCTEVSTSESVIADDGPPQNIIEWLKITSACCKIRNVHSIFSSSEAEELLVIVISLFLDRQLEGLLLILGDCLSSLILYFNSSEWESSCLIVAQSISQRVTMDLNCLRIVDCITGTDYRSKFLRSQLALQFLKVSFGLKVANVEKILKSVMSINVKDKDCNFFSLYVYLVLMDNLLFSSDAFRDKHAIINSWRNYLRNCSTQIGCTDWRLYASKVRNKASYLLQGAVLRRSAGGASLPVQ

SEQ ID NO: 193179 - protein, 981 aa, Oryza sativa
  unsure (1)..(981): unsure at all Xaa locations
  Clone ID: PAT_MRT4530_89340C.1.pep
MRQPDRQINTHSADSNPQTGVSCATPFYYCRIHVSTVGAPGRGCVELPIEKCDGIDYRRNGEINLDGSNLQSGAAPTDALRPPRHHGHMGAAAYSLLGEISCMHELIQQINIQLAYQAAVVGRLRLHRPACLRRRRLVSLPTRLAYYAAAVGRLRLHRRPASVAAEWCLRLHGWPIMPPLLGVYDFTTGLPPSPPSGASAYTAGLLLCRRCWASTTSPPACLRRRRVVPPPTRLAYYAAAVGRLRLHRRLASVAAEWCLRLHGWPIMPPLLGVYDFTTGLPPSPPIGASAYTAGLLCRRCWVSTTSPPACLRCRRVVPPPARLAYYATVVGRLHLHRRPASVAADWCLRLHGWPIMPPLLGVYIFTAGLPPSPPTGVFAYMVGWSHHRCWASTSSPPACLRRRRLVPPPTRLAYYASVVGRLHLHRRPASVAADWCLRLHGWPIMPPLLGVYIFTAGLPPSPPIGASVYTAGLLCRRCWASTTSPPACLRRRRVVPPPTRLAYYAAVVGCLHPHRWLTFVAVDWWEYYKXIKGIHGFKLISYAPGMDQSEHHXRPPRLPPTGASACTADLLCRRCWASTTSPTGLPSPPPTGASACTAXLIMPPLLGVYDFTDRLAFAAADWCFRLHGWPLMPPLLGVYVFTDRLAFAAADWCFRLHGWPIMPPLLGVYVFTDRLAFAAADWCFRLHGXLIMPPLLGVYVFTDRLAFAAADWCFRLHGWPXMPPLLGVYVFTNRXASTAADWCFRLHGWPIMLPLLGVYVFTDRXAASAADWCHRLHGWPVITPTDAIFFTAGYIAVTTNRHQYLQHKLPTFAMAADCFLHFHGCMILPVLIGLTIFIAAITTDEHHRLPSPTGYVVADXCFYFHNCASSLPVCFCCRRLVFTSSRQCNFVIMVERLHLYYLRHWQTLLMLLRKFCYFTNHDVFVSLDISACDAMLFYYNKRLSNIXDFYLNIFNTYLQSSNNYSTTRGYSSRLYVQLFPN

SEQ ID NO: 193180 - protein, 393 aa, Oryza sativa
  unsure (1)..(393): unsure at all Xaa locations
  Clone ID: PAT_MRT4530_89341C.1.pep
YLLRSRNGSVRTSPTGRLVCRRLVFPPARLAFMPPLLGVYVFTDRLAFAAADWCFRLHGWPLCRRCWVSTSSPTGXPRPPPTGVSACTAGXIMPPLLGIYVFTDRLAFAAADWCFRLHGWPXLCRRCWASTSSPTGRLDRRRLVFPPARLAYYAAVVGRLRLHRPAAASAADWCHRLHGWPVITPTDAIFFTAGYIAVTTNRHQYLQHKLPTFAMAADWFLHFHGCMILPVLMGLLCRCLVPLPLRLVXTATTTDGHHRLPLPTGYAAADWCFYLHNCASSLPVCFCCRRLVFTSSRRCHFVIMVERLHLYYLRHWQTLLLLLRKFCGFTNHDVFVXNLDISACDAVLFYYNKWLSNIQDFYLDIFNTYLQSSNNYSTTRGYSSRLYVQLFPN

SEQ ID NO: 193181 - protein, 1002 aa, Oryza sativa
  Clone ID: PAT_MRT4530_89342C.1.pep
MELQQESSDAGTLFSAPSRNLSSSSSAFVSANQSPFFTPRCLSARVSDHAHPENNSSLSGTVLKISDILSSDTLLKREQLPSATVGLLPSDASPPPSICTSSNFDTPAIVYNNPSFISTFSDPCQGSSSATSTGVRSTQKEKHKRQWGLYRKSSSSQPTTSATSVNRLRSFDVYIGFHGRKASLLRFTNWLRAELEIHGISCFASDRSRCRSSHSHDTIERIMNASTYGVVILTRKSFGNPYTIEELRNFFGKKNLIPIFFDLGAADCLARDIIEKRGELWERHGGELWMLYGGMEQEWRESVDALSRVSDVQLEANDGNWRHCILQTIIVLATKLGRRSVVDRVNRWRGRVEKEEFPFPRNADFVGRKKELSELELILFGDVSGDGEREYFEIKTKQRRKGLVIGRSVNNYEQVNTDDGKGKEPVLWKETKENIEMQRLGSPPRHGRPSRTKNDGRYGRKRRCRKILYGKGIACISGESGIGKTDLVLEYAYRFSQRYKMVLWVRGESRYIRQNYLALRTFLEVDLSVDSHLHEKGSDRCFEEQEEEAIAKIRQELMRDIPFLVIIDNLESEKDWWDKRVITDLLPHFGGETHFIITTRLPRVMNLEPMKLSYLSGAEAMSLMKGGVKDYPLVEIDALKAIEEKLGRLTLGLGIVGSILSELPITPSRLLDTLSRTLPIRDCSWNERDAISLKNHEILVRLLDVCLSIFDHADGPRSLATRMVQVCGWFAPSAVPIHMLALAAHKVPKKHRRGPRWRKWWRTLTCGLATSRMKRSEAEAAAMLMRFGIARCSTKPEYVQFHDLIRLYARKRGGTRMAQAVVQSIYLRGSIKHSSEHLWAACFMFFGFGSDPFLVEPRPSELIFFVKQIVVPLAINTFITYSRCNAALELLRLCTEALERAADSMLSHAGKWRETPLSCFRPTQSEAQYTYLWQELALLKASVLETRAKLMLRGGQYDTGDDLIRKAIFILTSICGEHHPNTVSARETLSKLTRLLTNVQLS

SEQ ID NO: 193182 - protein, 307 aa, Oryza sativa
  Clone ID: PAT_MRT4530_89343C.1.pep
MDLGLSLGLGLASQGSLTSSTTTTSSPGAGSSSPWAAALNSIVGDVRRDQAAAHAAAAVGVGVGGEEMYQGRASTSPDSAAALSSASGKRERELERSGSGVDDDDGADGAGGRKKLRLSKDQAAVLEECFKTHSTLNPKQKVALANRLGLRPRQVEVWFQNRRARTKLKQTEVDCEYLKRWCERLADENKRLEKELADLRALKAAPSPASASAMQPSSSAAATLTMCPSCRRVATAGAPHQPNHQQCHPKSNTTISSSSTAAAAVAVAGGNVLPSHCQFFPAAAAAADRTSQSTWNAAAPLVTRELF

SEQ ID NO: 193183 - protein, 284 aa, Oryza sativa
  Clone ID: PAT_MRT4530_89344C.1.pep
MEHIKPIFNQDGVLDKYEMPYYNGKIPRVEETPYEFDLPEYREVYYKAMLSSNPSSGDCIVMLIHQPYSQLSFARVGEDHWNWIPIGLFYTDCIYHKGWFYTVSVLGAVDAFNLNGPSVVHKRILKDMLTLGYEQMYIVQSPWGDILIVNRMTIIPRNGNPEIEETELYTSDIVVYKADIGEQKLVKLTGIGDYALFIGHNTSSCLPVKDCHMLMPNHVYITDDEYLWLLEFRHKRRDVGIYSLENNSLSNVVSPEPWKSWLPPIWMMPNLMKTGFQDQNNGGD

SEQ ID NO: 193184 - protein, 256 aa, Oryza sativa
  Clone ID: PAT_MRT4530_89345C.1.pep
MQQQQHPAPGAEFVADRDAARAEVERALGGYSFRDGGALLLEDALTHSVHPRDEAGGRARHQRLEFLGDAALGLAFATIFYRDDPGLDQGDLTVLRSANVSTQKLARVAVRRRLYPLLRRYNCAPQDHEVSRFTKSVEGPYSGDPIEGPRVLADIVEAIVGAVYLDSKLDLEVLQKVAKLLCEPIITKKALLEDPESMLNELGGEHREDLEIKILAWRKVANVVDDGREQAITTSGLGNGSEDEVGKLRTIRIEEA

SEQ ID NO: 193185 - protein, 133 aa, Oryza sativa
  Clone ID: PAT_MRT4530_89346C.1.pep
MAAKAALVLAVSLLVVAVASACTYCPEPPTPKPKPPAPRPPTPGGGAGSCPRDALKLHVCANVLGLVKAKIGAVAPYEPCCSLLDGLVDLDAAVCLCTAIKANVLGLNLNIPIDLSLILNNCGKICPSDYQCA

SEQ ID NO: 193186 - protein, 546 aa, Oryza sativa
  Clone ID: PAT_MRT4530_89347C.1.pep
MATAAGRYEDSGVSVSFRRKAAYTAASLLVFLVAGQLPLYGVKKYNGDKDVPDPLYWMNCMFASSNNTLMTLGIIPLLLSEMAVRIFSALIITRWPPFHHVRLNRARKLLAIAMAMVMAVSGVLSAGVAAELGTMASLVVMFQLFLGGMIAIYLDELLQKGYGLLSGVSLFAAANCCACIFWKAFTAEDPLLHWAAIIVFFKLVLQLQSCHITLPAVTSPDDPTLQTTYTISPSYMAYVPILFQPAFFSFPLVSISQTLSIKYGETNRVVNLLGKWQQMCKYPGYYVPVARIASYVTTPPSFGEIVTGDPGSLLYAVFLLTGCAFLSLFCFKVCAKSSKRYLVRLVGKPKQTRLSPDDEQLPDEDESISPKQCRRYMTIAAIFVGFCVGFLSLLAGFLGLDGPAIMLAVTVIHSVVQDHSESDGIRAKVYKHTRLVSSLFLSIIMFDHRSPMAGGEGFFVDVQVDAVRAVVMTPAAGGNALRLLVQEQEQRAGGRRRTDGGDSEEDDGGDCLRPYEPIIICCAALVYLALWLCGLLLFCRSVQFLI

SEQ ID NO: 193187 - protein, 87 aa, Oryza sativa
  Clone ID: PAT_MRT4530_89348C.1.pep
RPPSSSCFTGWGAPSHATASAVQRGGRANGDERRAAQISSVGQRQCQCFSSPARDGGRVLQDSARTGNSTRLRGGEGAAVPLPGKLW

SEQ ID NO: 193188 - protein, 45 aa, Oryza sativa
  unsure (1)..(45): unsure at all Xaa locations
  Clone ID: PAT_MRT4530_89349C.1.pep
CFLYGITKSDHLMYVERPCAYFRQLQRFLSYVNSEXKEPPGGGAN

SEQ ID NO: 193189 - protein, 741 aa, Oryza sativa
  Clone ID: PAT_MRT4530_8934C.1.pep
MAVAGAVAMSGGILLLLLLLLLLLAAACVEAGELPPISRRSFPKGFIFGTSSASYQKFKAKSKHLEKPPRRSRTGGSGAKTLAARAATPPPPPRRPRSSPAGKLPASREGGGEAHQLDGLHLGATRTGERRSSPPRSEAETVGLLGEAVDPASLRPDLALRRLDLAGAAAPAWRREAAGRPGHVGGVSGSAVGNGGGVACPGAETVRAAAARRLGTAAAWPARSYGLGAGGSMALVRLPGRSGGVPRLGCAAASSPMARPVLGCRGAAAMPCGRVGGVAWPGGARRPGNRGAGAGGVVASPASASSKEAGGWWNRGVLGQLSGMVGVSERKLSPILWANSDYVFGRGNPPEGIVEALQKGKIGIIVNSQWYVPFSPSKTNKDAARRVLDFVLGWLMDPLIRGDYPLNMRELVGNRLPKFTKEQSEMVKGAFDFIGLNYYSSSYAENVLPSYGLKNSYNTDFHARITGLRELLLYIKENYGNPTIFITENGVDEVNNKTMPLKEALNDNTRIEYYHKHLLALRNAMRDGANVKGYFAWSLLDNFEWADGYTLRIRGWVTCQNPEHPIRIPAAYLSSPSDGYVPCLASRQIEHTHPPPPDPCVGRAAPLLAAAYVGGAPIMPGGKIICIVVSPNSATCHRQAVRRCNGGYSVQVVVMQAPRRGATVDRRRRTTSGPAIGAARRPSPCSLFFFSSSFPDVFVCHLWATGLIGTVSARPWGSIVLPWNGDTALCGHGRRAAGRRT

SEQ ID NO: 193190 - protein, 132 aa, Oryza sativa
  Clone ID: PAT_MRT4530_89350C.1.pep
MPVPGGAKRRDNGADGEEGERALVQKLEACCRWSSYFLEGFHASGRSKIETTSPRGDGNRHGDGCGGGRPGQIKVREQLYPPSVGEVFGMADGSACICASCLQEKLGMLDSSSQSNPSHPLSVCRPPSLPIL

SEQ ID NO: 193191 - protein, 47 aa, Oryza sativa
  Clone ID: PAT_MRT4530_89351C.1.pep
MVAIQHSGEDIGTNWSKVMLIAGAKMVTVPITGFHKGIAEEQKAAIS

SEQ ID NO: 193192 - protein, 167 aa, Oryza sativa
  unsure (1)..(167): unsure at all Xaa locations
  Clone ID: PAT_MRT4530_89352C.1.pep
HNNFIIIFLQPSQXXLISFPNHLRXLHAIPHQSGRFFYNRHSISNHRHHTQATHASVCFRTTQPFSTHQRQSHVSPHPSALSTHKHHRGTCASAYTHHPVVCSQHSAHLLQPLAPPSSPMQQHSHTGTVFGSSRLRPCQSGXQPPQAAIHPCPCSPPKNRTPCMWFP

SEQ ID NO: 193193 - protein, 317 aa, Oryza sativa
  Clone ID: PAT_MRT4530_89353C.1.pep
MTLRTGEATPPPQAHAEEEPGRGKRRRVVARETRLQQEEEEEEGASSEPETRPRPPPATPATAEEPAATAAGAEARAQLAINIRRMLAVEAERRGRIAERIGVQAEGPILTLEDTFCDIDDGSAKSQVARKVALGVSQSIVSLSSFAGRKRIRVCSGFVIRWNDSTSIGTILTSAALVRPPCGDDVRISMVDFHHNIALVEVTSNFKLQEAVILKYIIDKGDVLALGRSYEVLNNSGFIFADVSIIEQVAEGSPADIAGICQGDILMKCGGKFLSTAPEFGAMLMDKCKETMEEYDQETNGDFSAKRITVEVAYTDP

SEQ ID NO: 193194 - protein, 64 aa, Oryza sativa
  Clone ID: PAT_MRT4530_89354C.1.pep
VMFFRRVPHQENAVATNNISIWMGTIFIFALFSAFRSDSYTGCYFTWIMLQFIFIVIYAPSVLT

SEQ ID NO: 193195 - protein, 642 aa, Oryza sativa
  unsure (1)..(642): unsure at all Xaa locations
  Clone ID: PAT_MRT4530_89355C.1.pep
DTLRKKKNLVLVVWYLPIIPRVKXLLSIRQDGVIMCWHVSGRHXEGLQARHPANARXWRNINSMFLSFGNEPRNMRFVLSTDSMNPFDDWNXTHNNWSVVLSMYNLPPXLCMERRYLMSTLLLQGPXNXGNDIDVLVEPLLEVMATSXMIXVELRDMFCQQPFMLRAMIFVTISDYPALLYLLGYLKGTITYVVCMDDTVSLYIPFSKKLVYMCHRWFLLTGHKYGRMKXRFYNTVEDRKPPXVRSLSFMLRIISHIVKGWKRGENRKQKGTKVDPSSAPLFKKKSIFHKNLSYXEHLELCHSIDAIHIIKNVCESIIVTLLDITFKTKYGLKSWQDLTKLKIRKXASSYQIENKKYCLPPASISLTVEYKKSMCNCLHGLKVSTGYSSNTENLVSTKDLKITGMKYHDWYVXPIAIRGLPTRVHILVLTNITHMYVSFQQDFSEIRDVPLVSCVFVDTMSQLEKCFHYLFFDIMLHLXLVHLVHELEALGHMSCXHWMFLFERSMGLLKGTVPNYTIPETSIIESYNTKEKKHSXIIDYQYKELGRAHVTIFQGLKVLEPFIAQHLCELGISXPDHSVQWIVKEHKRIFTLWFKTQNIMDNGNAVDTQTIKLLAIGPAIMVTSWQAYHIFGCTFYTLEREA

SEQ ID NO: 193196 - protein, 478 aa, Oryza sativa
  Clone ID: PAT_MRT4530_89356C.1.pep
MAELRTSWKSMLCCVGGGGVAGVEDDVPPERRRVRGGGHHQRLLSSSSSASSASRVSLSSLSSTGTLTPEDLSLTLSGSNLYAFTYAEMRAVTGGFSRANYLGSGGFGPVYKGRADDGLRPGLAAQAVAVKYLDLDCGTQGHREWLAEVFFLGQLRHKNLVKLIGYCYEDEHRMLVYEYMSNGSLEKHLFKSLDGAMPWMRRMQTAVGAAKGLAFLHDADTPVIYRDFKASNILLDSDFNTKLSDFGLAKDGPQGDATHVTTRVMGTNGYAAPEYIMTGHLTDKSDVYSFGVVLLELLSGRHSVDRSRRHREQSLVDWTRKYLKKPDQLHRVVMDPAMEGQYSYKGAQEAALVAYKCLSPSPKSRPSMREVVKALEPILDMNDYLQIGTFVFTVVVEDNKKDDVTKTKQVDGENKVDMRIEATVEEKHQSHHDRYRQKNPNSAIHADIVLQRDGSIGSYTTSLRRHRRTPSYLKERGA

SEQ ID NO: 193197 - protein, 64 aa, Oryza sativa
  Clone ID: PAT_MRT4530_89357C.1.pep
LFCIDLGFKFLSWFLLVFFTISFICLCNIWEKLGEVMILYPYHISAFTMMIINFMHYHLISHYT

SEQ ID NO: 193198 - protein, 53 aa, Oryza sativa
  Clone ID: PAT_MRT4530_89358C.1.pep
MASVCSSMLAMQLEYTDYIYIDKWQDAVAGGHMNDMSVQNVQIQGFRSGRQNC

SEQ ID NO: 193199 - protein, 583 aa, Oryza sativa
  unsure (1)..(583): unsure at all Xaa locations
  Clone ID: PAT_MRT4530_89359C.1.pep
CWSWTRGVSAFRSIGRESTPPACPRHRHWVGRSHHRSWASMSSPXPAGLRRRRLVFPPPFMGIHVFTDRLAFAAADWCFRLHGWPIMPPLLGVYDFTTGLPPSPPTGVPATVHGRPCLHRPAGLRRRRLVFPRLVGHTTVHGRPCLHRXGWPSPPPTGVSAAGLPPSPPTGVPAYTVGWSHHRSWASTSSPXASLRRLVFPXRPASVAADWCPRLYGRLVTPPFMGVHVFTDRLAFADWIQIQICIKGIHGFKLISYAPGMDQSEHHHRLASTAADWCFRLHGWPIMPPLLGVYVFTDRLAFAAADWCFRLHGWPIMPPLLGVYVFTDRXPSPPPTGVSACTAGLYAAVVGRLRLHRPACXAAADWCFRLHGWPLCRRCWASTSSPTGRLVRRRLVLPPARXLIMPPLLGVYVFTDRPPRPPPTGVSACTAGLLCCRCWASTSSPNGRLVRCRLVFPPARLAFMPPLLGVYVFTDRXASTAADWCFRLHGWPIMLPLLGVYVFTDRPPRPLPTGVSACTAGLYAAVVGRLRLHRPAXLDRRRLVFPPARLAYYXPLLGVYVXFTDRPPHPPLTGVTACTAGLL

SEQ ID NO: 193200 - protein, 1731 aa, Oryza sativa
  unsure (1)..(1731): unsure at all Xaa locations
  Clone ID: PAT_MRT4530_8935C.1.pep
VPTFPESPILEGKILKNSRASKATPGLEWYIPGLEIELCSRXGCSGWLGLCNGMPRFKPEYLFGTEGFVQELRTMSFAIGFGTAPLYAQIPHDRDEEKCRVKVTLNTNHEDIPSLMFEAGGGNYIHACQEVARIAIGELRDCYSDQLADTEYRYHPRQPQGSDRGSYLEPAGIENDATTRHLVEMLWAMDEFRAEIVLAAQDREDRNRGKICKLEDKVDRLEKELAALKGEAPPQKARVRLTTRKRALFVPRYQLAPKMVLTHSNGNGPNNNNNNNNNNGENPTLAQVLVQQAQLMNMMMQQFQNQQNQGNNHAPPQNKLAEFLRVRPPTFSSTTNPVEASDWLHAIEKKLDLLQCTNQEKVSFASHQLHGPASEWWDHFRLNRTTAEPITWLEFTAALRKTHIPSGVVSPKKKEFRTLTQGSRSVTEYLHEFNRLARYAPEDVRTDEERQEKFLEGLNDELSYPLMTGDYHDFQKLVDMAIRQEDKYNRMEQKKRRIAHFKAQQGNSQRPCLAMGPQAVSQGGSSLVARPQRQFFNNNSGNNNRNQAPRPVATLAQHQPAKREPGNKPRVCFNCGEPGHYSDKCPKPRRVKVVPAQNNSTAPVSKARVNHVAAAEAQGAPDVILGTFLVNSVPATVLFDSGATHSFLSMSFARNHGMEVEDLRRPLMVSTPSNQALSSQRSPSVRIEIQGVPFLANLILLESKDLDVILGMDWLARYKGVIDCANRKVTLTSNDGQVVTVYALPSEPLRSSLNQVSLEEIPIVQDYPDVFPDDLPGMPPKRDIEFRIDLVPRKTPIHKRPYRMAANELAEVKRQVDDLLQKGYIRPSSSPWGAPVIFVEKKDHTERMCMDYRALNDVTIKNKYPLPRIDDLFVQLKGATVFSKIDLRSGQLRIKEEDIPKTDFTTQDGLFECTVMSFGLTNAPAFFMNLMNKVFMEYLDKFVVVFIDDILIYSRTKEEHEEHLRLALEKLREHQLYAKFSKCEFWLSEVKFLGHVISAGGVAVDPSNVEXVTNXKQPKTVSEIHSFLGLAGYYRRFIENFSKIAKPMTQLLXKDVKYKWSEECEQSFQELKSRLISTPILILPDPKKGFHVYYDASKLGLGCVLMQDGKVVAYASRQLHPHEKNYPSHDLELAAVVHALKIWRHYLFGTRTEVYTNHKGLKYIFTQPDLNMRQRRWLELIKDYDMGIHYHPGKANVVADALSRKGYCNATEGRRLPWELCKEFERLNLGIVSRGFVAALEAKPTLIDQVREAQINDPDIQEIKKNMRRGKAIGYLEDEQGTVWLGERICVPENKELKNAILKEAHDTLYSIHPGSTKMYQDLKEKFWWASIKREIAEYVAVCDVCXRVKAEHQKPTGLLQPLMIPEWKWEEIWMDFITGLPRTSSGHDSIWVIVDKLTKVAHFIPVRTTYSGSRLAELYMARIVCLHGVPKKIVSDRGSQFTSKFWKKLQEEMGSKLNFSTAYHPQTDGQIERVNQILEDMLRACALDFGGSWDKNLPYAEFSYNNSYQASLQMAPYEALYGRKCRTPLLWDQTRERQVFGTDILREVEEKVKITQERLRIAQSRHKSYADNRRRDLSFEEGDHVYLRVMPLWGVHRFHTKGKLAPRFVGPYKIVSRRGEVAYQLELPQCLAGVHNVFHVSXLKKCLRVHTEEANLEQIEIQEDLTYVEKPIRILETDERRTRNRVIRFCKVQWSNHSEEEATWEREEELKSAHPHLFASSSESRGRDSV

SEQ ID NO: 193201 - protein, 755 aa, Oryza sativa
  unsure (1)..(755): unsure at all Xaa locations
  Clone ID: PAT_MRT4530_89360C.1.pep
TVGLLCPGCWASTTSPPACLRRRRLVSSPIRSVGHTTVHGRPCLHRRHASVAAEWCLRLHGWPIMPPLLGVHDFTAGLPPSPPTGVIACTVGRSHHRSWASMSSPPACLRCRRVVPPPTRLAYYAAAVGRPRLHRRPASVAAEWCLRLHGWPIMPPLLGVYDFTAGLPPSPPTGVLAYTVGWSHHRSWASTSSPXPAGLRRCRLVFLPIRLADFAAVNGLHHLHHWLGSTGADWCFCHHXMDCFIPTSATSAVTEGILQSXVIIYFILYMIFCLFLCLTTSTGSPLTSESGAIDVISYFLNNFHNIYLDCLRHNLSTKVPIEWIQIQICIKGIHGFRLISYAPGMDQSEHHXTGLPSPRPTGVSACTAGLYAAIVGRLRLHQPACLRRRRLVFPPARLAFMPPLLGVYVFTDRLXFAAADWCFRLHGWPLCRRNWGYXVFTDRVAFVAADRCPCRKGWPNKPPLLGAXVFTDRLAFVADXSPRLHGWPXMPPLLGVYVFTDRLAFAAADWCFRLHGWPXMPPLLGVYVFTDRXASSAADWCFRLHGWPLXPPLLGVYVFTDRXASSAADWCHRLHGWPVITPTDAIFFTAGYIAVTTNRHQYLQHKLPTFAMAADWFLHFHGCMILLVLIGLTIFIAATTTDGHHRLPPPTXCYAAADWCFYLHNCASSLPVXTSSRQHNFVIMVERLHLYYLRHRQTLLLLLRKFYYFTNHDVFVNLDISACNAMIFYYNKXLSNIQDFYLDTFNTYLQSSNDY

SEQ ID NO: 193202 - protein, 62 aa, Oryza sativa
  Clone ID: PAT_MRT4530_89361C.1.pep
AYNTPSHAVNLAAHARHHRLRRARRPALVALAVMADPLASLARAMEVVPDSEMEVAPVSSSE

SEQ ID NO: 193203 - protein, 125 aa, Oryza sativa
  Clone ID: PAT_MRT4530_89362C.1.pep
LEICHSVTATANTSVSSVIADPFLLQLRQKSGGAQARRRRGREGFSGEGGGKRRARAPRWRRGAVTDPAPPMEAGREQLNPRAGGRRRAEDTRVAGDGGGDVSGGEAEVGEEDDDGVWPRRRFEV

SEQ ID NO: 193204 - protein, 182 aa, Oryza sativa
  unsure (1)..(182): unsure at all Xaa locations
  Clone ID: PAT_MRT4530_89363C.1.pep
MAAAHGGCDGGGARRLRRRRGTRHGQGAARQLYATTRRRGGGVVGWVEERRARDARSGSGDATAERRRREAMERAARRGSSGGTGLGEAARHGARGGGLAARGDETARSAAXGTARGGDGTRTRRRDGDGDGAAKVARGTRRRWDARAARGGTRRRRRGRGDEMAMATVARRQATRATARGG

SEQ ID NO: 193205 - protein, 163 aa, Oryza sativa
  Clone ID: PAT_MRT4530_89364C.1.pep
VTNVGDIQENRTKLVCSLCKVMHGACIRCSHGACRACFHPICARESKHQMEIWGKTGNTNVEMRAFCLKHSTVQETISIQNDRICAEEDTSQIELDDASLATQKIQQLRLTRNNKDKFTSSMIASSCSSSLKQTTELATSPSTARSVGSQETQITDMAVDRPI

SEQ ID NO: 193206 - protein, 1053 aa, Oryza sativa
  unsure (1)..(1053): unsure at all Xaa locations
  Clone ID: PAT_MRT4530_89365C.1.pep
MRQPDRQIXLHPADSNPQTGVSCATPFYYCRNHVSTVGAPGRGCVEFPINKRDGINFMSRRLRFRFGSFHFLSVDHFFKLLFSDLIQISQGETQSDFYHYLSXLIFXSQINLRLAYYAAAVGRLRLHXPACLRRRRLVPPPTRLAYYAAAVGRLRLHRRPASVAADWCLRLHGWPIMPPLLGVYDFTAGLPPSPPSGASAYTAGLLCRRCWASTTSPPACLRRRRLVPPPTRLAYYAAAVGRLRLHRQPASVAADWCPRLYGWLVTPPFMGVHVFTXTGLPSPPPTGVSAYTAGLXLCRRCWASTTSPPACLRRRRLVSSPIRLVGHTTVHGRPRLHRPXAFAAADWCFCLHGXPIMPLLLGVYDFTAGLPPSPPTGVLAYTVGWSHHRCWASTTSPPACLRRRRLVSPPIRSVGHTTVDGHRHLHRRPASVAADWCLRLHGWPIMPPLLGVYDFTTGLPPSPPTGVPAYTVGWSHHRXWASSSSPPACLRRRRLVPPPTRLAXYAAAVGRLRFHRXTAFVAADWIQIQICIKGIHGFKLISYAPGMDQSEHHHRXPRPPPTGVSACTAGLLCRRCWASTSSPTGLPSPLPTGVSACTAGLYAAVVGRLRRHRPACLRRCRLVFPPARLAFMPPLLGVYVFTDRLAFAAADWCFRLHGXAFMPPLLGVYVFTDRLAFAAADWCFRLHGWPXMPPLLGVYVFTDRLAFAAADWCFRLHGWPIMPPLLGGYVFTDRLAFAAADWCFRLHGXLYAAVIGRLRLHRPACLRRCRLVFPPARLAFYAAVVGRLRLHRPAASSAADWCFRLHGWPIMPPLLGVYVFTDRLAFAAADWCFRLHGWPIMPPLLGVYVFTDRLAFTAADWCFRLHGWPVITPTDAIFFTAGYIAVTTNRHQYLQHKLPTFVMAADWFLHFHGCMILPVLIGLTIFIAATTTDGHHHLPSPTDYAAADWCFYLHNCASSLPVCFCCRRLVFTSLRQYNFVIMVERLHLYYLRHWQTLLLLLRKFYYFTNHDVFVNLDISACNAMIFYYNKXLSNIQDFYLDTFNTYLQSSNDY

SEQ ID NO: 193207 - protein, 341 aa, Oryza sativa
  unsure (1)..(341): unsure at all Xaa locations
  Clone ID: PAT_MRT4530_89366C.1.pep
AYLLRSRNGSVRTSPPARRRHRRLESSPIRLIGHTTVVGRLRLYRPAASSTVDWCLRLYGWLVTPPLLGLYVFTDRLAFVAADWCLRLHCRPIMRLLLGVYVFTNRLAFTAADXCLRLHGWPIMPPLLGVYVFTDRPPRPPPTGVSACTAGLLCRRCWASMSSPTGXPCPPPTGVTACTAALLCRRCWASTSSPTGXPPPPPTGVSACTAGLLCRYCWASTSSPTSRLIRRRLVSPPARLAYYAAVVGRLRLRRPAXLVRRRLVFPPARLAYYAAVVGRLRLHRPAASSAADWCFRLHGWPIMPPLLGVYVFTDRPLHRPAASSAAVWCHRLHGWPVMTPT

SEQ ID NO: 193208 - protein, 948 aa, Oryza sativa
  unsure (1)..(948): unsure at all Xaa locations
  Clone ID: PAT_MRT4530_89367C.1.pep
MGVHVFTDRLAFADWCFRLHGWPIMPPLLGVYDFTTGLPPSPPTGVLAYTVXLVTPLFMGVHVFTDRLAFADWCFRLHGWPIMPPLLGVYDFTAGPPPSPPSGASAYTAGLLCRRCWTSTTSPPACLRRRRVVPPPTRLAYYAVAVGRLRLHRRPASVAAEWCLRLHGWSIMPPLLGVYDFTAGPPPSPPSGASAYTAGLLCRRCWASTTSPPACLRRRRVVPPPTRLVYYAAAVGRLRLHHRPASVAADWCPRLYGWLVIPPFMGVHVFAXGWPSPPPTGVSAYTASLLCRRCWASTTSPPACLRRRRLVSPPIRSVGHTTVDGHRHLHRRPASVAADWCLHLHGWPIMPPLLGVYDFTAGLPPSPPIGASAYTAGLLCRRCWAFTTSPPACLRRRRVVPPPTRLAYYAAAVGRLRLHRRPASVAADWCLRLHGWPIMPPLLGVYDFTAGLPPSPPSGASAYTAGLLCRRCWASTTSPPACLRHRRLVPPPTRLAYYAAAVGRLRLHRRPASVAAEWCLRLHGWPIMPPLLGVYDFTAGLPPSPPIGASAYTAGLLCRRCWASTTSPPACLRRRRVVPPPTRLAYYAAAVGRLRLHRRPASVAAEWCLRLHGWPIMPPLLGVYDFTAGLPPSPPSGASAYTAGLLCRRCWTSTSSPLAHLRCRRLVFPLTRLTYYAAISGHLRFHRRPPSSPPTGVFIVIDGRLCSHIGHFCHHQGEYYKAKIQIQICIKGIHGFKLISYAPGMDQSERHHRLASTAADWCFRLHGWPIMLPLLGVYVFTDRXASSAADWCFRLHGWPLXPPLLGVYVFTDRPPRPPPTGVSACTAGLYAAVVGRLRLHRPAASSAADWCFRLHGWPLCCRCWASTSSPTGRLVRCRLVFPPARLAFMPPLLGVYVFTDRPPRPPPTGVSACTAGLLCCRYWASTSSPTGRRIRRXLVSPPARLACY

SEQ ID NO: 193209 - protein, 1909 aa, Oryza sativa
  Clone ID: PAT_MRT4530_89368C.1.pep
MTAHARRAAALTGERKGRRKRDSSPRRWRRPAWKETSGDDRRRGGTDGRRRHPRRRWRGVRRGDDDHGGLNCRPEMEGREKLTGSRGERCSGRDTTEGASSSRVSPPHGREDQPSVPPVGGVGCRAFVASLRNVRWPPRFRPTITEEYDGSVNPTEFLQVYTTGIEAAGGDDRVMANFFPMALKGQARGWLMNLPPASVHSWEDLCQQFTMIFQGTYPRPGEEADLHAVQRGDDESLRSYIQRFCQVRNTIPCIPAHAVIYAFRGGVRHNRMLEKIASKEPQTTAELFQLADRVARKEEAWTWNPSGSGVAASAAPGSAAQTGRRDRRRKKRSVHSGDEGHVLAVEGVPRATRKGRPASDKKKEAGTPSRERPASKWCSVHNTSLHDLADCRAVKNLAERTRKWEEDRRQERREGKSAASSLLLNGEEPGATIATVDGGACAHVSRRSFKAMRRELLAAAPTHEATRRARWSEVALTFDQTDHPPCVARGGQIAMVVSPTICNVKLGRVLIDGGAALNILSPAAFDAIKAPGMVLQPSQPIIGVTPGHTWPLGHIDLPVTFGGSANFRTERVNFDVADLSLPYNAVLGRPALVKFMAAVHYAYLQMKMSGPGGPISVRGDLKVALACMEQRADHLAAVTKPEGGDERLGTSAPTAPRQRIATCDEVPEDALVSFLRANADVFAWRPADMPGVPREVIEHRLAVRPGARPVRQKVRRQAPERQAFIREEVARLLEAGFIREVVHPEWLANPVVVPKANGKLRMCIDYTDLNKACPKDPYPLPRIDQIVDSTAGCDLLCFLDAYSGYHQIRMAREDEEKTAFITPVGTYCYTSMPFGLKNAGPTFQRTTRISLGSQIGRNVEAYVDDLVVKTRNQETLLSDLAETFENLRSARIKLNPDKCVFGVPAGKLLGFLVSARGIEANPEKIRAIERMRPPSKLRDVQCVTGCMAALSRFISRLGEKALPLFKLLKRSGPFTWTEEAEHALTQLKAYLSSPPVLVAPEPNEPLLLYLAATPQVVSAALVVERDEDNPHFAHPRPVLTWPGSEQGGEAPESNGGLRPLTTGVGPLPACQTVLGAPDPQEGPEATAGRPHLTPFGPEANPVLTRPGRKQGEEAPEPNGGLRPLTTGVGPLPACPTTPGAPDPQDGPEATVGRPLLSSSDPEDIGTEGECAPRGHLDEECPGDAAPSKEGRPRRKVQRPVYFVSEALRDAKTRYPQAQKMLYAILMASRKLRHYFQAHRVTVVTSYPLGQILHNREGTGRVVKWAIELSEFDLHFEPRHAIKSQALADFVAEWTPAPETVSIPEASTDPFQLPRTTHWVMQFDGSLSLQGAGAGVTLTSPTGDVLRYLVRLDFRATNNMAEYEGLLAGLRVAAGLGIRRLLVLGDSQLVVNQVCKEYRSSDPQMDAYVRQVRRMERHFDGIELRHVPRRDNMIADELSRLASSRAQTPPGAFEERLTQPSARPDPLGETDAPDRPPRPVGVQASGPEGSAPSSLRLIAWISEIQTYLTDKTLPEDREGSERVQRISKRYVLVEGTLYRRAANGILLKCIPQEQGVELLADIHEGECGAHSASRTLVGKAFRQGFYWPTALNDAVDLVRRCRACQFHAKQIHQPAQALQIIPLSWPFAVWGLDILGPFKRAPGGFEYLYVAIDKFTKWPEAYPVVKIDKHSALKFIKGITARFGVPNRIITDNGTQFTSELFGDYCEDMGIKLCFASPAHPRSNGQVERANAEILKGLKTKTFNILKKHGDSWIEELPAVLWANRTTPSRATGETPFFLVYGAEAVLPSELTLRSPRATMYCEADQDQLRRDDLDYLEERRRRAALRAARYQQSLRRYHQRHVRARPLCVDDLVLRRVQTRAGLSKLSPMWEGPYRVIGVPRPGSVRLATGDGTELPNPWNIEHLRRFYP

SEQ ID NO: 193210 - protein, 804 aa, Oryza sativa
  unsure (1)..(804): unsure at all Xaa locations
  Clone ID: PAT_MRT4530_89369C.1.pep
MWWPSLGTVYQEKTLHEAVDGFRRLLLIEALRPKLIDAHDVSKPRHHDTAAIVAYSATRVPLAVSECSSLPFHADGRAARLAQDTGIYSATRSKHSRSNNHSLLAASLPRLVCAAAVADSDIVFTTGLPPSPPIGASAYTAGLLCRRCWASTTSPPACLRRRRVVPPPTRLAYYAAAVGRLRLHAAGLPPSPPIGASAYTAGLLCRRCWASTTSPPACLRRRRLVPPPTRLAYYAAAVGRLRLHRRPASVAADWCLCLYGWLVTPPLLGVYDFTAGLPPSPPTGVFAYMVGWSHHRCWASTSSPTGRLVRRRLVFPPARLAYYAAAVGRLRLHRRPASVAAEWCLRLHGWPIMPPLLGVYDFTAGLPPSPPIGASAYTAGLLCRRCWASTTSPPACLRRRRVVPPPTRLAYYAAAVGRLRLHRRPASVAAEWCLRLHGWPIMPPLLGVYDFTAGLPPSPPTGVFIVIDGRLCSHIGHFCHHQGEYYKAKNGSVRTSPTGRLARRRLVLPPARLAFMPPLLGVYVFTDRLAFAAAEWCFRLHGWPLCRRCWASTSSPTGXLCRRRLVFPPARLAFMPPLLGVYVFTDRLAFAAADWCFRLHGWPXLCRRCWASTSSPTGXPRPPPTGVSACTAGLXYAAVVGRLRLHRPACLARRRLVFPPARLAXMPPLLGVYVFTDRPPRPPPTGVSACTAGLXYAAVVGRLRLHRPAXLARRRLVFPPARLAXMPPLLGVYVFTDRXASPAADWCFRLHGWPXLCCRCWASTSSPTGRLARRRLVFPPARLAYYAAVVGRLRLHRPAAASAA

SEQ ID NO: 193211 - protein, 410 aa, Oryza sativa
  Clone ID: PAT_MRT4530_8936C.1.pep
MADNEKGNKVRSQDIGTSSSRVNEAPDTSCVTLVQHLINQNRLLIEILQQHQTPILNLSQIQPQVQLEAVQALTPQVSMPPASRRTHGDVPHVDPKEASNICFMCDEQGHYARERPQQKRKTPMRTEDEVRMTRRQRRNTFRGAPQLTEHLLANGGRVSDSEDSDQVSSDDEDEMECKACSRCGETRHVASSCATICVHCEEDHPPDRCPTSRITCFFCEGTDHVPKDCQFSFLLTKKMANQPASSNGEKHQGNTNPRQDYSFSLTPVPGQRNQNEKRKCRVREDICCFNCQGMGHFADKCPKPRNITASTSVHATPCNLKLAPQRIVIHASRSSPIARVATAPTPASALPQGVNAHFQPQQRIVVDGRSCVSPRPTPGQAKGNRPPEGDTKQKTVIRFNQQSEGSFSCE

SEQ ID NO: 193212 - protein, 1754 aa, Oryza sativa
  Clone ID: PAT_MRT4530_89370C.1.pep
MAEQAKVHDLSPSVSGDDGEPNPRRRARTPPPPPHQSPKQGEALERVDKSAASPVAGDTGERRDGERRLLVYGDGSTPQGALQAAGALLRHPPVVHDPESPAQRWLDDVANLVMTAQQRLGAGGRSATTKTSGAATTAGQPDTPADPTPSRPPSPPVPRKGSSYTSDQAVTHSRLCSGRDTTEGASSSRVSPPHGREDQPSVPPVGGVGCRAFVASLRNVRWPPRFRPTITEEYDGSVNPTEFLQVYTTGIEAAGGDDRVMANFFPMALKGQARGWLMNLPPASVHSWEDLCQQFTMIFQGTYPRPGEEADLHAVQRGDDESLRSYIQRFCQVRNTIPCIPAHAVIYAFRGGVRHNRMLEKIASKEPQTTAELFQLADRVARKEEAWTWNPSGSGVAASAAPGSAAQTGRRDRRRKKRSVHSGDEGHVLAVEGVPRATRKGRPASDKKKEAGTPSRERPASKWCSVHNTSLHDLADCRAVKNLAERTRKWEEDRRQERREGKSAAVPSGKRRSEAKQKAPAVDIDDGDDDLGFQEPGATIATVDGGACAHVSRRSFKAMRRELLAAAPTHEATRRARWSEVALTFDQTDHPPCVARGGQIAMVVSPTICNVKLGRVLIDGGAALNILSPAAFDAIKAPGMVLQPSQPIIGVTPGHTWPLGHIDLPVTFGGSANFRTERVNFDVADLSLPYNAVLGRPALVKFMAAVHYAYLQMKMSGPGGPISVRGDLKVALACMEQRADHLAAVTKPEGGDERLGTSAPTAPRQRIATCDEVPEDALVSFLRANADVFAWRPADMPGVPREVIEHRLAVRPGARPVRQKVRRQAPERQAFIREEVARLLEAGFIREVVHPEWLANPVVVPKANGKLRMCIDYTDLNKACPKDPYPLPRIDQIVDSTAGCDLLCFLDAYSGYHQIRMAREDEEKTAFITPVGTYCYTSMPFGLKNAGPTFQRTTRISLGSQIGRNVEAYVDDLVVKTRNQETLLSDLAETFENLRSARIKLNPDKCVFGVPAGKLLGFLVSARGIEANPEKIRAIERMRPPSKLRDVQCVTGCMAALSRFISRLGEKALPLFKLLKRSGPFTWTEEAEHALTQLKAYLSSPPVLVAPEPNEPLLLYLAATPQVVSAALVVERDEDNPHFAHPRPVLTWPGSEQGGEAPESNGGLRPLTTGVGPLPACQTVLGAPDPQEGPEATAGRPHLTPFGPEANPVLTRPGRKQGEEAPEPNGGLRPLTTGVGPLPACPTTPGAPDPQDGPEATVGRPLLSSSDPEDIGTEGECAPRGHLDEECPGDAAPSKEGRPRRKVQRPVYFVSEALRDAKTRYPQAQKMLYAILMASRKLRHYFQAHRVTVVTSYPLGQILHNREGTGRVVKWAIELSEFDLHFEPRHAIKSQALADFVAEWTPAPETVSIPEASTDPFQLPRTTHWVMQFDGSLSLQGAVDLVRRCRACQFHAKQIHQPAQALQIIPLSWPFAVWGLDILGPFKRAPGGFEYLYVAIDKFTKWPEAYPVVKIDKHSALKFIKGITARFGVPNRIITDNGTQFTSELFGDYCEDMGIKLCFASPAHPRSNGQVERANAEILKGLKTKTFNILKKHGDSWIEELPAVLWANRTTPSRATGETPFFLVYGAEAVLPSELTLRSPRATMYCEADQDQLRRDDLDYLEERRRRAALRAARYQQSLRRYHQRHVRARPLCVDDLVLRRVQTRAGLSKLSPMWEGPYRVIGVPRPGSVRLATGDGTELPNPWNIEHLRRFYP

SEQ ID NO: 193213 - protein, 2248 aa, Oryza sativa
  Clone ID: PAT_MRT4530_89371C.1.pep
MAEQAKAHDLSPSVSGDDGEPNPRRRARTPPPPPHQNPKQGEALERVEKSAASLVAGGAGERRDGERRLLVYGDGSTPQGALQAVGALLRHPPVVPDPESPAQRWLDDVANLVMTAQQRLGAGGRSATTKTSGAATTGSVSSRRRARRAAAAARHSAATPSSTPSTREDQHGEPDARLNIERRRNGRRTPRATEGASSSRVSPPHGRKDQPSVPPVGGVGCRAFVASLRNVRWPPRFRPTITEKYDGSVNPTEFLQVYTTGIEAAGGDDRVMANFFPMALKGQARGWLMNLPPASVHSWEDLCQQFTMNFQGTYPRPGEEADLHAVQRGDDESLRSYIQRFCQVRNTIPCIPAHAVIYAFRGGVRHNRMLEKIASKEPQTTAELFQLADRVARKEEAWTWNPSGSGVAASAAPGSAAQTGRRDRRRKKRSVHSGDEGHVLAVEGVPRATRKGRPASDKKKEAGTPSRERPASKWCSVHNTSLHDLADCRAVKNLAERTRKWEEDRRQERREGKSAAVPSGKRRSEAKQKAPAVDIDDGDDDLGFQEPGATIATVDGGACAHVSRRSFKAMRRELLAAAPTHEATRQARWSEVALTFDQTDHPPCVARGGQIAMVVSPTICNVKLGRVLIDGGAALNILSPAAFDAIKAPGMVLQPSQPIIGVTPGHTWPLGHIDLPVTFGGSANFRTERVNFDVADLSLPYNAVLGRPALVKFMAAVHYAYLQMKMPGPGGPISVRGDLKVALACMEQRADHLAAATKPEGGDERLGTSAPTAPRQRIATCDEVPEDALVSFLRANADVFAWRPADMPGVPREVIEHRLAVRPGARPVRQKVRRQAPERQAFIREEVARLLEAGFIREVIHPEWLANPVVVPKANGKLRMCIDYTDLNKACPKDPYPLPRIDQIVDSTAGCDLLCFLDAYSGYHQIRVAREDEEKTAFITPVGTYCYTSMPFGLKNAGPTFQRTTRISLGSQIGRNVEAYVDDLVVKTRNQETLLSDLAETFENLRSARIKLNPDKCVFGVPAGKLLGFLVSARGIEANPEKIRAIERMRPPSKLRDVQCVAGCMAALSRFISRLGEKALPLFKLLKRSGPFTWTEEAEHALTQLKAYLSSPPVLVAPEPNEPLLLYLAATPQVVSAALVVERDEDNPHFAHPRPVLTWPGSEQGGEAPESNGGLRPLTTGVGPLPACQTVLDAPDPQEGPEATAGRPHLSPFGPEANPVLTRPGRKQGEEAPEPNGGLRPLTTGVGPLPACPTTPGAPDPQDGPEATVGRPLLSSSDPEDIGTEGECAPRGHLDEECPGDAAPSKEGRPRRKVQRPVYFVSEALRDAKTRYPQAQKMLYAILMASRKLRHYFQAHRVTVVTSYPLGQILHNREGTGRVVKWAIELSEFDLHFEPRHAIKSQALADFVAEWTPAPETVSIPEASTDPSQLPRTTHWVMQFDGSLSLQGAGAGVTLTSPNGDVLRYLVRLDFRATNNMAEYEGLLAGLRVAAGLGIRRLLVLGDSQLVVNQVCKEYRCSDPQMDAYVRQVRRMERHFDGIELRHVPRRDNMIADELSRLASSRAQTPPGAFEERLTQPSARPDPLGETDAPDRPPRPVGVQASGPEGSAPSSLRLIAWISEIQTYLTDKTLPEDCEGSERVQRISKRYVLVEGTLYRRAANGILLKCIPQEQGVELLADIHEGECGAHSASRTLVGKAFRQGFYWPTALNDAVDLVRRCRACQFHAKQIHQPAQALQIIPLSWPFAVWGLDILGPFKRAPGGFEYLYVAVDKFTKWPEAYPVVKIDKHSALKFIKGITARFGLETHGSNLTEEQLETHTISAWKEAKRQTYARNEGSWRANHHLVHATPYESLREIAMKILQNGVSTVPIMFSSSPDGSYPQLLHLASLSGILKCICRYFKNSQGNLPILSQPVCTIPLGTWVPKIGDPNGRPLAMLRPNTSLSAALNLLVQAGVSSIPIVDDNDSLLDTYSRSDITALAKDKVYTHIRLDEMTIHQVKVKVKVQVQRAVRPWSLSSNGDGLGVERKDLERLNEKVKEHIEEKAGRAVAKHSQLVKEVDVRLSARGGELSRGPKICRCEITLFTKRHGVIRAEEDAESTYASIDLASSIIKRKLRKIKEKETDVRHLKGTKPPVSDWPPSLLDNNDDDAQAQLKDLEEAVGAEDEDTVLTKVVRTKVFEMPPLSVEEAMEQLVNVDHNFYAFRDEKTGEMNVLYKRKEGGFGLIVPKGDGHLHKETIPNSDHHHPSLAA

SEQ ID NO: 193214 - protein, 615 aa, Oryza sativa
  unsure (1)..(615): unsure at all Xaa locations
  Clone ID: PAT_MRT4530_89372C.1.pep
MHRRRLQPRRCLPAVLRRADGHQRRPRLRPPPPPLRLRINLSCWASTTSPPACLRRRRVVPPPTRLAYYAAAVGRLRLHRWLASVAAEWCLRLHGWPIMPPLLGVYDFTAGLPPSPPSGASAYTAGLLCRRCWASTTSPPACLRRRRVVPPPTRLAYYAAAVGPLRLHRRLASVAAEWCLRLHGWPIMPPLLGVYDFTAGLPPSPPSGASAYTAGLLCRRCWMSTSSPLAHLRCRRLXIQIQICIKGIHGXFKLISYAPGMDQSEHHHRLASTAADWCFRLHGWPIMPPLLGVYVFTDRLAFAAADWCFRLHGWPLXPLLLGVHVFTDRXPSPPPTGVSACTAGLXYAAVVGRLRLHRPACXAAADWCFRRPACLRRRRLVFPPARLAFMPPLLGVYVFTDRLAFAAADXPPRPPPTGVSACTAGLLCRRCWASTSSLTGRLVRCRLVFPPARWPIMPPLLGVYVFTDRXASSAADWCFRLHGWPIMPPLLGVYVFTDRPLRPPPTGGTACTAGLVDWPYHLHRWSSRLLLTSALASTSEDLIVIIGCYIAIDWITDIVIFIIGVGTMHLKRCQTVKLYIAVPLTFLYISQGAVWVFKQLIGYNIVAFCHPSTVF

SEQ ID NO: 193215 - protein, 84 aa, Oryza sativa
  unsure (1)..(84): unsure at all Xaa locations
  Clone ID: PAT_MRT4530_89373C.1.pep
SHSFSNSLLHIISLQFIYYFRTGILYAALPLFFLTTXFVAAYYSLPASLSSEILLFLYFSIQLPLQLLIITILAQYFFSTYYYI

SEQ ID NO: 193216 - protein, 632 aa, Oryza sativa
  Clone ID: PAT_MRT4530_89374C.1.pep
MALSLSPTLQGWISQNITTGLPSPPPTGVSACTAGLLCRRCWASMSLPPAAFAAADWCLRLHGWPIMPPLFWASTSSPSAAFAAADWCLRLHGWPIMPSSLGVYIFTDRLAFAAANWCLRLHGWPIMPPLLGVYVFTDRLAFAAADCLLCRRRWASTSSPTGLPLPPPTGVFACTADLLCRRLLGVYAFTDWLAFAAADCLLCCRCSASSTSLTSRLVFRRLVSPPARLAYYAAVVGRSLCRRCWASTTSPPACLRRRRLVSSPIRFVGHTTVHGRLRLHRPACLRRRRLVSSPARLTYYVAVCWASTLSPIGLPSPPLTAYYATVVRRHRLHRPVASSAADWCLRLHGWPIMPPSLGVYIFTDRLAFAAANWCLRLHGWPIMSPLLGVYIFTDRLAFAAADWCLRLHGWPIMPPSLGVYVFTASCLRRHRLVSPPARLAYYAAVVLGVYVFTVGCLRRRRLVSPPTRLAYYAAVVLGVYVFTAGSPSPPSTGVSACTAVMPPSTGVFIFTTIHLRYRFATSPTTTSTGALTSRHASTSIMPCYFTSGVPIFKISTRTSSMRIFTQAMTTRRQEATVLDSIFSCFSTNQRVGGYINTRLSKFDKLDVKMKQSINQRVNSRSYYLRLRFRADI

SEQ ID NO: 193217 - protein, 516 aa, Oryza sativa
  unsure (1)..(516): unsure at all Xaa locations
  Clone ID: PAT_MRT4530_89375C.1.pep
TCLNPCLCIHPLLGLVRYPPLLDVYVFTDRPARLAYYAAVVGCLHLHRPAALSAADWCFRLHGWPIMPLLLGVYIFTDRXASSTADWCFRLHGWPIMPPLLGVYLFTDRXASSAADXCFRLHGWPXLCRHCWASTSSPTGRLVRRRLVSPPARLVYYAAVVGRLHLHRPAASSAADWCFRLHGWPIMLPLLGVYVFTDRPSRPPSTGVSACTTGLYVAVTANRRHHLQHKLSTSAADWFLHSHGCMILPVLIGLIVFMPSPLRLVYTATTTDGHHHLSSLTGYVAADWSIYLHNYTSSPPVFLCCHXLVFTSSRLCNFVTMXEQLHFYYLRHRQTLLPLLRKLCYFTNHDDYKSFDTLAYVTKYDAVLFYYNKXVFQSSIFIFTQAMTTRRQATVLDSMFSCFPTNQRTFYFSNFNYFTASPLAASVIADLLFRLHGXPTMQTLMSIFVIIIGCYTAVDXITDIVIFINNLSSLFNIAHSTAIGGQLRHHIXSSMLLLIIITVGCVCRRRLFSSSS

SEQ ID NO: 193218 - protein, 224 aa, Oryza sativa
  unsure (1)..(224): unsure at all Xaa locations
  Clone ID: PAT_MRT4530_89376C.1.pep
HTSLVTPSSATPGCSIYLCNLDDQXLLRVCMKYLYVFPPSAGGAANTVRAALGRALVHYYPLAGRLRHRANDRLALKCNAEGALFDEALLPTLTAXDXLRAGATAKPHKAWRKLLYIVHADAFVAVPPVGVHVTQLGCGGMVXCTAISHXVCDGIASXDLLHAWAVFAAADLDLAAGRDDDLSEVLHDRRALRTCCLARVDFTHLEYHTNRSSSRLLVIQPQMM

SEQ ID NO: 193219 - protein, 99 aa, Oryza sativa
  Clone ID: PAT_MRT4530_89377C.1.pep
MARALLAPCPPPLAPFASTGTRDREDVDFFFFPFLVLYKCGRLHAIQGLLVEPRMPSKDYLLNLANLTAGKRSGNKLLIVVFYHSGAFTIELVSSPMYQ

SEQ ID NO: 193220 - protein, 54 aa, Oryza sativa
  unsure (1)..(54): unsure at all Xaa locations
  Clone ID: PAT_MRT4530_89378C.1.pep
LFFCLFFLSLSRASLLRKTGRQRQLLTLCGSSTSLLYSGWISIFYFXSXXXXRS

SEQ ID NO: 193221 - protein, 75 aa, Oryza sativa
  Clone ID: PAT_MRT4530_89379C.1.pep
SCRNSKLPSSCNSRNWKWYNKTKPLRLRTKSTRMENTSSGKHMLPEDFVKKQRAYFEEVDAFELPEEEASETDLE

SEQ ID NO: 193222 - protein, 391 aa, Oryza sativa
  unsure (1)..(391): unsure at all Xaa locations
  Clone ID: PAT_MRT4530_8937C.1.pep
MSWHRAGVLLXGGSVLPTCPGGSGRRXGVGSVLLFMARMGWELCHVFRPYTVVMFNREKGKNVSRYASSNSSFQLNPPLASRELTRAHPWSIPSMLLSSQLPLVGSPDQNQYVFDRAFATQVDELPMPEEDVPFCHDCREQGHYALNCPWVYAKEAPSFGLAGQTSLNQPPRTKSSLQPSVQRREPNGENPLNPGNCSPPSFSYHVGSHTKQAKGQKSKNQKRKAPMRTEEEVRKMTITSTEWPPARITIPTRQRGNAFRGARQLTQHLLIHGGRVSDSEGSDQVSSHDEDESPRHLGEEEMESKACTRCGEIGHVASMCLTLCPHCEEDHPPGECPTRKPQQRIVVDGRSCVSPRPTPGRAKGNQSQEGDTKQNTVLCFKXQSEGSFSCE

SEQ ID NO: 193223 - protein, 42 aa, Oryza sativa
  Clone ID: PAT_MRT4530_89380C.1.pep
VLLCLRHLNTKKAQKNSTKRETIRTPDFIHPRFINSRRPHEI

SEQ ID NO: 193224 - protein, 45 aa, Oryza sativa
  Clone ID: PAT_MRT4530_89381C.1.pep
MREEIDLGGKLGLWGQVAESSLIRIVQNKSKGQEQSRGPAKRRAR

SEQ ID NO: 193225 - protein, 123 aa, Oryza sativa
  Clone ID: PAT_MRT4530_89382C.1.pep
MGAALHAALLLRRRRLGDSSARPRITCHCGTLLTGGGSSDRPPPLWIRCCNPLLFCVIHLFFTFPDAMSKWIGACSKLYVCVQLAMALMRAKSYTETCPCDKSPKRKKNNRNTHLGKRNGKHN

SEQ ID NO: 193226 - protein, 1080 aa, Oryza sativa
  Clone ID: PAT_MRT4530_89383C.1.pep
MIKPRVNWSDHANAVQSSCIKDEFLSSSFLFSLPTQRPNQEADCTGMLPLRSAACRIQGLERLQAPSIEKAWRSLRNTQVARKNYLRPGLSGKVKDCDSDHAHTYGTSSSYNVNKMDSVSRNRNPTQESMHQTTESGTMEKNSSHLPAGTKSCTRTYLNNHVVQADTITTTNQSLARTGPELFKTAPFIDNMCDDAKLDAMDEDELLASIDVDRIVMEHYQATNTPRGSSKSPLEKCNFNGFDENNLPQELSIMCDHGSKLAFCPEAKSHLLEMKDNLLAISHELIDGQLSPQQSDDLHQKRALLKKQIELLGEYTARLTQDEERQQSHSMASTTAHQGHHPTSILSSSFVKDTNIFQSPIYTRNEPGESGLCFSSAPYSYMDGLSMPLPSVQRDYTPRAIDISYTEGSGDKQWSSTHFAWTKELEANNKRVFGNRSFRPNQREIINATMSGNDVFVLMPTGGGKSLTYQSQNVSIFEVGTGIKRVGRNDWRKANISAAYLSASMEWSEQQEILRELMSPTCTYKLLYVTPEKIAKSDALLRQLENLYSRGHLSRIVIDEAHCVSQWGHDFRPDYQFFIHQHLGILKQKFPQTPVLALTATATASVKEDVVQVLGLANCIIFRQSFNRPNLRIAGINKPDVRFVIHHSLPKSIEGYHQECGRAGRDSQLSTCVLFYNYSDYIRLKHMVTQGFAEQGTSAPRGGSSQEQALETHKENLLRMVSYCENDVDCRRLLQLIHFGEMFNPSCCAKTCDNCLKELRWVEKDVTNIARQLVDLVMMTKQTYSTTHILEVYRGSVNQNVKKHRHDTLSLHGAGKHLAKGEAARILRHLVIEEILIEDVKKSENYGSVSSVLKFKTYEKIYQRFPTPEKAPKMGVLDESSVPRINKTNQQSQVDGSLAAELYEALQCLRTQIMDENPQLLAYHIFKNETLKEISNRMPRTKEELVEINGIGKNKLNKYGDRVLATIEDFLARYPNATRKTSSGGSNEHSEAVKKRRGFSVTNTSTNCDDFEERTVQSKKRAAKTRTRQEISDAASIVQDVRYIDLELDGCEQVNEVPYSVQKPVASGRVLPAWQSARIA

SEQ ID NO: 193227 - protein, 158 aa, Oryza sativa
  Clone ID: PAT_MRT4530_89384C.1.pep
LKAFESIFGGSSVKRSTACSVRRCLYQAAALLPRHRATVANGIGGEGKSRSAAGPPPHRWPSSPVEPLPLLLAEPSPLLLAESRIPRRGPRPPRRAAASMGPPHPPRRAVLAAGPPPRWLSSRLTEPLPPPALLLIEPLPPPAPPRRATDCPPPPCKL

SEQ ID NO: 193228 - protein, 38 aa, Oryza sativa
  Clone ID: PAT_MRT4530_89385C.1.pep
TKTRGWTYRGIRPACRRRGSSCPQRDGGGPAGLASSRA

SEQ ID NO: 193229 - protein, 1153 aa, Oryza sativa
  unsure (1)..(1153): unsure at all Xaa locations
  Clone ID: PAT_MRT4530_89386C.1.pep
MDLLVAQITADLRSSDALRQSSALLQALQQCAAGRDVSAVARTVATEILAAPSSAVCKRLALDLLRALPLPPDLLDPLLLSSLASDLSFPDPDVAASSIASFPSLPSHLLPSLLSSAHADIAAALSSPAESLRLAAVTSLSSLLPRDDLALMCSSNPSLMAHATTWWGRLAELALDSADAVAAAAFEALARLFQELDARRMSRLAGDKLVDGEGALAVRAQWAADAINFIWSRRNMLIARSMVMPVERFRVTVYPLVHAAKMVASGAVNTLRRIAKPGDTTIADSVESSAEKLVGVSDIVSHLLPFLSSLDPPLVFEVGINMLALADVPGGKPEWASAATTXILTLWDRQEFSSMRETIVRAVVTNLHLLDLGMQVSLFKRLLQMVRNLRAESDRMHALACICRTALCVDLFAKESVRRGQKPVPGTDVISLFEDVRAKDDLNSITSKSLFREELVASLVESCFQLSLPLPEQNNSGTESRVIGALAYGTGYGALNWTEPALDVVEVCRPCVLWDCNGRTYAIDCYLKLLVRLCHIYDTRGGVKTIKAGASQDQILNETRLRNLQLQLIRDLREVHTPRISSRLIWAISEHFDLEGLDPLLADDPEDPLNIIISNMHKILFNTESSTTTSNRIQDMQSVLICAQRLGTRNARAGQLLSKELEEYRASTSADFVTKHQSRYVLQIIKYVTSHPDNRWVGVGDATGDYPFSHHKLTVQFSEASAAQDRKLEGLVHKAILELWRPSPTQLSLLQTKGIGTLHKELPKAYTLTGSSDPCYIEAYHLADPTDGRITLHLKILNLTEPELNRVDIRVGLSGALYYMDGFSRTVRHLRNLVSQDPVQSSVTVGVSHFERCSLWVQVLYYPFDGSVGSTDYEGDYEESSQMTRQKRAFRAELGEPVVLRCQPYKIPLAELLLPYECSPVEYFRLWPSLPAMVECTGTYTYEGSGFKATAAQQYDSSPFLSGLKSISSKPFHQVCSHFIRTVAGFQLCYAAKTWFGGFVGMMIFGASEVSRNVDLGDETTTMICKFVVRASDESITREIESDLQGWMDDITDGAVEYMPEDEVKSAAAERLKISMERIALLKAAKPKVPPAKTKEEEEEEKKQNEDLDEFGNPKGPSTLSKLTAEEAEHRALQAAVLQEWHQLCKEKAMKAQ

SEQ ID NO: 193230 - protein, 62 aa, Oryza sativa
  Clone ID: PAT_MRT4530_89387C.1.pep
NWGPNQKPLWDKNWLPQFFFLATFGPDYGEKQTNPRGGEDFGGNGKLGLGFSQREILPKPAP

SEQ ID NO: 193231 - protein, 1164 aa, Oryza sativa
  unsure (1)..(1164): unsure at all Xaa locations
  Clone ID: PAT_MRT4530_89388C.1.pep
RVGPTRHPLPPAAPAAPSAPSAAAASRRCSLSPPSPPSXVRRRRHPGPPPTSAPPPSASPHPRRPRPPASEVAPPWPPPARVSFLAAAIADSXRLHRRPASVAADWCHRLYGWSVTPPFMGVHVFTXSWPSPPPTGVSACTAGLLCRRCWASTTSPPACLRRSRLVSSPIRSVGHTTVDGHRHLHRRPASVAADWCPRLYGRLVTPPLMGIVIYTAGLPPSPPTGVPAYTVGWSHHRXWASSSTPPACLRRRRVVPPPTRLAYYAAAVGRLRLHRRPASVAAEWCLRLHGWPIMPPLLGVYDFTAGLPPSPPIGASAYTAGLLCRRCWASTTPPPACLRRRRVVPPPTRLAYYAAAVGRLRLHRRRASVAAEWCLRLHGWPIMPPLLGVYDFTAGLPPSPPSGAYAYTVGLLCRRYWASTTSPPACLRRRRVVPPPTRLAYYAAAVGRLRLHRRPASVAADWCLRLHGWPIMPPLLGVYDSTAGVPPSPPSGASAYTAGLLCRRCWMSTSSPLAHLRCRRLVFPLTRLTYYAAISRHLRFHRRPPSSPPTGVFIVIDGRLCSHIGHFCHHQGEYYKAKIQIQICIKGIHGFKLISYAPGMDQSEHHHRLASTAADWCPRLHGWPIMPPLLGAYVFTDRLAFAAADWCFRLHGWPIMPPLLGVYVFTDRXPSPPPTGVSACTAGLXYAAIVGRLRLHRPACXAAADWCFRLNGWPLCRRCWAPTSSPTGXLRRRRLVFPPARLAXMPPLLGVYVFTDRXPSPPPTGVSACTAGLYAAVXWASTSSPTGXLRRRRLVFPPARLAYXPPLLGAYVFTDRLAFVAADWCPRLHGWPIMPPLLGAYVFTDRXPSPPPTGVLACTAGLLCRRCWAPTSSPTGLPSLPPTGVLACTAGLXYAAVVGRLRLHRPACLRRRRLVFPPARLAFMPPLLGVYVFTDRXCLRRYRLVLPPARQTYYAAVVGRLRLHRPAAASAADWCHRLHGWPVIXRQLMLPSSRLATSLSLLIGISIFNTSCLRLPWLPTVPSPLRLVYTATTTDGHHRLPLPTXVMPPPTSAFIFTTARLRYQFTSSRRCNFVIMVERLHLYYLRHWQTLLLLLRKFYYFTNHDVFVNLDISACNAMIFYYNKXLSNIQDFYLDTFNTYLQSSNNYSTTRCYSSRLYVQLFPN

SEQ ID NO: 193232 - protein, 115 aa, Oryza sativa
  Clone ID: PAT_MRT4530_89389C.1.pep
WNPPKNPLKKKQTKLPCPQAGGTILGGKKTQTPLKSQNGGKKPPHGGNFQRLRLGFRLLQPQGSPKPYGGETPGLFKQGPGGIPCRAVWGGPIRWRTLKGIWRAGRSGRNTARGW

SEQ ID NO: 193233 - protein, 237 aa, Oryza sativa
  unsure (1)..(237): unsure at all Xaa locations
  Clone ID: PAT_MRT4530_8938C.1.pep
MQYYIMFKSYDIWLKIENPNEIPTQINIVAIKTDFKINCKARQIFFNGISYSDFDRVSHLQTANEIWKVLSNFHQGTSNIKELYKYVFKSXYMKFEMKYGETLDDYFVCFNKVLSNLGSVDXSYNTNYPXYKISLHLLNRLGMLIRKMKVTSIXSLLFYIKLKTHDMNILSRKVDFKSNVLVSFSSSFYDCSSSSTPTVFTVLNAMSNDQLKQFVGKDLVVLINKLSCVVNNIRFRM

SEQ ID NO: 193234 - protein, 1331 aa, Oryza sativa
  unsure (1)..(1331): unsure at all Xaa locations
  Clone ID: PAT_MRT4530_89390C.1.pep
MDQSEHHHRLASTAADWRFRLHGWPIMPPMLGVYVFTDRFAFAAADWCVRLHGWPIMPPLLGVYVFTXTGLPSPPPTGVSACTVWPIMPPXGRLRLHRPACLRRCRLWCPLHGSYGCRCGRLRLHRPAASSAADWCFRLHGWPITPPLLGVYVFTDGRLXPPPIGVFAYTVGWSHHRCWASTSSPXPACLRRRRLVSPPARLAYYATIVGRLRLHRAAASSAADWCFRLHGWPIMPPLLGVYVFTDRPPRQPPTGVSACTAGLLCHRCWASTSSPXPAAFVRRRLVCPPARLAYYAVVVGRLHLHRPAASSAADWXSPPARLAYYATIVGRLRLHRPAASSAADWCFRLHGWPIMSPLLGVYVFTDRPPRQPPTGVSACPVGLLCHRCWASTSSPTGRLVRRRLVFPPARLAYYAAVVGPVVVGRLRLHHRPASVAADWCPRLNGWLVTPPFMGIHVFTDRPPRPLPTGVSACTAGLLCRRCWAYTSSPTGRLGRRRLVFPPARLAXYAAVVGRLRLHRXRPAFAAADWCFRLHGWPXMLPLLGVYVFTDRPPRRPSTGVSACTAGLLCHRCWASTSSPTGRLVRRRLVSSPIRLVFPSARLAYYATVVGRLRLHRPAASSAADWCFRLHGWPIMPPLLGVYVFTXGLPSPPLTGVSACTAGXLCRRCWASTSSPTGRLVGRRLVFPPARLAYYASVVGRLRLHRPAASSAADWCLRLYGWLVTPPLLGVYVITXGLPSSPPTGVSACTAGLLCHRCWASTSSPTGRLVRRRLVFPPARLAYYAAVVGRLRLHXGLPSPPLTGVSACTAGLYAAVVGRLRLHRPACLRRCRLIQICIKGIHGFKHISYAPGMDQSEHHHRLASTAADWRFRLHGWPIMPPLLGVYVFTDRLAFAAADWCVRLHGWPIMPPLLGVYVFTDRXPSPPPTGVSACTAGLXYAAVVGRLRLHRPACXAAADWCFRLHGWPLCCRCWASTSSPTGRLVSRRLVLVFPPARLAYYAXLLGVYVFTDRPXPSPLPTGVSACTAGLYAACCWASTSSPTGRLVGRRLVFPPARLAXTPPLLGVYVFTDRPAFAAADWCFRLHGWPLXPPLLGVYVFTDRPPRPSPTGVSACTAGLLCRRCWASTSSLTGLPSSPPTGVSACTTGLXYATVVGRLRLHRPAXLVRRRLVFPPARLAXMPPLLGVYVFTDRPPRQPPTGVSACTAGLLCHRCWASTSSPTGRLVRRRLVFPPARLAYYATVVGRLRLHRPAASSAADWCFRLHGWPXLCHRCWASTSSPTGRLVRRRLVFPPARLAYYATVVGRLRLHRPAAASAAXLVSPPARLACYNAN

SEQ ID NO: 193235 - protein, 166 aa, Oryza sativa
  unsure (1)..(166): unsure at all Xaa locations
  Clone ID: PAT_MRT4530_89391C.1.pep
MWTGQTGQVLPVRPACNVRSDRPAXRSDRPTLCRFWFRVVYLDIRVYFMIMASRWILYVTRCLGRVFAVMDRESAWRESIKSSSTLRVLRFMFTGFRRSDRRSIGGQTGGKXAVRLTAYGRSDRRLLQGAVGDLGGSIDQSTSVRPTFIRRSDRHNIFGQTTIRRI

SEQ ID NO: 193236 - protein, 1291 aa, Oryza sativa
  unsure (1)..(1291): unsure at all Xaa locations
  Clone ID: PAT_MRT4530_89392C.1.pep
NDFTAGLPPSPPTGVIAYTVGRSHHRSWASMSSXPAGLRRRRLVFPPARLVYYAAAVGRLRLHRRPASVAADWCLRLYGWLVTPPLLGVYVFTTGLPPSPPTGASAYTAGLLCRCCWASTTSPPXVPPPIWLVGHTTVVGRLRLHHRPASVTADWXPPPTRLAYYSAAVGRLRLHRRPASVAAEWCLRLHGWPIMPPPLGVYVFTAGLPPSPPIGASAYTAGLLCRCCWASTSSPPAXLRRRRLVPPSTRLAYYAAAVGRLRLHRRPASVAADWCPRLHGWPIMPPLLSVYDFTAGLPPSPPIGASAYTAGLLCRRYWASTTSPPACLRRRRLVPPPTRLAYYAAAVRRLRLHRRPASVAADWCPRLHGWPIMPPLLGVYDFTAGLPPSPPSGASAYTAGLLCRRCWASTTSPPACLRRRRLVPPPTRLAYYAAAVGRLRLHRRLASVAAEWCLRLHGWPIMPLLLGVYVFTAGLPPSPPSGSSAYTAGLLCRRCWASTTSPPACLRRRRVVPPPTWLAYYAAAVGRLRLHRRPASVAAEWCLRLHGWPIMPPLLGVYDFTAGLPPSPPSGASAYTAGLLCRRCWMSTSSPLAHLRCRRLVFPLTRLTYYAAISGHLRFHRRPPSSPPTGVFIVIDGRLCSHIGHFCHHQGEYYKAKIQIQICIKGIHGFKLISYAPGMDQSEHHHRLASTAADWCFRLHGWPIMPPLLGVYVFTDRLAFAAADWCPRLHGWPIMPPLLGAYVFTDRXPSSPPIDVLACTAGLYAAVVGRLRLHRPACXAAADWCFRLHGWPIXRRCWASTSSPTGXLRRRRLVSPPARLAFMPPLLGVYVFTNGXPSPPPTGVSACTAGLYAAVXWAPTSSPTGXLRRRRSMSSPARLAFMPPLLGVYVFTDRLAFAAADWCFRLHGWPIMPPLLGVYVFTDRXPSSPPTGVPACTAGLYAAVXWASTSSPTGLPSPPPTGVSACTAGLYAAVVGRLRLHRPACLRRRRLVSSPAWLAXMPPLLGAYVFTDRXPSPPPTGVSACTAGXLCRRCWASTSSPTGXLRRRRLVFPPARLAXYAAVVGRLRLHRPACXAAAYWCFRLHGWPLCRRCWASTSSPTGRLDRRRLVFLPARLAYYAAVVGRLRLHRPAAASAAXLVSPPARLACYNAPLHLVYTATTTDEHHRLPSPTXMLSPTSAFIFTTARLHYQFTSSRQCNFVIMVERLHLYYLRHWQTLLLLLRKFCYFTNHDVFVSLDISACDAMLFYYNKRLSNIQDFYLDIFNTYLQSSNDYSTTRSYNSRLYVQLFPN

SEQ ID NO: 193237 - protein, 100 aa, Oryza sativa
  Clone ID: PAT_MRT4530_89393C.1.pep
RLKINNVTITQRLALKYRWSNRNSTLQILAKSHTGMIPIYKFQKKKKQPIKSEDKMLKFTATSQESRIIAAIASIKAETEWCALCTVRLYRNPLILTNAH

SEQ ID NO: 193238 - protein, 673 aa, Oryza sativa
  unsure (1)..(673): unsure at all Xaa locations
  Clone ID: PAT_MRT4530_89394C.1.pep
FLAIFCCCSHITTTTSPPAYLRRRRLVSSPIRLVGHTTVHGRPCLHRPXAFAAADWCFRLHGWPIMPPLLGVYDFTTGLPPSPPTGVLAYTVGWSHYRXWASSSTPPACLRRRRLVSPPIRSVGHTTVDGHRHLHRRPASIAAEWCLRLHGWPIMPPLLGVYDFTAGLPPSPPSGASAYTAGLLCRRCWASTTSPPACLRRRRVVPPPTRLAYYAAVVGCLHPHRWLTFAAVDWIQIQICIKGIHGFKLISYALGMDQSEHHHRPPRPPPTGVFACTVGLLCRRCWASTSSPTGXPRPPPTGVSACTAGLYAAVVGRLRLHRPACLRRRRLVFPPARLAFMPLLLGVYVFTDRLAFAATDWCFRLHGWPXMTAVVGRPRLHRPACLRRRRLVFPPARLAYYAAVVGRLRLHRPAASSAADWCFRLHGWPIMPPLLGVYVFTDRLAFAASDWCFRLHGWPIMLPLVGVYVFTDRXTASAADWCHRLHGWPVITPTDAIFFTAGYIAVTTNRHQYLQHKLPTFAMAADWFLHFHGYMILPVLISLIFFTAATTTDGHHRFLPPTXYAAVDWCFYLHNCXSSLPVCFCCRRLVFTSSRRCNFVIMVERLHIYYLRHRQTLLLLLRKFYYFTNHDVFVNLDISACNAMLFYYNKWLSNIQDFYLDIFNTYLQSSNDY

SEQ ID NO: 193239 - protein, 100 aa, Oryza sativa
  Clone ID: PAT_MRT4530_89395C.1.pep
WIPLGFNGVNGEVFGDWKGFLEGVKVGDKPQGAYCVRDQRGLERLLGQHPGAWVGMLAETLELEFFQEFGEGRIPKVEVRWPILVNFWRATLTHDFGIGG

SEQ ID NO: 193240 - protein, 591 aa, Oryza sativa
  unsure (1)..(591): unsure at all Xaa locations
  Clone ID: PAT_MRT4530_89396C.1.pep
WASSLSPTGRLHRRRLMFPPTWLAXMPPFVGRLRPHPRRASVAADWCPRLYGWLVXTTVHGRPRLHRPACXAAADWYLRLQGWPIMPPLVGIFAFTXRQPSSPPTGVFIVINGRLCSHIGHLCHHQGEYYKAKSXLFYSLYDIFPFPLPHYTNWIQIQICTKGIHGFKLISYAPGMDQSEHHHRLAVIAADWCFRLHGWPIMXAVVGRLHLHRPAXLVRRRLVFPPARLAFYAAVVGRLRLHRPAASVRRRLVFPPVRLAXMPLLLGVYVFTDRPPPSAADWCFRLHGWPIXRCCWASTSSPTGXPHPPPTSVSACTAGXIMSPLLGVYVFTDRLPXSAVDWCFRLHGCPXLCRRCWASTSSPTGRLVRRRLVFPPARLAHYAAVVGRLRLHRPAASSAADWCHRLHGWPVMMPIDAIFFTVPSPLRLVYTTTTTDGHHCLPSSTGYAAADWCFYLHNCASSLPVCFCCRRLVFTSSRLCNFVTMVEQLHFYYLRHRQTLLPLLRKLCYFTNHDDYKSFDTLAYVTKYDAVLFYYNKWCSNLQXYLHSSNDYSTTRSYSSRLYVQLFPNQPKSRGLHKYKTLKIRQAEAIN

SEQ ID NO: 193241 - protein, 170 aa, Oryza sativa
  unsure (1)..(170): unsure at all Xaa locations
  Clone ID: PAT_MRT4530_89397C.1.pep
FIPLNFSSITSPRPFIWLWKTKCVMKIKVFIWLLFYDILNTRDMLDRKNCAPVYADLFCVLCSSRVRETMMHLFFLCPFSKRCWRXIGLTCNTNLNIFQMLALSMIYFRRKGFMEIMFIASXYIWKQRNGLIFQNIXPSEGIWFQGFKHEILLHMCRMNEPLRSFVSDWL

SEQ ID NO: 193242 - protein, 43 aa, Oryza sativa
  Clone ID: PAT_MRT4530_89398C.1.pep
KDFFFYFPKFFFFFIKDVIIKFFFFYNFLFKKYIFFLFIFFHK

SEQ ID NO: 193243 - protein, 955 aa, Oryza sativa
  unsure (1)..(955): unsure at all Xaa locations
  Clone ID: PAT_MRT4530_89399C.1.pep
WLAYYAAAVGRLRLHRRPASVAAEWCLRLHGWPIMPPLLGVYDFTAGLPPSPPTGVLAYTVGWSHHRSWASTSLPXRLAFVAAAVGRLRLHRRLASVAAEWCLRLHGWPIMRPLLGVYDFTAGLPPLPPSGASAYTAGLLCRRCWASTTSPPACLRSRRVVPPPTRLAYYAAAVGRLRLHRRPASVAAEWCLRLHGWPIMPPLLGVYDFTAGLPPSPPTGVLAYTVGWSHHRSWASTSXRPAGLRRRRLVPPPARLAYYAAAVGRLRLHRRPASVAAEWCLRLHGWPIMPPLLGVYDFTAGLPPSPPSGASAYTAGLLCRRCWASMTSLPAYLRRRRLVSSPIRLVGHTTVHGRPRLHHRPASVAAEWCLRLHGWPIMPPLLGVYDFTAGLPPSPPIGASAYTAGLLCRRCWASTTSPPACLRRRRVVPPPTRLAYYAAAVGRLRLHRRXPSPPPTGVFAYTVGGLRRCXGLHHLHHWLGSTGADWIQIQICIKWIHGFKLISYAPGMDQSEHHRRPASVAAEWCLRLHGWPIMPPLLGVYDFTXRLASVAAEWCLRLHGWPIMPPLLGVYDFTAGLPPSPPSGASAYTAGLXYAAAVGRLRLHRRPASVAADWCLRLHGWPIXRRCWASTTSPPACLRRRRLVPSPIWLVXTPPFMGVHVFTAGLPSPPPTGVSACTAGLYAAVXWASTSSPTGXLRRRRLVYPPARLAFMPPLLGVYVFTDRLAFAAADWCFRLHGWPLXPPLLGVYVFTDRXPSPPPTGVSACTAGLYAAVXWASTSSPTGLPSPPPTGVSACTAGLYAAVVGRLRLHRPACLRRRRLVSPPARLAFMPPLLGVYVFTDRLASPPPTGVSACTAGXLCRRCWASTSSPTGCLDRRRLVFPPARLAYYAAVVGRLRLHRPAAASAADWCHRLHGWPVITPTDAIFFTAGYIAVTTNRHQYLQHKLPTFAMAAD

SEQ ID NO: 193244 - protein, 184 aa, Oryza sativa
  Clone ID: PAT_MRT4530_8939C.1.pep
LGLHRRFRSLLAACAAAFNSPLLGLVWFHPLWQGAGICTAWIAASMVLEPVHQHSKGLPRRQLACGPPYLSFAFWIDSFVSSLSRPPLVLASSLLSHGVRGPLRPRLRRLALSAAFMNKTWPLLYINFAINMFHLYVCTIYSWLTIAYILISQLLYGDISKQIKTRLSRLWDSTISMMKKNISH

SEQ ID NO: 193245 - protein, 67 aa, Oryza sativa
  Clone ID: PAT_MRT4530_893C.1.pep
MAIVAVAEAALVEIAFSRLMKACDYIGAAGAGGCGTGVTGCVALLPAGTETVGGAFAASDGSALLAY

SEQ ID NO: 193246 - protein, 102 aa, Oryza sativa
  Clone ID: PAT_MRT4530_89400C.1.pep
MEVKKPIGSRRRQLALMVMTPICGGGDVASREDDSTSWRHTRRPVDEDVDVLQRWRYQLAAAKAADGEDVDAQNNGGIIGQPCRRRYQSAAAKAADGEDVDA

SEQ ID NO: 193247 - protein, 90 aa, Oryza sativa
  Clone ID: PAT_MRT4530_89401C.1.pep
ILAESLHAFAGGYRLSCRLERRAYWSEHCRGQSPVTRSRSDTPNGAHGSVRVLLGSYCFRLRKLLLRTLSLDRSLYTTKIVLRKERRTRT

SEQ ID NO: 193248 - protein, 508 aa, Oryza sativa
  unsure (1)..(508): unsure at all Xaa locations
  Clone ID: PAT_MRT4530_89402C.1.pep
MALSLSLTLQEWISQNITAGLPPSPPTGVFAYTAGLXYAAAVGRLRLHRRPASVAADWCLRLHGWPIMPXRCWAFTSSPTGRLVCRRLVSPPTRLTYYAAVVGRLRLHRLATSSAAEWSLRLHGWPIMPPXLLGVYVFTDRXASSAADWCPRLHGWPXLCRRCWASTSSPTGXPCLPPTGVSACTAGLXYVAIFGRLRLHRQAASSAVDWCLRLHGWPIMPPLLGVYVFTDRXASSAADWCFRLHGGPIMPXRCWASTSSPQPTGVSXPPPTGVSAYKAGLXYAAVVGRLRLHRPAASSAADWCLRLHGLPIMPPLLSVYVFTAGXLLLLTXRRLYCWFILLPLLIDVIVFIAGRLVXPTGLFTSTHHHSXLPLPTGYAATNWCFYLHDCASSPPVCFCCRQLLFTSSRLCNFVTMVEQHHLYYLRHWQTLLPLLRKLCYFADHDIYRSLDISACVNKYNAMLFYYNKWCSNIKDFYSDIFYEYIHSSNDYSMTRSYSSRLYVQLFLN

SEQ ID NO: 193249 - protein, 75 aa, Oryza sativa
  Clone ID: PAT_MRT4530_89403C.1.pep
LEKWQKSIARRVHSLRCKVATTLLPRNSTNRRGAKTAAAFTPFKQAGLTLAINYFAFLCFLIVLCIRLRSSYSWA

SEQ ID NO: 193250 - protein, 335 aa, Oryza sativa
  unsure (1)..(335): unsure at all Xaa locations
  Clone ID: PAT_MRT4530_89404C.1.pep
MGVHVFTDRLAFADWCFRLHGWPIMPPLLGVYDFTTGLPPSPPTGVLAYTVGWSYHRSWASTSSPXAGLRRRRLVFLPTRLAYYAAAVGRLRLHRRPASXSPPTGVXPIRIQIQICIKGIHGFKLISYAPGMDQSERHHRLASTAADWCFRLHGWPIMLPLLGVYVFTDRXASSAADWCFRLHGWPLXPPLLGVYVFTDRPPRPPPTGVSACTAGLYAAVVGRLRLHRPAASSAADWCFRLHGWPLCCRCWASTSSPTGRLVRCRLVFPPARLAFMPPLLGVYVFTDRPPRPPPTGVSACTAGLLCCRYWASTSSPTGRRIRRXLVSPPARLACY

SEQ ID NO: 193251 - protein, 625 aa, Oryza sativa
  unsure (1)..(625): unsure at all Xaa locations
  Clone ID: PAT_MRT4530_89405C.1.pep
MDQSEHHHRLASTAADWCFRLHGWPXMPPLLGLYVFTDRLAFAAADWCFRLHGWPLCRRCWASTSSPTGXLRRRRLVFPPARLAFMPPLLGDYVFTDRPPRPPPTGVSACTAGXLCRRCWASTSSPTGXLRRSRLVSSPARLAYXMPPLLGIYVFTDRXPSPPPTGVSACTAGLLCRRCWASTSSPTGLPSPPPTGVSACTAGLLCRRCWALRLHRPACLRHRRLVFPPARLTYYAAIVGRLHLHRLAASTAADWYFRLYGWPIMPPLLGVYVFTDRXASSAADWCFLLHGWPLCRRCWASTSSPTGLPSPPPTGVSACTAGLYAAVVGRLRLHRPACLRRRXDWCPRLHGWPIMXRRCWASTSSPTGLPSPPPTGVSACTAGLXYATVVGRLRLHRPAAASAADWCHRLHGWPVITPTDAIFFTAGYIAVTTNRHQYLQHKLPTFAMAADXFLHFHGCMILPVLIGLIFFTAVPSPLRLVYTATTTDGHHHLPSPTGYAAVDWCFYLHNCASSLPVCFCCRRLVFTSSRQCNFVIMVERLHLYYLRHWQTLLLLLRKFCYFTNHDVFVSLDISACDAMLFYYNKRLSNIQDFYLDIFNTYLQSSNDYSTTRSYNSRLYVQLFPN

SEQ ID NO: 193252 - protein, 346 aa, Oryza sativa
  unsure (1)..(346): unsure at all Xaa locations
  Clone ID: PAT_MRT4530_89406C.1.pep
MAAAAFTAADWCFRLHGWPIMSPLMGVYVFTDRPPHSPPTGVLVYTVGMDQLEHHHRLAFATADWCLRLHDWPIMPPLLGIYVFTAGLPSPPATGVSACTAGLLCRRLLGVYVFTDRLAFAAADWCLRLHGWPIVPPLFGVYVFTAGSPSPPPTVLIGLIVFTAGLSPSLPTGVLAYTVGWSHHRSWAFTSSPTGRLVRRRLVFSPTLLDGHTTVVGHPHFHRRLPLPPPTGISACTAGLLCRRCWVSTSSPPAAFAAADWYLRLHGCPIMPPLLGVYVFTAGCLRRCRLXTSSFSSSFYFFRRRLIMSPPTATPIITPAAIAPSSTAIFINQEALHQSSSHTCQH

SEQ ID NO: 193253 - protein, 31 aa, Oryza sativa
  Clone ID: PAT_MRT4530_89407C.1.pep
MSLSPPSSCEPGELWWRRPLVSSRRGMYQHP

SEQ ID NO: 193254 - protein, 45 aa, Oryza sativa
  Clone ID: PAT_MRT4530_89408C.1.pep
DVKPPPIRAIEIIEAHRKYRSQGSSFRTSSHLQSMSIPGYQRTQP

SEQ ID NO: 193255 - protein, 548 aa, Oryza sativa
  Clone ID: PAT_MRT4530_89409C.1.pep
MRRKPAASEGGWGSDADPDSGSSGNGGGGGSPPSSPSPPSPPSPQPLLPTLPSPQAFVDAYTGYEDQGAWDPDSLSLELGLATLRELECIRYQEAQEDWRKSDDNKSDSCKQKDKDQGAWDPDSLSLELGLATLRELECIRYQEAQEDWRKSDDNKSDSCKQKDKEQEAWDPDSLSLELGLAPLQELEWIRYQEAQEDWRRSDDNKSDSCKLRDKTTSDDRSKSGDNKYDSCKTRDKKPIVDLADEFENNTIKKKITLLSEKYDFFRPVDRDGSCFYRAFIFSYMERIVAMQDDLERIIEVSRIGERIGKYKQAYARFGSFGIPQEEFLKALSAFEQLINLIEKGVAVEQLYQIDETDITKNSLRFLRFLTEIEICTHEDHYKGFLLTADYSSVFEFCQVEVRPENAEASNEQMKALVEALGIPVLVENLDTTSETDTPILNQHFIYPRPESEEGTMLGPLNSHEIVSPESSGYHAARGELQNQPSTSGSSTNSSTEALGLQSIGTSSTPNERDGKGDRTINDLSPAERRRLAILLYRPGHYDILCPK

SEQ ID NO: 193256 - protein, 74 aa, Oryza sativa
  unsure (1)..(74): unsure at all Xaa locations
  Clone ID: PAT_MRT4530_8940C.1.pep
LLHMLSSLKVLLTTLQSNFAGEVXMRGGELTXSIWKASSVFSSNSSLMDSVSTAIIPSSLDNLLLNFNTSFLYS

SEQ ID NO: 193257 - protein, 148 aa, Oryza sativa
  Clone ID: PAT_MRT4530_89410C.1.pep
LASGMNQQHQRSIEHCSIGCFLASPPPRFFPARTRSAPGELRMKLVVFLIRGCPGEVLLRPIVPAKEGLRTRTKWHILQRFCKLEIISIETETMITISSRSIIKSRCKKSNKKILVFFLSMSVKFLLITTRRSLSVQKRSSTFSQLLH

SEQ ID NO: 193258 - protein, 87 aa, Oryza sativa
  Clone ID: PAT_MRT4530_89411C.1.pep
GLVQFCSISMGSLLCCILLCGLAALLLKFQALLPCCPAFVFPLRFWPAPGYLGSICCPLAMGHLLLPFHCYLWCNFLRVYVCTSLHN

SEQ ID NO: 193259 - protein, 87 aa, Oryza sativa
  unsure (1)..(87): unsure at all Xaa locations
  Clone ID: PAT_MRT4530_89412C.1.pep
PKKQKWDPEGQIARVAXRNLRVSMGLKLRPDTQGQRPPIWYATFCPAIYHFHKNLNHIFAQIPNLFQKYRKNGVGGPKKRLKNPPLW

SEQ ID NO: 193260 - protein, 874 aa, Oryza sativa
  Clone ID: PAT_MRT4530_89413C.1.pep
MTREHTCFTLVKATSLCSCSTYFREAQLDRVYYARLSIIQKARIITECLHRFCRDCIEKSMRLGNDECPACRTPASSHSLKVDPNFDALILTLYPDLHKDEEEELAFTEEKTCHKKIQASTDEAPHRRKEALGKKSSAAKAIGSSRSQGNMLARKRGHIDFPDIVPTKVRDFHNFEEGRSCKKFECGQIWALYSEVDKFPKLYGWIRKVKLQPFTVLLTWLEPCPQQEQEKRWLEQDIPISCGEIWSIYMNWTFDWTPSSKATCEFTIEERGGELCGFLELDPGSVPDIFLNREENNNDGCKGLSSVGDHSEGPKTKKARKFHVSQSSPAGHKVTSKVDSHEERMANRVAIRLKNIMKIFLCKKRADRQYNPPPMTRKVDIQGKGKTSDTDDKDNANAEATNTVRQNEHSCSLELPSPYPDFYDFEKLRDINMFSLGQIWALYDDLDGMPRFYARIEHFDASSFKAHLTWLEYNAASEEEKKWADEEQPVACGFSVNDGITVIPLVRIKGFVSLFAAAKDKSAVVIASSELLRFSHNIPCYRTTGNEKVIFRATHWLWFWAQLQSDVDKFPKFYGWISKVERQPFIVHLIWLEASPEYEQEKRWLEQDLPVSCGKFKIRDWKARAVFMPDKRNTVVEIPTRDRLRFSHRIPSFLLTEERGGRLRGFYELDPASVPDVFLYRNTVMGWSGMRGTDALNFIFFTYWNATEKRLAIGHSQCLPLNEPSFHSWLYDSHKKMVKEHRRGFDTIATLVAWTIWKERNNWVFNQKSRTWAEIARVMTGEAELWRLAKAAIPVVSGLNNPVIAYHYPDLCDFGKFRDVNWIEVDQIWALYDDHDFMPRVYARIDHIDTSSLKVQFTWLAGAQSYECARGEMD

SEQ ID NO: 193261 - protein, 60 aa, Oryza sativa
  Clone ID: PAT_MRT4530_89414C.1.pep
MAVGGGGSLVSNETGVGNGGKVEREVTREHPAVRLISDIEAHDLDLLELVISMSRAKLTF

SEQ ID NO: 193262 - protein, 775 aa, Oryza sativa
  Clone ID: PAT_MRT4530_89415C.1.pep
MSKRTCMFYFGKRNDECPACRTLASSHSLKVDPNFDALILTLYPDLHKDEEEELAFTEEKTCRKKIQASTDEAPHRRKEALGKKRSAAKAIGSSRSQGNMLARKRGHIGFPDIVPSKVGGKDREENDNSGCDEWSLFDEYSQDIKKKRARRCLVPRSSPAGHKISTTLKKDAHARSFECGQIWALYSEVDKFPKLYGWIRKVKLQPFTVHLTWLEPCPQQEQEKRCKATCEFTIEERGGELCGFLELDPGSVPDIFLNREENNNDGCKGLSSVGDHSEGPKTKKARKFHVSQSSPAGHKVTSKVDSHEERMANRVAIRLKNIMKIFLCKKRADRQYNPPPMTRKVDIQGKGKTSDTDDKDNANAEATNTVRQNEHSCSLELPSPYPDFYDFEKLRDINMFSLGQIWALYDDLDGMPRFYARIEHFDASSFKAHLTWLEYNAASEEEKKWADEEQPVACGKKRIAYEVYLNKGELWALYKDWSMQWNSDADSHRSYDYEVVEILSGFSVNDGITVIPLVRIKGFVSLFAAAKDKSAVVIASSELLRFSHNIPCYRTTGNEKVGAPAGFMELDTSCLPIDMDMIFPSVTLDSYISLGKKKGSTLIDLTTDSRSSRKDPGNEQTENLSEAQKESLSSEKNSSLPKNGHVANGFGNNSGPGCPSPTPTIFSYPDPEFHNFEDDRTCEKFEPGQIWALYSDVDKFPKFYGWISKVERQPFIVHLIWLEASPEYEQEKRWLEQDLPVSCGKFKIRDWKTKYERNYSFSFSTYRIEWLKPAD

SEQ ID NO: 193263 - protein, 143 aa, Oryza sativa
  Clone ID: PAT_MRT4530_89416C.1.pep
MLLLFDFLGFWDGSWRLRAFVYQWKIQASTDEAPHRRKEALGKKRSAAKAIGSSRSQGNMLARKRGHIGFPDIVPSKVGGKDREENDNSGCDEWSLFDEYSQDIKKKRARRCLVPRSSPAGHKVPSKVDHHEEGNATHKAESL

SEQ ID NO: 193264 - protein, 410 aa, Oryza sativa
  Clone ID: PAT_MRT4530_89417C.1.pep
MPGVGVKIYSVFFKFLLRHKLQSLAAAAAAAAAGGEDDAAAFGVSCRADEATAPSNPAFSAADGVASKDLHIDPNSSLSVRIFLPTPPPRPHSRRASEPPPATANGGSAPYRGYLPHAVSSPRAAASARRRLPIVVQFHGGGFVSGSSSSAANDAFCRRVAKMCDAIVVAVGYRLAPESRYPAAFDDGVRVLRWIAKQANLAMMSKVGGGVDTFGASTVEPWIAAHGDPARCVLLGVSCGANIANFVTRKAVEDGKLFDPIKVVAQVLMYPFFIGSVPTHSEIRLANSYFYDKSTCILAWRLFLSEKEFSLDHPAANPLAPDRGGPPLKCMPPTLTVIAEHDWMRDRAIAYSEELRKVNVDAPVLDYKDTVHEFATLDVFLKTPQAQACAEDIAIWMKKYISLRGHEFSY

SEQ ID NO: 193265 - protein, 142 aa, Oryza sativa
  Clone ID: PAT_MRT4530_89418C.1.pep
MASLVAVQPVAVKGLAGSSISGRKLAVRPSPRALCRTTRRPRAAVVAKYGEKSVYFDLEDIGNTTGQWDLYGSDAPSPYNPLQSKFFETFAGPFTKRGLLLKFLLLGGGSLVAYVSASASPDLLPIKKGPQLPPTPGPRGKI

SEQ ID NO: 193266 - protein, 72 aa, Oryza sativa
  Clone ID: PAT_MRT4530_89419C.1.pep
VVISTPELRLPWAAAPVFADTNKPGTVPVYQLIPNKPGTAHQYLSPAAVQMLPFLVHEVALQWWMLSRGITC

SEQ ID NO: 193267 - protein, 710 aa, Oryza sativa
  unsure (1)..(710): unsure at all Xaa locations
  Clone ID: PAT_MRT4530_8941C.1.pep
KRTLGNGEQRLPSNSILKSRRSKECFSXLHETFDSLRRYRLMLNSEKCMFGVPSGKLLGFLVSGRGIXANPEKIKAIKNMKSPTRLKEVQKLTGYMAALSRFVARMGERGQPFFALLKKQDKFVWTQEAKEAFIALKRYLSNPPILVAPQPNEELFLYIAATPYSVSTVIVVEREKVQQPVYYVSDALHDTKTRYPQIQKLLYAVIMTSRKLRHYFQAHRVTVVSSCPLGEVVRNKDVLGRIVKWVVELSQFDIRFVPRTAIKSQVLADFVADWTMPDNRSDNQIDNERWTMAFDGALNSQGAGAGFILTSPSGDQFKHAIHLNFRATNNTAEYEGLLAGIRAAAALGVRRLIVKGDSELVANQVNKDYKCSSPELSKYLAEVRKLEKRFDGIEVXHVYHKDNIEPDDLARRASRREPQPXNLAPFLTRPSVKEASGEDSPVTPNISSGATEAERAVADIESTDDWHTPLIKFIGSEELPEDDTEAKKISRKAKVYCMIGNDLYKKAPNGVLLKCVSSDDDRHLLLDIHEGIRGSHAAGRTLVGKAFRQGFFWPTALKDACDMXTHKATSASTSDYPSHLAVLVLGARYSRAIPTRIGRLQVPIXVAIDKFTKWIEATPTREIKADNAIKFIKGIFCRFGLPHRIITDNGSQFISADFQDYCIRLGVKICFASVSHPQSNGQVERANDIVXTPTTSNKETPFFLVYGSEA

SEQ ID NO: 193268 - protein, 125 aa, Oryza sativa
  Clone ID: PAT_MRT4530_89420C.1.pep
GLLLATAGVMVGVIATNLADLTGVRERGNLFQHQYLLVNQVIFFNHPVLLLLVVRNHDGRVDSIFIISREGGKIFSAGVKNFPTSMVVLGGFPQKSRETTVAPPANKLGIAAIKIQDWLLPPPIW

SEQ ID NO: 193269 - protein, 106 aa, Oryza sativa
  Clone ID: PAT_MRT4530_89421C.1.pep
CHGTLISIDRTCCTSALRHGVHVRTASAAALHVLEEDASPLAPTHSHRRRDMGDRDGDGLDYIDRGHGGVWGRVGEDLKFETTEVGGATASSPPARQLVGEGGEIS

SEQ ID NO: 193270 - protein, 1356 aa, Oryza sativa
  unsure (1)..(1356): unsure at all Xaa locations
  Clone ID: PAT_MRT4530_89422C.1.pep
MSSPTGWPSPPPTGVSACTAGLLCRRCWASTTSPPACLRRRRVVPPPTRLAYSLPTVDGHRYLHRRPASVAADWCPRLYGRLVTPPLMGIVIYTAGLPPSPPTGVLAYTAGLLCRRCWASTTSPPACLRRRRLVPPPTRLAYYAAAVGRLRLHRRPASVAAEWCLRLHGWPIHSVAADWCPRLHGWPIMPPLLGVYDFTAGLPPSPPTGVLAYTAGLLCRRCWASTTSPPACLRRRRLVPPPTRLAYYAAAVGRLRLHRRPASVAAEWCLRLHGWPIMPPLLGVYNFTAGLPPSPPSGPSAYTAGLLCRRCWASTTSPPACLRRRRVVPPPTRLAYYAAVVGCLHPHRWLTFAAVDWIQIQICIKGIHGFKLISYAPGMDQSEHHHRLASTAADWCFRLHGWPIMPPLLGAYVFTDRLAFVAADRCPRLHGWPLCRRCWASTSSPTGXLRRRRPMSSPARLAXYAAVVGRLRLHRPACLRRRRLVSPPARLAYYAAVVGRLRLHRPACLRRRRLVFPPARLAXYAAVVGRLRLHRPACXAAADWCFRLHGWPXMPPLLGVYVFTDRLAFAAADWCFRLHGWPIMPPLLGVYVFTDRLAFAAADWCFRLHGWPXMPPLLGVYVFTDRXPSPPPTGVSACTAGXLCRCCWASTSSPTGLPSPPPTGVSACTAGLLCRRCWASTSSPTGLPSPPPTSVSACTAGXLCRRCWASTSSPTGXLRCRRLVFPPARLAYYAAVVGRLRLHRPACLRRRRLVFPPARLAYYAAVVGRLRLHRPAXAFAAADWCFRLHGWPIMPPLLGVYVFTDRLAFAAADWCFRLHGWPXMPPLLGVYVFTDRLAFAAADWCFRLHGWPIMPPLLGVYVFTDRLAFAAADWCFRLHGWPIMPPLLGVYVFTDRPPRPPPTGVSACTAGLLCRRCWASTSSPTGLPSPPPTGVSACTAGLLCRRCWASTSSPTGLPSPPPTGVSACTAGLLCRRCWASTSSPTGLPSPPPTGVSACTAGXLCRRCWASTSSPTGXLRCRRLVFPPARLAYYAAVVGRLRLHRPACXAAADWCFRLHGWPXMPLLLGVHVFTDRXPSLPPTGVSACTAGLLCRRCWASTSSPTGLPSPPPTGVSACTAGLLCRRCWASTSSPTGRLVRRRLVFPPARXAYYATIDGRLRLHXRLAFAVADWCLRLHGWPIMPSLLGVYDSTTGLPPSPPTGVSTCTLAYYATVDGRLRLHRPAXFAAADWCLRLHGWPIMPXCWASTTPPPACLHRRRLVFPSARLAYYAAVVGRLRFHRPAASFVADCYHYXGHHHLPSPTDYAAADWCFYLHNCASSLPDFYLDIFNTYLLSSNDYSTTRSYNSRLYVQLFPN

SEQ ID NO: 193271 - protein, 186 aa, Oryza sativa
  unsure (1)..(186): unsure at all Xaa locations
  Clone ID: PAT_MRT4530_89423C.1.pep
MGLIVFTDQAPSPPLIGVFAYTEWISQNITTGLPSPPSTGVYVFTDRLAFAVVDWCLRLHGWPIMPPLLGVYVFTDRXASSAADWCFRLHGWPIMPPLLGVYVFTDRLAXSAADWCFRLHGWPVMTPTDAIFFTAGYVAVTTNRRHHIQXKLSTSAADXFIHFHGCMILPVLIGLIFFTAGHLVCC

SEQ ID NO: 193272 - protein, 976 aa, Oryza sativa
  Clone ID: PAT_MRT4530_89424C.1.pep
PLEVRPHPLRETQAGSFLRTLAAEPGGRYLWAGAESGIRVWALDEVFAGWGAGARRGDEESAPFREGMPAPPALCVAVDRANRLLWTGHKDGRIRSWRMDLDAAATAPAPPPGGAGDGGGSVGGSNHGGPSNAPVFKEALTWQAYGRTPVLSMVVTSYGEIWSGSEGGVIKAWPYDAIAKSLSLSPEERHMAALLVERAYIDLRNHCTVGNVCSLPASDVKHMLADYSRAKVWTVTSMTFAIWDARTRELLKVFGMDGQVESARLETPVMPEQPIEEEVKVKPSKKDKSQGSLNFFQKSRNALIGAADAVRRVATKGTFVEDNRRTGAVAQAMDGTIWSGCTNGSIILWDGNGNRVQEFQHHTSSVQCIKALGERVWAGYASGIVQVMDVEGNLLAGWTGHSCPVIRMAIGGSYIYTLAHHGGIRGWPLTSPGPLDDILRTELTNKELSYTRMEKINIMVGSWNVAQGKASAESLKSWLGSVSSDVGLVVVGLQEVEMGAGFLAISAAKETVGLEGSANGQWWIDNIGKALDEGTSFHRVGSRQLAALLIAAWARKSLKPYVGDVEAAAVPCGFGRAIGNKILLQGGVGLRIRVYDRKMCFVSNHFAAHLEAVNGNQVDEVRPDLAEADMIVFLGDFNYRLYGITYDEARDMVSQRSFDWLREKDQLRAEMKAGKVFQGMREGLIKFPPTYKFQKHAPGLGGYDSGEKKRIPAWYVACMDVTESDHKPVRCTFSVDIARVDELIRRQEYGEIIETNEKVRSMLEESSFVPDTTVSTSEIVLENQENIVFRITNICETSKAAFEITCEGQSSKKEDATKSEILPRASFGFPLWLEVQPAVGLIKPGETAEITIHHEDFYTQEEFVDGIPQNWWCEDTRDKECVLTVNIRGSTSTETKSHAISIRHHCPATSAPPLIISNPLSSSAAPPINALASEGPPSKRSSKKRESNHHKREQQQQDYAQFGSSEVHDLCRMRCP

SEQ ID NO: 193273 - protein, 497 aa, Oryza sativa
  unsure (1)..(497): unsure at all Xaa locations
  Clone ID: PAT_MRT4530_89425C.1.pep
MVGWYTTVVGRLRLHHRPASVAADWCLRLHGWPIMPPLLGVYDFTAGLPPSPPSGASAYTAGRLRRRRLVPPPTRLAYYAPAVGRLRLHRRPASVAADWGLRLHGWPIMPPLLGVYVLTAGLPPSPPIGASAYTAGLLCRRCWASTTSPPACLRRRRLVPPPTRLAYYAAAVGRLRLHRRPASVAADWCPRLYGRLVTPPLMGIVIYTAGLPPSPPTGVPAYTVDTTHPICLNGSVRTPPPARLDRRRLVFPPARLAXMPSLLGVYVFTDRLAFAAADWCFRLHGWPLCRRCRASTSSPTGRLVRRRLVLPPARLXIMPPLLGVYVFTDRLAFAAADWCFRLHGWPLCRRCWASTSSPTGLPSPPPTGVSACTAGLXYAAVVGRLRLHRPACLRRRRLVFPPARLAFMPPLLGVYVFTDRPPRPPPTGASACTADLLCRRCWASTSSPTGRLDRRRLVFPPTRLAYYAAVVGRLRLHRPAAASAADWCHRLHGWPVI

SEQ ID NO: 193274 - protein, 287 aa, Oryza sativa
  unsure (1)..(287): unsure at all Xaa locations
  Clone ID: PAT_MRT4530_89426C.1.pep
TRPAIGIKGGVGLRIRVYDRKMCFVSNHFAAHLEAVSRRNADFDHIYRTMSFNKPHGSTASATSVQLHRGVNVNGNQVDEVRPDLAEADMIVFLGDFNYRLYGITYDEARDMVSQRSFDWLREKDQLRAEMKAGKVFQGMREGLIKFPPTYKFQKHAPGLGGYDSGEKKRIPXWCDRVLYRDSRPISVADXSLECPVVASITSYVAXIGMSQESDHKPVRCTFSVDIARVDELIRRQEYGEIIETNEKXRSMLEEASFVPDTTVSTSEIILENQENIVFRITNIXET

SEQ ID NO: 193275 - protein, 919 aa, Oryza sativa
  unsure (1)..(919): unsure at all Xaa locations
  Clone ID: PAT_MRT4530_89427C.1.pep
GESTCGQPSPPIFPVDRPRVHSAGLSSPPPLLITTTTSPPACLRRRRLVPPPTRLAYYAAAVGRLRLHRRPASVAAEWCLRLHGWPIMPPLLGVYDFTAGLPPSPPSGASAYTAGLLCRRCWASTTSPPACLRRRRLVPPPTRLAYYAAAVGRLRLHRRLASVAAEWCLRLHGWPIMPPLLGIYDFTAGLPPSPPTGASAYTAGLLCRRCWASTTSPPACLRRRRVVPPPTRLAYYAAAVGRLRLHRRPASVAAEWILRLHGWPIMPPLLGVYDFTAGLPPSPPSGSSAYTAGLLCRRCWASTTSPPACLRRRRVVPPPTRLAYYAAAVGRLRLHRRPASVAAEWCLRLHGWPIMPPLLGVYDFTAGLPPSPPSCASAYTAGLLCRRCWMSTSSPLAHLRCRRLSEHHHRXASSAADWCFRLHGWPIMPPLLGVYVFTDRLAFVAADWCFRQHGWPIMPPLLGVYVFTDRPPRPPPTGVFACTAGLYAAVVGRLRLHRSACXAAGDWCFRLHGWPLYRRCWASTSSPTGXLRRRRLVFPPARLAFMPPLLGVYVFTDRXPSPLPTGVSACMDGLYAAVXWASTSSPDRLDSSGRRLVFPPARLPFMPPLLGXVYVFTDRLAFAXAADWCFRLHGXTFMPTLLGVYVFTDRPPRPPPTGASACTAGLLCRRCWASTSSPTGXPRPPPTGVFACTAGLYAAVVGRLRLHRSACLCRRRLVFPPARLAFIPPLLGVYVFTDRXPSPPPTGVSACTAGXLCRRCWASTSSPTGXLRRRRLVFPPARLAYYAAVVGRLRLHRPAASSAADWCFRRCCWASTSSPTGXLRRRQLVFPPARLAYYAAVVGPRPACLRRRRLVFPPARLAYYAAVVGRRLHGWPVITPTDAIFFTAGYIAVTTNRHQYLQHKLPTFAMAADWFLHFH

SEQ ID NO: 193276 - protein, 75 aa, Oryza sativa
  Clone ID: PAT_MRT4530_89428C.1.pep
NRPWPEPVGQGKNNQFGRNKKRATNSRVKIFFAPGDSYLPLSLENREAIGTKGLIKKGTQKGGGQRANNEFFISD

SEQ ID NO: 193277 - protein, 306 aa, Oryza sativa
  unsure (1)..(306): unsure at all Xaa locations
  Clone ID: PAT_MRT4530_89429C.1.pep
PTPSESVTTSLMARDFTSSPTTGSLASHSTSVGRLRLHRPAXASAAADWCLCLHGXSIMPPSWGVYVFTDRXPSSPPTGVSAXRLAYYTAVVGCLRLHHRLAFAAADWCFRLHGWPIMPPLSGFYVFTDRPPRMTPIGAILFTVAHVVVIILLLSSPTGYAAVDWCFYLHNYASSLPVCFCYRRFEFTSSLLCNFVIMVEQLQLHCLLHRQSLLLLLRKFCYFTDHDVYMSLNILTGSTIFKTSTRTSSTCILTQAMSTRRQATVFDSIFSCFPTNQRQAFYFINSNYFTGNFGFSVVATIYFKFL

SEQ ID NO: 193278 - protein, 1302 aa, Oryza sativa
  unsure (1)..(1302): unsure at all Xaa locations
  Clone ID: PAT_MRT4530_8942C.1.pep
PPQPLDGLIKADAAAGSKRLLRQVGTYKSSFAFTLLGXPSTDKVXSVNAPYVSKIDSLLFFKIGTLWPSPDATPKCAQLSIYDLASDVQNWFNIFEKERVCNDSPDPKIIAALSAMLDTHNKLVQNFRYARSRLAEHGDEKITLCLLGCNAKDDVQYNLPTSGEIAAIIVGDFDAKECKFDVLVHDRDHGMRHVSSLHPSYLALQYPLLFPYGERGFHLGIKYADYDGVGIVDAIDRGVTSGDSVGKHQVLPASFTGGRRYMVMNYQDAMAICRLYGSIDLFVTFTCNSKWQEIAETIRFEPGQQPSDRPDVIVRVFNMKVNDFITDIREGRTFGKVLADISASVIDSFICAEIPDFDTDRLGRRNDGRYITKNGIRLDNRSVVPYNLNLLKTYEAHINVEWCNKSNMIKYLFKYITKGHDRAKIYFETTSKIGNISPNHDLAPPDEILEYMDARFLSTCEALHRIFEFDIHYRIPPVERLTVHLPGKNYVRMLLMIVKGAQSYADMRTHNGIVYSTFREACEARGLLEGDNEWYLLFDEAIESASSKQLMQLFVTVILYCSVGDVRSLFDKYWLHMADDIHHRLKKALDNPRCIIPHEHLLSILLHELTAIFANSGGNIRDFNLPVPTSASHMPAGNRLIDEEYAPDPLMMSMHTDSLISQLNADQKKTFDTIVSSVSSKQPGVASLLLPRGRTAHSRFKIPIDIDETSLCNIRRGTMLADLLIETALIIWDEAPMTHRRCFEALDRTLRDILSETNPANSIISFGGKPVVLGGDFRQILPVVPKGSRLAVMNASVTNSDLWKHVTVLTLNINMRLLRPALAQNERDELHEFSQWVLAVGDGTLPMIAKEGEVEPSWITIPDDLLVVTDGDKIAAIVDESXIPDFDLLYPXEFLNSINVTNFPTHNLVLKEGVVVMLLRNLNQSVGLCNGTRLRRLALSAAFMNKTWPLLYINFAINMFHLLTIAYILISQLLYGDISKQIKTRLSRLWDFHDINDEEKIYHTELVLLDETGASIHVQIYPSLRNKFKDLLQQGKVYYIDSFSVRYANRTYRPVANPLMISFTKWTTLEECIEIPDNFPSITFSLTPFQDVPSLVEKNHFYVDVMGIITEVGATATIRPKSSNTDNLKRTMQISDARPDFDWKLTVQMRDRFVVNITITSIAQHTSWCYNSCKLCSRTSRPFDFTYRYTHCSYIGIAVPSFTEDTLMKNQETLQVNSIISSSGTAQPLLSSSSDTAVQPLAIMPSASAKPVPDVTGVAAQPPPSVNLSTKKITEKRAMPTASAPPAKKLFKDDSPSKGDNK

SEQ ID NO: 193279 - protein, 674 aa, Oryza sativa
  unsure (1)..(674): unsure at all Xaa locations
  Clone ID: PAT_MRT4530_89430C.1.pep
MDTDDAGAAHAATPPARGCDLRLLRSDDYVASLPAVLLESRICSSAASKLHHAKESETSTDPCYDRDIALAILKLLVFATGDIINNQIQQGSRTHYCRASSPTWLATSADTVDRLNKFAIGCFHAAEPDYRPCMAHADPAAPLIAHADPAAPLHWPLLMGIVIFTAGLPLSPPTSVLVYTVGWSHYRSWASTSSPXPVCLCRRLLVSLPTRLAYYAAVGGHLRFHRXTAFVAADWIQIQICIKGIHGFKLISYAPRMDQSEHHHWLAVVAADWCLRLYSWLVTTPLLGVYIFTXRFAFAAADWCHRLHSWPXLCRCCWASTSSLTGRLVRRRLXIVGRLPLHRLAXLVRRRLVFPPIRWPIMPPLLGVYVFTDRPPRPPPTGVSACTVGLLCRRCWASTCSPTGXPRPPPTGVSAYTVGLXYAAIVGSLRLLRPAXLIRRRLVFPPARLAXMPPLLSVYIFTDRLPRPPPTGVSACTGGLLCRSCWASTSSPTGRLVRRRLVFPPARLAFMPPLLGVYVFTDXAASTAADWCFRLHGWPXLCRRCWASTSXTGRLVRRRLVFPPARLAYYAAVVGRLHLHRPAVSSAADWCFHLHGWPXLCRRCWASTSSPTGRHVRRRLVFPPARVAYYAVVVGRLRLLRPAASSAADWCFRLHGWPXMPTLLGVYVFTDWPP

SEQ ID NO: 193280 - protein, 719 aa, Oryza sativa
  unsure (1)..(719): unsure at all Xaa locations
  Clone ID: PAT_MRT4530_89431C.1.pep
QQRLHRRPASVAADWCHRLYGWSVTPPFMGVHVFTXGWPSPPPTGVSACTAGLLCRRCWASTTSPPACLRRRRVVPPPTRLAYSXSVAADWCPRLYGRLVTPPLMGIVIYTAGLPPSPPTGVPAYTVGWSHHRXWASSSTPPACLRRRRLVSSPTRLAYYAAAVGRLRLHRRPASVAADWCLRLHGWPIMPPLLGVYDFTAGLPPSPPSGASAYTAGLFXLRRRRLVSSPTRLAYYAAAVGRLRLHRRPASVAADWCPRLHGWPIMPPLLGVYDFTAGLPPSPPSGASAYTAGLLCRRCWMSTSSPLAHLRCRRLVFPLTRLTYYAAISRHLRFHRRPPSSPPTGVFIVIDGRLCSHIGHFRHHQGEYYKAKXIIYFLLLIIAKVPEIHGFKLISYAPGMDQSEHHHRLASTAADWCFRLHGWPIMPPLLGAYVFTDRLAFVAADRCPRLHGWPLCRRCWASTSSPTGLPSSPPTDVLACTAGLYAAVVGRLRLHRSACLRRRRLVFPPARLAFMPPLLGVYVFTDRPPHPPLTGVTACTAGLLXRQLMLSSSRLXYIAVTTNRHQYLQHKLPTFAMAADWFLHFHGCMILPVLIGLTIFIAATTTDGHHRLPPPTRVMPPPTSAFIFTTARLHYRFTSSRQHNFVIMVERLHLYYLRNQQTLLLLLHKFCYITNHDVVVNLDISTCDAVLFYYNKWLSNIQDFYLDIFNTYLQSSNDY

SEQ ID NO: 193281 - protein, 36 aa, Oryza sativa
  Clone ID: PAT_MRT4530_89432C.1.pep
VLRHPALSLLLFCIYLSWDSYQASHVSKNFSENTDD

SEQ ID NO: 193282 - protein, 121 aa, Oryza sativa
  Clone ID: PAT_MRT4530_89434C.1.pep
MSDAYKKAKPGRLVFKGGEAASLHKPPKKHKKNKKPASDAPADAEADAEGAAAPSAEGAAEGGGDEYTIDAAKRMKYEDLFPVESKKFGYDPANAAKASRSRTVEEALDDRVRKKADRYCK

SEQ ID NO: 193283 - protein, 1347 aa, Oryza sativa
  unsure (1)..(1347): unsure at all Xaa locations
  Clone ID: PAT_MRT4530_89435C.1.pep
MFRQLARQQQRLHRRPASVAADWCHRLYGWSVTPPFMGVHVFTDRLAFAAADWCFRLHGWPIMPPLLGVYDFTAGLPPSPPXWCLRLHGWPIMPPLLGVYDFTAGLPPSPPSGASAYTAGLLCRRCWASTTSPPACLRRRRLVPPPTRLAYYAAAVGRLRLHRRPASVAAEWCLRLHGWPIMPPLLGVYDFTAGLPPSPPIGASAYTAGLLCRRCWASTTSPPACLRRRRLVSPPIRSVGHTTVDGHRHLHRRPASVAADWXSPPIRSVGHTTVDGHRHLHRRPASVAAEWCLRLHGXPIMPPLLGVYDFTAGLPPSPPSGASAYTAGLLCRCCWASTTSPPARLRRRRVVPPPTRLAYYAAAVGRLRLHRRPASVAADWCLRLHGWPIMPPLLGVYDFTAGLPPSPPSGASAYTAGLLCRRCWASTTSPPACLRRRRLVSPPIRSVGHTTVDGHRHLHRRPASVAADWCPRLYGRLVTPPLMGIVIYTAGLPPSPPSGASAYTADLLCRRCWASTTSPPACLRRRRVVPPPTRLAYYAAAVGRLRLHRRPASVAAEWCLRLHGWPIMPPLLGVYDFTAGPPPSPPIGASAYTAGLLCRRCWASTTSPPACLRRRRVVPPPTRLAYYAAAVGRLRLHRRPASVAAEWCPRLYGRLVTPPLMGIVIFTAGLPPSPPIGASAYTAGLLCRRCWMSTSSPLAHLRCRRLVFPLTRLTYYTAISGHLRFHRRPPSSPPTGVFIIIDGRLCSHIGHFCHHQGEYYKAKIQIQICIKGIHGFKLISYAPGMDQSEHHHRLASTAADWCFRLHGWLIMPPLLGVYVFTDRLAFAAADWCFRLHGWPLXPPLLGVYVFTDRLAFAAADWCFRLHGWPLCRRCWVSTSSPTGXLCRRRLVFLPARLAFMPPLLGVYVFTDRPPRPPPTGVSACTAGLLCCRCWASTSSPTGXLRRRRLVLPPARLAFMPPLLGVYVFTDRLAFAAADWCFCLHGWPLXPPLLGVYVFTDRPPRPPPTGVSACTAGLLCCRCWASTSSPTGLPSPPPTGVSACTAGLYAAVVGRLRLHRPACLRRRRLVFPPARLXIMPPLLGVYVFTDRLPRPPPTGVSACTADLLCRRCWASTSSPTGCLDRRRLVXPPARLTYYAAVVGRLRLHRPVAASAADWCHRLHGWPVIXRQLMLSSSRLATSLSLLIGISIFNTSCLRLPWLPTVPSPLRLVYTATTTDGHHRLPLPTXVMPPPTSAFIFTTARLRYQFTSSRRCNFVIIVERLHLYYLRHWQTLLLLLRKFYYFTNHDVFVNLDISACNAMIFYYNKXLSNIQDFYLDTFNTYLQSSNDYSTTRSYNSRLYVQLFPN

SEQ ID NO: 193284 - protein, 1380 aa, Oryza sativa
  unsure (1)..(1380): unsure at all Xaa locations
  Clone ID: PAT_MRT4530_89436C.1.pep
MFRQLARQQQRLHRRPASVAADWCHRLYGWSVTPPFMGVHVFTDRLAFAAADWCFRLHGWPIMPPLLGVYDFTAGLPPSPPSGASAYTAXPIHSVAADWCPRLHGWPIMPPLLGVYDFTAGLPPSPPSGASAYTAGLLCRRCWASTTSPPACLRRRRLVPPPTRLAYYAAAVGRLRLHRRPASVAADWCLRLHGWPIMPPLLGVYDFTAGLPPSPPTGASAYTAGLLCRRCWASTTSPPACLRRCRLVSSPPRLVCAAAVAXWRYRLHRRPASVAADWXSSPIWLVGHTTVVGRLRLHRRHASVAAEWCLRLHGWPIMPPLLGVHDFTAGLPPSPPTGVIAYTVGWSHHRSWASMSSPPACLRCRRVVPPPTRLAYYAAAVGRPRLHRRPASVAADWCHRLYGWSVTPPFMGVHVFTAGMPPLPPSGASAYTAGLLCRRCWASTTSPPACLRCRRVVPPPTRLAYYAAAVRRLRLHRRPASVAADWCPRLYGWLVTPPFMGVHVFAXGWPSPLPIGVFAYTVGGLRRCXWASSSTPLAWFHWRRLVIHGFKLISYAPGMDQSEHHHRLASTAADWCFRLHGWPXMPPLLGVYVFTDRPPRPPPTGVSACTAGXLCRRCWASTSSPTGRLVRRRLVLPPARLAYYAAVVGRLRLHRPXAFAAADWCFRLHGWPXMPPLLGVYVFTXGLPSPLPTGVSACTAGXLCCRCWASTSSPXACLRRRRLVFPPARLAXYAAVVGRLRLHRLAXPSPLPTGVSACTAGLYAAVVGRLRLHRPAASSAADWCFRLHGWPIMPPLLGVYVFTDRXASSAADWCFRLHGWPIMPPLLGVYVFTDRPPRQPPTGVSACTAGLYAAVVGRLRLHRPAASSAADWCFRLHGWPIXRRCWASTSSPTGXLRCRRLVFPPARLAXMPPLLGVYVFTDRPPRPPPTGASACTAGLLCGRCWASTSSPTGXLRRRRLVFPPARLAYXPPLLGVYVFTDRLAFAAADWCFRLHGWPIMPPLLGVYVFTDRPPRPPPTGVSACTAGLLCRRCWASTSSPTGXPRQPPTGVSACTAGYYAAVVGRLRLHRPAXLVRRRLVLPPARLAYYXPLLGVYVFTDRXPSPPPTGVSACTAGLLCRRCWASTSSPTGRLVRRRLVFPPARLAYYAAVVGRLRLHRPAASSAADWCFRLHGWPXLCRRCWASTSSPTGRLVSRRLVFPPARLAXYAAVVGRLRLHRPAAASAAXLVSLPARLACYNAXDATFFTAGYIAVTTNRHQYLQHKLPTFAMAADWFLHFHXLHDSASVDWPYLLHRRSSRLLLTSALTSTSGLYSYHYXGHHHLLSPTDYAIADWCFYLHNCASSLPDFYLDIFNTYLQSSNDYSTTRSYSSRLYVQLFPN

SEQ ID NO: 193285 - protein, 55 aa, Oryza sativa
  Clone ID: PAT_MRT4530_89437C.1.pep
MPQSDALLEALDAPKPIATQAAKKPHGWEIREVRKDNHVDGLRETREDVEYYPIV

SEQ ID NO: 193286 - protein, 46 aa, Oryza sativa
  Clone ID: PAT_MRT4530_89438C.1.pep
MGPESSELPYWPMKFWAAHRVTNNDHKEEDACEDHVDPLEWDSYGF

SEQ ID NO: 193287 - protein, 88 aa, Oryza sativa
  Clone ID: PAT_MRT4530_89439C.1.pep
LLSVILYLQLSNYSCIPIVSIIWLASFYSSLYSTHLCSCAQALSQCVACVYLSSFTFVHSKASVYMTIFVWLCASLASGVRITVCFTR

SEQ ID NO: 193288 - protein, 235 aa, Oryza sativa
  unsure (1)..(235): unsure at all Xaa locations
  Clone ID: PAT_MRT4530_8943C.1.pep
MAAGSSAGDSPSSGRSLPLPTLHKHSPCLPPPFPPLAALSPRRNRARAVVLSLRRRRRAPVRRRRXPGPPPASASPACASPRPRRSRPPLRLARRXPPERRRPSRPEPRRRLFPLRSPFPSSPSTRGEPWTAXFVSPFPPLSRPPLRRAYGRRRRPXGRGRAASRRPCRRGRFRARPAAAMWGPAVSRPRPRVRLTRGTHGAGRRKPRAPGPPWTVRLPRGPHSRGPGPRAPPLG

SEQ ID NO: 193289 - protein, 220 aa, Oryza sativa
  Clone ID: PAT_MRT4530_89440C.1.pep
MGPESSELPYWPMKFSAAHRVTNNDHEEEDACEDPVDPLEWDSYAVDKFSKWIEAKPVVTITADKARDFFVNIVHWFGVPNRIITDNGTQFTGCVFKDFCEDFSIKICYASVAHPMSNGQVERANGMVLQGIKAQDFVGLHPYTGKWVDQLSSVLWSLRTMPSRATGQSPFLLVHGVEAMLSSEVEFESLRFRNFKEERYGEDRVDDLNRLEEACEAALI

SEQ ID NO: 193290 - protein, 142 aa, Oryza sativa
  unsure (1)..(142): unsure at all Xaa locations
  Clone ID: PAT_MRT4530_89441C.1.pep
AVAPPPVAPSPIGELAAASPHEPAACHHQSPASPPPLPPPPLLPDLAERRAPPRRRDHRYLPSSSSPLPAATSLSRPLPTPPAPPAAGTSPPAAAASPPTGSSGGEGTXPLPPSPASKEGREEEKRAREGRERRERVSEREA

SEQ ID NO: 193291 - protein, 372 aa, Oryza sativa
  Clone ID: PAT_MRT4530_89442C.1.pep
MDPAAAARGQAEQWMRVAEKLLVARDLEGCKEFVSQALGTDPHVPGANDLLAAADVLLAAQRRRIPNGHPDPYAVLGLDPSTPASRRPDAIHAQYRRLSFLLNRSHPDRPCSLSFAEAARLVADSWAFLSDPILKSALDAELDAAAAAAAAAAARAYHPPAPMQQPQPQPPPQPTPPRAAPLPTPPRAPPQSTPPRAAPQSTPPQRVAPQPPATAAAPPIEPVAPPSPTFWTVCMSCCHIHQYDRLYEARKVLCPSCRQPFVAEEMAEPPPIVPGTDMYYCTWGFFPVGFPGCPGFEKLISSQQHGTDQPNTPWLGTTGGAEADGVAGAENGAPVSAAVEVQSVPKPAKPVRVKVGAKKRGRPKGSKNKKNL

SEQ ID NO: 193292 - protein, 107 aa, Oryza sativa
  Clone ID: PAT_MRT4530_89443C.1.pep
IASAALFLFVFFFFFLFSFSFLIFFFLCKAAIGSSLGHESIPKKKGLKIGWAMPPIQNKFKPRTPTTGVPYMAGPPPLVLKTLFFLAKIKPQATSPTSIATRPTFVI

SEQ ID NO: 193293 - protein, 70 aa, Oryza sativa
  Clone ID: PAT_MRT4530_89444C.1.pep
MGYGCSPEAESSRTTGTQPRGIRMEIGAGGGGVAGEVARSRPTAQAGGGWMGVECRWGTTNKARQRKEEP

SEQ ID NO: 193294 - protein, 79 aa, Oryza sativa
  Clone ID: PAT_MRT4530_89445C.1.pep
MTLTRVGGTEANRCAKIPVSDRREGRSGDETSRRQTRRPVVKTWTPINGGVTNQPCRRGHQSVADEVSRRFPEQMTPYV

SEQ ID NO: 193295 - protein, 110 aa, Oryza sativa
  unsure (1)..(110): unsure at all Xaa locations
  Clone ID: PAT_MRT4530_89446C.1.pep
CRRCWASTTSPXGLSPSPPTVSSPXTVGVRHRRCXTAISSSSTGRLVCRRLVSPPTRLAYYAAVVGRLRLHRPAASSAADWCFRLHGXPIIPPLLGVYIFTDQPPRMTPT

SEQ ID NO: 193296 - protein, 217 aa, Oryza sativa
  unsure (1)..(217): unsure at all Xaa locations
  Clone ID: PAT_MRT4530_89447C.1.pep
MAHRATRAGGRRKKXGRPRRTADSGRVHRSXRDGFGLRGAHRSDEGFERERSNGSDSPERGRRRXIAAAHAGSEKRGKIHQSNGSSIRRGGSISDVQGVHSRRRMGXRSTEEGRRRAAASGIRRQWRWGHAGRRQGLGQHPRAFGRAIEPLRKLEWKRKSGEGERGLPRREIAGKSVRQRGGTASASSRGRRWREGDRSPFRLRAHADFPARGEEAV

SEQ ID NO: 193297 - protein, 286 aa, Oryza sativa
  unsure (1)..(286): unsure at all Xaa locations
  Clone ID: PAT_MRT4530_89448C.1.pep
WRRGHAGRRRGLGQRPRAFRRAIEPLRKLEWKRKSGEGERGXTASGDHWEERPTARRXSPRPRAGEEEGDGARRSPSAPRACRLSGXATARKVVAARRQEQRKSGERLGFYRWRRGGLVGGTDLDGQGSSAVACGQGXGRRTWQSRAAEGGSMVPVGEKAXKGEGGKGALPMPFWEKGGGRESSASGSWTHTTWSGRACGNRARAASGRTRRRLSAATDRAWVGVWTRISKSILGFGRIERSQGREQYSETSQREMDNLEKESVTWEFEFDYLMRYAGEDFEEKSE

SEQ ID NO: 193298 - protein, 230 aa, Oryza sativa
  Clone ID: PAT_MRT4530_89449C.1.pep
MPINAVIIPHIPTSVMRARVSRRRLAHRSITKQCFFRPVCQCSDNPVDVLFGQRTATSGLWKPQAWEVQRRRIWQRQVQFGYSCTPCNCISSTILLAAVPPLPYPRRTKNAIKLISMDKKPARNLTGFLATTAGTVVNNNNSGKLPGLSRKLLQKALSEHKKNALTKVKSSGNTREHSMVLRDEWEDEIATLRLQFEQKDIEEENEGKNNLKPQRGGANKEQIQAGDGRN

SEQ ID NO: 193299 - protein, 243 aa, Oryza sativa
  unsure (1)..(243): unsure at all Xaa locations
  Clone ID: PAT_MRT4530_8944C.1.pep
MPTTEVAPRDDEPARMNDEDDDGDTGGVREEGRRDRGRPCRCDAKGGDDDVGRCTGTAEGAAGGDVDEEEGEAGAAAAVSGRIRGQAGVEGDVTMPREETAASAGAXARRPGQLEAAQWRQRHWTTAGTRLRWFPRETKATPGKRMHLRGRGWRRHGWPAHRRGGRGGWRWPAAQDRDEGDGERWCGHGETREEAKTRERRKGIPFYRXGEGSGHGRSGERRREWRPAATEGDRDCRGRSGRL

SEQ ID NO: 193300 - protein, 49 aa, Oryza sativa
  unsure (1)..(49): unsure at all Xaa locations
  Clone ID: PAT_MRT4530_89450C.1.pep
DGDXCCSCSLMXSANRSCCRSSCCICALXIRDLSYHICPEFDRXIQYPP

SEQ ID NO: 193301 - protein, 109 aa, Oryza sativa
  Clone ID: PAT_MRT4530_89451C.1.pep
MQTRAHHPRGGSPACDRVLHSYWRAPHGDRAQARVWQRLNDSTVCLPSETAPRPYVLDFGWRTAPIELEGWMPRTKPAYVCAARPGRRGWDTGPDWQERDRCMWVWRQP

SEQ ID NO: 193302 - protein, 40 aa, Oryza sativa
  Clone ID: PAT_MRT4530_89452C.1.pep
IKRCSLRCLYKRPLAQVPRLYAAQTPGMVQVSAFTFHNLR

SEQ ID NO: 193303 - protein, 91 aa, Oryza sativa
  Clone ID: PAT_MRT4530_89453C.1.pep
MGLVHAMNDEVVPGKTTVTNVPKPLITSLCYLPASISHSDGGKDSLLPVKMGKQMAMGGEKFVPTQRRVTINQMQSTIKSNDKTEGADEHE

SEQ ID NO: 193304 - protein, 148 aa, Oryza sativa
  Clone ID: PAT_MRT4530_89454C.1.pep
MARIAYTSADSRLAIPSASLDSSATAACGCKQSSRFMANNSNCCGFMANNSNCCGFMATVLDFTSRLRAAAGRRSNAPWLAGFPSLQGKQRVGRRRTRRIYAHTVVTHGPAESVFTPAKNSRSQDGITREPVRYSAAAYCVTGHMQEE

SEQ ID NO: 193305 - protein, 258 aa, Oryza sativa
  unsure (1)..(258): unsure at all Xaa locations
  Clone ID: PAT_MRT4530_89455C.1.pep
GFKLISYASGMDQSEHHHRLAFAAADWCLRLHGWPIMPXLLGVYVFTXGLPSPPPTGVFAYTAGLLCRHCWASTSSPTGRLVCRRLVSPPARLAYYAAVVGRLRLHRPAASSAVDWCLRLHGWPIMPPLLGVYVFTDRPPRLPPTGVSACTAGLLCRRCWASTSSPTGRLVCRRLVSPPARLAYYAAVVGRLRLHRPAXAADWCLRLHGWPIMPPLLGVYVFTDRPPRLPPTGVSACTAGLLCRRCWTSISSPTGRLV

SEQ ID NO: 193306 - protein, 112 aa, Oryza sativa
  unsure (1)..(112): unsure at all Xaa locations
  Clone ID: PAT_MRT4530_89456C.1.pep
NKFFLFFWGEPKHKKLTHLPRDKALTLANKGHYYQQSDTIPSKPSNQTXTDRIGHQQNTSLLNNHHTGCNKIFNLGKTHNNNESDGILNQTSGKHVCSELNYEQETAILEKK

SEQ ID NO: 193307 - protein, 780 aa, Oryza sativa
  unsure (1)..(780): unsure at all Xaa locations
  Clone ID: PAT_MRT4530_89457C.1.pep
MGIHVFTDRLAFAAADWCFRLHGWSIMPPLLGVYDFTTGLPPSPPTGILAYTVGWIQIQICIKGIHGFKLISYAPGMDQSEHHHRLASTAADWCFRLHGWPIMPPLLGVYVFTDRLAFAAADWCPRLHGWPXLCRRCWAPTSSPTGXALRRRRPMSSPARLAFMPPLLGVYVFTDRXPSPPPTGVSACTAGLLCRRCWASTSSPTGXLRRRRLLGVYVFTDRXPSSPPTGVLACTAGLLCRRCWAPTSSPTGLPSSPPTDVLACTAGLYAAVVGRLRLHRPACXAAADWCFRLHGWPLCRRCWASTSSPTGXCLRRRRLVFPLARLAXYAAVVGRLRLHRPACXVAADWCPRLHGWPIMPPLLGAYVFTDRLAFVAADRCPRLHGWPLCRRCWASTSSPTGLPSSPPTDVLACTAGLYAAVVGRLRLHRPACLRRRRLVFPPARLXLGVYVFTDRLAFVAADWCPRLHGWPIMPPLLGAYVFTDRLAFVAADRCPRLHGWPLCRRCWASTSSPIGLPSPPPTGVSACTAGLYAAVVGRLRLHRPAAASAADWCHRLHGWPVITPTDAIFFTAGYIAVTTNRHQYLQHKLPTFAMAADWFLHFHGCMILPVLIGLTIFIAGRLVCCXLVPSPLHLVYTATTTDGHHRLPPPTXCYAAADXCFYLHNCASSLPVCFCCRRLVFTSSRQHNFVIMVERLHLYYLRYQQTLLLLLHKFCYITNHDVVVNLDISACDAVLFYYNKWLSNIHDFYLDIFNTYLQSSNDYSTIRSYNSRLYVQLFPN

SEQ ID NO: 193308 - protein, 53 aa, Oryza sativa
  Clone ID: PAT_MRT4530_89458C.1.pep
HTRRRVTLYLTNYIDMKVHTTKNRKTNINFAWRAHHQRETPHIEGKGRSPWAW

SEQ ID NO: 193309 - protein, 873 aa, Oryza sativa
  unsure (1)..(873): unsure at all Xaa locations
  Clone ID: PAT_MRT4530_89459C.1.pep
LLTNIFTDRLPRPLPTGALACTAGLLCRRYWVSTTSLPVGLIPVVTFTAGPASVAADCCPRLYGWLVTPPFTGVHVFTXGWPSPPPTGISACTAGLLCRRCRASTTSPPACLRRRRLLSSPLRLVGHTTVHGRPCLHRPXAFVAADWYCCLHGWPIMSPLLGVYDFIAGLPLSPPTGVLAYTVGRPHHRSWASTSSPTGLPSPPXLVSLPTRLANYAAVGGHLRFHRRPPSSPPTGVFGXHGFQLISYAPGMDQSEHHHQLAIVAADCCLRLYSWLVTTPLLGVYIFTXRFAFAATNWCHRLHSWPIMPLLLGVYIFTDRPPRPPLTGVSACTAGLXYAAVVGCLHLHRPAASSAVDWCHRLHGWPIXRRCWAFTSSPTGRLIRRRLVFRPARLAXMPPLLGVYVFTDRPPHPPSTGVTACTAGLLCRRCWASTYSPTGRLVRRRLVFLPARLAYXPPLLGVYVFTDRLPSSAADWCLRLHGWLVTPPLLGVYVFTDRXPSPPPTGVFACTAGLLCRRCRASSTSPTGXPRLPPTGVSACTAGLXYAAVVGRHRLHRLSXLVRRRLASPPARLAXMPPLLRVTPRNAWTPQRPPWXISATTTAARLKRRWSSDRSESTSNPTGFVGRKTTGLXPTCQRANARARAARLRLHRPAASCDANYCYHLHGCPCRCHRXQASSSSTQAVYVYRXLVSSLPWLHDSTSVDWPYRLHRRSSRLLLXLVPSPLRLVYTATTTDGHHRLPSPTXVMPLPTGAFIFTTARLHYQFASVAADSYXTSSRQCNFVIMVERPHLYYLRHQQTLLLLLRKFCYFTNHDVFVNLDISACDAVLFYYKWLSNIQDFYLDIFNTYLQSSNDYSTTRSYSSRLYVQLFPN

SEQ ID NO: 193310 - protein, 155 aa, Oryza sativa
  unsure (1)..(155): unsure at all Xaa locations
  Clone ID: PAT_MRT4530_8945C.1.pep
MQLNPKARIRRNKTKAKGTLSKCGNHLEAPXFNLISYTKLYCQNRLYQLTQSDSDPADPXIVADLDSCRFLLCSRIDLRLRLHFNLILFSDADITKFANFVLSLSSDLSNTQGDPXAISFPIRSPPMVMSSSASPSTAPSAEYAEVSSHRIDPFS

SEQ ID NO: 193311 - protein, 54 aa, Oryza sativa
  Clone ID: PAT_MRT4530_89460C.1.pep
NGNSRAVLLKKKKKKKKKKKKKKKKKKKKKKKKKKKKKKKKKKRGGHFKGLKFY

SEQ ID NO: 193312 - protein, 203 aa, Oryza sativa
  unsure (1)..(203): unsure at all Xaa locations
  Clone ID: PAT_MRT4530_89461C.1.pep
SNXRRXXXFXXXEXGXGXFLXXXGAXXEGGXXXXXLXGXXNXSXXGXXMNGXXXXXGGGXXXWGGNXXGXFFXXTPXXEKRXXXXXGFXGGKGXXFPXRXFKKGXRGGXKXNXXGGVXGPPPPXGXFLWXXXVXVXXFFFFFXGXAXTSXXFFXFFFFFIFFFFFFFXXSTMMKTXSRQFTQVANIFQPQSKHLSFFVPNPAS

SEQ ID NO: 193313 - protein, 679 aa, Oryza sativa
  unsure (1)..(679): unsure at all Xaa locations
  Clone ID: PAT_MRT4530_89462C.1.pep
LVGHTTVDERLRLHRSAASSAANSCLRLHGWPIMLPLMGVYVFTTGLPLPPPTGVFAYTVGWSHHCSWASTSSPXPACLRRRRLVSPPTRPAYYAAVVRRLRLHRRPVFATADWCLHLHSRPIKPLLLGVYDFTAGLPLPPPTGVSAYTAGLLCRRYWASTTSPQACLRRRRLVSQPTRPAYYAAVVGRLRLHRPDWCLRLHGRPXLCRRCWASTTSPPVCLRRRRLVSPPTWPAXMPSLLGVYDFTAGLPSLPPTGVSAYTAGLXYAIVVERQRLHXPACLHRRRLVSSPIRLVGHTTVHGRTCLHRRLASAAADWCPRLYGWLVTPSLMGIFAFTXGLLPPPTGVFAYTVDRLRGRXWALSSTPACLXTAVRWIQIQICIKGIHGFKLISYAPGMDQSEHHHRXPSSSSTNVXCLYGWVVTPPLLGVVVFTNWPPCPPPTGVFAYTVGWSHHRCWACTSSPTGLPSPPPTGVSAYTADLLCRRXCWASPSSPTGXLCHRQLVSLHARLTYYAAICXRLRLHRPACXATTSWCLRLHGWPIIPPLLGVYVFTDQXASSAADWCLRLYGWLVTPPLLGLYVFTAGSPSPPPTGVSACTAGLLCRLCWXLRLHRWPVSPSPTGVLAYKDSXSASVDGRHHHLQRNLSTSAADWFLHFHGCMIMPVLIGLIVFTAGRLVCG

SEQ ID NO: 193314 - protein, 112 aa, Oryza sativa
  unsure (1)..(112): unsure at all Xaa locations
  Clone ID: PAT_MRT4530_89463C.1.pep
YSSLPVRGLLEVYHEGPSAGPAETENLGDRLEPEASDEGRRXNTPRAKTTAREYTCFAGQGPRQEATHAESVRRKPRPEGISFAKAPNPTMRKPSGPLRPRRGIHQIDGPSH

SEQ ID NO: 193315 - protein, 172 aa, Oryza sativa
  Clone ID: PAT_MRT4530_89464C.1.pep
MDSCLMAKTRGPSLVLFAWPMCARLAWLVGWNGSRFGSVVVRLRGFGSHRTDYRVSRFGDWAWITAKWAARAGTTGPGTRSFGLPGLPKPKTWATGSNRRQATKVEEEYPKGEHHSSGVHVLRWTRTPSGGHTGGVGEAKASARRHRFRQGTKPHHEEAQRAVASPQGDSPD

SEQ ID NO: 193316 - protein, 888 aa, Oryza sativa
  unsure (1)..(888): unsure at all Xaa locations
  Clone ID: PAT_MRT4530_89465C.1.pep
TTSPPACLRRRRVDPPPTRLAYYAAAVGRLLLHRRPASVAAEWCLRLHGWPIMPPLLGVYDFTAGLPPLPPSGVSAYTAGLLCRRCWASTTSPPACLRCRRVVPPPTRLAYYAAAVGRLRLHRPACLRCRRVVPPPTRLAYYAAAVGRLRLHRRLASVAAEWILRLHGWPIMPPLLGVYVFTTGLPPSPPIGVLAHTVGWSHHRSWASTSSPPACLRRRRLVSPPTRLAYYAAAVGRLRLHRRPASVAADWCLRLHGWPIMPPLLGVYDFTAGLPPSPPIGASAYTAGLLCRRYWASTTSPPACLRRRRLVPPPTRLAYYAAAVGRLRLHRPAASSAADWCFRLHGWPLCRRCWAPTSSPTGLPSPPPTGVSACTAGLYAAVVGRLRLHRPACLRRRRLVFPPARLAFMPPLLGVYVFTDRPPRPPPTGASACTAGLYAAVVGRLRLHRPACLRRRRLVPPPTRLAYYAGAVGRLRLHRRLASVAADWCLRLHGWPIMPPLLSVYDFTAGLPPSPPTGVSAYTAGLLCRRCWASSLSPSTAFVAADWCLHCYXGRLCSHIGHFCHHQGEYYKAKIQIQICIKGIHGFKLISYALGMDQSEHHHRPPRPPPTGVFACTVGLLCRRCWASTSSPTGLPSPPPTGVSACTAGLLCRRCWASTSSPTGRLVRRRLVFPPARLAYMPPLLGLYVFTDRPPRPPPTGVSACTAGLLCRRCWASTSSPTGLPLPPPTGVSASTAGLLCRRCWASTSSPTGRLVRRRLVFPPARLAYYAAVVGRLRLHRPAASSAADWCFRLHGWPIMPPLLGVYVFTDRLAFAAADWCFRLHGWPIMPPLLGVYVFTDRPPRPPPTGVFACTAGLYAAVVGRLRLHRPACLXAADWCFRLHGWPL

SEQ ID NO: 193317 - protein, 62 aa, Oryza sativa
  Clone ID: PAT_MRT4530_89466C.1.pep
MTCSVPIMVVGESKQRHGDGQRLARCSSGWDSKDEDVAAAACRENNAGTGSLEQSGMGSGAQ

SEQ ID NO: 193318 - protein, 147 aa, Oryza sativa
  unsure (1)..(147): unsure at all Xaa locations
  Clone ID: PAT_MRT4530_89467C.1.pep
MSNAAHRKARAISMSNVAHRKARATSPGVFDSTNLERRSRLASINPXSMRPYISLLKVAHRKVRATRPKTMERWRWRTARWRETPAVGHVEAASDAVAMIRQYPPARRWWTVMRWRRGRVEKRPTATPPLRHIMPASRAHEEAATKG

SEQ ID NO: 193319 - protein, 576 aa, Oryza sativa
  unsure (1)..(576): unsure at all Xaa locations
  Clone ID: PAT_MRT4530_89468C.1.pep
LCRRCWAXTISPPACFRRRRLVPPPTRLAYYAAAVGRLRLHRRPASVAXDWCPRLYGWLVTPPFMGVHVFAXGWPSPPPTGVSAYTASLLCRCCWASTTSPPACLRRRRLVSSPIRLVXTPPFMGVHVFADRLAFAAADWCFCLYGWQTSPPXWASSSTPLAWFHWRRLILLILYLISYAPGMDQSEHHHRLASTAADWCFRLHGWPXLCRRCWASTSSPTGLPSPPPTGVFACTAGLXYATVVGRLRLHRPACLRRCRLVFPPVRLAFMPPLLGVYVFTDRPPRPPPTGASACTAGLXYAAVVGRLRLHRPACLRRRRLVFPPARLAFMPPLLGVYVFTDRLAFAAADWCFRLHGWPXLCRRCWASTSSPTGLPXAAADWCFRLHGWPLCRRCWASTSSPTGLPSPLPTGVSACTAGLYAAVVGRLRLHRPAASSAADWCFRLHGWPIMPPLLGVYVFTDQLAFAAADWCFRLHGWPXLCRRCWASSPLXRLVFPRLHRPACLRRRRLVLPRLHRPAAASAADWYHRLHGWPVITPTDAIFFTAGYIAVTTNRHQYLQHKLPTFAMAADWFLHFH

SEQ ID NO: 193320 - protein, 963 aa, Oryza sativa
  unsure (1)..(963): unsure at all Xaa locations
  Clone ID: PAT_MRT4530_89469C.1.pep
QHLSFPVNRPRVHSAGLSSPPPLLISTTTSPPACLHRRRLVSPPTRLAYYAAVVGRLRLHRRPASVAAEWCLRLHGWPIMPPLLGVYDFTAGLPPSRPTGVSAYTAGLLCRRCWASTTSPPACLRRRRVVPPPTRLAYYAAAVGRLRLHRRPASVAAEWCLRLHGWPIMPPLLGVYDFTAGLPPSPPSGASAYTAGLLCRRCWASTTSPPACLRRRRVVPPPTRLAYYAAAVGRLRLHRRPASVAAEWCLRLHGWPIMPPLLGVYDFTAGLPPSPPTGASAYTAGLLCRRCWAYTTSPPACLRRRRLVSSPIRLVGHTTVHGRPRLRRPXAFAAADWCFCLHGXPIMPPLLGVYDFTAGLPSSPPTGVLAYTVDWSHHRSWASTSSPXACLRRRRLVSPPTGLAYYAAISGHLRFHRRQPSSPPTGVFIIINGRLCSHIGHLCHHRGEYYKAKSSFILXLYDIFVFSFASXYSTGSPLTSESGATDXYHIFHNIYLDCLRHNLSTKVPIELWSSIFLCTRGLYKSTYRVMEFYLPMLSVWFANGWLPLGRFLAPGGSLDGLSNARFXVLFRINQKHRDKINLFSALYNCKSTRVVNSDXVKLYSINDKLMSLICMFGKCLGRLPMLGGYDXSDRLAVIAADWCLRLYGCLVTPPLLGVYDFTDRPPRPPPTGVSACTAGLXMPPLLGVYVFTDRPPRPPPTGVSACTAGLLCRRCWASTSSPTGRLARRRLVFPPARLAYYAAVVGRLRLHRPAASPAADWCFRLHGWPXLCRRCWASTSSPTGRLVRHRLVSPPARLACYDAXLMLSSSRCPHLYVWFXTATTTDEHHRLPSPTXVMLSPTGAFIFTTARLHHRFASXRRLVFTSLQQYNFVIMVERLHLYYLRHRQTLLVLLRKFCYFTNHDVFVNLDISACDAVLFYYNKWLFNIQDFYLDIFNTYLQSSNDYSTTRSYXSRLYVQLFPN

SEQ ID NO: 193321 - protein, 842 aa, Oryza sativa
  Clone ID: PAT_MRT4530_8946C.1.pep
MVSSILGNGRAKSGHQPLPPAAIPVDVPAPPVAGSLPHPIKWDPHPSFYRFSPFPSLPVVVSPLPAFSFSLSDAGRPPATSPSSPEHRPAVPSPPSALQHRPLHRPYRLLAGNSPERCPRRQPVALVPLYSLQPAAVHRRCADRRRRLLLRHRGIAFFPGITSSSPEFRRNAVARAGLTFLLVDISSGCPGRRARASADVAVSSLGDAASPSTPACPRFRRNVAANLSVRLAGVVRPPVPPRRVPVGHLHHHLRHRSRDVVLGLASPSTEPRRGVVLVVLVPVQPLPAVLVASSPVPVVVVVVVLSSFPVVVAPVLVFVLGSASSSLVPAAARLRPRIAAEAVPSPFVSVVPVCLRRARSSLSFPRLVAWWANEGYTSCGPVVEMSYGGGLVPNARGSVLPACPGYPGRSEARCEAGVKIFENPSQNLSHPLNWNNPAGATNVQVPTVQQQCKLSEFLKTEPPTFAIAVDPMEASEWLRTIEKKLGLIQCTDQERVGFATHQLVGPASEWWDNYEASQPEGHTTTWNEFSSVFRRSHVPSGMITLRKREFRYLKQGDLTVAEYLHGFYRLAHYAPEDVETGEDKQEKFLQGLKDELAVQLLLEDYEDFEKLVDKAMQLESEHNRMTNCKRRMVNNPVFPGGNQRQRTEPLQITGSSVVYPEFLPQEDERNADNNNSNTNADDTTNNHGSCPIHDHLDQAYNVNIIHQDIDDSINEGTQNDNLSNFDTEKDSNGDSNNGTTDADVSKDFQPPIPTPNQNDRSQTDNSAKKTLICYNCKEPGHFSRDCPQPKRNLRHHSGHYARRRQLSAKHFKVSLKGSKPKDLIVTRSIHNSRSEEYLVDKV

SEQ ID NO: 193322 - protein, 206 aa, Oryza sativa
  unsure (1)..(206): unsure at all Xaa locations
  Clone ID: PAT_MRT4530_89470C.1.pep
DARGGGGDGGNGGAPLPSPPRSGRREARGGQRQRGAGRRRCRVGRRRWLRSQPPPLPSPLRGDIPPSPQILPPFTSSLRQRASGGGASAGGGWPRASAVAXEGGAASAAVGGGAXAGGGRPRAAAGGGWPPASSAAGGGAAASGGXGGXGGRSAASAGGGASRASAGGGASWALAGGGASLAGHRQRAARDSVVGADHRTSTQRKK

SEQ ID NO: 193323 - protein, 1305 aa, Oryza sativa
  unsure (1)..(1305): unsure at all Xaa locations
  Clone ID: PAT_MRT4530_89471C.1.pep
WIPPVFTLSLIVVAVLGPLYLASSTSGKDGVARSGGLGLPVGRCDSGTGQQWRRLQPAVLEATTTGDGLQEAKAGEHEHLLEIGVATRKLDGEGREDDRGKAIDAGHGLEASQLSGRSAASPLHRLVLATAIADSNNVFTDRLAFAAADWCFRLHGWSIMPPLLGVYDFTTGLPPSPPTGVLAYTSVGHTTVDGHHHLHRRPASVAAEWCLRLHGWPIMPPLLGVYDFTAGLPPSPPSGASAYTAGLLCRRCGASTTSPPACLRRRRLVPPPTRLAYYAAAVGRLRLHRRPASVAADWCLRLYGWLVTPPLLGVYDFTAGLPPSPPIGASAYTAGLLCHRCWASTTSPPACLRRRRLVPPPTRLAYYATVVGRLRLHHRPASVVADWXPPPTRLAYYAAAVGRLRLHRRPASVAADWCLRLHGWPIMPPLLGVYVFTTGLPPSPPIGASAYTAGLLCRRCWASMTSPPACLCRRRLVSLPIRLVGHTTVHGRPRLHHRPASVAADWCLRLHGWPXMPPLLGVYVFTXGLPSPPPTGVSACTAGXLCRRCWASTSSPXPAVLRRRRLVFPPARLAXYAAVVGRLRLHRPACLRRRRLLAFAAADWCLRLHGWPIMPPLLGVYDFTAGLPPSPPIGASAYTAGXLCRRCWASTSSPXPACLRRRRLVFPPTRLAYYAAAVGRLRLHRRPASVAADWCFRLHGWPNMPPLLGVYDFTAGLPPSPPIGASAYKAGLLCRRCLASTTSPPACLRRRRLVPPPTRLAYYAAAVGRLRLHRRPASVATDWCLRLHGWPIMPPLLGVYDFTAGLPPSPPTGASAYTAGLLCRRCWVSTTSPLACLCRHXWIQIQICIKGIHGFKLISYAPGMDQSEHHHRLASAAADWCFRLHGWPIMPPLLGAYVFTDRLAFVAADWCPRLHGWLIMPPLLGAYVFTDRXPLPPPTAGLXYAAVVGRLRLHRPACXVAAGWCPCLHGWPIXRRCWAPTSSPTGXRLRRRRLVSSPARLAXMPPLLGAYVFTDRXPSPPPTGVLACTAGLLCRRCWAPTSSPTGXLRCRRLVSSPARLAYXPPLLGAYVFTDRLAFAAADWCFRLHGWPLXPPLLGVYVFTDRXPSPPPTGVHACTAGLLCRRCWAPTSSPTGSPSSPPTGVLACTAGLXYAAVVGRLRLHRPACLRRRRLVSSPARLAXMPPLLGTYVFTDRXPSPPPTGVSACTAGLLCRRCWASTSSPTGXLRRRRLVFPPARLAYYAAVVGRLRLHRPAASTAADWCFRLHGWPXLCCRCWASTSSPTGHRIRRXLVSPPARLACYNAN

SEQ ID NO: 193324 - protein, 721 aa, Oryza sativa
  unsure (1)..(721): unsure at all Xaa locations
  Clone ID: PAT_MRT4530_89472C.1.pep
FTYKVCFTIIDRCSRLHDWLVTPPLMGVYIFTDRPPHLPPTAVSVCTVGLLCCRXWASTSSPXGLPLPPPTGVFAYTVGWSHHCSWASTSSPTGLPSPPPTSVSANTAGLLCHCCWASTTSPLACLRHRXLVSLPIQLVGHTTVHGRPHLHRPACLHRRRLVFLPTRPAYYAAIVGRLRLHRRPVFVAADWCPRLYGWLVTPPFMGVHVFTXQLAFAAADWCPRLYGWLVTPSLMGVFAFTDRLASAADWCFRLYGWRTPPPLMGLVIYTDRLAVVVANWCPRLYGWVVTLPLLGVVVFTDRPPRPPPTGVFAYTVGWSHHRCWASTSSPIGLPSPPPTGVSACTAGLLCRRXCWASTSSPTDLPSPQPTGVSACTAGLLCHXCWAPMSSPTGLPSPLLTGVSACTAGLLCRRCWASMSSPTDRLIRHRLVSSPIRLVGHTAVVGRLRLHRRLAFAAADWCLCLHGWPIMPPLLGIYDFTVGPXSPPPTGVLAYKDGGLRLRXWASSSSSTQAVYVCCRLPSPLRLVYTTTTTDGCHHLHCWPPCLTPTGLFVIIDWRHRHRWFAFAAXWCLNFHGWPILPPLKDVFLFIIILLLPPPTCYYLHNCASLLPVCFCHRLMFTSSWLCNFVTMVELLHLHCLQHRQTLLPLLRKFCYFTSHDFYKSFDISVCVAXNMMPCYYNKWCSSKDFYPDILNTYLHSSDGYSTTINYSSRLYVQLLSN

SEQ ID NO: 193325 - protein, 41 aa, Oryza sativa
  Clone ID: PAT_MRT4530_89473C.1.pep
KTNRLLMLLLQKRNMAQRQGNSNPNLLDQKSKQNLPGFIAA

SEQ ID NO: 193326 - protein, 64 aa, Oryza sativa
  unsure (1)..(64): unsure at all Xaa locations
  Clone ID: PAT_MRT4530_89474C.1.pep
HILRLLLIPIPRFHTPSXYHPSIPPTFFTQYPLSYIHTQTPLSQPLPKRIRTPLTINTTHISFL

SEQ ID NO: 193327 - protein, 156 aa, Oryza sativa
  unsure (1)..(156): unsure at all Xaa locations
  Clone ID: PAT_MRT4530_89475C.1.pep
MGVRRERRSDRRFVDGQGRRWRCSSSSAAVQPANSPHRGCCSRACHRSRSLLISTADDLLSLLDDNDNDNPFPAAATLSAILGEDKVSLGSYPVLSLRVLLGEEAQAGGGFSILPSSLSSTAPPERNEKXGSRTGGRWPRRRWEGDQGGEGAVGDM

SEQ ID NO: 193328 - protein, 51 aa, Oryza sativa
  Clone ID: PAT_MRT4530_89476C.1.pep
SVGCILTLCAAWNTRSWRDHVIWRIFCFVQQGLALGVGPIKKCTSRSLKLW

SEQ ID NO: 193329 - protein, 118 aa, Oryza sativa
  Clone ID: PAT_MRT4530_89477C.1.pep
DFFCPPFDPKFEAPPVVYAFEVGRLLKQNPPPKNGESFGDEIGAPPAVDFWGEGEVAPVGVDTDVGWFLLCPGFVMPLLAFFELLFVNLSRGAKSPLLGWVFLCPPVPIGWIFFFVRL

SEQ ID NO: 193330 - protein, 35 aa, Oryza sativa
  Clone ID: PAT_MRT4530_89478C.1.pep
YLFAFVDCPYFVQGANFLWFANLIYNCIALICCLF

SEQ ID NO: 193331 - protein, 134 aa, Oryza sativa
  Clone ID: PAT_MRT4530_89479C.1.pep
RPARTGTAGPGYAFCDFREIHNLWMGICASSEHLEHVHETDESIVYVKDEQGRGDREMKSGARKVDFLFSQRGKKGPNQDSVILCQVPSSDIYSLSLNLCYVFDVLSSDQSAQFLLLMRLRTPIVWFCTQKGSD

SEQ ID NO: 193332 - protein, 89 aa, Oryza sativa
  Clone ID: PAT_MRT4530_8947C.1.pep
MARAIAARLGSASSQPAGYREGGGARPPATASGGGQREERGFLTVGSASGGKMTANDGGERRTTRWVGGCGGPRPREANGGYGVARRWN

SEQ ID NO: 193333 - protein, 139 aa, Oryza sativa
  unsure (1)..(139): unsure at all Xaa locations
  Clone ID: PAT_MRT4530_89480C.1.pep
SGKFERYTIKIFAMVALIALCASXATTAITXIHYHLPTLNHGPPWDPSRQYMMQTFSLGSHTALFMQHPMALLQQQCCMQLQRMMPYCHCGSSCQIXHSMQQDICAVLCQQQMMKMAILFPYMCNMAPVFFQLSACGXX

SEQ ID NO: 193334 - protein, 113 aa, Oryza sativa
  Clone ID: PAT_MRT4530_89481C.1.pep
MKLIPTGALGLAAAAFDETVAASAGPSVALRGRWQRKADSPPAPARGDAGEQMIHSRMTGEIDQCGGEIEAEIERAKEVVANKGRALDDDRERFQKAAVAALNILSGGAAGSI

SEQ ID NO: 193335 - protein, 42 aa, Oryza sativa
  Clone ID: PAT_MRT4530_89482C.1.pep
EGREISTYLIRQASPSDHRWLLVCVCLRVPSRSEASNFSYDK

SEQ ID NO: 193336 - protein, 102 aa, Oryza sativa
  unsure (1)..(102): unsure at all Xaa locations
  Clone ID: PAT_MRT4530_89483C.1.pep
SVTWGSDENTLGXYTFDGVGKPRDLYEKLRIPVDNLFFAGEATSVQYTGTVHGAFSTGLMAAEECRMRVLERFRELDMLEMCHPAMGEQTATVSVPLLISRL

SEQ ID NO: 193337 - protein, 260 aa, Oryza sativa
  unsure (1)..(260): unsure at all Xaa locations
  Clone ID: PAT_MRT4530_89484C.1.pep
TKVHQLLYHLNNLHQHQDRVSSPSPSPWVSPPKGSPSPSPSSKIIAHRSPHHPFTTPPQLVRPKPTTRRAEHDHSVETTGRSWFKRSWTTYGFITAGIAALLIISAAGAFYCRAKKMGTVRPWATGLSGQLQKAFVTGVPALKRSELETACEDFSNIIGCTSTCTLYKGTLSSGVEIAVASSLVTSADDWSKECESRYRRKITSLSKVSHKNFMNLLGYCEEEQPFTRVMVFEYAPNGTLXEYLHVREAEKLDWMTRLRI

SEQ ID NO: 193338 - protein, 177 aa, Oryza sativa
  Clone ID: PAT_MRT4530_89485C.1.pep
SVGVAASAAYKKWERAAMAGVSLVADAAEELERNTVNADARMLSPSSSNACTVDGLGTNHIKEADQQAPAKLKLQLFPINEATRKALEKDEHNPHLELTLSARKKISSVLEHLNRKWGNSNIASGELLLFPYCAHQEDLATYQRWTTKDTVAVADVFLSVNSPSVFRLRYGWFSLAE

SEQ ID NO: 193339 - protein, 79 aa, Oryza sativa
  Clone ID: PAT_MRT4530_89486C.1.pep
MDSGTGRAEKTTTGSGSNKGGTLVSRWDKSAEGSRKVLGGKKEAWQNKAGDLGASVTRKEGRGKNVVGEVVSEGDAKDQ

SEQ ID NO: 193340 - protein, 155 aa, Oryza sativa
  Clone ID: PAT_MRT4530_89487C.1.pep
MATGGGDELGDAGGDNGDDDDANLTMTTTTVRVAIAASAGGGSGAYSRREAAAGGKRRRWHSGKKFDDMIEKELSRRSVKCSDADGVAIGEEDSIVISSEDRSPVHHHPWRAFPSNVIIITAAWPCIMTAVALGNKASGNELLVVMLQGIGDCLK

SEQ ID NO: 193341 - protein, 126 aa, Oryza sativa
  Clone ID: PAT_MRT4530_89488C.1.pep
LISGVAGFVKPTEIKINGCHLGIHVFTNRLDFATAERLAYYAAVVGHPRLHRPACLRRRRLVFPPPYMGVYVFTDRLAFAAADWCFRLHGWPIMPPLLGVYDFIAGLPLPPLTGVFAYTVGGLRHH

SEQ ID NO: 193342 - protein, 376 aa, Oryza sativa
  unsure (1)..(376): unsure at all Xaa locations
  Clone ID: PAT_MRT4530_89489C.1.pep
GRPRLHRSASLRHRRLVFSPARLAYYAAVVGRLRLHHRPASVTADWCPRLYGWLVTPPFLGVHVFTDQLDLAAADWCPRLHVAFGPIPSTRGLVGWTENXISQNITIGASCAANWCLRLHGWPITPPLLGVYVFTDQPPRPPLTGVSACTAGLLCRCCWASTSSPTGXPRPPLTXLLCRRCWASTSSPTGLPSSLPTGVLACTTGLLCRRCWASTSSPTGHLVCRPLVFPPTRLAYCDTVVGRPRLHRPARLRRRQLVSSPARLAYYVAVAGRLRLHRPAXAFVATDWCPRLHGWPIRSPLLGVYIFTDRLPRMXANWCFCLHGWPXTPPLQIGVTTFNXKLSTSAADWFLHFHGCMSLPVLIGLIVFTAGHLVCC

SEQ ID NO: 193343 - protein, 180 aa, Oryza sativa
  Clone ID: PAT_MRT4530_8948C.1.pep
MVERRVSEDGGRSGAKVDGDGQGIAAADPGRLAWHGSRDNDKRQRKWAANLGGTPPGSCIVLLHISLLSRVPNSAPKFCWLIVMPGWFSGWCCPGFQVQQLPSSKGTGLVFAMLLLLHQVDTYAGIIFRACCSIYVDVTSGKASTDILVITYYCSLKPYKSTIGPDGTRENKIGHNILLH

SEQ ID NO: 193344 - protein, 672 aa, Oryza sativa
  unsure (1)..(672): unsure at all Xaa locations
  Clone ID: PAT_MRT4530_89490C.1.pep
PISPFLPSSLSTAPPLSCHRAAVPVPLRRRSRAAASPFPCHRAAVPVPPCRRSRAAALPFPCRRAAGPVPPRRRSRAAAPPFPRRRSRAAVPPLPRRLHVRCRLVSSSARLVYYAAADRRLRLHHRLAFAAAAWCPRLHGXWSHDRRWAFTSSPTGLPSLPPMGVHAYTVGXHTTVIGHLRLHXPARLHRRXLVFPPIRLEDSXPLMGIFIFTXRLPRLLPRLVFSLLLMGLVLTNGSVRTSSSACLRHRRLVSLPTRLVGHTTVVGRLRLHHQLAFAAADWCLRIHGWLVTPSLLGVYVFIASLPSPPPNGVSSYTVGWSQRRCWASTSSPTXLAFVAADCWPIMPPLLDVYVFTNRPPRSLPTGVSACTAGLLXRRCWAFTSSPTGXPHPPPTGVSAYTAGLLCRRCWASTSSPTGRXIRRRPVFPLTRLAYYAAVVGRLRLHRPAASFAADWCHRLHGWPIMPLLLGVYVFADRXASSAADWCFRLHGWPIMPPLLDVYVFTDRPPSSVADWCHRLHGWPVMTPTDAIFFTAGYIAVTANRHELGNNINSPPIICLHGWPTTQLPIEDLIVIIGCYIAIDWITDIVIFINILSSLFNIAHSAAVDGKLRYHTPSLQPGASHCPQVCPLLSMSRRCYVDRPAEAVGEAACTLPNLTYRTAPTSYQGTPFI

SEQ ID NO: 193345 - protein, 101 aa, Oryza sativa
  unsure (1)..(101): unsure at all Xaa locations
  Clone ID: PAT_MRT4530_89491C.1.pep
GMKXIYRIXGLLYPQIQHQLATQPLHVCYPILHTKPWLSRHGNSSSGGLISSVXGHGAASQAMRSAVRQREGATKRAGGGAAQRAGRDLFSLPHLLEPLAV

SEQ ID NO: 193346 - protein, 980 aa, Oryza sativa
  unsure (1)..(980): unsure at all Xaa locations
  Clone ID: PAT_MRT4530_89492C.1.pep
PSQPVGPSKISEQSLFQTLLGLKLAPPRCLRRRLPTSPPWWRSTHSSSMRRLRLLTRRGTTLADWCFRLHGWPIKPPLLGVYDFTTDLPPSPPTGVPAYTVGWSHHRXWASSSSPPACLRRRRLVPPPTRLAYYAAAVGRLRLHRRLASVVAEWXPPPTRLAYYAAAVGRLRLHRRPASVAAEWCLRLHGWPIMPPLLGVCDFTAGLPPSPPIGASAYTAGLLCRRCWASATSPPACLRRRRLVPPPTRLAYYAAAVGRLRLHRRPASVAADWCLRLHGWPIMPPLLGVYDFTAGLPPSPPSGASAYTAGLLCRRCWASTTSPPACLRRRRVVPPPTRLAYYAAAVGRLRLHRRPASVAADWCLRLHGWPIMPPLLGVYDFTAGLPPSPPIGASAYTAGLLCRRCWASTTSPPACLRRRRVVPPPTRLAYYAAAVGRLRLHRRPASVAAEWCLRLHGWPIMPPLLGVYDFTAGLPPSPPIGASAYTAGLLCRRCWASTTSPPACLRRRRVVPPPTRLAYYAAAVGRLRLHRRLASVAAEWCLRLHGWPIMPPLLGVYDFTAGLPPSPPSGASAYTAGLLCRRCWASTTSPPAXPPSPPTGVFIVIDGRLCSHIGHFCHHQGEYYKAKIQIQICIKGIHGFKLISYAPGMDQSEHHHRLASTAADWCFRLHGWPIMPPLLGVYVFTDRLAFAAADWCFRLHGWPLXPPLLGVYVFTDRXPSPPPTGVSACTAGLYAAVVGRLRLRRPAASSAADWCFRLHGXLLCRRCWASTSSPTGCFDRRRLVFPPARLAYYXPLLGVYVFTDRPLRPPPTGVSACTAGLLCCRCWASTSSPTGRRIRRXLVSPPARLAFLPVLIGLTIFIAXVSSAADXCPRLYIWFIQLPLLMDIIIFRRRLIMPPPTGAFIFTTARLHYRISTWTSSTHIFNQAMITRRQEAIILDSMFSCFPTNQRVGGYTNTRLSKFDKMKQSINQPTIFHLDG

SEQ ID NO: 193347 - protein, 446 aa, Oryza sativa
  Clone ID: PAT_MRT4530_89493C.1.pep
MACSFHFVPLLLLLTLLLLISSASRTAALPSMRSSSEDTASNATAAARLRPGKELLKYKRIRALLKKLNKPSLKTIQSPDGDLIDCVPSHLQPAFDHPKLKGQKLLDPPERPKNYNLTIAVSSSSSSRVGEVVVQAWHAAGEECPEGTVAIRRTTEKDLLRASSLRRYGRKPARRNIRRDSTSNGHEHAVGYVNNDNYYGAKASVNVWSPRIGDPSEFSLSQIWVISGSFGNDLNTIEAGWQVSPELYGDSNPRFFTYWTVEFEVICTYNFQTDAYQETGCYNHNCRGFVQTTNKIAIGAAITPESVYNGRQFDITLMLWKDPKHGHWWLELGPGMVVGYWPSYLFTHLAHHGNMVQFGGEVVNTRPSGSHTATQMGSGHFPGEGFDRAAYFRNLQVVDWDNSLIPAANLKLLADHPACYDIQGGSNSYWGSYFYYGGPGRNVKCP

SEQ ID NO: 193348 - protein, 131 aa, Oryza sativa
  Clone ID: PAT_MRT4530_89494C.1.pep
FFFFFFLHDIFIQICITPIVSTCQHRMIAMNFIFSLLVTNYYLLPISTTHDTNRSGRNCYQGSMMFVSLGRVSAVFERQVLGAKQYGLSLSLSRGSEVDRRESKTGVVRRSDMYEHNRPGELARLNRAVAK

SEQ ID NO: 193349 - protein, 487 aa, Oryza sativa
  unsure (1)..(487): unsure at all Xaa locations
  Clone ID: PAT_MRT4530_89495C.1.pep
DLVGGEAAVARRPNRRRLSPSTAAAPLPLPHWRRGRSPSPSHGGGRVRRLPLRRIQRXGEAPPPPPAAEPPRHQRRRAPPLRSPDSNSGNPPVPAAAANRCVSRMPRKVVSGPDYDDEYDDDYDEYDEDYDDYGETGHSDDIQHPVKEEKSSKKSSSTVPVLWRCSMCMFDNHESMVYCEMCGVFRESFMKSAKDGSIKVHGIPSDFGTPSMPKSDCTKMPVNTRTTDFDGDPEIKNASISHEKVGSTQYTSAGSSSGAGKKVKHIALPEDVPVERTAQLISDHFQLKEDQSSRASSSAQNEDVAQKLSSDIQKLGLEKNEVDTAKPYLPEEYKPEKWMFANEESGVLSQLNLAIVGHVDSGKSTLSGRLLHLLGRISKKDMHKNEKEAKEKGKGSFAYAWAMDESSEERERGVTMTVAVAYLETKKYRVVLLDSPGHKDFVPNMISGATQADAAILVVDACTGSFEAGMDGERGKSVCHTKKHAQL

SEQ ID NO: 193350 - protein, 766 aa, Oryza sativa
  Clone ID: PAT_MRT4530_89496C.1.pep
MDYFNGTDAHCGGAVGAMGSYVYNLTSSYADQKNEVNIVATSLAMLLLAALLLAFDLLAGAATLRPAARLVLSVSLALFLPVTSYLFSEAKNDVPGAAAADAELPLRARLILAWMLLVELLRKKVEATVAGTKGASGGGPTSRAGRVAFLGYLVFFNVHGAGRKAVFGVLWVFAAAKLVQRVAIGEFVKRSFAFGKNPQLLAGYMAQTLEQQERRPRRDDELMTSCKYAVMGEENLEREAGPNGYLVDLNKTVAGDDNADDAVVVTVGRVWSLAESDQLLVSNPKLKRLCLSYALFKLLRREFEETPLTAAEAADCRELIFRGLCNDGGAAADRAATLFQVFDDELGFVTEYYHSVLPVMLASPFFLLVNYIVFPVLVLGLCLMTVVLCGNGDIAFIAGSIKRDNYAVSFGLLRMTRCLLSRVFRSPSALFSSIDLSITFLLFLTILYEEAWELAVFLLSNWLTVSMVCDYAVKPPSRLRRSAIRGVQWVTNRMSRRNYLRVKQYSVLWFCRLPLKLPAAAVPEEAKQSIVEYLAAYDGAVAPLSAGRSAVAARNTLCNASRLISSACESGSVAEVILTWHIATSLLEVRCPPHAEEEAAAAARSSTVATRLSRYCAYLVAFRREMLPDDVDCTARVYGTMTTELKRELGLKGYYFSTDATRYGKMMAIAGGQEDDEAAAEETTVVRKGARLGKALMDEAAGGDEAAVWKLVADVWTEIVVYVAPARDAEQVRAHGEALARGGEFVTVLWALVTHTGIARPAAASV

SEQ ID NO: 193351 - protein, 590 aa, Oryza sativa
  Clone ID: PAT_MRT4530_89497C.1.pep
MAPGHRHGSVPPVVLLLLVATVLGSLCLSLTASPEAQKGYNFRFARHARDAPLVSYYNYIVVGGGTAGCPLAATLSERSRVLLLERGGLPYGNRNVSSEYHFADALADTSPRSPAQRFVSEDGVVNARARVLGGGSCLNAGFYTRASSGYVRAAGWDPRLVNASYPWVERELVFRPDVPRWQCALREGLLQAGVTPDNGYTLEHVQGTKIGGTIFDRAGRRHTAADFLRRAHPRRLTVFLRATGTATPVAYGVVFTDPAGVRHHVYLRGGAKSEVIVTAGTLGSPQLLMLSGVGPRGELEKHGILPVLDQPRVGQGVADNPMNSVFVPSPVPVALSLVQIVGVSRFGTFIEGVSGSQFGIPLHGRAASRRARSFGMFSPMTGQLGTVPPKERTPEAMRRAAEAMRRLDRRAFRGGFILEKILGPMSTGHVALRSADPDANPAVTFNYFRDPRDVERCVRGIETIERVVRSRAFARFTYANVTAMEAAVLGRRAGHLPVNLLPRRATDTRPLQQYCRETVMTIWHYHGGCHVGAVVDQDYRVLGVRGLRVVDSSTFKYSPGTNPQATVMMLGRYMGLKIQKERWTRNDETH

SEQ ID NO: 193352 - protein, 681 aa, Oryza sativa
  unsure (1)..(681): unsure at all Xaa locations
  Clone ID: PAT_MRT4530_89499C.1.pep
YAALLRRLMLVMDSRRLSFPVDRPRVHSAGLSSPPPLGWSVTPPFMGVHVFTXPAGLRRRRLVFPPACLRRRRVVPPPIRSVGHTTVDGHRHLHRRPASVAAEWCLRLHGWPIMPPLLGVYDFTAGLPPSPPIGASAYTAGLLCRRCWASTTSPPACLRRRRVVPPPTRLAYYAAAVGRLRLHRRPASVAADWCLRLHGWPIMPPLLGVYDFTAGLPPSPPIGASAYTAGLLCRRCWASTTSPPACLRRRRVVPPPTRLAYYAAAVGRLRLHRRLASVAADWCPRLYSWLVTPPFMGVHVFAXGWPSPPPTGVSAYTAGLLCRRCWASTTSPPACLRRRRLVSSPIWLIGSRSRYAXKGFMALSLSLTLQEWISXTSPPARLDRRRLVFPPARLAXMPPLLGVYVFTDRLAFAAADWCFRLHGWPIMPPSRLAYYAAVVGRLRLHRPACLRRRRLVFPPARLAFMPPLLGVYVFTDRXPSPPPTGVSACTAGLXYAVVVGRLRLHRPACLRHCRLVFPPARLAFMPPLLGVYVFIDRLAFAAADWCFRLHGXPLCRRCWASTSSPTGRLVRRRLVLPPARLTYYAAVVGRLRLHRPAASTAADWCFRRPPRPPPTGASACTAGLXYAAVVGRRLHGWPVITPTDSIFFTAGYIAVTTNRHQYLQHKLPTFAMAADWFLHFH

SEQ ID NO: 193353 - protein, 47 aa, Oryza sativa
  Clone ID: PAT_MRT4530_8949C.1.pep
EKLDIESAAAYPLATKMLAVRKVVSCLLMDSEGSSKGYLFGNLWIYP

SEQ ID NO: 193354 - protein, 106 aa, Oryza sativa
  Clone ID: PAT_MRT4530_894C.1.pep
ALSSRRNVGNVARVGVEKVVDRSSSMLSSSCVLFAVLSHRSAPQTSGTSTGSMTRASKAHRTSIRIPIRSSRKLSCNPKTPFRSTCQQQPLAECIDPPDIHKDHIG

SEQ ID NO: 193355 - protein, 459 aa, Oryza sativa
  unsure (1)..(459): unsure at all Xaa locations
  Clone ID: PAT_MRT4530_89501C.1.pep
HVFTDRPPSPPPTGVFACTVGLLCRHCWASTSSPTGRLVRRRLVFPPARLAYYATVVGRLRLHRPAASSAADWCFRLHGWPIMSPLLGVYAFADRPPXSAADWCFHLHGWPIMPPLLGVYVFIDRPPYPPPTGVTACTAGLLCRRCLASTSSPPAHLXPPSTGVSACTAGLLCRGCRXVYIFSDRPPRMTPTGAIVFTAGHVAATAIRRHHLQRKLSTSAADWFLHFHGCMILLVLIGLIVXHRRSSRLLLTSAVASTAGLYCYHYXWTSLSNLIFIIFGIGKLYCLYFASFATSPTTTSTGASTSWHASTSIMPCYFTTTSGVPIFKISTRTSSMRIFTQAMTTRRQEATVLDSMFSCFPTNQRVGDYTNTRLKIXQFDKLYVKMKQLINQPTXSTLGVISFVFASEQVFYFSNSDYFTDNFGFSTLLQSTPNFXKYQXLRFNLHIREFRAINQATQF

SEQ ID NO: 193356 - protein, 652 aa, Oryza sativa
  unsure (1)..(652): unsure at all Xaa locations
  Clone ID: PAT_MRT4530_89502C.1.pep
WASSSTPPACLRRRRLVSPPIRNGSVRTSPPARRRRRRLESSPIRLIGHTTVVGRLRLYRPAASSTADWCLRLYGWLVTPPLLGVYVFTXTGLPSSPPTGVSACTAGLLCHHCWASTSSPTGRLVRRRLVFPPARLAYYAAVVGRLRLHRPXAFVAADWCLHLHGWPIMPPLLGVYVFTDRPPRQPPTGVSACTAGLLCHRCWASTSSLTGRLVSRRLVFPPARLAYYATVVGRLRLHRPAASSAADWCFRLHGWPXLCRRCWASTSSPTGLPSPPLTGVSACTAGLYAAVVGRLRLHRPACLRRCRLVFPPARLAFMLPLLGVYVFTDRPPRRPPTADWCLRLHGWPIMPPLLGVYVFTDRPPRPPPTGVSACTAGLLCRRCWASTSSPTGLPSSPPTGVSACTXWPIMPPLLGVYVFTDRPPRPPPTGVSACTAGLLCRRCWASTSSPTGXPRQPPTGVSACTAGLLCHRCWASTSSPTGRLVSRRLVFPPARLAYYATVVGRLRLHRPAASSAADWCFRLHGWPIMPPLLGVYVFTDRXASSAADWCFRLHGWPIMLPLLGVYVFTDRPPHPXADWCHCLHGWPVITPTDATFFTAGYIAVTTNRHQYLQHKLPTFAMAADWFLHFHGCMILPVLIGLIFFTAGRLVYC

SEQ ID NO: 193357 - protein, 220 aa, Oryza sativa
  unsure (1)..(220): unsure at all Xaa locations
  Clone ID: PAT_MRT4530_89503C.1.pep
WISQSITIGASCAADWCLRLDGWPIMPPLLGVYVFTNRPPRLPQTGVFACTAGLLCRRXWASTSSPTGHLVRRRLVFPPARLAXMPPLLGVYVFTDRPPRPPPTGVSACTAGXYYAAVVGRLRLHRLAASSAADWCFRLHGWPIMPPLLGVYVFTDRLAFAAADWCLRQHGWPIMQPLLGIYIFTXRLAFTTADWCLRLHGWXLCRRCWASTSSPTGGLV

SEQ ID NO: 193358 - protein, 336 aa, Oryza sativa
  Clone ID: PAT_MRT4530_89504C.1.pep
MDSSLTDERPSLVWMALQHIVDGVDWGWQLGAAALAAHLQARWLRAEAGGNDTIQSLIKVTVDELIIQKSQLGGQIAEQQQYRLGGQTYQYQHDEPYQYRPEELHQYGHQYNNDLADRIAKLVEEQFGMRPKEQIHMYRQPYPEWFDRVPLLHRYKIPDFSMFSGQDDVSTKEHISQFLAQCGEASAEEAPKVRFFPLSLTGSAFTWFSSLLSNSIGEWADLEKQFHDYFFAGINEMKLSDLISVQQQEEESAIVYIQRFRDVHSRCYCLSLSDEQLADLAFQGLSAPIRDRLFCHEFDGLAHLMQTVSAHESRLQEAKEDQFWSYQDQTEQNFGA

SEQ ID NO: 193359 - protein, 1167 aa, Oryza sativa
  unsure (1)..(1167): unsure at all Xaa locations
  Clone ID: PAT_MRT4530_89505C.1.pep
WLPPATADCGIATQADRRARRIQATPSRHGRHRRLFGHSDAPGRVRVLFSSLPRGCPCIPTDVTACTAGLLCRCCWASTTSLPACLRRRRLVSSPMRLVGHTTVHGRPRLHRLXAFAAADWCFRLQGWPIMPPLLGVYDFTAGLPPSPPTGVLAYAVGWSHHRSWASTSSPXPAGLRRRRLVFPPARLAYYAAAVGHLRLHRRPAFVAADWCPRXTLAYYAAAVGRLRLHRRPASAATDWCFRLYGWRTPPLLMGFIIYTTGLVPLAPTGVFVTIDGLLHSHIGYFCCHRGNTTKLSHHLFYSLYDILHFPLPHYINWIQIQICIKGIHGFKLISYASGMDQSEHHHRLAFVAADWCPRLHGWPIMPPLLGVYVFTDRPLRPPPTGVSACTAGLLCRRCWASTTSPPACLRRRRLVSSPMRLVGHTTVHGRPRLHRPXAFAAADWCFRLHGWPIMPPLLGIYDFTAGLPPSPPIGASAYTAGLLCRRCWASTTSPPACLRRRRVVPPPTRLAYYAAAVGRLRLHRRLASVAAEWCFRLHGWPIMPPLLGVYDFTAGLPPSPPTGVLAYTVGWSHHRSWASTSSPTDXLRRRRLVFLPTRLAYYAAAVGRLRLHRWPASAATDWCFCLYGWRTPPLLMGFTIYTTGLVPLAPTGVFVTIDGLVDSRCLGAMTSRTECLNVQKEKYIFINILKYLIFSRVLYLYQILLILYVCSAXIQIQICIKGIHGFKLISYAPGMDQSEHHHRLALTAADWCFRLHGWPXMPPLLGVYVFTDRLAFAAADWCFRLHGWPLXPPLLGVYVFTDRLAFAAADWCFRLHGWPLCRRCWASTSSPTGXLRRRRLVFPPARLAFMPPLLGVYVFTDRLAFAAADWCFRLHGWPLCRRCWASTSSPTGLPSPPPTGVSACTAGLYAAVVGRLRLYRPACLRRCRLVFPPARLAFMPPLLGVYVFTDRTPRPPPTGXSACTAGLYAAVVGRLRLHRPAAASAADWCHRLHGWPVITPTDAIFFTAGYIAVTTNRHQYLQHKLPTFAMAADWFLHFHDCMILPVLIGLTIFIAATTTDGHHRLPPPTRLHXPVCFCCRRLVFTSSRQHNFVIMVERLHLYYLRHWQTLLLLLHKFCYITNHNVVVNLDISACDAVLFNYNKWLSNIHDFYLDIFNTYLQSSDDY

SEQ ID NO: 193360 - protein, 72 aa, Oryza sativa
  Clone ID: PAT_MRT4530_89506C.1.pep
ILIKLRFLCFYMVVCLVGYSLNHLSTAIFVEGQVSKVTSCIKSYLVRKMHFHKITEIETLEVVDFTSKLQHP

SEQ ID NO: 193361 - protein, 55 aa, Oryza sativa
  Clone ID: PAT_MRT4530_89507C.1.pep
IIKNELTNSQKQFFLAKKNHSDHHQLRVQATLPSAAAPPSSPRRPGRRGRRRRRS

SEQ ID NO: 193362 - protein, 229 aa, Oryza sativa
  unsure (1)..(229): unsure at all Xaa locations
  Clone ID: PAT_MRT4530_89508C.1.pep
MDGREQQQQPRVNSPPPAGGGVMMPQHPYGAAPAMPPGSANVMHGVPLSFNPMASPTASSPMKPADMSGTMYRTDPVVQGMQQQPGSGGGGTAVGGGELVKKKRGRPRKYGPDGNIGLGLKPAAAAGTEAGGPSGGAGSNSNPDGKRRGRPPGSGKKKQLDALGSSGTSFTPHIITVKPNEDVASKIMAFSQQGPRTTCIISANGALXQTTLRQPATSGGIVTYEVYSS

SEQ ID NO: 193363 - protein, 85 aa, Oryza sativa
  Clone ID: PAT_MRT4530_89509C.1.pep
VHYRRAMTLHARVRKLGSSRAAAPAARSEPASRRTATNEPAFAVHLPPPTSSLLEQDCLSSRNPFPSLPSPYSPLILLRLLVDPW

SEQ ID NO: 193364 - protein, 92 aa, Oryza sativa
  Clone ID: PAT_MRT4530_8950C.1.pep
LSRANITSLPGLITCSSVRILDSSTRYENCHVVYLCSFMRVISHACLLDLSFFMLFHAKLSETILSDGSSFTDLSFAAGTSWSNGTKRFKTM

SEQ ID NO: 193365 - protein, 150 aa, Oryza sativa
  unsure (1)..(150): unsure at all Xaa locations
  Clone ID: PAT_MRT4530_89510C.1.pep
XXXXXXXXXXXXXXXXXXXXXXXXXXXPPPPPPHLTCHLAACARPAFSLPRPQRRCNPQLLGGGVVGGGGRGPGSRMRPTRRSARRERLEVEKEQAAVTTHDSRDGDGDKGKKLQTPLGSSPSPTDTVGPGNRGVHLQRETQGEKWFLQR

SEQ ID NO: 193366 - protein, 1004 aa, Oryza sativa
  Clone ID: PAT_MRT4530_89511C.1.pep
MLLLVLLQIQLVAALSLLPPASAPPPAALPCRPDQESPLLRLKSSFSATDMSTAAFRSWRPGTDCCRWDGVRCGHGDGRVTSLDLGGRQLESRGGLDPAIFHLTSLEYLSLADNDFNGSPLPSSGFERLTELTHLSLRSTNITGVVPAGIGRLVNLVSLDLSTDFEIIDTFDDVYVFKMNSSLDAQQLAVPNLESLVANLSNLRELNLGLVNLSENGARWCNALVDSCPKLQVLRLSCCALSGPICATLPRLHSLSVIDLSFNSLPGLIPDFSNFPNLTALQLRRNDLEGFVSPLIFKHKKLVTIDLYHNPGIYGTLPNFSSDSHLENIYVGGTEFNGIIPSSIAELKSLKNLGLGATGFSGELPSSIGNLRSLKSLEISGFGLVGSIPSWVANLSSLTVLQFTNCGLSGSIPSSVGNLRNLGKLLLYNCSFSGKIPSQILNLTQLEILSLHSNNFIGTVELTSMWKLLDLFVLDLSDNNLVVVDGKGNSSTASIPKLGALRLSGCNVSKFPNFLRFQDEIEYLDLSYNHIDGAIPQWAWENWVKMDILSLKNNKFTSVGHDPFLPLSDMKALDLSENMFEGPIPIPRGYATVLDYSGNRFSSIPFKFTNYLSDVSFFKAGRNNFSGRIPPSFCSAMSLQLLDLSYNSFDGSIPSCLIEDVDKLEVLNLKENKLRGEFPDNIKESCSFEALDFSGNLIEGKLPRSLAVCKNLEVLNIGSNQINDSFPCWMGTLRKLQVLVLKSNKFFGHVAQSLGEEKGTCEFQSARIVDLASNKFSGILPQEWFNKLKSMMIKDSNLTLVMDHDLPRMEKYDFTVALTYKGMDITFTKILRTLVFIDLSDNAFHGSLPEAIGELVLLNVLNISHNSLTGPIPPQLGRLTQLESLDISSNELSGEIPQQLASLDFLTVLNLSYNKLEGEIPESPHFLTFSNSSFLGNDGLCGRPLSKGCINITSLNVIPSKKNSLDVLLFLFAGLGFGFGFALSIVVIWGIPIRKRSRVRQRAL

SEQ ID NO: 193367 - protein, 121 aa, Oryza sativa
  unsure (1)..(121): unsure at all Xaa locations
  Clone ID: PAT_MRT4530_89512C.1.pep
NGVPEFRDHLDYMLKHHTGXIETRRIMDHILGSSSLMCHTXKVNKMHRVMKPNQVRYALRTXAETMCSQINFIRAATKSIXRKRNSTNHDPVIDCHRSNALQGGXYQWTPIRVSMDNARIG

SEQ ID NO: 193368 - protein, 83 aa, Oryza sativa
  Clone ID: PAT_MRT4530_89513C.1.pep
NIDRVSHSLMPSYTGFRVNHSNCLMTPGITLPQTSPNANSRGNGPFTSLTFLVLVHSFSGRLAHIDPTSHIYYSISYLIKTHL

SEQ ID NO: 193369 - protein, 61 aa, Oryza sativa
  unsure (1)..(61): unsure at all Xaa locations
  Clone ID: PAT_MRT4530_89514C.1.pep
PGAGPRPHPGLKNPSPPFPGQTGSSPHRSPRIPPGGPRXPSCTPAPAPEEPGQGQVRPPPG

SEQ ID NO: 193370 - protein, 682 aa, Oryza sativa
  Clone ID: PAT_MRT4530_89515C.1.pep
MRRRPGIAGLQNAAATRDQFRLVGENVAKVRTDVMKEQLATFRTQLEEFARKHKVLGSGFEVISVGKKKLVRSVPTELNKDHNGILELAQAEGFVTVEQVERKFSWSTGRAIDVLETLLKEGLAMIDDGHRDGKRRYWFPCVTLSSDSTGTEAHMACHLPVQLWKNHEIAIHFSGLGCRQNFYIVIRASGFWMSLKGTSSWPTPEVGNLPVGPGEYISYIPVNSAASSRLEADVELEHAESMEKTQFGDVNGNGLDLGIMVSAAVADLDGARVELTSGRMLPGVTTAPSPPVSTVSMPPTSSALLPSPPPTPLTCSRVVFAAATAATSPAAGPPLPPRPGVIGKKKQKGKKVAENSFLGGEMATAEAKRRRHHSPPASIAAGGDSSTPTSAAPADSSSPSLDLIPDIARRLTSLEDFFSLRASCRAYRALLPASRRLLASQSPLLLVSLYPSFAEALFHPRLRRLHRFRLPWGHHLPPSRYTLLYAHGFLVTSTTAANNYPPRLLLLRLFTGEQLRLPRVFAPFSRVILTADLLVVIFLPGRATVQHCRPGDALWRVASAPAPHVFDDLISVNGTLYALVGLRLATLQLSESSLELSFLGGEHDDANRPEGDRFMLGECGGEVLLISVEHEERVVYRVFRWASEKRKWEMITNLGGRRATPEQQFTDQTISLDLSQLVLMQA

SEQ ID NO: 193371 - protein, 276 aa, Oryza sativa
  Clone ID: PAT_MRT4530_89516C.1.pep
MENVTEKGFGVTKVFTIELKWLGIVPLLGFGVSVVLGSGFEVISVGKKKLVRSVPTELNKDHNGILELAQAEGFVTVEQVKRKFSWSTGRAIDVLETLLKEGLAMIDDGHRDGKRRYWFPCATLSSDSIGADAKRSSTRASAASTASASLPWGHHLPPSRYTLLYAHGFLTTAANNYPPRLLFTCEQLRLPKVFAPFSRVILTADLLVVIFLAGRATVQHCHPGDALWRVASAPAPQVFDDLISVNGTLYALVGLRLATLELSESSLELSFLGGRA

SEQ ID NO: 193372 - protein, 43 aa, Oryza sativa
  Clone ID: PAT_MRT4530_89517C.1.pep
ATDDRFIEDDFSTYGEILDSKTINDRETGRSRWQAVGRTPKGS

SEQ ID NO: 193373 - protein, 379 aa, Oryza sativa
  Clone ID: PAT_MRT4530_89518C.1.pep
MGCRGGGNAPERVPGAAVLDGGPAGQEDDDEEVRGEDDAGEGREDPGEAELLAGEEAEEEEPWRVVVGGGGGGDEEAVGVEEGVARGGQVVPPWEAEAVEAAEARVEERLGEGGVEGDEEERGLRGEEAARRREERAVGAAGGAQGEEILQGRQAAGYVGDEIQRRGRRVGGRRRGRGGGIAAGGDGGRRPAPGRGGRGGPAAGDVAAVAAAKTTREQVRGVGGGEGSKAELVGGIETVDTGGDGAVVTPGSCGGEGSIGLKLTGGGTADETGASGGGKGAVVRGDGFDGDDKVGEYSIQAFTILPLESGGGSAGLVGFLAWTSSPPPSCQENLRFLHGFGVLELDVGFQAGGCSGVDRDVRDVLAGADGEVSDLGRRP

SEQ ID NO: 193374 - protein, 190 aa, Oryza sativa
  Clone ID: PAT_MRT4530_89519C.1.pep
MGSSKGRSQFRLGSMRRRPGIAGLQNAAATRDQFRLVGENVAKVRTDVMKEQLATFRTQLEEFARKHKVITIELKWHSIFQLLSNFVYMVLGSGFEVISVGKKKLVRSVPTELNKDHNGILELAQAEGFVTVEQVERKFSWSTGRAIDVLETLLKEGLAMIDDGHRDGKRRYWFPCVTLSSDSTGADAKS

SEQ ID NO: 193375 - protein, 118 aa, Oryza sativa
  Clone ID: PAT_MRT4530_8951C.1.pep
MARNAVVVDEVEQRDSLGGNSAAARESVAATASPLAAGRPLLLYPAGAPIEREFTAGVVAGKPVNGRRQWQCEVSDKELRAKSCNHVEVMMVKKVMDHASAIHDEELSRAKAVGGGGP

SEQ ID NO: 193376 - protein, 42 aa, Oryza sativa
  Clone ID: PAT_MRT4530_89520C.1.pep
QSCLLANAGLPFLYNYTIRKHLYQWLEQLAILQGPLLRACPS

SEQ ID NO: 193377 - protein, 141 aa, Oryza sativa
  unsure (1)..(141): unsure at all Xaa locations
  Clone ID: PAT_MRT4530_89521C.1.pep
TRAAVTIPRRGASRGGGPPRWRGGRGPPGARCRRARRAPAPPAARRPRPLPPARGSPRAAAARPPSPPPPSSATPPPPASPPPPPPQXSPPPAPPPVAHLQRTPRPRPRPRPPRHRAARGLAAGRGEGWMSGRRRARWTPQ

SEQ ID NO: 193378 - protein, 52 aa, Oryza sativa
  Clone ID: PAT_MRT4530_89522C.1.pep
AWMEQPECRSSRSHPSLMCLGQSSTADRPVFLVTATASRRRCFSGPAVVSSG

SEQ ID NO: 193379 - protein, 122 aa, Oryza sativa
  Clone ID: PAT_MRT4530_89523C.1.pep
KKKKTSRGNKGPKIKGVFSILQLTRGGKYTSPTFLKKAGGGNGTLFNNGKNIGYRRKPFEQINGEINWGGAFPPQLKKTGPLKPKRGVGIQVTGKTLLGKRVLPDPGGTPMEKGALGGGGGG

SEQ ID NO: 193380 - protein, 89 aa, Oryza sativa
  Clone ID: PAT_MRT4530_89524C.1.pep
SPCRARTPPCPPRPSPPASASPSRRGAAPSPRAPCGARTSPWRPRRAGSPARRAPPRRWPRRTPSSTPWRTPPPASPTTARRPAPPGRW

SEQ ID NO: 193381 - protein, 926 aa, Oryza sativa
  unsure (1)..(926): unsure at all Xaa locations
  Clone ID: PAT_MRT4530_89525C.1.pep
MDDFQGLLARDFGLRPQGKAAPMSAARAAASSGSAWSNSRSASASSAAAATAPPAPLYDDLFGAAAPSAPPPKAAPSPSLDAIFDSFKEPSAPDAPPKPKHSSMPVFDKPVYDDDIFDGVPGVKSSSSARFDDVFGGSHAPPPPAYDDLLGGFGSKPEVKEVLPEEKRKPEPAASSAGFDDLIPGFGGRIPMRARETVGTKDKNVSMSTSKPASMASDPFDVLGTTSTSKHTSSGIFTDPLDELGRPAKSQGKKHDNTAVDSGLFEDSSTFNQVPKSEPLFTSELNDDLKDRNGSTKDRDSSPVQNFSRKNTTQKPSVENFENIFPKSQSARYSDVHVDIGASGSEKYSGNGMDDQSPRSDESEDEIWLTVSEIPLFTQPTSAPPPSRTPPPLAVKQKPHGSQAKRKDDNYPRRSNQNHNHHRSSSNQAGSSSIDELEDFAMGKSQSSAYDNANPFNEEEFEHSSSAAASAAAMKEAMDKAEAKFKHAKVVRERERDAKHRNREQQEQDDEARFNTQDHEERDRQERLEREREMRQREEKEREQRRLEEERELEKQRERERAARQAVERATKEARERAAAEARAKAEREARQRAERAAVQRAQKEARERAAVDARERAERAAAEAKERAAAEAKEKVATQARDRAAAERAAVERAQQEARRRAERAAVERAASEARERQAAEARERQAAAAAAAAAAAAKEKQSKPDDLESFFGMGARANSAPKQRAPTADSMFNSQTQNRGAASSASASMRKASSTTNIADDLSAIFGGAPXHLKNFKKLKERVKKEDVLGSNGIKGXRERAAKALAEKNERDMQVQREQAERHRISETMDFEIKRWAAGKEGNLRALLSTLQYVLWPECGWQPVSLTDLITAAAVKKVYRKATLCIHPDKVQQKGANLQQKYVAEKVFDLLKEAWNKFNSEELF

SEQ ID NO: 193382 - protein, 283 aa, Oryza sativa
  Clone ID: PAT_MRT4530_89526C.1.pep
MAGKHGRNGFEDDDVNPFAGGSVPPANNSRLPPLSHEPADFYNVDIPLDSSKDLKKKEKELQAMEAELNKRERELKRKEEAAAQAGIVIEDKNWPPFFPLIHHNISNEIPIHLQRMQYLAFSSFLGLAAGRVFWNIIATTTAWVKGEGVIIWLLAIIYFISGVPGAYVLWYRPLYNAMRTESALKFGWFFLFYLIHIIFCVWAAVAPPFPFKGKSLAGILPAIDVIGRSAIVGIFYFVGFGLFCLESLLSIGVIQQVYMYFRGSGKAAEMKREAARGALSSAF

SEQ ID NO: 193383 - protein, 877 aa, Oryza sativa
  unsure (1)..(877): unsure at all Xaa locations
  Clone ID: PAT_MRT4530_89527C.1.pep
MVVLVHHHAYWSNLPNEDAMVLQDGSTNTKHAKTDLIGCIRDGCSHADAFLPSCVVLMDTNAARDCDLRLLRSVSESVEEINLGELISLGIFCCLHVTPRHYFCRLVPPPTRLAYYAAAVGRLRLHRRPASVAAEWCLRLHGWPIMPPLLGVYDFTAGLPPSPPIGASAYTAGLLCRRCWASTTSPPACLRRRRVVPPPTRLAYYAAAVGRLRLHRRPASVAAEWCLRLHGWPIMPPLLGVYDFTAGLPPSPPTGVLAYTVGWSHHRSWVSTSSPXPAGLRRRRLVFLPTRLAYYAAAVGRLRLHRRPASVAADWCLRLYGXLVTPPLLMGFIIYTTGLVPLAPTDVFVTIDGLLRSHIGYFCCHRGNITKLSHHLFYSLYDILPFPLPHYTNWSSIEWIQIQICIKGIHGFKLISYAPGMDQSEHHHRXPRPPPTGVSACTAGLLCRHCWASTSSPTGLLSPPPTGVSACTAGLLCRRHGWPIMPPLLGVYVFTDRLAFAAADWCFRLHGXAFMPPLLGVYVFTDRLAFAAADWCFRLHGWPIMPSLLGVYVFTDRLAFATADWCFRLHGWPXYAAVVGRLRLHRPACLRRCRLVFPPARLXLYAAVVGRLRLHRPAASSAADWCFRLHGXLIMPPLLGVYVFTDRXASTAADWCFRLHGWPIMLPLLGVYVFTDRXAASAADWCHRLHGWPVITPTDAIFFTAGYIAVTTNRHQYLQHKLPTFAMAADWFLHFHGCMILPVLIGLTIFIAATTTDGHHRLPSPTGYAAADWCFHLHNCASSLPVCFCCRRLVFTSSRRCNFVIMVERLHIYYLRHRQTLLLLLRKFCYFTNHDVFVNLDISACDAVLFYYNKWLSNIQDFYLDIFNTYLQSSDDY

SEQ ID NO: 193384 - protein, 801 aa, Oryza sativa
  unsure (1)..(801): unsure at all Xaa locations
  Clone ID: PAT_MRT4530_89528C.1.pep
WASTSSPTGMPPSPPIGASAYTAGLLCRRCWASTTSPXPACLRRRRLVPPPTRLAYYAAAVGRLRLHRRPASVAAEWCXAYTAGLLCRRCWASTSSPPACLRRRRVVPPPTRLAYYAAAVGRLRLHRRPASVAAEWCLRLHGWPIMPPLLGVYDFTAGLPPSPPSGASAYTAGLLCRRCWASTTSPPACLRRRRVVPPSTRLAYYAAAVGRLRLHRRPASVAAEWCLRLHGWPIMPPLLGVYDFTAGLPPSPPSGASAYTAGLLCRRCWASTTSPPACLRRRRVVPPSTRLAYYAAAVGRLRLHRRPASVAAEWCLRLHGWPIMPPLLGVYDFTAGLPPSPPSGASAYTAGLLCRRCWASTTSPPACLRRRRVVPPPTRLAXMPPLLDVYILTXWLTFVAVDWIQIQICIKGIHGFKLISYAXRNGSVRTSPPACLRRRRLVFPPARLAXMPPLLGVYVFTDRLASAAADWCFRLHGWPLCRRCWASTSSPTGLPSPLPTGVSACTAGLYAAVVGRLCLHRPACLRRCRLVFPPARLAFMPPLXGVYVFTDRPPRPPPTDVLACTAGLYAAVVGRLRLHRPACLRRRRLVFPPARLAFMPPLLGVYVFTDRLAFAAADWCFRLHGWPLCRRCWASTSSPTGRLVRRRPMSSPARLAXYAAVVGHLRLHRPAASSAADRCPRLHGWPLCRRCWTSTSSPTGLPSPPPTGVSACTAGLYAAVVGRLRLHRPACXAAADWCFRLHGWPIMPLLLGVYVFTDRLAFVAADWCFRLHGWPXLCRRCWASTSSPTGXLRRRRLVFPP

SEQ ID NO: 193385 - protein, 87 aa, Oryza sativa
  Clone ID: PAT_MRT4530_89529C.1.pep
KLPSPPTWAPKTMSQGPRSVSALHPRCPGAPGPRVEISARVPLVTTPHQPLRSPGRMPRELRSRLRAPRAAAGVQRPPRRRTTADVV

SEQ ID NO: 193386 - protein, 106 aa, Oryza sativa
  Clone ID: PAT_MRT4530_8952C.1.pep
VVFVGGTAFLGLQVMLVHNHHLLELLVGSDLVDLAAPKFEWHQLGGTSDLPDDHLLPPEKKSKHGQNGKNKPKKRGRKPKQLPPHPSGAEASAPAPGDRRWIHCGV

SEQ ID NO: 193387 - protein, 557 aa, Oryza sativa
  unsure (1)..(557): unsure at all Xaa locations
  Clone ID: PAT_MRT4530_89530C.1.pep
CLRIPLTGVLACTAGLLCRRCWASTSSPXGRLDCRRLVFPPARLAXMPPLLGVYVFTVGXASPPPTGVSAYTVGWSHHRSWASTSSPTGLPLSPPTGVSAYMAGLXYAAVGGHLRFHRXTAFVAADWCLHCYXGRHCSHIGHLRTSPPACLRRRRLVFPPARLAYYAAVVGRLRLHRPACXAAADWCLRLHGXPILPPLLGVFVFTDRLAFAAADWCLCLHGWPXLCRRCWVSSSSPTSLPSPPSTGVSICTAGILCRRLLGIYIFTDRLAFASAEWCLRLHVWPIMLPXLLGVYVFTDRLSLAAADWCLRLHGWPXLCRCCWASTSSPXGSPSPPPIGVSACTAGLXYATVVGRLHLLQSATPYDANWCYRLHGWPXVAATANRRHHLQRKLSTSAADWFLHFHGCMILPVLIGLIVFTAAPLRLVYTATTTDGRHHFYCXAALSDADWLAHLHGCAFSSSFYFFHRRLLXTMVERFHLYYLRHRQTLLPLLHKLCYFTNRDDYKSFDISAYVTKYDAVLFYYNKWCSNLQYFYSDIFNTYLHSSNDYSMTRSYSF

SEQ ID NO: 193388 - protein, 570 aa, Oryza sativa
  unsure (1)..(570): unsure at all Xaa locations
  Clone ID: PAT_MRT4530_89531C.1.pep
LLCRRCWASTTSPPACLRRRRVVPPPTRLAYYAAAVGRLRLHRRPASVAAEWCLRLHGWPIMPPLLGVYDFTAGLPPSPPTGVLAYTVGWSHHRSWASTSSPPACLRRRRVVPPPTRLAYHAAAVGRLRLHRRPASVAADWCLRLHGWPIMPPLLGVYDFTAGLPPSPPGGASAYTAGLLCRRCWASTSSPXPAGLRRRRLVFLPIRLADFAAVNGLHHLHHWLGSTGADWCFCHHXDCFIPTSATSANITDRPPRPPPTGVSACTAGLLCRRCWASTSSPTGRLVRRRLVFPPARLAFMPPLLGVYVFTDRLAFAAADWCFRLHGWPLCRRCRAPTSSPTGXLRRRRLVFPPARLAFMPPLLGVYVFTDRLAFAAANWCFRLHGWPLCRRCWASTSSPTGXPRSPPTGVSACTAGLYAAVVGRLRLHRPACLRRCRLVFPPARLAFMPPLLGVYVFTDRPPRSPPTGVSACTAGLYAAVVGRLRLRPRQTRPAGRLVFPPARLAFMPPLLGVYVFTDRLAFAAADWCFRLHGWPIMTPTDAIFFTAGYITVTANRHHHLQRKLSTSTAD

SEQ ID NO: 193389 - protein, 699 aa, Oryza sativa
  unsure (1)..(699): unsure at all Xaa locations
  Clone ID: PAT_MRT4530_89532C.1.pep
AAAVGHLRLHHRPTSVAAEWCLRLHGWPIMPPLLGVYDFTAGPPPLPPSGASAYTAGLLCRRCWASTTSPPACLRRRRVVPPPARLAYYTAAVGCLRLHXPACLRRRRLVSSPIRLVGHTTVHGRPCLRLHGWPIMPLLLGVYDFTAGLPPSPPTGVLAYTVGWSHHRSWASTSSPXPACLRRRRLDPNPDMHKRDSWXKLISYAPGMDQSEHHHRLAVVAADWCLRLYGWLVTTPLSGVYIFTAGLLSPPPTGVTAYTAGLLCRCCWASTSSPXPACLRRRRLVSPSAWLAYYAVVVGRLRLHHRPASIAADWCFRLHAGLLCHRXWASTSSPTGLPSPPPTGISVCTAGLXYAAVVGRLPLHRLAALXRRRLVFPPARWPIMPPLLGVYVFTDRPPRPPPTGVSACTLAYYAAVVGRLRLHRPACLRRCRLVFPPARLAYYAAVVGCLRLHRXRLAFAAADWCFRLHGWPIMPPLLGVYDSTTDLPPSPPTGVLAXNGWLVTPPFMGIHVFTDRPPRPPPTGVSACXAGLLCRRCWASTSSPTGLPSPLPTGVSACTAGLYAAVVGRLRLHRPAASTAADWCFRLHGWPIMLPLLGVYVFTDRPPHPPXWCHRLHGWPVITPTDAIFFTAGYIAVTTNRHQYLQHKLPTFAMAADCFLHFHGCMILPVLIGLTIFIAAITTDEHHRLPSPTGYVVAD

SEQ ID NO: 193390 - protein, 413 aa, Oryza sativa
  unsure (1)..(413): unsure at all Xaa locations
  Clone ID: PAT_MRT4530_89533C.1.pep
MLVMDSRRLSFPVDRPRVHSAGLSSPPPLLIATTTSPPACLRRRRLVFPSAWLAYYAAAVGRLRLHRRLASVAAEWCLRLHGWPIKPPLLGVHDFTTGLHPSPPSGASAYTAGLLCRRCWASTTSPPVCLRRRRVVPPPTRLAYYAAVVGCLRPHRWLTFVAVDWCFRLHGWPIMPPLVGIFAFTVDXPSSPPTGEWISQNXSRPACLRRRRLVFPPARLAXYAAVVGRLRLHRPAASSAADWCFRLHVWPIMPPLLGVYVVTDRPPRPPPTGVSACTAGLLFCRCWASTSSPTACLRRRRLVFPPARLAFMPPLLGVYVFTDRLAFAAADWCFRLHGWPLCRHCWASTSSPTGCLDRRRLVFPPATSTAADWCFRLHGWPXLCCRCWASASSPAGXPHPPLTDVTASTAGLL

SEQ ID NO: 193391 - protein, 228 aa, Oryza sativa
  Clone ID: PAT_MRT4530_89534C.1.pep
MWDPRGSHADSVCHVSKNWVQYYLGPRDPTIIPLGLFGSLPLVFVDLKLRDYLQYWVSLNFFPARLAIATKEVRTPKTFFGLGANNGEDIEMGGGDSDSEHVDLTYEHVNPVIQALTRKFRSKAWKEFVPIIIDNEVGAGKYMWTSNQTMGCMCATCHFIDTDWKFVEFRLGQAFGENAKERIDKVRKILNMLFKEYSDKLKDNHANSLRQAEHVMAISENDPIADWV

SEQ ID NO: 193392 - protein, 834 aa, Oryza sativa
  unsure (1)..(834): unsure at all Xaa locations
  Clone ID: PAT_MRT4530_89535C.1.pep
MPPGGNLIPASAAFVAIVNRVSVVVHMVAEFCGVSGCLQAWPIMPPLLGVYDFTAGLPPSPPIGASAYTAGLLCRRCWASTTSPPACLRRRRLVFPSARLAYYAAAVGRLRLHRRPAFAAADWCFRLHGWPIMPPLLGVYDFTAGLPPSPPSGASAYTAGLLCRRCWASTTSPPACLRRRRVVPPPTRLAYYAAVVGCLRPHRWLTFVAVDWIQIQICIKGIHGFKLISYAPGMDQSEHHHRLASTAADWCFRLHGWPIMPPLLGVYIFTDRLAFAAADWCFRLHGWPLCRRCWASTSSPTGRFVRRRLVSPPARLAYYAAVVGRLHLHRPACLRRRRLVFPPARLAFMPPLLGVYVFTDRPPRPPPTGVSACTAGLLCRRCWASTSSPTGLPSPPPTGVSACTAGLYAAVVGRLRLHRPACLRRRRLVFPPARLAFMPPLLGVYVFTDRPPCPPPTGASACTADLLCRRCWASTSSPTGRLDRRRLVFPPARLAFMPPLLGVYVFTDRLAFAAADWCFRLHGWPLCRRCWASTSSLTGRLLRRRLVLPPARLTYYAAVVGRLRLHRPAASTAADWCFRLHGWPLCRRCWASTSSPTGCLVRRRLVLPPARLTYYAAVVGRLRLHRPAASTAADWCFRLHGWPIMPLLLGVYVFTDRLPRPPPTGVSACTAGLLCCRCWASTSSPTGRLVRRRLLPLLMDIIVFRCRLVMPPPTSAFIFTTARLHYRLVPPTRVHFITATQLCHHGGATSSLLSSVPXQTLLLLLHKFCYITNHDVVVNLNISACDAVLFYYNKWLFNIHDFYLDIFNTYLQSSNNYSTTRGYSSRLYVQLFPN

SEQ ID NO: 193393 - protein, 136 aa, Oryza sativa
  unsure (1)..(136): unsure at all Xaa locations
  Clone ID: PAT_MRT4530_89536C.1.pep
RFFNSAFDYHFSLFLQMPIREACHVAIQRSNPMKQKLWKHTQARQLANGRAVPLLQIVSFGSELSNRAPTFDMDLSDFMDGDKPISYDKAKEYFSQDPSQKWAAYVAGTXILVLMTELGVVFTDSMSILVSSSVPE

SEQ ID NO: 193394 - protein, 784 aa, Oryza sativa
  unsure (1)..(784): unsure at all Xaa locations
  Clone ID: PAT_MRT4530_89537C.1.pep
RHRLHHWLASVAADWCLRLHGWSIMPPLLGVYDFTAGLPPSPPSGASAYTAGLLCRRCWASTTXTPPACLRRRRLVPPPTRLACYAAAVGRLRLHRRPASVAADWCLRLHGWPIMPPLLGVYDFTAGLPPSPPTGVFAYMVGWSHHRCWASTTSPPACLRRRRLVSSPIWLVGHTTVVGRLHLHRPAVSSAADWCFRLHGWPIMPPLLGVYDFTAGLPPSPPSGASAYTAGLLCRRCWASTTSPPACLRRRRVVPPPTRLAYYAAAVGRLRLHRRLASVAAEWCLRLHGWPIMPPLLGVYDFTAGLPPSPPSGASAYTAGLLCRRCWASTTSPPAXPPSPPTGVFIVIDGRLCSHIGMDQSEHHHRLASTAADWCFRLHGWPIMPPLLGVYVFTDRLAFAAADWCFRLHGWPLXPPLLGVYVFTDRXPSPPPTGVSACTAGLYAAVVGRLRLRRPAASSAADWCFRLHGWPIXRRCWASTSSPTGRLVRRRLVLPPARLAXMPPLLGVYVFTDRXPSPPPTGVSACTAGLYAAVXWASTSSPTGRLVRRRLVLPLARLAYXPPLLGVYVVTDRXTSTAADWCFRLHGWPIMLPLLGVYVFTGRPPHPPLTDVTASTAGLVDWPIMPLLLGIYIFIVATTTDGHHHLPSPTDYAAADWCFYLHNYASSLPTFYFNNFKYFGLDELGNNINSPPIICLHGWPTTQLPIEDLIVIIGCYIAIDWITDIVIFINILSSLINIANSAAVDGKLPDLTVADWFLRLHGYATSLPLIGVTVFTTTDIFRYF

SEQ ID NO: 193395 - protein, 105 aa, Oryza sativa
  Clone ID: PAT_MRT4530_89538C.1.pep
MIWCYACPARRRRGRPRMNPLAPGAPALEKLACERMLVAAGQTDGLAARDRAYYDAVAASPWRGTATWVESEGEGHVFFLEKPECDKAKQLMDRVVEFISAGSPA

SEQ ID NO: 193396 - protein, 1290 aa, Oryza sativa
  unsure (1)..(1290): unsure at all Xaa locations
  Clone ID: PAT_MRT4530_89539C.1.pep
TSTTSPPAWLRRRRLVSPPSPPPTGVSAYTAGLLCRRCWASTSSPTGFPSSPPTGVSAWASTSSPTGLPSSPPTGVSAYTAGLLCRRCWACTSXRPACHRRRQLVSPPALLAYYMLPLXASVDWCPHLYGWLVTPPYMGIHXSPTGLPSSPPTGVSAYTAGLLRRRCWATTSSPXPACLRRRRPVSPPSRLAYYAAVVGHPRLHRPXAFVAADWCLRLHGWPITTPLLGNHVFTXGLPSPPPPTGVSGYKAGLLRRCCWASTTSPPAFLRRRRLVSPLTRLAYYVAVVGHPHLHRSACICRRRXCLRLHGWPNMPPLFGIYDFTAGLPSPPPTGVSAYTAGLLCRRCLASTSSPXPACLRRRRLVSPPARLAYYATAVGHLRLHCRPAFAAVDWCLHLHGWSIMSPVLGIHVFTXGLPSSPPSGVSASTAGLLRRRCWASTTSPPACLRRCRLVSLPTRLAXMAPLLGIHVFIDRLAFVAADWCFRQHGWPIICCRCWASSTTSPPACLRRRRLVPPPTRLAXMPPLLGVYDFTAGLPXVAADWCPRLHGWPXLCRRCWASTTSXTGLPPSPPSGASAYTAGLXYAAVVGRLRLHRPACLRRRRLVFPPARLAFMPPLLGVYVFTDRPPRPPPTGSRSXCIKGIHGFRLISYAPGMDQSEHHRLACLRRCRLVFPPARLAFMPPLLGVYVFTDRLAFAAADWCFRLHGWPLCRRCWASTSSPTGRLVRRRLVLPPARLAXYAAVVGRLRLHRLACXAAADWCFRLHGWPLCRRCWASTSSPTGLPSPPPTGVSACTAGLYAAVVGRIRLHRPAASSAADWCFRLHGWPIMPPLLGVYDFTXRPASVAAEWCFRLHGWPXLCRRCWASTTSPPACLRRRRVVPPPTRLAYYAAAVGRLRLHRRPASVAAEWCLRLHGWPIMPPLLGVYDFTAGLPPSPPSAACAASPVRRPAAPSPPPASPPPPPRRPALRFARRPPELRSRRRPPLSFAPATSSRLPLLARAPPGRAVFSLGLAAASSFPASPPFRGEITGDASSPTTSGVATTPPSPAVPAASPERRPTSPSPPSASPHRPPPRLLLGFRRNAVAAPVSPSSSSPVSFRPPLPPPRLVGSLHLHHLRHRSGKVALGLASPPSKPLRGPSSSSPIVLVVDVPSVARLVVSRHRLRHRHRSGVSHVVLVSVQPLPAVLVASSPVPVVVVIVLSSFPVSLVVAFVPPSSRSHPSSASVKQVAAAPVLVFVLGSASSSLVPAASRLRSRIAAEAVPSPFVSVVPVCLRRARSSLSFPRLVAWW

SEQ ID NO: 193397 - protein, 306 aa, Oryza sativa
  Clone ID: PAT_MRT4530_8953C.1.pep
LSNDRSATPEPPVGSGLNHAGSEMFQPTERKGRLKGSAPHDTLSNAGTAASAGMGTSVLVPVKATQFESGSAITHTKDIPRPAGDISNAIISTGTLIPQKVSQVKLVKDISQQTNTQKLVGSTSNTGDRNDPMISAKVPQLQLVRDTTLQMVTGKPASIATSASHGTAVPISRQVPWVKLVKDVTPQMLTSRLGSAAVKVDYRTAVAIPQKLSQLKLVKDITPHTATQKPATIAAKAIHQKKRKANSDPGESPLARHKPTINDVPPSPFERSSVSSIPHHFSKAMLTDNLRSLTKLHLADETGLAH

SEQ ID NO: 193398 - protein, 114 aa, Oryza sativa
  unsure (1)..(114): unsure at all Xaa locations
  Clone ID: PAT_MRT4530_89540C.1.pep
AXXRFFFFFRXCAWPXVLVSXXRXRGGSSSCRASXXRSSAXXRYKAGAFSSPRTPRRPTRPRTSACADLASPSSSASTPPRRRRRRTWWRRRRGGVGAEEEGEARSGTGEKGVT

SEQ ID NO: 193399 - protein, 1204 aa, Oryza sativa
  unsure (1)..(1204): unsure at all Xaa locations
  Clone ID: PAT_MRT4530_89541C.1.pep
MHRRRLQPRRCLPAVLRRADGHQRRPRLRPPPPPLRLGAAAVERLRLHRRPASVAADWCLRLHGWPIMPPLLGVYDFTTGLPPSPPTGVPAYTVGWSHHRXWASSTSPPACLRRRRVVPPPTRLAYYAAAVGRLRLHRRPASVAAEWXPPPTRLAYYAAAVGRLRLHRRPASVAAEWCFRLHGWPIMPPLLGVYDFTAGLPPSPPSGTSAYTAGLLCRRCWASTTSPPACLRRRRVVPSPTRLAYYAAAVGRLRLHRRPASVAAEWCLRLHGWPIMPPLLGVYDFTAGLPPSPPSGSRSRYAXKGIHGFXAYLLRSRNGSVRTSPTGRLARRRLVLPPARLAXYAAVVGRLRLHRPXAFAAAEWCFRLHGWPXMPPLLGVYVFTXGLPLPPPTGVSACTAGXLCRRCWASTSSPXPACLRRRRLVLPPARLAYYAAVVGRLRLHRPAASSAADWCFRLHGWPIMLPLLGVYVFTXGLPSPLSTGVSACTAGXLCRRCWASTSSPTGRLARRRLVSPPARLAYYAAVVGRLRLHRPAASPAADWCLRLHGWPIMPPLLGVYVFTDRPPRPPPTGVSACTAGLLCRRCWASTSSPNGRLVRRRLVLPPARLAYYAAVVGRLRLHRPAASPAADWCLRLHGWPIMPPLLGVYVFTDRXASPAADWCLRLHGWPIMPPLLRVYVFTDRPPRPPPTGVSACTAGLXYAAVVGRLRLHRPACXAAADWCFRLHGWPIXRRCWASTSSPNGRLVRRRLVLPPARLAXMPPLLGVYVFTDRPPRPPPTGVSACTAGLLCRRCWASTSSPTGRLARRRLVSPPARLAYXPPLLGVYVFTDRXASPAADWCLRLHGWPIMPPLLGVYVFTDRPPRPPPTGVSACTAGLLCRRCWASTSSPTGRLARRRLVFPPARLAYYXPLLGVYVFTDRPXPPTGVSACTAGLLCRRCWVSTSSPTGRLVCRRLVSPPARLAYYAAVVGRLYLHRPAASYDANWCYHLHGWPRRRHRXSASSSSMQAVYVCCRLVSSLPWLHDSANVDWPYRLHCRSSLLLXLVPSPLLLVYIATTTDGHHHSTSSVADXVMPPPTGVFIFMTAHLRHRFASVAANSCXTSSRLCNFVAMVERLHIYYLWHXQTLLPLLRKFCYFTSHDVYKSLGISVCVTKYDAVSFYYYKWFYNFQDSYSDILNTYLYSSNDYSMTRSYSSRLYVQLLSN

SEQ ID NO: 193400 - protein, 749 aa, Oryza sativa
  Clone ID: PAT_MRT4530_89542C.1.pep
MAPGRFVTSSMEAFSKLVMMPIARHSPLRRHAMSAASEILTVRRRISDRSDSELVCGHPPCRHRSNAPSAAGLPPPRCCCDSTEEFAAGRGFIRPRLGLGNLLVDVRLGLGNLLIDVEREGSDRRADTGPSPPRRCDFTEFVAGSRFMRRRIGFGDRRADAGPPPPRRCDSTAFVAGSRFMRRRIGLGDRHVDAGPTPPRCCDSTEFITGGRFIRRRVGLGDLVVESAAVGPCPLGCRDSTELVAARIRYIRRHLGNLFLEAVGRMKPPDEIIFSICLDHRLLSSSLPPRRLHGILSQGSAPPPDLRGVAGQYQLAALKRMKRILWRATPMASEFRASAKSHRVVEIHGEPPEQERIGLRVLLRRQSSSPPRRHQPLRASASHLQVLRRWCSNSHVPNVPPSSSSPPPPPSPPQPTNPADFWKINTPLNPSATKTEKSTIDETLLQLKFDPKEFARCNKLMETYNVLGQEWTFTKLKEQTKYLFDSLIVLVESFHEAGYCFSQISTSTVLVTSSWKFVLLEGCFALNNWSVEGVRKDYRDIAVLFRKLLSESMGEETVHPPDFGMLLSLMEKDGFRYKYLIGTHVSLLPDDNINIAYMKIHEFIRKILLAEEKDKARQLKLGITRYSTISTRIRRRIPYKNIWLTKARSNSFMTAFLEQNERNMELGGTYFELLDTIRHFVCHRLDLLKLGFRYKANEVDRMWYAEFPTLLAELQLALFLVGRLEELELEKNFMNRKPMRPKVSSHGTF

SEQ ID NO: 193401 - protein, 63 aa, Oryza sativa
  Clone ID: PAT_MRT4530_89543C.1.pep
TTRASTLQISFGSVLQFLIICDSEFFNTGKKFSTKQRKKFYIRHLMQRIICYSTQRIRDDNSY

SEQ ID NO: 193402 - protein, 461 aa, Oryza sativa
  Clone ID: PAT_MRT4530_89544C.1.pep
MEKKASILMNRYELGRMLGQGTFAKVYHARNLASNQSVAIKVIDKEKVLRVGMIDQIKREISIMRLVRHPNIVQLHEVMASKSKIYFAMEYVRGGELFSRVARGRLKEDAARKYFQQLIGAVDFCHSRGVYHRDLKPENLLVDENGNLKVSDFGLSAFKECQKQDGLLHTTCGTPAYVAPEIINKRGYDGAKADIWSCGVILFVLLAGYLPFHDSNLMEMYRKISKGDVKFPQWFTTDVRRLLSRLLDPNPNIRITVEKLVEHPWFKKGYKPAVMLSQPNESNNLKDVHTAFSADHKDNEGKAKEPASSLKPVSLNAFDIISLSKGFDLSGLFENDKEQKADSRFMTQKPASAIVSKLEQIAETESFKVKKQDGLVKLQGSKEGRKGQLAIDAEIFEVTPSFFVVEVKKSAGDTLEYEKFCNKGLRPSLRDICWDGQSEHPSLAQSSTLTQSSKSISRHAI

SEQ ID NO: 193403 - protein, 131 aa, Oryza sativa
  Clone ID: PAT_MRT4530_89545C.1.pep
ERGFAKITKGKESSPNKTKAKRNLRGPGTDTPKRGATKKKRMGFSKNSKLSRAQSILPKHNPNSIFNRTPALPPQFSPTPQRTEPCINQPRDGGTPAGFIGRATQLPSEKSPPKGPPWPQGIPAPLKQYQA

SEQ ID NO: 193404 - protein, 151 aa, Oryza sativa
  unsure (1)..(151): unsure at all Xaa locations
  Clone ID: PAT_MRT4530_89546C.1.pep
NSKQKSNVGAQPKKRTFRKCRYRDVDLDALLDMYTDDLGQFFRVLARIMVQRGLKMKPXMALMMKLTMAKKDASAGHKPXPVRTQLRNMIIDPDMIVCLAMVYNGKTLKQLEIIPEMMVHYLAEMFICYKPIKHGMPGIGATHSSRFISVT

SEQ ID NO: 193405 - protein, 52 aa, Oryza sativa
  Clone ID: PAT_MRT4530_89547C.1.pep
MVRRSQRWAESESGREAVKRSFDAVFHLLPCSRAVNHPPLAVGHLTPRAAQR

SEQ ID NO: 193406 - protein, 637 aa, Oryza sativa
  Clone ID: PAT_MRT4530_89548C.1.pep
MDEEDYSWVRRTRFSHSVVRSKSGREQFGAFVEQFNRGAARRQRGPGSGFMLHGLNLEPRARLPATTSANSSVPRTTGSSNAQPSSETKPASSSSDAKLEQHEKSLNLEPRTRLSATTSANSSVPWTTGSSNAQPLSETKTASSSSDAKPEQQEKPRDHQPSQEVSTKQDDKAENDTKATATSGPLEFSFHPDEQTLRLQRACSSPVPFPSNKNMLVADAAARSSSLKVAGEGPKPKPKQRARSPPLRRDVPELFKEAKSSSKRFSTPPPRRKPSSPPAPSRSPPHVFATARAHGKPKHKKDSSANGRAKVAALEVLEKWTVDRSQLLIGHRFASGAHSRLFHGIYKEQPVAVKFIRQPEDEEDAELAAQLEKQFNTEVTTLSRLNHPNVIKLIGACSSPPVFCVITEFLSGGSLRTFLHKQEHKSLPLEKIISIGLDIANGIGYIHSQGVVHRDVKPENIIFDSEFCAKIVDFGISCEEAECDPLANDTGTFRWMAPEMMKHKPYGRKVDVYSFGLILWEMFTGSVPYEDLNPFQAAFAVFDKNERPVIPSSCPAPLRLLIEQCWASQPDKRPEFWQIVQILDKFKAVLDKDGTLDNMPCLNLQGTHDHKNWLAHWVQKLKHTHHDLSGPPPPKLM

SEQ ID NO: 193407 - protein, 361 aa, Oryza sativa
  unsure (1)..(361): unsure at all Xaa locations
  Clone ID: PAT_MRT4530_89549C.1.pep
MAAQRLAALHAAAPSAFSSTSSASHGRPAARSSTTALLPVALPRASATLRAAPSRLLPQEAKAAGSGRSVMCMASASASAAXSAAVASGAAELKAAREDIRELLKTTHCHPILVRLGWHDSGTYDKNIKEWPQRGXGANGSLRFDVELKHGANAGLVNALKLVQPIKDKYPNISYADLFQLASATAIEEAGGPKIPMTYGRIDVTGPEQCPPEGKLPDAGPSAPADHLRKVFYRMGLDDKEIVVLSGAHTLGRSRPERSGWGKPETKYTKNGPGAPGGQSWTAEWLKFDNSYFKEIKEKRDQDLLVLPTDAALFEDPTFKVYAEKYAEDQEAFFKDYAGAHAKLSNLGAKFNPPEGFTLDG

SEQ ID NO: 193408 - protein, 51 aa, Oryza sativa
  Clone ID: PAT_MRT4530_8954C.1.pep
KAKIQAKEGFPPDKKVLFFFGKQFKNAPPLGDFNIQKESPLPLVLPLRGGQ

SEQ ID NO: 193409 - protein, 216 aa, Oryza sativa
  Clone ID: PAT_MRT4530_89550C.1.pep
MKPLGRMTDDPVQLVADLMLHNTNQWDVEKVQRIFLPLDAAAILNMPRPRTEQDEFWAWAWDKTSIFTDLFDLKMPRLNPATWSWDVLDADIMSKREAAIAVSVMWTIWGSRNSYNHGDVKYQSLRSVELVDELIKSLEIPSQEDPSAVVQKWAPPALGWMKLNTNGALNLKDGVAGAGIVARDNTGNFVTAECRRYTISVIRAQWRCWRVEMQSC

SEQ ID NO: 193410 - protein, 346 aa, Oryza sativa
  Clone ID: PAT_MRT4530_89551C.1.pep
MLAKQAWRLLDRPDSLCARVLLGRYSKGGDILSANCPRGASSTWIIKGRENTNQWDVEKVQRIFFPLDAAAILNMPRPRTEQDDFWAWAWDRTGIFTVRSAYRELIQRCGLSEPATGSSTGDEATWKALWRLRIMPKIRVFWWRVVKNLLPCAAELRRSHMKEISNCPLCGNDNETKFHALVECEHAKLFWSAAQDLFDLKMPRLNPATWSRDVLDADIMSKREAAIAVSVMWTIWGSRNSYNHGDVKYQPLRSVELVDELIKSLEIPAQEDPSAVVQKWARPALGWMKLNTDGALNLQDGVAGAGIVARDNTGNFVTAECRRYDHISDPSTVEMLACRDAVMLAL

SEQ ID NO: 193411 - protein, 344 aa, Oryza sativa
  Clone ID: PAT_MRT4530_89552C.1.pep
MVAGGGHRHVGAAAERGEGRGKRNGRSTAHPGSTTTTGTATGAEEGGGVARVVGDGGVPAVGGRNGGVDEVGEDAAEPKEATPRREKVRGDDGGGPELGGYFWPTILEDCFRYYKGCQDCQKFGAIQRAPALALNPIIKPWPFRGWGMDMIGQINPPSSKGHRFILVATDYFTKWVEAIPLKKVDLGDAIQFVKEHIIYRFGIPWTITTDQGSIFVSDEFVQFANGMGINCFKISSFMSIGNSILGFLKLKPMLLKKEYSASRTIYFHLFESGFMPSYNCWTSHGEQGVEMEEDEVEENNIPDFAQYVGFEGNQMGEEERDADGNDAADDLGHMLQDAKEDCER

SEQ ID NO: 193412 - protein, 61 aa, Oryza sativa
  Clone ID: PAT_MRT4530_89553C.1.pep
AWMPRIHSKAPLRLQSPSSPPHVPSTCVPGVIDIKASSILYAYSVSVAPLRTEYIHRNASS

SEQ ID NO: 193413 - protein, 39 aa, Oryza sativa
  Clone ID: PAT_MRT4530_89554C.1.pep
GAAPDPALGSGSMYYEQIMNPEVFLFIKDGHKELNIPTR

SEQ ID NO: 193414 - protein, 125 aa, Oryza sativa
  unsure (1)..(125): unsure at all Xaa locations
  Clone ID: PAT_MRT4530_89555C.1.pep
ADPPGRCVRFFRQHYPTPPQPPVRSSSPIDCVCQGHHRQPPPLSSASALAPAAVVWRTLPPRGIHPFATSTRSPPRADFAGGMDSGXAPPPPRDLRPRADLASGMDSGPPPPPPSHPGSSSRFSS

SEQ ID NO: 193415 - protein, 262 aa, Oryza sativa
  unsure (1)..(262): unsure at all Xaa locations
  Clone ID: PAT_MRT4530_89556C.1.pep
FLSRCFWLSNTHQHHRYCRFPPEACFLSKSPMLGSMNASLVCCANPSNNRPRNSDISRQQKDGLLFGKKKALPRNIYDCENIYDFDCYIVFSKGGPAISVLXASNSRPLATSTPGIRXKIVELFEMIQAQLXRGQHPEHKRPEPTEDQWERGSVDPILNLLRKHSXELKRKINDGKELSSDETWRGNDSGNXQNSRIFGVKNDIXGRANVLLHTRPTPNCRRRSLVRGVRFQPVVTNGDMQLQMPSLSQIAWLIMTSLSQIA

SEQ ID NO: 193416 - protein, 129 aa, Oryza sativa
  Clone ID: PAT_MRT4530_89557C.1.pep
GRAQKDLAELAFKEKKKQEQCSYNVIAYKDKPRLRTALEMLRTTKEIESRLEEVSLPIIILHGEGDLVTDPAVSKALYDKAKSSDKTLRLYKDAYHAILEGEPDEAIFQVLDDIISWLDQHSTKKVPSS

SEQ ID NO: 193417 - protein, 100 aa, Oryza sativa
  unsure (1)..(100): unsure at all Xaa locations
  Clone ID: PAT_MRT4530_89558C.1.pep
MEFPHRHHHHGHRGDDDDDDRXXHSAPRSPPTXHDSAXXGGVPXGKAPXXGWDPYARHPXLXHDYAHXXXAYGGGGYGNVVHXSHEVXATRATPTTWIET

SEQ ID NO: 193418 - protein, 108 aa, Oryza sativa
  unsure (1)..(108): unsure at all Xaa locations
  Clone ID: PAT_MRT4530_89559C.1.pep
SRLVTLTGKKDAXLSLVPVGIVAESTRHLPXRDRGGGDGQPYLFTSSCTDLISSSHLLLFLLLLCSNSFPSLPHHPFLFLLSNFSSNSSPSLPIIPSAAGGLPDGGGG

SEQ ID NO: 193419 - protein, 263 aa, Oryza sativa
  Clone ID: PAT_MRT4530_8955C.1.pep
MLALRGRAVCLNFANPAWLLAVPPLATLRSAADVSSSGSRRRCLCFHSPSTPCPPHPLRPACHPLRPRPSPIAVVALSPVRASSPRARVPACCRPRVASSRPAPTSCACHRPHLRVRLGHAAVLATASGPVRVRVRRRPRLLQCAIFCAFVLVWPAVVVQMMENLAGRRRLGWGERITAVLLGADVAAGDGRRAGEECRRRRWWGPAARRATAASPARSGGGGVGGGRRCGGRRPLLRRGVGTAALVGRRNNGGACEELGRRR

SEQ ID NO: 193420 - protein, 508 aa, Oryza sativa
  Clone ID: PAT_MRT4530_89560C.1.pep
TRPRFLPPPPLSLSPLLLSQIRHLSSSSDPSPRRRRGHGHNGRGGLRAPETTRLLLLLLLLLLLLLLLFLSLVERSGDPSVQAPGGGFVWDMPHVQSAPAAATAAGMSAASAPAPRRWEGVDQALERMVLRACLDQAPERRRVRDAFKDVQLSIDHCLFKGQYSDIGTKDDIGTKEVLFLALAIILQFLHAKLAILMIIGCGSQGSGTSYEKNSRGVEIFSKCWYPENHRIKAIVCLCHGYGDTCTFFLDGIARKIASAGYGVFALDYPGFGLSEGLHGFIPSFDTLVDDVAEHFTKVKENPEHRGLPSFLFGQSMGGAVALKIHFKQPNEWDGAILVAPMCKQVLIFMARLLPKEKLVPQKDLAELAFKEKKKQEQCSYNVIAYKDKPRLRTALEMLRTTKEIESRLEEFFTSCRIANGLLFRSITISVPLVSLPIIILHGEGDLVTDPAVSKALYDKAKSSDKTLRLYKDAYHAILEGEPDEAIFQVLDDIISWLDQHSTKKVPSS

SEQ ID NO: 193421 - protein, 75 aa, Oryza sativa
  Clone ID: PAT_MRT4530_89561C.1.pep
MDRIVGRLSAVDGLYYPTTFLLADPPPSAPHRKTALPAFLSHDAPRLLDCVRCGVEIDVLQRGESARRTRTLTRI

SEQ ID NO: 193422 - protein, 127 aa, Oryza sativa
  unsure (1)..(127): unsure at all Xaa locations
  Clone ID: PAT_MRT4530_89562C.1.pep
MASLSDPNSPPXHVDEDCRGALQLLSDGTGVRAAEPPPPIYVRSDIDDGRDQWKDVVYDAAHGLGGRMYRPAATGGAEDKLPVEVHFHGGGYCIGYCTWPNFHAGWLRVDGELPAVVISLDYRLAPE

SEQ ID NO: 193423 - protein, 681 aa, Oryza sativa
  unsure (1)..(681): unsure at all Xaa locations
  Clone ID: PAT_MRT4530_89563C.1.pep
MGIVIYTAGLPPSPPTGVPAYTVGWSHHRSWASTTSPPACLRRRRVVPPPTRLAYYAAAVGRLRLHRRPASSAADWCPCLHGWPIMPPLLGVYDFIAGLPPSPPSGASAYTAGLLCCLGIFAFTVDRLRRRRLVSSLLLMDDFVPTLATSAITKGNITKLIRTSPPARLDRRRLVFPPARLAFMPPLLGVYVFTDRLAFAAADWCFRLHGWPIMPPLLGVYDFTTGLPPSPPTGVLAYTVGWSHHRXWASSSTPPACLRRRRLVSPPIRSVGHTTVDGHRHLHRRPASVAAEWCLRLHGWPIMPPLLGVYDFTAGLPPSPPSGASTHTAGLLCRRCWASTTSPPACLRRRRVVPPPTRLAYYAAAVGRLRLHRRPTSVAAEWCLRLHGWPIMPPLLGVYDFTAGVPPSPPSGASAYTAGLLCRRCWASTTSPPACLRRRRLASSPIRLVGHTIVDGRLRFHRPACXAADWCFRLYGWRTSPPLMGFIIYTTGLVPLAPTGVFVTIDGLFRSHIGYFCCHRGNTTKLRMDQSEHHHRLAVVAADWSLRLYGWSLHRPAALSAADWCFRLHGWPLCRRCWASMSSPTGLPSSAADWCFRLHGWPVMTPTDAIFFTAGYVAVTTNRRHHIQTQAVYVCCRLVYSLPWLHDSASVDWPYLLHRRSSRLLLTSALASTSGLYHYHY

SEQ ID NO: 193424 - protein, 92 aa, Oryza sativa
  Clone ID: PAT_MRT4530_89564C.1.pep
LAFDHNCFPDNKLLIVSRRTMAGTLYYIDQRTLHLRLLPPQVHNPVRVWSDAPCMRLVEAVLSAHTELCNLFVTLVFGFHFVDHIPKPILFI

SEQ ID NO: 193425 - protein, 336 aa, Oryza sativa
  Clone ID: PAT_MRT4530_89565C.1.pep
MRAGSFSGANYDRGVWIYLSGEQGVVVTKEERHIVVFDIAGCGFEEEGYPVVDYESALEIAKSTTDFDEMGSRDGFFASKLLNDFVYWVIRPERSAFSDGSGSSSSFTKRRGEGGSPEQGGGGRLREGRPLEGWSLDGWHGSGGVRAGKRPDQCMLEMFVKNATTKEISMLIQVHSNNEPVVALPLADWPTPEKIASGTVHNAADIHEVPSTPSLAVPSQATISQPSSSTQLVDKYLANPFKQNEHVGVDDEGIYSDDEIVAVTADGEHERTDVPKVKGPRALSFENDSPTTRLGARESERHSVVFDLAGCGFEEEGYSVVDYESALQTAKSTTVR

SEQ ID NO: 193426 - protein, 55 aa, Oryza sativa
  Clone ID: PAT_MRT4530_89566C.1.pep
YLSLQCSKPRSPCLILFPRIDQSVSLDLISSHSLSPYASPVRHHTSPGILLINSV

SEQ ID NO: 193427 - protein, 390 aa, Oryza sativa
  unsure (1)..(390): unsure at all Xaa locations
  Clone ID: PAT_MRT4530_89567C.1.pep
MGACLRHRRLVSLPTQLAYYATVVGRLRLHPEPASVTADWCPRLYGWLVTPPFMGVHVFIDRPDFTTADCCPRLSGWLVXHRSWASTSSPTGLTPPLPTGVSACTAGLXYAAVVGRPRLHXPACLRRRRLVSSPIRLVXTPPFMGACLXTADWCFRLHGWPLCRRCWASTSSPTGLPSPPPTGVSACTAGVYAAVVGRLHLHRPACLRRCRLVFPPARLAFMPPLLGVYVFTDRLAFTAADWCFRLHGWPLCRRCWASTSSPTGXLRRCRLVFPPARLAXYAAVVGRLRLHRPAASSAADWCFRLHGWPLCRRCWASTSSPTGRLDRRRLVFPPARLAYYAAVVGRLRLHRPAAASAADWCHRLHGWPVITPTDAIFFTAGYIAVTTNRH

SEQ ID NO: 193428 - protein, 497 aa, Oryza sativa
  unsure (1)..(497): unsure at all Xaa locations
  Clone ID: PAT_MRT4530_89568C.1.pep
MAPAVLVPIDEGSDGEGGSATDVAAPSPAPMDIDGDDDGRDRGGEGDGAAASVPAADGSSAALSLTLGLHVHGDGGGADRLSDLHEDILAKILGHLRDIRNVATTAVLSRRWLDLWTLVDIIVLQYDEPPDSRIVQEVLAARARNGSTATDIRLLEVTSLNSATPDATASWLRVAAPRLTGELFFRNRSSVPSEILNEEMDVVEQLVEELGDLVVDESGAFELPCFMRVTKITLSLGFLGLSLPPSGVFAKLRELHLVHVQFNGELTMEDAMLPSLEWLEIRHSSGLASLTLRLAPLTQMTLYNVRRLRRLNAVLPGLEVLSVTECFLEDLEGVSIVAEELEDLRWLDMIQIQICIKGIHGFRLISYAPGMDQSEHHRLACLRRCRLVFPPARLAFMPPLLGVYVFTDXLPSPLPIGASACTAXYYAAVVGRLRLHRPAAASAADWCHRLHGWPVITPTDAIFFTAGYIAVTTNRHQYLQYKLPTFAMVADWFLHFH

SEQ ID NO: 193429 - protein, 73 aa, Oryza sativa
  Clone ID: PAT_MRT4530_89569C.1.pep
MYVPQPSLSDAAGRDAGDQPRVYQVWRGSNEFFLRGRFIFGPDVRSIFITMFLIYAPVVALCVFVARHLIDDF

SEQ ID NO: 193430 - protein, 365 aa, Oryza sativa
  Clone ID: PAT_MRT4530_8956C.1.pep
MGRVLENSDNEVDGDSTTMHLAHPAPLFFLLSDSKFPFLLILGETLMASNGPRHLATNFHTTQHVKINKTAWLPVQGEEEEEHRAHADAAMWQPRGRIAGSHGSNGRLHQQPAASSPIHPPANHTITMANRCVSLDATWAHLPAPPPPPPHHTWLSPAADDAITAALWASMAPSSASSYCGSAASPTPSTSTTTTSSSAASAEILAGGGARAAAAATRPSGRVSKRKPRPSRRAHTTYITADPADFRRMVQEITGFPVPGAHTAYPSASASSAPAAPHAAAALACVLPTLDTSAFLLDRASPPPPPPQPQPGRKNDKTPTTTMASTPPQPPAAADEAAASSLLLQELEELIGASAFPTLESWGMI

SEQ ID NO: 193431 - protein, 263 aa, Oryza sativa
  Clone ID: PAT_MRT4530_89570C.1.pep
MTIKKGGSGRATKEYNGKATDGLVGLIESRLQFPGIDPLYIGTNNREESYCYSIYTTVRNNKSVDRWIFCEHVRGLEMKLVQHKKKKHPVRVALKDDRGVFERRGKKKIRKTMKIHIDAVLRIEEARPIGWVTGRSCRRSYCHLNEPTSRFVALSIACFYLWFIKYACIVREGDQTAVRCDELSRFIWMPAYARRGVQSPWEMKRSTTNCVLFCSLSGLLGYREVANLNDKSTSRSKAVQSRRQHGQRGRKGLHEDLHPKAPL

SEQ ID NO: 193432 - protein, 543 aa, Oryza sativa
  unsure (1)..(543): unsure at all Xaa locations
  Clone ID: PAT_MRT4530_89571C.1.pep
MATVQRSTPPFYNFLKEGFLLPSRNRSLFVAVFLLVVASTSVLLLVNDLAVQPIAVEILLDAKALNTTDPMSPDFTKLVKEIQDDTRELMIATAAYSLFAVVIGFAIRIIILFGAVATFSGEQHTFGTLLGKARTQLKGPLLTLAFVFVLEIAYVALLVAMAGLLAFLMVKKYYVPFLLLSLFVLVGFIFLVYFSVLCSFSVVVSVAEPWCADWCLRLHGWPIMPPLLGVYDFTAGLPPSPPSGASAYMAGLLCRRCGASTTSPPACLRRRRLVPPPTRXGVYVFTDRLAFVAADWCPRLHGWPIMPPLLGVYVFTDRLAFAAADWCFRLHSWPXLCRRCWASTSSPTGLPSPPPTGVSACTAGLYAAVVGRLRLHRPACLRRRRLVSSPARLAYYAAVVGRLRLHRPACLCRRRPMSSPARLAFMPPLLGVYVFTDRLAFAAADWCFCLHGWPLCRRCWASTSSPTGRLVRRRLVLPPARLAXYAAVVGRLRLHRPAAFVAADWCPRLHGWPXLCRRCWASTSSPTGLPSPPPTGRSSRARC

SEQ ID NO: 193433 - protein, 185 aa, Oryza sativa
  unsure (1)..(185): unsure at all Xaa locations
  Clone ID: PAT_MRT4530_89572C.1.pep
MLKTPASIGLIIYCFLCVWFVGGLSVFHCYSMRKKKENRVSSRLVFVSPDSRAASRNPRGLDSGDGGAQPASGEGGGGGGGEVFCSRIPPSKNNLRARVTVEQGLQQTRVASRGFMSPNMGKPVGDLEMGRKPVPWDEPRTAADIRDLEAGLGGFLDEKEGRLNXASPDLEQDDLPTDPMKGRAG

SEQ ID NO: 193434 - protein, 427 aa, Oryza sativa
  unsure (1)..(427): unsure at all Xaa locations
  Clone ID: PAT_MRT4530_89573C.1.pep
MGREGTVPQNGAAGSLRSRGLYSVPHIGAAGPFRSCACWPSDPRPVPRAKPSRIAAPRDRLGSALPACVTESVPQRQSALPPEPHLPTPSPARGPPPSCAPSSXAAFFSPSSRSLSPIPPPPFFSPSSLHPFPLSPLLPVHLPSVFLSLLPPPLPTLSSPPNPSPILPPLSRTPSMTRPRPSPXPPPLPLPSSPRQAVXRVSSPSSAASPSPPNPSSSHALRPLPPSEEVVVGSSCPPVVLPSAAGSXPAPATQARPAPHAMPILPSPSYPPPHPPITHALPLILLSILPILPSPSPPPHPPITLSLSLSSSTTAAPSVRAADPSPAAVWRPDSSPATAGMLDPSPATAGRPDLWCATAGRPEPSPATTRRPDPSPVIAGTTVAGLRHGGDDALSSSSLLPTSTHPSMSRRIASPPIYIGSKWWEIE

SEQ ID NO: 193435 - protein, 1031 aa, Oryza sativa
  unsure (1)..(1031): unsure at all Xaa locations
  Clone ID: PAT_MRT4530_89574C.1.pep
QQRLHRRPASVAADRCHRLYGWSVTPPFMGVHVFTXGWPSPPPTGVSACTAGLLCRRRWASTTSPPACLRRRRLVSSPIRSVGHTTVDGHRHLHRRPASVAADWCPRLYGRLVTPPLMGIVIYTAGLPPSPPTGVPAYTVGWSHHRXWASSSTPPACLRRRRLVSPPIRSVGHTTVDGHRHPHRWLTFAAVDWCFRLHGWPIMPPLLGVYDFTAGLPPSPPTGVSAYTAGLLCRRCWASTTSPPACLRRRRVVPPPTRLAYYAAAVGRLHPHRWLTFATVDWCFRLHGWPIMPPLLGVYDFTAGLPPSPPSGASAYTAGLLCRRCWASTTSPPACLRRRRLVSPPTRLAYYAAAVGRLRLHRRPASVAAEWCLRLHGWPIMPPLLGVYDFTAGLPSSPPTGVLACTAGLSCRRCWASTSSPXAGLRRCRLVFLPIRLTDFAAVNGLHHLHHWLGSTXPTGVFVTIDGLLRSHIGYFCHHQGEYYKAKIQIQICIKGIHGFKLISYALGMDQSEHHHRXASSAADWCSRLHGWPIMPPLLGAYVFTDRLAFAAADWCPRLHGWPIMPPLLGAYVFTDRXPTSPPTGVHACTAGLXYAAAVGRLRLHRPARXVAADWCPRLHGWPIXRRCWAPTSSPTGXRLCRRRLVSSPARLAFMPPLLGVYVFTDRXPSPLPIGASACTAGLLCRRCWAPTSSPTGXRLRRRRLVFPPARLAFMPPLLGVYVFTDRLAFVAADWCPRLHGWPIMPPLLGAYVFTDRXPSSPPTGVLACTAGLLCRRCWAPTSSPTGSPSSPPTGVLACTAGLXYAAVVGRLRLHRPARLRRRRLVSSPARLAXMPPLLGAYVFTDRXPSSPPTGVLACTAGLLCRRCWTSTSSPTGXLRRRRLVSSPARLAYYAAVVGRLRLHRPARXVAADWCPRLHGWPXLCRRCWAPTSSPTGXRLRRRRLVFPPACLRRYRLVLPPARQTYYAAVVGRLRLHRPAAASAADWCHRVCHGYRLVSSLPWLHDSARVDWPYLLHRRSSRCSRLVSSPP

SEQ ID NO: 193436 - protein, 222 aa, Oryza sativa
  Clone ID: PAT_MRT4530_89575C.1.pep
MGYLYIYLLEQTYFGLFAKKKKYIIKIRNAESLSVWKAMLKTPASIVLIIYCFLCVWFVGGLSVFHCYLMSTNQTTYENFRYRYDRRANPYNRGVLNNFLEIFCSRIPPSKNNFRARVTVEQGLQQTRVASRGFMSPNMGKPVGDLEMGRKPVPWDEPRTAADIRDLEAGLGGFLDEKEGRLTHASPDLSRDDLPADLMKGRAGTHSRRSSWVNRTGTSESE

SEQ ID NO: 193437 - protein, 542 aa, Oryza sativa
  unsure (1)..(542): unsure at all Xaa locations
  Clone ID: PAT_MRT4530_89576C.1.pep
MALSLPLTLQEWISQNITTGSPRPPLTGVSACTAGLLCRRCWASTSSPTGLPSPPPTGVSACTAGLLCRRCWAPTSSPTGSPLPPPTGVSACTAGLYAAVVGRLRLHRPACXAAADWCFRLHSWPLCRRCWASTSSPTGRLVRRRLVLPPARLAXYAAVVGRLRLHRPAASSAADWCFRLHGWPIMPPLLGAYVFTDRLAFVAADRCPRLHGWPLCRRCWXVYVFTDRLAFVAADRCPRLHGWPIMPPLLGAYVFTDRLAFVAADRCPRLHGWPLCRRCWASTSSPTGLPSPPPTGASACTAXYYAAVVGRLRLHRPAAASAADWCHRLHGWPVITPTDATFFTAGYIAVTTNRHQYLQHKLPTFAMAADWFLHFHGCMILPVLIGLIFFTAAPLRLVYTATTTDGHHRLPLPTGYAAADXCFYLHNCASSLPVCFCCRRLVFTSSRXCNFVIMVEXLHLYYLRHWQTLLLLLRKFYYFTNHDVFVNLDISACNAMIFYYNKXLSNIQDFYLDTFNTYLQSSNDCSTTRSYNSRLYVQLFPN

SEQ ID NO: 193438 - protein, 110 aa, Oryza sativa
  Clone ID: PAT_MRT4530_89577C.1.pep
WEPKIPRGFIWGKKKEAFFGLPPRVPYRLEEKDLVPPPLGYNVSLMFPSPFLLFGLASVPQAPPKMGASGLTLRKTANIGQSSGQFAAKIGWCPSFPGISGNFVTKVSRW

SEQ ID NO: 193439 - protein, 358 aa, Oryza sativa
  unsure (1)..(358): unsure at all Xaa locations
  Clone ID: PAT_MRT4530_89578C.1.pep
AYLLHSRNGSVRTSPTGRLVCRRLVLPPARLTYYAAVIGRLRLHRPACXAAADWCFRLHGWPIMPPLLGVYVFTDRLAFVXAADWCFRLHGWPLCRRCWASTSLPTGLPPPLPTGVSVCTAGLYAAVVGRLRLHRPAASSAADWCFRLHGWPIMXRCWASTSSPTGLPSPPPTGVSACTAGLYAAVVWRLRLHRPAAASAADWCHRLHGWPVITPTDAIFFTAGYIAVTTNRHQYLQHKLPTFAMAADWFLHFHGCMILPVLIGLTIFIAATTTDGHHHLLSPTDYAAADWCFYLHNCASSLPVCFCCRRLVFTSSRQCNFVIMXDISACDAMLFYYNKRLSNIQDFYLDIFNTYLHG

SEQ ID NO: 193440 - protein, 265 aa, Oryza sativa
  unsure (1)..(265): unsure at all Xaa locations
  Clone ID: PAT_MRT4530_89579C.1.pep
SCQKPVDSQHEKGKTIEKPANPKVSRGQKGKLKKXKEKYGEQDEEEREIRMALLAFSGRASQKDKPSXRCRWSHCSLXKPSTGEDDRSKICYKCKKSGHLSRDCPESTSEVDPADVNVGRAKDGMDRSSAPAGSSVTMDEDDIHELGDEEKEKLIDLDYLTGNPLPSDILLYAVPVCAPYNALQAYKYRVKITPGTAKKGKAAKTAMSLFLHTADATNREKELMKACTDPELVAAIVGNAKITAPGLTQLKQKQKQKGKKSAKEN

SEQ ID NO: 193441 - protein, 107 aa, Oryza sativa
  Clone ID: PAT_MRT4530_8957C.1.pep
PGWLSTTTTRLCRRAHTCWELRLHGYKRPTAPLFGHRPLSMKSRQLPSDESSVRLKARGRVSEQTCKQDRARTRSGSIRFYALVFRCVNRENRKRAEIPLGRLLTAG

SEQ ID NO: 193442 - protein, 790 aa, Oryza sativa
  unsure (1)..(790): unsure at all Xaa locations
  Clone ID: PAT_MRT4530_89580C.1.pep
MEFYLPMLSVWFANGWLPLGRFLAPGGSLDGPSNARIQIQICIKGIHGFKLISYAPGMDQSEHHHRLASTAADWCFRLHGWPIMLPLLGVYVFTDRLAFAAADWCFRLHGWPLCRRCWASTSSPTGLPSPLPTGVSACTAGLYAAVVGRLRLHRPAASSAADWCPRLHGWPIMPPLLGAYVFTDWLAFVAADWCPRLYGWPIMAPLLGAYVFTDRLAFVAADWCPRLHGWPIMPPLLGAYVFTDRLAFVAADWCPRLHGWPIMPPLLGAYVFTDRLAFAAADWCPRLHGWPIMPPLLGAYVFTDRLAFAAADWCPRLHGWPIMPPLLGAYVFTDRLAFAAADWCPRLHGWPIMPPLLGAYVFTDRLAFVAADWCPRLHGWPIMPPLLGAYVFTDRLAFAAADWCPRLHGWPIMPPLLGAYVFTDRLAFAAADWCPRLHGWPIMPPLLGAYVFTDRLAFVAADWCPRLHGXAYYAAVVGRLRLHRPARLRRRRLVSTPARLAXMPPLLGAYVFTDRLAFAAADWCFRLHGWPXMPPLLGAYVFTDRLAFAAADWCPRLHGWPIMPPLLGAYVFTDRLAFAAADWCPRLHGWPIMPPLLGAYVFTDRLAFVAADWCPRLHGWPIMPPLLGAYVFTDRLAFAAADWCPRLHGWPIMPPLLGAYVFTDRLAFAAADWCPRLHGWPIMPPLLCAYVFTDRLAFAAADWCPRLHGWPIMPPLLGAYVFTDRLAFAAADWCFRLHGWPLCRRCWASTSSPTGLPSPLPIGASACTADLLCCRCWASTSSPTGRRIRR

SEQ ID NO: 193443 - protein, 106 aa, Oryza sativa
  Clone ID: PAT_MRT4530_89581C.1.pep
PHSNTLFVSGDYNFSRQTNMTSSSWSFLGYAFLLHGVTAGDWVVRGLKYGRVGDPGGFGWSYSEFSIISAASSGQSLLLILFFTTNQTVECSQKKKNRRYVRGNSS

SEQ ID NO: 193444 - protein, 1686 aa, Oryza sativa
  unsure (1)..(1686): unsure at all Xaa locations
  Clone ID: PAT_MRT4530_89582C.1.pep
MVGWSHHRCWASTSSPTGRLVRRRLVFPPARLAYYAAAVGRLRLHRRPASVAAEWCLRLHGWPIMPPLLGVYDFTAGLPPSPPIGASAYTAGLLCRRCWASTTSPPACLRRRRLVPPPTRLAYYAAAVGRLRLHRRPASVAAEWCLRLYGWLVTPPLLGVYIFTDRXVSSAADWCFRLHGWPIMPPLLGVYDFTAGLPPSPPTGVFAYMVVVPPPTRLAYYAAAVGRLRLHRRPASVAAEWCLRLHGWPIMPPLLGVCDFTAGLPPSPPIGASAYTAGLLCRRCWASTTSPPACLRRRRLVPPPTRLAYYAAAVGRLRLHRRPASVAAEWCLRLHGWPIMPPLLGVYDFTAGLPPSPPSGASAYTAGLLCRRCWASATSPPACLRRRRLVPPPTRLAYYAAAVGRLRLHRRPASVAAEWXPPPTRLAYYAAAVGRLRLHRRPASVAAEWCRRLHGWPIRPPLLSVYDFTAGLPPSPPIGASAYTAGLLCRRCWASTTSPPACLRRRRLVSPPIRSVGHTTVDGHRRLHRRPASVAAEWCLRLHGWPIMPPLLGVYDFTAGLPPSPPSGASAYTAGLLCRRCWASTTSPPACLRRRRVVPPPTRLAYYAAAVGRLRLHRRPASVAADWCLRLHGWPIMPPLLGVYDFTAGLPPSPPIGASAYTAGLLCRRCWASTTSPPACLRRRRVVPPPTRLAYYAAAVGRLRLHRRPASVAAEWCLRLHGWPIMPPLLGVCDFTAGLPPSPPIGASAYTAGLLCRRCWASATSPPACLRRRRLVPPPTRLAYYAAAVGRLRLHRRPASVAAEWCLRLHGWPIMPPLLGVYDFTAGLPPSPPSGAAAYTASLLGRRCWASTTSPPTCFRRRRVVPPPTRLAYYAADVGRLRLHRRPASVAADGASAYTAGLLCRXVGCLRPHRWLTFVAVDWIQIQICIKGIHGFKLISYAPGMDQSEHHXRLAFAAADWCFRLHGWPXMPPLLGVYVFTDRLAFAAADWCFRLHGWPLXPPLLGVYVFTDRLAFAAADXPPRPPLTGASACTAGLXYAAVVGRLRLHRPACXAAADWCFRLHGWPLCRRCWASTSSPTGXLRRCRLVFPPARLAFMPPLLGVYVFTDRXPSPPPTGVSACTAGLYAAVXWASTSSPTGRLVRRRLVLPPARLAYXPPLLGVYVVTDRLAFAAADWCFRLHGWPLXPPLLGVYVFTDWXPSPLPTGVSACTAGLYAAIXWASTSSPTGLPSPPPTGVSACTAGLYAAVVGRLRLHRPACLRRRRLVFPPARLAFMPPLLGVYVFTDRPPRPPPTGASACTAGLLCRRCWASTSSPTGRLVRRRLVLPPARLAYYADVVGRLRLHRPAASSAADWCFRLHGWPXLCRRCWASTSSPTGRLVRRRLVFPPARLAYYAAVVGRLRLHRPACLRRRRLVFPPARLAFMPPLLGVYVFTDRLASAAADWCFRLHGWPLCRRCWTSTSSPTGLPSPPPTGVSACTAGLYAAVVGRLRLHRPACLRRCRLVFPPARLAYYAAVVGRLRLHRPAASSAADWCFRLHGWPIMPPLLGVYVFTDRLAFAAADWCFRLHGWPLCRRCWASTSSPTGRLVRRRLVLPPARLAYYAAVVGRLRLHRPACLRRRRLVFPPARLAFMPPLLGVYVFTDRPPRPPPTGVSACTAGLLCCRCWASTSSPTGRLVRRRLLPLL

SEQ ID NO: 193445 - protein, 632 aa, Oryza sativa
  unsure (1)..(632): unsure at all Xaa locations
  Clone ID: PAT_MRT4530_89583C.1.pep
MLVMDSRRLAIQSIGHESTSPAMCAAAAAVGRLRLHRRPASVAAEWCLRLHGWPIMPPLLGVYDFTAGLPPTPPSGASAYTAGLLCRRCWASTTSPPACLRRRRLVPSPTRLAYYAAAVGRLRLHRRPASVAAEWCLRLHGWPIMPPLLGVYDFTAGPPPSPPSGASAYTAGLLCRRCWASTTSPPACLCRRRLVSSPIRLVGHTTVHGRPRLRRPXAFAAADWCFCLHGXPIMPPLLGVYDFTAGLPPSPPSGASAYTAGLLCRRCWMSTSSPLAHLRCRRLVFPLTRLTYYAAISGHLRFHRRPPSSPPTGVFIVIDGRLCSHIGHFCHHQGEYYKAKIQIQICIKGIHGFKLISYAPGMDQSEHHXRLASSAADWCFRLHGWPXMPLLLGIYVFTDRXASSAADWCFRLHGWPLXPPLLGVYVFTDRXPSPPPTGVSACTAGLYAAVVGRLRLHRPACXAAADWCFRLHGWPLCRRCWASTSSPTGRLVRRRLVLPPARLAXMPPLMGVCVFTDRPPHPPPTGVTAYTAGLLCRCCWAPTSSSPVVSSAAXLVPLPLRLVIQLPLLMDIIVFRRRLXYAAADWCFYLHNCASSPPDFYLDIFNTYLQSSNDYSTTRSYSSRLYVQLFPN

SEQ ID NO: 193446 - protein, 65 aa, Oryza sativa
  unsure (1)..(65): unsure at all Xaa locations
  Clone ID: PAT_MRT4530_89584C.1.pep
SMASIRLISDPRIKQNSYPSRAGTNVEQIRTACDAAANPNWRGGASLXLSAXSLPLLSSCPLPPP

SEQ ID NO: 193447 - protein, 196 aa, Oryza sativa
  unsure (1)..(196): unsure at all Xaa locations
  Clone ID: PAT_MRT4530_89585C.1.pep
MARSAFSRFSIYCCGLLLXHASMAQLFNPRTNPWHIPRKGEFYVSVDFDRLPAFEPLRKVRSEPGETEYFYENNELFQCTATFVIRRGIQPQGLLGPRYTNIPXVVYIIPGRGAMXLNFPGCPATYQQQFQQXSSQGRSQRQKITXEHHRIHLFTPGDIVALPAGAAHCIYNEGDAPIVAVYVYDANNNAHEIGPR

SEQ ID NO: 193448 - protein, 81 aa, Oryza sativa
  Clone ID: PAT_MRT4530_89586C.1.pep
MALVKSHHQMLASSSTSSSSPSSQQQQPPPPASNSSSLAAADDDQPSPDKRKRRPPGTPDPDAEVVALSPRTLLESDRYVC

SEQ ID NO: 193449 - protein, 92 aa, Oryza sativa
  Clone ID: PAT_MRT4530_89587C.1.pep
MGEPPDVGILVLGLATVSARSGGEAIGSGSPVTVEEEEEAVVREGDEETKQRVVVVVSWLLAPLQPHSCSYSGSHNPTAHDRRLISTAGGAT

SEQ ID NO: 193450 - protein, 511 aa, Oryza sativa
  unsure (1)..(511): unsure at all Xaa locations
  Clone ID: PAT_MRT4530_89588C.1.pep
GSHMVRRLSVRSPRLQRARRPPPSAPPTTAPMDPPSPPPPPPYPPAAAEGGPAADSQAAELPRLTVTQVEQMKVEAKVGEIYRVLFGNAPNANSLMLELWREQHVEYLTRGLKHLGPSFHVLDANRPWLCYWIIHALALLDEIPDDVEDDIVDFLSRCQDKDGGYGGGPGQFPHFVTNFAAVNTFATLGSVRALXSVNWDNLSKLRLRMKDTSGAFRCAFSQVVNSGEKIVSFHVEFLTPYICHSFYYPLTRMHDGGEIDVRASYTAISVASLVNILDGELAKGVGNYITRCQTYEGGIAGEPYAEAHGGYTFCGLATMILLNEVDKLDLASLIVNAIPVFFFLASSTLSDKLLVYDQGAALALTQKLMTVVDEQLKSSYSSKRPPGDDACGTSSSTEAAYYAKFGFDFIEKSNQIGPLFHNIALQQYILLCAQVLDGGLRDKPGKNRDHYHSCYCLSGLSVSQYSAMVDSDACPLPQHVLGPYSNLLEPIHPLYNVVLDKYHTAYEFFSS

SEQ ID NO: 193451 - protein, 78 aa, Oryza sativa
  Clone ID: PAT_MRT4530_89589C.1.pep
HEVFWPQWLVVNPKMHSCWPKGQKGWGFNLKLPKPNGVTSVPPSPCRLGVLCQKKHNCRIILHLSFSPKKKRVKISRD

SEQ ID NO: 193452 - protein, 185 aa, Oryza sativa
  Clone ID: PAT_MRT4530_8958C.1.pep
RERRRRDRRRERLVRREERSDEEGEEDMREEREATESERSLRSRPRHRGRSGAGGGGDGEGEDLPRLAARCHHRSAATPPSSTASAPRGPRTSPAAVPPTPLNSPTSPVPRSHSADPAAASGEERGVDLASTDAFLRLLTQSASGEWIRGERERGGVRSKKDSTSAPIYYLSIYALSSIYLSNIY

SEQ ID NO: 193453 - protein, 1142 aa, Oryza sativa
  Clone ID: PAT_MRT4530_89590C.1.pep
MGSRIKEMVRVATARLGGEPSPRGGAGNSAFGRGESSRTARLGGGGASLRRQPQPQAPSVRTICCNDREANAPVGYKGNSVSTTKYNVLTFLPKGLFEQFRRVANLYFLMISILSTTPISPVHPVTNVVPLSLVLLVSLIKEAFEDWKRFQNDMSINNAHVDVLQGQKWETTPWKRLQVGDIVRTANLDGETNLKIRKALEKTWDYKNPEKAFEFKGEIQCEQPNNSLYTFTGNLIVDKQTMPLSPNQGCSLRNTEYIVGVVIFTGHETKVMMNSMNVPSKRSTLEKKLDKLILALFATLFTMCVIGAIGSGVFINEKYFYLGLRGKVEDQFNPKNKFVVTILTMFTLITLYSTIIPISLYVSIEMIKFIQCTQFINNDLHMYHAESNTPALARTSNLNEELGQVEYIFSDKTGTLTRNLMEFFKCSIAGEIYGTGITEIEKGGAERAGIKIDGDEGKRSGAAVHEKGFNFDDARIMCGAWRNEPNPEACKEFFRCLALCHTVLPEGEETPEKISYQAASPDEAALVAASKNFGFFFYRRTPTTVIVRESHVERMGSIQDVAYEILNVLEFNSTRKRQSVVCRFPNGRLVLYCKVAELIEKDLVLVGCTAIEDKLQEGVPACIQTLSAAGIKIWVLTGDKMETAINIAYACSLVNNDMKQFIISSETDVIREAEDRGDPVEIARVIKESVKQSLKSYHEEARGSLISTPGQKLALIIDGRCLMYALDPTLRVDLLGLSLICHSVVCCRVSPLQKAQVASLVKKGAHKITLSIGDGANDVSMIQAAHVGIGISGQEGMQAVMASDFAIAQFRYLTDLLLVHGRWSYLRLCKVITYFFYKNLTFTLTQFWFTFQTGFSGQRFYDDWFQSLYNVIFTALPVIMVGLFDKDVSASLSKKYPKLYQEGIRNTFFKWRVIAVWAFFAFYQSIVFYYFTAAASRYGHGSSGKILGLWDVSTMAFTCVVVTVNLRLLMSCNSITRWHYISVAGSITAWFMFIFIYSAIMTSFDRQENVYFVIYVLMSTFFFYLTLLLVPIIALFGDFLYLSIQRWFFPYDYQVIQEMHRDEPHEYSRIQLPETSHLSPEEARSYAISMLPRESSKHTGFAFDSPGYESFFASQQGVGVPHKPWDVARRASMKQRQKTGGS

SEQ ID NO: 193454 - protein, 113 aa, Oryza sativa
  unsure (1)..(113): unsure at all Xaa locations
  Clone ID: PAT_MRT4530_89591C.1.pep
GADGGSPWRRAARRRGQRGRRRRRGGPRDQRDCETRLPLLLAVHRRPNQVVERRRRRRTTLHGARAAHGRSRQRRPXQQHGGHAFLDKSVPRHHRRVFHGRRRRAEGPRAASV

SEQ ID NO: 193455 - protein, 128 aa, Oryza sativa
  Clone ID: PAT_MRT4530_89592C.1.pep
MECVRRQRALPVLQHGYVPHELSSEPLPLGIYMGPPSPPTPSGRFRISRRPPLVQVDGQLNPTTLAPSTITNIERNLNLPFVLADDISSDDGLLRAAAQACAERGPKCYRQSINIEHITNQKPTRPRR

SEQ ID NO: 193456 - protein, 509 aa, Oryza sativa
  Clone ID: PAT_MRT4530_89593C.1.pep
MELVCYLDADDVLNYNTPEDAILMSSASGEKYDYIINFAINIGWSLMRPTLTSHGRVVEITPNPGNYIQGGPTMTQSSKSLARAPGYIVTVLTMFANKKITCMSMRNEEMRFTMELAGEGKLKMVANSWHPFEEAAEPWEKSTGGHATRKPEHFLSDSYRINETMTTGEIQELLGIMAAGGGIPATMRAVQYTGYGGGAGALKHVEIPVPSVKKHEVLIKVEAASVNPIDWSIQKGMLRPFLPKFPFIPVTDVAGEIVEAGSAVHELKVGDKVLSKLNFWKGGGLAEYVAAPESLTVVRPAGVSAVDAAGLPVAGLTALKALMSIGTKFDGTGGTGANVLITAASGGVGTYAVQLAKLGNHRVTATCGARNMDLVRSLGADEVLDYNTPQGAALTSSASDEKYDYIINTAMNVNWSAMKPTLSSRGRVVDITPNPGNYVAAMLTMFARKKITMMALMSLGKEEMRFLMELVGEGKLRTVVDSRCPFEKAAEAWEKSMGGHATGKVIVEM

SEQ ID NO: 193457 - protein, 90 aa, Oryza sativa
  unsure (1)..(90): unsure at all Xaa locations
  Clone ID: PAT_MRT4530_89594C.1.pep
CADRGSPAACESGGGLWIGCKLPSGSGYDSGGSCSFPIGRSNGGCGGRRSTCGASPRGRWSHWGEQQARPGGFSLXRMHWGKVGGGAGWF

SEQ ID NO: 193458 - protein, 271 aa, Oryza sativa
  unsure (1)..(271): unsure at all Xaa locations
  Clone ID: PAT_MRT4530_89595C.1.pep
MARMSLRPRGRRPREACGDDRLSALPGDLLLLVLRRLYTRTALATGMLSRSWAHLPHELPALDFRVSDILRRAITGDRCILRHRGVVGASPVASRRHRVARHRPPATPSSSPTLPRRRQQPADLSSMPPDVTMATTDTTIAYIMDEQQEIKFKTSKRDRGASGCQVMPLGVRRQAPRALALXGPRPSPNCRVAGGAPCRAVPATGSAVPRAARLARPVWPPLWLSSHQCAAPQPSLTMFNAVRMNVRCRTTGPRQIGCDQSVIGLSPVTSD

SEQ ID NO: 193459 - protein, 80 aa, Oryza sativa
  Clone ID: PAT_MRT4530_89596C.1.pep
MGQGVRQTACRHLTRDLTGVGAPRPSGSGQAHPDPPSGEIRRRADTSPSGPTSPKVPGHVGDYVCLKPLVMILPVPYHRQ

SEQ ID NO: 193460 - protein, 119 aa, Oryza sativa
  Clone ID: PAT_MRT4530_89597C.1.pep
TCMVVKPWQVVTCFKAGRRIRSWACPSIYGSKKNYIVRQAEAGLLGLCGQLVGWRIKESVSAADFCQMVIRAGCNWAQLLLVSGSSIKEMLRGVHSPLGAPLSFKKKKKRKKKKKKKKQ

SEQ ID NO: 193461 - protein, 48 aa, Oryza sativa
  Clone ID: PAT_MRT4530_89598C.1.pep
RVYVEQYEKVSSKTGRDSQDALAPLVDVALKLSKMQEFTGRSAATVIT

SEQ ID NO: 193462 - protein, 61 aa, Oryza sativa
  Clone ID: PAT_MRT4530_89599C.1.pep
SSLASLPRRGDSSSSSSIIRARSLLFLARRGGDGDSGVVRRDGRRGAMRVMEAMLGRQASC

SEQ ID NO: 193463 - protein, 42 aa, Oryza sativa
  Clone ID: PAT_MRT4530_8959C.1.pep
MGTRIFIQIRAPELSGSDKALSALDVLSRSSLRFLRGLVRTA

SEQ ID NO: 193464 - protein, 123 aa, Oryza sativa
  Clone ID: PAT_MRT4530_895C.1.pep
MAELVGPRVYSCCHCRNHVCLHDDIISKAFQASDVRSAGLIWYIMLKKGRNGRAFLFSHAMNISMGPKEDRQLMTGLHTVADIYCRDCREVLGWKYERAFEESQKYKEGKFIFEKAKIVKENW

SEQ ID NO: 193465 - protein, 49 aa, Oryza sativa
  Clone ID: PAT_MRT4530_89600C.1.pep
QPAYVFHEGKFLPDLLKDQFISKRHFIKNKSLFYIRDMALRSYTKQEPL

SEQ ID NO: 193466 - protein, 34 aa, Oryza sativa
  Clone ID: PAT_MRT4530_89601C.1.pep
NTTNLSALELKKIASSDENHEYKQRKDASIYNCH

SEQ ID NO: 193467 - protein, 320 aa, Oryza sativa
  unsure (1)..(320): unsure at all Xaa locations
  Clone ID: PAT_MRT4530_89602C.1.pep
MDVDFWGVVIEPCNKKEIFCPEDTLYHLTSVALDEAYGLKDSNVKVFVEVNDEKFAIGTLSSKRHPHIKVDFCFKKNFQLFHTSLISKVAFCGYQVKNLGKFTDSEGDESDEEVPPDNMIKEAQKSKLPAKSATVASAMQKAFVKEIEHYEKSKADDDNNERYRDISVVGESTGNEDSSDDADYEGKSSDEEETTAKEGESTDEKETPAKEGESSDEEETPAKNTKEENEPVVTPLKTFPHXDGKIEAPITDNKTGTNTSKRGSHLQVTNPHPAKQAKRTPIKNDTPKRSASYVCNSCKKTFNSSGALKDHSKAKHPATN

SEQ ID NO: 193468 - protein, 43 aa, Oryza sativa
  Clone ID: PAT_MRT4530_89603C.1.pep
MAAMAIFFLLPPSKIHLQTYNGCRFGPHQSRQAWLVMRASPLG

SEQ ID NO: 193469 - protein, 104 aa, Oryza sativa
  Clone ID: PAT_MRT4530_89604C.1.pep
MPSTHTICIFSSTILAFSLEPLSFGLSEKRNIFVQALAFFMGGAIEAPVHVLAVDDNPPDRELIERVLKTSSFQVTTVDSGSKALEFLGLHDHEDSPISTQSDQ

SEQ ID NO: 193470 - protein, 225 aa, Oryza sativa
  Clone ID: PAT_MRT4530_89605C.1.pep
MAAIEGGNGSEEKPFFNLKGYIAGNPVTDYKIDEDGRIPFLHGMGLISDELYEHAKETCGEKYSAPSNAQCAHSVQAINDKASHVLLKIWANDETVRESLGVQKGTVGEWKRCNRDIDYNSDVRSTVEYHLTLMRKGYRAIIYSGDHDSRVPSISTQAWIRLLNLSIADDWRPWYVDGQVAGFTRSFASNNLTYATVKGAGHTAAEYKPKECQEMFARWISGTPL

SEQ ID NO: 193471 - protein, 39 aa, Oryza sativa
  Clone ID: PAT_MRT4530_89606C.1.pep
MGFEDPEELLPTNNPGNYFRPSGLHAASSTSDLVSIDRP

SEQ ID NO: 193472 - protein, 163 aa, Oryza sativa
  unsure (1)..(163): unsure at all Xaa locations
  Clone ID: PAT_MRT4530_89607C.1.pep
GDDDSRCTGEAAQAAGGGGVVATPLVIXRGRVSGGFPAKRRRCRGRGCTCEAEGGDGARSWXGGAAGGWPAPEREKEKAGRGGAATGERGRGLKLENGPRGFHFIGWGREPGTGEVGTAAEKSAGGHGKRPGLARAFRVIKSTNQGGNMGERERNKWVLLPPI

SEQ ID NO: 193473 - protein, 736 aa, Oryza sativa
  unsure (1)..(736): unsure at all Xaa locations
  Clone ID: PAT_MRT4530_89608C.1.pep
VLRSCLSTCHKKLPTTAPYSSQQNGVVERRNDMVVVTTRSMLKLKGLPGWFXGEAVSTAVYVLNRXFGCIIYIRNTTPHLTKLEDRGRKMIFVGYECGSKAYCAYDPVTKRVHVMRDVVFDEQAQWDWGTSSDDGELGGGDNIFTVEAGGEEPTSGEQSPHLSGDRDTELETGSPAGIDNDYLDADHDDDAPLRFCSINDIIGPASPCGFAPCALVAEELYAVSSDELALFDEAERLMAKMEAIEDNKTWSLADLPPGRCAIGLKWVFMVKRDEHVAVCKHKARLVVKGYAQRQGIDYDELFAPVARLDSVHLLIALAAHKGWELDHMDVKYAFLNGDLQKEFYVEQPAGFVIADKEHKVLKLRKALYGLHQAPRAWNAKLDNTLQSLGFKRSPSEHAIYVRRNGNAQLVVGVYVDDLMITGSNYDDIRQFKKEMAAAFKMSDLGQLHYYLSIEVKQSASGILLSQGAYATKNLEKCGMEGCNQCQVPMETRLKRSKFSSEPSVDATAYRSIVRSLRYLVNTCLDLAFAVGYASRFLEDPREDHLAAVKHILHYVAGTKNLGVWFSRKVEKEAYLRGFSDSGYAGDVDARKSMTGVIFFLGSSPITWQSMKQKVVVQSSCEVEYIVAANAACQALWLARVLAEVQGSTPRAPMLRVDNKSAISLTKNPVLHGQSKHIQVKYHLAREAAENGLINVEFIRSEEQLGNILTKLLGKTKFHELRSKIGLINISNEHSKS

SEQ ID NO: 193474 - protein, 600 aa, Oryza sativa
  Clone ID: PAT_MRT4530_89609C.1.pep
MPPPPPPLGRFGVEVTARTLVRASDPPPGFPAVLPVSNLDLILGSFNVSLIVVYPAPARGFAAVAAAVRAALPAFLSRFFPFAGRVVADAATGIPEVACDNAGAELVLADAGVALADVDFADADRSLGTIQLPYEQGIALSLQLVRFKCGGFSMSWGTNHLLVDGHGLTALPTAWAEMLRTGGLSWEPHHDRRSLFRPRSPPRHGASLDAEFTRYAPGSLVNPLLAAALVRRNYVVGADDLDRLRAAASTASRRATRLEALSAHVWKLLAAATHGSDARCRLAWLVDGRRRLDPAKYDPTLVSSYLGNVVTYASRESPVEAITSSPLADVAAMAGAAIGEVFRQERYEELVDWMELRKAAAFKNGEKWTETVGIGTGSPAVVVSAFVPFRVDGDFGFGSPALVMPWVRPGRLGSAAMTVARSPREDGSWVVSARLWPRLADAIEADPDAVLKPATAARLGLARRAPAAADVARHASRFFIWFLRLPRDKRAYRRGAVTLAAALDLESLKKVNFFETTGREVEEVKGAEYSEGGGEGVGEVVVSQGQCGGGCGRWCWGMGSSSTVFDMVSAVLAVEIMGTPYLHGMVIRLVIGDSLYLWNM

SEQ ID NO: 193475 - protein, 378 aa, Oryza sativa
  Clone ID: PAT_MRT4530_8960C.1.pep
MGRIIRWLKKLLTGRKEAHKGLKENHAVSDGAEKEKSRWSFAKHRRSGVDSGRRPSEAALAAVAAVAVEPSEVRRPCHCGEVENAIARREKAAMVIQKAYRGYLARKALRALRSLVKLQALVRGYLVRKQAATTLHRLQALMRQQASSRAATRASYRKSMEQERISVEETRLKTTTPGHRRRLSDSADSNYERSPRIVEMDTCHRRSRSSRIAIRHSRDHSSDCLTPAPMPPAPLSCSSPISIKQPPRLSIQRSQHHERDTRHAKTAHNTPRLGAPPYGSSPANKSVDGMARARLSHRDALGSPRYMAGTASSAARTRCQSAPRQRQAAEAPARSRRSCSRTTQDSGFCFECSEDSRPGYSEELSDEAARDYYLDRMW

SEQ ID NO: 193476 - protein, 84 aa, Oryza sativa
  unsure (1)..(84): unsure at all Xaa locations
  Clone ID: PAT_MRT4530_89610C.1.pep
FFFFFFQIIRAPQXIHKIPINTTSCIFSVYQIHHNSHKITKTFPKSTTKLHKSSTHRTSHKSENHPHRTDRGAQKIIHIHTVRR

SEQ ID NO: 193477 - protein, 229 aa, Oryza sativa
  unsure (1)..(229): unsure at all Xaa locations
  Clone ID: PAT_MRT4530_89611C.1.pep
KFRPICVLDVMSYKILTKGVISRLVRVIQKVEFNSQVAFLKYWFIMEXGILSLHEIIQEVHMGKNVWVLFKVNFEKVCDEMRDGXLYNKFMAKNVLEIDKWCGSIFKVVRGGCVATMLNELISXVLQGFKARIYIAPLPFNIAGDVALTLLINQTIEKXLIKGRVSHFAECYRVSILQYVDDIVFIMEDDKEKXLNMKTILCLFAHLSYLKIKFHRSDYIIWGEATDRA

SEQ ID NO: 193478 - protein, 962 aa, Oryza sativa
  unsure (1)..(962): unsure at all Xaa locations
  Clone ID: PAT_MRT4530_89612C.1.pep
VLRSCLSTCHKKLPTTAPYSSQQNGVVERRNDMVVVTTRSMLKLKGLPGWFXGEAVSTAVYVLNRXFGCIIYIRNTTPHLTKLEDRGRKMIFVGYECGSKAYCAYDPVTKRVHVMRDVVFDEQAQWDWGTSSDDGELGGGDNIFTVEAGGEEPTSGEQSPHLSGDRDTELETGSPAGIDNDYLDADHDDDAPLRFCSINDIIGPASPCGFAPCALVAEELYAVSSDELALFDEAERLMAKMEAIEDNKTWSLADLPPGRCAIGLKWVFMVKRDEHGAVCKHKARLVVKGYAQRQGIDYDELFAPVARLDSVHLLIALAAHKGWELDHMDVKYAFLNGDLQEEFYVEQPAGFVIADKEHKVLKLRKALYGLHQAPRAWNAKLDNTLQSLGFKRSPSEHAIYVRRNGNAQLVVGVYVDDLMITGSNYDDIRQFKKEMAAAFKMSDLGQLHYYLSIEVKQSASGILLSQGAYATKNLEKCGMEGCNQCQVPMETRLKRSKFSSEPSVDATAYRSIVRSLRYLVNTCLDLAFAVGYASRFLEDPREDHLAAVKHILHYVAGTKNLGVWFSRKVEKEAYLRGFSDSGYAGDVDARKSMTGVIFFLGSSPITWQSMKQKVVVQSSCEVEYIVAANAACQALWLARVLAEVQGSTPRAPMLRVDNKSAISLTKNPVLHGQSKHIQVKYHLAREAAENGLINVEFIRSEEQLGNILTKLLGKTKFHELRSKIGLINISDGNGDMIPRLRFDDGVATLQSSRGELWSHPDGQQEDEGEESKGKLSHFDFLALGDTGEGLRVDGKDMRRASGPSGVMEMGYHKGPRPNFKGKDNILYSPCFFPLILTAASTSTSASVFASLSSPDSPTAPSTNAKTRLHDSILIIRQSSSSSGDDGGSIAPTTSGGASLPTQQEAAMVVGEGGGGRRPRRRLWATTPQRVSQAATGLTAKGGGDGSRGRCVRPWAGAAALGV

SEQ ID NO: 193479 - protein, 61 aa, Oryza sativa
  Clone ID: PAT_MRT4530_89613C.1.pep
FFFFFDNEGKSRHKWSTDTHLCSRHTLHVMSGNSDGILQRQVHNNHEVRYQSTNTGTITTL

SEQ ID NO: 193480 - protein, 336 aa, Oryza sativa
  unsure (1)..(336): unsure at all Xaa locations
  Clone ID: PAT_MRT4530_89614C.1.pep
PPSTPPLIPCPHPPCXPLQHPPLLPTTRPPPPPPLLELPQPLPPPLQLPPPQQLPPSPPPPPPSPSTLPPSPDVXPPSPDVTAAVATTSGRPPXKPPPPHHAAPPPAASPPDXPRRPRSGRSSHRPVXPPLPARRENEAPPPPSLRPPPPSLPSLSPPPLRYPLPPPSLPPPPPPPSLFQLLPPLPPSACCPAVPPATASPPLLPSSTPHGESRRACFANGVPLSPPPPPPSGRPVLSHPTPLSLPPLPLPSLSYCPQPRVMKASAPAPPPVHCRGPGGHPAPSHLVPPPPSPPSPPHRRPSXPPPPRRPPHRQRHIAASPAMKAAAEGPRCRANS

SEQ ID NO: 193481 - protein, 123 aa, Oryza sativa
  unsure (1)..(123): unsure at all Xaa locations
  Clone ID: PAT_MRT4530_89615C.1.pep
LFKRGLPTGSPGQTVYGLSDRMVRGAMAAADQSXERQMLNMRPATEAVMGRHMERGDDGLPLRKENDATAXDYRRHANAVNVVDMGGGLHRKDEMERRDVMSRGVTSTDPKLMMLRLMLSLTK

SEQ ID NO: 193482 - protein, 94 aa, Oryza sativa
  Clone ID: PAT_MRT4530_89616C.1.pep
LVNVHTPRKGREPFLDGERLLKPPPPGRRPRRGAWRGAFPGRPTAPARVLGVLRRLRGSVRGARISRALRRRRRWPPLARRGADANRVGGGGGA

SEQ ID NO: 193483 - protein, 143 aa, Oryza sativa
  Clone ID: PAT_MRT4530_89617C.1.pep
APIADRVSSRQARLQAPSRPPLPPTTALRVKLAPEHSSCRCRANTVICHASPAVAVRASSRSRRRPFPGVDTVSAPTMLPLQHPPLLPTTRPPPPPPLLELPQPLPPPLQLPPPQQLPPSPPPPPPSPSTVGSHARGLPSQVT

SEQ ID NO: 193484 - protein, 72 aa, Oryza sativa
  Clone ID: PAT_MRT4530_89618C.1.pep
MAPSAAAAVYRPSALSISPPAHDDALQRRRRWRRTTTRYSGGGGGGAPLQLHLDSFQKLGKEDGQQRSIVAV

SEQ ID NO: 193485 - protein, 841 aa, Oryza sativa
  Clone ID: PAT_MRT4530_89619C.1.pep
MANIISATITESHEQCEGFQREGRASEYIDKLIRNTKFPPKGSFDEYIGRHMFPDVSGNRSKALFLGYMVRCLLLASSGNRKSDNRDDFRNKRLDLACELLQRELWVHIMHAQKRMVKVMQRHLSGDGDLQPLECYVHASIVTNGLNRAFSTGSWCHPFNKRERCSGIVATLRRTNPLQMMSDMRKTRQWVAYAGKAGDARYPEPSVDALVSCGMKKLDELLLQEISGKDRIFLNGNLVGVCADSVEFVLHLRSMRRRKQIDAQVEIKRDKQNKEVRIFSDPGRILRPLLIVENLRNIMNRKNGSYSFQELMDQNIIELIGVEEEEDIRCAYGIRHLFAGDEEKNFSFYTHCELDPSFLLGLSCSIIPFANHDTAKRILMQAEKISQQAIGYSTTNPLFRVDTHSHQLYYPQRPLFKTVAADCLGKRDYTSGSKHDFARPEYFNGQNAIVSISVHQGFNQEDSLVLNRASLERGMFRTQHFKSYKALIENKEITKRLKHKENINFGKTPSKKGLVDSLDIDGLPYIGASLQSNDIIIGKVSDSGEDHSIKLLHTEKGIVEKVVLSATDDGTNSAFVTLRQTRSPRIGDKFASMHGQKGVIGFLDSQENFPFTHQGIVPDIVINPHGFPTRQTPGQLLEAALGKGIALGGATRYATPFTSPSVEVITEQLHKAGFSRWGGESVINGRTGERAASPVFTGPTFYQRLHHMAEDKVKFRNTGPVHPLTRQPVEDRRRYGGVKFGEMERDCLLAHGAAANLHERLFLLSDVSRLHVCRRCQRAAVVVSPAVAADGGGGRKVRGPYCRFCRSAEEVVRVSVPYGAKILYQELFSMGICLKFDTELI

SEQ ID NO: 193486 - protein, 73 aa, Oryza sativa
  Clone ID: PAT_MRT4530_8961C.1.pep
FFFFFFFFFFFFFFFFFFFFFFFRKNWRSVEKKKGSGKRGLVQERPFRAKRNYFWDFYKQGFRKPGYILAKKP

SEQ ID NO: 193487 - protein, 216 aa, Oryza sativa
  Clone ID: PAT_MRT4530_89620C.1.pep
MDSPATPVGLSLPLLSLVLCNEPCYTKGKAVAHTGLWGTAAVQGNGRPRSTLSKTDCRDRTVHDRLTGNGNDDVSDDGSDDVSTGGDSGGSDAHARRRMTARRRERRAPTGRGRRGELTGDQNNGGKATDGAGDEEEAAAEIGSTAATVLRRSSAAAKGRTGTATTWRSRWWPSRVTTTTGTAAAHGWSDGGDGGARAHGARALRTTRGEGEGAGG

SEQ ID NO: 193488 - protein, 1087 aa, Oryza sativa
  Clone ID: PAT_MRT4530_89621C.1.pep
MWDEKERRRVFCLAPQDGEAVWWLAMEDPEITGQQSPNATSIVTDLMDLDDIIVEGNEVQFAMDVDLRAIPSLKDGGHTDPLVQIPGDMSHMDVDLRVIPSLKDGGHADPPVQVPVDKRIASLEKLCKEASRSFFRETRLVSHQINSYNDFVSHGLQKMFDSLDEVTVEPDYDPSKKVGPWRHATIKFGRVELEEPVFWVDNCDLDVETLKLKPKHARLQKMTYSSKMKVEMTVQVYSLHKSDKAKTGEDPYIQRKDIMKETKWVTIGKLPVMESECEYDFGGYFLIKGMEKVFVAEEQRCLSRIWINDSPTWEACYQRSQIRREKISIKPVQSNDGFRKVINLYFLGATIPIWIMFFALGVSSDKEAFDIIDIQECDASMANIISATITESHEQCEGFQREGRASEYIDKLIRNTKFPPKGSFDEYIGRHMFPDVSGNRSKALFLGYMVRCLLLASSGNRKSDNRDDFRNKRLDLACELLQRELWVHIMHAQKRMVKVMQRHLSGDGDLQPLECYVHASIVTNGLNRAFSTGSWCHPFNKRERCSGIVATLRRTNPLQMMSDMRKTRQWVAYAGKAGDARYPNPSYWGKLCFLSTPDGEKCGFVKNLAITAIVSCLAREPSVDALVSCGMKKLDELLLQEISGKDRIFLNGNLVGVCADSVEFVLHLRSMRRRKQIDAQVEIKRDKQNKEVRIFSDPGRILRPLLIVENLRNIMNRKNGSYSFQELMDQNIIELIGVEEEEDIRCAYGIRHLFAGDEEKNFSFYTHCELDPSFLLGLSCSIIPFANHDTAKRILMQAEKISQQAIGYSTTNPLFRVDTHSHQLYYPQRPLFKTVAADCLGKRDYTSGSKHDFARPEYFNGQNAIVSISVHQGFNQEDSLVLNRASLERGMFRTQHFKSYKALIENKEITKRLKHKENINFGKTPSKKGLVDSLDIDGLPYIGASLQSNDIIIGKVSDSGEDHSIKLLHTEKGIVEKVVLSATDDGTNSAFVTLRQTRSPRIGDKFASMHGQKGVIGFLDSQENFPFTHQGIVPDIVINPHGFPTRQTPGQLLEAALGKGIALGGATRYATPFTSPSVEVITEQLHK

SEQ ID NO: 193489 - protein, 182 aa, Oryza sativa
  unsure (1)..(182): unsure at all Xaa locations
  Clone ID: PAT_MRT4530_89622C.1.pep
EKNLLLKRKKSSENKPYSLKGLFTLMKKKPFWQDLRSDRRSPRSDRPTLCRFWFRVVCLDIRDYFMIMTSRWILYVTRCLGRIFALMDRESAWRESIKLSSTLRVLRXCFIGFRRSNRRHTDGQTGGIAAVRPAGTRXQTCVGDRCQEQISEVRPEIQHRSDRRIYSGQTDLIEIEGNFYFR

SEQ ID NO: 193490 - protein, 124 aa, Oryza sativa
  Clone ID: PAT_MRT4530_89623C.1.pep
RLIKDDSLVAHFEYHKHPITSVEWSPHEPSTLAVSSADHQLTIWDLSLEKDAEEEAEFRARMREQADAPEDLPPQLLFVHQGQKDLKELHWHPQIPSMIISTAADGFNMLMPSNIDTTIREADA

SEQ ID NO: 193491 - protein, 85 aa, Oryza sativa
  Clone ID: PAT_MRT4530_89624C.1.pep
METVVAFGVTRFGSGDPRAGDGEASETVFPASTVSCVPSLVVSIVDCYLSRGWVLPMLGGKTNLAIVVEDKIEVHRENAKMLRVG

SEQ ID NO: 193492 - protein, 47 aa, Oryza sativa
  Clone ID: PAT_MRT4530_89625C.1.pep
GLCYPYMCICVYRFMILYLHVYIVFDLMQSLNIIVPLQCKDNNSVEN

SEQ ID NO: 193493 - protein, 61 aa, Oryza sativa
  Clone ID: PAT_MRT4530_89626C.1.pep
IHRGRISPPPDPPLSPIPTTRSTAAMCGESSRHRIHAGDSRRAFTPMDFLPPHGHAGEGGH

SEQ ID NO: 193494 - protein, 560 aa, Oryza sativa
  unsure (1)..(560): unsure at all Xaa locations
  Clone ID: PAT_MRT4530_89627C.1.pep
TTQLADAAAATGRTCAPSVWGDFFVTYTPPSQMSEKWMREHVDQLKRQVRCKLSKATSMAYTVMLVDVLERLHIDDHFRDEITVALQHVLLLHHKEHADSVAAADLLHLESLRFRLLRQHGFLVSADVFDKFKDSTGCFRENLSTDARGLLSLYNAAHLAMPXEEAALDDAIAFSRRSVKSLQGKLGSPMAEQVSRALDIPLARAPKLLETMRYITEYEREEAHDGVVLELARLDFELIRPLYLKELKTLSLWWRQLYDSVKLSYARDRLVESYFWSCAIFHGEKYSRSRIIFTKVFXLMTLMDDTYDIHATLEECYKLNEAMQRWDKSAVSILPEYLRIFYIKLLNDFDEMEDSLEPDEKYSMSYAKTTFKQMSEYYLREAQWSSDKYMPSFVEHLDISLMSSGFPAMAPVLLLGVRDSGGAAATTKEAFEWATSVPVPALVRAGGELARFLNDTASYRIGKSGGDMASTVECYMAERGVGGGEAVAAVAALAERAWRTINGECAAVGTMDAALLPAARLMVNLARTVEVIYLGGRDGYTVGGDLKGLVSNLFLDPLPV

SEQ ID NO: 193495 - protein, 233 aa, Oryza sativa
  Clone ID: PAT_MRT4530_89628C.1.pep
MSTEAETTSAAAPAPAPAPASAPARCQRIGCDATFTDDNNPDGSCQYHPSGPMFHDGMKQWSCCKQKSHDFSLFLAIPGCKTGKHTTEKPITKAVPTKPSKAVPVQTSKQSVGADTCSRCRQGFFCSDHGSQPKAQIPTATSDTNMVPVEKPAVPPPKKKIDLNEPRVCKNKGCGKTYKEKDNHDEACDYHPGPAVFRDRIRGWKCCDIHVKEFDEFMEIPPCTKGWHNADAA

SEQ ID NO: 193496 - protein, 108 aa, Oryza sativa
  unsure (1)..(108): unsure at all Xaa locations
  Clone ID: PAT_MRT4530_89629C.1.pep
EHMPPVPLTQKRHRVPSXYHTFIKVHIRSIXATDXSLSRTKAFGTGSKNFAHFWSIPNGVGCPHSSKKPDRAMDAPSPQKVLILDCLSSQDNRVDPTCLLISCCKYLH

SEQ ID NO: 193497 - protein, 85 aa, Oryza sativa
  Clone ID: PAT_MRT4530_8962C.1.pep
MRPFGWTCRNPRTSEDPSQRHQSQWGEALWRRLWAKMLQANKPRRVHAKQKHLGRMAYGEGCMAKAQGLRQDGFGMQATSWAAPA

SEQ ID NO: 193498 - protein, 116 aa, Oryza sativa
  Clone ID: PAT_MRT4530_89630C.1.pep
DGSKKSRVKWLHAKLVQTVHPHAWPTQLTHTATCDLQGRGHSRGTRTPLRPPSDKKVAHSTASRTRLASRRGSRPQEQWFFTQAPLLSATSCSLSPNLSRFFVSCPMKTCFLYGLK

SEQ ID NO: 193499 - protein, 287 aa, Oryza sativa
  Clone ID: PAT_MRT4530_89631C.1.pep
MSTEAETTSAAAPAPAPAPALAPARCQRIGCDATFTDDNNPDGSCQYHPSDIGTLKLPLDEASWAMCLMCGEGFFSPLDMAHMSADYLQKAKGKEAKNYLSLQRGPMFHDGMKQWSCCKQKSHDFSLFLAIPGCKTGKHTTEKPITKAVPTKPSKAVPVQTSKQSVGADTCSRCRQGFFCSDHGSQPKAQIPTATSDTNMVPVEKPAVPPPKKKIDLNEPRVCKNKGCGKTYKEKDNHDEACDYHPGPAVFRDRIRGWKCCDIHVKEFDEFMEIPPCTKGWHNADAA

SEQ ID NO: 193500 - protein, 116 aa, Oryza sativa
  unsure (1)..(116): unsure at all Xaa locations
  Clone ID: PAT_MRT4530_89632C.1.pep
MARAQLVLVAVVAXLLLAAPHAAVDIXCGQVNSAVGPCLTYARGGAXPSADCCXGXRXLXAAPTTXAXXRTACNCLKNAAXGIXGLNXXNXXXIPSXXXVSVPXNIXXSIXXSXVX

SEQ ID NO: 193501 - protein, 222 aa, Oryza sativa
  Clone ID: PAT_MRT4530_89633C.1.pep
MAVASSASSSGSNQAQSKRAPALHMFQEIVAEKDFTASSLEDQIYTGIFLAGKTKKYWVDERTRNNCFMLFPRGLSITWSEDPRFWTWKPLKEGSSDADTDTQIEVPSLQNVCWLEIHGKLERSYLTPGVTYEVLFEVMLIDPAYGWSVPVNLQLKFPDGTVQQRKENLEEKIRMKWLELKVGEVKTQQGQKGEIEISMFEYDGGLWKRGLLIKGIKILPKQ

SEQ ID NO: 193502 - protein, 68 aa, Oryza sativa
  Clone ID: PAT_MRT4530_89634C.1.pep
GLRSERKLVESAQIDPIRSAVDSTTPPSFLPSDADAIHNTTTLDRIPSSPSLPPCIRTTRDYSITILD

SEQ ID NO: 193503 - protein, 352 aa, Oryza sativa
  Clone ID: PAT_MRT4530_89635C.1.pep
PGLQAVLTVGFSADLGRIFGDSITPGSTRLGAIIVYLVGFWLLDVGNNATQGPCRAFLADLTENDPRRTRIANAYFSLFMALGNILGYATGAYSGWYKIFPFTVTPSCSISCANLKSAFLLDIIILVVTTCITVASVQEPQSLGSDEADHPSTEQEAFLWELFGSFRYFTLPVWMVLIVTALTWIGWFPFILFDTDWMGREIYRGSPDDPSITQSYHDGVRMGSFGLMLNSVLLGFTSIVLEKLCRKWGAGLVWGVSNILMALCFVAMLVITYVAKNMDYPPSGVPPTGIVIASLVVFTILGAPLAITYSIPYAMAASRVENLGLGQGTVPFESMLSFWVPVLRKSLFHMQV

SEQ ID NO: 193504 - protein, 68 aa, Oryza sativa
  Clone ID: PAT_MRT4530_89636C.1.pep
VSVHNQKQVITFSCYSSRMCKIASQLSPVQTQFVHNACFENLLSMQVCSMSKSMTPWLVNTMRTRPTM

SEQ ID NO: 193505 - protein, 135 aa, Oryza sativa
  Clone ID: PAT_MRT4530_89637C.1.pep
FLLPLGQLRGAWAGAAAGGGWSGGSRRELKRWPPRSHRRAPPPAGKAMSSGSATPRRISDCAATAVDADDAVAGGCKASPKPIATAYWSWRLNAIATAHEISLHRLSSPVCAARRLVRFRASDYSRRRSPCRSAS

SEQ ID NO: 193506 - protein, 48 aa, Oryza sativa
  Clone ID: PAT_MRT4530_89638C.1.pep
SANLDKSTCASSVSSNAGCFFCLDYRVLQPREPIISHGSCVCGLDYCN

SEQ ID NO: 193507 - protein, 97 aa, Oryza sativa
  unsure (1)..(97): unsure at all Xaa locations
  Clone ID: PAT_MRT4530_89639C.1.pep
FYLETKVIHGIXKGIPCEGSRSPNLMANTTTIVFXAGGCKAYSXEISSNHLDKDLLDXGYYLTRGLNQYNLCLLVCLISYCVYPRTNIPQSSHIRVL

SEQ ID NO: 193508 - protein, 542 aa, Oryza sativa
  unsure (1)..(542): unsure at all Xaa locations
  Clone ID: PAT_MRT4530_8963C.1.pep
MGMDSSPSTQDCGGWLLYVSLAAKCGGDPCRVVGFVAVAVVAFAVTSLLHWLSPGGPAWGRYWWNRRGGLGIAAAIPGPRGLPVLGSMSLMAGLAHRKLAAAAGGSPARRRLMALSLGETRVVVTADPGVARELLASAAFADRPVKESXSAYGMLFHRAIGFAPYGTYWRALRRVASTHLFSPRQVSASAAQRAVIARQMVEAMRSAAAAAAGGGVAARPFLKRASLHNVMWSVFGRKYELAAPESEETAELRSMVDEGYDLLGQLNWSDHLPWLAPFDLKKTRSRCSSLVPRVNRFVTRIIDEHRARLSLAVDAAVDFTDVLLSLHGGDKLSDADMVAVLWEMIFRGTDTVAVLIEWVAARLVLHQDVQARVHDELDRVVGSDRAVTESDASKLVYLQAVIKEVLRLHPPGPLLXEGTRLPLGCRAWRDVYMSLNVKCYPSVWPDPNEFKPERCVEGPLPIKNRDLRIALFGSGRRSCPGKSLAIATVGFWVATLLHEFDWLPLSDKSRGVDLSEVLKLSCEMATPLEARLRPRRKVMSVE

SEQ ID NO: 193509 - protein, 248 aa, Oryza sativa
  Clone ID: PAT_MRT4530_89640C.1.pep
MSEAPAVAAPRPRDPGLFGSFDLPAAWGCRRPMAFCRDLDAAALVGSEPNAAAAAAAAGDAVEPKRNASRSPPKGGDAPVAAAAAQEAPRKQWNLRYRKGGRDGGEDALQNKKLWNMEAAGGGGGGGARASRGFSVELTRQEIDADFFAITGRKAPRKPAKRPRSVQRQVDSICPGNSLWEVSRDRYKVNEKAEDSCSETEAESLEMNVGFMRTQDHLTVQTVLQIHAETSEETFTQSGKKTLRFQNV

SEQ ID NO: 193510 - protein, 131 aa, Oryza sativa
  Clone ID: PAT_MRT4530_89641C.1.pep
MPTAARRPPSLSPPTPAAQPPLHPDTGAGASLSSAIDLLAAPSAAAGECGPPAPARLVPAMLARRKPRIDEAMEPYEYEKGWKPGREKFGQELVFKAWQTLVRSQCKPLKRVSLAAGQLRDWPKQPHPTVQ

SEQ ID NO: 193511 - protein, 105 aa, Oryza sativa
  Clone ID: PAT_MRT4530_89642C.1.pep
MSGRKETVLDLAKFVDKGVQVKLTGGRQVSFYGQSVTGTLKGYDQLLNLVLDEAVEFEREQDDPLKLSGKTRQLGLIVCRGTAVMLVSPTDGTDEIANPFQSDGA

SEQ ID NO: 193512 - protein, 466 aa, Oryza sativa
  Clone ID: PAT_MRT4530_89643C.1.pep
MRKKRDVWVGKNVVEEKEEEAGEAASRRRMNPPELMDDLVDEILLRLPPDEPACLARASAVCKRWRRLLSDRAFLLRRRRRAPPPLLGFLHNLDNADHPDRFVPTTALPIPPPPPELHCGMALDCRHGCALLDAYPSRIDLVVWHPMTGHLLRRLPRPDVPYLLYYNAAVLCAAAAAGCDHLDCHEGPFRVVVVGTEEDNEAWATVYSSESDEWSPPTSARLARGPEFCVEGKPATLIGDSLYFALVFGIGVVKFDMKRHRLSLIDPPAELDDGFVLMPLDNDGVLGLAAVEDHSLLSVWSMDVSLDHGHGVANWEKCRVIELDSLLPNLDHSTPVLPIGFVEGANIIFLRTDAGVFTLELRSMRVTKVCKNGFFYAVVPYTSFYIPGVHLQQQHSGPQISNGRAWGSQAANMRRGSSEQPRERAPLHQQRRAGRPVNSQRPTGDMVRSSGRASRLASQVRPPWRP

SEQ ID NO: 193513 - protein, 73 aa, Oryza sativa
  Clone ID: PAT_MRT4530_89644C.1.pep
MRTAAAVDTKGKQRWVQVVAAEDFATPLLFSLVGRADADAVKSFKEKKSSEEPRYEAHFNLTNEARPEVGSSQ

SEQ ID NO: 193514 - protein, 57 aa, Oryza sativa
  Clone ID: PAT_MRT4530_89645C.1.pep
MPVRMEVRSATLALTGAFAGELETAVCPQEEGHSPEAEVMEGIRASATKEEGGSLEP

SEQ ID NO: 193515 - protein, 89 aa, Oryza sativa
  Clone ID: PAT_MRT4530_89646C.1.pep
GRLPAKSQLRLPLRRRRRLRRRGTDIRPLHRPLRPAARHEDFQGRNRPTPLAPPNYTGGRGYAAQPSTQPYGRGGRYGAPPSNQPHGAP

SEQ ID NO: 193516 - protein, 153 aa, Oryza sativa
  Clone ID: PAT_MRT4530_89647C.1.pep
MGRGIPAPTPPDVNRDVGALPPVPSIHCWVTNGQKAVARHTSICERRTPCPVALNATGAVGALLMNAPGRQRIRPLRLSTWPPRGSHARASERSSPSGLRGGTGHPKPGGGGTAALFLRARPIHGDWTYRTCHTGRAFFPLDQGPQGHIVDTV

SEQ ID NO: 193517 - protein, 1870 aa, Oryza sativa
  Clone ID: PAT_MRT4530_89649C.1.pep
MAKATTGICLVDVILFSFFLVAPRAFAAAAAVTDTLRGGRNITDGETLVSADGTFTLGFFSPGVSAKRYLGIWFTVSPDAVCWVANRDSPLNVTSGVLAISDAGSLVLLDGSGGGHVAWSSNSPYAASVEARLSNSGNLVVRDASGSTTTLWQSFDHPSNTLLPGMKMGKNLWTGAEWDLTSWRSPDDPSPGAYRRVLDTSGIPDVVLWQDGVERYRSGPWNGRWFSGNPEAATYTTNLITFQVTVSPGEISYGYVSKPGAPLTRSVVLDTGVVKRLVWEATSRTWQTYFQGPRDVCDAYAKCGAFGLCDANAPSTSFCGCLRGFSPTSPAAWAMKDASGGCRRNVPLRCGNTTTTDGFALVQGVKLPDTHNASVDTGITVEECRARCVANCSCLAYAAADIRGGGGGSGCVIWTGGIVDLRYVDQGQGLFLRLAESELEGIPHNPATTVPSVDLQKVKAATGNFSQSHVIGQGGFGIVYKGQLPDGRMIAVKRLHQSTLTKKGKKDFTREVEVMARLRHGNLLRLLAYCSEGSERVLIYDYMSNRSLDLYIFGDSGLRLMLNWRKRLGIIHGIANGVAYLHEGSGECVIHRDLKPPNVLLDDSFRPKIADFGTAKLFTADQPEPSNLTVVVSPFGVVLLETLSGQRNGPMYSLLPHAWELWEQGRVMSLLDATIGLPLSVSGPDHTEMEDELARCVQIGLLCVQDAPEERPAMSAVVAMLTSKSSRVDRPKRPGVHGGRSRPPLRESELLGATDIDDDLTTTTGAELGDTLGKGRNITDGERLVSAGGSFTLGFFSPASSSSSSTSRRYLGIWFSVSDDVVCWVANRDRPLTDTSGVLVITDAGSLLLLDGSGHVVWSSNTTTGGGASMAAQLLESGNLVVSDRGNGGAGAVVVWQSFDHPCDTLLPGMKIGKNLWTGAEWYLSSWRSSGDPSPGNYRYRTDTKGVPENVLWDGDGEVYRTGPWNGLWFSGIPEMGTYSDMFSYQLTVSPGEITFGYSANAGAPFSRLVVTGVGEVQRLVWEPSSRAWKNFFQGPRDLCDDYGKCGAFGLCDAGAASTSFCSCVEGFTPASPSPWKKMRDTSAGCRRDAALGCATDGFLAVRGVKLPDAHNATVDKRVTVEECWARCLANCSCVAYAPADIGGGGGGGAGSGCIIWADDLVDLRYVDGGQDLYVRLAKSELAATAAVHARPNPALAAPSINLSSVKEATGNFSESNIIGRGGFGIVYQGKLPSGRKVAVKRLTQSLVTDKRKEDFIREVEMMSNTRHAYLVELLCYCQEGGEMILVYEYMENMSLDLYIFDIIRGIAIGVEYLHNVKVIHRDLKPSNILLDDNRRPKVADFGTAKLFINDQTDPTLVLSAGYIAPEYAAQGNLTLKCDVYSFGVVLLEIISGKRNRTLPTFLRETWESWKQHEIEDILDLGLIKPEPDLLLGLDRCIQIGLLCVQQSPDDRPTMNQLTQAKQLHPGDVLGSKSGVFALGFFSPGTSNKSLYLGIWYHNIPQRTYVWVANRDNPISTPSSSVMLAISNSSNLVLSDSEGRTLWTTNITITGGDGAYAALLDTGNLVLQLPNETIIWQSFDHPTDTILPNMKFLLRYKAQVSRRLVAWKGPNDPSTGEFSLSGDPSLDIQAFIWHGTKPYYRFVVIGSVSVSGEAYGSNTTSFIYQTLVNTQDEFYVRYTTSDGSANARIMLDYMGTFRFLSWDDSSSSWTVRLQRPASTIDCYTYASCGPFGYCDAMLAIPRCQCLDGFEPDTTNSSRGCRRKQQLRCGDGNHFVTMSGMKVPDKFIPVPNRSFDECTAECNRNCSCTAYAYANLTIAGTTADQSRCLLWTGELVDTGRTGFGDGQNLYLRLAYSPGMPTFFPLQLQYNS

SEQ ID NO: 193518 - protein, 335 aa, Oryza sativa
  unsure (1)..(335): unsure at all Xaa locations
  Clone ID: PAT_MRT4530_8964C.1.pep
LSRVPTSWGLVYSRVNKPGGGGARTGSTGVGPTRQPHGPRWTGCTRXLTPAGAMSHTRQPHPRAQAADGRAPRGSHSARPRAAMPARLAGGGAPEPRWSPPATTGAAERRPRDGREGGNEAAVHGSPQGDGGDGGGGRSGGRRWRGSGQRGRRRSGGRRPKRRGGRGRRGCGEAEGGGAEVGGGPGRRRRRTGARRRRPRQRATSRARIRRGGRAARGGNGRGRHGEGLNRVGRGRGRPEGKETGAGGPAAINGAGGIXGRGFQTNPRERGREXFGERERESRGIIPPYXLHAGTTGCGGFGGGGGAXARAERRERREVGDDGWAPHVSKGGGRA

SEQ ID NO: 193519 - protein, 159 aa, Oryza sativa
  Clone ID: PAT_MRT4530_89650C.1.pep
MTVAAVAEADEVGGDSCGGQGRRQRHTEVTSTVDKDEGSGGRSGQRRQRRRTRTCATMAARPWTWTLRRRQRRVARLGACGDFVNLKICRPSLPEVLIGVGPLSYQIKVDFGAFLRNKYPEFGMLSFLNHCYSYANLNSCKIPFPNTGTINISRRWMRQ

SEQ ID NO: 193520 - protein, 126 aa, Oryza sativa
  Clone ID: PAT_MRT4530_89651C.1.pep
MSPRCCVVCVMPSCILVDPRPGVALQRLDGSCYRPIHRRHKQVSAACLRLPKPTPSQPQPLPIASAASPNRRSVVTANIYPCPGVDYLFSLFPPAVLRAPAKPRPPPTRDLQGKRGILIEDGDGVA

SEQ ID NO: 193521 - protein, 157 aa, Oryza sativa
  unsure (1)..(157): unsure at all Xaa locations
  Clone ID: PAT_MRT4530_89652C.1.pep
TRAATSTDEGEGNDTTVAAVAEADEIGGDSCGGQGRRQRHTEATSTVDKDEGSGGHNGQRRQRRRTRTCATMVARPWTWXLRRRQRRVARVHRSLRAGPRPRPMHTAGRLISRPLAPSPLPSLLQFNRKSYVDLLTPIIIRACTEQRTVSFCFHVCN

SEQ ID NO: 193522 - protein, 60 aa, Oryza sativa
  Clone ID: PAT_MRT4530_89653C.1.pep
TAAATTGAAAAVSGHIRSCLSRRRCHPSPAAWSATIVSATAAGCRELGGAMEVEEAESHG

SEQ ID NO: 193523 - protein, 142 aa, Oryza sativa
  Clone ID: PAT_MRT4530_89654C.1.pep
MVAAVAEADEVGGDSCSGQGRRQRHTEATSMVDKDEGSGGRSGQRRQRRRTRTCATMAARPWTWTLRRMQRRVARCLALDAHGDIFYDSGDELPRQCEEETVLTWTVRRIRKMAVMALFLTYNGLTIRWSLQSKTPFIDSME

SEQ ID NO: 193524 - protein, 172 aa, Oryza sativa
  Clone ID: PAT_MRT4530_89655C.1.pep
MPLTLFFFLLSFLPLTRVAFFAAGGGAVREVLLTRWEGRDDQVLLYGLLPAGVDHGELMGRARFCLCPTGDDEGAAAASRRVVEAITAGCCAVGSAVSFLRRRRRCHDEDFVLLFHDWHRLLQHGSGFKLSTTVEFVCFCNLRTPMPAGGGPRGTTDPVAQIHLMMKTLYNG

SEQ ID NO: 193525 - protein, 640 aa, Oryza sativa
  Clone ID: PAT_MRT4530_89656C.1.pep
MPGLPLTDHDAVNTGCEFDCQRSSDQMCCEHSVAQFSSDQQLNPEENLALYCKPLELYNFIRHRAIENPPYLQRCLLYKIRAKQKKRIQITISLPGSNNKELQAQNIFPLYVLFARPTSNVPIEGHSPIYRFSQARLLTSFNDSGNNDRAEATFVIPDLETLIATQAYGLTFILVSRGTKKNKGRTGQNLCENDCSEKHVDYSSLRKLAGKCFWGKIPITLLNSSLETCADLILGHIVESPISICMSPGYLEPTFLEHDNCLSFCSRKADAMVPYQLQVKVSAAEAGAKDILKSPYNSFSYSDVPPSLLLRIVRALQYYANTMKFFLYRLRVGNVLFNYKNTQMSEVTEDFTCPFCLVRCGNFKISEDYQAVNVTLKKDNMRTEFVAAEVDNSHRIFYYRSRFKKSRTEILPVARADAHIMESGSPEETQAESEDDVQEENENALIDDSKKLHGSNHSQSEFLAFGKSRKLSANRADPRNRLLLQKRQFIHSHKAQTPLGDDKVTNLVTADAMSVPMTFEEVLSDNDSEDEVDDDIADLEDRRMLDDFVDVTKDEKRIMHMWNSFIRKQSILADSHVPWACEAFSRHHGEELLENSALLWGWRMFMIKLWNHSLLSARTMDTCNRILDDIKNERSDPKKQ

SEQ ID NO: 193526 - protein, 214 aa, Oryza sativa
  Clone ID: PAT_MRT4530_89657C.1.pep
AAGIRHEVRRFFEAYIKAFSKVTPLTIRQVKASNIGQLVKISGIVTRCSDVKPLMQVAVYTCEECGFEIYQEVTARVFMPLFECPSQRCKLNKAKGNLILQLRASKFLKFHEVKLQELAEHVPKGHIPRSLTVHLRGELTRKVAPGDVVEMSGIFLPMPYYGFRAMRAGLVADTYLESMSITHFKKKYEEYELKGDEQEQIDRLAEDGDIYNKL

SEQ ID NO: 193527 - protein, 204 aa, Oryza sativa
  unsure (1)..(204): unsure at all Xaa locations
  Clone ID: PAT_MRT4530_89658C.1.pep
MSDALINGVAGAGGGIIAQLLTYPLQTVNARQQTERDPSKPAFKDGAVRQMCLVVKHEGWERLYGGLMPSLVGTAASQGVYYYFYQIFRSRAEAAALQRSRRGIGDGSVGMLQSLTVAALSGCVNVLLTNPIWVIVTRMQTHRKANKQQSPLDLTCVLDRPYKLPLXKLPHKTIHVIQDLYKEAGFLGFWEGVVPALIMVSNPA

SEQ ID NO: 193528 - protein, 437 aa, Oryza sativa
  Clone ID: PAT_MRT4530_89659C.1.pep
MAMSAAHGEDSPYFAGWRAYDEDPYDPITNPQGVIQMGLAENQVSFDLLEEYMREHPEASDCGAGVRENALFQDYHGLKSFRKAMASFMETIRGGKARFDPDRVVLTAGATAANELLTFILADPGDALLVPTPYYPGFDRDLRWRTGVNIVPVSCDSAAGFQVTAGALRAAYDEAVAAGTRVRGVLITNPSNPLGTTAARGVLEGILDFVARHDMHLISDEIYSGSVFAAPDLVSVAELVDERRRARGGAADAEDIARRVHVVYSLSKDLGLPGFRVGVVYSYNDAVVAAARRMSSFTLVSSQTQRTLAAMLSDAAFAAAYVRSNRDRLRERHARAVAGLRRAGVACLRGANAGLFVWVDMRRLLGDGEATVAGELRLWRRVVAEAKLNISPGSSCHCREPGWFRVCFANMSLETLDVALHRLGCFIKKWEQEQHEN

SEQ ID NO: 193529 - protein, 142 aa, Oryza sativa
  Clone ID: PAT_MRT4530_8965C.1.pep
MTSAMTSPPAAAARTARTAHARRRTAVLQHERRAPTGSGQHGDLTGDQSDGGRPTDGDDDEVETAALFGLTTATVLWRSLAVAKRRTRTATTWRPRRRSSRATTMTGTAAAHGWSDGGDGDARAHGARAFPTTRGEGEGGDG

SEQ ID NO: 193530 - protein, 159 aa, Oryza sativa
  unsure (1)..(159): unsure at all Xaa locations
  Clone ID: PAT_MRT4530_89660C.1.pep
LAVIIDASRFLLRXPHAFHLFLHPVHSVLHARLTPCAATALYLEADRPPPHHRHLRRQNHAPRPLVVASPLEQGRRAREKAEVVVALLQRPPSSRLPPSALATAPRGGVGEADNNPRAVRGSGQGGGQRRVGADSIVRASVRGEKGGGRRGGEDYVGST

SEQ ID NO: 193531 - protein, 354 aa, Oryza sativa
  unsure (1)..(354): unsure at all Xaa locations
  Clone ID: PAT_MRT4530_89661C.1.pep
SWMYCIQCSTPEYREGVTEFVYFADNDRKIRMSKYMLCPSADYKNEKIFDESSWVHSHLIHRGFVDHYRCWSKYGEQKTLDVATNEVPDVVNNPVGXDGIFIPSPLGGDAIDFEPQTLSEMLHDIEDPDHNERDXEKFNKSVADSEMPLCLGSKPKHSKLSXLLELMKLKASNDXLDKSFTXLLEFLKGLLSKGYQILXTTYEAKQVLCSLGLEVKRIHACRNNCILYXEXYSDLDACPVCGASTYKRDISEDESHKSKRGDPTKVVWYFPIADRIKRMFVNPKQAKLVCYTRAEEQKVDAKLRHPTNSVQWRIIDXFAMCTDGINTFGDLSNRRRTWSILCEDYLLVPISVLE

SEQ ID NO: 193532 - protein, 95 aa, Oryza sativa
  unsure (1)..(95): unsure at all Xaa locations
  Clone ID: PAT_MRT4530_89662C.1.pep
VFAGGIAEMAGRSLXIRERADALDAAGNTTAAIVKGYAIGSAALVSLALYGAFVSTAGVKVVDDLSTQVYIGLIVGAMLTYWFYAMTMKSVVSAV

SEQ ID NO: 193533 - protein, 176 aa, Oryza sativa
  Clone ID: PAT_MRT4530_89663C.1.pep
MSWAAVTSDTVEKGVDVGGGGMGIGQWLWWPNQLVRGARRHVVTSAFPLSSPTIATTSRRVMTPELILPRDLHFPLTHHHRGTSYSGRHGDVTRCNYVRALHPTHPSSHRIGPGQPAQGSTDVLAGSASLLLSSAICCDSLPRQSMHCHPDTDRASLRPFAPATPFWHTNPELCVV

SEQ ID NO: 193534 - protein, 143 aa, Oryza sativa
  Clone ID: PAT_MRT4530_89664C.1.pep
MAREKQIGKNRGWSETTDRECWMSVRWGRMEATGDGDYWELVEQINRNTAIRQRHQVSELHVLAARTIGHSCRAAASLHRTVPPESRHHATASLPSPNLAVGGAFLPDAHSGCRLLSETRRSTSHAEEKLRRHLPGRPLASSG

SEQ ID NO: 193535 - protein, 514 aa, Oryza sativa
  unsure (1)..(514): unsure at all Xaa locations
  Clone ID: PAT_MRT4530_89665C.1.pep
MSGQTQRLNVVPTVTMLGVMKARLVGATRGHALLKKKSDALTVQFRAILKKIVAAKESMGEAMRASSFSLAEAKYVAGDGVRHVFLHSSARRHLPSRAPVAHPRGDDGRSRPPSPGGHPPRPPQISERARSNRRLRRRRAASMSGPPGRRFPISPQRRRRRHPPRALALPYPSPHAPPPTMAGAQESLVLAGVMHGHNDVVTAIATPIDNSPFIVSSSRDKSLLVWDLTNPVQNVGEGAGASEYGVPFRRLTGHSHFVQDVVLSSDGQFALSGSWDGELRLWDLSTGVTTRRFVGHDKDVLSVAFSVDNRQIVSASRDRTIKLWNTLGECKYTIGGDLGGGEGHNGWVSCVRFSPNTFQPTIVSGSWDRTVKVWNLTNCKLRCNLEGHGGYVNAVAVNPDGSLXPSGGKDGVTLLWDLAEGKRLYSLDAGSIIHSLCFSPNRYWLCAATQDSIKIWDLESKHIVQDLKPEIPVSKNQMLYCTSLNWSADGSTLYAGYTDGTIRIYKISGFSYAG

SEQ ID NO: 193536 - protein, 407 aa, Oryza sativa
  Clone ID: PAT_MRT4530_89666C.1.pep
MAVTMDNVIRFMFILSVVYGAAYAKKSEAKVASAPGLAAAVNTVFDITELGAVADGKTDSTKAVQDAWDAACGLAGSQKVVIPKGEFMTGPLNFSGPCKGYVTVQIDGTMFGSNDIPKYNKGNWIEILHIDNVLVNGSGTLDGQGAAVWKDECKILPNTLVLDYVKNGTVSGLKLVNAKFFHINVYMSKGVTIKNVTITAVANSPNTDGVHIGDSSEISVSDATIATGDDCISVGPGSSRISIQGITCGPGQGISVGCLGRFKDEKDVTDVTVRDCVLRNTSNGVRIKSYEDVLSPITASRLTFENIRMDGVANPVIVDQKYCPEKDCPEKKGSKTVTIKNVTFRNITGTSNTPEAVSLLCSDQLPCSGMELLDVNLKYDGKDNKTMAVCTNAKGISKGSLQALACL

SEQ ID NO: 193537 - protein, 510 aa, Oryza sativa
  Clone ID: PAT_MRT4530_89667C.1.pep
MFSHATSLFLNFFGLFVPQSSTPSTGNLLPMADLEQSSSDAATLKKLYNEGAIPPKQTMVREAGDLPDDTVAQRVEEVLISAPSTAEGVPAPLCDKSAAEKATAINILPLTDVIGPLVDHRASASLKEKVDDEVAKISSAPTIAGGSGTKRCQKWGHDLLSYVGHGQSGSSPEEEDIEAARRESGSEAAMSGSPVAVAPHVEVAPIVAESVGCAAAPVAAPPPKMTTWSDMVAECHRLLERGSRVVVAQMDRVEARATAADGRVAQLEAQLVVAHEDLQKMKEIVASNEMQRQAASFHELCVDLSRSFAFRSCVDPEDVQQGGHPHVEMVGLPSSDDAVKDGGLDATCCLLEAGEVGFPRASSDLDSVVAERDRRIDYWKTKFEVAKLERSLMVVKKDQAVEVLRGREVWVNSYLKSCCSAMADVCRQLKDIGQRIDISLKEECRRARRCARGHVLACVQDHRPQMDLGFLRGGFRRSRLSAHEVDRSARSLAPLAEEVFASMNWQWPSW

SEQ ID NO: 193538 - protein, 284 aa, Oryza sativa
  Clone ID: PAT_MRT4530_89668C.1.pep
MAAAEGPVLLFPSTSSTSARVEAVVVFNICDSYVRRPDQAERVIGTLLGSVLPDGTVHVRNSYVVPHNESPDQVALDIEYHHNMYASHHKVNPKEVIVGWFSTGFGVSGGSTLIHDFYSREVQSPIHLTVDTGFTRGDASIKAYISSNLSLGDRHLAAQFQEIPLDLRMLEAGKVGFDILKSTIVEKLPNDLEGMESSMEKLYVLIDEIYKYVDDVVEGRVAPDNKIGRFISDAVASMPKLSPAAFDKLFNDRIQDNLALVYLSSITRTQISIAEKLNTAAQIL

SEQ ID NO: 193539 - protein, 444 aa, Oryza sativa
  Clone ID: PAT_MRT4530_89669C.1.pep
MTPSLQAFVDIVSGLRERGLTGYEIVEDFVSRRIQPLQAHAHPAFDYAGTEDITQISSRDLPDDTVAQRVEEVLISAPSTAEGVPAPLCDKSAAEKATAINSGSSPEEEDIEAARRESGSEAAMSGSPVAVAPHVEVAPIVAESVGCAAAPVAAPPPKMTTWSDMVAECHRLLERGSRVVVAQMDRVEARATAADGRVAQLEAQLVVAHEDLQKMKEIVASNEMQRQAASFHELCVDLSRSFAFRSCVDPEDVQQGGHPHVEMVGLPSSDDAVKDGGLDATCCLLEAGEVGFPRASSDLDSVVAERDRRIDYWKTKFEVAKLERSLMVVKKDQAVEVLRGREVWVNSYLKSCCSAMADVCRQLKDIGQRIDISLKEECRRARRCARGHVLACVQDHRPQMDLGFLRGGFRRSRLSAHEVDRSARSLAPLAEEVFASMNWQWPSW

SEQ ID NO: 193540 - protein, 379 aa, Oryza sativa
  unsure (1)..(379): unsure at all Xaa locations
  Clone ID: PAT_MRT4530_8966C.1.pep
MAPPIAGNARVFSGHQPLPPAGFPAAVPTFPVAGSLPHSIKWDPRTPFYRFNPIPSLPVVSSPIPAVALSLPRRRRPPAACAASPVRRPAAPSPPLASQPPPLRRPTLRFARRLLFIASXRRSTPPSPPSTPRHRLLPRHHLLLARISPERRRLXRRPLLPPRRLVAPLHHHLHQHRSGVFHAVPSSAQPLLPAIIVSSSSPIVLVVDVPSVARLVVSRRRLRRRHRSGVFHVVLVPVQLLLAAPRRPLAGPGRRRRRRPLVVPGRRGVRPSVKPFPFVVLASSRSLQPPSSSSSSPPRRQASCRPRLAFVQGSPPKPSPRRSSPLCXLSPPRPFVVVVPAPRRVVVRIRPLASPPSSFRCRPVPVVRSSTPVPVYRCR

SEQ ID NO: 193541 - protein, 88 aa, Oryza sativa
  unsure (1)..(88): unsure at all Xaa locations
  Clone ID: PAT_MRT4530_89670C.1.pep
PCFLPSLFVSDLPDDTVAQRVEEVLISAPSTAEGVPAPLCDKSAAEKATAINILPLTDVIGPLVDHRAXASLKEKVDDEVAKISSAPT

SEQ ID NO: 193542 - protein, 142 aa, Oryza sativa
  Clone ID: PAT_MRT4530_89671C.1.pep
MAAAEEKKKKKMIKVMSSDGETFEMTEAAASMTAAPTAAPASLSKIIEYCTKHAAVEGRSTAAAELKRFDEELIDVDTDTLYHLLMAGNLMGVEGVLELAVQRTAELIRGKSPEEIRDTFKIANDFTPEEEEIIKENAWALQ

SEQ ID NO: 193543 - protein, 203 aa, Oryza sativa
  Clone ID: PAT_MRT4530_89672C.1.pep
MAGKSGARTRKRVEATDSAVLKRARDGSAFTRCEACGKSVSVVLIDMHNCSLDDKIRISLEAQVVEQAVEVAASKKKSGKNNNNNGEGAKKGKRPPTAFFLFMSDFRKEYKAEHPDNKSVSAVAKEGGERWKSMSDEDKKPYLDKAAELKAEYHNGERSDENNVGGNAGEQEVDQPPKKGTDEDDQEDEDGAEEEKNELDDDI

SEQ ID NO: 193544 - protein, 59 aa, Oryza sativa
  Clone ID: PAT_MRT4530_89673C.1.pep
QGFPKVHHFRGHVQRTTWIQANEHRFGMHATGCAETKGWDRQSAARRRSWDKRRGGAEL

SEQ ID NO: 193545 - protein, 242 aa, Oryza sativa
  unsure (1)..(242): unsure at all Xaa locations
  Clone ID: PAT_MRT4530_89674C.1.pep
VVVMISGRXGRNRVSALQNNNSKFISPGLLQQQVARWTAPSTADDLFGSPENMVSATAIVQEGKSKPVYVRQSNLKYQKHTAMPQPALTCIVDMGDANDDTTEEDGVHNSNQAAKRRLRPQTNSHAPSDGSQSVKRSSCGKNKYTEQDVIERVQVQSLNGTLQNGTKMVQHKGRGKNKCKEVAKLKENQKIKVEFYNNCALSNSFSRHLGRIVRDRNITPIKVKKWSDISNTEQEHIFASIT

SEQ ID NO: 193546 - protein, 58 aa, Oryza sativa
  Clone ID: PAT_MRT4530_89675C.1.pep
SGTDQCAGKPCDKEHVGIGDATRHRGMLEGRRTEDGSRSQGGQGQERGLGDGHGGGRI

SEQ ID NO: 193547 - protein, 102 aa, Oryza sativa
  Clone ID: PAT_MRT4530_89676C.1.pep
MGMPSMQVAVRRLPPLNRPHCAFVNPAALRCLLLLISPSRPLQLCAKVYVDGAEHKSVAYVACHIGGQTWSKDDWTGGGTLNQVHGPKRAIFKFTDLSDTTP

SEQ ID NO: 193548 - protein, 339 aa, Oryza sativa
  unsure (1)..(339): unsure at all Xaa locations
  Clone ID: PAT_MRT4530_89677C.1.pep
LAQTPYILHNHPNSLLPQYILRTQPIAPCRPCAYKDSYQKKLKGQNPMSTAYEYLQPRLSFKTEQILSCFGQDILDLVWQKFKERQMKIFQDYFFHLLXGRERNPAIQVIIYMLPILRLDDHQVISDPSYRFMVLKAEINLQRFRNLPTYNHDEISLQTIIDHGLVNSIYATLDRILQFDLGSAVKDVCRRLRNGRYRIIFSSIPPKFTPHARPAIHYIYIMNKQFNFQEGGPSKLSDEQEEMYTMIANHENWRLFSEAAEIEEAITIDYEYQLVFQNKITRIFISRYYNQSCEYFKGAGRIIKPXFYYRSLAQWYQKTEPSKIDMMQLAPMIYSEDNE

SEQ ID NO: 193549 - protein, 80 aa, Oryza sativa
  Clone ID: PAT_MRT4530_89678C.1.pep
SISSCSFISFWTSNKCSQCYSRFIDFLLYWFRVSMPRNLLPPDAANRESCWYGFMCRTQHHRPDHAKKLNHVCRPTRGNP

SEQ ID NO: 193550 - protein, 1636 aa, Oryza sativa
  Clone ID: PAT_MRT4530_8967C.1.pep
MSFMISLTLLTTVNDAITGNSLISSWFGMMPRYKPEYLFGVEGFVQELRTISFVIGFGTAPFYAQIPHDRHEEKCRVKVTLNSNSEDIPSVMFEAGGRNYIHACQEVARIAIGELRDRYSDQLADTEYRYHPRQPQGSDRGSYLETEGIENDATTRHLVEMLWAMDESRAETVLAAQDREDRNRGKICKLEDKVDRLEKELAALKGEAPPQKARIRLTARKRALFVPRYQLAPKFPPVSLLVPCPCQMVNTRSNGNGPSNNNNEGNPTLAQVLAQQTQLMNMMMQQLQNQQNQGNNHAPPHNKLAEFLRVRPPIFSSTTNPVEAGDWLHAIEKKLDLLQCTDQEKASFASHQLHGPASEWWDHFRLNRTTAEPITWLEFTAAFRKTHIPSGVVSLKKKEFRSLTQGSRSVTEYLHEFNRLARYAPEDVRNDEERQEKFLEGLNDELSYPLMTGDYSDFQKLVDKAIRQEDKYNRMEQKKRRIAQFKTQQGNNQRPRLTLGPQSMPHGGSSSVVRPQRQFFNNNAGNNIRNQALRPVAAPTQQQPAKREHGSKPVVCFNCGDPGHYADKCPKPRRMKVVPVQSNSTAPASKARVNHVAAAEAQDAPDVILGTFLVNLVPATVLFDSGATHSFLSMSFAGNHGMKVEDLRRPLMVSTPSNQALSLQRSPSVRIEIKGVPFLANLILLESKDLDVILGMDWLARHKGVIDCANRKVTLTSNDGRVVTVHALSSESLRSRLNQITLEEIPIVREYPDVFPDDLPGMPPKRDIEFRIDLVPGTTPIHKRPYRMAANELAEVKRQKDHTQRMCVDYRALNDVTIKNKYPLPRIDDLFDQLKGATVFSKIDLRSGYHQLRIKEEDIPKTAFTTRYGLFECTVMSFGLTNAPAFFMNLMNQVFMEYLDKFVVVFIDDILIYSRTKEEHEEHLRLALEKLREHQLYAKFSKCEFWLSEVKFLGHVISAGGVAVDPSNVESVTNWKQPKTVSEIRSFLGLAGYYRRFIENFSKIAKPLTRLLQKDVKYKWSEECEQSFQELKSSLISAPILILPDPKKGFQVYCDASKLGLGCVLMQDGKVVAYASRQLGPHEKNYPTHDIELAAVVHALKIWRHYLFGTRTEVYTDHKSLKYIFTQPDLNMRQRRWLELIKDYDMGIHYHPGKANVVADALSRKGYCNATEGRHLPLELCKEFERLNLGIVSIGFVAALEAKPTLIDQVREAQINDPDIQDIKKNRRRGKAIGFLEDEHGTVWLGERICVPDNKDLKDAILKEAHDTLYSIHPGSTKMYQDLKERFWWASMRREIAEYVAVCDVCQRVKAEHQKPAGLLQPLKIPEWKWEEIGMDFITGLPRTSSGHDSIWVIVDRLTKVAHFIPVKTTYSGSRLAELYMARITDGQTERVNQILEDMLRACALDFGGSWDKNLPYAEFSYNNSYQASLQMAPYEALYGQKCRTPLLWDQTGERQVFGTDILREAEEKSRHKSYADNRRRDLSFEEGDYVYLHVTPFRGVHRFHTKGKLAPRFVGPYKIVSRRGEVAYQLELPQSLAGVHNVFHVSQLKKCLRVPTEEANLEQIEVQEDLTYVEKPIRILEIDERRTRNRVIRFCKVQWSNHSEEESTWEREDELKSAHPHLFASSSESRGRDSV

SEQ ID NO: 193551 - protein, 74 aa, Oryza sativa
  Clone ID: PAT_MRT4530_89680C.1.pep
MALKLDVTTMALRLELALAMAHHRHQLSEIWEPGSPSPSGHQGAAEYDKTYKTHIFKPPRLKHPKRTAKSPGVP

SEQ ID NO: 193552 - protein, 85 aa, Oryza sativa
  Clone ID: PAT_MRT4530_89681C.1.pep
TSWLIKGKYSLCTTMGLLAAACNVGGVAWVRWREISDWVCGLPADCCSGSLRTVAHTGRAKLWEPITASDSPSPYKLGHQGLYDC

SEQ ID NO: 193553 - protein, 64 aa, Oryza sativa
  Clone ID: PAT_MRT4530_89682C.1.pep
SAAYKIAMKLIPDRKMFINLLVGKCQDCAALKEEIRKLAKLLKPFLDDIHAMMAKFRLDRLKST

SEQ ID NO: 193554 - protein, 104 aa, Oryza sativa
  unsure (1)..(104): unsure at all Xaa locations
  Clone ID: PAT_MRT4530_89683C.1.pep
INQKDKMAQLSIEYSTENCTMVDIEEFFVRKNHLTCLLXDEFVNDDVTSAYIHCTRXQANNNRKVYYENPFLSDILKGAGVNGVDEDSDNFITKIVNNYLFNKL

SEQ ID NO: 193555 - protein, 53 aa, Oryza sativa
  Clone ID: PAT_MRT4530_89684C.1.pep
MAPASRADMTVAARPPFYSTTVGMVSGGQICNSEGGSDAVAWTSAHRGGVPGC

SEQ ID NO: 193556 - protein, 631 aa, Oryza sativa
  Clone ID: PAT_MRT4530_89685C.1.pep
MGSRPRVAFLHHHHHHHHLLAVAVVLLLLARGAEPIAAGGGAAGRHLTTEERWMDQRLDHFSPTDHRQFKQRYYEFADYHAGGGGGGGPVFLRICGESSCNGIPNDYLAVLAKKFGAAVVTPEHRYYGKSSPFESLTTENLRFLSSKQALFDLVAFRQHYQEILNARYNRSSGFDNPWFVFGVSYSGALSAWFRLKFPHLTCGSLASSGVVLAVYNFTDFDKQVGDSAGPECKAALQEVTRLVDEQLRLDSRSVKVLFGAEKLKNDGDFLFFLADAAAIGFQYGSPDAVCSPLINAKKTGRSLVETYAQYVQDFFIRRWGTTVSSYDQEYLKNTTPDDTSSRLWWFQVCSEVAYFQVAPKNDSIRSTEINTGYHLDLCRNVFGEGVYPDVFMTNLYYGGTRIAGDPSNCSSPAAVSTVRKQIASHISLWLSQCQEPTSSRRTSDDSAHGDLTPCSILNAGHGDDDSGVGATINTVTQTNLRYPLIYSSTIKVVFECPEDEAESIIVIDEKGSTSAATLSKAVARANTNQAGPAAAWLNNHMRWGFAIVLRRCDTDDRSRDEYGVAQLKLETFQTHCAAVAGTAEGNLLCSVVLRMELDSCLSSAAGPGAGRLLVSSLSHGASAPFTGGVTP

SEQ ID NO: 193557 - protein, 302 aa, Oryza sativa
  Clone ID: PAT_MRT4530_89686C.1.pep
MGSTAAAGGNLRTALSYCVQQVRNYDYHHYLCLLHLPPAMRKAAFAFRAFNIETAKAMDVVSDPKTGLMRLLWWKDVVDKVFANKLVEHPVAQVLSSVVSEHKISKHWLKRSVEARINDANRDDYAIPETISELERYAEDTQSTILYMTLQAGGIQSTIADHAASHIGKASGLLLLLKALPHHVSKQGRIPYIPASIAEECGLLTREGGRSEVRMGDELPDAVFKVASVADAHLQKARELASSVPAEAIPVLLPGVPAQVLLDSLRRREFNVFDSRLSRGVHGISPLWYQIKLIWHSVRKKY

SEQ ID NO: 193558 - protein, 92 aa, Oryza sativa
  Clone ID: PAT_MRT4530_89687C.1.pep
MEPSGKLSSSAVVLVLLLVVATEMTGMVVVVQARLCEKPSSHFKGLCLRSQNCDNECMLEGYMDGKCKYLTRRCICSMECATMSNVGLTPTK

SEQ ID NO: 193559 - protein, 221 aa, Oryza sativa
  Clone ID: PAT_MRT4530_89688C.1.pep
MAGFPLGGGSHSRDNPAPPVPPVHPADAASFLYATRGGSFQLWQQQEQQPFYASNIIRFADDAPPAPSLAGASSSSSSRGMRSSGGGGGDQQMVTVAERFPREVSSEAVFRCVRLGPVDQAEAEVAYQTAVSIGGHVFKGILHDVGPEALAVAGGGGASEYHFRLTGDGSSPSTAAAGEAGSGGGGNIIVSSAVVMDPYPTPGPYGAFPAGTPFFHGHPRP

SEQ ID NO: 193560 - protein, 315 aa, Oryza sativa
  Clone ID: PAT_MRT4530_89689C.1.pep
MAGFPLGGGSHSRDNPAPPVPPVHPADAASFLYATRGGSFQLWQQQEQQPFYASNIIRFADDAPPAPSLAGASSSSSSRGMRSSGGGGGGGGGGISCQDCGNQAKKDCTHMRCRTCCKSRGFACATHVKSTWVPAAKRRERQQQLAALAASAAATAGGAGPSRDPTKRPRARPSATTPTTSSGDQQMVTVAERFPREVSSEAVFRCVRLGPVDQAEAEVAYQTAVSIGGHVFKGILHDVGPEALAVAGGGGASEYHFRLTGDGSSPSTAAAGEAGSGGGGNIIVSSAVVMDPYPTPGPYGAFPAGTPFFHGHPRP

SEQ ID NO: 193561 - protein, 120 aa, Oryza sativa
  Clone ID: PAT_MRT4530_8968C.1.pep
GRVGDDAKSALVTYIYREMMGANDAIQPQLALDKHHKIPDELSGEANMAAQDGNHTATAAAASGFAGSNGEDAILHKEGDPVENNRLGLASIFFNDMAWTRKALQQLLRSLGFQIGTRKT

SEQ ID NO: 193562 - protein, 176 aa, Oryza sativa
  Clone ID: PAT_MRT4530_89690C.1.pep
MAAAVEEAFPIGFTKGIRSYWRSRKYHSVDSSAAGRGTSNLVRLGGGSGSGSDGGAWAVRLGGMFRTRVKAAAPAATTTAVAKVPARVLGRVRDAYVDAMVGVAKKQAAAALSQPGAGTTEALWQKRVPVRRSRGQSKKQLRQKADELGQRLVMEMYKSVLASRDLSSMLQASRAQ

SEQ ID NO: 193563 - protein, 305 aa, Oryza sativa
  Clone ID: PAT_MRT4530_89691C.1.pep
MAGFPLGGGSHSRDNPAPPVPPVHPADAASFLYATRGGSFQLWQQQEQQPFYASNIIRFADDAPPAPSLAGASSSSSSRGMRSSGPGGSGGGGTISCQDCGNQAKKDCTHLRCRTCCKSRGFDCATHVKSTWVPAAKRRERQNLLASAAESSKRPRDSAAAATSTTPTTSSGEQQQMMVGERFPREVSSEAVFRCVRLGPVEEADAEVAYQTTVSIGGHVFKGILHDVGPEHSSGGGGGMGGRHAAAGEAGSSPSTAAAPHGGGEGGSSGVAAAAAAVSSSAVVMDPYPTPGPFGGAHFFHGHPR

SEQ ID NO: 193564 - protein, 256 aa, Oryza sativa
  Clone ID: PAT_MRT4530_89692C.1.pep
RTHLCCCSWSFPAEMAHKGVPKFGSWEDEDRGEHLYTQYFENARKGKSPGRSVNPNNHHGDTEALSKASPLHAGSDPAMRKPKDDRRSNREGDLRQHETTVRKPYAESPNHRYGDHTNYDNAVRKTGIEKSPVHPRHQARAANKGGVSSPSRDRRGSLEGNRGSAPTTPGRSKFRSTGRGDETPDRGSAVPKFGEWDEKDPSTGEGFTDIFEKVREEKQSGTGNAPVMTSEADYIKRYQQRKYESTGCSCFSWFKN

SEQ ID NO: 193565 - protein, 105 aa, Oryza sativa
  unsure (1)..(105): unsure at all Xaa locations
  Clone ID: PAT_MRT4530_89693C.1.pep
XSADRTISVWRREEGADHARLAVLAGHTGPVKCVAMDEEDDTAGDKRWVVYSGSLDGSVKVWRVSSTPDAAAARTPAHGWKATPSPLGAWTPYAATPARKRMAAA

SEQ ID NO: 193566 - protein, 335 aa, Oryza sativa
  Clone ID: PAT_MRT4530_89694C.1.pep
MAASSSSAPALADAYDIPWVEKYRPTRVADVVGNSDAVARLQVIARDGNMPNLILSGPPGTGKTTSILSLAHELLGPSYREAVLELNASDDRGLDVVRNKIKMFAQKKVTLQPGRHKIVILDEADSMTSGAQQALRRTMEIYSNTTRFALACNTSSKIIEPIQSRCAIVRFSRLSDQEILGRLMIVVAAEKVPYVPEGLEAIIFTADGDMRQALNNLQATVSGFRFVNQENVFKVCDQPHPLHVKNMVKNVLDGKFDEACSALKQLYDLGYSPTDIITTLFRVIKNYDMAEYLKLELLKETGFAHMRICDGVGSFLQLSGLLAKFALVRETAKAS

SEQ ID NO: 193567 - protein, 39 aa, Oryza sativa
  Clone ID: PAT_MRT4530_89695C.1.pep
DMILKIGKIKIRNSFGLHYLLNVSYLRYYSCICFFGMSP

SEQ ID NO: 193568 - protein, 90 aa, Oryza sativa
  unsure (1)..(90): unsure at all Xaa locations
  Clone ID: PAT_MRT4530_89696C.1.pep
GRAVAGAGYGRGGSGRXGRRRGGRNGRRHPQRHVRSFPQRVHLQRPGPRRGGAQARGKAAEDNDNNRRRRRRPQWRRGLGGRRQRQRRRP

SEQ ID NO: 193569 - protein, 196 aa, Oryza sativa
  unsure (1)..(196): unsure at all Xaa locations
  Clone ID: PAT_MRT4530_89697C.1.pep
ISFSFSSFFPFLGRRPSPPCRPPAPISFLGRPAPPPPPFGTPTCGPHLSGRPQPPAVCRRQQPPXCPTSSAPPAPTPXPFPRPPHNATLAPSLPPSARAREGGIRFRIPPLSLSLSTPRRRRFWPRPPLPRPXKPSPELPLSFPPFRCPLPRFLPPSGPCTRAPAPPPPSPATXPSPLGPPPXKPPPPLASPPRGP

SEQ ID NO: 193570 - protein, 70 aa, Oryza sativa
  Clone ID: PAT_MRT4530_89698C.1.pep
MVPQGIESLSYLSKLALLYLHKGFIIQWSGNEMHKKILHGAEICVYKCACFISVKEALCNYVAPLHFSFI

SEQ ID NO: 193571 - protein, 125 aa, Oryza sativa
  Clone ID: PAT_MRT4530_89699C.1.pep
MARSAQFVAAAALPALLPTPCGRTSSSRASSDERWDIQKKPWLQADALHGEEDRNAAMTMRLTTNKEISKPRHAVFAGPSFVAPEPCMLPLPKAWVPRGGAEKRITYPDPPNGLGSLEGTKPESL

SEQ ID NO: 193572 - protein, 511 aa, Oryza sativa
  Clone ID: PAT_MRT4530_8969C.1.pep
MTGFNLLENFKENPEAFFQSVKPRVVAPQKTLPTKKSAIPAPPTFKTMADKTLREFAALSADNVTIRAQINMGDDLIFAQAKTTDALRKKLAANDKVLENINVKLDGFASALQNQLCFNKMIETQLAQLASLVPANESGRILGQPDSSIENVKAITMRGGTNWIAREAPSSDSADKEVQLEKDILNNKRLLPTMEVVKLTEQCNNVILHKLPEKKKDPGCPMITCSIGAQQFDKALCDLGASVSVMPKDVFDKLNFTVLAPTPMRLQLADSSVRYPAGIAEDVPVKIRDFFIPVDFVVLDMDTGKETPLMLGRPFLSTAGANIDVGTGSICFHINEKEEKFEFQPRTEQYSMVRIKYGPNPQNIQVVEVEPPKTDSLVKFMQNFLDKETTMPRNRYWKTPVKSSTPAKKLEQPAQRKPSSAPKPKKGSGSSSSHHDESSARSSVDISMEDTEAPRHLLNDTDLDLVDDRERQANYMLSDQEYAHTREYSLELLKKIGMDVDIRAIWKTVGW

SEQ ID NO: 193573 - protein, 115 aa, Oryza sativa
  Clone ID: PAT_MRT4530_896C.1.pep
IGCRRGAVGQAELVGPRVYSCCHCRNHVCLHDDIISKAFQGRNGRAFLFSHAMNISMGPKEDRQLMTGLHTVADIYCRDCREVLGWKYERAFEESQKYKEGKFIFEKAKIVKENW

SEQ ID NO: 193574 - protein, 84 aa, Oryza sativa
  Clone ID: PAT_MRT4530_89700C.1.pep
MGTRVHGTGKAYIYCRMNILESIRIAVLTDLSIGTHMEQLLFVRGAVLDQNRSVSCLIPKEYQPGVNRVSAGVDGYQLVSMGIS

SEQ ID NO: 193575 - protein, 518 aa, Oryza sativa
  Clone ID: PAT_MRT4530_89701C.1.pep
MVEGQGGEEELKEEEEAVELGGRAVPRELMAEVLRRLGPRGVMAAAAVSRGWRDCAGRVWRAAEELRLRAAGVSLVGALLPRCPALSRLSLRMESDVDATILACLAFSCPSLGTLEISMSDNAVNRMTGLPLPGPVSNKAVSVLNREELSRFVSEKHSLSVLKIGGCCNLGFLNLNSSSLSILWLSDLCSLSKSVINCPNMSEISLCFTQQSNDCTDLVTLMDGLGRTCPNLKNMHISSAQLSNEAVFALEGASLRGLCMLSLILGSKITDAAVASIVRSCASLELLDLSGSSISDNGVGMICKAFPHTLSRLLLALCPNVTTCGIQFATAQLPLLQLMDCGMTLCASLQNEKQGPYFGEINGAIRFCPKLPTSKKQSTNQKLIIKHGNLKKLSLWGCSAIDCPKLKNVHASGCHDMLIGAIRNQAPFKMEDKYGILDNYNPSFMVFVYLMSIVIILGISAIQVDVLNEFAAAEPHLPCKRLADGSKRVQLPQFAQQEPSQDKKGIDLRRNQCTVHLD

SEQ ID NO: 193576 - protein, 117 aa, Oryza sativa
  Clone ID: PAT_MRT4530_89702C.1.pep
HSVRGKIWTGLIFLRHQLFFYVPLLRSPKKKGANLLMSDVPSDTLTEHKPVELSLYIPPPTTTRAHIYAPSPSGPRSWFYQMDWTKGLFLHSENYPVQGHETPATWVKPPSGHNFPR

SEQ ID NO: 193577 - protein, 641 aa, Oryza sativa
  Clone ID: PAT_MRT4530_89703C.1.pep
MRWLSLGGLVLCTVTKTGIHVVRPARAFVRHELGIGNGSHILHVSEAGARCGSMRKLLELIRNERTFQIKIMVKNLLQEDMDHEDRLSMLTDDILLSILGRVDIISAVRTSVVSTRWKHLPWLLPEFTIDVKDFLPVPQPNRIKVEHMDEAMASLTKGIRSLLTIARSEFPINRFQLKLYLINNYSRVVGPMLDKAIEVGILKDMDLSVLDEEEIVDCTDKHILQQASSVKDLFSGYPSVLTRLTRLSLYNLCFARWDLHHHLFECCNQLRYLSLSNCDVGKNAIWKISAPNSNIIVLELDVCCLEKLEVLCLPKLERLNWDTWLCPYAPLSFDVVPNLQEVSLICGATNKHEGFILSEVPSGTTNIHTLTLDFQGEKLWIKPEGKQLFRAFSNLRKLSIHSIFSEFELLWTTNLLEAAPSLEMFDIEIWEHTCDVDREPKVFGERPNPAWKAPDVTSFRNSLLKELQIVAFRPLKQQLEFIRVVMQQAPNLGTIILKYDDPCEYCEALGIFPPRSSTECVFPKSKDEQDRVINLLKDGEADDDDMLSMLNDDISLSILERVDIKTAVRTIVLSKRWKRLPWMLPELSIDVKDFFLYHSRTVLKVVPLEIFRGKLGIEHAIELIRLEEDHQVIQQPLSIIT

SEQ ID NO: 193578 - protein, 124 aa, Oryza sativa
  unsure (1)..(124): unsure at all Xaa locations
  Clone ID: PAT_MRT4530_89704C.1.pep
RRTSYACNEYLCLINKYSTSTRITNLXAENEHKMEENRHQKRRSINRTMSRIRLINEWDKNAEITXPIGPKFTSLHMGTKEEATCRNWATLAQPIVRANPPXLRSMQGFDGWLGLIPNDGWRVL

SEQ ID NO: 193579 - protein, 96 aa, Oryza sativa
  Clone ID: PAT_MRT4530_89705C.1.pep
GCGDMGGNPCRCTPATTPLPPPLGFMRDVKDFGTTTRCCDGEGGVCGFSRGLDNLWLGLPDGAWQGLPRRRSTEGRRRKGQSKVGGSGADLLGCRG

SEQ ID NO: 193580 - protein, 98 aa, Oryza sativa
  unsure (1)..(98): unsure at all Xaa locations
  Clone ID: PAT_MRT4530_89706C.1.pep
MALASRATPTSIIFYVSDHDRQEHQLHHLKYLGGSTTIAQRGSTVSMHDPESQDDISIKVVPADESPLEETYAXPTKEQESTAADSXGFSREELGRLV

SEQ ID NO: 193581 - protein, 162 aa, Oryza sativa
  Clone ID: PAT_MRT4530_89707C.1.pep
MEVLRLYSLKGGCGCSSTVILPPLQPNKSAPLPPTLDCPLRLLPSVLRRRGRPCQAPSGRPSHRLSRPREKPQTPAATLYLPSGTAGQVLSARTTPVSLGCARAGYTSITAPTFTSEPPPSPSQHRVVVPKSLTSRMNPRGGGSGVVAGVQRQGLPPMSPQP

SEQ ID NO: 193582 - protein, 64 aa, Oryza sativa
  Clone ID: PAT_MRT4530_89708C.1.pep
RKNPSMRCDAMRNGARRWWRGGKRSGAWLRFLKRKGGEEERRGGSSCGGRKERKKKRRSILQPG

SEQ ID NO: 193583 - protein, 295 aa, Oryza sativa
  Clone ID: PAT_MRT4530_89709C.1.pep
MAGDGEAIPEAWKELVRSLGTEQLVGAIYVALDDFNARERDTIPPELWRRLGDRSAAYRNPFVSDGGSSSGSGSGEVERIKVKLVAVGGEDGSGGGGGGTSADSSEDAVVDLLRDLQAVPMTFETLEASKISKTISGLRKHSSSEKVRRLAAALYKSWKAIVDEHLSRSSSKPPTPTKTASAPAAADHAKKANTAAAGHVKTPAAAPKTAACSKRKEAPAPPEMDEAKLEAARKKLRERYTEEETAKRQRKIQIINNAPGKAKQRPAVVEQRRRVVRDTVVAVASRAPVRSSLRM

SEQ ID NO: 193584 - protein, 265 aa, Oryza sativa
  Clone ID: PAT_MRT4530_8970C.1.pep
MNRVSTSWGFVYSRVNKPLGAPEGGYVDAAGGRRRARAPMVAGSGHRHGGAAAERGEEKGETRRRSTAHPRSTATTKKAAGAEEGGGAARVDGDGGAPAVSELDEGVDGDDDGAAKPEEATPGRETVPASGESRPKVVGDRGERGRRCELDSSEETARQRWKRVRCGEGLNRVGRGRGRPGKEGNRPGGPAAINGANEICGNKSARLNAREREEKMGRKGEGITGSGGIRGGGGARRGRGGGSGGRNEMTGGPHPSARVAGGPAR

SEQ ID NO: 193585 - protein, 154 aa, Oryza sativa
  Clone ID: PAT_MRT4530_89710C.1.pep
CGYSGISQGVSSTAVRTMECARGPGRGAVGAVGAEQGSVRGAVKLIRETGTPRCVDAHPRVTRGRGSGGWSTRVWRMNGRKSRTDRPGRSRGGTEWERRWKREGDGVSPGGAGGGRVAGSGICELAGPVHVEGAGRTWRRAESRPLWATGSPFI

SEQ ID NO: 193586 - protein, 66 aa, Oryza sativa
  Clone ID: PAT_MRT4530_89711C.1.pep
RLSKRNTNGSSMSSSLPISSLAVPRSVIAPCSTHCSSASSCRSLLVDECRLSPRPYIPPRIKQWLV

SEQ ID NO: 193587 - protein, 100 aa, Oryza sativa
  Clone ID: PAT_MRT4530_89712C.1.pep
MVAVVRDTRSVRDALVWSSARASMSSSSGHGLCADDPSDSILGKPSIEVAWASTRQRPFGLTLATRLDDETCSTLAPVDGGHGGVCVSIVEFTPLHSSRV

SEQ ID NO: 193588 - protein, 129 aa, Oryza sativa
  Clone ID: PAT_MRT4530_89713C.1.pep
MGAKSEREMERARNTQEDEICNAKSEREMKHVMMLVRETGLLVRQWRELLVGAMHCLYVLSWGGLGLDYEGLVRVIPTMEDDDDPNYHGTDFVGVGEGEDERNEYTDEGNNVDEEEDEAATDVARKREM

SEQ ID NO: 193589 - protein, 89 aa, Oryza sativa
  unsure (1)..(89): unsure at all Xaa locations
  Clone ID: PAT_MRT4530_89714C.1.pep
GRATLFTPNIYADVIICLDILQNPWSPIYDDARDIASIQSXLLCDPNPSSPAHSKACITVLCKTSSYHNTHLPRYCAAHLDEQLIPGHE

SEQ ID NO: 193590 - protein, 59 aa, Oryza sativa
  Clone ID: PAT_MRT4530_89715C.1.pep
TQYVQGCYLLKTSGGRHLGSRKCQSRYLDYYICKQGLPDQRTMLLCLNNELLICTMQGW

SEQ ID NO: 193591 - protein, 360 aa, Oryza sativa
  Clone ID: PAT_MRT4530_89716C.1.pep
MEPTSSAAMARQTWELENNIPAAASDPDALDAIYRYDEAAQARVQQEKPWANDPHPFRRAKISALALLKMVVHARAGGTIEVMGLMQGKCEGDAIVVMDAFALPVEGTETRVNAQADAYEYMVEYSTINKQAGRLENVVGWYHSHPGYGCWLSGIDVSTQMLNQQFQEPFLAVVIDPTRTVSAGKVEIGAFRTYPKDYKPPDEPVSEYQTIPLNKIEDFGVHCKQYYALDITYFKSSLDSHLLDLLWNKYWVNTLSSSPLLGNRDYVAGQIFDLADKLEQAEGQLAHSRYGMLMPSQRKKEQEESPLAKVTRDSSKITAEQVHGLMSQVIKDILFNSVHPSNKASTSAPDSSGPEPMVEA

SEQ ID NO: 193592 - protein, 419 aa, Oryza sativa
  Clone ID: PAT_MRT4530_89717C.1.pep
PAGTQRSEVKHAKKIKQKEKIFPICEIRKTLARRRCRTRGCSSTWQTWELENNIPAAASDPDALDAIYRYDEAAQARVQQEKPWANDPHPFRRAKISALALLKMVVHARAGGTIEVMGLMQGKCEGDAIVVMDAFALPVEGTETRVNAQADAYEYMVEYSTINKQIGSHHAIDHNVSEVSVFANTLMTDLAGRLENVVGWYHSHPGYGCWLSGIDVSTQMLNQQFQEPFLAVVIDPTRTVSAGKVEIGAFRTYPKDYKPPDEPVSEYQTIPLNKIEDFGVHCKQYYALDITYFKSSLDSHLLDLLWNKYWVNTLSSSPLLGNRDYVAGQIFDLADKLEQAEGQLAHSRYGMLMPSQRKKEQEESPLAKVTRDSSKITAEQVHGLMSQVIKDILFNSVHPSNKASTSAPDSSGPEPMVEA

SEQ ID NO: 193593 - protein, 88 aa, Oryza sativa
  Clone ID: PAT_MRT4530_89718C.1.pep
MQHQRGGAEGGAGSRREGRQGGDASQGPRADGAAVSGGPPGRGRRQQPGLEPVAAARAAAGAGAGGPGRRRRGSGGGRGAAPGAARLE

SEQ ID NO: 193594 - protein, 95 aa, Oryza sativa
  Clone ID: PAT_MRT4530_89719C.1.pep
MTTTRPGDVEEKFRRRESRDAVLMAAAAARGSGRRHVEVRSEETVEVGCDRGASSGECNHGGMVARTRRGDVVGLVRQGAVVPFTGWQHGGGCLG

SEQ ID NO: 193595 - protein, 388 aa, Oryza sativa
  unsure (1)..(388): unsure at all Xaa locations
  Clone ID: PAT_MRT4530_8971C.1.pep
METAAAVVCRGGGLRAPARRGGSDSSTTRAGGVAASPAPSTTARRRPLLVASLGEPLITAQPLSSSLGDGAAVHETLARSDSVIPSLKPSHCVDHSVQVDADEETGSTKTLPPPDDVPTKTVHVKFVLQKRCAFGQRFLVVGDVAALGLWNPAKAAALDWSEDHVWTVKKELPAERSIEFKFLLQDRSGHVEWQHGRNRILDVADTSNTLIVCEDWDEAKNQQVSEEIGDADGIFSGSDGVFQEDELQLGEEQETNKGVTVGVDDAKSALVTYIYREMMGANDAIQPQLALDKHHKIPDELSGEANMAAQDGNHTATAAAASGFAGSNAIQLRQYPVKITAXLYGANGPVENNRLGLASIFFNVLDRERPLAIXKLRSLGFQIGTRKT

SEQ ID NO: 193596 - protein, 371 aa, Oryza sativa
  Clone ID: PAT_MRT4530_89720C.1.pep
MAAASLAPPTASFSPAPAPGRVKAAAPLLSRRPPGRFLLRVASESSSISGDTLLGLYEKERLSHSLYANEDYDKEMFWDNLDADLRYWTRSLRPVQWYPGHIAKTEKELKEQLKLMDVVIEVRDARIPLATSHPKMDAWLGNRKRIIVMNREDMVSNEDRNAWASYFANQGTKVVYSNGQLGMGTMKLGRMAKSLASTVNTKRREKGLLPRAVRAGIVGYPNVGKSSLINRLLKRRMCPAAPRPGVTRELKWVRFGSDLELLDSPGILPMRISDQTAAIKLAICDDIGERSYDFADVAAILVQLLVRHPAVGPEAFRRRYRLDMDSDCGKMFVTKLSVHLFNGDASQAAFRILSDYRKGKFGCVALERPPT

SEQ ID NO: 193597 - protein, 44 aa, Oryza sativa
  Clone ID: PAT_MRT4530_89721C.1.pep
TKAPGLIFPQRFVSRSKSYKFVDNKKNEWYYVITLVFGGVNWEK

SEQ ID NO: 193598 - protein, 68 aa, Oryza sativa
  Clone ID: PAT_MRT4530_89722C.1.pep
MARALDSKIISDRETGRSRGFGFVTLSYEQSMRDAIEGMNGKELDGRNITVNEVQSRRFGGGGGGYGG

SEQ ID NO: 193599 - protein, 76 aa, Oryza sativa
  Clone ID: PAT_MRT4530_89723C.1.pep
IGSIYTPYYAQFARPISLHSEYCITSFLSLFFLTRSFLSLNQCHTKDWTKCLKRLIQLVDRVSKDTSKNIRLMMSG

SEQ ID NO: 193600 - protein, 228 aa, Oryza sativa
  Clone ID: PAT_MRT4530_89724C.1.pep
MGGSRALPLSSLLAAATKSPLLHHRPLPLRLAASMSSSSPSPSPAAPASASAIDFLTLCYRLKTTKRAGWVRRGVQGPESVADHMYRMGVMALVAADLPSGVNRDRCVKMAIVHDIAEAIVGDITPSDGVPKEEKSRREQEALDHMCSLLGGGPRAEEIRELWMEYEQNATLEAKVVKDFDKVEMILQALEYEKEQGLDLEEFFQSTAGKFQTDVGKAWAAEVASRRK

SEQ ID NO: 193601 - protein, 326 aa, Oryza sativa
  Clone ID: PAT_MRT4530_89725C.1.pep
MAQSNVLSVIFLDVAPCSGVVFLSVEGKTAKQKNQISMRRDNQWLGARRHRRSTARRGSGGHVEGRAGGWSWEGRGDGAGEGGVGRRRSDGTVGLGERRAGEWAGGLLGPRASGSGGGARTGEELGALREVTATADDLPALVDEKNGVGGWIGNRSPRRFDEGGRGGGLDGVGVGGGGGDVARSMTAPAGGSGLGESGAQPGERSWGGGLAREAAAGGSDPATREGRAQPRASGAAPAAAQEDRSVIPNHTESIHGGRWSRRGGIVNHDDHPFQSVAAYSLHYQHRQFPPTRAAWSVIGPHVAAVGYTVPRMEPHCHHRRNWICSR

SEQ ID NO: 193602 - protein, 53 aa, Oryza sativa
  Clone ID: PAT_MRT4530_89726C.1.pep
FLLVSGRTTWLMLDNTDSAVMKHVSMTDVTFARNNARNRTSCRKTDCGASPMI

SEQ ID NO: 193603 - protein, 225 aa, Oryza sativa
  Clone ID: PAT_MRT4530_89727C.1.pep
MELARSACSKEHHKIYAGWFAVADPDGDGRVTGADATKFFAMSGLSRADLKQVWAIADTKRQGFLGFGEFVAAMQLVSLAQAGEEITQDSLKREDLSSLDPPVMEGLDELLARSKAGVKRVHPEENGAPQVQVHSANSWFSSKSAKKMQVPLTAVTSVIDGLKRLYVEKLKPLEVAYRFNDFASPLLTSSDFDAKPMVMLLGQYSTGKTTFIKHLLQTSYPGAHV

SEQ ID NO: 193604 - protein, 569 aa, Oryza sativa
  Clone ID: PAT_MRT4530_89728C.1.pep
MELARSACSKEHHKIYAGWFAVADPDGDGRVTGADATKFFAMSGLSRADLKQVWAIADTKRQGFLGFGEFVAAMQLVSLAQAGEEITQDSLKREGCFSCDAAICISVFVWMSPEFMVILADLSSLDPPVMEGLDELLARSKAGVKRVHPEENGAPQVQVHSANSWFSSKSAKKMQVPLTAVTSVIDGLKRLYVEKLKPLEVAYRFNDFASPLLTSSDFDAKPMVMLLGQYSTGKTTFIKHLLQTSYPGAHVGPEPTTDRFVVVMSGSDERTIPGNTIAVQADMPFTGLTTFGGAFLSKFECSQMPHPLLDHITFVDTPGVLSGEKQRTQRSYDFTGITSWFAAKCDLILLLFDPHKLDISDEFKRVIASLRGHDDKIRVVLNKADQVDTQQLMRVYGALMWSLGKVLNTPEVARVYIGSFNDKPVNESAVGPIGKDLFEKEQDDLLCDLKDIPKKACDRRVNEFVKRARAAKIHAYIIGHLKKEMPAMMGKAKAQQRLIDNLGDEFAKVQREYHLPAGDFPDVEHFKEVLGGYNIDKFEKMKPKLVQAVDDMLGYDIPELLKNFRNPYE

SEQ ID NO: 193605 - protein, 48 aa, Oryza sativa
  Clone ID: PAT_MRT4530_89729C.1.pep
LLHYRSRISMAGEAYAHAFDHACNHSFVIKKIKTRRGEPKSRWDQMLT

SEQ ID NO: 193606 - protein, 543 aa, Oryza sativa
  unsure (1)..(543): unsure at all Xaa locations
  Clone ID: PAT_MRT4530_8972C.1.pep
HLDYRAAARVAFICPGECPSTPDFIHLXPCTFVYDXTEPQTKPYPLDMWKYGSALQQRPELXPYSGRGATSHNWHAPKPHRXTGFRGFERGRERERPSEPSATTANHASGTSGTTKATRSTQAKLQAYEEAITIHKNKTGYTEAVHGSTEADPVCQPRRVADKRTPLDTTRVAHVETTRLPSGHTNTDTTXVTTRTRERLPTPVHGRDAAGTRLDDAEARTKTMTGAAATLTKRGRRTGTAXRRDERHDDRERREDDDDDDDRDRRGGDEGXSQQQLHGDEDDVEHAATMPTTEAAPRDDEPGDRWDVDDENDRRRRRWWCSGATSRRGGRRGRRGDDGVPAKFGRGGGDAGFPARRRXAGXRGRCCRAEGGDGTAGRCSGEEGEAAGGGXARRNEKGDGGSAPPAVTARNGGXAGEEEAAAMLEEATARPAGARARRHRRLEVAGGVGERGRRRGWGRMIFILGMNLSGRDKSTPLTGISSPRFEEASMKIGWVVFSSCLTSSAPSSITNLPNKTSPLWTAWLDLLLQMESSLHLTFPWLHL

SEQ ID NO: 193607 - protein, 50 aa, Oryza sativa
  unsure (1)..(50): unsure at all Xaa locations
  Clone ID: PAT_MRT4530_89730C.1.pep
PKKKVFNGPRVFPSAFLSKPRVEVQGGDXRSFXXLVCXCRPXHLREHLHW

SEQ ID NO: 193608 - protein, 94 aa, Oryza sativa
  Clone ID: PAT_MRT4530_89731C.1.pep
MSVLQRHQHTLGPHHCVCSELCMHTQIHYTEETHTGRERRREQVRCSWGYVVWKAVDGVAAIASENQEFRIATGSTSRQLLIVRSAVEQVMSHM

SEQ ID NO: 193609 - protein, 150 aa, Oryza sativa
  unsure (1)..(150): unsure at all Xaa locations
  Clone ID: PAT_MRT4530_89732C.1.pep
VIIIPPPGQIGTGSAPVVDFLSSRRAVKFGELVSKIDRRSGKKLEKEPKFFKTGYFGMVKKIPLXPMVVESFYEGVVLXCAVFFIRQTVAVGFFFFVEKKDAXGPPVPKAADKKKMSFVFLVLSTSAFEDIIALTPPSISLCKRDKNKKS

SEQ ID NO: 193610 - protein, 248 aa, Oryza sativa
  Clone ID: PAT_MRT4530_89733C.1.pep
MGEMEERLLAAVEKLAEKVEKVGLIQEKLEVMDKKLEKQGERLDQVQAKVDLSLESLGQVLQEQIHVMQAVKRTVPATLVIPTRTMEATSSVTREQPQVTIPMPTLTPPPRVETGETHAPHLGEGNRGVAHENHFRRNMPKMDFPKFDGPDASVWVDNCETYFAMYQIPAGFKVSAASLNLLGKASHWYKAWKQKVGLHVWEEFRDAVVKEFDCGTHHIKANAMFELKQTGSVDEHKSQFDDLMYKLC

SEQ ID NO: 193611 - protein, 78 aa, Oryza sativa
  Clone ID: PAT_MRT4530_89734C.1.pep
MGLALTESETRGRARKGRGGDRETAAWNHRAGVVGAVWSHGSTIGDNGVVEWHGGCQVARSAACIWGGKEEFDGNDYR

SEQ ID NO: 193612 - protein, 235 aa, Oryza sativa
  Clone ID: PAT_MRT4530_89735C.1.pep
MAAKLPTVVLLASFAAVILSLAAPLLAGDPDMLQDICVADYKSLQGPLRVNGFPCKPEANVTAEDFFFPGLGKPADVYSGNPMGSAVTAATVERIPGLNTLGVSMARVDYAPWGGANPPHSHPRATEILFVADGLLEVGFVVATAAPASSRLITRVVPKGGVFVFPRGLLHYERSVGEKPAVAISAFDSQLPGTQAAADALFGSSSPAVPTDVLARAFQVDGGVVENIKSKFQHK

SEQ ID NO: 193613 - protein, 75 aa, Oryza sativa
  Clone ID: PAT_MRT4530_89736C.1.pep
SANNYAAPFFLVHLKKAGNNLLPPLPLFQVKLTAFFYCPIPPPFFWVRLKPPPPKMAQSVPPFCACPRFPGTLTV

SEQ ID NO: 193614 - protein, 129 aa, Oryza sativa
  unsure (1)..(129): unsure at all Xaa locations
  Clone ID: PAT_MRT4530_89737C.1.pep
HVDCCQGFSTCAIXESRXRIETVFATSSGHVEMLDTKHSQGTESIRSMTAKCLERDYKANSPVRRRPGELMTNAYSLESIEQLRTPVPDLVVKFRSENNLDEVDKGKRYVDQGTRTPRSPLMPVNHYNK

SEQ ID NO: 193615 - protein, 99 aa, Oryza sativa
  unsure (1)..(99): unsure at all Xaa locations
  Clone ID: PAT_MRT4530_89738C.1.pep
MASSRCRVAYVVLAALAAAPFLLLLLYGGGSPSALCLAAVRSGGASRRLQYPSVAXGRCVPPLPVLPSSPLPSLRASGWIIFAGXAHHPGHRPLPRVPG

SEQ ID NO: 193616 - protein, 483 aa, Oryza sativa
  Clone ID: PAT_MRT4530_89739C.1.pep
MAAATAAVFALLMASALAGAAAGGDIVHHDDEAPKIPGCSNDFILVGLLSNHHDDEAPKIPGCSNDFILVKVQSWVNGKEDDEYVGVGARFGPQIVSNEKHANRTRLMLADPIDCCTSPKEKVSGDILLVQRGKCKFTKKCKFTKKAKFAEAAGASGIIIINHVHELYKMVCEKNETDLDINIPAVLLPRDAGFALHTVLTSGNSVSVQQYSPDRPVVDTAEVFLWLMAVGTVLCASYWSAWSAREALCEQEKLLKGLQTCLVALLSRWFRAASESFFKVPFFGAVSYLTLAVSPFCIVFAVLWAVHRHFTYAWIGQDILGIALIITVIQIVRVPNLKVGSVLLSCAFFYDIFWVFVSKRWFHESVMIVVARGDKTDEDGVPMLLKIPRMFDPWGGYSIIGFGDILLPGLLVAFALRYDWAAKKSLQTGYFLWSMVAYGSGALISLGWKRGELWNLWSKGEPERVCPHHMHMQPQPKTPPLVQ

SEQ ID NO: 193617 - protein, 175 aa, Oryza sativa
  Clone ID: PAT_MRT4530_8973C.1.pep
MAFGNTPFKRMANSPKSPPSPNRCRKHRRPHDEWPLQPSPSSPANGILPMPRRRIEAASHQGRRARRHSKAAAPVVASRPPRPPSPQGRLARCRPKAALLAVADETPIAGLPPFNSTNPPCRSTPLYGSLADLGLSFPPHTITDDAREITKLPSHPRYRVKQKERYHEVPTNPVH

SEQ ID NO: 193618 - protein, 45 aa, Oryza sativa
  Clone ID: PAT_MRT4530_89740C.1.pep
NSDFSIPRDSVKHLMVAHVIRVPTLRLMRLIPVHYFLALCPFYLK

SEQ ID NO: 193619 - protein, 192 aa, Oryza sativa
  unsure (1)..(192): unsure at all Xaa locations
  Clone ID: PAT_MRT4530_89741C.1.pep
MQGLQTCLVALLSRWFRAASESFFKVPFFGAVSYLTLAVSPFCIVFAVLWAVHRHFTYAWIGQDILGIALIITVIQIVRVPNLKVGSVLLSCAFFYDIFWVFVSKRWFHESVMIVXRGDKTDEDGVPMLLKIPRMFDPWGGYSIIGFGDILLPWLLVAFALRYDWAARKXLQTGYFLWSMVAYGSGLLITYV

SEQ ID NO: 193620 - protein, 145 aa, Oryza sativa
  unsure (1)..(145): unsure at all Xaa locations
  Clone ID: PAT_MRT4530_89742C.1.pep
ASGGKGADRWAPHGSDSGRAVHGGPGPQTGEERRTTRQPNRWPRSTRXIGRRRELAAGVRGHGANRPGGHGARRHGAHAAAARXAAGDGERRRRGEAAATRLSSGATAKRCGRERXKRRRGITDDDRXRRATEDDGDGGTSSGTS

SEQ ID NO: 193621 - protein, 138 aa, Oryza sativa
  Clone ID: PAT_MRT4530_89743C.1.pep
MVFLHEGRGNSAGDEREEEEPKLPTTDAMSRNLPSVEFGNITEIPKASKLRQLKVLLPRKNAAFADVALMTRQSKRLVTHVCRVPSVNARVGLGLGSAREGDRPERRTPSRGRAHFGWARVGSSAHGQSENTQHKHNT

SEQ ID NO: 193622 - protein, 157 aa, Oryza sativa
  Clone ID: PAT_MRT4530_89744C.1.pep
APHRSQTQWRDKRKQNSYPLVRRGPINIRARAQLGVMYGQIGILFASKEVVTTRAPTRPGRRRGPPAGTNPRDGPQPQGGARQTASDIGDPPLILELERHASERCFSLQARGGLEPQNQEGLNCSSLGTREHATCKKRKPEPIAAGRAVRWSLVPNS

SEQ ID NO: 193623 - protein, 52 aa, Oryza sativa
  unsure (1)..(52): unsure at all Xaa locations
  Clone ID: PAT_MRT4530_89745C.1.pep
RRLHAGWLFRRHLKACTSTPAXPPRRPPSPPPGGVVPVVDGYFAIAWRLAPP

SEQ ID NO: 193624 - protein, 306 aa, Oryza sativa
  Clone ID: PAT_MRT4530_89746C.1.pep
MVGAVTEGERGGRQRERERETVDVIAAAGEEERWRPARRRARWWRCSNAPGARPRAPPPPADKRRALPIDPLSLPKAVGLLRCRKSCCLHWMNYLSPDLKRGNFTDDDDELTIKLHALLGNKWNTHIKRKLLSQGIDPQTHQPVSAGTSVAAASELTTTAITVGFPSLASSLVAEGSLAEAESATEVSSSSVSRSAAKSSLPVDGDGEDSDLAVRLTAEGKGRALVGWGGVDAPPCSPTTALLLHPSPRSPIASSLPHSPSASLPAAALARRRARAHTRRSATALALCCATRICALLRLPPASLTE

SEQ ID NO: 193625 - protein, 97 aa, Oryza sativa
  Clone ID: PAT_MRT4530_89747C.1.pep
FIISLPRGLLLLLVVVVHSFELPTNFESTQSAKCPFLISFVAGLIHLATKRILKWSLQKRKTETYPYPSEKCQKGERGDSSTRWPPGGGRSDPTRAM

SEQ ID NO: 193626 - protein, 1276 aa, Oryza sativa
  Clone ID: PAT_MRT4530_89748C.1.pep
MRRRVRWLPPHCGTGRPAAAALPRGRHDARADTAYKATGLHSLLNNEANHHDFDSKRSVSPFSTAGFFSKMLFWWMNPLIKKGYEKPLEETDIPALGIEDEAGTQYSMFMNKIDASKSSLFWIIVSCYKREILVSGFFALLKVLTLSAGPLFLKEFINVSSGKEAFKHEGFVIVLGLLFSKCLESLAQRQWYFRTRRVGVQVRSLLSAAIYRKQHKLSCSASTEHSSGEIMNYLMVDTYRIGEFPFWFHRTWTTGLQLCIALMVLYNAVGPATVASVFVIVLTVMLNAPLAKQLQNIQSKLMEAQDMRLKTMSESLTNMKVLKLYAWENHFKGVIEQLRELELKWLSAFQLGKAYTSVLFWASPALVSAATFLACYFLGVPLDPSNVFTFVAALRLVQDPINHIPNVIGSVIQARAAFNRLNEFLGASELQKDQVSMEYSAHSQYPIAIKSGCFSWDSSENYNLRNINLMVKSGTKVAICGEVGSGKSSLLAAILGEVPRTDGVIQVSGKIAYVSQNAWIQTGSVKDNILFGSTMDKPRYEETLKFCSLVHDLEILPFGDLTQIGERGANLSGGQKQRIQLARALYHDADIYLLDDPFSSVDAHTATSLFNEYVMGALSEKTVLLVTHQVEFLHAFDSVLLMSQGQIMHAASYQELLLSSREFQNLVNAHKDIVNFPNDNMVDYNGDKSPFKRETAVVLDGGKESIKNAEFDQLIRREEREIGGTGLKPYLMYLGQNKGYIYATLVAIANIAFTSGQLAQNSWLAANIQNPGVSTFNLVQVYTAIGIGSIMFLLFRALLAVDLGLQTSRSLFSQLLTALFRAPMSFFHSTPIGRILSRVSSDLNVIDLDVPFTLSFSISATLNAYINLGVLCFFTWPILFIAAPIIIMAVRLQRYYSASSKELMRINGTTKSLVANHLAESISGAVTVRAFKQEGRFFARFLELIDNNASPSFHCFAATEWLTQRLEIMATTILSSSAFVITLLPQGTLSPGVAGMVLSYGLSLNMLFLFSIQNQCSLANQIISVERISQYMDIVKYTQDASPVLKGISCTFQGGDKIGIVGRTGSGKTTLINAIFRLVEPSGGKITIDGQDITTMGLHDLRSRIGLIPQDPILFNGSIRYNLDPHGHFSDKQIWEVLGKCQLDEVINEKKGLDSLVVEGGSNWSMGQRQLLCLGRALLRRSRILILDEATASMDNATDAVIQKTVRTELKDSTIITIAHRIPTVMDCTRVLVVNDGEMVEYEEPQKLMQTEGSFFKELLNEYRLQISRAGLQISS

SEQ ID NO: 193627 - protein, 70 aa, Oryza sativa
  Clone ID: PAT_MRT4530_89749C.1.pep
KKQEQRLQHQTQQHWNSKDETGCSSVTGNLNKLQIGAPNIATFQRMSHPPPKTKAKRVHNYLGLHKKFKL

SEQ ID NO: 193628 - protein, 91 aa, Oryza sativa
  Clone ID: PAT_MRT4530_8974C.1.pep
MGSGIDVKGWDFELLPFGSGWQMCPGYSLGLKVIQLTLANLLHAFSWSLPDGVAAGELSMEEIIGLTTPRKIPLLPIVKTRLPDNLYAEPL

SEQ ID NO: 193629 - protein, 56 aa, Oryza sativa
  Clone ID: PAT_MRT4530_89750C.1.pep
LYFSVNRLSLCSYATYEHVFYTAYQLQNMRNLFSGNSTLSGHSTASTCCKPGLACL

SEQ ID NO: 193630 - protein, 137 aa, Oryza sativa
  unsure (1)..(137): unsure at all Xaa locations
  Clone ID: PAT_MRT4530_89751C.1.pep
HTIQVLCTLSRVGSDLEAFSHNPASXAIGVMVFPPAPFVYXLNQRFLSYXIELLLRYXNSXGKTNLSHDGLNPAHVPYXWVNNPTLGEFCFAMIGRADIEGSKSNVATNAWAXQASYPWXGTFLDTSGVKYPPREDR

SEQ ID NO: 193631 - protein, 136 aa, Oryza sativa
  unsure (1)..(136): unsure at all Xaa locations
  Clone ID: PAT_MRT4530_89752C.1.pep
PQTLTDREGAQPVTGNATAAPRLIRQRQRAARIGDRHKPLCNGLWMNHRPTMMIFFGGRNTKPASLXHFDDAPKHCVSMMGHEVVDRXEEARQLRLYQDHFSDNPTYSPVLFRHRFVLSQFNLIYLYYMNRYVCLI

SEQ ID NO: 193632 - protein, 294 aa, Oryza sativa
  Clone ID: PAT_MRT4530_89753C.1.pep
MSDVFLFANRIPNFLRRLFAEGAFSKAFVPVLAEYNADNDLDKTREFIAKVSRTLGLLVTVVTLVAMLISPIIAALFGTGWFIDWFNDGPDAQKFTQASLLLKITFPYLWFITFIALSGAVLNTIGKFGVMAFSPVLLNVAMISMALFGADYFEQPDIALAWGIFLGGLLQFLFQIPFMIKERLLVKPKWAWKDEGVTKVRRLMIPALFGVSVTQINLLLNQVIASFLVTGSITWLYYSDRLIEFPLGLFGIAISTVVLPNLSRITKKKALNEEQRAIAFKQTLDWGVRMVVAL

SEQ ID NO: 193633 - protein, 136 aa, Oryza sativa
  unsure (1)..(136): unsure at all Xaa locations
  Clone ID: PAT_MRT4530_89754C.1.pep
HHSLLTALQTPRLLQTASRGAPLACRTQAQTRSPPAQLAHYRRRTITHGARGATRRHDDPRRCRGGASRRESGAXRRRTRGRRGRGRRRTGRRRRRPPRSDLPAALLPARPRRRPRLPPPTPTCSICLCLCAIARL

SEQ ID NO: 193634 - protein, 100 aa, Oryza sativa
  Clone ID: PAT_MRT4530_89755C.1.pep
NCFFVFQLDTLVFKSRWFFWVKGWDLLSGVFAPKARLGMAIRGFFFFRSWGDFFFCPSDDLGRLFHRRGCFGGILSPIFLKNVSHHCTILKAPLKKRFFH

SEQ ID NO: 193635 - protein, 505 aa, Oryza sativa
  Clone ID: PAT_MRT4530_89756C.1.pep
MANKTLREFAAPSANNVAIRPQVNIGDVDFDLKSSLITIAQASPFCGKPNEDANAHLQQFLEIYSTYTIKGVSPDAVRLRLFLFSLLGRAKQWFYANHAAVNTWDKCSTAFLLKFFPMGKTNALRGRISSFQQTRYESIPEAWERLQETYNGLTPMSRDQLDTAVGGAFFSKTIQGAIDLIEKMVSNMGWSEERLQTRQRGMHTIKETELLAIKLDLLMKRLDDHEKWPQGTIKALDSHVTKPSVDEQFARFVEVIQKIHINMPLLDAMQVPTYTLYLKDILNNKRPLPTTEFDQALCDLGASVSVMPKDVFDKLNFTVLAPTPMRLQLADSSVRNPTGIVENVPVKIRDFSISVDFVVLDMNTGKETPLILGRPFLSTAGANIDMGTGSIRFHINGKEEKFEFQPRTEQCSMPGEIHAKFPGEGNNDAQEPLLENAGKTTHTGQEARAAGSEEAVFRTKAKEGVEGEAKDARSITFGDGWNIHELNQKEVRSCTSEFKRRDLRQ

SEQ ID NO: 193636 - protein, 63 aa, Oryza sativa
  Clone ID: PAT_MRT4530_89757C.1.pep
MAPGALWCWCSEGAQSGMSPSPQDKSADVEFMHGVVDMDQNWSLELPPAGRPVARGSTADDKS

SEQ ID NO: 193637 - protein, 135 aa, Oryza sativa
  Clone ID: PAT_MRT4530_89758C.1.pep
GKKLGGGKISLAPSFSPEKREKKAPGGGGEKPPRGLPPPKRETRGNFGGEPFLTMGPPQKPRSPSKKGTSPIKTRGTKLSPSRFWKNNPPPPPGPGGGTRPPGPPPDGNPPPGNPGNLFPRLWGGRETRASLGPF

SEQ ID NO: 193638 - protein, 135 aa, Oryza sativa
  unsure (1)..(135): unsure at all Xaa locations
  Clone ID: PAT_MRT4530_89759C.1.pep
MEGAVLCAANHAPLTPITFLDRAALVYPDRPAIVASSSGLTRTWRETRDRCLRLAASLAALDVHRHHVVAVFAXNIPVMCELHFGIPMAGAIICTLNSRLDASRRPPPSAPALAWPPHWWGPLTYRGRHWDRVER

SEQ ID NO: 193639 - protein, 201 aa, Oryza sativa
  unsure (1)..(201): unsure at all Xaa locations
  Clone ID: PAT_MRT4530_8975C.1.pep
GEKTKKIFPRKITPPRFKKPNRDFFPPPPRTPRGKGKPGPPLGAPPPCRSRPKGANPGPFFPPKPPPIGGGKKPKKNPGNPGGGPPPRTQGRGPGFFPNNPGPGPXENHIPPPPQKQAGKRPPNQGFPQPKIPPGAPKXPKKKIPGIPLPPFKKRIPPPGPKPPGXFRRPPRGPFLGPPPQTGEHPRAPGPGGPPGRRGGA

SEQ ID NO: 193640 - protein, 92 aa, Oryza sativa
  Clone ID: PAT_MRT4530_89760C.1.pep
CTCVKEGTQEKDAALQMCSSRHNPNCSWLSTPCQETTFHRSDASLQTECFYAKCISHLTEKRPQRLRALTEETESRVQFTPLQIHRATKTGL

SEQ ID NO: 193641 - protein, 430 aa, Oryza sativa
  Clone ID: PAT_MRT4530_89761C.1.pep
MAKEESRKEKKAKTKAASSAAAVPDARRAAVVAAVAAFLESSGFPRALAALQSEANLEAGSWRSSPVSLEELVSGFLEDSSNYAPGASINGSIEHEKTAAVVAEDAGKKKKKKGSDTKVSEAENKVAEPSAVEKPSENADVETKEKKQKKKSKKQENDEDVEARLEKAESAIINKFETVDTLKEDSKNGLVDVAPVEKGKKKKKGKSTPETSDKVDTGSTDAGADCAKGKGDAAEMEKDNNEKKSKKKLKKSKENVEVVENKEVAGKDSAPKSNDENNSGMETEKGENGMPPSDNAVVGKKRKLEEVEGSNLPAKEDNTASQKLSNGSSEDDGAKPNKRQKKSSEPKTVNAFQRVKLEDVKFADDRLQDNSYWAKGGADSGYGAKAQEVLGQVRGRGFRHEKTKKKRGTYRGGQIDLQTHSIKFNDSDDE

SEQ ID NO: 193642 - protein, 81 aa, Oryza sativa
  unsure (1)..(81): unsure at all Xaa locations
  Clone ID: PAT_MRT4530_89762C.1.pep
VITRAREPSRKPELAANRVKSLVPKALRSCXSADAPINRDLDIESTVAGAXSQIHPTRKELRNVYPIEPANNKGRVELQRY

SEQ ID NO: 193643 - protein, 199 aa, Oryza sativa
  Clone ID: PAT_MRT4530_89763C.1.pep
HSLTPTLLPPPPSKPITSSPVPASSGAFSPPPFMEPSTAQGTSVAPVPWQRLGQEPRQRDGRWRARCALQLAAFAGATAAFAAVAYRVRHRPRDIAFLAVTYWLVALLLCLVEKLEALRLDASPPARETELRRVRLGVWAVAVTLGNTVAWRVCDAMPFLALKLGVWGVTLVVLGFAYYFVFRSKAGECHDEEHGHPSS

SEQ ID NO: 193644 - protein, 663 aa, Oryza sativa
  Clone ID: PAT_MRT4530_89764C.1.pep
MAQYRQSGGFFDYRGGHHHALPEYHRPLPHASKPSRIRRPGKPARRRSPAAAAAVASALLLAGVFLLSRRLSRQPAEISQDLGGGGEGLPEWNRSKELKFGHGGGGRSAQDSRYWDRDDRRRDEDYSEDEKEKISGASGNNAGVSDKVVTSDPAVEEKGLTMDTGGAADKEAAEVAEGGKGGTLYNEGGRKELEQYEAAAMGAAGTGIREVDPDDEYDDGIDAQDDLDDAQSHSSDGGRKLGDSSHESTESKENIAHDSTGNKESIALERRTETGAGISDGVDVIDAANVNQKKVSATGDKKHASKKKSKRKKTGSTCEMRFLNSTAQLVEPAKNEKFASFNLEYVEVEDKPLGSEYWEPRFAGHQSLQEREESYLAHDQQLNCAFVKGPNGTSTGFDISEENRKYMSKCHIAVSSCIFGNSDRLKTPFGKTITSLSKKTVCFAMFLDEITLRTLESEGQKMDSSGFIGIWKIILIKNMPYNDMRRVGKIPKFLAHRLFPSSRFSIWLDSKLRLQNDPILILEYFLWRHGYEYAISNHYDRHCVWEEVAQNKKLNKFNHTIIDQQFEFYQADGLTKFNPSDPNKLLPSYVPEGSFIVREHTPMSNLFSCLWFNEVDRFTPRDQLSFAYTYLKLRRMNPEKPFRLNMFKLAAIEHSFNNEEVTI

SEQ ID NO: 193645 - protein, 92 aa, Oryza sativa
  unsure (1)..(92): unsure at all Xaa locations
  Clone ID: PAT_MRT4530_89765C.1.pep
RQKLIKLRNLLDRSQHTPPIKDIHTCLWXLELGGSVRGYYKCTHGTFGLAPSRSCRVCSLAGDEVWWRMPRRCIVRRGRRLVEEVLDGALAW

SEQ ID NO: 193646 - protein, 94 aa, Oryza sativa
  Clone ID: PAT_MRT4530_89766C.1.pep
MARQNGGTRALAAADLVAAGSSGGAGGVLSMTRAYWPTRTMVEMRKTAKRRESGLHTGGGCFDRFFCKITVSLRDHQRECQLGSASTWSCETTS

SEQ ID NO: 193647 - protein, 44 aa, Oryza sativa
  Clone ID: PAT_MRT4530_89767C.1.pep
HVTDGPGERNYLQCLKYSYVNALGSLHTILGYSMEDRMLQAKLS

SEQ ID NO: 193648 - protein, 90 aa, Oryza sativa
  Clone ID: PAT_MRT4530_89768C.1.pep
MTPSPGEATASFVVSSYPSATPSLSLASLGAPSPTSTRAGIILFLIAVVVSSPFQPFGVLGFASRTLAVIRTGLRTSVAKHMLYSHLSDG

SEQ ID NO: 193649 - protein, 109 aa, Oryza sativa
  unsure (1)..(109): unsure at all Xaa locations
  Clone ID: PAT_MRT4530_89769C.1.pep
MSTTIVVPSSSVKNINSFICIEVGGYCQGGIYGYKYNPLRGEGTRHKAXDTTYTQANTRRRISTSYISLDILHSVPTEAGKRDLAPSLISTISYLRRKTXPVVDYELVI

SEQ ID NO: 193650 - protein, 1397 aa, Oryza sativa
  unsure (1)..(1397): unsure at all Xaa locations
  Clone ID: PAT_MRT4530_8976C.1.pep
QSSSSSSSSDRHPRRTHDRRQPTAPSAGCRAFGRSLRDVRWPERFXPGAIEKCDGSTDPEEFLQVYSTVLYAAGADDNALANYLPTALKGSTRSWLMHLXPPYSISSWADLWQQFVANFQGTYKRHAIEDDLHALTQNPGESLKDYVRRFNECRNTIPEITNASIIRAFKSDVRDCYTTQELATRRITTTRRLFKIVDXCAHADDALRRKNDKPKTGGEKKPAKDAPKSSKKKNRKSGKRKAQSEVLATEYADPPKHPDPQGSDTKKAWCPIHKTDKHSLEDCLVFKKSLAKHMASEKGKRVRVVEKDAEAPTQELDPAYPDSDLHVSHIFGGRYPIVVEPTICNIKVARVLIDGGSSINLLFTSALDAMGIPXSELTPTDQPFHGITPXLSSKQLGKITLPMTFGQANNFRMEQITFDVAEFDTAYNAIIGRTALAKFIAASHYAYQVLKMPGPKGTITIQGNAKLAVQCDKRSLDMVENTPSPPTTAEPPKKVSKTNKTPKPDGAIKIVPLSSANPDKTELALITFLRNNADVFAWQPSNMPGVPREVIEHKLMVRPNAKPVKQKLWRFAPDRKQAIREELDKLLKAGFIREVLHLEWQANPVMVRKANGKWRICVDFTDLNKACPKDHFPLPRIDQLVDLTAGCELLNFLDAYSGYDQISIAKEDEEKTAFITPFGVFCYVKMPFGLITAGNTFQRTVQGALSDQLGNNVEAYVDDIVVKTKTSDSLIDDLRETFDNLRRYRLVLNPEKCTFGVPSGKLLGFLVSARGIEANPEKIKAIENMKSPRRLKEVQKLTGCMAALSRFVTRMGERGQPFFVLLKKQDKFVWTQEAKEAFIALKRYLSNPPVLVAPQPNKELFLYIAATPYSVSTVIVIEREKVQRPVYYVSEALHDAKTRYPXIQKLLYAVIMTSRKLRHYFQAHRVTVVSSFPLGEVMRNKDVVGRIAKWVVELSQFDIHFVPRTAIKSQVLVDFVADWTMPDNRSDNQIDNETWTMAFEGALNSQGAGAGFILTSPSGDQFKHAIHLNFRATNNTAEYEGLLAGIRAAAALGVRRLRHXFSGVKPINSTVXTHKAASASTPDYPSHLAVLVLGARYTWAIPTRTRRLQVPIXVAIDKFTKWIEATPTGEIKANNAIKFIKGIFCRFGLPHRIITDNGSQFISADFQDYCIRLRVQIXFASVSHPQSNGQVERANGIVLQGIKTRELPSVLWAVRTTPTTSNKETPFFLVYGSEAILPTELXHQSTRVHKYSDKDQEEQRYDDVNLLEEHRERVAVRAASYQQALRRYHEKRIQARTLSIGDYVLRRVQSQAGRNKLSPKWEGPYTITQVLRPGAFKIPLPLSLVAGHQFPHLLEVLANLRQIARQSIGALVRRRVEARSMFSPLDFLYRVPRRRQS

SEQ ID NO: 193651 - protein, 80 aa, Oryza sativa
  unsure (1)..(80): unsure at all Xaa locations
  Clone ID: PAT_MRT4530_89770C.1.pep
VFGALPEQCLPDPVPPLPPLAPSLPCXPLDPEVPSTTTPDLMPPLSPLILLPLPLSLPSPYPPPPDTAPTPLPLSVAAVV

SEQ ID NO: 193652 - protein, 268 aa, Oryza sativa
  unsure (1)..(268): unsure at all Xaa locations
  Clone ID: PAT_MRT4530_89771C.1.pep
MEFPTMAEPSKVIHIRNVGHEIAEALLQMQDLHNSVSALQYYSTVQPSVRGRNVYMQFSSHQELTTDQNSHGRNSDQESEPNRILLVTIHHMMYPITVEVLHQVFKAYGYVEKIVTFQKSAGFQALIQYQSLQEAMDAFGALXDFTNPSLPTEQRPRASQLHMHTXPSSSLHRFNSRSNPRPNRHCCAPTQMNHISALPQEITEDAILNHVSEHGSVVNTKLFEVNGKRQALIQFESEEEATEALVSKHATSLEGNTIRISFSQMQSI

SEQ ID NO: 193653 - protein, 108 aa, Oryza sativa
  Clone ID: PAT_MRT4530_89772C.1.pep
MVNLSVVQIHSVMDKKENIRNMSVIGHVYHGKSTLTDSLIGAAGIIASAKVGEQRYTDTRQDEQDRCITIKCTGVSLYFELEESKVPAGSNGNALLINLIDFPGHVDF

SEQ ID NO: 193654 - protein, 40 aa, Oryza sativa
  Clone ID: PAT_MRT4530_89773C.1.pep
MAMWDIKNIIQAPHQHMAMIKRGQHIGSGSGLNYKGLTKM

SEQ ID NO: 193655 - protein, 175 aa, Oryza sativa
  Clone ID: PAT_MRT4530_89774C.1.pep
MGREVAESCVDGVVMQMVAAYCGGFYAAKPELAARRIEAIGFQVGHQLTERYTMERPRFSDHLEAIKFICKDFWSELFKKQIDNLKTNHRGTFVLQDNHFRWLTRVSVDPSVESMDATENDSTTLGDSAAQTTSMLLYFPCGIIRGALTNLGISCSVTADMSNLPACSFVVRIKT

SEQ ID NO: 193656 - protein, 132 aa, Oryza sativa
  Clone ID: PAT_MRT4530_89775C.1.pep
MRKEAEVKLSIFEDAKSAFDIAEMAGEARSEVQKTRMAALAAGSRFIYAKRILQALEQAGEVALSLIESLKHKATSVVAATTKSTFMGCGSVPSARGQQDDNDAGEDQKLDSGPLHTHATGPTHAVGPTDQQ

SEQ ID NO: 193657 - protein, 132 aa, Oryza sativa
  unsure (1)..(132): unsure at all Xaa locations
  Clone ID: PAT_MRT4530_89776C.1.pep
MIVFALPLFGLVFCGPATALPNGPGESIMIGKVKGIXNGGKITSSVSCHEYLFPYMVYYCHSVPKIRVYEAEILSVQTKEKINSGVAICHIDTSAWNAGHPAFVALGGKPGQNKVCHWIFNGSMTWVIADKS

SEQ ID NO: 193658 - protein, 114 aa, Oryza sativa
  Clone ID: PAT_MRT4530_89777C.1.pep
MTQDAGDAVLLASRITMDRHLSLVHKFMPEGAVVRAGESRPRPRYPDRSVHLLSFAMAGLIPPFSSFFHEVLDFYRIHALHLASNAMMTLAPLKPPRLRPPATFSFSRNSHVVA

SEQ ID NO: 193659 - protein, 61 aa, Oryza sativa
  Clone ID: PAT_MRT4530_89778C.1.pep
PDRGRFNYRRVSFFLMGTPLEALLIPPPTWWIRFMGEKGPLLVILAIFRAGPVLKTVLKSP

SEQ ID NO: 193660 - protein, 103 aa, Oryza sativa
  Clone ID: PAT_MRT4530_89779C.1.pep
GDGGPARRRARARRQAPQRLHLGRLGGAPEGRRQAVCNGVGGPARRRAGDVERRHGRSLSAGEGGGRSPKAAAKLALPVPGEGRWRDAPRRRAHEKTDAAARR

SEQ ID NO: 193661 - protein, 105 aa, Oryza sativa
  Clone ID: PAT_MRT4530_8977C.1.pep
MEKAEAATRTRVGTSRGIDDGSSKLRASSMTVDTRTQLSSAASTTLAKLRAMLRTVAELRRGGSQGTGYKKVWWITCDGFYLPKTITSDGLSLHAHQRWVTCDGS

SEQ ID NO: 193662 - protein, 46 aa, Oryza sativa
  Clone ID: PAT_MRT4530_89780C.1.pep
WRTAIDGGCSRRLRPSSRPRVVAREACRAYRWRGEAGAAAAAHAGA

SEQ ID NO: 193663 - protein, 558 aa, Oryza sativa
  Clone ID: PAT_MRT4530_89781C.1.pep
GWRRKRGSGLVVRAEMFGQLTTGLESAWNKLRGTDQLTKDNIAEPMRDIRRALLEADVSLPVVRSFIESVTEKAVGTDVIRGVKPEQQLVKTSLRLQGKSCMLIAADVYRPAAIDQLTILGKQVGVPVYSEGTEAKPSQIAKNGIKEAKSKKTDVIIVDTAGRLQVDKAMMSELKEVKRAVNPTEVLLVVDAMTGQEAAFALRLTRISFLIWPALVSTFNVEIGITGAILTKLDGDSRGGAALSIKEVSGKPIKFVGRGERMEDLEPFYPDRMAQRILGMGDVLSFVEKAQEVMRQEDAEELQKKILSAKFNFNDFLKQTQAIAQMGSFSRIIGMIPGMNKVTPAQIREAEKNLKFMESMINVMTPEERERPELLAESRERRIRVAKESGKNERQKMMGAMQGQDTPDMEGLMDSIKAEEQAPKKDKAPPPSSKPAKSGGGKQKKKKWSKGKQKEKVNNSVLFDKATYDKLLSEVPKYKQITPSVLSERLRFSITLEFQQSQVSVPVLNYKVWYLRENWHFVIVKSGYRWNFIPQIGFAKIPLSNGGNTLECYFFLIE

SEQ ID NO: 193664 - protein, 109 aa, Oryza sativa
  Clone ID: PAT_MRT4530_89782C.1.pep
LYKHKPHPREDEAVCGTSRAPPPYPPTRLDTHPSPNPWPPSPPSSPPPSSSSTPPPTTRPTPSFLPPPPTRRMTTTSWSAPTRRPRRISFRSRTSPTPTTMRRSPVSSP

SEQ ID NO: 193665 - protein, 131 aa, Oryza sativa
  Clone ID: PAT_MRT4530_89783C.1.pep
GPGGPGPVFFAKAGPPQKARGGVSFALGPWGGNETWAPFLEQKGFCSFDPILSAGGPPGTPPVVPGKKVPGIGGFKPLALGKTGPKIFSLSRGKTSQKPKKKTAPPMFKKTQWALKGKRTPHLVVKRKKKP

SEQ ID NO: 193666 - protein, 545 aa, Oryza sativa
  Clone ID: PAT_MRT4530_89784C.1.pep
MVFEEMGITFSVEPSCILRENDAYPGGEWLPGAVLNAAANCLTAKPGRSSDDVAIVWRDEGKDSEPLNFVTLEELRKKVCLVANALDALNLAKGSAIAIDMPMNVNAVVIYLAIVLAGYVVVSIADSFAAPAISMRLKISEAKAIFTQDYILRDDKELPLYSRVVEAKAPMTIVIPVRGSTPIKGLRADDLSWEDFLAKVNHAKADNYTAVEQPAYAFTNILFSSGTTGEPKAIPWTHLTPLKSAADGWCHMDIRRGDVVAWPTNLGWMMGPWLVYASLLNGASMALYNGSLNSSGFAKFVQDAKVTMLGLVPSIARSWKSTDCTAGFDWSTIRCFSSSGEASSVDDYLWLMGRVCYKPVIEYCGGTEIGGGFVAGSLLQPQALSAFSTPAMGCNLFILDNNGNPLVLRRHGDEFERTPDGYYRAHGRADDTMNLGGIKVSSIEIERICNRVNDAILETAAIGVPPLGGGPEQLTIAVVFKDQSSQTEDLNQLKLAFNTALKKLNPLFKVSSVVVVPSLPRTASNKVMRRVLRKEFTQQPKHSKI

SEQ ID NO: 193667 - protein, 731 aa, Oryza sativa
  Clone ID: PAT_MRT4530_89785C.1.pep
MGHAAAAAAAAHVPLGAITVDDLLAAGVAGGAAAELHEAVRRAVGARGGDGDAAAVWGELCRAALRPGVPFAVHRMLYYGCFAGFPSATPPAWTPDPEEAVLTNVGRVLEARGREFLGDKYKDPIASFTDFHKFSIENPEAYWKMVFEEMGITFSVEPSCILRENDAYPGGEWLPGAVLNAAANCLTAKPGRSSDDVAIVWRDEGKDSEPLNFVTLEELRKKVCLVANALDALNLAKGSAIAIDMPMNVNAVVIYLAIVLAGYVVVSIADSFAAPAISMRLKISEAKAIFTQDYILRDDKELPLYSRVVEAKAPMTIVIPVRGSTPIKGLRADDLSWEDFLAKVNHAKADNYTAVEQPAYAFTNILFSSGTTGEPKAIPWTHLTPLKSAADGWCHMDIRRGDVVAWPTNLGWMMGPWLVYASLLNGASMALYNGSLNSSGFAKFVQDAKVTMLGLVPSIARSWKSTDCTAGFDWSTIRCFSSSGEASSVDDYLWLMGRVCYKPVIEYCGGTEIGGGFVAGSLLQPQALSAFSTPAMGCNLFILDNNGNPLPQDSVGTGELALDPTFLGASTTLLNADHHEVYFSGMPEWNGKVLRRHGDEFERTPDGYYRAHGRADDTMNLGGIKVSSIEIERICNRVNDAILETAAIGVPPLGGGPEQLTIAVVFKDQSSQTEDLNQLKLAFNTALKKLNPLFKVSSVVVVPSLPRTASNKVMRRVLRKEFTQQPKHSKI

SEQ ID NO: 193668 - protein, 50 aa, Oryza sativa
  Clone ID: PAT_MRT4530_89786C.1.pep
MRRSDEGGQSLYEGYVTNTGAQTDEIVDMLSEPTYIFHLHQHSSYMENVK

SEQ ID NO: 193669 - protein, 69 aa, Oryza sativa
  Clone ID: PAT_MRT4530_89787C.1.pep
MSSCGGVLGGGADDLIEFGRNLARSGHDLGKRRACAVEFVAVAQTNSPDLDAGSSNPDGGQCSRHGPRR

SEQ ID NO: 193670 - protein, 73 aa, Oryza sativa
  unsure (1)..(73): unsure at all Xaa locations
  Clone ID: PAT_MRT4530_89788C.1.pep
SVRGCDTRHEYIDTRRFPLELLSALSLSTLALNGTCPLFSLRRRGLFIYHPVGFIGIMXWINPRETXILLADS

SEQ ID NO: 193671 - protein, 83 aa, Oryza sativa
  Clone ID: PAT_MRT4530_89789C.1.pep
ALKKSTTVFWGYPILKLGKSPSTEKKNFAVGSHVLGRGDSGLFGRNWGPVGCFFFVKLLSTTYTVHNWLFSVVPVFQSKTDQR

SEQ ID NO: 193672 - protein, 715 aa, Oryza sativa
  Clone ID: PAT_MRT4530_8978C.1.pep
MEPRSPRRFPSPPAALSHSQHYINAPRASLLRFRRSPLSLPVGIELAPSSSLSAIAAELRSAAVVAPDLLPLRHRLLRLRRVLADLVHPFVSPADRRNAAVLVDPSRAAASLRFGRRSRRRRRPGVSRGPPFRFPLPSPLSGAAPSRRWSPAATIGARAHRLPSAVPARPPSGAPRGCHVGPGRQPPTPSGAADAWDPRRRPAQAACTRSTVDREADAWAPLPWTRANEGYTSCGPVVEMSWHRAGVLLLGAQSCLPVPEVPAVGGVGSALLFMARMGWELCDVFRPYAVVMDNTGNKGYVNDGSDDSRTQANGNEKSINETSPELIQIVVNQTNMLATAFQLLQNWNNPAGATNVQVPTVQQQCKLSEFLKTKPPTFAIAVDPMEASDWLRTVEKKLGLIQCTDQERVVFATHQLVGPASEWWDSYEASRPEGHTITWDEFSAVLKRSHVPAGMITLRKREFRYLKQEDLTVTEYLHEFHRLAHYGLKDEIAVQLLLEEYEDFEKLVDKTIQLESEHNRMKNCKRRIVSIPTFPCGNQRQRTEPLQITGSSIAHQEFLPQEDGHNADNNISNTNDDDTTNNHASCPISDHSNQACNVNIIHQGVDDSINDGTQNDNPRNCDSNYGTTDANVSKDFQPPIPTPSQNDRPQTDSSIKKTLICYNCKEPGHDLRDCLQPRQSRPPHYRQFTRSRHPNRIVVTGANAIPVRPRVNHNP

SEQ ID NO: 193673 - protein, 72 aa, Oryza sativa
  Clone ID: PAT_MRT4530_89790C.1.pep
DFSLFFHSLFYYFMFTHSFPLHIYGTFRGRAPSQEARGQLNGPNVNPWHIFRQGGDSQSTPERLQSFEPIRR

SEQ ID NO: 193674 - protein, 195 aa, Oryza sativa
  Clone ID: PAT_MRT4530_89791C.1.pep
MASSSGTREVLMLEAPPAPSGAPWRAPPDAEAVDALPYIDGDYGDPAVKREVDRMVEEEMRRGSRKPADFLRDLPPVPAIGFENHPMLAKEYERVRAGKPPATIEMSRYGLEPPPANKRNDVAAWRQALRNAQSQLHHQIIRIENLELMLKYGVEVWKLQNRQMESVLSRMQKMAVEYNEKIETVNRERKFHQFY

SEQ ID NO: 193675 - protein, 127 aa, Oryza sativa
  unsure (1)..(127): unsure at all Xaa locations
  Clone ID: PAT_MRT4530_89792C.1.pep
MERLSSSVQSWVEEHKLASIGGLWATAVGASVAYGRRKTPQMRXSTPGFTRRPSPSPSSVEPPLRTTTTTHHPTPTTAAAWTTTSTRSXAGHHRRRPGEREVELVVLPFLPAARCRQMKMMTITMIN

SEQ ID NO: 193676 - protein, 71 aa, Oryza sativa
  Clone ID: PAT_MRT4530_89793C.1.pep
ERNSIALGLLFLPYKFCSSKSLSKFFGESLGLLRALIRERLQIFVLEQGESLFEIFCLTRFALRRIAHIFC

SEQ ID NO: 193677 - protein, 426 aa, Oryza sativa
  Clone ID: PAT_MRT4530_89794C.1.pep
MNGGIGDALMQPQHVQVMSSSLPMVASTFVAEPAAAANKPRAAGLPPTPPQVFAAQRAAAAAGGDVCMEESAQGGGGGLPPRKAHRRSSSDVPFGYLAGQHQLLPPKVEAGWGHLGAGAGGAAAADDLFNAYLNLEGLDGLNSSDDRHDEGDSRGSSIKTNGADSSENESEECADDTRGGIRLWSADGGERREGVKRNAAGEPATAPLARHARSLSMDSLIGKFNFTAGTAAAAGNGVALGPNRFSLEFGSGEFTPSEMKKIMADEKLAEMALADPKRVKRVLANRQSAARSKERKMRYIAELEQKVQILQSEATNLSAQLTMMQRDSAGLATQNNELKFRLHAMEQQAQLRDALNEALTTEVQRLKLATAELGDSCSSSSLAQQIQLNAQNQMFQLQQQQATQIPFYQLQQSQQNGAAKNNESKE

SEQ ID NO: 193678 - protein, 134 aa, Oryza sativa
  unsure (1)..(134): unsure at all Xaa locations
  Clone ID: PAT_MRT4530_89795C.1.pep
RSGRGMREGXMRDADRKRSEHAXGAGIXPMASRRAVCXLSSVNNLAFHMLDPAPPQDRSTNLHCTHVVVNKKHHAGEKRRKKIGSLLLGSGERERPIDDGGRTGARQQLQGDRERGYRIITGEKKEEFLVFGVH

SEQ ID NO: 193679 - protein, 46 aa, Oryza sativa
  Clone ID: PAT_MRT4530_89796C.1.pep
PVCDRPINEGMTGLPPVSGGGWRWVPLKGELRLGFQAKARIVFWSR

SEQ ID NO: 193680 - protein, 309 aa, Oryza sativa
  Clone ID: PAT_MRT4530_89797C.1.pep
MAHSHSAASLHAARLLPQQRTPTAPRTLLPAGGGLLLRRPHPPLHQQRRSRSSSRPDLRCRRRLLTARGDYDFYENYADEEGDEEEESEVIGGSFDAAVALFNGGEFHACHDVVEELWYTAEEPTRTLLHAILQCAVAFHHLFNQVYIFIVSFPHLTMHSKLVITPVKFVIRHDRAQTQNHRGAMMELGEGLCKLRKLRLDDDTTSPFSRFQEEVAAALNFIYRTQKELAACTDDLCLTMDGSATSYQLLGNFAAGQKLYRLETTTSADGDGVPTIIFSASSRLVRVKLPTLSATEHHLAALQCTSEYI

SEQ ID NO: 193681 - protein, 188 aa, Oryza sativa
  unsure (1)..(188): unsure at all Xaa locations
  Clone ID: PAT_MRT4530_89798C.1.pep
PQESRRPRQPQAPPPRGAHQPTXPQAPARRRPGGKESGNQRPPGNSKDHXXPKPXNGPPKGNPGRPQGPARKTRGPPQGPRNPPTKKPPPEPRAPARPPHRPGKKQGGTPGRTPASQMGNPPRARRQGAGKSRQAPPPPPFTWKMKKGGAKKWGGAPTDPKKKKKKKPPKKKKKKKKKKKKKRKNKHP

SEQ ID NO: 193682 - protein, 160 aa, Oryza sativa
  Clone ID: PAT_MRT4530_89799C.1.pep
MAITVEWNGREGARFTERPGGDALKIEDIRMEDGEPSKTKGAKGRSGVRHWGLAKDDHGTTRIHGLGPSRDVELLHWPISQALRERRTSSGCPLLRYTKRVWTLLASWVAYQQLDPSQWEPCLSVQGWWEMLANKREVPKKGLRSLILLVVWEIWKERNQ

SEQ ID NO: 193683 - protein, 836 aa, Oryza sativa
  Clone ID: PAT_MRT4530_8979C.1.pep
MAEQGKTHDLSPSVSGDDGEPNPRRRARTPPPPPRQSPKQGEALERVDKSAASPAAGDAGERRDGERRLLVYGDGSTPQGALQAAGALLRHPPVVHDPESPAQRWLEDVANLVMTAQQRLGAGGRSATTTKTSGAATTGSVSSRRRARRAAAAARHSAATPSSTPPTREDQHGEPDARLDIERRRNNRRTPRATEGASSSGVSPRHGREDQPSVPPAGGVGCRAFVASLRNVRWPPRFRPTITEKYDGSVNPTEFLQVYTTGIEAAGGDDRVMANFFPMALKGQARGWLMNLPPASVHSWEDLCQQFTMNFQGTYPRPGEEADLHAVQRGDDESLRSYIQRFCQVRNTIPCIPAHAVIYAFRGACGTTACSKRSLPKSPRPPRSFFSSRTEWLVRRKRGHGTPPVPEWQLRPPPDPPLRQGGVTGGGRRGRSIPATRVMSSPSRALRGPPERGGLRATKRKRPTLPDLGYLEERRRRAALRAARYQQSLRRYHQRHVRARSLCVDDLVLRRVQTRAGLSKLSPMWEGPYRVIGVPRPGSVRLATGDGTELPNPWNIEHLRRFYPYLYKKGARRPRKKKEKAIQDWRGPGGSLRRARVTSLVVAVVRTTVAALLVGVEGEREPRGRTLEAVDDVVGGVPDLRACAVLGSERELFQRRPRGEVRVREAPKPNGGPRPPTAGVGPPPACPTVSGAPDPQDSLGATAGRPRLSPSYPEDIGAEAEGAPRCLSDEERPGDAAPSEEDRPRRKVQRPVYFVSEALRDAKTRYPRAQKMLYAILMAPRKAPSPYLQAKQIGSPRFVRCSDRSHLSPGFRSGVTPDRFPWEGKLLWHNAGGYCR

SEQ ID NO: 193684 - protein, 111 aa, Oryza sativa
  unsure (1)..(111): unsure at all Xaa locations
  Clone ID: PAT_MRT4530_897C.1.pep
KELKLPKCVLLNNFVAACIIVKLPSSWRNFSIMSXTRDRRQEYSIEWLILDSIMSLNVEEKAXGKDVVSKGDGRXSSANVMHKAQNKNKEKFFKVQQTTDFKKKKKKNNPN

SEQ ID NO: 193685 - protein, 58 aa, Oryza sativa
  unsure (1)..(58): unsure at all Xaa locations
  Clone ID: PAT_MRT4530_89800C.1.pep
ILXKKKKKKKKKKKKKKKKKKKKKKKKXKKKKKKFFFRWGGIQNFPVFKKKFFFYRAP

SEQ ID NO: 193686 - protein, 960 aa, Oryza sativa
  unsure (1)..(960): unsure at all Xaa locations
  Clone ID: PAT_MRT4530_89801C.1.pep
MPLFDRDRYQRLDGNGGGGGGGRRSSPSSCSTATIVLFVALCLVGAWMMSSTGNVPMAVSPEDKPPAVVKEDDASSIDVTDGVKGRGGGGDGGDTPRTTDEAADDVGKKVQDAGDTAKTTDDVGDTGVKGGGVDTQTATDAVAKTTTGGTGAGESGKPAGDKVGDGETTTTSKNQTFSDENGKTEGGEVVSPEDPDKQSADDAPTDGKDTGDQASGDADEAPSTDTKGKKNSTAEEPRDTKDAGENADEASTETKADKSSDDTPTDAKATGDGGTPSKNQTSFDDENGKMDGVETVAEDGKVTEKSSEQVPTNGDDGGGGGEAQTTDDDTATGASSNNQTISDMNDDSNTTTTTTTTLAAVDSSNGTVSQTTEDDAPANSAAAAAAATEKINPAAEQELLPSGQAELLNETASAVAQNGSFPTQASESSAEKKARDRNKNKSNGSDTAAAAAVAVAHGWKLCNVSTGEDYIPCLDNEAAIKKLKTTKHYEHRERHCPAAAPTCLVPLPGGYRRPIPWPYSRDKIWYHNVPHTKLASYKGHQNWVKVSGEHLTFPGGGTQFINGAAHYIDLIEEAVPAVAWGRRSRVVLDVGCGVASFGGFLFDRDALTMSLAPKDEHEAQVQFALERGIPAISAVMGTKRLPFPGGXYDAVHCARCRVPWHIWGGKLLLETWXALTKSMCWKMVKKTNDTVDETAMVIFKKPTSNGCYSNREKPEPPLCDADDDPNAAWNITLRACMHRLPTNKSVRGARWPELWPERMSAAPYWLSHSQVGVYGKPAPDDFAADEEHWNHVVNSSYLAGVGIDWSNVRNVMDMRAVYGGFAAALKDMNVWVMNVVPVDSADTLPIIYERGLFGMYHDWCESFSTYPRSYDLLHADHLFSKLKKRCKLLPVMVEVDRILRPEGKLIVRDGRDTAAEVESILRSLHWEVRMTVSKQGEVMLCAEKTMWRPKEVEKAATTAS

SEQ ID NO: 193687 - protein, 194 aa, Oryza sativa
  Clone ID: PAT_MRT4530_89802C.1.pep
MATSAERPGPHRREGQRQADASRLRQGTVKGCSRIARARGTRRDCEEGEGAVVPFPESSESVVGWRKVRPAGLRGYGMWHWGHVVNSSYLAGVSIDWSNVRNVMDKLAVYGGFAAALKDMNVWVMNVVSVDSPDTLPIIYERGLFGMYHDWCESFSTYPRSYDLLHADHFFSKLKKRCKLLPVMVEVDRRCSSS

SEQ ID NO: 193688 - protein, 100 aa, Oryza sativa
  Clone ID: PAT_MRT4530_89803C.1.pep
MAPDDQSYAAAASQTELTGDYYAAQLELPAIDQQLPQSSSSSSSSPLGLYCPTTTTAASEKHSGIAAAAAAAVVAAAAAMLAIEGGCGCGTGPGPAGAVV

SEQ ID NO: 193689 - protein, 990 aa, Oryza sativa
  Clone ID: PAT_MRT4530_89804C.1.pep
MPLFDRDRYQRLDGNGGGGGGGRRSSPSSCSTATIVLFVALCLVGAWMMSSTGNVPMAVSPEDKPPAVVKEDDASSIDVTDGVKGRGGGGDGGDTPRTTDEAADDVGKKVQDAGDTAKTTDDVGDTGVKGGGVDTQTATDAVAKTTTGGTGAGESGKPAGDKVGDGETTTTSKNQTFSDENGKTEGGEVVSPEDPDKQSADDAPTDGKDTGDQASGDADEAPSTDTKGKKNSTAEEPRDTKDAGENADEASTETKADKSSDDTPTDAKATGDGGTPSKNQTSFDDENGKMDGVETVAEDGKVTEKSSEQVPTNGDDGGGGGEAQTTDDDTATGASSNNQTISDMNDDSNTTTTTTTTLAAVDSSNGTVSQTTEDDAPANSAAAAAAATEKINPAAEQELLPSGQAELLNETASAVAQNGSFPTQASESSAEKKARDRNKNKSNGSDTAAAAAVAVAHGWKLCNVSTGEDYIPCLDNEAAIKKLKTTKHYEHRERHCPAAAPTCLVPLPGGYRRPIPWPYSRDKIWYHNVPHTKLASYKGHQNWVKVSGEHLTFPGGGTQFINGAAHYIDLIEEAVPAVAWGRRSRVVLDVGCGVASFGGFLFDRDALTMSLAPKDEHEAQVQFALERGIPAISAVMGTKRLPFPGGAYDAVHCARCRVPWHIWGGKLLLEVNRLLRPGGLFVWSATPVYRKTPEDVQIWHDMAALTKSMCWKMVKKTNDTVDETAMVIFKKPTSNGCYSNREKPEPPLCDADDDPNAAWNITLRACMHRLPTNKSVRGARWPELWPERMSAAPYWLSHSQVGVYGKPAPDDFAADEEHWNHVVNSSYLAGVGIDWSNVRNVMDMRAVYGGFAAALKDMNVWVMNVVPVDSADTLPIIYERGLFGMYHDWCESFSTYPRSYDLLHADHLFSKLKKRCKLLPVMVEVDRILRPEGKLIVRDGRDTAAEVESILRSLHWEVRMTVSKQGEVMLCAEKTMWRPKEVEKAATTAS

SEQ ID NO: 193690 - protein, 310 aa, Oryza sativa
  Clone ID: PAT_MRT4530_89805C.1.pep
MAFLVERCGEMVVSMEMGPHGGGGAAAGKPVPAPFLTKTYQLVDDPCTDHIVSWGEDDTTFVVWRPPEFARDLLPNYFKHNNFSSFVRQLNTYGFRKIVADRWEFANEFFRKGAKHLLAEIHRRKSSQPPPPPMPHQPYHHHHHLNPFSLPPPPPAYHHHHLIQEEPATTAHCTVAGDGGEGGDFLAALSEDNRQLRRRNSLLLSELAHMKKLYNDIIYFLQNHVAPVTTTTTTPSSTAMAAAQHHLPAAASCRLMELDSPDHSPPPPPPKTPATDGGDTVKLFGVSLHGRKKRAHRDDDDGVHDQGSEV

SEQ ID NO: 193691 - protein, 343 aa, Oryza sativa
  Clone ID: PAT_MRT4530_89806C.1.pep
MKRGCEDELGAGDVILRGVEEVEEEDDDDLVLPGFRFHPTDEELVTFYLRRKIAEKRLSIEIIKEMDIYKHDPSDFLKTSTVGSEKEWYFFCLRGRKYRNSIRPNRVTGSGFWKATGIDRPICSAAGGGGGDCIGLKKSLVYYRGSAGKGTKTDWMMHEFRLPPPPADDLAAGRSSPPPSLQEAEVWTICRIFQRNITHKKQPQPQLAVAAAAVPAPVPDATSSITGSLESDSAGDDVVEYMNTLQPPPASNVNGGYSNQRYFQEQWNSSSNDNTTVFHQHAAAAPPPEPSPATAMAGFGHDQSVLSSPAPSDFYYKDGCNDDIYRMVMELADPSLFYDHIYA

SEQ ID NO: 193692 - protein, 157 aa, Oryza sativa
  Clone ID: PAT_MRT4530_89807C.1.pep
MKGSRMRWVKAFTPRSPSFLFMVSLRKRIHNTDLAIMPVVAARKAARQACVTRAPILPDLRIHLPQGVCLCGNVRLLYPQGADIPFLAAIPWDSAIIEGMGLSMSLCPSLPAAGLSIRRPPPSPPDTRISLRQRHDLRPPLTPPNACRIQGPLHCPQ

SEQ ID NO: 193693 - protein, 206 aa, Oryza sativa
  Clone ID: PAT_MRT4530_89808C.1.pep
MARSCSSSGSDHSSYDLALTLRRKLLLLDILAVLRFLAAALLERLGVVSCQEDNELPGCHSWCDSDVVDTGAMERLMQAKLSTSWYRLRRRASRGGSDNMASPHGDTSADICTICLAELEAGGGGGGCQRQVAELSSCSHAFHAACIDGWVVEAGTCPLCRTPEYIFIASTIMPVGNFPCSSCNLDDLQNLYSGNDSWSVHQLGIH

SEQ ID NO: 193694 - protein, 1733 aa, Oryza sativa
  unsure (1)..(1733): unsure at all Xaa locations
  Clone ID: PAT_MRT4530_89809C.1.pep
EPPPDAEESAGPVRVGEDAGAPAVGGRNGGADEVDDDAAKPMEVTPRREEMNLSGRDMPQAASSQPTTTSTAFAVAPVNTNPEAQAEANMEAMRQNMTRLQDVLRXVQEQQQAYEAARQAKVASPPILXYSAGYVPPQVYPLAPIQPLPAQAVQVPVYFAGQPSTAAVHPTSHSLQAQPAVVQAHSXLPGQVSQAMAEGASALQVQLQAFLQQLSQPHSISGTAPSAQPEGNSSQGAPSWLPSNQPGPGASPWSQGPQFDFLNAAPAPTARPQAPTPGFGANQTPNQATMVWPQPAFDLSTMAHQAPPIGAGQSNATARPHAQAATSPFATPYPQQGAVNRAGGEKGLPLSGGIKTRPIPPQFKFPPVPRYIGETDPKEFLSIYESTIEAAHGDENTKAKVIHLALDSIARSWYFNLPANSIYSWEQLRNVFVLNFRDTYGEQHLLGICQTPGESIREYMRRFSQARCQVQDITEVSVINATSVGLLEGKLTRKIDEPPPLAVRQPQTAIQGQPPRQSQAPMTWRKFRTDRSGKAVAATRWAXWQSKKFDAXQASNHQQPVRKKYLNQQISFGSEDAEGVLIPHQYPLVISAEVAGFEVRRILVDRGSSANVIFADAYAKMGLPTLALTQAPASLRGFGGKAVKVSGQVQLAVAFGTNENRREEQILFDVVDIPYSYNAIFGRATLSKFEAISHHNYLKLKMPGPTGVIVVKGLQPSATSKGDLAEINIAVHNVEAEPHNHAKHMPKPAPHGKVIKKQIDDADPTKLVLLGGDLGEEEAENILEVLRRNIDIFAWSPDEMGGVSTDLIMHHLAVKPDAKPRKXKLRKMSADCQEAAKAKVQKLLSAGVIQEIDHPKWLANPVLVRKSNGKWNMCVDFTDLNKVCPKDDFPFPRIDQLVDSTAGCELMSFLDAYSVYHQIHMNPADILKTAFITPFGTFCLLRMPFDLRNAGATFARLVYKVLCKQLGRNVEDYVDDIVVKSHKAFDHAFDMQETFDNLRAAGIKLNPEKCVFGVRTGKLLGFLAAERGLLFFKTLRGVGKFSWTPKCQEAFDELEQYLQRPPALVSPTLGSERLLYLAASLVAVSAALIQETEXSQKQVYFFSEALQAAKIRYIQMEKLVYALVMASRKLKHYFYALVTVPSQYPLGEVLCGKKITGQLSKWAAELSPFDLHFVARTAIKSQVLADFVAEWTPAFAPEPEPVEQPWVMHSDGSWSHKGAGAAAVLTSPRGAPIRYAARLQFDMTNNTAEYEXMLLGLRMAKALGVRRLLIRTDSKLVASHVNKSFEAKEEGMKRYLEAVQSMEQCFAGITVEHLPRGQNEEADTLAKSATCGGPHSPGIFFEVLYAPSVPTESLDIMAINQAELGEDLEDWQTPFVKYLRNGWLPEEEAEAKRLQLRATRCKLVSGQLYHSGVLQPLLRCISFAEGEEMAKEIHQGLCGAHQAARTVASKVFCQGVYWPTVLKVCVEQAKKCESCQRHGRSQTAPQYELQPIALIWPFARWGLDIIGPFPVARNGYKFTIVAIEYFSRXIEAEPLGAITSAAVQKFVWKNIVCRFGVPKEFITDNGKQFDSDKFREMCEGLNLEIRFASVAHSQSNGAAEHTNGKILEAVKKRLEGAAKGKWPDEMLSVLWALRTTPTRPTKFSLFMLLYGDEAMTPTELGANSPRVMFSGGEDGRTVSLELLEAVRVEALEHIRKYATGTSATCNKKVRPTXAIAWPSCSKEEGEPGGSREA

SEQ ID NO: 193695 - protein, 39 aa, Oryza sativa
  Clone ID: PAT_MRT4530_8980C.1.pep
PCSKCTKIFVPSYHLVILLNKNNPQNGRPNLGVNSKPLK

SEQ ID NO: 193696 - protein, 296 aa, Oryza sativa
  Clone ID: PAT_MRT4530_89810C.1.pep
WGAFTISLGFFAGLDGDELLEEEERQVVIGDEHVAADVRHHVQRAVAAEHRVVVCVSAAADHLRRPHHLQQTTREHPLVNITGKNLSPRHSPARSTAATNSSTGLRGDGCVADGCSPGCGGSSWTDDGGAPLLSSRDEGSAQPAQPAVGLGSSPAARSRLRARPPPASAPIPPSAAISATGRPSASIPRPPAVRSHPRRRPPVGVCSSSSQISTARLGFGGGGAWRGLRRRRAVRASAAAAGRAVVTTRRCSCDSDAQVLLLHGGTATTDRKNDVMGDEEKGGGWWPQERRAANIS

SEQ ID NO: 193697 - protein, 294 aa, Oryza sativa
  unsure (1)..(294): unsure at all Xaa locations
  Clone ID: PAT_MRT4530_89811C.1.pep
MVGPTYQPSRRRQAVGSAGGRRRGDGRWAAARGVEPIVSAHGGARGWPVGSGAREWADRRRTRRRAGRGSGGGLGRGGNGSGMRGRRGASSAHGGGHGGEAGAGLHLRWPSPTARSAFASSTGAKPRSLAATSAAAFLPPQRRTPRQPPATPPVAGRPSSPRTPPRPPRLSLAARXPAPHPPRRPPPCPPALRPRPLCPPPASRLLPGPGRLSPLPPAQPAALGSSPRPAXPGPPPHPPPPPPPCPPXPASAPCPPPXPPLPGPPTSPLHPPAAALAPRPPPASAPRPPAASAR

SEQ ID NO: 193698 - protein, 64 aa, Oryza sativa
  Clone ID: PAT_MRT4530_89812C.1.pep
METTVNSCGTRLRWKGIMSGAFPFMAASDTLGITDIQGGTMASDGGKLLPRHCKRGDLTVPLSP

SEQ ID NO: 193699 - protein, 52 aa, Oryza sativa
  Clone ID: PAT_MRT4530_89813C.1.pep
CCTGSLQSADCDHVGHRLSDSHRQALTLATNKESLLRFLILDKVITLRDSET

SEQ ID NO: 193700 - protein, 38 aa, Oryza sativa
  Clone ID: PAT_MRT4530_89814C.1.pep
SVTRNRNNSESKRRARIITRDTHSTIDTYHTNNSIDRA

SEQ ID NO: 193701 - protein, 299 aa, Oryza sativa
  Clone ID: PAT_MRT4530_89815C.1.pep
MAAQVVAEQCGSQAGGALCPNCLCCSSYGWCGSTSDYCGDGCQSQCDGCGGGGGGGGGGGGGGGGGGGAVEAVVSKELFEQLLLHRNDAACPARGFYTYDALVTAAAAFPDFAATGDDEARKREVAAFLGQTSHETTGGWATAPDGPYSWGYCFKEEIGATASYCVPSADNYNYGPAGEAIGEDLLNNPELVASDPVVSFKTALWFWMTPQSPKPSCHDVITGQWTPSSGDIAAGRVPGYGVITNIINGGLECGFGPDDRVANRIGFYQRYCDVLGIGYGSNLDCYDQRPFNSGLTAAQ

SEQ ID NO: 193702 - protein, 298 aa, Oryza sativa
  Clone ID: PAT_MRT4530_89816C.1.pep
MAAQVVAEQCGSQAGGALCPNCLCCSSYGWCGSTSDYCGDGCQSQCDGCGGGGGGGGGGGGGGGGGGGAVEAVVSKELFEQLLLHRNDAACPARGFYTYDALVTAAAAFPDFAATGDDEARKREVAAFLGQTSHETTGGWATAPDGPYSWGYCFKEEIGATASYCVPSAEWPCAPDKKYFGRGPIQLSYNYNYGPAGEAIGEDLLNNPELSPKPSCHDVITGQWTPSSGDIAAGRVPGYGVITNIINGGLECGFGPDDRVANRIGFYQRYCDVLGIGYGSNLDCYDQRPFNSGLTAAQ

SEQ ID NO: 193703 - protein, 333 aa, Oryza sativa
  Clone ID: PAT_MRT4530_89817C.1.pep
MKATTTAVALLVAAAAMVAQVVAEQCGSQAGGALCPNCLCCSSYGWCGSTSDYCGDGCQSQCDGCGGGGGGGGGGGGGGGGGGAVEAVVSKELFEQLLLHRNDAACPARGFYTYDAFVTAAAAFPDFAATGDDEARKREVAAFLGQTSHETTGGWATAPDGPYSWGYCFKEEIAAAASYCVASAEWPCAPDKKYFGRGPIQLSYNYNYGPAGEAIGEDLLNNPELVASDPVVSFKTALWFWMTPQSPKPSCHDVITGQWTPSSGDIAAGRVPGYGVITNIINGGLECGFGPDDRVANRIGFYQRYCDVLGIGYGSNLDCYDQRPFNSGLAAVQ

SEQ ID NO: 193704 - protein, 473 aa, Oryza sativa
  unsure (1)..(473): unsure at all Xaa locations
  Clone ID: PAT_MRT4530_89818C.1.pep
MAGGGGGGGGAAPAPKHDELTPHPVKDQLPGVSYCITSPPPWPEAILLGFQHYLVMLGTTVIIPTALXVPQMGGNNEDKAVVIQTLLFVAGINTLLQSFFGTRLPAVIGGSYTFVVPTISIILAGRYANEPNPXTKFLRIXRGTQGALIVASALQIIFHCRTDRSGIIGGAPWIRVPYPFQWGAPTFDAGEAFAMMAASFVALVESTGAFIAVSRYASATPLPPSVLSRGIGWQGIGILLDGLFGTGNGSSVSVENAGLLALTRVGSRRVVQISAGFMIFFSILGKFGAVFASIPPPIFAALYCIFFAYVGSAGVGFLQFCNLNSFRTKFILGFSVFMGLSVPQYFNEYTSVAGYGPVHTHSRWFNDIVNVIFSSKAFVAGFVAYLLDNTIHRHDSSVRKDRGHAWWDKFRSYRTDTRSEEFYSLPFNSFRTLVHPRVLSFYGPFCSSVLQPSTHLLLVMVLFIHTQDGSMTS

SEQ ID NO: 193705 - protein, 82 aa, Oryza sativa
  Clone ID: PAT_MRT4530_89819C.1.pep
MSRATALGDAPRRGGGAAQVRARRAAGGSGGAGEDDGAVGGNGVPRCLRAHRWDQDTHDEVVALLKAHRAARPLRMSGPFPA

SEQ ID NO: 193706 - protein, 224 aa, Oryza sativa
  unsure (1)..(224): unsure at all Xaa locations
  Clone ID: PAT_MRT4530_8981C.1.pep
TEYTETVHGSTEADPVCQPRRVADKRTPLDTTRPAHVXKPRGYRAGTLTRTLPXSPPAHVNDYRHRYTGTGVDNRTTGTGRHXRTRTRQREERSLPPRDEAWERQRRTGAAETXRRGNDFGEDPWTKARRGRRNDWRHGGEDEDDDGAAAAHLTDADDGQERLDGGTNATTTGNDERTTTTTTGTGEEATRAAGSGCTETRTARTTPLRCRRRRRRRETTSRRE

SEQ ID NO: 193707 - protein, 232 aa, Oryza sativa
  unsure (1)..(232): unsure at all Xaa locations
  Clone ID: PAT_MRT4530_89820C.1.pep
TFVVPTISIILAGRYANEPNPHTKFLRIMRGTQGALIVASALQIIFGFSGLWRNVARYLSPLSAAPLVMLVGFGLYELGFPSVAKCVEIGLPELILLVIFAMYLPHAIHMMKSIFDRFAVLFTIPIVWLYAYLLTVGGAYRNAPPKTQFHCRTDRSGIIGGAPWIRVPYPFQWGAPTFDAGEAFAMMAASFVALVESTGAFXAVSRYASATPLHPLYLAVEFGWQGIGIFVG

SEQ ID NO: 193708 - protein, 114 aa, Oryza sativa
  Clone ID: PAT_MRT4530_89821C.1.pep
RNTLIPPLASLPQLFSNRSPWRLSPESATRLRALLPPLIGGKRARPRAPEPQKRGCGDAITRTARTCWHASMSRICNDARIIPSHIHIHIHGRRCLFGACILTRGSSFMRLSAP

SEQ ID NO: 193709 - protein, 114 aa, Oryza sativa
  Clone ID: PAT_MRT4530_89822C.1.pep
ERVIAKASKTRLFRWAPIQCDWHPCKKSPAGREEDLETEARGELCHCRGRGDMMQLHTKEHQGMLATARSQQGARTDFPQSARGMKALLTPQIQTSSFPLVQRCPVCGNLFFQP

SEQ ID NO: 193710 - protein, 328 aa, Oryza sativa
  Clone ID: PAT_MRT4530_89823C.1.pep
MFNRPGFTDLELPQLCEVFTVKGGTGQGHAHWRGKQSRQFFVEMQKANSGVVVNGVVYFLMDALYDAMIISGLGAGIHPDFIFSFDLETEEWREDIQGPISSSFVFDGDFDPQEYFSIWHQLCLAELKGYLVHHQRFCSTMDLWFLTDYETRAWVKEYSIQTESFIPVLEYDVKPLLVLDDGRILIWLGSTGLLLIYDPRTSSFAEVKMRHLAEVGIPISTGYFRYLEIRFRAVQWTSIAHLDNLIFYEFRKIAAEFAIKDICGLSYFLSIEANKLSGDELMLAQINEKRYLIDLPHRTDIRLSEAILDYCWCWCATILDDDRVFTIT

SEQ ID NO: 193711 - protein, 47 aa, Oryza sativa
  Clone ID: PAT_MRT4530_89824C.1.pep
ADASIVIAWTPGIAAMRDTTAIIPSSYGLDIVHNANVVLTNYFSHIV

SEQ ID NO: 193712 - protein, 102 aa, Oryza sativa
  Clone ID: PAT_MRT4530_89825C.1.pep
MGEDLWCRRPNDPLMGRVIPTSTPPEADATWEHGGSWGVARIKGGSAWAPSSLAAPAKWRLGEGLGAKRCKGPRGMTWHPEAATPPPRPLQQFADCGGRTKL

SEQ ID NO: 193713 - protein, 77 aa, Oryza sativa
  Clone ID: PAT_MRT4530_89826C.1.pep
MEQEYAPARPTSDTKAGTTELAQSQALWSTTRRGATGRARRDRAIAARRPGIALTARVSRGHAPHAGGQQARPLAAE

SEQ ID NO: 193714 - protein, 242 aa, Oryza sativa
  Clone ID: PAT_MRT4530_89827C.1.pep
MRRHAVVDELAALGAAVHTCSRKEAELGERLREWEGKGFRVTGSVCDVSVREQRERMLREVAGLYGGKLDIRVNNVGTNFSKQTTEYSADDYSFIMATNLESAYHLCQLAHPLLKSSGSGSVVFISSVSGVVAVSSGSVYAMTKGAMNQLAKNLACEWAKDNIRTNSVAPWYMKTSLVEDELARKDFADSVVRRTALKRVGEPEEVSSLVAFLCMPGASYITGQTISVDGGMTINGLYPTQD

SEQ ID NO: 193715 - protein, 79 aa, Oryza sativa
  Clone ID: PAT_MRT4530_89828C.1.pep
TSFRDTSLMDINQSGNCKNFSDAFLFSLSRTEYRKFPPFIFSTAIIPKFNRNHFNLPYLHMQGLYRMCYLSMEKHIFTK

SEQ ID NO: 193716 - protein, 598 aa, Oryza sativa
  unsure (1)..(598): unsure at all Xaa locations
  Clone ID: PAT_MRT4530_89829C.1.pep
APNNGGIIGQPCSQLNSPRIINKYQRRHDKQQEKYYEEDDGGFDPHWDCEFFRFCWNEGMRLPSIEDCPGCSDNAGSSSRSYNRGNRLSQRRLSVHQRLGPINXDRHQDEDEGRKIQWCPSGIFTKNQKRRVHRMRNRECFQEVQQEINHRMKKTKQEXRVKSKVATADEVEADKVKRLAKGKSVASTSVNMVFLLTAEYEAKQADVADVEEASARLILSPEQAIFEKPEGTENRHLKPLYVNGFVIRKPMSKMMVDGGVAVNLMPYAKFRKLGRNADDLIKTNMVLKDFGGNPSETKGVLNVELTVDSKTVPTXVFFVIDGKGCYSLLLGRDWIHTNCCIPSTMHQCLIQXQGDKIEIVPADMSVNVASADLALWDIXKCPIVIYXSQLKMETPNYYFEGVVEGSNFYTKDTEDDLNGKLGQGFMSADDLEEVDIGLGDRPRPTFISKYLSAEFRTRLIELLKQYRVCFVWEYYEMPRLSRSIVEHRLPIKPGYKPYXQPPRRCKADMYDAIKAENTHLYDAGFIRPCRYAKWVSNIVPVIKKNAKLLVCIDFRNLNKATPKDEYPIPIADQLVVATSGHKIISFMDGNVASQDCFQ

SEQ ID NO: 193717 - protein, 485 aa, Oryza sativa
  Clone ID: PAT_MRT4530_8982C.1.pep
MEASKAKRSVAIVGAGASGLAACKHLLARGFRPVVFESGEAAGGPAAAAAEEFPRHDEVAAYLDAYARRFGVRERVRFGSKVVSAEYAGVPEEEAAAWERWSGNGEAFGDGRGEWLLTVQHRESENLQTYKFDFVILCIGRYGVASVPTFPPKGVPEAFHGQVLHSMDYSSMDHTAAAELIRDKRIAVVGSGKSAFDTVAQCADVNGLVWGVNLQNLTTSRLAEVMVHKPGEGLLLSLLATMLTPLRWLLSKLTEMYYKRHTPMQRHGMVPGYSFSQSILACRLGILPKRFYDRVDDGSIVLRRCDPSFSFCAGGLVLDVATGDHIVDADVVILATGFQADRQLRDIFVSPWFSKIVAESSDATVPLYRRCVHPRIPQMAIIVYAESAANIYPYEMMAKWVAHLLDGAFQLPSIARMEKSVVEWVCWAHDMRRCSGNYFRKSCIGTITTWDNDQLCRNMGYNPRRKKGIVAEWIEPYGAADYADI

SEQ ID NO: 193718 - protein, 103 aa, Oryza sativa
  Clone ID: PAT_MRT4530_89830C.1.pep
RVRREREYLILEFSSLEGGELRYYYYYYYYYYYYYYYYYYYYYYYFWFVCFMESKEVHGRDVLVDLEKGNCLLMREGGDNGTDVNMISSQAKTSWNDLIAMKG

SEQ ID NO: 193719 - protein, 163 aa, Oryza sativa
  unsure (1)..(163): unsure at all Xaa locations
  Clone ID: PAT_MRT4530_89831C.1.pep
SGSGVRRRSRWATSPTSSSRAPRPTPAPAAPAHSPPTPPPLPPLAPRLPRTLPSPSLLPPPLLRSVAXVKSAISTVYTRRNTAQKRRRTNDNTPFPAGTASCPPPATLASKNSKTSEAQGTRPISSAAPCHRSKKTKSTRMENTSSGKHMLPEDFVKKQRAYF

SEQ ID NO: 193720 - protein, 1246 aa, Oryza sativa
  Clone ID: PAT_MRT4530_89832C.1.pep
MERRPPIRPDWQANKRQAMEQGGGDWGIRDVREEEGLRRPLPNQPRVNPNVKPQGRQAAEMERGAGTMKIKCFKCGREGHHQANYTNPPLCYSCHNTGHIASHCPLISAKRCVKLCGFGIPGQGFYSLQVEISDAEVARAPVRGILTVIQGEASVSKVLAELKHLFVGLTWDWKIKQLNAKEFLKKFPSYEVRSQISTCKSFDFETSQIKASVVETGITEEAVDELVAVWVKIYGIPKMARSEDYIKSIVELVGEFEAVEVASIRRDGPVRVRVACKDPRELYFSIHLYINKVGYMIRWEPKGYLPYENRQNPPDDDDKDDKDDEGLEDDMNLDDEFKNHDISRGRPLKGEGSQHESRAGAFSAPPTYKGKVSSEQGGSIKMIASKKTSLLKHPDLFESCTSLVIWGDKKQEMIAEQESQELEAPELSQNETRPEFSTLLEFDEDLERCQIPTDSDIERLREEEDREEEDSFQEVSNRKKGKAKRTEPAVTSRMSLRHRELAVVPIPKRAKILTQRKNLEQPDSVELKKIDVAANIDLGSNPVEIDNNIETLKAKELVQAKLAELNWKNQLEKQKPQAGDVSVPAKVIESEDVSSIKELETDLRVEKDGISPEPNKRETHAGAFFLSNVIKLNYDNSCWEIMVIYGPVDNNLKQAFLDELNWHILYRSHHVVIGGDFNLYRFASEKSNTNTNSRNMDMFNSFIANLDLREIYRSGPKFTWTNKQDSLVQEVLDRILVTTDWDDMYPTALLSSILRVGSDHIPLLLDTCEGIIVKSKYFKFESAWLAEESFKELVIQRLLPRDNSYILEFWNKKQSSLRRFLVGWGKNNRSKKLREKRTLQCKIEELDKKALTEELTSDEWNQRYSWENDLEHIYEMEELYWHKRCGEQWILEGDRNTEFFHRVANGRKRKCHITSLMDGETELTSKSEIREHIVEYYKTLFRDVPTANIHLSQGVWTNHLNLSDASKENLTRPFVMAELDKVINEAKLNTAPGPDGFSIPFYRAFWPQVKNDLFEMLLMLHNEDLDLKRLNFGVISLIPKNNNPTDIKQFRPICVLNDCFKFLSKVVTNRLTEVADEVVSQTQTAFIPGRFILEGCVIIHEVLHELKSKNSEGIILKIDFEKAYDKVNWEFLIEVMERKNFPKKWISWIKSCVMGGRVCININGERTDFFRTFRGLRQGDPLSPLLFNLVSDALAAMFDSAKAAGVLCGLVPNIFPGGITHLQYADDTVLFVANDVNQIVATKFIL

SEQ ID NO: 193721 - protein, 91 aa, Oryza sativa
  Clone ID: PAT_MRT4530_89833C.1.pep
MEEEDVRRRGGDGDGNQQHMRWRLLEISSGRTVATGGAKLWIFNNCDVRGVRQRGSAGAKRGGKEKDGDTEGEILKINQNFDFLPYFQNAH

SEQ ID NO: 193722 - protein, 91 aa, Oryza sativa
  unsure (1)..(91): unsure at all Xaa locations
  Clone ID: PAT_MRT4530_89834C.1.pep
SYHSSSSPRKSSPPLGCQGAPPRRRPPPPPFSPPLPAAAPRPLPPPMGXERRGIAASLRSPPGEPDPLREIWLIDLPTTSIPLDSGPIPLC

SEQ ID NO: 193723 - protein, 33 aa, Oryza sativa
  Clone ID: PAT_MRT4530_89835C.1.pep
SGFHGVAGGGGGGGGHGGRRGGRAAGERGWWWR

SEQ ID NO: 193724 - protein, 61 aa, Oryza sativa
  Clone ID: PAT_MRT4530_89836C.1.pep
MHSETGSPPPSESSMWSVVAEILPEDRCHRVLQSYTTIRGKPLKFDQQQRPEERGWIPLRF

SEQ ID NO: 193725 - protein, 80 aa, Oryza sativa
  Clone ID: PAT_MRT4530_89837C.1.pep
RGCHAKISSKFILVIIYKSEVPKRLIDRQWMYADRRSKEFIDGVHYFLRVAEANRHKGFIYCPCNKCKNQKEYSASRTTT

SEQ ID NO: 193726 - protein, 130 aa, Oryza sativa
  Clone ID: PAT_MRT4530_89838C.1.pep
EKKNHLGIFTQTGGKKDRQRVKNKTPQCAWHRGGLKKRGETGAKATVKKLGGAGDIAPTPKKNLTTIKGFWVGQKKKGLSLEGKKKAWRGKTDFFGGFAPGGETPGGGENRNRGQNLGLTFWQSLTWGGA

SEQ ID NO: 193727 - protein, 129 aa, Oryza sativa
  unsure (1)..(129): unsure at all Xaa locations
  Clone ID: PAT_MRT4530_89839C.1.pep
TSQNRRGARECNISSQDRTMRIKERYVRQGSDVSVRGAEQKNGDEXSTAPPPQLIWTAVQWVKRVHARDRYGLVMRCDHTSNSHVRSAKRVGCCSIEDLQLEQCLLNVLTCSLFRVMLELNVPPPVGDG

SEQ ID NO: 193728 - protein, 321 aa, Oryza sativa
  unsure (1)..(321): unsure at all Xaa locations
  Clone ID: PAT_MRT4530_8983C.1.pep
MCGSAARALNSVSRAAFSWKPTGLPQQTLAAAVSRSGVGLHSGAKTTATLLPARAGEGRYFVVEGEETRVAAEVANAEAHSPLCTALRRGGARVRTVEHLLSAMEALGVDNCRVEVSGGDEIPLLDGSAQEWVMAIRGAGQCAAKDSSGQKLEKLAPEIHEPVYLQKSDCFIAALPSSRIRITYGIDFPKVPGIGXQRFATVLDANVYSSKIAPARTFXIWKRLKKLGSAGLIXGGSLENATVCSISGGWLNPPLRFEDEPCRHKILDLIGDFSLLAQNGNQGFPLAHVVAYKAGHALHTDFLRHLLGRSAVGQENLAEQC

SEQ ID NO: 193729 - protein, 74 aa, Oryza sativa
  unsure (1)..(74): unsure at all Xaa locations
  Clone ID: PAT_MRT4530_89840C.1.pep
LASTTHSPNDMNLEQYIXTNDLNLDADIKADTATRXGLIPTRERQMKVTHADLKKAYEKVMTYNKLSVPQGLYM

SEQ ID NO: 193730 - protein, 83 aa, Oryza sativa
  unsure (1)..(83): unsure at all Xaa locations
  Clone ID: PAT_MRT4530_89841C.1.pep
KNVHALAASPCALWRSCRRPDHSSCYLYINRVVVSSQHTXKLSRVCLLLCTVSSLVVYSVSLTSVHWRSREWVSETFTFDALH

SEQ ID NO: 193731 - protein, 145 aa, Oryza sativa
  Clone ID: PAT_MRT4530_89842C.1.pep
SKYSQSSSNGFTSYESCNSMNPHIVAMPVNSKSINTVRAFNSTGKLLQHNIGSENPLQIKFCQHPDSNLASATDVFLSLNNLPRIENEISCPPNKLGYCIQSEKPYSFQSSFSSCFSVGDELKPILFDSATSFVQNDLMQEFNLT

SEQ ID NO: 193732 - protein, 426 aa, Oryza sativa
  Clone ID: PAT_MRT4530_89843C.1.pep
MEAGQDDAADRLTYEIFSILESKFLFGYGGGGGGETKSLQCAPPVSRGNRVCVLSVDGGARPEDGLLAAAALVRLEAAVQRRAGSKAARLADFFDVAAGSGAGGVLAAMLFARGPCGRPMYSADDALGFLLRRVRRRGWSSRAGGLLRRPAGAFHKVGVRVLVYFLYYSVFGELTLRDTVRPVLVPCYDLATRAPFLFSRADAAQSPAYDFRLRDACAATCAPSGGGAAVEASSVDGVTRITAVGSGVALGNPTAAAITHVLNNRREFPAAAGVDNLLVISIGTGEAAGSSSRHRARTPVIARIAAEGASDMVDQAVAMAFGQHRTSNYVRIQGMGVARRRGGGVACGGETAEKAVWVAEAMLQQRNVEAVMFQGRRLAGETNAEKVERFARELIKEHGRRKQHVPPAASGGGGGGLDCHVSKKQP

SEQ ID NO: 193733 - protein, 61 aa, Oryza sativa
  Clone ID: PAT_MRT4530_89844C.1.pep
DKTSKKNTKVTKLVLEEERNVHENARTIDHTWPPAPAMSAVAVAPQETAALGSSLTRSTAR

SEQ ID NO: 193734 - protein, 56 aa, Oryza sativa
  Clone ID: PAT_MRT4530_89845C.1.pep
HPWSSLHLWAQCECFCASISVLCSLSSTRISMISVPSPVQKEAHPLHDLLSSTVTR

SEQ ID NO: 193735 - protein, 69 aa, Oryza sativa
  Clone ID: PAT_MRT4530_89846C.1.pep
KKDIITYWTEDLEPTTERIEQTIETAKNHELLKNQPNDGGSNMNSTTPTKKKTNSMGTLQLIKGLVQSS

SEQ ID NO: 193736 - protein, 51 aa, Oryza sativa
  Clone ID: PAT_MRT4530_89847C.1.pep
MAGGGAKREFGERWLLRLRGMEIFGFGTAGAATFLYDACIASLHRLRGVAG

SEQ ID NO: 193737 - protein, 641 aa, Oryza sativa
  unsure (1)..(641): unsure at all Xaa locations
  Clone ID: PAT_MRT4530_89848C.1.pep
CRNSARGKWERKKKPTLVKGERGDRNPRAASSAAMAAAAAPESYIGSVISLTSKSEIRYEGVLYTINTEESSIGLRNVRSFGTEGRKKDGQQIPASDKIYEYILFRGSDIKDLQVKSSPPAQPTTLHNDPAIIQSHYPCPASTSLPPPASTAADPASHNADPGSHNGQSGIQMPPPLPQYQPGASLPSWNSSPMPSSANGAGLTMPPMYWPGFYTPPSGFPHLQQPPFLRPPHGLTIPQALQQPIQYPGLNAPLPPFPRMPEFALPQPGSGNNLTQNLGVSTSMPVPALSSTPATESSANQLPNMLSSVSASVFSLGLTPPSVNPPVSTIESTMSQSQGISPLMNNKPVSLPLDSTVPSASSNKPMNIPVPTYLPSSQPPLANIAASAATVAEPVTLVTPGQLLPTISSTVLSADALETASAMIPSPKAASSMVSSSQAALAASSQEPLLPAPKPTLQKSHFQSFGXPVGASSYIQYNNRGRGRGRGRGRGIGQSRPITKFTEDFDFMAMNEKFNKDEVWGHLGKSKGQLNDDPNEYEDDVLEDDISPGKPEVKPVYVKDDFFDSLSCNTIDNGGGNGRIKFSEQRKIDTETFGDSARHRPMGMRGGGRGPRGGPRGRGYYGRGYGYMGRGRGYSYPNHQS

SEQ ID NO: 193738 - protein, 217 aa, Oryza sativa
  unsure (1)..(217): unsure at all Xaa locations
  Clone ID: PAT_MRT4530_89849C.1.pep
MVSSSQAALAASSQVTSSVVSPSEDQFASSPVPSHQQLEQNNEDRHTKKPEWKAKQHSVAPSNKEPLLPAPKPTLQKAXGASSYIQYNNRGRGRGRGRGRGIGQSRPITKFTEDFDFMAMNEKFNKDEVWGHLGKSKGQLNDDPNEYEDDVLEDDISPGKPEVKPVYVKDDFFDSLSCNTIDNGGGNGRIKFSEQRKIDTETFGDSARHRPMGMRGG

SEQ ID NO: 193739 - protein, 252 aa, Oryza sativa
  Clone ID: PAT_MRT4530_8984C.1.pep
MTAPADKGKKAKTDADGGAAEENEQIDGALVLSIEKLQEIQDELEKVNEEASDKVLEVEQKYSEIRRPVYLRRSDVIQTIPDFWLTAFLSHPLLSELLTEEDQKMFKYLESVDVDDSKDVKSGYSITLTFSENPYFEDKELTKTYAFADDGTTTINATSIKWKEGMEIANGNAKKKGSKRPLVEESFFTWFTDTEHKSLADGVQDEVAEIIKEDLWPNPLKYFNNEAEELGEDDDEEGSDADEGEEDEEEEN

SEQ ID NO: 193740 - protein, 333 aa, Oryza sativa
  unsure (1)..(333): unsure at all Xaa locations
  Clone ID: PAT_MRT4530_89850C.1.pep
MAIPRSLLSLVTLSSLSATLLPVIATAPETTLGLRTHCFPLLRRAFVPLTRGDSQCLSKAIAKLRAAAAPTMSTRAGAVERMTETVATVPPVFLLTHTRGIPLHSSPRVALRFHDLEGCISPNVCVGITGSSSRMEGRSLVATGESPDARSSSWRHSLLGCSPKDLAPGIFNLSRRKGNNVHLSLQNNHWLPILNPITTISEIDELVQLGSRLQEVMLLENTPDDIRWKWTPNGEYSAKSAYEAQFQXLCTNAFEDANHLAKECSFTRNVWNLVCSWLGYNLSPQSWQDTPISNWWDSLIFLAKGDSAKKKIGALLTTWWQVWLEHNRRIFHH

SEQ ID NO: 193741 - protein, 268 aa, Oryza sativa
  Clone ID: PAT_MRT4530_89851C.1.pep
MEPLPLGFGDGLDATLLSSLWAFQDDLQPQESMEELKQSLMATTLELDAAKEELKKKEQSIAKLADLVRHVAKERDDARDQLQRLLAAAAAKPPPLVTSSVTDSDGGSLVSSPAADNPFFDPVTSSDKRCCAIASPPPAAKQQHAAAAGADAVLDMLAMKKPLPQRGRLLQSVMEAGPLLQNLLVAGLLPRWRNPPPVALDTLPVGVRAGGAVYPGASLSPGITSSAAVIGYGGGANACGKRPMAAAAAAVAASCSPAAFSAKRHRLH

SEQ ID NO: 193742 - protein, 80 aa, Oryza sativa
  Clone ID: PAT_MRT4530_89852C.1.pep
MWRYRRICQMVDDNHVENEMGGELDDRQMASNSNGDRPVGKLLEEERKVFEEIVGCNSEISQFEDLGNAGWVVTDKDLEY

SEQ ID NO: 193743 - protein, 41 aa, Oryza sativa
  Clone ID: PAT_MRT4530_89853C.1.pep
LLTHLMTGQEGLHYLSHSINLYNIFIFITLLTWMHLFSLRF

SEQ ID NO: 193744 - protein, 81 aa, Oryza sativa
  Clone ID: PAT_MRT4530_89854C.1.pep
MAFDAIASRHDPSTSFFWSSENSGCMAFSRMVGGLELVGSLAMDRWHSLVDSSSTSHRGYSLVQTGKLKERGEGCLPSCEN

SEQ ID NO: 193745 - protein, 95 aa, Oryza sativa
  Clone ID: PAT_MRT4530_89855C.1.pep
MARSASGRSLLVILLAVSLLLVASSDAARFTRSNRMAMMVVEAPARPGVGVSGSAEDDVSTSDAIVEMFGRMALQTTDYPPSGPNDRHTPKAPGT

SEQ ID NO: 193746 - protein, 140 aa, Oryza sativa
  Clone ID: PAT_MRT4530_89856C.1.pep
MVGGRDEKRRGRDRSSVGQVFPNRKGRGYRAPAEVTMVFLLPYSLGKAGNRDNRAVTDGWGHRPMPVGPHRWRIRCVRYAGGWGPSPVMWGQKVVEWKRIVGGVDSAKALAMLRAVAAAAALAQGCVISAFQVCGEPGVK

SEQ ID NO: 193747 - protein, 247 aa, Oryza sativa
  Clone ID: PAT_MRT4530_89857C.1.pep
CGKIGSVALADLLKKKLLEEGRKPYVIPVGGSNSLGTWGYIEAIREIEHQIQISGDVQFDDIVVACGSGGTIAGLALGSKLSSLKAKVHAFSVCDDPGYFHSYVQDLIDGLHSDLRSHDLVNIENAKGLGYAMNTAEELKFVKDIATATGIVLDPVYSGKAAYGMLKDMGANPAKWEGRKILFVHTGGLLGLYDKVDELSSLSGSWRRMDLEESVPRKDGTEVSDISLSKKSIRLNLYDKIQSRWLM

SEQ ID NO: 193748 - protein, 1596 aa, Oryza sativa
  Clone ID: PAT_MRT4530_89858C.1.pep
MASRSYYPSDPSPPANPRGRPRDTSVVVVVLDTSEVYIVASLSTRKDTQVIYVDPTTGYLHYLGKHGEDLFDSEAAALNYITNGSKILCKSTTYSKAVLGYAVLGSYALLLVATQLSATVPTLPGGGCIYTVAESQWIKIQLQNPQAQGNGESKNIKELAELDIDGKYYFCETRDITRPFPSRMTLREPDEEFVWNRWLAKPFMDIGLLGHCVVLLQGFAECRSFGGTGQQGGIVALLARRSRLHPGTRYLARGINACSGTGNEVECEQLVWAPRKDGQGQSIPFSSYIWRRGTIPIWWGAEIKNAVSVEAEIYVADDPFNGSLQYYQRLGRRYGNKSLEVNATSQKKPGVVPIVCVNLLRYGDGKPETVLVDSFKSSLEYLRSTKKLGKTWIQLINYDWHATVKLKGQQQTVEGLWRHLKAPTMAIGFSEGKYYNVKQQLKECKGSVIFNDDINGGFCMESIQNGVVRFNCADSLDRTNAASYFGALQVFVEQCSRLSISLDVDAMFGLSSSRYPEYNGRNPRTLPPGWEERFDSVTGKSFYIDHNTRTTTWEHPCQEAPQKPWKRFDMTFDQFKGSTMLAPVNHLAELFLLAGDIHATLYTGSKAMHSEILNIFKEETGKFSKFSAAQNVKITLQRRFQNYINDSSRQKQFEMFLGLRLFKHLPSIPISPLKVGTFEAIWMHVCQQGADYVELFIYLGEPCQVCQLLLTVSHGVDDSSYPATIDVRVGSSVDTLKLVLEGACIPQCSNGTNLLIPLTGRIDPEDLAVTELEGELNFLNRVVALSFHPSARARTPITLGEIEVLGVSLPWVDMLTDSRRGPDFVELLHEKLSSIPGNVGSKEFANSSNSFLPQNGIVGSERASSTKSSSSVLQGSSGNFVDFLTGDFDMPNQSDATENTSFVNVEQTNSFDDDFDVNPFATASETPSAKVNSQVEEFDSAHIYLKFFESFSGNIKGKGLNFEQMMKLEIKRLCLDLSAAERDRALLSIGVIPATVDPNRSVDYSYLLKLSSLADYLALLGHTVHEDRVNASIGLENINGHAIDFWNICENDESCTGDVCEVRALSSSHASATSENSSIFVECSQCGRTACKACCAGKGAFLLLNNTYRDLKIYGGSQGGGYSALADNFVCKSCCSEVIKHALYVDYVRVLRSLRKKGRTEQAVLKAVNQVCGLEFSRISDFTKSVQYGQKQLKQLLDGEESLAEFPYASFLQTVETSDDSEPLLSLLAPFGIGEQKSYWKAPLDNTSVEFSIVLGGLSDVSGAAIIVGSCGYSTSDCPIVEIWAGNKINREDRTFIGKWDVHDMMLSSPHLSGPEKTSSMSEEPRHIKFHFPNPIRCRIVSIKMTLNHIDSHSTKFREEFDLLSLSEGTFSESKPTTPQNSFIHAKRIVIFGNTLRKETNPDTSMGIMRMKTYLDRSQPLGRFRIPVEAERLRDNDLVLEQYLLPNTPGIAGFRLDFFNVVRLRVTHSPSSSELDMKEFSLIPMEDRVINPAILYLQVTIVKESGKLVVEEYRLPEVKVNTPLYYDFQDLQQDVRCVLFRLLGDVTAFVDDIAEIDGSNLRNLPLATGLSLSNKIKLYYYADTYEMGKIGSLSAV

SEQ ID NO: 193749 - protein, 122 aa, Oryza sativa
  Clone ID: PAT_MRT4530_89859C.1.pep
VQDLIDGLHSDLRSHDLVNIENAKGLGYAMNTAEELKFVKDIATATGIVLDPVYSGKAAYGMLKDMGANPAKWEGRKILFVHTGGLLGLYDKVDELSSLSGSWRRMDLEESVPRKDGTGKMF

SEQ ID NO: 193750 - protein, 233 aa, Oryza sativa
  Clone ID: PAT_MRT4530_8985C.1.pep
MDGGGVEAAMDGGGVEAATTAAWMARHRGMYERATRHPFTVSIRDGTVDLSAFRRWLGQDYMFVKEFVAFLASVLLKCCRQSDGSDMEIILGGLASLSDELSWFKKEAEKWSVNLAEVSPLKSNTEYCRFLQSFSEPEISYVVAITTFWIIETVYQDSFAFCIEEGNKTPPELLGTCQRWGSPEFKQYCQSLQRIADRCLAEASADAARSAEEAFLRVLELEIGFWDMSSSRS

SEQ ID NO: 193751 - protein, 284 aa, Oryza sativa
  unsure (1)..(284): unsure at all Xaa locations
  Clone ID: PAT_MRT4530_89860C.1.pep
DTQTDHQINIHPADSNPQTGVSCATPFSYCRKFVTTVGAPGRGCVEFSVEKCDGINFRHISLDMLDGFNFHRHQVDCXDLRLLKDPKHDRAASSSLASLLAXEINLLMRLRRCLNQRLLYSAAVADGDIIFTAGSRRHRRLVSLPTRLAYYVAVVGRLRLHRRPASVAADWCLRLHGWPVMPLLLGVYDSTVGLPSPPPTSVSAYTAGLLRRRCWASTSSPXPACLHHRWMVSPPTRLAYYAAIVGHPRLHRXRLTFVAADWCLRLHGWPIMPPLLGIYDSTAG

SEQ ID NO: 193752 - protein, 84 aa, Oryza sativa
  Clone ID: PAT_MRT4530_89861C.1.pep
PPPGQPWQSTGGASPPTPARADTSHQPQPPSLPSRSKHHRLSGHRRKKNKKKIKKPSSDRSAREAAIRGGRGRSRWFLGHGFLI

SEQ ID NO: 193753 - protein, 69 aa, Oryza sativa
  Clone ID: PAT_MRT4530_89862C.1.pep
MRAKQFALFLGENLTWLRVASACGGRPSCPTPTPLTPTPSTPTPTPYAFGRCPRDPLKLGVCPNILGLI

SEQ ID NO: 193754 - protein, 77 aa, Oryza sativa
  Clone ID: PAT_MRT4530_89863C.1.pep
QGVVVIIILLVTHHPSPSLELSYRVEKKERRVVKATLSLFSCASSSAELSSKQTCSCYSRQRALDLTKWRPRTSRRS

SEQ ID NO: 193755 - protein, 119 aa, Oryza sativa
  Clone ID: PAT_MRT4530_89864C.1.pep
GPKFPGGPGDNQVPPKLPTKKLSPPLFARGGEPPSAPKNAPLKNKTGEGTIPKTSPRGQNPGALGRKGRQKTYPPTLGKSISFFYPLTVYPPRGIPPIAPSPGGTGKNPPRLPPPSGFS

SEQ ID NO: 193756 - protein, 253 aa, Oryza sativa
  Clone ID: PAT_MRT4530_89865C.1.pep
MAGCLPTAGLRRALTLPSPSPAAAVGHEEGSSTSAASTTVGTGVAPVVVVGVDLVPAFLDDLDPPLYLDDVEAEADAGGLSTAIASRRLFFESPGRSNSIVDSAEHPAAAAAAVVPRGNGGASTSSSSSSGRPAAAPSRAAAAATGKGVRVCGDEQARPVPVSTAAPREEFLKSMTEMVDAMGLDVARRGGDRARLHELLLSYIALNDRDALPDILGAFTDLLLALNAHGPAATPADGVVRERGGGGDARRKA

SEQ ID NO: 193757 - protein, 51 aa, Oryza sativa
  Clone ID: PAT_MRT4530_89866C.1.pep
LMVLLAHQLLFSYFWTQRLTIYNRALSCACTGMSIFFLQCNITSILVIQKR

SEQ ID NO: 193758 - protein, 91 aa, Oryza sativa
  unsure (1)..(91): unsure at all Xaa locations
  Clone ID: PAT_MRT4530_89867C.1.pep
FPKPSTQPASSSDGXSHGGSSSSTSRRRRHQLRGGPRQPHGLRPVASPPRRSSSGRTEEKASEGRTGQRRAPLPAHQTDACRSRTTSESYS

SEQ ID NO: 193759 - protein, 110 aa, Oryza sativa
  unsure (1)..(110): unsure at all Xaa locations
  Clone ID: PAT_MRT4530_89868C.1.pep
TPASFFLVXRLSNKXXLEXXVEATXXFLNKXXKPVLVXGPKLRXXKAGKAFXDLXHXXGYAYEXMXSAXGLXXXTYXHLIGTYCGAXSTAFXAEIFEXXDGYLXAXXXFN

SEQ ID NO: 193760 - protein, 104 aa, Oryza sativa
  Clone ID: PAT_MRT4530_89869C.1.pep
ACGGLASARARGAKSGSGCATSTLPLGLAMAPSPLAPSMVVEKKTATQHDLGVRFSGTISRRCDAVSAVGGANSGNGWSKARRRACGSSRERDGWAWHSCVAMA

SEQ ID NO: 193761 - protein, 168 aa, Oryza sativa
  Clone ID: PAT_MRT4530_8986C.1.pep
LTNPIFSMAFERKRNPFEDGTISIFSPNPNRPLWPLFPGGNLPTRPAAAAGGHGPRSAPHGVLAGVLADGRPVDRLPPLLLHPPLLPPPRRPRPSPPTYARARRRRRSSPPPPPVLGNNWANVGPGQTAGGGPAPGGVQLNPQLLNKSGINNLMPILNISNRLVILQV

SEQ ID NO: 193762 - protein, 60 aa, Oryza sativa
  Clone ID: PAT_MRT4530_89870C.1.pep
MTSRHPDNGLYISLTLGSSISTPLFREQRRDNIPSCPGKEGNSDYSYHPGATSMLTVVID

SEQ ID NO: 193763 - protein, 55 aa, Oryza sativa
  Clone ID: PAT_MRT4530_89871C.1.pep
MWLALLRLANFSFCWITLGQLKNGNFLLFIQLLWQNFLKLQPVTKYLSYVLWRTS

SEQ ID NO: 193764 - protein, 544 aa, Oryza sativa
  Clone ID: PAT_MRT4530_89872C.1.pep
MVAGGGNGGAAVLVGITVLLFVVVVVVVVLVRWWSGGEGGAAPSPPALPVLGHLHLLKKPLHRSLAAVAAGVGAPVVSLRLGARRALVVSTHAAAEECFTACDAALAGRPRTLAGEILGYDHTIVLWTPHGDHWRALRRFLAVELLSAPRLAALAADRHAEAASLVDAILRDAAGGAKVTLRPRLFELVLNVMLRAATTRRRHASVDARKLQEIIEETFSVNGTPSVGDFFPALRWVDRLRGKVGSLKKLQARRDAMVTGLIDDHRQWRSGSAGDGDQDKEKKGVIDALLALQETDPDHYTDNVVKGIILFSITVPLLHFYSIVINMYNGFDHGVQSLLFAGTDTSALTIEWAMAQLVTHPETMKKARAEIDANVGTARLVEEADMANLPYIQCVIKETLRLRTAGPVIPAHEAMEDTTVGGFRVARGTKVLVNAWAIHRDGDVWDAPEEFRPERFVDSDAGGAVTAPMMPFGLGRRRCPGEGLAVRVVGVSVAALVQCFDWEVGDDDVVDMTEGGGLTMPMATPLAAVCRPREFVKTILSTSM

SEQ ID NO: 193765 - protein, 155 aa, Oryza sativa
  Clone ID: PAT_MRT4530_89873C.1.pep
SVGLLTGRPRTPPFAGSAGDAKSYKELESKRVQTLETLFLLLSSTSSVRPRVLIRLTSGITLSSLFNWAETCNGCCPSDPSDGTAHTYLHSAGSRCNVGTRSSADDITSVRPPGMYLAGTDVPTSGVSTPAPASDERLEALIIPTGRGKACDRPP

SEQ ID NO: 193766 - protein, 79 aa, Oryza sativa
  Clone ID: PAT_MRT4530_89874C.1.pep
NSHILKPLKKKIKLLNGVIQYLNSHPPKKKKAQKMGLQTTWYKKIGPKVSFRSPAAVQHLEDKLINGCSRMMMMPLPHS

SEQ ID NO: 193767 - protein, 108 aa, Oryza sativa
  Clone ID: PAT_MRT4530_89875C.1.pep
FFFFFFFSYFNFHFLFFFLRGNKTGSKPLEKPNPTNLMDLIHHTSPQSNLFTLKPNFILLLHTKFRENPKKKKTFFYWNTPRLGVNFFLNFSPKKKKTPQRIPPPLFF

SEQ ID NO: 193768 - protein, 103 aa, Oryza sativa
  unsure (1)..(103): unsure at all Xaa locations
  Clone ID: PAT_MRT4530_89876C.1.pep
KGPTAHDVDSPXTRSIMPTRLKLEIESHNPTTPDVVCLTKRMDYMQQRVNIMEHLVMTQGVQNIKTRAHHAYNSQHAVSPRRPVLAELHANEPTNTHLLEEPY

SEQ ID NO: 193769 - protein, 46 aa, Oryza sativa
  Clone ID: PAT_MRT4530_89877C.1.pep
YGSPSVHFGAYRRLGACMIAPLILLALCGPPAVIACLAKTIPSNIL

SEQ ID NO: 193770 - protein, 286 aa, Oryza sativa
  Clone ID: PAT_MRT4530_89878C.1.pep
MASSMAKNSSPFKVVLGSSSPARREILADMGYEFTVMCADIDERAIRREKPEELVKALAEAKAEAIKLKLHGEDSAQERDQPTILITSDQVMVSKGMIRERPKGQEEAREFIKGYSGDKAFAVNYVLVTNLSNGASKGGWDIPEIYFHHIPEDFIQSVVKEGHMTCVAGGLKLTHPSVLPFIKQLVSNSFETTTIASITTLRTANLYWTVSLQRLNNNNIESIALILRFLPMLHRSAQWIAFEDSRGSSLRGLFKKFLEPNDLHLECHLQLARRALLNGPYDALVL

SEQ ID NO: 193771 - protein, 176 aa, Oryza sativa
  Clone ID: PAT_MRT4530_89879C.1.pep
MEYGRRKPISLLELCIRTTMDNLRYVDNVDGVEMDLLQRILPHCKMEDLTRIENNTEMDLTPVTDKLWKLFYTRQFGEENANQVVKRMSMSGARYKWKDLFDAKTKKQKEYEEKMGQRLAKKYEAAKAGKKHFLAGCLQISGKNESCYSKEYYSKDISAHKDELKSCTANEDNDYS

SEQ ID NO: 193772 - protein, 45 aa, Oryza sativa
  Clone ID: PAT_MRT4530_8987C.1.pep
MIRINKDSGHSLCILVVCNYSDMRHPIFFFFFWLGVPPLPQSARA

SEQ ID NO: 193773 - protein, 80 aa, Oryza sativa
  Clone ID: PAT_MRT4530_89880C.1.pep
MGFMLRVRLASFFAGAAAAGAAGGFFLYKDYKLAHDSMALQVKGLQDHVDARYKALDKRLATLEDQKTSETAPDVGVPSD

SEQ ID NO: 193774 - protein, 89 aa, Oryza sativa
  Clone ID: PAT_MRT4530_89881C.1.pep
MGKRKSAAKPPPKKRMDKLDTVFSCPFCNHGSSVECRIDMKNLIGEASCRICQENFSTTVNALTEPIDIYSEWIDECERVNNVEDDDGA

SEQ ID NO: 193775 - protein, 103 aa, Oryza sativa
  Clone ID: PAT_MRT4530_89882C.1.pep
MGFMLRVRLASFFAGAAAAGAAGGFFLYKDYKLAHDSMALQFQSLAWLTVPVPLHVESELAKLKVKGLQDHVDARYKALDKRLATLEDQKTSETAPDVGVPSD

SEQ ID NO: 193776 - protein, 72 aa, Oryza sativa
  Clone ID: PAT_MRT4530_89883C.1.pep
MGSHGDDGGGGGAHVLLLPYPSQGHVHPMLQFAKRLAFHGMRPTLAVTRYILATCASPDAAAAGAVRFATIS

SEQ ID NO: 193777 - protein, 81 aa, Oryza sativa
  Clone ID: PAT_MRT4530_89884C.1.pep
PSRKLASAHLPLVAAAPLVDALRASLAEPLVLPDLARRLPLRLHRQGVVGARRRSRRPLARCGQDEQFVRGVVRARRQSRH

SEQ ID NO: 193778 - protein, 70 aa, Oryza sativa
  Clone ID: PAT_MRT4530_89885C.1.pep
ELKLGKEMRPLAKLKEKSNIINMALTIKHQRSPLLYCQKFQLNNQLSTVHQSTRERGILKMTVSRDKHLH

SEQ ID NO: 193779 - protein, 79 aa, Oryza sativa
  Clone ID: PAT_MRT4530_89886C.1.pep
QPPKGKQFSPKGKWVFPFRSPRPPLQKDPGHVPCYFLQSYYNNNPEKIPPVSTKGKKPCFPHKPQWKGGFVIIRKGNTR

SEQ ID NO: 193780 - protein, 86 aa, Oryza sativa
  Clone ID: PAT_MRT4530_89887C.1.pep
MGAAWLGVGLQAILVMFLLMSPPFLPCALAAGCSSEGKSGDQVVGIVREMQEGHDFFASSKSTWSRRILNAGEDGRHNPPFSPGHK

SEQ ID NO: 193781 - protein, 146 aa, Oryza sativa
  Clone ID: PAT_MRT4530_89888C.1.pep
MAGITGSRALMVVALLCAAAAMTAAQEASNVRATYHYYNPQQNNWDLNKVSAYCATWDANKPLSWRQKYGWTAFCGPAGPRGRDSCGKCIQVKNRGTGATIIARIVDQCSNGGLDLDYETIFKKIDTDGRGYQMGHLQVDYKFVNC

SEQ ID NO: 193782 - protein, 310 aa, Oryza sativa
  Clone ID: PAT_MRT4530_89889C.1.pep
MASATAPQPVSSPSAAAGAASNNPHKRKKPAARGKGKGKGKGRLAKTPRRSDDPGDLPRRRSKPSDRFLKLLRKRARDYNSDDSDDEERLSDEDEEEEGASGSGDDEAAGAVTRFEQGCRAFRVAFTKIMAKKLPDDPLGPILSAHKKLVAAKLAEDAEEHKPKGEGRREKRMAAEKGHVIPTNHLDSKEKELIKIATQGVVRLFNSVSKAQNCRKGLNPSRSKDAKVLAKETKQAFLTELSKTSNQSQKGKASSNFSKNNSKDEDEPGWAPLRETYMLGSKLKDWDKMQTSDVVNEQTEIPLDDSSDEE

SEQ ID NO: 193783 - protein, 78 aa, Oryza sativa
  Clone ID: PAT_MRT4530_8988C.1.pep
STLEDPRNTLLLSGDYSAECVIDRINWKKESCPERHTDPPYIGERVRFTKYGVSIISTLLPSYALGFGSHAVTTLEKT

SEQ ID NO: 193784 - protein, 151 aa, Oryza sativa
  Clone ID: PAT_MRT4530_89890C.1.pep
MAGITGSRALMVVALLCAAAAMTAAQEASNVRATYHYYRPAQNNWDLGAPAVSAYCATWDANKPLSWRQKYGWTAFCGPVGPRGQAACGKCLLVTNTATGAQITARIVDQCANGGLDLDWDTVFTKIDTDGQGYQKGHLIVNYKFVDCGDN

SEQ ID NO: 193785 - protein, 79 aa, Oryza sativa
  Clone ID: PAT_MRT4530_89891C.1.pep
MSVPVRNKGLPVTRPGAYTSTWGGSIMGKEKVDFYWYFRKVSGFALAGYAAGIITYLAAQNLPLSLPTSLAEIPFISGS

SEQ ID NO: 193786 - protein, 52 aa, Oryza sativa
  Clone ID: PAT_MRT4530_89892C.1.pep
THTGPNQPDRLDHIDRSIKQGRSSQAREGGTNNNHAQESCTAINLSTRAGCS

SEQ ID NO: 193787 - protein, 790 aa, Oryza sativa
  Clone ID: PAT_MRT4530_89893C.1.pep
MAPEAAAAALKPMKATSDGVFQGEDPLEAALPLAIVQICIVVVLTRVLAFFLRPLRQPRVIAEIIGGIMLGPSAIGRNSAFINTVFPKQSLTVLDTLANIGLLFFLFLVGLELDLRAIRRTGAGALAIAVAGISLPFVLGIGTSVVLQNTVNRGVPTGPFLVFMGVALSITAFPVLARILAELKLLTTDLGRMAMSAAAVNDVAAWILLALAIALSGSGSPFVSLWVLLSGVGFVLSSFFFIRPLLSWMARRSPEGEPVKELYICTTLTIVLAAGFITDTIGIHALFGAFIVGIIVPKEGPFAGVLLEKVEDLISGLFLPLYFVSSGLKTNVLTIKGGDSWGLLVLVVATACIGKIGGTVLASLIVRVPLREAVTLGVLMNTKGLVELIVLNIGKDRHVLNDETFAILVLMALINTFITTPLVMAIYKPARRAPPYKNRAVQRPNPDDELRMMVCFHSTRNIPTMINLMESSRGTRRRGITVYAMHLVELSERSSAINMVHKARRNGMPFWNRRRNGDGDQLVVAFETYQQLSHVSIRAMTAISDLHTIHEDVVTSAHQKRAALIVLPFHKLHQMDGHMESLGDEYQHINQRVLHHAPCSVGILVDRGLGGAAQVAASDVSYNIVVLFFGGRDDREALSYATRMVEHPGIALHVIRFVPESGGGGANDKAAADDAFLAEFRGKVAGGNDSIRYEERTSRGKADVVEAIKAMGPTNLFLVGQGSPCAPLMEPSAECPELGPVGSYLAMPDFSTVASVLVMKQYDPTAEHYELVEEVADTAVDIDTPGPRRG

SEQ ID NO: 193788 - protein, 128 aa, Oryza sativa
  unsure (1)..(128): unsure at all Xaa locations
  Clone ID: PAT_MRT4530_89894C.1.pep
GRGRAPHPLHLLRERRRHRRLLPRPPPPPRPSSRRSPAAVAISDPFLFQSLHPAAKYHDAAMAIGGCPIYXSDXXGNHNLELLRKLDYEVFHVCVRAIEWRREDRRCVPVGSKTLNAAPLAQGWFDIL

SEQ ID NO: 193789 - protein, 792 aa, Oryza sativa
  Clone ID: PAT_MRT4530_89895C.1.pep
MAPVLLVVVGSSAAAWADVPAGSRVQVVQVACGARRPATTSMAVRCVGRGGGKTGPVLGKPSDDDDDDALSRCVSWGSFLFLPVHDAFLSQIEPSMCFLGSGVEQIGPSVCFLGSGVKQTKLVKIAFRMAVVTAVFLRRVQANSNCADMSLQVSSLQEECARFLDSFVAGEEIAGHDAVRMLVGCHDKLTVVLSAYGGAGRDDVDEGQAPPVVVPPGGQIDTHLLDLFLIGTSELPTNWSDRTLVAQLTCSLYRAIEAVTKFIATTEKGVPLEQADAEGSSHQSLHVASKAAGLTSSSSRSKDVKLRAILHEDSVTGVRPWFSLFGMSFSDLYDHFPESVWDICEDSPAEAFEKKEHKGWMQFRSEMNSRYNKAVDISFDDRFADSIVFDKTLYKYAILGCKVNADGIMNQGVISASERNKIIHALERIEGDIEIGKFKWRDGADIHTSIVEALADMIGDKAKDLAVESKYDSCLMILETWSKNSIDHIMTQLKQLQVALVLLAIKNDGVILGEREIEGTTCLESLLLRIVKVLDYDASKLRSYHGSISCSNDGVMLLRTSYPENQMFSKLSSMASFAESINNCIPNHLRQLLEKVLSRRNILLLTPNGETTIYDTVLSKFGSIEQTRHHGDVAISKCLNIGFRNVRESPQTCEIEDAKHYLFSSTKSVVEILDLSIQLVLRILFGMEKAQNSLPRGYHDVMRFTHFLTTKGIDLGTAYALVHLCLDKKLQPSELILDKHELKQIDFHCERAHYLLEYKGSIFGDSTDLDACKKMLKWCCKLRIDPAATISS

SEQ ID NO: 193790 - protein, 97 aa, Oryza sativa
  Clone ID: PAT_MRT4530_89896C.1.pep
IYTRLHRVVDKNDRSDTGRISNGQPRSHVAPVSAGSGGRCEASQRPEPVYIVRVSCFFLARDLSTHSESLRSHPKPPAEPAKGGLRGLPVRSHELRH

SEQ ID NO: 193791 - protein, 79 aa, Oryza sativa
  Clone ID: PAT_MRT4530_89897C.1.pep
CFFFFFSFFFFFFFFFFFFFWGSKRNFDRITTGWTNGQEVNKLVSDETWFGFNHFNRAHGNLKRSLTIALRDFFGALIF

SEQ ID NO: 193792 - protein, 42 aa, Oryza sativa
  unsure (1)..(42): unsure at all Xaa locations
  Clone ID: PAT_MRT4530_89898C.1.pep
FXIRLPYTLWLLLSENLLVVRLLAYRNSDILVHTCQNRISVY

SEQ ID NO: 193793 - protein, 84 aa, Oryza sativa
  unsure (1)..(84): unsure at all Xaa locations
  Clone ID: PAT_MRT4530_89899C.1.pep
SEPHFLNCMYARGSHIQLLADLVTFSSQARSNHNDHQCHLHCIPHPSIHRLIIRERIGGIDHVLDMVVDAHVLGXGCKXVGGIS

SEQ ID NO: 193794 - protein, 74 aa, Oryza sativa
  Clone ID: PAT_MRT4530_8989C.1.pep
MDEGACSYSLAKPKLIDRYDPIPKIISCCALHLLLAYPVCAREGTSYVDRYMCVYVPIYQLYPLYLHAVVVDND

SEQ ID NO: 193795 - protein, 67 aa, Oryza sativa
  unsure (1)..(67): unsure at all Xaa locations
  Clone ID: PAT_MRT4530_898C.1.pep
VHASAHAFETVFNGELRRXQLLIIPQRYAVVKKAHREGCAYIAFKTKPNSMVSHIAGKSSMLRAVSN

SEQ ID NO: 193796 - protein, 260 aa, Oryza sativa
  unsure (1)..(260): unsure at all Xaa locations
  Clone ID: PAT_MRT4530_89900C.1.pep
WIPRAAGIRHEFFFFFFFFFFFFFLXKXXXKXXXXXNYXNXDNKXFXXYKXXXXTXXXXKXXXXXXPFXSKXAXSXGPXXQQXFHLXGTXHPGXXKXPGXNLLGXXRXRXQQSXGXXXPRPXFPGAPXDRXSFXXXGXXFFRGFSPXXXXXGGXXXXXXLXXXGXXXXXXXXXXXXXXYPLPXXPPVXPXXXPXGXXXXXQXXWXPXXXXSXXXXXXSXXXHXTXFXLXXXSXPXXXXXXXXFXXQXXXXXSCGXFXXXX

SEQ ID NO: 193797 - protein, 103 aa, Oryza sativa
  unsure (1)..(103): unsure at all Xaa locations
  Clone ID: PAT_MRT4530_89901C.1.pep
LDWAPPDPDGRKRAFFFGGGIAHFPEVAGPFKGIIRALKEKGSQFKGARMNIFVWRGGSNYPTGLSQKGALGAELGVPNXGYGPQAPMAGIFHPALYCLMGEA

SEQ ID NO: 193798 - protein, 96 aa, Oryza sativa
  unsure (1)..(96): unsure at all Xaa locations
  Clone ID: PAT_MRT4530_89902C.1.pep
YXRSVGIIIIIHMYKLKLYWDSSSGFCNLLLLPPFQSPHLDHLFFSSLKHMPLLCGFAVVLLLPPQYHYNVXVFKXFYDVCKEXRXXSKKKKKKKK

SEQ ID NO: 193799 - protein, 96 aa, Oryza sativa
  Clone ID: PAT_MRT4530_89903C.1.pep
AHASGCAGVRLAARRRAGGACGAGPAARLVSSCSWSWDVGRRAGRRAVGGCATEGCRHLAWPADRLSRAGQDRRSRSRTATASRAGQEQHNSDNTN

SEQ ID NO: 193800 - protein, 93 aa, Oryza sativa
  unsure (1)..(93): unsure at all Xaa locations
  Clone ID: PAT_MRT4530_89904C.1.pep
GGPDDKEAAGAAEGAGREEEHGETLCGACGESYGADEFWICCDIXCEKWFHGKCVKITPAKAEHIKQYKCPSCSGGNGGGGGVSGNGKRARPS

SEQ ID NO: 193801 - protein, 367 aa, Oryza sativa
  Clone ID: PAT_MRT4530_89905C.1.pep
MDAQYNPRTVEEVFRDFKGRRAGLVRALTADVEDFFRQCDPEKENLCLYGFPNEHWEVNLPAEEVPPELPEPALGINFARDGMQEKDWLSMVAVHSDAWLLSVAFYFGARFGFDKNDRKRLFGMINDLPTIFEVVSGKSKAKPPSANNHSNSKSKSSNKTKSSEPRAKQPKPQPQPPVKNEGREEEGGPDDEEGGGGGGGGGREEEHGETLCGACGESYGADEFWICCDICEKWFHGKCVKITPAKAEHIKQYKCPSCSGGNGGGGGVSGNGKRARPTKREAIISQYLVRDERSKNTSTHARSPLISDNPYEVISDIRIMLAEQYTTNAREDDFDAKPNDKDNQGEGNVAWGGINKELYSLQVTIQN

SEQ ID NO: 193802 - protein, 62 aa, Oryza sativa
  Clone ID: PAT_MRT4530_89906C.1.pep
TWGGRFTFLFNTILTQKRVQHLNKRKSECTNNTGGNTLKLIYYLNGTTIHHELTTVTPRYVI

SEQ ID NO: 193803 - protein, 113 aa, Oryza sativa
  Clone ID: PAT_MRT4530_89907C.1.pep
FVGTMAYKDPVAAAAQKYKPIQSAVPGTTLGPIQIEAFLGGGKLYDTPGVHLHHRQAAVIHADDLPSLAPQSRLRARCFPVCICIQWHTCFFLKTCTLIFSSEYNVVFRLMIQ

SEQ ID NO: 193804 - protein, 34 aa, Oryza sativa
  Clone ID: PAT_MRT4530_89908C.1.pep
EAEKARTVVVNTLKNAISVIDDLGERSQSVGVCN

SEQ ID NO: 193805 - protein, 87 aa, Oryza sativa
  Clone ID: PAT_MRT4530_89909C.1.pep
MAGGGFPVARRWARTWGRWVQTPERVARTHWAERGAGWPTASGARRPDLVCRAATALPPPVAITGSSPVVAITSAGSSSSPDLAAPH

SEQ ID NO: 193806 - protein, 259 aa, Oryza sativa
  Clone ID: PAT_MRT4530_8990C.1.pep
MSGAAKEARGELVIAVHDTVTIAGHEHKTMVALEKGRIGDAAPVETDMGVASIYIENVEMMKVDNRIIGTNNFIELNERNRSQGLQSGYYGKTVKGKRCSVAIDHAAVKGKQGTWRRRTKSSGEGLGLQRLVFEGLGYINSSTPHLSGCCSWGALPVSTQGCGVPRKVCEGFDFASAREEIKSDIKVLSKGIRDGEQDATLGGTKTTATEGLGDASTRRSPIGTTADSRPPNRRSEKGEKGDQGRGGDVGRGALVDSTT

SEQ ID NO: 193807 - protein, 267 aa, Oryza sativa
  Clone ID: PAT_MRT4530_89910C.1.pep
MPFAIEHQAAAAPELYVRYTAVEGGCVGQDARQKDEEATAASERGHAPATCGGSGGRSLPRLRYWYILWCGGDSFVRMMSKDTDVEVLMPNEDLHTSTNGAKGSAKRSSNYAHKEDIQLCISWQSISSDPIIGNEQLGKAYWQRIAEHYHANRDFESDRNANSLEHRWGNIQKEFQTLESHKRPRSRKSSTPIDRAGEEDEGDDASKSTAPDLSQPSAKKRPIGRKQAKEKLKNGGEDGPYKEAMKDLLDAKEKEAKLKEERWKETW

SEQ ID NO: 193808 - protein, 483 aa, Oryza sativa
  Clone ID: PAT_MRT4530_89911C.1.pep
MGRSKKKTFNYLKERVWKKIQGWKEKLLSRAGKDILIKAVAQAIPAFAMSCFDLTKTLYDEISSLISRFFWAQHDRENKMHWIAWDKLCSRTEKGGLGYRDLHLFNLAMLAHQAWRLLSNLDSLCARVLKAKYFPDGKLMEVRESPGISYSWRSIVRGVQVLKVGLIWRVGDGTDIDMWNDPWIPLGTTKRPITPRRGIVLNKVADLINPITGEWDRELIQDIFWEEDVKNILAIPVHNGYSDVAAWHFDPRGIFSVKSAYHTLEYQRDRQAIRQTGESSSGKTSSAALQWEKLWRLNHLPKVKHFLWRLAHNSLPLRQNISKRGMEIDTRCPVCLRLDENGGHCFFKCKFVKPCWRMLNFEHIRQELSLQTSTLDVCKHILNLREDIMLTTVILLWNWWDARNKVNAGEDRRTHEEAANLSGGWGFILRDHEGNGVLARAGRIELVHDALSAEAVACLHALRAVLNHGFSYFSVETDSSILV

SEQ ID NO: 193809 - protein, 1427 aa, Oryza sativa
  Clone ID: PAT_MRT4530_89912C.1.pep
MKTFILQQMVQKGRAKRSSNFNRKEDIQLCISWQSISSDPIIGNEQPGKAYWQRIAEHYHANRDFESDRNANSLEHHWGNIQKEVSKFQGCYEQIERRHPSGIPHQELLRNSPKFQTLESHKRPRSRKSSTLIESAGEEDEEGDDARKSTTPDLLQPSAKKRPMGRKQAKEKMKNGEDGPYKEAMKDLLDAKEKEAKVKEERWKETKEIQERKLLFAEHVRTYVLAMRTQIAASKVAALNGGFDGSSGFGATASPSSRELAQRLLKKNAEHESRLRRSAQSKVPSDPNIWFQMRENYEKIILADHDFSEKREIEYLLWQLHYKRIEEFRAHIVSAGKNNANPDRIKRIRSSVRSFLSEATGFYHDLMLKIRSTYGLPLGYFSEGPDSSVVPDKDGKKVVGVKKGLLSCYRCLIYLGDLTRYKGLYGDVDYASREYAAASIYYKEAASLCPSNGNPHHQLAILASYAGDEVTAIYRYFRSLAVDNPFSAARENLILAFDKNHDIYAQLSGNSKVPNAKSLPSRSVGRARGRGETRFQPKGSSTEENSKEREHSIQEILKAFYIRFVRLNGILFTRTSLETFGELSATVISDLQILLSSGPYEELNFGVEAAENALSVVKLIAILIFTVHNANKDADNQSYAEIVQRRVLLQNAFAAAFEFVGYLLKRCAELHDVASSIYLPAILVFIEWLACHPDFVASSEMDEKQADARSFFWSQCVPFMNKLILTGLAHVDGDNDETCFFDMGTYEEGETGNRLALWEDVELRGFSPLVPAQGILDFSTKQGFGSDGGTKEKKARVERILAAGKALLNFVQIDQLRIYFDASSKKFLMASEPPPPASSVPLVVSSNAQTTNHIQQEPEVSSKIGSVAEDLGVLQSKAQLFLDGDDDEEIVFKPPVSEKLPRVTSEQTSNELLQPVVVSDVNWSNDGAPPPMTFQSNGPVLTPNVYVQSLPISSLGWAANAGQHVILDVGARSTSDIFESLKAPDHNWVSTGAPLVGSLDTVPMASFSNIISDQRTPPSSLGCFSNPDNTAILPGQDSFLLSALNNVNIGASGFLDQRVNGGLSGLQSVGNVPQVSAQATMNSTNPMIGQYKHTEVTIPSAFYSVLPSVVSSDGVSKKNPVSRPGRHVGPPPGFNNAPPKRQDDSILAGNGQHVQTNDGIWLDGYRSSLDYVNNQRFAHSNVTTASSTFTTPFPFPGKQAFSMHPRGSDEKQWQDFHLFGPTKQLPELNFQQGNQQNGPLAEQLPAQSAWSGNYLDLLRICWECLSWKHNKCYPWNWVWQVFQAMKGILDDPFHCLMRICTESSLTSQTQGFDLMSNLQFCIRAVTEMRQMMGVLQIDAGMLPSSPPWMLASCAPGDDAWSRRATVIVPVPASCRSSSCRTLSPVAFAVLLTVTQGSSTAPTWRDTAPPPAASPASSSAARGGESRR

SEQ ID NO: 193810 - protein, 146 aa, Oryza sativa
  Clone ID: PAT_MRT4530_89913C.1.pep
MKTFILQQMVQKEEPKDQATLIKEVSKFQGCYEQIERRHPSGIPHQELVLEAEALYSSNASKNRAFQFNHCWLKLRNSPKFQTLESHKRPRSRKSSTPIESASEEDEEGDDARKSTTPDLLQPSAKKRPMGRKQAKEKMKNGEDGP

SEQ ID NO: 193811 - protein, 245 aa, Oryza sativa
  Clone ID: PAT_MRT4530_89914C.1.pep
MAEGGGRGLGGELQGVTSQPPAREDHSSTESDRNANSLEHRWGNIQKEVLEAEALYSFNAPKNRAFQFNHCWFKLRNSPKFQTLESHKKPRSRKSSTPIERVDEENEEGDDASKSTNLDLSQASAKKRPICRKQAKEKLKNGGEDGPYREAMKDLLDAKEKEAKLKEERWKKTKEIQERKLLFAERKLVWDQQHKIMFFDVSTLAMRAHIVASNVAALNDGFDGSSGFGGEFGGGNGESLSTSME

SEQ ID NO: 193812 - protein, 70 aa, Oryza sativa
  Clone ID: PAT_MRT4530_89915C.1.pep
AQRCKNDHAKSMFLQSHPLRNTCPSGKCQSKLSDCKYVIKFRSCHQIGVKEVKSTYNVKIAPSYLSWDLS

SEQ ID NO: 193813 - protein, 779 aa, Oryza sativa
  Clone ID: PAT_MRT4530_89916C.1.pep
MGVYLSTPKTEKLSEDGENDKLKFGLSSMQGWRATMEDAHSALLDIDNDTSFFGVFDGHGGRVVAKFCAKYLHREVLRSEAYSAGDLGNAAHKAFFRMDEMMRGQRGWRELQALGDKINQISGMIEGLIWSPRGSDSNDQHDDWAFEEGPHSDFAGPTCGSTACVAIVRNSQLVVANAGDSRCVISRNGQAYNLSRDHKPELEAERERILKAGGYIQMGRVNGTINLSRAIGDIEFKQNKFLSPDKQMLTANPDINTVELCDDDDFLVLACDGICAAEEKATEQCCAVRRSAAAARAMEFRFRAGDRRHRPPSAASGPFSDTRRGYFVGAAQAMRGAVGHFRGGLRPPPPPPTPFGWEEAARLERIISEEVGRRLIEKEVERRLIEEDVRREVAFAHGLHVLPHDPFPRPPPPPPEMPVGMHPHPHEPPPRFQELGAWEGFRPRRQHAGVAAPLRFGQRMLLGGAERRWSPPPPPRPKPKHKLVLREIEPGESSEVPSETKHSEAKPLETKPLQTKVSGVKRKVDAIPATTRPGKLQKPAQDWSCALCQVSATSEGALNEHLEGKRHKAKLAHCGASNAIKDGKSSLKEKTANKDDAGPSDAPKKICIQVDGAMHEVVQKSNYLWCDRCKVRCDNNVTMADHLRGKKHSGLNKVWTSINAVRMNKKKEQSAATWEETVNENERTEIPVEAKDDSAGLSTEEDETCHYEIPVKNSKNEGTYLATEVDQSDSEIETPVEIMREGLNMATDATDENVRMEDPLEIKKENPDETNLAPKEEQH

SEQ ID NO: 193814 - protein, 407 aa, Oryza sativa
  unsure (1)..(407): unsure at all Xaa locations
  Clone ID: PAT_MRT4530_89917C.1.pep
MHQAQLEKIQAREETLDSVMRKTEEKRQAALITSSALAEVLGNIRLQYEAYAKVNASLRARSVALEAERKALDERTRFAQEFEATIRRRIEVLDRNQREQKGCGRAQAQRAQELKERALALEERARALDQHETTLAVHEATAAEAESSLRLREEAATERNQTTIATEALVARRTEELWLREEAWRERDAALAEREAEVNRREVAARRLGEQLTKCEEAVAGHETRHVESARVERTAMVARALELEAREKELAARGQPGDAELVSQLTAAQDTLANLGCLVQNQAGEIAALHLTNDIGPGQLYDAIERLECVGRRVGISVRRDKKLLPTRPALALRLDEMAADLERLKEEVGEAVKSSSASLARAAVELVLASHQARDPNILPWHVLEXFPPGIETRAQEQVRDAADV

SEQ ID NO: 193815 - protein, 330 aa, Oryza sativa
  Clone ID: PAT_MRT4530_89918C.1.pep
MTSGGDSFVRMMSEDTDVEVLMPNEDLRTSTNGAKGSAKRSSNYTRKEDIQLCISWQSISSDPIIGNEQPGKAYWQRIAEHYHANHDFKSDRNANSLEHRWGNIQKEVSKFQGCYNQTERRHPSGIPHQELVLEAEALYSSTAPKNRAFQFNHCWLKLRNSPKFQTLESHKRPRSRKSSTPIERAGEEDEGDDASKSTAPDLSQPSAKKRPIDRKQAKEKLKNGGEDGPYKEAMKDLLDAKEKEAKLKEERWKGTKEIQERKLLFAERKLVWDQEQKIMFCDVSTLEPDVRTYVLAMRAQIAASKVAALNGGFDGSSGFGGEFGGGNGEV

SEQ ID NO: 193816 - protein, 84 aa, Oryza sativa
  unsure (1)..(84): unsure at all Xaa locations
  Clone ID: PAT_MRT4530_89919C.1.pep
QITDAVAVNQIWKATLGAPDSDHHXLWMDYCHFSDTSDADWLICYLSKDVTIGKRIRYEAMIIMDKLLWTMHPPRKFIPDFYIY

SEQ ID NO: 193817 - protein, 74 aa, Oryza sativa
  Clone ID: PAT_MRT4530_8991C.1.pep
LQDQINWHASIPEGEFWTCTGVKQISQASCFHINRVEVDGKREEVEVEGEVGVHGGVARISHWGLGGEGDQQGR

SEQ ID NO: 193818 - protein, 730 aa, Oryza sativa
  unsure (1)..(730): unsure at all Xaa locations
  Clone ID: PAT_MRT4530_89920C.1.pep
MANGNDDVSDDVITGDGSGGACSPANDGATTQTEDTNGRRRRRGRSGDGLRVDGDGGAPAVFGGGEAVDGDDDDLTIPMVATTTDDGGCNGDAARLNRRQRRRRLGLRGGGARRDGGLRQSAGLHRLPPHRPPRRPPPLPDPLPPGRRGVRLPPPPPGRRCPSLPEKREEENEERRKKRKRWGEEIRAPHYPAGPVDGKIDNGDEDSELEDDEASRRRLRLAVDAAGHALVTAAACARPSTSPPAPWPSPPPMPGGRRSRRLCGVRTIVGLGSFGSSMDYILRFNLHPTGPRGETGRKMHQAQLEEIQAREETLDSVMRETEEERQAALITSSALDEVLGNIRLQYEAYAEVLAKRVEDARGVLDAAAAQVRRASKVDASLRARSVALEAERKALDERTRFAQEFEATIRRRIEVLDRNQREQEGCGRAQAQRAQELEERALALEERARALDQHETTLAVHEATAAEAESSLRLREEAATERNQTTIATEALVARRTEELWLREEAWRERDAALAEREAEVNRREVAARRLGEQLTKCEEAVAGHETRHVESARVERTAMVARALELEAREKELAARGQPGDAELVSQLTAAQDTLANLGCLVQNQAGEIAALHLTNDIGPGQLYDAIERLECVGRRVGISVRRDKKLLPTRPALALRLDEMAADLERLEEEVGEAVKSSSASLARAAVELVLASHQARDPNILPWHVLEXFPPGIETRAQEQVRDAADV

SEQ ID NO: 193819 - protein, 303 aa, Oryza sativa
  Clone ID: PAT_MRT4530_89921C.1.pep
MANECDSFMCMMSEETHVEAYSLPMQNEDLHTSTNGAKGRAKRSSNFNRKEDIQLCISWQSISSDPIIGNEQPGKAYWQRIAEHYHANCDFESDRNANSLEHFGVLEAEALYSSNASKNRAFKFNHCWLKLRNSPKFQTLESHKRPRSRKSSTPIKSAGEEDEEGDDARKSTTPDLLQPSAKKRPMGRKQAKEKMKNGEDGPYKEAMKDLLDAKEKEAKVKEERWKETKEIQEHKLLFAERKLVWDQEQKIMFCDVSTLEPDVRTYVLAMRTQIAASKVAALNVGFDGSSGFGGEFGDGNGEV

SEQ ID NO: 193820 - protein, 205 aa, Oryza sativa
  unsure (1)..(205): unsure at all Xaa locations
  Clone ID: PAT_MRT4530_89922C.1.pep
MADGNDDVSDDVITGDGSSGACSPANDGATTQTEDTNGAPAVFGGGEAVDGDGDDLAIPMVATATDDGGCNGGPARLNRRQRRRRLGLRGGSARRDGGLRQRWRRIEESSGVLLKGLASGDGGPRRPAARWKARVGGRKVDPNRAQIRRFPNEIDRSFYKRKGRGDRGDYFPSNDFTENGKDRPDWKAAAXLGFRPAAARGGRRA

SEQ ID NO: 193821 - protein, 547 aa, Oryza sativa
  Clone ID: PAT_MRT4530_89923C.1.pep
YIPFSAARENWILAFDKFHMQNHDIYAQLSGNSKVPNAKSLPSRSVGRARGRGETRFQPKGSSTEENSKEREHSIQEILKAFYIRFVRLNGILFTRTSLETFGELSATVISDLQILLSSGPYEELNFGVEAAENALSVVKLIAILIFTVHNANKDADNQSYAEIVQRRVVLQNAFAAAFEFVGYLLKRCAELHDVASSIYLPAILVFIEWLACHPDFVASSEMDEKQADARSFFWSQCVPFMNKLILTGLAHVDGDNDETCFFDMGTYEEGETGNRLALWEDVELRGFSPLVPAQGILDFSTKQGFGSDGGTKEKKARVERILAAGKALLNFVQIDQLRIYFDASSKKFLMASEPPPPASSVPLVVSSNAQTTNHIQQEPEVSSKIGSVAEDLGVLQSKAQLFLDGDDDEEIVFKPPVSEKLPRVTSEQTSNELLQPVVVSDVNWSNDGAPPPMTFQSNGPVLTPNVYVQSLPISSLGWAANAGQHVILDVGARSTSDIFESLKAPDHNWVSTGAPLVGSLDTVPMASFSNIISDQRTPPSSLRLFQ

SEQ ID NO: 193822 - protein, 655 aa, Oryza sativa
  Clone ID: PAT_MRT4530_89924C.1.pep
MEKKITGYTTVDISQWHRKEHFEAFQSVAQCTYNQTVQLDITAFLKTVKKNKHKFYPAFIHILARLMNAHPEFRMAMKDGELVIWDSVHPCYTVFHEQTETFSSLWSEYHDDFRQFLHIYSQDVACYGENLAYFPKGFIENMFFVSANPWVSFTSFDLNVANMDNFFAPVFTMGKYYTQGDKVLMPLAIQKFDDKLSNMRIGRRPGRPQGVRVGRFINAAGTTGFPTGKRAICQILGLAGIDLFTPSDVVEKRNVRKVCMCIRLLSKKARTMRLTVPDFDIVTHTIAMPNYIVGGIRRSLEQPQCSSSGSSGYSPSANSKALNQQRVFGAENDQQCETHYDSDEAESKLSALEPEDSVSEDNISTLLKSGNMPKEEKEGYGDSEHGMHEEKSLSESVGSIDFGNMESDSVGSTPLFHKNESYCCIESPTDQCSRTRTIRCSLSSEESDSISSHLVVDSSKAKRTHGEHLEPLNGNGKRFANDPEKESDALQKVTFDQQCDLLACDGESVCSNCDSTPYSSLTPIDSACGKLPAVSEDDSACRGLELEFRCGNETDVSQKEDKQVESEYKAENDSSAQMNENDVPKSGKGMLKSVAGGITLVGAVFFIAHLRRSKDRSFAGVIAPFSEKSVQGDSRAKKVEKTKAGAVYPGEWLKV

SEQ ID NO: 193823 - protein, 331 aa, Oryza sativa
  Clone ID: PAT_MRT4530_89925C.1.pep
MASESDSFVRMMSEETHVEAYSLPMQNEDLHTSTNGAKGRAKRSSNFNRKEDIQLCISWQSISSDPIIGNEQPGKAYWQRIAEHYHANRDFESDRNTFSLEHRWGNIQKEVSKFQGCYEQIERRHPSGIPHQELVLEAEALYSSNAPKNRAFQFNHCWLKLRNSPKFQTLKSHKRPRSRKSSTPIESAGEEDEEGDDARKSTTPDLSQPSAKKRPMGRKEAKEKLKNGGEDGPYKEAMKDLLDAKEKEAKVKEERWKETKEIQEHKLLFAERKLVWDQEQKIMFCDVSTLEPDVRTYVLAMRAQIAASKVAALNGGFDGSSGFGGEFGGGN

SEQ ID NO: 193824 - protein, 434 aa, Oryza sativa
  unsure (1)..(434): unsure at all Xaa locations
  Clone ID: PAT_MRT4530_89926C.1.pep
MAAPPVSGDGAAAAAPVVALGAAGAVGGPRPYEVAVAAAELRPVDCNLAALCDHVQAEGFGSGAFSDVVVEAMGATYRLHRLIISRSAYFRNMLHVKTMVVMGNVSEMPAGVIFAKVPHWNYERXRFELALYALLAKVTLSDVEVSGNENLNLTSSSANSDHSMRKGKSPMNEAGNIYLTDAHGEGNAVFGPVRVNVRGAVDGLAGIGRGNSNVPGAAWAPTRYVFSRVPYGLGSRNGQQPFANDESEPRVDYNGGSPRVRQESKEHELGSNLETTENTTISLDMKTPLSHFPPFRFGVEFEDVHRLADSQVKHSTEVFYAGSLWKVSVQAFNDEDPHGRRTLGLFLHRRKAEPLDPLRKANMYVDHREKVTARYQLICPSKREVMIFGSLKQAGTLLPKAPKGWGWRTAILFDELGDLLQGGSLRIAAVVQLV

SEQ ID NO: 193825 - protein, 76 aa, Oryza sativa
  unsure (1)..(76): unsure at all Xaa locations
  Clone ID: PAT_MRT4530_89927C.1.pep
RRKRKGEESEEKKEEKRRKREREEEGRKEXKGKEERGSEGGVKKEXRKKEGKKRRKRKERREEKSSMKEEDRRSKQ

SEQ ID NO: 193826 - protein, 216 aa, Oryza sativa
  Clone ID: PAT_MRT4530_89928C.1.pep
MVNGWKAGAAAIFASSPAARFAGDRRRRGGGVEREPEETDASRKNGKKKLGKRGRNYEKGSGRESDEGRRGRWGPNRGGFDGGARRGASSSRPVRLRASLLSIYSASGTARVPRWEQQQHRVLCPWLAWWRVGRGRGEGSVTSVTARVQATHVSFRSRLLDQATSNDRGENDAQSFLAGWSQLSPAPAVGWSNYFSCCQHVTKWSSNFELVPTMAK

SEQ ID NO: 193827 - protein, 244 aa, Oryza sativa
  Clone ID: PAT_MRT4530_89929C.1.pep
MVALDLRNPPSAATTVKEDQQFTIFIDGVETALHEGVIQWNGGTVTLVSTGVLAVDRLQHVLVRGGGSGDVSFTRCGFAAAEACGVASFHRCDAVRADGAREVAVRRCRSADVERAGVVAIRRCKGAARVRGAGELHVGRCHEANVGGCADVAVGRCRAARADWCGAIGIERCGSADVSRCGAVRVDRCRAASVSGCGSVAVRRGKVNVIEQPPVCQEKPMYHLVHAEPVYAIPLEISSEIKLQ

SEQ ID NO: 193828 - protein, 96 aa, Oryza sativa
  Clone ID: PAT_MRT4530_8992C.1.pep
MGGGGHGGGTTYKGYTIPHNKRWHTVAGKGLCAVMCLLLSFCLNSLSWQHEYRNLIVNTLAFCFNLHFKKGMRHPWDGHDDHSHGHGHEHEAPLDH

SEQ ID NO: 193829 - protein, 114 aa, Oryza sativa
  Clone ID: PAT_MRT4530_89930C.1.pep
ASWCGLCSRAGARAPVTWGSSAALPLGSPSSSLGGLCLPCGLLWFSIFFARGPCLGPRCVPCICFSWAPCSPRCLYAPFCCVAPARSLGAWPLSCSVRLRVCPFVVAFNVDCIL

SEQ ID NO: 193830 - protein, 37 aa, Oryza sativa
  Clone ID: PAT_MRT4530_89931C.1.pep
DWHNGKMRFRCLYVCSSGSGNVPSMLILYQQALTYDS

SEQ ID NO: 193831 - protein, 180 aa, Oryza sativa
  unsure (1)..(180): unsure at all Xaa locations
  Clone ID: PAT_MRT4530_89932C.1.pep
GXXXNFPXPKGIPNGGFLGKPLGECRXGENLERNRGKGPPPGPANRLGPEPLDSFLFKXVSXIWEPPPWFXGNPQKRXGXKLFAPGXRGAXKPXKGKTSLGFGKASQKPXLLETFXKNXFXFLGTFGGXLXGGXKKNLNPXTPFFXLXLGFPSXKNFSPLPRELTLGNPHFTQNFLIPGF

SEQ ID NO: 193832 - protein, 193 aa, Oryza sativa
  Clone ID: PAT_MRT4530_89933C.1.pep
MGRPAAFRRDGGSSTSATTSSPATATPSWRCCLNSLDYGGSVGWNVLNPGRPRVAARPVAGQDGRRARSYEHSEAGTAISWDDALQSGARRFEHKCYNLFTCNSHSFVASCLNRLAYGGSVGWNVLNLAALVWLRGRWLGKMAVVRSLLPFAAVACVGVLMAGWSFLISMAAFSSLLLGWFVLGVYCFKGLVC

SEQ ID NO: 193833 - protein, 252 aa, Oryza sativa
  Clone ID: PAT_MRT4530_89934C.1.pep
EGGVLGARCSKLSVCWWPPHFKSPLLENGAAADDGSGVPVFAEYSLDELRVATDGFSPERIVSEHGEKAPNVVYRGTLFSTGRTVAIKRFGRSAWPDSRQFLEEARAVGQLRSVRLANLIGCCCENGERLLVAEFMPHETLAKHLFHWETKPLSWAMRVRAAFYVAQALEYCSSKGRALYHDLHAYRVLFDVDGNPRLSCFGLMKNSRDGKSYSTNLALTPPEYLKTGRVIPESVVYSFGTNLLDLLSGKHI

SEQ ID NO: 193834 - protein, 197 aa, Oryza sativa
  Clone ID: PAT_MRT4530_89935C.1.pep
ARGTYVDSSSEESEDQQVKICDICGDVGEEKKLAICSRCNDGAEHIYCMRVMMPEVPEGDWFCEECRTEMQIEKEKSILEKSQVKVSTISVGSKVKAANVSSKDLNVSNTSSKSTKEDAEEGIVPSGCTSTGKEEDGRSCIGGSEAANKNEEQTSSGRNDDFNLKILHGERHMQSHNNDVPFTSVAHDISNMAVKNK

SEQ ID NO: 193835 - protein, 471 aa, Oryza sativa
  Clone ID: PAT_MRT4530_89936C.1.pep
MGARCSKLSVCWWPPHFKSPLLENGAAADDGSGVPVFAEYSLDELRVATDGFSPERIVSEHGEKAPNVVYRGTLFSTGRTVAIKRFGRSAWPDSRQFLEEARAVGQLRSVRLANLIGCCCENGERLLVAEFMPHETLAKHLFHCMCLVLTFSFFVRAAFYVAQALEYCCCFRFEYISNSIASKVLSMGYGETKPLSWAMRVRAAFYVAQALEYCSSKGRALYHDLHAYRVLFDVDGNPRLSCFGLMKNSRDGKSYSTNLAFTPPEYLKTGRVIPESVVYSFGTILLDLLSGKHIPPSHAPSHALLGIQHDKENTERISLSAIAKVYARADLDEVHEMLENDGYCEDERATFEVSFHSWTGQQVSDSILVKKHGDSAFQSKDFATAVECYSRFIDTGVMVSPTMLARRSFVYMVLGKLQEGLADAKKAADISPEWPTAHYLQGMAYLAMGMEPEGHEELKQGAALEAERNAR

SEQ ID NO: 193836 - protein, 91 aa, Oryza sativa
  Clone ID: PAT_MRT4530_89937C.1.pep
AFPQQQPVIIEQHYAATPRELQLFPESASSEDSEPSQEHGISDHVTRPQARYPTPTATLPVNLFPVFPGRQDQQCSSGTSGPNEEDRIGRS

SEQ ID NO: 193837 - protein, 125 aa, Oryza sativa
  unsure (1)..(125): unsure at all Xaa locations
  Clone ID: PAT_MRT4530_89938C.1.pep
GRANVRRQREGIPSILRYTSHIDMVCSRVYGRFRHTLRKFITEFTDGRSPTRSEMGRHCVVFGPVPPSPXWETGDLRYKRDXREDIRHRISEPTYPPQPTKPELIGAKSPGDLVGSTRLRSCRYR

SEQ ID NO: 193838 - protein, 66 aa, Oryza sativa
  Clone ID: PAT_MRT4530_89939C.1.pep
EKSHTNTARIGHGHRLMSSTSGHLCYQLGGVDRGATERDLKAPIETNMTALQPAEMLDELRDYRER

SEQ ID NO: 193839 - protein, 95 aa, Oryza sativa
  Clone ID: PAT_MRT4530_8993C.1.pep
KNLHLLIYYRCWFFKQPVPTKLNRHERAEPAEPAAYFHRSTSAISTNLIHSRRSHLALIYTRSARHRVGNGAGWGRVGLERPRPTPRLLPPAPVP

SEQ ID NO: 193840 - protein, 157 aa, Oryza sativa
  Clone ID: PAT_MRT4530_89940C.1.pep
YSTVDPFSFSSGDPLTKKDDFAIASSPWHPAKKDGFAMSRQGDVVTIGGGNGFPCSLVWFAINSKSPKYDTTRYAFCATAFTLPCTGAGAATSISTLIRSHHIHLVKHPTLPPSLAFNTSVSLAPPIDERPDLDRWYRYLKINNAGSELCSLFGYGE

SEQ ID NO: 193841 - protein, 79 aa, Oryza sativa
  Clone ID: PAT_MRT4530_89941C.1.pep
MGRRWRPSQSFPRQAPPRPRRAPHQQPTGSNSVDRGVCRRRPPPPDRRSWPPPPPTQPAASPPPPPSRRPASGRRRRPP

SEQ ID NO: 193842 - protein, 116 aa, Oryza sativa
  unsure (1)..(116): unsure at all Xaa locations
  Clone ID: PAT_MRT4530_89942C.1.pep
PSSLGSRAATMADHHKDQVVYSLGERCQPGMGYPMFFLPRGGXXXNLQCVFHSAPGGALDEQLLQDCCRQLAAVYYIWCMCSALNHXXGGXYRELGATDXGHPMFVVXPGFLKWDL

SEQ ID NO: 193843 - protein, 51 aa, Oryza sativa
  Clone ID: PAT_MRT4530_89943C.1.pep
QNPFRHTTVVYRRSYGLLYHEYSGGNHCPYMVSNRTSRCECEHIVNNRRGL

SEQ ID NO: 193844 - protein, 63 aa, Oryza sativa
  Clone ID: PAT_MRT4530_89944C.1.pep
GVMRFVSISFSYVVFRSILMPRSNDLMIVRDSELLVIAVEHRTHSNFVLVPSRKAVVPCCRQN

SEQ ID NO: 193845 - protein, 199 aa, Oryza sativa
  Clone ID: PAT_MRT4530_89945C.1.pep
LAYGLFSDGKIIAVFSGIVVSWNETTRSATIVTCSEAVCDDGALIDPKPKVLVHLPNNTILDGQLLFFNDHYRIMLLEVVSDTPLQPANFGSTPKFGQDVFALSRDYESSMHARRGTVLWQEPPNVLEYMYYCLSLSCQLAPCGSGGSVIDQHGDVVGMAIGAPPNPDILPISIVQTCIEMWTKFSRIAHPVLNMELRA

SEQ ID NO: 193846 - protein, 52 aa, Oryza sativa
  Clone ID: PAT_MRT4530_89946C.1.pep
LSPRPEAIIRHRISHVVAPQRCHHSRVRHCQSTTALAAALASTSLLLRLIGL

SEQ ID NO: 193847 - protein, 410 aa, Oryza sativa
  Clone ID: PAT_MRT4530_89947C.1.pep
MEGNLPPRGALVHGHGGGVGAFDLEATMQPPPPFHFAQDPHLHHHQGMVPVRGNPMLDLGNVVKTSPSDEEDVDDGHHHGGGGGSGKEASQWHRVKWISGMVKLLVSAVAYIDEDVDMDYGTGSAARRKHAMLKRKGKWRLVSAAMTERGFPVSPQQCEDKFNDLNKRYKRMTEILGRGTACQVVEHPELLEGMRLSGKLKEEARKHLNSKHLHYEEMCSYHNRNKMCLFDDPALQKSLRLALRSGEEHAKKNPFGYDDEDFSDDDDEDEEFDDLEVSAEDHHHGIHGAKRLKHDQEETHFGSNLSEVAVIDMNKMLSEGSGGPTAEKSPSTPGMRDIRLEKRRLKIKAQMLKIEQKHFKWLRFSKEKDRELEKMRLENEKMKLENERLELELKLKEIEMGIKPKKIFSD

SEQ ID NO: 193848 - protein, 616 aa, Oryza sativa
  Clone ID: PAT_MRT4530_89948C.1.pep
MASRGTTSSCLLALLLLLLLPIAPLAAPRRSRFPSTLRLASFDASPPPPPTTFFEVDRPIRPPRGSVGPCSTLLLSHSFGYTYGRGPVTVAYAPPACLAAGAAAGGSLALAVLEWSADCRGRQFDRIFGVWLSGAELLRSCTAEPRATGIVWSVSRDVSRYTALLAAPGEVAVYLGNLIDDTYTGVYHANLTLHLYFHPAAAPPPPEQQQQQQQQHADLIFPISRSLPLNDGQWFAIQNSTNVQSKKLVIPSNTYRAVLEVFVSFHSNDEDWYMHPPNEYIEANNISILPGNGAFREITVQLDGDVVGAVWPFTVIYTGGVNPLFWRPITAIGSFNLPTYDIDITPFLGKLLDGKEHNFGFSVTNALDVWFIDANLHIWLDHKSEKTFGSLVSYEAPKLTLHVDSNFSALDGRFVTSAGRHISATGWVNSSYGNVMTTFYQRFSYKNSNLYSKNGTFQVVNQTIDAKSGVFAKSSVVLFLEEVHRTFPLYIFSGTSDQVGDEYSLVSVVKMGFNERRISGRKQEFSYISLRNAQSAHGYMKLQMEQKSGVGINKISHVKSKERRLTYHDSHINRLPALHLWNGNLHPNQSPAPSHGMIRVLEIRRVFYVKSRVFYD

SEQ ID NO: 193849 - protein, 102 aa, Oryza sativa
  Clone ID: PAT_MRT4530_89949C.1.pep
LSRARDDDDRSFDPSCLSPSLPGVALPQQPVVAPREGPRVQVAARRAAGGEAVEPEAVAVVTAVLVHVRPHRLTPVVLQALGEHGRWRVAPPGGLRLAHGRG

SEQ ID NO: 193850 - protein, 82 aa, Oryza sativa
  unsure (1)..(82): unsure at all Xaa locations
  Clone ID: PAT_MRT4530_8994C.1.pep
GSHPGATGPSVRPXFREDECERLLTRAAEGDGSRVEPRGDALRRRDVEHDKRAVRAKAEVVGGRPLSSLLLMLTPACICVGG

SEQ ID NO: 193851 - protein, 56 aa, Oryza sativa
  Clone ID: PAT_MRT4530_89950C.1.pep
MLTNIAKYGLQHSNVLCMLLVVLSVLAATMATIADQQQIYSPGEQSLPRINYPAYS

SEQ ID NO: 193852 - protein, 433 aa, Oryza sativa
  Clone ID: PAT_MRT4530_89951C.1.pep
TPSLLRLVHSAAAAAARSSSFRSGLNLGLGAAMASDNIGSRDVCVVGVARTPMGGFLGALSSLSATKLGSIAIEAALKRANVDPALVQEVFFGNVLSANLGQAPARQAALGAGIPNTVVCSAVNKVCASGMKATMFAAQSILLGINDIVVAGGMESMSNAPKYIAEARKGSRFGHDTLVDGMLKDGLWDVYGDFAMGNCAELCADNHALTREDQDAYAIQSNERGIAARNSGAFAWEIVPIEVPVGRGKPPVLVDKDEGLDKFDPVKLKKLRPSFKENGGTVTAGNASSISDGAAALVLVSGQKAQELGLQVIARIKGFADAAQAPELFTTSPALAIPKALANAGLESSRVDYYEINEAFSAVALANQKLLGIPSEKINVHGGAVSLGHPLGCSGARILVTLLGVLREKGGKIGVAGVCNGGGGASALVLELA

SEQ ID NO: 193853 - protein, 85 aa, Oryza sativa
  unsure (1)..(85): unsure at all Xaa locations
  Clone ID: PAT_MRT4530_89952C.1.pep
NTSILSNIFSVLGTRGQDXQLFSVLFSVHMGHTTRLPVSPALSVRWSHVTGCRCEEGDVYLQALLIKPRSFPSCGCKHRTVRLQG

SEQ ID NO: 193854 - protein, 132 aa, Oryza sativa
  unsure (1)..(132): unsure at all Xaa locations
  Clone ID: PAT_MRT4530_89953C.1.pep
NHICPLATINLGRSMVTSLACCILDDRNQTISELKRKKKSKNRLCSIESINGQISCFYKMAYDELVGHPELLDRQWTLHLLLLRPPLDPGXXCALRQRHQVEVEVPDGRRGGRRGRRDGDGHPRAVPIVAAL

SEQ ID NO: 193855 - protein, 82 aa, Oryza sativa
  Clone ID: PAT_MRT4530_89954C.1.pep
RTCAQAEQLNVSVSPEWGVLPMQTIYGSNGWDSYAWAFKAMMDEVSLVMHNPYLEDYPMDLHVMDVLLHDGTVPCSLGRSDT

SEQ ID NO: 193856 - protein, 441 aa, Oryza sativa
  Clone ID: PAT_MRT4530_89955C.1.pep
MAMSSSSFPTATATATASFPNWVMLERFVFRRDDDKSFPDDTKATLRASGSGSHKTPFTIAFRIADPPAISRLYVQWPQGPNPEEMVACHLVATHRNLVLVCFCYIVECPVPACPQDYFIFTASGDDPVSSPLLKALPPCTYQPKGGEPLPCTYQPEGGFPPSDVEGDGNLRYPLEFRSVGILCQGEEFAVAELQVLRNINANVKARLCVLRSAISSKGEDGDGGGRWDIMELPIVYGSGEEYWDIFYWTTDTVIAFQNYLCWVDYDRGMLFCDVLQKRPGIAFIRFPLDSFPNGRSRRHFSQVYRGSLEPGRGYTITCHTLRTLGLDVGAIEWSKDFAITSKEIWSFKGPELVPHEVLLFLTVSMEMPNVMHFLTCDYEHVIRKMSVVTIDLASKTVLSVIPYVNGQEDLSGEDADMVRAKSSYPQSFLPSEFSKYFNSI

SEQ ID NO: 193857 - protein, 270 aa, Oryza sativa
  unsure (1)..(270): unsure at all Xaa locations
  Clone ID: PAT_MRT4530_89956C.1.pep
VLFRHCGRRGDRVPPPQDRRLLVNQGHPHWHGHQIQPVHCRRLPLFIKTEDFEKSDYLRHDSFTVRCDMVVVRKIRAEKGKTDPPRRDLRVXPPSDMNRQLGDLLETEKGADVVFEVAGERFAAHRCVLAARSPVFGAELYGLMKEGDAAVVVCIEDMEARVFKLLLRFMYTDSLPEMKNKDAGVMCQHLLVAADRYNLERLKLICEEKLCKHISMGTVSNMLVLADQHHCAGLKKTCCNFLGSSANLSPISRGCLSVMKELVLGCWCIH

SEQ ID NO: 193858 - protein, 155 aa, Oryza sativa
  unsure (1)..(155): unsure at all Xaa locations
  Clone ID: PAT_MRT4530_89957C.1.pep
MQLNPKARTRRNKTKVKKTLSMCGNLLEAPQSNPTSHVKLYYQNQLYRLFXSDSDPADPXVADPDSSRFLALFPNXLRLQLCFDLIFFPDADVTKSGNLVLFLLRHXXNAXXDFQATSSSARFPPAVMSFSTNPFDTPSTEYAEKRLPQKRCPSW

SEQ ID NO: 193859 - protein, 404 aa, Oryza sativa
  Clone ID: PAT_MRT4530_89958C.1.pep
MSSSAAGNSSRSASTSTIVADTETGYHLLKIDGYSRTKGTPNGTAIASSQFIVGGHRWRIYYYPNGDHTDNADYMSFYLLLDEKKNTKTKSVKVWTLFQICFADQAKALPTLTSKTVRTFGDGSSWSWGYSKFIKREDFEKSKDLRDDSFTIRCDIAIVREFLVETTEVLPPKSFVSVPPPDMNLQLGELLETEKGADVVFEVAGERFAAHRCVLAARSPVFGAELYGLMKEGNAAVVVRVEDMEARVFKLLLRFVYTDSLPEMKKKDEGIMCQHLLVAADRYNLERLKLICEEKLCKHISTGTVSNMLLLADQHHCSGLQKACCNFLGSSANLSPVSRGWLFVMKQLVLGCCNAWRLAVVHPVSVSWLVLSLSGRAAEVYDLSNSMKFTSHEHHPKEARGAIA

SEQ ID NO: 193860 - protein, 169 aa, Oryza sativa
  Clone ID: PAT_MRT4530_89959C.1.pep
MAGAGEDGKRESSWPWPPEYGPPDNALHSLGMEFTTITAGEVVGRLLVTATCCQPFKVLGGGVSALMAEAAASIGGYIASGYRRVAGVQLSINHIRPAHLGETVQAKAKPMQLGRTIQVWEVQIWRIDPSTSECKHLVSTARVTLLCNLPTPEDLKHYEQGFIKKHAKL

SEQ ID NO: 193861 - protein, 154 aa, Oryza sativa
  Clone ID: PAT_MRT4530_8995C.1.pep
LPDPASPSHPRPDLQPSVLLVRQPPVARGSEDTALLRRAAAVHRRPVAALVDNEQQQQQLFVSLPDPAPIVVGLVAHHCEPPPPSPANPSSPSLSHAPAADLVNAFSVALLISWILLFLAIGLQLFSKTSIRNASNCHGARPVVLLKMLLPENQ

SEQ ID NO: 193862 - protein, 54 aa, Oryza sativa
  Clone ID: PAT_MRT4530_89960C.1.pep
SLITRSKQALNWQKIFFYLKSLEQSTSQSSNIYAFLFSFCIYSCCIYVNGLVWR

SEQ ID NO: 193863 - protein, 51 aa, Oryza sativa
  Clone ID: PAT_MRT4530_89961C.1.pep
PPVGVFKLYLPGTTKFTRLFNDGIMETGRIHQTSLVIYISSLHWRKKKKKK

SEQ ID NO: 193864 - protein, 123 aa, Oryza sativa
  unsure (1)..(123): unsure at all Xaa locations
  Clone ID: PAT_MRT4530_89962C.1.pep
LWLQDSARSECRDGPSVMASSXTTVAPFXGXKXTAXMPVXRRSXXSXFGNXXNGXRIXXMHVXXIEGIXKFXXLSYCTAHRXEXXPKXIXFPPPPXXVXAPXFTKXXFFSPEKTQXPDTKSGT

SEQ ID NO: 193865 - protein, 220 aa, Oryza sativa
  Clone ID: PAT_MRT4530_89963C.1.pep
MEPGSVDIDTFATKIYRVMLIAALAEWVGAAQDLKLWLRLDLCGAGPMVTWVDVTGRLLSPMSSGVTWIDVTGKVVGPDVRGTGFKVVAMVGLVWSRPNVIWVTYGACCRPSARASVAVTPTAASCASAADAAPTLPQNKSGGGDTGSSRNGARSNGGGAESAATCLAAALRRPFVPKTGRTAGDWSLTTTIPAGRAVSCDTLRRWRGGGEEGRVAAARG

SEQ ID NO: 193866 - protein, 96 aa, Oryza sativa
  Clone ID: PAT_MRT4530_89964C.1.pep
MARVAASCVALLAQRRGLSAAITAAEGSAKTIDDKAVKLGTAAKDVATATATTTEEKTAFWEPDPDTGYYRPVTGTKEVDAADLRAEMLKQRMLHD

SEQ ID NO: 193867 - protein, 54 aa, Oryza sativa
  Clone ID: PAT_MRT4530_89965C.1.pep
YIWIYTSINLVAARLLFFFQQHGHLLTSYLQCMTEHCCREHIELFEERPDGSIR

SEQ ID NO: 193868 - protein, 80 aa, Oryza sativa
  Clone ID: PAT_MRT4530_89966C.1.pep
SSSLRRSPRSCRLASPSRRTAPDPARLRPSPPTDPVTDGIHMGYSSRSAGLVPEEEAQRGGGSVLREHEGVNISGVTCGP

SEQ ID NO: 193869 - protein, 88 aa, Oryza sativa
  Clone ID: PAT_MRT4530_89967C.1.pep
MTEEVAVAPLPPAEAPAISHTAAALSGKAVFVGAVVVGCHIAHAVERRRYWRRHRDSDGVYAAARSLAAGDVAAWLRAWEADRINPRD

SEQ ID NO: 193870 - protein, 69 aa, Oryza sativa
  Clone ID: PAT_MRT4530_89968C.1.pep
MRQMISPTSYYKCLVRHRIRTYSHKADIGRVFIGTKQSPGNSQVCATGPSLHRKEELLNAGRELVLISA

SEQ ID NO: 193871 - protein, 62 aa, Oryza sativa
  Clone ID: PAT_MRT4530_89969C.1.pep
KFLKLDPKKNKLAPKHTPCTVKAHKKSARKIMIPKSRKKYSAKLAQPKFKREPTFVCPPQWS

SEQ ID NO: 193872 - protein, 179 aa, Oryza sativa
  unsure (1)..(179): unsure at all Xaa locations
  Clone ID: PAT_MRT4530_8996C.1.pep
TAVRERNLVVPVAIEENFQSLASFLRLLASKPAASSASLDSFRGQSYRAXYQLXSQPLPTLQQHSSLAHIIEFVRAAVWHSRQSPLLQSAAFQLRNNQVWQQLRLVAQQSHYQDINIVQAIAQQLQLQXVDDLYFGRNLAQAQAQAXVALNLPSRYGIYPXYYSAPSSITTLGVYCTEV

SEQ ID NO: 193873 - protein, 484 aa, Oryza sativa
  unsure (1)..(484): unsure at all Xaa locations
  Clone ID: PAT_MRT4530_89970C.1.pep
MNVLASKIFPSRSNVASEQQQSKREKATIDDAKNSSKNKNLDRSVDESVLGIILGGGAGTRLYPLTKKRAKPAVPLGANYRLIDIPVSNCLNSNISKIYVLTQFNSASLNRHLSRAYGNNIGGYKNEGFVEVLAAQQSPDNPNWFQGTADAVRQYLWLFEEHNVMEFLILAGDHLYRMDYEKFIQAHRETDSDITVAALPMDEKRATAFGLMKIDEEGRIVEFAEKPKGEQLKAMMVDTTILGLDDVRAKEMPYIASMGIYVISKNVMLQLLREQFPGANDFGSEVIPGATNIGMRVQAYLYDGYWEDIGTIEAFYNANLGITKKPVPDFSFYDRSAPIYTQPRHLPPSKVLDADVTDSVIGEGCVIKNCKIHHSVVGLRSCISEGAIIEDSLLMGADYYETEADKKLLGEKGGIPIGIGKNCHIRRAIIDKNARIGDNVKIINVDNVQEAARETDGYFIKSGIVTVIKDALLXLAEQLYEVAA

SEQ ID NO: 193874 - protein, 79 aa, Oryza sativa
  Clone ID: PAT_MRT4530_89971C.1.pep
PFHIIVPPTIAFPEMLFTYTVSTLKEQETRQHMQKKLHDGHYKWNGPHKIWLEKFQHKKKTLPGVVEDQVNSMHSLEQV

SEQ ID NO: 193875 - protein, 530 aa, Oryza sativa
  Clone ID: PAT_MRT4530_89972C.1.pep
MAMAAAMGVASPYHAAHAAASTSCDSLRLLVAEGRPRRPRGVASSSSSSSSAGRRRRPLVFSPRAVSDSKSSQTCLDPDASTSVLGIILGGGAGTRLYPLTKKRAKPAVPLGANYRLIDIPVSNCLNSNISKIYVLTQFNSASLNRHLSRAYGNNIGGYKNEGFVEVLAAQQSPDNPNWFQGTADAVRQYLWLFEEHNVMEFLILAGDHLYRMDYEKFIQAHRETDSDITVAALPMDEKRATAFGLMKIDEEGRIVEFAEKPKGEQLKAMMVDTTILGLDDVRAKEMPYIASMGIYVISKNVMLQLLREQFPGANDFGSEVIPGATNIGMRVMCYICCLRIYFCCLQVQAYLYDGYWEDIGTIEAFYNANLGITKKPVPDFSFYDRSAPIYTQPRHLPPSKVLDADVTDSVIGEGCVIKNCKIHHSVVGLRSCISEGAIIEDSLLMGADYYETEADKKLLGEKGGIPIGIGKNCHIRRAIIDKNARIGDNVKIINVDNVQEAARETDGYFIKSGIVTVIKDALLPSGTVI

SEQ ID NO: 193876 - protein, 107 aa, Oryza sativa
  Clone ID: PAT_MRT4530_89973C.1.pep
MACRWVAQAAARWRVEGERGDGGGFWGAVRVAQGRERTEGSGVKPSNISFFFSELFTVIDNAWLRHPFRLLHLAPNETIEPKLDGLENYLSCKYRNPGDELGIAGLG

SEQ ID NO: 193877 - protein, 40 aa, Oryza sativa
  Clone ID: PAT_MRT4530_89974C.1.pep
HAVQMKTLYFSLLQTLHAIYINSWTSRLPFLLHDRKQVPY

SEQ ID NO: 193878 - protein, 84 aa, Oryza sativa
  Clone ID: PAT_MRT4530_89975C.1.pep
MDPVHMDSPYENPLSLTAWAHVNERARTRRRRRYQRPRSKPKRRGGGGAAWGTGPTWKRRWVGLVEVIVGGRGGGEESQVTVRG

SEQ ID NO: 193879 - protein, 61 aa, Oryza sativa
  Clone ID: PAT_MRT4530_89976C.1.pep
SNARQSRYPAHVFTCGLTYQCTACFWFGLNDLLLSGQCLFLLSYRSNNKAAMCYGRSQKWV

SEQ ID NO: 193880 - protein, 73 aa, Oryza sativa
  Clone ID: PAT_MRT4530_89977C.1.pep
MWPLEEEAQKSLTTFHLNVGSWISIISWFARGVRLGIESSMWNTAVCRGIPVLEIGHEGWIGQKSSLSDDVDE

SEQ ID NO: 193881 - protein, 62 aa, Oryza sativa
  Clone ID: PAT_MRT4530_89978C.1.pep
LAVLDAVSPGLCFVRRSFRPVDLACLFGVPSGGPSVPVGPGVCSSKKKNKKKKKNNKKKKNN

SEQ ID NO: 193882 - protein, 151 aa, Oryza sativa
  unsure (1)..(151): unsure at all Xaa locations
  Clone ID: PAT_MRT4530_89979C.1.pep
IKLRAAWGSSTSSGTTRWPGRGRTPPSGRSSPTRGPRLGPSPSPWPGGGPSPPPSSPAALRRHPATRPTTSASSRPPXPVVKPKPRSPLAAPXPPPPSPPTPPPLSPPSPPXGPEDPXPCATSAPSSAGSSRSTXAPPAASGPPPPCPSAC

SEQ ID NO: 193883 - protein, 337 aa, Oryza sativa
  Clone ID: PAT_MRT4530_8997C.1.pep
MGPTCHSPPGLPPLSPSPLSLTQGSAAGVEAPPRHVRWRRRRRWRRAPAADLYLSPWPHTISSCICLLAVAAHVHPQVVVALEALAVHAAEVHVRRQDLVLLDPDHLVGAPRRDVLTVGVGALVDVAAIVLAVHVVAAAVVLGDGDELHDASVAVRQSAGRGLGNGGHCFFKFKLVKNCWRLMNLEQTRLSLKMLDSGRSVVEHILNLEEGRRLQIACLMWCWWDTRNKVNAGEQGSSSTEIVRRANFMASAPAGLMSVRTPSPEGVSAGRSVWKFPHEDELKLNVDGAFYEASNSGGWGFILRNPFALQAAAEWGVSQVEVETDSSSGDSSTIQFL

SEQ ID NO: 193884 - protein, 135 aa, Oryza sativa
  Clone ID: PAT_MRT4530_89980C.1.pep
MTTSPEIERPAADLEDMNTTSIDERRRPTTRSSGGAASVDGGDGAPVIGDGGERAAGLPLTTAHLNAAAASGDDDGDGGATSPEMAGGNRGKVEENERIKTPQTIGRKGERLGRKRRGKAARLSYSRRLELEDEQ

SEQ ID NO: 193885 - protein, 176 aa, Oryza sativa
  Clone ID: PAT_MRT4530_89981C.1.pep
MAAPPACGTLSAACPCSPPAPAKPFSSGTCGTPPSWELASVLKESMAKFDAAGAKLIAIGVGTPDKARILADGLPFPVDSLYADPERKAYDVLGLYHGLGRTLISPAKMYSGLNSIKKVTKNYTLKGTPADLTGILQQGGMLVFRGKELLYSWKDKGTGDHAPLDDVLNACCNRTS

SEQ ID NO: 193886 - protein, 62 aa, Oryza sativa
  Clone ID: PAT_MRT4530_89982C.1.pep
LPSEEVAAASAAAGEAPPPPSPAVVEEAKDASEAPKPEEAPNAEDGEEKKAEGEKENVMANY

SEQ ID NO: 193887 - protein, 259 aa, Oryza sativa
  Clone ID: PAT_MRT4530_89983C.1.pep
METVASLSRAALAGAPAATRATASRVNRAVVPAASRPRGGRLCCRRSLTAVSAAAGASPPVSPSPSPDGGSPGVWDALGGVSVLAAGTGEAVQLRDLWDPTEGVAVVALLRHFGCFCCWELASVLKESMAKFDAAGAKLIAIGVGTPDKARILADGLPFPVDSLYADPERKAYDVLGLYHGLGRTLISPAKMYSGLNSIKKVTKNYTLKGTPADLTGILQQGGMLVFRGKELLYSWKDKGTGDHAPLDDVLNACCNQTS

SEQ ID NO: 193888 - protein, 416 aa, Oryza sativa
  Clone ID: PAT_MRT4530_89984C.1.pep
SSLFTLFPFLSLPSIFPSVLIGGFTLNSASETSVLYFQNRKRFVNVHVADSNGSRVVGAKVAVHQITRDFPFGSAISRTILGNKLYQEWFNKRFNAAVFENELKWYATEPYPGKEDYTVADQLLQFVQANDAVARGHNIFWEDPKYTPAWVKNLTGSQLRAAVSGRIESLLSRYKGDFVHWDVSNEMLHFDFYENRLGGNATVDFFDTAKRADPLATLFLNDFNVVEVCDDLSSSADSYVSRLRQLADGGVTFEGIGLEGHFGKPNIPYVRAVLDKLGTLRLPIWLTEIDISSSFDPKTQAAYLEEVLREGFAHPSVDGIMLWTAMDTNASCYQMCLTNQNFTNLPAGDVVDKLLGEWQTKETLGTTNDRGSFNFSAFLGEYKLSVTYLNLTAEGTFSLAHSDDTKHINIRLSPSC

SEQ ID NO: 193889 - protein, 137 aa, Oryza sativa
  Clone ID: PAT_MRT4530_89986C.1.pep
ARRPRQLRAAAAAAGDAPSSPPWPPREPPPPPAHGRGAPRGTPPRRRRPPRRRRRTAAAAAAAFDGRRPPPPRAASPPRRCRRRGRGSGPRQRGAGTRRGAAAPRAPPASTAPRRAPAPPSARSPRSRAPPGRRAPP

SEQ ID NO: 193890 - protein, 33 aa, Oryza sativa
  Clone ID: PAT_MRT4530_89987C.1.pep
LGRQSVSVRLFTVGALSVLAIVCGESFQIPLLL

SEQ ID NO: 193891 - protein, 186 aa, Oryza sativa
  Clone ID: PAT_MRT4530_89988C.1.pep
MAAALLRRALHLHLHLRRALPSPPRAGALLLPAAASSPAHRFLSGFTTTTQQNSASTTTIDLSSDESRRRLINRLVYRSKQRGFLELDLVLGTWVEQHIHSMDEANIRALLQVLDLENPDLWKWLTSQEQPPEAVNSNPVFIAVKSKVTDNLSKHSSPETRSAPGQPWVRGWDDKRGIEGPKYGNQ

SEQ ID NO: 193892 - protein, 1004 aa, Oryza sativa
  Clone ID: PAT_MRT4530_89989C.1.pep
MACLVILDTAFMCRICLAVASELFPMFAILPGMDLVWGVQQLNPMPHARSATGESLSADFIGLIWWLLCLSLTTLSGLEIWRIEKLQAVPVPKESHGRFFTGDSYVILKTTALKNGSFRHDIHYWLGKDTSQDEAGTAAIKTVELDAALGGRAVQYREVQGNETERFLSYFKPCIIPEEGGIASGFRHTEINEREHVTRLFVCRGKHTVHVKEVPFARSSLNHDDIFILDTKSKIFQFNGSNSSIQERAKALEVVQYLKDSNHEGKCDVGSVEDGKLMADADAGEFWGLFGGFAPLPRKTFSDLNGKDSAFSSKLICLNKGQTVPVDFDVLTRELLDSTKCYLLDCGSEIYVWMGRETPLEERKRAGSAAEELLREVNRPKSHIVRLMEGFETVIFRSKFSKWPKKADAVVSDESRGKVAALLKRQGFNVKGLAKAAPVKEEPQPQIDCTGNLQVWRVNGTEKTFLSFSEQCKFYSGDCYRSVSLVLGSGEEECLIGTWFGKKSVQDEKTTAISVASKMVESLKFQAVMVRLYEGKEPAEFFSIFQNLVIFKGGVSTGYKKFVSENGIEDDTYSENGVALFRVQGSGPENMQAIQVDTAATSLNSSYCYVLHDGDTLFTWIGNLSSSMDQELAERQLDVIKPNLQSRMLKEGSEYDQFWKLLGVKSEYPSQKIAKDQESDPHLFSCTFSKGVLKVREIFNFTQDDLMTEDVFILDCHSCVFVWVGQRVDTKMRAQALSVGEKFLELDILMENSSQETPVYVITEGSEPQFFTRFFTWDSAKSAMHGNSFERRLSIVKDGVKPKLDRSRSMSFSPDRVRVRGRSPAFNALAANFENPNARNLSTPPPAIRKPSPKSPSSDPTKPPQRAASIAAISASFERPRPTLIPKSIKASPDVNKPQVEASKPKPEANGKDSTPSKDSPTVTPTIQEDLKEGQPENEEGLPVYPYERLRTSSINPVTDIDVTKRETYLSAAEFRERFGMTKEAFAKLPKWKQNRLKIALQLF

SEQ ID NO: 193893 - protein, 55 aa, Oryza sativa
  Clone ID: PAT_MRT4530_8998C.1.pep
YPFALLKFWDLCSEPSELSSKSNGGVLHLPVRRLKHYSGIESPVSGFCFPRKRKH

SEQ ID NO: 193894 - protein, 59 aa, Oryza sativa
  Clone ID: PAT_MRT4530_89990C.1.pep
LKRVIPGEGRHRRSIFNFIASYLLPSRPLLTNLSDHDVEHQHLLAMDKNVVMVLMRAIQ

SEQ ID NO: 193895 - protein, 64 aa, Oryza sativa
  Clone ID: PAT_MRT4530_89991C.1.pep
LKKWGARSRSGCPPLTKFEITTAILRGKADFMSFYRMGLVGLQHLDLATTDLITLWRACGCMRW

SEQ ID NO: 193896 - protein, 94 aa, Oryza sativa
  unsure (1)..(94): unsure at all Xaa locations
  Clone ID: PAT_MRT4530_89992C.1.pep
FFFFFFXFFFFYFFFLFFFFFFFFFXXTKHSNYFISSEAVSCFTNIVQWKEALLVSCWYIFEQTLHETKKVTCRGTKQRINKSAKSTTKYSSKA

SEQ ID NO: 193897 - protein, 586 aa, Oryza sativa
  Clone ID: PAT_MRT4530_89993C.1.pep
MQQQQQAMEEDGVKEEEEEYYLEEEDEGEEETRPPLQQQQQVGLGRRGRAREEKERTKLRERQRRAITARILAGLRRHGNYNLRVRADINEVIAALAREAGWVVLPDGTTFPSSSSSVSQPPPTQQQLQVPDLLPPRPPERDFAGTPYVPVYVMLPLGVVNGNGEVVDADVLVGQLRVLKAAGVDGVMVDCWWGNVEAHRPQEYNWTGYKRLFHMIRELKLKLQVVMSFHECGGNVGDDVSIPLPHWVTEIGRSNPDIYFTDRAGRRNTECLSWGIDKERVLQGRTGVEVYFDYMRSFRVEFDEYFEDGIISEIEIGLGACGELRYPSYPAKHGWKYPGIGEFQCYDRYLQKSLRRAAEARGHTIWARAPDSAGHYNSEPNLTGFFSDGGDYDSYYGRFFLNWYSQVLVDHADRVLMLARLAFEGSDIAVKVSGVHWWYKTASHAAELTAGFYNPCNRDGYASIAAVLKKHGAALNFTCVELRTMDQHEVFPEAFADPEGLVWQVLNAAWDAGIPVASENALPCYDRDGFNKILENAKPLNDPDGRHLLGFTYLRLTKVLFERANFLEFERFVKRMHGEAVLDLQV

SEQ ID NO: 193898 - protein, 101 aa, Oryza sativa
  Clone ID: PAT_MRT4530_89994C.1.pep
LSHPTAPSLSPAAGGDGGERWRRRRAAEARRPASGGGARAELHCGEDGGDHSGGGGRHTRWGTASSAAADQVFDTATGGRVRAAPRGSGRTRGAGGGASGG

SEQ ID NO: 193899 - protein, 79 aa, Oryza sativa
  Clone ID: PAT_MRT4530_89995C.1.pep
VVIPTDLTTPRGAACNKRAVEATKDMTDSDTVQHLRAPADEAPYYGARAQTENVRLHDSLRNVSQAATEGPTMGSQCIN

SEQ ID NO: 193900 - protein, 127 aa, Oryza sativa
  Clone ID: PAT_MRT4530_89996C.1.pep
MATATPLRCAASPPAGSGGGKGAATAAAAVARPDLRQRKRGELAASARQPPAAGARRLRRAATERERGAGEGERREKERGGREMREIEGTEEVDKDRGRDACAGAGSSVFKGAGSTIFHHREVGKAL

SEQ ID NO: 193901 - protein, 44 aa, Oryza sativa
  Clone ID: PAT_MRT4530_89997C.1.pep
MEPTEAPQEVGVEPTVKERLQSMLERIVLQSQVQRGDGELLVQV

SEQ ID NO: 193902 - protein, 108 aa, Oryza sativa
  unsure (1)..(108): unsure at all Xaa locations
  Clone ID: PAT_MRT4530_89998C.1.pep
PALFVPPSPPKEGFIYLGALQPQHVDIHTPFPHHLSPSGKLVQIDHTLTGVGSGQTSLGIKPANGVFIATEKKLPSILAVETSTXRFSSLTPNIGXVYSGMGPDLPVL

SEQ ID NO: 193903 - protein, 96 aa, Oryza sativa
  unsure (1)..(96): unsure at all Xaa locations
  Clone ID: PAT_MRT4530_89999C.1.pep
GAAPXXXXXGXRQRPXAREGGELRELRPEDGGGAERRISGGSPSAPYSXEPHAATASSLMASRFLVSRGVAFFFFLTFFFFFKQMNILILQPWRFN

SEQ ID NO: 193904 - protein, 106 aa, Oryza sativa
  Clone ID: PAT_MRT4530_8999C.1.pep
GAKFIIRECPKGPPLKIYFLGGGKKTPFFPPPNFWGPEDFWREFFFFFLRRGGVGGGIPFWKGFPKGPRGNWTLIPLKCKSHPIRAGPPYGALQKQGNCVLPPGKE

SEQ ID NO: 193905 - protein, 252 aa, Oryza sativa
  Clone ID: PAT_MRT4530_899C.1.pep
MSATMDIDGAAASAAAGGGRHSEKELFSAAESGDAAAFSSLSPADLAAALALRDEDGRSLLHVAAASGHAQVVRVLAAMGGDAAASVVNGKDEEGWAPIHTAASSGKAEIISILLDQGANVDLTTDAGRTALHYAASKGRLNIAETLIAHSANVNKKDKFGCTPLHRAASTGNAELCEFLIEEGADVDAVDKTGQTPLMHAVISEDKAVALLLVRHGADVAIEDKEGYTVLGRASDSFRPALIDAAKAMLEG

SEQ ID NO: 193906 - protein, 534 aa, Oryza sativa
  Clone ID: PAT_MRT4530_89C.1.pep
MATAFPYSFTRTKHLTLCPPSSHGGDAADHRPLPWILLDVRAYIADRRNSTTATIVLSNGRKIQITFCIAPPPLVSYICAWSPATDPAVFFAKEPAVGFVDADLVFLRVHSDQIYDLIYHASSRPSLKLIHNPYSPYNPYHYLRRIDNVVVLPDRRRHAAGADDDDHDGSGRFYVSSLDRDRRFDLGHFKLCLYDEDDSMDCKWSNTILLLDRLRDPPDKDIVLHLTEKVLILDDEQPLVAFVDPWRGMVICNVLDNSSTPGGSSYMPMPSEIFNIHNTYTSSISRDIAIVNGRLTVVRLCLYLDSDDDSDDDDDDDCCAWDLTTWSKPVTCLDDEWREDLKIKSSDVSIDDSTRNACLLPKLDDGCPTTETLQLAHPTLSLVDAHIVYIMGKVDVSDEKALVLTVDMANKRLQEVSMYDAERIVNDFDYAYTHSTISQYFTTAAAVLARQVEAVISVNLAKLFITHLIMEAVGVKGSLKRPLKFHIQYPHKRLGETINRSDPMDLHEPLQLDAGSDMGTTDGTEGSDNPMDLE

SEQ ID NO: 193907 - protein, 78 aa, Oryza sativa
  Clone ID: PAT_MRT4530_8C.1.pep
MELDMVRQLGCVGPRAGGCEYARKMAGPGAVVSLSGARAEGRTKKRRGRRQGKKREKGEKKKEEKKKKRRRRKEYYHW

SEQ ID NO: 193908 - protein, 391 aa, Oryza sativa
  unsure (1)..(391): unsure at all Xaa locations
  Clone ID: PAT_MRT4530_90000C.1.pep
MATITAASPRPSAAPAAMEETSKAMPTSEWPAASGGNASPPARSRPSLLVIFSACLVLLGAGGPLLLRVYFVHGGTRLWLSATLQISGWPLLLPPLCVSLYRGRRHGIGNLLLPRRLVGAAAVLGGLYAVSCFVYALGSQALPLSTSSLLLATQLAFTAVFAFLFVGLRFTPFSANAVVLLTVRERVRGRRCKTVRDPHDRGGWHLVDVQQVVTLQSQDWDMMECGGVLGGELPPTSPYATVMQMQAVMGAADTXVCVLGMAIKGAFQAVAREAAAFGLGAANYYLVLAWDAVSWQLLNLGIMGLITCASSLLAGIMIAVLLPLSQVLAVIFLHEKFDGTKGIALVLSLWGFASYLYGEKAQKKKEAQKMREREQEVALAQKTADVESAAP

SEQ ID NO: 193909 - protein, 75 aa, Oryza sativa
  unsure (1)..(75): unsure at all Xaa locations
  Clone ID: PAT_MRT4530_90001C.1.pep
LPSPPLPTTEHQSLPHLTAPPHPPRKLPPTATVAAFVPLQHYHHXDKAPPRTGSTPKTPPPPGTSPVSVLPPPPP

SEQ ID NO: 193910 - protein, 55 aa, Oryza sativa
  unsure (1)..(55): unsure at all Xaa locations
  Clone ID: PAT_MRT4530_90002C.1.pep
SLQVQVGYSHELXAAWSQRSGCLLEPLWMHGDGAAGVWGCVCFNFSRGCQLGRRF

SEQ ID NO: 193911 - protein, 461 aa, Oryza sativa
  Clone ID: PAT_MRT4530_90003C.1.pep
MDKTAATSDKSGRNPALGPRVTGIAYLGDPPYLSWRPARSRPGVAKVVETWGAPDAPRAVLAASLADRAVDPVSVRDLPLFLPAVLAVARKNGVVELLNPLNGETLAGVNAAAGRAAPADSSAEEDPLATLHLFRRHALDSSMLGTFLACTEKGKAYVKSVAKENASSDMAVGPSSSWDVSNSGTVQFSSVDAGESYAMFGGKGIEVNLWDITSCSKIWSAKSPRGNSLQIFTAPWFTAGTFLCKDDHRKIVACTNNHQVRLYDTASQRRPVISVDFRESPIKAVAEDPNGHAVYIGTGRGDLASFDMRTELTLACTLFPGKLLGCFAGKCSGSIRSIVRHPELPLIASCGLDSYLRIWDTNTRQLLSAVFLKQHLTAVVIDSHFSTEELEETKSKQPDPVGAEVRKERKEKKNRTSEMDEDETRMLDHDDSDSEMHTSKRKKSGEKSKGMKKKSKKQQVA

SEQ ID NO: 193912 - protein, 80 aa, Oryza sativa
  unsure (1)..(80): unsure at all Xaa locations
  Clone ID: PAT_MRT4530_90004C.1.pep
SRRHPPADSQPASGFSASPPSRHPPPPPPPPPPLPPLEXNFTFFVGPDPPPPPGXSSSPSHPTSPRSSPPPPPHHHAPGG

SEQ ID NO: 193913 - protein, 474 aa, Oryza sativa
  Clone ID: PAT_MRT4530_90005C.1.pep
MATPKLSPVSPVRPEDKQRASSSSSSGAVAAPLRVQDDTAVEEYEQYLRLPELARLWKDRCCPEWADEGLVKPALQALEITFRFISVALSDPRGYASRRELARRLEALAAREVELVAALCEGEQCPPLAELSASKGVLPRERSASEVWKIPGSAAAVVCQVSEASLLPRLAAWDKSETVAARIKYAIESQMQGCVFTLGLGEPNLAGKPVLEYDRVVRPHELHALKAKIAPEPKTGYRNKENEALFTIHQILESWLCAASQLLTRLNNRIEARNWEAAASDCWILERVWKLLADVEDLHLLMDPDDFLRLKSQLAIRAAPGSDASSCFRSRALLHVANATRDLKKRVPCVLGVEVDPNGGPRVQEAAMRLFHSRRRGEGEEAGKVELLQAFQAVEAAVRRFFFAYRQLVAAVMGTAESSTNRALFSPAEEMDPLAQMFLEPPYFPSLDAAKTFLADYWVRRMAGDGDSASSRRS

SEQ ID NO: 193914 - protein, 489 aa, Oryza sativa
  Clone ID: PAT_MRT4530_90006C.1.pep
MDDDDDCRRRDVTLGDEFMVLQPENGGARSLADLLLSCKVGENKAVRCGRPGAEVALPWHRWIIAVSLLAQMLLRLSKGVMAKVGRAVEYWMNLVSENDNVLGLIRNALHGKVKTPDRNSPNYRSFIGLLDTRIDLDEKIKPGDSNYHAALCIMAAKLAYENELVIKDAVEKNWKMTFLEFFNCWNDFQNDYTTQAFMFADKPEDAELVVVAFRGTQPFDMEQWSTDVDISWYEIPGVGKVHGGFMKALGLQNNAAAGKKPSWPAEIAPPSAAKNSEKTKSFAYYAIRARLRAFLAANPRARLVVTGHSLGGALAALFPVVLALHGGEADAAALGRLDGVYTYGQPRVGDAALGEWVAAASSLEGKHLRFVYCNDVVPRVPYDDAAFLFRHFGRCVYFDAAYRARAMAEEPNKNYFSPAFALAKHANAAWELARGLAIGRVAGGEYAEGWAMRAARVVGLVFPGLPPHAPQDYVNATRLAGASLRKLLD

SEQ ID NO: 193915 - protein, 376 aa, Oryza sativa
  Clone ID: PAT_MRT4530_90007C.1.pep
MASMSTIVPLCLSLLLFFQVSIAQFSFGGGPLYSSRGFRGDSVSQHQCRFEHLAALKVTHRDRSEADFIEYYNTEVRNEFRCAGVSVRRLVIESRGLALPVYANAHKLLYIIQGHGVFGMALPGCPETFQSVQYAFEQSSTQKLSDEHQQLHKFRQGDVIAVPAGVAHWLYNNGDSPMVAFLVIDFGNNANQLDPIPREFFLAGKPTSWQQEQYSYQAEQQSDNQNIFAGFNPDLLGEALGNALLTPHWTVNAHIVMYVTAGQGRIQVVDHRGRTVFDGELRQQQILLIPQNFAVAVKARQEGFSWVSFKTSHNAIDSQIAGKRSILRALPVDVVAKAYLLSREESRSLKFNRGDEMAVFSPRLHQQLYAEWQNSK

SEQ ID NO: 193916 - protein, 246 aa, Oryza sativa
  Clone ID: PAT_MRT4530_90008C.1.pep
MSVYYETLCPFCSGFVVNDLARIFRDGLSPVVDLRLVPFGNGRVSPDGSITCQHGEEECQLNAIEACVIRLWPDAEQHFPFINCIEHLALTQKWNAWQSCFQETGLASQPVMDCYNSGYGTQLQLQYAAETNALQPPHQFVPWVTVNGRPLGDDYTNFEAYICRAYDGELPEACRGKHLAIAQQTRASRGGKIHKPDRCPCSCNAEGSTKVGRSTCLLHRGVVLTSLERHFVEKTQTVQDQMKLTK

SEQ ID NO: 193917 - protein, 39 aa, Oryza sativa
  Clone ID: PAT_MRT4530_90009C.1.pep
QCPYRDLKPSNLLWNANGDLKIGDFGLVRTTSETDFLTE

SEQ ID NO: 193918 - protein, 67 aa, Oryza sativa
  Clone ID: PAT_MRT4530_9000C.1.pep
LFFYFFGENKSESETRIPINTCETRIPINTCQLFFFSLVGLQGMKMQHTAIGTCVFKEQCKSTRSGN

SEQ ID NO: 193919 - protein, 84 aa, Oryza sativa
  Clone ID: PAT_MRT4530_90010C.1.pep
ELGRAGLGRVALHTDAELLRRHRLRRRRPHPHPHPHRHREPPPPCSPRRWCTGAPQTAGGGGVDMRRGCHSPTVLLGAPSPSSR

SEQ ID NO: 193920 - protein, 249 aa, Oryza sativa
  Clone ID: PAT_MRT4530_90011C.1.pep
MVRYERVPYFCFICGFIGHSDRDCVKKVANNDAPFQYSAELRCSPLKPFEKKVSTVKGTEASTASHRLSFRKAGSASSSSSRRYQGEQWDEAVPPRVDTHYGFDAQEKVGDETLDEQLARSTKLKMGSMSGLSSAKQQMVDMIPAIANLHQAASFGDVSSEDTLSVHKRRSTEQLGNKKSGKVQQALLQHVLEAEEDMKKKEGAGLQGRELKRFKKTAADGMNVGELEVTSAGAAGTLAGPMLGSRQEQ

SEQ ID NO: 193921 - protein, 229 aa, Oryza sativa
  Clone ID: PAT_MRT4530_90012C.1.pep
MRNILDSNGNLEDVQPRNILIWGIPSILYTTEQFPDTTATPTFQNRESLMGNRSLTKYGSESERLLHAAVRPPSWVERRIRDRGGSRGRKRILEEGSEGVRQGRGGSGGMASPAATGIAAVSAPAAGGDAGSREREGKPMGLCALSEAACLAQNKKPRNENEAEANRRGRRRIAGPSSRRRAAARPGGRPATRHGDQPEAAVETLFPPAAREGRGGALPPDAAVRGMIP

SEQ ID NO: 193922 - protein, 457 aa, Oryza sativa
  Clone ID: PAT_MRT4530_90013C.1.pep
MSLHGWSKRKCKNVGREIEKCRKELAALLESNSDSLAIRGATDRLNELLYREEMLWLQRSRINWLKEGDRNTRFFHSRAVWRAKKNKITKLRDANGVVHSSTKLIQGKVTAAMNEELCKDFSDDEIATAVFQIGPLKAPGPDGFPARVYQWNWGLLKDDIKSSPVEVREAIKQKLQIANNSFEDKYLGFPILEGRRNKDSVCEDLNRLTRNFWWGATNGERKIHWGSWDNLIKPKNQGGLGFRDVKLFNQALLARQAWHLIDNPESLCSRVLMAKYFPNVSLVDTWFGGNASPGWKDIEYGPSLLKEGIIWRIGNGRCVRIWRDPWLPRNFSRRPISQKNNCRLKWVSDLTADGVWNEEKINELFLSIDAEIISKIRISSREEDVFLAWHPDVHGRFSVRSAYYLALNLANQNVAGPSSGGGNKSWHLIWGCNIPQKVKIFAWKIATNSLATLVNKA

SEQ ID NO: 193923 - protein, 342 aa, Oryza sativa
  Clone ID: PAT_MRT4530_90014C.1.pep
MEIQQQKGVGNSKVVKVEKEESWDLFINQASNEGRPVVAHFGASWCVTSLSMNYKFEELAQTHPEILFLYVDVDDIQSVSSKLGVKAMPTFFLIKDKEVVNKIVGANPDEVKKMVDASAESIGVTAPPDIVPRTSAKPTASTTAKNSRRVGVGVGAGSLSPLLSPASFLFPSRALCCECGCGVASHALCELWVRERWPEELAGEEEEEEEDDELSFAMCCYVGKATKIFLCLAAALIVVGLVLGFGLAHRTWGERKVQPDCRWPDCQLQPTYGGGGGGDPLPATSGAGAGGVDTPPGVPLTEPAVAAFPGVASASSAAPPTASMPYLGPPSPFAVGLAPAHG

SEQ ID NO: 193924 - protein, 201 aa, Oryza sativa
  unsure (1)..(201): unsure at all Xaa locations
  Clone ID: PAT_MRT4530_90015C.1.pep
KNYGGPPPSPRGEIFLQKREGKNTEIFSPPHVGASPGPPLLALGPRPEASNERLPPLKGRQRPATACGPPGEGALAAADRSAALTHRARPPVLTTPCHHCPPPPVAADAGAEGAAGGMRCXRGTLEAFLCKYIKKLKGRGSFGVEXSCGAAKAHLHPRSTNLWSSSANSTPKNRKFIPFGTVPALDKLALGARAVLGLILN

SEQ ID NO: 193925 - protein, 1622 aa, Oryza sativa
  unsure (1)..(1622): unsure at all Xaa locations
  Clone ID: PAT_MRT4530_90016C.1.pep
MAALLGLWWRSGNQGSPAAVIHVWSGFWMGIIPDLLGVSVGLSPTFSFLQVLWDPGRKQYHDLDHHRTRAYSFQDRQILRSNQNRYDWTGSADWISSWHQFSHDQSMEPSAGRGDQGIIKAMITRPKPQDGDMSGQQGKELALLGPSSKDSTLRASSTDEETLKLKAKEVGEMSPPPTCNSRSGYLGPEEFPEGEVLEDDEDAVEVDIEEEEMKQVGQLTVVASFYSLRTPNLFALFEDMGRAWRLRSDMSYKSLRDNLFIITFGAEGDYNFVLQGGRWLHKGDALLVAAFDGLTCPSKIPLKVVPIWIRIYDLPLVLMTKARGELYGSKFGQVREVDVEADGRNRHDFFRIRVDLLVKKPLKSKIAIKNKVQGNEVTRRFDVRYERVPYFCFICGFIGHSDRDCVKKVANNDAPFQYSAELRCSPLKPFEKKVSTVKGTEASTASHRLSFRKAGSASSSSSRRYQGEQWDEAVPPRVDTHYGFDAQEKVGDETLDEQLASQTDKLHVSDEKGXLQDMMATGSTKLKMGSMSGLSSAKQQMVDMIPAIANLHQAASFGDVSSEDTLSVHKRRSTEQLGNKKSGKVQQALLQHVLEAEEDMKKKEGAGLQGRELKRFKKTAADGMNVGELEVTSAGAAGTMSCLSCNCRGIGNATTVRDLCALVREAGPKLVFLCETRQKIETVRRLRNRLGLKSCVGLSSDGLSGGLALLWDESVFVDIKGMNERYIDAYVRLSPDAPIWHVTFVYGEPKVENKHHMWSLLNLLRQSSTLPWLVMGDFNETLWQFEHFSKTPRNERQMQAFRDALHICELHDLGFRGLPYTYDNKRXGVNNVRVRLDRAVADDNWRSPCSDHAPILLKFAVEESRRVKRKCLHYEIFWERENELPNIIDEAWAVAGDKMNXLRSLSKVMMSLHGWIWRAKKNKITKLRDANGVVHSSTKVMENMATQYFXMYKRDEMLDHSPITQLIQGKVTAAMNEELCKDFSDDEIATAVFQIGPLKAPGPDGFPARFYQWNWGLLKDDISKAVKVFFDTGVMPNGVNEMAIILIPKIEXPMELKGFRPISLCNIIYKVVSKCLVNRLRPLLDELVSQSQSAFVPGRMITDNALLAFECFHSIQKNSNLNKGACAYKLDLSKAYDRVDXKFLEQAIYKLGFSCRWVNWILECITTVRYSVKFNGTLLSTLAPSHGLRQGDPLSPFLFLFVADGLSLLLDDKVAKGELTPVHICHRAPGISHLLFADDTLLFFKANVQQARIIKRXYAAATSQLINPAKCSIMFGESSPVEVREAIKQKLQIANNSFEDKYLGFPILEGRRNKGKFXSLQKKIWKRVLQWGENLLSSGGTEIFIKSVLQAILVYVMVIFRLPDSVCEDLNRLTRNFWWGATNGERKIHWGSWDNLIKPKNQGGLGFRDVKLFNQALLARQAWHLIDNPESLCSRVLMAKYFPNVSLVDTWFGGNASPGWKDIEYGPSLLKEGIIWRIGNGRCVRIWRDPWLPRNFSRRPISQKNNCRLKWVSDLTADGVWNEEKINELFLSIDAEIISKIRISSREEDVFLAWHPDVHGRFSVRSAYYLALNLANQNVAGPSSGGGNKSWHLIWGCNIPQKVKIFAWKIATNSLATLVNKA

SEQ ID NO: 193926 - protein, 4025 aa, Oryza sativa
  Clone ID: PAT_MRT4530_90017C.1.pep
MEEEEAAPECTDAMGSEAAAGDVAETEEVVVASEAEYSWPQLRFDLPPRRLYHFAGQFRSAAAAASASAGNFLKGVKWSPDGSSFLTSCDDNSLRLFYLPEEAYSTEAEHPAEAAVGGEDSYGASIQVNEGEPVYDFCWYPYMSVSDPATCVFATTSRDHPIHLWDATTGELRCTYRAYDAMDEITAALSISFNSTGTKLFAGYNKAIRVFDVHRPGRDFEQHSLLKGCEGPTGIISSISFSPHNGMLAVGSYSQTTAVYAESNMEPLYVLHGQLGGVTQVLFSKDGNYLYTGGRKDPYILCWDIRNTVDIVYKLYRSSDTTNQRIHFDIEPCGRHLATGGQDGMVHIYDLQGGQWVTAFQAAADTVNGFAFHPYLPLATTSSGHRRFGMEDEIEEELSLAGIFNKGDRSYAVRRAAVSAYAALCAVLCAHEAPGGLPDRFVAWGLPLLGEPTSAALLAEGLRELLATGDVPAVERFVPPLLAACRDVLEDERTSLTVLRCLLGLLTLVAAKFPHCFRPQFVDIVDLLLGWVFVPDLAESDRSTIMDSFLQFQWHWLGNLQFSLGLLPKFLADMEVLVHDPNLAASHNSGRLRPLFACFSTVLQIMASGVAERNSLKELIAGPLEGLSPQLLRCASVIASKLGWSERMEEASRCLVLLAEILQERFAEFYGMFVDVLAQSLEVASSVQLVAALKTNLQVLSLQNLGLRASAVEALLDFSSFLSRLRLHPNHTMVTNVATTYLFVLQHGLEDVVDQAISSLMKELELLKSLLETGRASYPDIQNLSLGSNSETQSKSNSSTFSLVGYSEHQLLSLMKFDLKILLATISVDTKKRNDKAASLTSFISAKLDPFGTPFHDFLEMQFHIFSILHRLSSMDLSSTIAPSKANGSGDSGSQTQLVIESRKSFCDCKNKFMHKYGKLVVWGLNASSSMTLKLEALAWIDTFGNLVLGMERDVDKRNISYEVHEGATLLNTILFAILDCAYDREPKVRLHVATSLEILFLGRLINPMDFSVVTQVLLDKLSDPDNAVKKGFSRLLSIALPITTYTFGLLENRWSYQHSPDTANMSKHCMSWRHVLAVKQQPRKLHWQQLVSILSYLSLRLKLPLSSWVQRLFFSYRGKKDMFSGQTDVSGDSDGNELFKGPDVDRTIIDRIYSVNNLAAVWWGIHEAARHCINLRLRTHLGGPTQTFAALERMLLDVPNLLAPEATEGEGRYIAPSDTSLLPMRLLLDFVEALKKYVYNAYEGSFVLPAPPKASSLFFRANKRVCEEWFSRICDPMLNAGLALHCNDAVIHYCSSRLLDIRNLAASSLKDNSRMGGATESHHAFRERLEADFLKVLRHASLALCRCHETDALVGLQRWAISTFYTYFEQDKQLVRGVSDSQNHFSWMSGLIYQSQGKYEKAAAHYSHLLQFEEGLASMESDGIQYIIARVIECYTSLSDWKCLEGWLSELQVLRAVHAGKPYSGALTSAGNELNAVHAMACFDGGDFHSAWGYLDLTPKSSSELSLDPKVAVERSELMLLRAMLQSHSKPDKAREELNKAKLMLDEALSVVPLNGLTEAAACAGQLYCIFAFEETTELACPNRTNQSPALMDYLLRLLQDPIDRINQDCNIWLKIFKVYCTTQPSSLPTLLLCQKLASLARKQSNLKLASRLNQYIINHPLSSSDEMEKEMLTLNIKYEGALLKHDQGKKEEALTDLWSLVRATVLSTVSDSSGAGTPLIAKACLKFSTWMERENSTHIMNMILPKVIEDINDSGGFQNGAEKLLLGDNGSVSASNSHVVSQEIIGIARKTSWQLCPSMGKAWHSYASWCITHANYSLSGTDSKLQNSLFPALQSELSPDRFHLTDNEKSEVQEIIRNFCADKDGNYVDCSISPTAGCSYNSEGNPIVSLIEQTICLLETAAGAPGSEACDGEGPSVRLSSELTVLFCKCDSAKDSSMTLIGKLIEIWWTLRRRRVSLFGHAAHAYFQYLSHSSTGLQPSYHRDVLKGKTKSYTLRALLYLLHIILNYGVELKEIVESGLSTVPLLPWQEIIPQLFARLSFHPEKIVRKQLESILVKLGNLSPCSIVYPTLVDINACEGEPSDELQRILDFLVKQYPKLVKDVKLAIEELGMVTVLWEEQWLSTLQDLHSDVLRRINILKEEAARVAANSTLSSAEKNKINAAKYSAIMTPIVVALERRLASTSREPKTSHEVWFHKEYNAQLKSAITALKTPPGSPSALGEIWRPFDSIAASLATHLRKSCISLSEIAPQLAALSTSNIPMPGFEKQIFSSSESSFADSHGTITISSFCKEVTVLSTKTRPKKLVLQGSDGQKYTYLLKGREDLRLDSRIMQLLEAINSFFYSSSDTRSRNMAIRFYSVTPISGRAGLIQWVENVSSIYNVYKTWQKRSQLAQAQLSSVNTVNNSIHKSVPPVPRPSDMFYGKIIPALKEKGIKRVISRRDWPLDVKRKVLLELMKETPKQILWQEMWCASEGFRNFNSKVKRFSSSVAAMSMIGHVLGLGDRHLDNILMDFSSGDVVHIDYNICFDKGKRLKIPEIVPFRLTQTIESALGLTGVEGVFRVTCEEVMAVLLRNKDIILMLLEVFLWDPLMEWTRGNIQDEAGIAGEEKKGMELAVSLSLFSSRIQEIRVPLQEHQDLLVTNLPATLSSLKKFLDTLEQYEVISAMFYHAEKERSSALQSETSAKSMLAEASSLAEKSRTSFELHAHELAETKAAANDEANKLAVWVEKHGRILEAIRDNSIAGVESCMQLNSKDDALSLISAVLESEVPLTVVPEPTRAQCSELDREVSQLILELQGGLSAALESLGEYALVLQQVLPVNYITTSPVTGWAQALQLSVSSGSEDLLPLAKRQAAEVIAKVQGEGINLVQQRYRDLLNQMESYVVCIERLARERSELMNSIGFENEVRSKEWILSAFMNSIQLPSPKRDMGNIPFLQSGNVGVKTPAHEDIQDETGIVLSILGIAVGQLYSDVRAKVSELSSKVTGIAKFRTDEAGLQADAGTSLQLFDQQVEKCALISGFVGEVHGVMEAKLVEMNTAYAKPQHGQWASTFQRILCSSTNMIEQMTEVFLPEIIRSFISYNSEVMEAFGSVSQIRGSVDTALEKLVRIELERASMTEFEQSYFMKVGRITEQQIALEEAAMMGRDHLSWEEAEELASQEEACRAQLEQLQETWSQKDMTISSLMKVESSAMNSLLSSKQYFSSLVNVDQESEFHLRRSKALLSVLTKPLADLEALDHMLSACGLFPYHDHCFFVWKLSLLDSILDLCMHEISSSVEHSFTTNQLYTALKTKLTNHVEKQVYRYIMERIAPAFILQLDKEISDLLQLSQGRRESGQPKRDSAAVGRIAVMLEEYCNAHETARAARTAVSLMQRQSNDLTEALRKIVLEIIQVEWLHDLSSPHAQKSKVLSQNILSDDKFISVLLNISRGNLLDKIQSSVSLVTRSIECLQACENTSVSAEGQLERAMGWACAGPNTSGAGSSTTKASGIPSEFHDHLLKRRKLLWVIQEQASDLANICTSVLEFEGSRDGIYLIPEDKSSGQSTDRGRTWQQTFLNLLTRLDAAYRSFTCAEQEWKLSQFNMESAGKSLYSVTNQLSVVSSRAKSALECSVYIFPVNLQDTLVSMYERASEVTASLSGFKHVSQDRTALTSECGSLLEEVLAIAEGLHDVYIVGKEAAVMHNSIMSNLSKANTILLPLEASLSADLAVMSEAISKEREKNNTSMPLIHGKALYQSYIIRIRDAYKNLEPLVPPLADDAKELHSLMTKLGRLSSIHAGSLHKALEVLGESETVKSQDMPSTHADILQSDSSIEKDKGSSGSREGGSQDLVTTTDLSLQDECWISPPEHSYTSSSGYTTELTQITSSENIENMDPLLVDRPVIEAPGANDQERGADSESDSSSNKQLFINNVTLTNVNSVDEVEISLSKERKSENENTNLPFKQIRGQECDNSDPKSYPDSVTRLTRGKNPFALSILKQVEHKLHGWDIDGTRSLKVSEQVDHLLKQATSIDNLCNMYEGWTPWI

SEQ ID NO: 193927 - protein, 572 aa, Oryza sativa
  unsure (1)..(572): unsure at all Xaa locations
  Clone ID: PAT_MRT4530_90018C.1.pep
MGFDVGVVAFNPEGWGPPDTAPAPASLGGGAAAASIPFAPFSRSDKLGRIADWTRNPAGPAALAAASRDSVFNFTSGDDSLAXAAEDSSFRLVDAKPPPXPPALPQRRDEEVEARRREAEKERARRERHFQNNRPPHPGFRGNQSSSAKSSVDIQPDWTMREQIPFANFTKLSFSVADQPEDLLLCGAVEYYDRAFDRVNPKAARRLERFKSRNFFKVTTTDDPVIRRLAEEDKATVFATDAILAALMCTPRSIHSWDIVVQRVGNKLFFDKRDGSQLDLLSVNETAQEQLPENKDDINSAHSLAVEATYINQNFSQQVLLRDGEKVTFDEPNPFASEGEEAASVGYRYRRWKLDDEISIVARCEVHAVNADPGGGRQFLTLNALNEFDPKITGVDWRQKLETQRGAVLATELKNNANKLARWTCQALLAGADMMKLGYVSRVHPRDHYNHAILTVMGYKPRDFATQINLNTSNMWGIVKSIVDICMKFEEGKYVLVKDPAKPQVRIYEVPSDAFENDYVEEPLPEEEQVRPPSDDVDATAEEMDAAAEAEANNAAASAGGEGEKSAEAAAA

SEQ ID NO: 193928 - protein, 606 aa, Oryza sativa
  Clone ID: PAT_MRT4530_90019C.1.pep
KPSRRHPQPPPGSRPPPPPSTMGFDVGVVAFNPEGWGPPDTAPAPASLGGGAAAASIPFAPFSRSDKLGRIADWTRNPAGPAALAAASRDSVFDFTSVDDSLAAAAEDSSFRLVDAKPPPRHPRFGPKWRFNQRPQLPQRRDEEVEARRREAEKERARRERHFQNNRSHHHPGFRGNQSSSAKSSVDIQPDWTMREQIPFANFTKLSFSVADQPEDLLLCGAVEYYDRAFDRVNPKAARRLERFKSRNFFKVTTTDDPVIRRLAEEDKATVFATDAILAALMCTPRSIHSWDIVVQRVGNKLFFDKRDGSQLDLLSVNETAQEQLPENKDDINSAHSLAVEATYINQNFSQQVLLRDGEKVTFDEPNPFASEGEEAASVGYRYRRWKLDDEISIVARCEVHAVNADPGGGRQFLTLNALNEFDPKITGVDWRQKLETQRGAVLATELKNNANKLARWTCQALLAGADMMKLGYVSRVHPRDHYNHAILTVMGYKPRDFATQINLNTSNMWGIVKSIVDICMKFEEGKYVLVKDPAKPQVRIYEVPSDAFENDYVEEPLPEEEQVRPPSDDVDATAEEMDAAAEAEANNAAASAGGEGEKSAEAAAA

SEQ ID NO: 193929 - protein, 82 aa, Oryza sativa
  Clone ID: PAT_MRT4530_9001C.1.pep
MSCCGGNCGCGSGCQCGSGCGGCKMYPEMAEEVTTTQTVIMGVAPSKGHAEGLEAGAAAGAGAENGCKCGDNCTCNPCNCGK

SEQ ID NO: 193930 - protein, 57 aa, Oryza sativa
  Clone ID: PAT_MRT4530_90020C.1.pep
SGSGVSSNLTLISRPDYGEHPCHALYTEHSIGTGTKLPENTYIYRGMRPALVISNIH

SEQ ID NO: 193931 - protein, 42 aa, Oryza sativa
  Clone ID: PAT_MRT4530_90021C.1.pep
ALGGWNPLGYHVLVINQIGWHTKRLGQRQQKDAVHLTLSGLY

SEQ ID NO: 193932 - protein, 117 aa, Oryza sativa
  Clone ID: PAT_MRT4530_90022C.1.pep
FFFCSSPLRRLALKPSSSRAAAAAAMSSAPATAIAAPVEHIVLIKVRPEAAASGAAAAMASSLQALSSVVPGLSYIHVGPALRLRSPGGAALGGGHVRHSRYATKPDLAAYAAHRAH

SEQ ID NO: 193933 - protein, 221 aa, Oryza sativa
  Clone ID: PAT_MRT4530_90023C.1.pep
MSPVKVFGSAPFTNVARVLLCLEEVGADYEIVDVDFGDREHKGPDHLARNPFGQVPAFQDGDLMLFESRAICRYILRKHRATDEANLLREGDPSESAVVDAWLDVEALRYEPSVHAVFVQRRVVPALGGEPDERVIAESVARLRETLAVYEARLEATRGYLAGGEVSLADLSHFPYTRYFMEMPYEVPVFGAYPRVTAWWERLLTRPSVRKVAAMMSGGEG

SEQ ID NO: 193934 - protein, 384 aa, Oryza sativa
  unsure (1)..(384): unsure at all Xaa locations
  Clone ID: PAT_MRT4530_90024C.1.pep
EDPPGNSLVILRNPEFLFSIRFDRLKANIILKRIVLAGVGLGRRGSLAARFAFFPPEPATYAVRKDEACGGGGRLVASGVPRDAAVDVLLVDTRKGSKVVAFYLRNPAARLTVLYSHGNAADLGQLYDLFVQLKVNLKVNLMGYDYSGYGASTGKPSEENTYADIEAVYQCLETEYGISQEDLILYGQSVGSGPTLHLASRLPRLRGVVLHSAILSGLRVVCHVNFTFCFDIYKNVKKIKKVKSPVLVIHGTDDDVVNWSHGNELWKLAREPYDPLWIKGGGHCNLELYPDFIRHLSKFIREMENITTKTRLKKIRQSLQPAPKKVHHRASTGXPPPSPPTAAAASGCRGCFKCPTCFSFSCSCCRSCLKCPTFKCCCCGSCRD

SEQ ID NO: 193935 - protein, 429 aa, Oryza sativa
  Clone ID: PAT_MRT4530_90025C.1.pep
MRMGKYEMGRALGEGHFGKVKLARHADTGAAFAIKILDRQRILAMKIDEQIKREIATLKLLKHPNVVRLHEVSASKTKIYMVLEYVNGGELFDKIALKGKLSEKEGRKLFQQLMDAVSYCHEKGVYHRDLKPENVLVDAKGNIKVSDFGLSALPQNQRKDGLLHTTCGSPNYIAPEFSAYGGCSSDRGNLPFDDQNTVVLYQKILKGDARIPKWLSPGAQDILRKILDPNPITRLDITGIRAHEWFRQDYTPAMPFDDDDDNNISDGNLHMTENQDIETSPAISQINAFQLIGMSSCLDLSGFFEKEDVSERKIRFVSNYSPTSLFEKIESTVTEKGFQVQKNSGKLKVIQVCKEPANPRGHGNLLISAEVFEINESLYVVELKRSSGDCSLYRQLCASLSEDLGICKRQQLLKKDSMRQDLCRYNSSF

SEQ ID NO: 193936 - protein, 634 aa, Oryza sativa
  Clone ID: PAT_MRT4530_90026C.1.pep
MAPTKGEGPAIGIDLGTTYSCVGVWQHDRVEIIANDQGNRTTPSYVGFTDTERLIGDAAKNQVAMNPINTVFDAKRLIGRRFSDASVQSDIKMWPYKVIPGPGDKPMIVVQYKGEEKQFSAEEISSMVLIKMREIAEAYLGSTVKNAVVTVPAYFNDSQRQATKDAGVIAGLNVMRIINEPTAAAIAYGLDKKATSVGEKNVLIFDLGGGTFDVSLLTIEEGIFEVKATAGDTHLGGEDFDNRLVNHFVQEFKRKHKKDISGNPRALRRLRTSCERAKRTLSSTAQTTIEIDSLFEGVDFYSTITRARFEELNMDLFRKCMEPVEKCLRDAKMDKSTVHDVVLVGGSTRIPRVQQLLQDFFNGKELCKSINPDEAVAYGAAVQAAILSGEGNEKVQDLLLLDVTPLSLGLETAGGVMTVLIPRNTTIPTKKEQVFSTYSDNQPGVLIQVYEGERTRTRDNNLLGKFELSGIPPAPRGVPQITVCFDIDANGILNVSAEDKTTGQKNKITITNDKGRLSKEEIEKMVQDAEKYKSEDEEHKRKNTIQDEKIASKLPADDKKKIEDAVEQAIQWLDNNQLAEVEEFEDKMKELEGLCNPIIAKMYQGAGADMGGGMDDDAPAAGGSGAGPKIEEVD

SEQ ID NO: 193937 - protein, 88 aa, Oryza sativa
  Clone ID: PAT_MRT4530_90027C.1.pep
GPCRWGNLARWSGPFRFLPRAPRGRLGGFLKNSVCVSAPEVVNGLVWALVGTLVTRLFLSNKETLKGVLECKLHFLHPAQVFPNLILF

SEQ ID NO: 193938 - protein, 649 aa, Oryza sativa
  Clone ID: PAT_MRT4530_90028C.1.pep
MAPTKGEGPAIGIDLGTTYSCVGVWQHDRVEIIANDQGNRTTPSYVGFTDTERLIGDAAKNQVAMNPINTVFDAKRLIGRRFSDASVQSDIKMWPYKVIPGPGDKPMIVVQYKGEEKQFSAEEISSMVLIKMREIAEAYLGSTVKNAVVTVPAYFNDSQRQATKDAGVIAGLNVMRIINEPTAAAIAYGLDKKATSVGEKNVLIFDLGGGTFDVSLLTIEEGIFEVKATAGDTHLGGEDFDNRLVNHFVQEFKRKHKKDISGNPRALRRLRTSCERAKRTLSSTAQTTIEIDSLFEGVDFYSTITRARFEELNMDLFRKCMEPVEKCLRDAKMDKSTVHDVVLVGGSTRIPRVQQLLQDFFNGKELCKSINPDEAVAYGAAVQAAILSGEGNEKVQDLLLLDVTPLSLGLETAGGVMTVLIPRNTTIPTKKEQVFSTYSDNQPGVLIQVYEGERTRTRDNNLLGKFELSGIPPAPRGVPQITVCFDIDANGILNVSPEDKTTGQKNKITITNDKGRLSKEEIEKMVQDAEKYKSEDEEHKKKVDAKNSLENYAYNMRNTIQDEKIASKLPADDKKKIEDAVEQAIQWLDNNQLAEVEEFEDKMKELEGLCNPIIAKMYQGAGADMGGGMDDDAPAAGGSGAGPKIEEVD

SEQ ID NO: 193939 - protein, 171 aa, Oryza sativa
  Clone ID: PAT_MRT4530_90029C.1.pep
HPPARSSQDTTRVRRLDATRLFSVLAMLRHGRRVEGHGDALPPCPRLRLLPHRRRRLSGRATGRRGGHVGRHNLLRRGGRLRRRRAPTPPPGVVAARDIGRHHCHQRTSHRRRGTTARPARSSPPSPSSSWTFYLAWLLRPNDALPLQPAGDDGVGPTRGRREVTATIGGR

SEQ ID NO: 193940 - protein, 93 aa, Oryza sativa
  Clone ID: PAT_MRT4530_9002C.1.pep
MGSAPSWAVSPSSRTGVAVVGRRLTFAGRGFTALSVAVRTSAEAKGHHATSRRFAALFWGETERIPSSRRPAFSSNSGDLLFFSSADETLDSG

SEQ ID NO: 193941 - protein, 96 aa, Oryza sativa
  unsure (1)..(96): unsure at all Xaa locations
  Clone ID: PAT_MRT4530_90030C.1.pep
LRTSLPARILALHLLSSRRSTAGPAXSPPRSAATSDLPLPRNGSATAHHRTAIPAPRLPPPTPXRRRRRRGRPLPPPPPPPSPPCTRGRPSSPAAA

SEQ ID NO: 193942 - protein, 264 aa, Oryza sativa
  Clone ID: PAT_MRT4530_90031C.1.pep
MASAAEMQPLAPAGYRRAPEMKEKVDASAVDLEAGTGETLYPGISRGESALRWGFVRKVYGILAAQLLLTTAVSALTVLHPTLNATLSSSPTLALVLAVLPFVLMVPLYHYQHKHPHNFVYLGLFTLCLSFSIGVACANTQGKIVLEALILTSAVVASLTAYTFWASKKGKEFGYLGPILFSALVLLVVISFIQVFFPLGSGPVALFGGLGALVFSGFIIYDTENLIKRHTYDDYIWASVELYLDILNLFLYILNMIRSMQSDN

SEQ ID NO: 193943 - protein, 95 aa, Oryza sativa
  unsure (1)..(95): unsure at all Xaa locations
  Clone ID: PAT_MRT4530_90032C.1.pep
MARSVLVDGVWPLLLHGAARRQGXRKPLVDNDATGRRAGFYLRVDDLKNDPSNVEPKNDRVLVRLKQIPEKCVGGALLTKPAVKIERYWMGEIVS

SEQ ID NO: 193944 - protein, 87 aa, Oryza sativa
  Clone ID: PAT_MRT4530_90033C.1.pep
ESFQEIRLSPCPAATTTTTTTTATTTLLQPPPDGVRDRRGSEDFNACTGSVTMSASRCFAAQVTTDRTCCVYPDGLHTRSMCATYVT

SEQ ID NO: 193945 - protein, 107 aa, Oryza sativa
  Clone ID: PAT_MRT4530_90034C.1.pep
MACVTNLFSTKRIGDFAGAMGEVPQLDVLCHLTTDTFVTHYGWNLVQKGIITGMPMLYWPLYVELTINKVLKVDYMGIDVEMEGWLVGLVIPEEVKVKVRLIIESEH

SEQ ID NO: 193946 - protein, 301 aa, Oryza sativa
  Clone ID: PAT_MRT4530_90035C.1.pep
MAANKLKFSPLLALFLLAGIAVTSRAGDIAVYWGQNGDEGSLADACNSGLYAYVMVAFLSTFGNGQTPVLNLAGHCEPSSGGCTGQSSDIQTCQSLGVKVILSIGGGAGSYGLSSTQDAQDVADYLWNNFLGGSSGSRPLGDAVLDGVDFDIETGNPAHYDELATFLSRYSAQGGGKKVILTAAPQCPYPDASLGPALQTGLFDSVWVQFYNNPPCQYANGDASNLVSAWNTWTGGVSAGSFYVGVPAAEAAAGSGYVAPGDLTSAVLPAVQGNAKYGGIMVWNRFYDVQNNFSNQVKSSV

SEQ ID NO: 193947 - protein, 127 aa, Oryza sativa
  Clone ID: PAT_MRT4530_90036C.1.pep
MNVTPTNPSNQPQQHKQPRPRDEGGEKITKEERGFVAKMEGLIPFVIDAIRRSNDQRGGYRGVSSQDGSSHGGGGGSRRHLIDYWELAGSAAEDARPGSVQETGAAEDERSRPPAAVVAAGSAYRRK

SEQ ID NO: 193948 - protein, 142 aa, Oryza sativa
  Clone ID: PAT_MRT4530_90037C.1.pep
PQGETHPRAARAPSKTRPSPRLPSTDHIKADTSRTAERGKVPPTNNGKETPYRKTYLTRPAVTSCYLRPRYLGSTPPPHSPDTTRIPAWWTTPHTTHGLLTNEEQRQRSSTMPRRLYHYTNIHRIQGVLITITTTCPIDHVA

SEQ ID NO: 193949 - protein, 581 aa, Oryza sativa
  unsure (1)..(581): unsure at all Xaa locations
  Clone ID: PAT_MRT4530_90038C.1.pep
MSRDLDCPVQTQMAVAVLDRSFSSEYPASSRTEGRSCSWKRVFVQTENGYVLGIELERGENAHTVKKKLQVALKVPTEESSLTFGDLVLNNDLSSIRNDSPLLLRKNQMHRSSSTPCLSPTAHDVQEQDHSEPIEILGCLSPSSRMKQLAKDVVEAIRNGVDPVPVNSGMGGAYYFKNIYGERVAIVKPTDEEPFAPNNPKGFVGKTLGLPGLKRSVPVGETGLREVAAYLLDHDNFANVPPTMLVKITHSVFNVNDTVSCKSKVFHNKLQAVSKLASLQQFIAHDYDASDHGTSSFPVSAVHRIGILDIRIFNTDRHAGNLLVRKLGPGPDNFGVQTELIPIDHGLCLPESLEDPYFEWIHWPQASIPFTEEELEYIANLDPVKDAEMLRLELPFIRGACLRVLVLSTIFLKEAAAFGLCLSEIGEMMSRQFTGKEEEPSELELLCMEARKWVKKRELFLPEAGVEDDNDGITQFSIDSEDGSDASELPSFSKFGLMNASHRNPLSKLDECDEEDGEEEEDDDGDEEDDDEDMFKDDAGNLKNPXSKHIPSVSKLSASFKGASFSLGKLEPTTKVFPKTR

SEQ ID NO: 193950 - protein, 198 aa, Oryza sativa
  Clone ID: PAT_MRT4530_90039C.1.pep
MAPVAGSGDEWSETAMLVIDMQKDFVDPATSSAALLAGEAILPTVTAAVAVARQRGIFIVWVVREHDPSGRDVELFRRHFYSSGKGLGVEGSKGAELADGLTIKDGDYKLVKTRFSAFFATHLDSVLKTSGIKNLVIVGVQTPNCIRQTVFDAVALDYDKVAVIIDATAAAKPEIHLSNMIDMKNIGVETPTLEEWRR

SEQ ID NO: 193951 - protein, 56 aa, Oryza sativa
  unsure (1)..(56): unsure at all Xaa locations
  Clone ID: PAT_MRT4530_9003C.1.pep
FLADXSYIFIHGDDTAASIFSHASGFRFQPTDEQLVVDYLQRRTACAAMALLPTSP

SEQ ID NO: 193952 - protein, 118 aa, Oryza sativa
  unsure (1)..(118): unsure at all Xaa locations
  Clone ID: PAT_MRT4530_90040C.1.pep
PPPPPSPPTCSSPPHAPPARAPAHPPPPPRALSRPPHPSPPPPSSPHRGRPDPAPRPPPRPPQPPXSPPPPPPPPAHAPYPTPSPPPPAVEEEAVTLEVTAMVPMTILCLVLPISSPL

SEQ ID NO: 193953 - protein, 1428 aa, Oryza sativa
  Clone ID: PAT_MRT4530_90041C.1.pep
MGDLTTSSPASEVPFRVSFSGHGGHLRLDPTPNPPSPIPEFVLPPAYPLESPSSVKEYLEANYLNPELHLPTAADGARVWDLDWFELARPPLEPSAPRTMLVPAWEPPFRRRRPPLSSSSSRQESQVWDPESVQMDMSDVFDSGTGGITPRMPGPAKDFVRGSVNSRPFRPGGLHDDAAAAAALEKAFPEGARNGDWVRELMSGGPAQVNPPGFRKGLDLGNLKEYKSHWKCYQDGERVDEQSTSSSNDTMDKYSVQFDDLFKIAWEEDSDDKVPREDHVQQLVGDEETNDVDKQNISKLQNASETIENLDIEKQKGGAQGDVSEPQSDLDQMLLSSVKDTSRDSSGSGDGSMAKEGKVWALVGGDEDIVTNFYKLVPDMAIEYPFELDKFQKEAIYYLQKGESVFVAAHTSAGKTVVAEYAFALATKHCTRAVYTAPIKTISNQKYRDFCGKFDVGLLTGDVSIRPEATCLIMTTEILRSMLYRGADIIRDIEWVIFDEVHYVNDAERGVVWEEVIIMLPKHINIVLLSATVPNTVEFADWIGRTKQKKIHVTSPLKFEIPIFIDSVGACTEILNTLVELLKVCNWANLICIIPFCCHLFIRTNKRPVPLEHCLFYSGEVFKICEKDAFLTQGYREAKEVFKKKNSSKLGMKPGSKPGTTAVRAGTQGRNPDTSSRGRDQKNPKHHHASSSAAAVQQSTSGPRRSESSFWMPLINNLLKKSLVPVVIFCFSKNRCDRSAESMFGADLTSNSEKSEIRLFCDKAFSRLKGSDRNLPQVVGIQSLLRRGIGVHHAGLLPIVKEVVEMLFCRGVIKVLFSTETFAMGVNAPARTLKDLVVFDSLRKFDGKEHRKLLPGEYIQMAGRAGRRGLDNIGTVIVMCRDEIPEESDLKNLIVGKPTRLESQFRLTYTMILHLLRVEELKVEDMLKRSFAEFHAQKNLPEKEKLLLQMLRQPTKTIECIKGEPAIEEYYEMVLEAEAHRESITEAIMQLPASQQSLTPGRLVVVKSQSDDDHLLGVIVKTPSAALKQYVVLVLTGDCTSSALAPDSSNQNEKEAGDFKQGYFVIPKGKRSMEDEYFSSVSTRKGSGVINIKLPYKGDASGMGFEVRAIENKEIMNICASKIKIDQVRLLEDPSKTVYSKTVQMLIKEQPDGNKYPAALDAIKDLKMKDMLLVENYYAYQRLLQKMSENKCHGCIKLKEHIALMKEQKVYKDQLNDLKYEMSDEALQQMPEFQGRIDVLKEIHYIDSDLVVQLKGRVACEMNSGEELISTECLFENQLDDLEPEEAVAIMSALVFQQRNTSEPSLTPKLADARKRIYDTAIRLGKLQREFKVPVDPEEYARDNLKFGLVEVVYEWAKGTPFADICELTDVSEGLIVRTIVRLDETCREFRNAASIMGNSALHKKMETASNAIKRDIVFAASLYVTGI

SEQ ID NO: 193954 - protein, 210 aa, Oryza sativa
  unsure (1)..(210): unsure at all Xaa locations
  Clone ID: PAT_MRT4530_90042C.1.pep
ISLEVRERRLVAGRHEQTAPATAGGPPPPPSPPTCSSPPHAPPARAPAHPPPPPRALSRPPHPSPPPPSSPHRGRPDPAPRPPPRPPXSSRGRGGCGEPAGEIKRPEPVERHGRPAXRPPPCSPPPPPPPPAHAPYPTPSPPPPAVEEEAVTLEVTAMVPMTMLRTRKSTAGVNHPWTALHTAGITASSIAAAAELWSGGGGGGGSGGGG

SEQ ID NO: 193955 - protein, 404 aa, Oryza sativa
  Clone ID: PAT_MRT4530_90043C.1.pep
MMKEILQVVVEPITWLEFTVAFKKIHVPSGVVALKKREFRALTLRSCSITEFLHEFNCLARYAPEDVCMDEKLVDKAIRQEDKYNRMEEKKHKIAHNQPIKEQGNMPVVCFNYDEPGHFADKCPKPRRVETAPIQNKSIAPAPKARVNHVAAAEAQGAPDVISMRDYPNVFPVDLRGIPPKRDIEFRIDLVMRTSPTITRWQRRNKGSSGGGNDEDILYYYPLAKTRDTNRSGFLNAHALELRNHSTTSSLVITRVETRMTSPRRLIPVCELKNTNKDKILDVKLFSQVPLTRKEFGRGTKTIGKFIFLAFHPYKECPNMSTKDPAAVREEEERRWSGLLHRGTWSSVTAGSTPPTPAVAATKEALADAAVGERWIRALSARVWGKKRNKIWTGGWSGLEFGIS

SEQ ID NO: 193956 - protein, 949 aa, Oryza sativa
  Clone ID: PAT_MRT4530_90044C.1.pep
MGRLQNLMLLSAGFFSTLLLAQVTSAAAGMTVKVSTTPIFSKIPRAQTNKDFQVLLRIEAPPPVDLKGRVPIDLVAVLDVGGGGMSLEPVKKAMKFAIRQLSDEDSIAIFGPPMSREVIPKFMNIHGSRRIAEKKVDELEGRRFAHPARSSLDEALKMLEEQPASSSVGRAKFIVLVTDITRFSSDMPEWFTAALAKYPVHAFGLGASHDAAALRLVAQRSQGTYSFLDDANADKVAAALALCLGGLKSVAAVGARVVLKAASGSGVRIDRISSGGYASSVSQVDGASGEIAIGALYAGEVKTFVVHLDVPAAPEISPGEGVCCDQQQLLVASLDGQLYTSGGGVDVIDDDAAAGGGGPIQDVLVVERPPAAVLPKVPSAIVVNHIFQFRVLEMVDAFINDEILLRRTPATTGRTKDVDVDDDRGMKLLARWERFVLEHQFWVGLDLGSLDGEITAVANSLRKQQHVVGGVLPSSSMAAYIFSWMSSYKMQRPTAMGSPAKVVGLFVTLEVHLTLQVAITAENGGGGGDGECEYSCVEQLPPAPPLLVASGRDDDSYRFNAAYEGVISLDDINQFMIKIYQAMSADPVKVSTTTMFPTIPRDHTNKDFRVLLRVEAPPMADLKGHVPIDVVEVLDVSGSMGDPAMASSDFKKNKPPSRLDVLKDAMKFIIRKLEDGDRLSIVAFNDRPVKEYSTGLLDISGNGRRIAEKKVDWLEGRGGTALMPALEEAIRVLDCRPGDSRNRVGFILLLTDGDDTSGFRWSRDVINGAVGKYPVHTFGLGAAHSSEALLYIAQESRGTYSFVDDENMDKIAGALAVCLGGLKTVAAVDTRVSVRVAELSGARIERIDSGGYESRVACGGASGEVVVGVLYAGEVKSFIIHLHLPAASVSSLECGYCDAATVCDHHGHHCHRRHEQRLLDVGYSYRRAPDAAAISIVGRGVFVQRPEEV

SEQ ID NO: 193957 - protein, 40 aa, Oryza sativa
  Clone ID: PAT_MRT4530_90045C.1.pep
NLWGIPLCSEACKDPTAVQATHCLEVHCGSISAGGVVSPR

SEQ ID NO: 193958 - protein, 93 aa, Oryza sativa
  Clone ID: PAT_MRT4530_90046C.1.pep
SPPTACPSSWSPRRRRTSPRHCRSRRRRSNSTSRLSPCLLPPPSRRPRSSSGDRTPPRRRQRRRQTTAAGWRSEGRKAASCRRCIAPVRRWGT

SEQ ID NO: 193959 - protein, 64 aa, Oryza sativa
  unsure (1)..(64): unsure at all Xaa locations
  Clone ID: PAT_MRT4530_90047C.1.pep
MAKHLALSXAAAVAVSWLAASSAAAAGFYEKVRRXVGAGDHVRVVSDDGERRSRWALDAXTXSF

SEQ ID NO: 193960 - protein, 112 aa, Oryza sativa
  unsure (1)..(112): unsure at all Xaa locations
  Clone ID: PAT_MRT4530_90048C.1.pep
PALTNIIAGQILSVVRPRLVFRDEIPSGTIRMPPGPPPSLTVLXIRKTTKPRTRTTILSANPTSNRPPLRTRCLRYRVGRRTYNRQQEISQTIAKTYSCYPSVLHPGIAAVV

SEQ ID NO: 193961 - protein, 519 aa, Oryza sativa
  Clone ID: PAT_MRT4530_90049C.1.pep
MSASAEAKSRRERRSVVAELEGALLRDAATFPYFMLVAFEASGLPRFAALLALWPLLWALERALGRGDLALRAAAFVATAGVPRAEVEAVARAVLPKFMADDVDPAAWAAFGSCGGRRVVVTRMPRVMVERFAREHLGAHEVVGCDLEYSRLRRSTGFVRGGGGGERAVAERVRALFADGDRPDVGIARSESATRSFLPFCKKQLRPPFCEDDGDDVAAAGEQHKCPPFRPVIFHDGRLVCRPTPLMSLVILLWLPLGALVAFVRIAVGISVPIQIIPRIAPYFGGAVVVHGAPPPAAASGPASGVLFVCTHRTLMDPVVLATVLGRRVAAVTYSISRLSEVLSPIPTVRLTRDRGVDAAQMRAELSRGDVAVCPEGTTCREPFLLRFSALFAELSDRIVPVAMNYRVGLFHPTTARGWKAMDPIFFFMNPRPVYEVTFLNQLPAEETCAAGKSAVDVANYVQRILAAKLGFECTTFTRKDKYRVLAGNDGIVNVKPPAAADPAPWQRRLKEVLGFLLH

SEQ ID NO: 193962 - protein, 668 aa, Oryza sativa
  Clone ID: PAT_MRT4530_9004C.1.pep
MVVAAAARPQTAEALSKRASMLRDSLQRSQGNTDGMVTILGSFDHRLSALEAAMRPTQVRTHAIRMAHENIDKTIKAADGILSQFDLARRAEAAVLKGPHEDLESYLEAVDLLKGIVRFFSTNKNFKSSEGVLNHVNNLLAKSALKIEEEFRQLMTTYSKPIEPDRLFDCLPKSLRPTKDDPDADPGNAGHSEHPSKSLETAVYRTPTLIPPRILPLMNDIAQQLIQAGNQQSCYKIYRDTRGSALESSLRKLGVEKLSKEDVQKMQWEALEAKIGNWIHFMRIAVGILLRIGPYCVYSDLKTHILLTTQVKLLLAGERKICDQIFDGVNFNKDQCFAELTANSVVTLLSFGDAVAKSKRSPEKLFVLLDMYEVMHELQPEIEVIFEGKSCSEMREASLGLAKRLAQTAQETFADFEEAVEKDASKTIVNDGTVHPLTSYVINYVKFLFDYQSTLKLLFQEFETGSETESQLAVVTMRIMQALQNNLDGKSKQYRDPALTYLFLMNNIHYMVRSVRRSEAKDILGDDWIQRHRRIVQQNANQYKRVAWAKILQTLSIQGAGSTGSSDLSSSGVSRAMIKERFKSFNMQFEELHAKQSQWIVPDQELRESLRLAVAEVLLPAYRSFVKRFGNLVENGKNPHKYVRYSPEMVEQLLGEFFEGQQWGEQKR

SEQ ID NO: 193963 - protein, 490 aa, Oryza sativa
  Clone ID: PAT_MRT4530_90050C.1.pep
GLGSNRFNGSLPSELGNLDKLQELYIDSAGLSGPLPSSFSKLTRMQTLWASDNDFTGQIPDYIGNWNLTDLRFQGNSFQGPIPSALSNLVQLSSLILRNCKISDNLASIDFSKFASLNLLDFSYNQLSGNFPPWASGKNLQLNLVANNFVIDSSNNSILPSGLACLQRNTPCFLGSPQSSSFAVDCGSNRLISASDNLRYQTDDASLGPASYSVTGAPTWGVSNVGKFVDAPNGSYIIYSSRQFQNTLDSELFQTSRMSPSSLRYYGIGLENGNYTVTLQFAEFGIEDTQTWKSLGRRVFDIYLQGERKEKNFDIRKTAGDKSYTVVKKQYKVPVTKNFLEIHLFWAGKGTCCIPTQGYYGPTISALSVIPAGSIFAYLCKIPFSLFNLTSGLCSDFTPTVGNTAHKNKSTSKTGVIVGVVVGVTVLGLVALVGIFMWRQKRRKLSLEQQELYSIVGRPNVFSYSELRSATENFSSSNRLGEGGYGTVYK

SEQ ID NO: 193964 - protein, 131 aa, Oryza sativa
  unsure (1)..(131): unsure at all Xaa locations
  Clone ID: PAT_MRT4530_90051C.1.pep
PHASCVLVWSDYRGDVSMLXTSAHFLTKLLDIIQASSSPPPARTATPPVIHDDTDVSYIFPQHNNVFLLNASCQICNTASILFFLQSHTGFADLPPLLLPPTDGLADRHPSPCRRTRGEESGRWIHGEEKG

SEQ ID NO: 193965 - protein, 241 aa, Oryza sativa
  Clone ID: PAT_MRT4530_90052C.1.pep
MEITPAGSDHEIPEHLSMCSKLYLAAFRGYTDEVCNLLAGSSGAAVQPANSSPSPAAQERANHQGPCSIREVTAELRTLLHIAAGQGHDDLIAELCLHDSSLLSSASSSGHTPLHCAARAGHALAVRAISLLAGASVEEDRVRDVVRSKNVAGDTALHIAARHGHGKAVEELMEVAPETASELNGAGVSPLYLAVMSRSVRAVRAIISCRDASAAGPNSQNALHAAVLQCSDFQLIFTRVN

SEQ ID NO: 193966 - protein, 95 aa, Oryza sativa
  Clone ID: PAT_MRT4530_90053C.1.pep
SSRPLSSVLEPVVSYLPLCPNSGTEEWNEAFASLSELLTQYIHQKVESDIEELHKCFRLLKRLSSGSELFLELHDSILPLLQDSVRQHYGGILHL

SEQ ID NO: 193967 - protein, 727 aa, Oryza sativa
  Clone ID: PAT_MRT4530_90054C.1.pep
MKVSDHVFHFSVNRHAYIHALVIKGDLECYRTKKKKKLERWPGGELPPDLARFDTVDDAVSYLVRSVCELEIDGEVGSVQWYQSTESLAMLKAVTVSRQRKPSAVPCSLPRRFDRIPNPGFRWLSSTAAVGTGEEAAFRCGGSAELCDIEHALKALRKKILTLDFENSMRVHDPQNSFQYLEVLYKIRQLTERLGSLHPVGEAKEHNELIVYAGDLFDMAMARLEEEFVYLLTHYKQPIEQGLVSFRSTEDGSVDDFSSSSFNEEQCDGKTTQTETTGGSEYFATDLIQHGALSAVKSIANFMFLSEYDKECSQAYISTRQSAVDENLGSLRIDKLSMEELLSTNWTKLSSLIKRWNRAMKVFVQVYLTSEKRLSNHVFGELSESTADLCFYEISLSSVMQLLTFYESVAIGPPKPEKLFRLLDMYEVLNDLLPEVEFLFQEGCDDIVLTEYNEVLLQLGESVRKTITEFKYAVQSYTSSNAMARGEVHPLTKYVMNYIKALTAYSKTLDSLLKDTDRRCQHFSTDIQSMANQCPHFTVSALHLQSVTAILEENLEAGSRLYRDDRLRNIFMMNNIYYMVQKVKNSELKIFLGDDWIRVHNRKFQQQAMSYERASWSHVLSFLSDDGLCAAGDGASRKIIKEKFKNFNLSFEDAYRTQTGWSIPDDQLREDVRISISLKIIQAYRTFTGRYYSRLDGTRHLERYIKYKPEDLEKLLLDLFEGAQKTL

SEQ ID NO: 193968 - protein, 78 aa, Oryza sativa
  Clone ID: PAT_MRT4530_90055C.1.pep
NLFQTLIRPLLEGKARSCWSFTWNGTGISLWPGESQTKCRRRIAHSRSWVTISSQPVPYQSASPASERKNGASEPATM

SEQ ID NO: 193969 - protein, 323 aa, Oryza sativa
  unsure (1)..(323): unsure at all Xaa locations
  Clone ID: PAT_MRT4530_90056C.1.pep
MGEQQQQVERQPDLPPGFRFHPTDEEIITFYLAPKVVDSRGFCVAAIGEVDLNKCEPWDLPGKAKMNGEKEWYFYCQKDRKYPTGMRTNRATEAGYWKATGKDKEIFRNHHMLIGMKKTLVFYKGRAPKGDKTNWVMHEYRLADASPPQPPPPPSSAEPPRQDDWAVCRIFHKSSGIKKPVQVPMQMPMQMQMPVAHQVPAANYQQQMAMASASIIQVPMQMQMPSMSDQLQMLDDFSTGSLMAPPPPPPSYSTLPGFPLQINGXPQQFVGNPSMYYQQQQQQQQQQMDMAXGGFVVXEPSSLVVSPHRCCPIHIYIGMRELN

SEQ ID NO: 193970 - protein, 65 aa, Oryza sativa
  Clone ID: PAT_MRT4530_90057C.1.pep
MGCCSMIELDYITEMKTVNVAVERAFDVEVVGENGRSGSAATAPRFVPGLTASISGGLPVKIRRV

SEQ ID NO: 193971 - protein, 77 aa, Oryza sativa
  Clone ID: PAT_MRT4530_90058C.1.pep
MGYLWRVRLSSFLVGTATASAAGFFFIYKDHLLARAAIARQVEDIKETSEKHYESLNQRVSALESRNELGDTKAVSD

SEQ ID NO: 193972 - protein, 461 aa, Oryza sativa
  unsure (1)..(461): unsure at all Xaa locations
  Clone ID: PAT_MRT4530_90059C.1.pep
MELGRPGCPVDRLPDSPRHERGAARCLLGTGANPKVWCNRLEGGYAKGPVTASFRLPWIYPASYLLFRYDLLSIVGSFHXRHGGDQCSSXGGAHQRRLPXPDPAPPPADLPKLLYRFAAVCRTWRSLLTDPGFLRRYREFHGLPHLIGYVHDGADXRDLVVARFVTTADTTFRPRVPEKGVDLHVLDSRHGRVIFRRIGKGWLDESSLIIWDPVADHHQEVPLPEAFAQEEFNLTATVLCDALGCDHLDCHGGPFRVVFVGVRDEEGASATSAFNYTSSSGSWTASPAAAAAVADEDDWGFRMPAPSILVGGTTLYFRSPGRILRYWFGDEMEHLSYVDIPPFITQETRGTVLMPAADGRLSFAAMYGDMTISFWETEVSADGAVDWVHTQNALVSIPLPGVLIGAAASLLFVRTEDGLHISVANTTKVEAEVQGGDMADLDDFQKKSLLRTTDYVPDDLG

SEQ ID NO: 193973 - protein, 104 aa, Oryza sativa
  Clone ID: PAT_MRT4530_9005C.1.pep
MVLAWLTEQARHGEVKSALAEGRIVVAGTRPNSATADPAVAASQLAFTSVSAAIMIVREIAPEHQWAFPVRIMRGKGVTAERSMHISVCKLKYLLKNFIPRGFF

SEQ ID NO: 193974 - protein, 37 aa, Oryza sativa
  Clone ID: PAT_MRT4530_90060C.1.pep
MGGTSNRQCMLLLINPKFCSSWSLLLIYQYAFFSNGA

SEQ ID NO: 193975 - protein, 55 aa, Oryza sativa
  Clone ID: PAT_MRT4530_90061C.1.pep
PEEGGTKTEMARWFLHPFVDLHLSRNDLVFNKSPSISYMQVIFRGNALAPGFGHS

SEQ ID NO: 193976 - protein, 121 aa, Oryza sativa
  Clone ID: PAT_MRT4530_90062C.1.pep
LQVCFAPQVPANAVVIIVKLKRHQAPLYARRPPHILNATEYTGLRTMYLEQVAVYTHNMGISSQSWETGTRWEACRCFPINSILCMPMRLLKSSALPVYAQNHNIVNAECPVLRRLTQRVP

SEQ ID NO: 193977 - protein, 112 aa, Oryza sativa
  Clone ID: PAT_MRT4530_90063C.1.pep
MEMMKPAMASCKDIAKEHTQNGAPVGQETPAAVNVRARAVDGGVPSSVTGEANYDLANADGQAFKLHRMPPSSVPAVAAHRPTTTTAASASSRPSTTTTPPLDDRLRDDFPG

SEQ ID NO: 193978 - protein, 300 aa, Oryza sativa
  Clone ID: PAT_MRT4530_90064C.1.pep
MGGRLGMGWKEDGQPSGDQARVAQPTRASQTRNGETAARPPKATQPASLARYYKYRWEDHKNLRIRRSTKTNEKTPRSCGCRPLLFLALHTSLAFLFNTSAPITSVAKLRIAYFHVNNSLFPAVDLTLCFSVHNLGLVLLLRYCAVSAAVSYHSHLVVSTNMSPGSAHPGCKLDAGAGGVPAQILASRVRAIDVSLTLESLMVSGDLYFVVGKDGEKVPVAWLVGRTGLLYFSAHWCSPCRKFLPKLIEEYIKMREETSSDVEVVFVSNTDGQEKRNCHLTWQGGPRPRGPIEGLWIEMG

SEQ ID NO: 193979 - protein, 106 aa, Oryza sativa
  unsure (1)..(106): unsure at all Xaa locations
  Clone ID: PAT_MRT4530_90065C.1.pep
LVXLELTEPWGSTPVLESMPSLLTASIKLTDCDDHCGKEEFGGSCDDNACDNCGXNXGSSGDCXLLDGLSEAKSLELIAKPRVFIFRXDLMWCPTFXKLKXXLLNE

SEQ ID NO: 193980 - protein, 645 aa, Oryza sativa
  Clone ID: PAT_MRT4530_90066C.1.pep
MDLYEGDSNNGGDYGDSHDGGGYGNGDSGHGYGDANDGNNLGGYGGGSTILLYGAEHRFGASIPTHDFLAQPLHLSRDGGRTSYNSSGFGEGSSSSQNPPGVDGPHAIGAGFQAPMAPPFGGSGHGGVFVPPIQPQARAASQGRGRGRGRGARCRLTEDFNDRASWTNENTKLFCELYCKQIDNGNCIRGRMSKAGWKEIRKGFYATTDLVHDNEQFGFRYRGLKNMWTFILRLRTDTGLGRRPDGTMVASDKWWDDNTKDHPEFRKLKNGMPDYLEEMDRIFMGPATQPANPIVDVEDSEDDEESDDDDFDPLSPISVGTKRSHSMRSTPSTQSRATSPSKKLKSPAVRAVVNELKEDVRLQPVDTKDEDSDKEFGRVMMEYFMDDYASTAFLYGTLHLAKHIDKYYNQSEYRDVSTTMSALEWVEKKHADRKRCYNMFRMTSDMFYSLHDLLVDKFELKSSMKSKSIEALGLFLWMAGAPQSVRQVEDRFERSLATVHNMFHKVLASLLKLAADIIKPRDPQFATLHSRLRYLRFYPYFNDCIGAIDGTHIPMQVSKDHLVQHICRHHITTQNVMACCDFDMIFTFVLAGWPGFVHDMRVFNDAMSTYNHVFPHPPPGKYYLVDSGYANRIGYLELYKGTKYH

SEQ ID NO: 193981 - protein, 539 aa, Oryza sativa
  unsure (1)..(539): unsure at all Xaa locations
  Clone ID: PAT_MRT4530_90067C.1.pep
MDSYEGDSNNGGGYGDGHDGGGYGNGDSGHGYGDANAGRVFGDGNNLGGYGGGSTILLYGAEHRFGASIPTRDFLAQPLHLSRDGGLTSYNSGSFGEGSSSSQNPPGVPPRTVHRTLGLRGRPSAQGASGSGPRRGGRMSAAGVDGPHAIGAGFQAPMAPPFGGSGHGGVFVPPIRPQARAASQGRGRGRGRSAWRRLTEQIDNGNYIRGSMSKAGWKEIRKGFYATTDLVHDNEQFGFKYRGLKNMWTFILRLRTDTGLGRRPDGTMVASDKWWDDNTKDHPEFRKLKNGMPDYREEMDRMFMGPTTQPATPIVDVEDSEDDEESDDDDFDPLSPISVGTKRSHSMRSTPSTRSRATSPSKKLKSLAVRAVVNELKLYLLGYVRFGSYEVLCLLAMSFMENARLQPVDTKDEDSVKEFGRVMMEYFMDDYASTGFLCGTLHLANHIDRYCNQSEYRDVSTTMSALEWVEKKLADRKRCYNMFRMTSDMFFSLHDLLVDKYELKSSMKSKSIEALGLFLWMAGAPXSVRQVEDRFERSL

SEQ ID NO: 193982 - protein, 124 aa, Oryza sativa
  Clone ID: PAT_MRT4530_90068C.1.pep
MEPFDLAYSLVSTISMLYKYHLRVKQINSGAPRRGLGAKGSDEMTSRAGFSDEGFYVRPSLGDLTHPAFTLVQVGTIIFLVFVVVPISPPLAAAKDEATTTTHADIIPLLATSSVYTENEVRTT

SEQ ID NO: 193983 - protein, 86 aa, Oryza sativa
  Clone ID: PAT_MRT4530_90069C.1.pep
MPNGSDRDDPVLRDTLALTWSLPDRRDVVVGQLLGNNGAHLLTLACGPEDQGDCARLSVTLCVADSQGRNRDGEVVLLLSSCGTPD

SEQ ID NO: 193984 - protein, 120 aa, Oryza sativa
  Clone ID: PAT_MRT4530_9006C.1.pep
HRCAAGSGNATARGRLVRGCYNDPLPHVVVDEVSIETEEESLLVYDVDDLEHDPGLRVPISSFDANDQDADRRGYILKGLAFRGHDETEESNNRGNFLELLKWLAGNNEDVNKVVLNNAP

SEQ ID NO: 193985 - protein, 44 aa, Oryza sativa
  unsure (1)..(44): unsure at all Xaa locations
  Clone ID: PAT_MRT4530_90070C.1.pep
MKLAGLKSVDGAHEESIWAAAWXPEADHRPXALLLTGALNETXR

SEQ ID NO: 193986 - protein, 109 aa, Oryza sativa
  unsure (1)..(109): unsure at all Xaa locations
  Clone ID: PAT_MRT4530_90071C.1.pep
THLGKGGRDGVGWALRRPLSLPDSPRHERGLPAAFXGLGVKPEVWCAWLEGXMRRVLSRHLSNVDLYVNFIVCVPWPVRDRDFNAHSAWNSIREFKKEAKGSFAYSRHL

SEQ ID NO: 193987 - protein, 543 aa, Oryza sativa
  Clone ID: PAT_MRT4530_90072C.1.pep
MVAAAVAAAEQVVAALREECATPAARLDGVAAAMAGEMAAGLAEEGGSKIKMIVSYVDNLPNGSLLLGNFLVIVWFLDAMNTLISAATDDSDTLIENKNCGKYLLLFSLLKQQNSGTAMCAVLYFCIKRTEEGLFYALDLGGTNFRVLRVQLAGKEKRVVKRESREVSIPPHLMSGNSSELFGFIASALAKFVADEGHNAVFNDRQRELGFTFSFPVRQTSIASGTLIKWTKAFSIDDAVGEDVVAELQMAMEKQGLDMRVSALINDTVGTLAAGSYYDEDIVVGVILGTGSNAAYLEKANAIPKLEGELPKSGNMVINTEWGNFSSSCLPITEYDEALDKESLNPGEQASFSRRLHTPHMSKIFEKLISGMYLGEIVRRVLLKISLQSSIFGNLDQTKLKTRFILRTPDISVMHHDGTPDLRIVAEKLADNLKITDTSLETRKMVVEICDIVTRRSARLAAAGIVGILRKIGRGVPGDKRKSVIAIDGGLYEHYTEFRQCLETTLTELLGEEASKSVAVKLANDGSGLGAALIAAAHSQYLN

SEQ ID NO: 193988 - protein, 250 aa, Oryza sativa
  Clone ID: PAT_MRT4530_90073C.1.pep
MAAAAATAFSCSFASPRHRRSPTTARASGAAVEIRVCTNRTCARQGGREVLAALEGLAPPRVDVASCGCLGRCGAGPNFGASVSGGGAAVFGHVGTAARAAQLLEHLLGDSGFDAAAGLAALAAREKAEAALEKGGAAEAEALLTEAIEMNAGGGLHLAYRSRSRARLSMGNITGALADAEEATKIAPKFPQAHLSRGDALFAMEEYRAAEDAYADALDLDPSIRRTKSFRARVQKLREKVANADVSSSS

SEQ ID NO: 193989 - protein, 132 aa, Oryza sativa
  unsure (1)..(132): unsure at all Xaa locations
  Clone ID: PAT_MRT4530_90074C.1.pep
EEEQQSSLHNSLYPSKELLSDDKAMTVSDHIKELPDRMLASLSAAGAKTLXGRFAYSKDLIRILEAPVRVQGVRLLQLSPGELFCTTLNVSGYCDLLLGGPVIPHDMIAFVVPAVTWYERXFLGPIVLGWSV

SEQ ID NO: 193990 - protein, 239 aa, Oryza sativa
  Clone ID: PAT_MRT4530_90075C.1.pep
MRKLLMREPKKKKRATNERATNEGAKKKRAKNSKKKGSNDKDAVGIDDEGIYSDNELLVVHSDSSYDSDLSESSDSDCSDPKFDPDQEIIDEGDDDDVPVFAYDVQDPCIDVGVVFPDVDQCKLAVTHHAILNDHAFETVKKDKKRFRAICKRAEEGCKWCFFFASTSPKYIGCKVKTSGPKHTCGSFNKCGETMVTTKWVADRVVDLLRDNSSRGAKDLQEELNRKHQIDIPYFKVFR

SEQ ID NO: 193991 - protein, 61 aa, Oryza sativa
  Clone ID: PAT_MRT4530_90076C.1.pep
VDAPKIHFEHVFLLETNLIYCTLQSYTSFTNPSPLFILIRACFSQNWSMISINERAFLNNS

SEQ ID NO: 193992 - protein, 411 aa, Oryza sativa
  Clone ID: PAT_MRT4530_90077C.1.pep
MAPPHACSPGATQRLLLHAAADGDLRLFKRIASRLDGGEGRLKEAVEAVKDRGAGALHQAARNGRTAMCVYLVEELQVDINAANESEVEKFEIYGICGIVGCGNFATLEPHPHVLGGIVYTVSYLLDHGANPDKPNEQGRAPLHLAVEQGNCEILKVLLVKGADVDSSSDCGTPLHIAAVKSHDGCMKILLDHHADCNKVFSTFYTPLIAALMVRSLKCVKLLIKAGADIKGVGTFTPLIAAATEGLTDFYKCLLEAGADPNVPDENRRKDVEILLPVTSRIPSVYDWSVDGIITYVNKNVQATNLEPEDGTCTRIGAFAWLKMGEGMKALTDAHLCRMLCPDWPKACYREGAAHMFLKAKSFFICNNYFVFRTDKACDAFLDGLKLDPANMEIENGLREAFKSLKKSRAA

SEQ ID NO: 193993 - protein, 453 aa, Oryza sativa
  Clone ID: PAT_MRT4530_90078C.1.pep
MASKSKSGHGYVLLGLNGYIADRHNRTTASSTTSTGLPIEVTFCAARPPALAHFSIHCPGLDHVGADRNPLLSPKVLSADADVVLIRVPVDPLALLDLRLHDYFVYRMHPETPRLDLLPHPGEHGFSDSEIAILSCGNGKYVVAGLQATSCDTTYTLRRLYRDGEPPGSWSWTSQRVPVSVSVSQLQRDDVCPIPKSAIRQTHHLTAKVITLRGARGTIGWVDLWRGILLCDVLDATPKVRDIPLPFPARANWRAYLNRCPYYSRDITVSESRDTIKYVEMELTRPAIEEEIISGPDDPEEECSYSLVPGRWQATTWTMPIPANSWNDWKYGCTISSDHVKLPDDGTKQSELLRRLVMSRNERKEEVAVAGLCLSLGCLRMAHPTLSIADGDDVIYLLSKGIRGAKMAAVVAVDVRARTLIGVSEIDSEKNINFLRCCLPTGIFKHLNTSAAT

SEQ ID NO: 193994 - protein, 635 aa, Oryza sativa
  Clone ID: PAT_MRT4530_90079C.1.pep
MILNLIILFLGSHAASASNTLFPGQPLSGSETLVSENGIFELGFFSPSGTKHYLGIRYKNITSSNPVNFWLGNRIPITNFLNATLYIDAGELYIEELGSVLWTSNSMKNASDTAVAVILNTGNFVVRDQLNSSMVVWQSFDHPADALLPGAWLGLDMVIGANILLTLYKPPYNCTLMIDQSRKRGFIMFIDGHDYLGTFPDWMVTYEENGSLGFPDNPQNVTAATSEECQAACLSECFCAAYSYHSGCKIWHSMLLNLTLADNPPYTEIYMRIGSPNKSRLHILVFILIFGSIAVILVMLMLLLIYKKRSSCVASQAKMEGFLAVYSYAQVKKATRNLSDKLGEGSFGSVFKGTIAGSTIVAVKKLKGLGHTEKQFRTEVQTVGMIQHTNLVRLLGFCTGGTRRLLVYEYMPNGSLDSHLFSETSRVLSWNLRHRIVIGIARGLAYLHEECRDSIIHCDIKPENILLDAELCPKIADFGMAKLLGREFSAVLTSIRGTIGYLAPEWISGQPITYKADVYSFGVLLFEIISGRRSTEKIQHGNHRYFPLYAAAKVNEGDVLCLLDDRLEGNASLKELDVACRVACWCIQDDEIHRPSMRQVIHMLEGIVGVELPPIPASFQNLMDGYDSDLYSVEV

SEQ ID NO: 193995 - protein, 210 aa, Oryza sativa
  unsure (1)..(210): unsure at all Xaa locations
  Clone ID: PAT_MRT4530_9007C.1.pep
FLLTTKFGNSSIGDGDRXKRNPRXRSFRKQSENRLKSKSAAIRIGRVRVGLGSRLSRFRXCDSFGQKSATKTYGILEFVRGKSRVRQGHVLIKSTGMLTNLKARFFWTCTKAKQIFQASCFSHQTLSSTFESYYNSLAVVLQRRDWENPGVTQLNRLAAHPPFASWRNSEEARTDRPSQQLRSLNGEWRLMRYFSLRICAVFHTAYGALS

SEQ ID NO: 193996 - protein, 95 aa, Oryza sativa
  Clone ID: PAT_MRT4530_90080C.1.pep
MVWPLPSGMRAGFIDTVSLSSSLSLSGLPSCTPTRAQHTHSRPSHPHAQCKPLSHATLLYHDADTPPGGIPQTDDDTPLPNACLDRGRRIEPQAL

SEQ ID NO: 193997 - protein, 56 aa, Oryza sativa
  unsure (1)..(56): unsure at all Xaa locations
  Clone ID: PAT_MRT4530_90082C.1.pep
IKNKNKQCQREVEDSPVAAFRPVLDQELTARXRFKLKFSGPGALRLRMGNAWSCQT

SEQ ID NO: 193998 - protein, 77 aa, Oryza sativa
  Clone ID: PAT_MRT4530_90083C.1.pep
PLLTQCLHWTEIDGMGSSFGTFAHVSHWEPGCNWQPLTSRYLDWVADKLGRPKPLLVRAGFTSVYFAGIETRIRVLP

SEQ ID NO: 193999 - protein, 108 aa, Oryza sativa
  unsure (1)..(108): unsure at all Xaa locations
  Clone ID: PAT_MRT4530_90084C.1.pep
GPFFPIKFYPAAGLGSPNKTRVGGLDPPNYVLKSDVFEAKNKVGKLQSPSPGGRFLAPGDGSCVAKLKVEFQLXGGSSLFPEKEKDIVDGYYGMVKMIEGFLVAPPAE

SEQ ID NO: 194000 - protein, 1033 aa, Oryza sativa
  Clone ID: PAT_MRT4530_90085C.1.pep
MGSNYPRRDPPPDRQGQVPPRGDPPPGRQRQVPPRGDPPPGRQRVPPRLLITPFRDIGQRLSTGQAFKPIGQVSVSRMLAGPQLFGRLASQLFEVDRSLSFSTAGDSAEEGDEEDEEGEEEETAGDSAEEGDEEDEEGEEEETEEECVQKDEGGESTLPPPQVPRVPRDFCETKLISFLGRGYKIILQSKNGPCSLIAICNYLILTRKLSLPPSMTIVYLDYLVDRVFSQVFSKMKDDSYKTAQATVEQTATGLDIDIYCTSVDGFEDTPQYGLFRILDIPLYHAWVLDMNNQEDTILLNAVDGRSYNQLNIDRAKYNSKKDADFMIDAAETRRYELIHTFLKDNPGQVTEFGLHTLKAATPDRKLFIFFQNEHFNVVYKYHGRFFVLESDVGFRNYQNIWRSVDSPGESGVLVHDITISRDQHSVLKSGNYFEGAKQSFKKKPHSARQTQHHSVSSSLESSQGPPPVRHSRMAGEHGSSSSVKPRPSPTNAQLETRPPSPGTVRADFASYFMSGKDQKLEHMFLDFLRSFERNNIPYYGAIVDSMKTLSSPEMHIHFDHIWSYAPELAHDLCQCYPRIQKNLENAVRTFIHDLNLPGFHCENPVICICDMPKPDRWIPLRTFLKLRGYHLTKPRHIRCDGFFLPVIDTTQIGRIILTNLLTMITRSHKGGRSWNGHWDLDHVMVSDSLDVKIDLPCNYQAACKTEAHDFLRVATDVLPEYEVGGKWPGLFRHLDKSLRNYIDHLRYGSAMLRKFQRFITIHPALKSSLTRLQIIDNIYSAHQATTGQVKRLLQSILDSVTLRQDWRVRCQKQDGSVSSVSPIHTVVYEHHRAKMEKSESNEQGDENAEKEGHELGGYVGNDGGNEECPEQRDDNEPFENSVEDGMVYLRHVRHHGWKGSKDNMGKQQFLRLSDLELVNSNSLDEILPAMVECLILHKDDYHHMYDKDIYDRVLGWIDEILENYELLEFPKSYGIDFPAITPTGHDDAFPDPHRSAPPSGHYNPIGPPDVPGLEPSCSARRPKQEAPLQRSPS

SEQ ID NO: 194001 - protein, 395 aa, Oryza sativa
  unsure (1)..(395): unsure at all Xaa locations
  Clone ID: PAT_MRT4530_90086C.1.pep
MDRLLAFSRRRRRWLAWAGASAGAYLVYHHPAVAARRRRIARVASALASLADAVADVASDLAAFLRSDSDSIPPTVRQLSKLASSPEASASASALSGALTTGVIRGYATAAAASSSGDEAAFSXRLLDRILSPSGERXLASAVAGSFGXSQLVLAYYSAPSDPSSGSSSPSWVDVVTTGSCRRAIRSWVEVFTATAVGVFIDKTIHINTYDQLFAAATNPSYGARLQQLLVALCNASMETLVKTSHSVLSNPNPNANSNQNGSNNGSGSGSGNGGDGEGWVETVSTVLAVPSNRRLVLDLTGRATFEAVRSFLDFVMWRLHEGARAGGDAAIGAGLCALRHMSERSAPFSRTPNPCRIDRLATADDLVSEVAAAGPTVSGIHPEYVVPAGKQLAL

SEQ ID NO: 194002 - protein, 56 aa, Oryza sativa
  unsure (1)..(56): unsure at all Xaa locations
  Clone ID: PAT_MRT4530_90087C.1.pep
NXKNYLXKXSPTILFPTNIIYRGGGGNXFFLYLXXNXQTLHXKXFIXXITYFTXYP

SEQ ID NO: 194003 - protein, 188 aa, Oryza sativa
  Clone ID: PAT_MRT4530_90088C.1.pep
LAGPIAERLKHDSQAIADGFAEVTVMFVDIVNFTRLAEGMTPQQVFSMLNRIFSSFDELAERYGMEKIKTIGDAYMVAGGLNNEACNYTRAIAELAIAMRDLLHRDFTVNDMRLEVRIGIGTGPVVAGVVGKKKFIYDLWGDTVNLASRITSEGTPGMIHVDATTHQRLKGEFEFATPLDLYLKGKGN

SEQ ID NO: 194004 - protein, 53 aa, Oryza sativa
  Clone ID: PAT_MRT4530_90089C.1.pep
CFHMKHPGQSDHMLTSHSSSVFFYPLFLFFFFIADVAFNYHLQHFLLLCVCKL

SEQ ID NO: 194005 - protein, 373 aa, Oryza sativa
  Clone ID: PAT_MRT4530_9008C.1.pep
MMQSAAGAMELLVASQEAGGVVVVGMNSGDAGELSYANNSDMQRTIAAATRKERQEMAAAVRRGRRQARAIAIADLGCATGPNALLMAGDAVEAMLGDAERQQEAAPAEFHVFLNDLPSNDFNSVFRQKQKLVVPSNNANSSRCLVSAWPGSFYGRVFPADSLDYVVSSSSLHFLSRAPADAAPNEGRMYVSASSSSSSSSRVLHAYRAQFQADFRLFLSCRAEEVRRGGVLLLTFVARREAVPSPHDCHLWDLLAEAAADDRRLVDSFDAPFYGPCPEELREAIREEGSFQVTRMELFEVSRSRSCQSQADLDQLAAQTSSTIRAVVEPMLGPHFGWDAMDALFRRYTHLLHNYYRHNNDQLTNVFLALHKI

SEQ ID NO: 194006 - protein, 477 aa, Oryza sativa
  Clone ID: PAT_MRT4530_90090C.1.pep
MEPYAAAEGGGGGGGGGSTDTGLEESMWRMGLGGGGGGGGEAVAAGRLPERPGEADCVYYLRTGACGYGENCRYNHPRDRAAAAVLNGGGKTTHSAEYPERPGQPVCEYYMKNGTCKFGSNCKYDHPREGSVQAVMLNSSGYPLRSGEKDCTYYVKTGHCKFGSTCKFHHPEIGGVSETPNMYPPVQPQPISSSHPYQHLAGWQMGRPPVLPGSFLSGSYPPMMLPSTVVPMQGWNPYISPVNQVASAGGHQTVQAGPFYGLSHQGPSAAVTYGSQYAPLSSSTMPSSSSKQEPAFPARPGQPECQYYLKTGSCKFGSACKYHHPQYLNTPKSNCMLSPLGLPLRPGSQPCAYYTQHGFCKFGPTCKFDHPMGTLSYSPSASSITDLPIAPYPLNYAVAPVAPPSSSSDLRPEYLLTKEFSANQSASPGTTCGPAGAMLKASTYPLSISSLGPPLIVNKASTDFDKGMAKVVILPPE

SEQ ID NO: 194007 - protein, 87 aa, Oryza sativa
  Clone ID: PAT_MRT4530_90091C.1.pep
MEDLGGVRKRLVPSLGLYGGAAIGRTARRVSTVVSPLVGLPFAECGLRDIIIWSYMLRLRGGPLMVTAQYGNSAVRGGFSKYQEGIG

SEQ ID NO: 194008 - protein, 103 aa, Oryza sativa
  Clone ID: PAT_MRT4530_90092C.1.pep
ELTDSIDRAAYMPIKINPICPGRFSISCLLSTILNSQSDEVSQHACMQQRQCSMCTSSSSSWTRKSLSDAWLLVGSILDGRRDRSTFLARSTPMDGWIDKTKA

SEQ ID NO: 194009 - protein, 93 aa, Oryza sativa
  Clone ID: PAT_MRT4530_90093C.1.pep
MGKKVCGASLLDHLLVERGRNGQKRRYGDVKINWSCALFVVSYRGYSTKNNPVASGVHPQCPAPVVHVQRYALVKQGSEGHEYAAEQLVRKMN

SEQ ID NO: 194010 - protein, 60 aa, Oryza sativa
  Clone ID: PAT_MRT4530_90094C.1.pep
MAMSRSTGAVRCSSCPTVATAPKTTLSCPAPVVHVQRYALVKQGSEGHEYAAEQLVRKMN

SEQ ID NO: 194011 - protein, 688 aa, Oryza sativa
  Clone ID: PAT_MRT4530_90095C.1.pep
MEREPGGTEPEPILGRMVAVEDYILCGFLPPPSEFFLLVLNFYGLSLLHLNPNSIAFLSIFSHLWLSGYEVAADFIGRRIQPLKARAHLAFDYFGLEDTTRVSPRGLSSTTVEHRVAQVMISSPTTASNVPTPLCEREAAEREAAINALLLTDAIGPLVDHQTAASLKEGVAREASDTAIVIAAATTSGSKVPKKGRKFSSVLGNRRKTPTPSVSDASPPPPRWQRLLTLGEKAARAKAAQDGSTANSSASPAVASSEVVVVPWSREVTPSGPASNPTAGRGPPAAVLTWEELQVEMGHIIEAGTHGISHEIAEARAAAASSANERADRLTRDLAEGLEHRMSELENDLSEIRGSLWVTYTSLHQLSGECGVTTTIPENPDEFSLTTSLTELATAMEAIPSKHAARIREETSNGIYTGACHVLACVRLAHPELNLQKILDQGAASDARKDVMEEVGELGESVLPLFEEDVDVEDIQQRGQPELPVVVPALELEPYVPQDGVDQDLPEETDVATTPLDLENAIADRDRRIQYWRTKFEVAELERTILEVKKDRAMEALRGREVWFNSYLRSCCTTMAVVCRELRVPRGDPEESAAGYISWLNGAGAQLEGIGRRIDEALKQKCRRLSRYAGGHVLACIRDHRPQLHLEFLHEGFSRSRRNPAEIDNLAKSMAPLAEKIFQSMDWRWPSW

SEQ ID NO: 194012 - protein, 1651 aa, Oryza sativa
  Clone ID: PAT_MRT4530_90096C.1.pep
MEVDEVGGRWTFSRANEGYTSCGPVVEMSWHRAGVLLLGAQSCLPVPGVPAVGGIGSVLLSMARMGWKLCHVFRLYTVVMAGSVTRRGLDMTGFVLELRGMCVAVGYPHGVDYQARPLLEQEGDDAEPHAAWEVTAVILAGSPERTSLTVTAGGDSFPAACQSAALLAIGTLHQRYPDELQHSPYRYHPRRGGARDHATFRDASSEDDATIVHLARMVEAYDAARIDFHQMVRRGMVENNLKILELRQENLQLKKDLDAVEAQLHQLKIAQGEICRPKRRRVCRSLKITARKSTSRPELVRQSLAWTCFVETPRAEPAPVMVMTRRSANTGDGNQPEGSNHNHQGNPPPPPPPPPPPPPDTNAILTQILAQQANMMTAFLHHLQNPPQLNAPPPPSQHSKLAEFLRIRPPTFSSSNNPVDALDWLHAVGKKLDTVQCSDEEKATQPEGQPITWARFTAAFRRTHVPAGVVALKKREFRELKQGNRSVMEYLHEFNNLARYAPEDVREDEEKQEKFLAGMDPELSVRLVSGDYPDFQCLVDKSIRLEARHKELESHKHRLANFRNQQGANQRVRYTNPYPGGSSSQQQQQQQQPRSAPRPQFVVRVPQPQQQQYQQGTRAPRPPPPTVQLGQGRRDAQGVVDCARRTVTLYRGPEQPVVFFAPPTSVRSSELHQIELSEIPIVREFGDVFPEELPGMPPKREIEFRIDLAPGTAPLYKRPYRMAANELAEVKKQLEELKEKGYIRPSTSPWGAPVIFVEKKDKTKRMCVDYRALNEVTIKNKYPLPRIDDLFDQLKGATVFSKIDLRSGYHQLRIREEDIPKTAFTTRYGLYEFTVMSFGLTNAPAFFMNLMNKVFMEYLDKFVVVFIDDILIYSQSEEDHQHHLRLVLGKLREHQLYAKLSKCEFWLSEVKFLGHVISAKGVAVDPETVTAVTDWKQPKTVTQVRSFLGLAGYYRRFIENFSKIARPMTQLLKKEEKFVWSPQCEKAFQTLKEKLVSSPVLILPDTHKDFMVYCDASRQGLGCVLMQDGYVVAYASRQLRPHEGNYPTHDLELAAVVHALKIWRHYLIGNRCEIYTDHKSLKYIFTQSDLNLRQRRWLELIKDYDVGIHYHPGKANVVADALSRKGHCNTLNVCGIPPELNQQMEALNLSIVSRGFLAALEAKPTLLDQIREAQKNDPDMHGLLKNMKQGKAAGFTEDEHGTLWNGNRVCVPDNRELKQLILQEAHESPYSIHPGSMKMYLDLKEKYWWVSMKREIAEFVALCDVCQRVKAEHQRPAGLLQPLQVPEWKWDEIGMDFITGLPKTQGGYDSIWVVVDRLTKVARFIPVKTTYGGNKLAELYFARIVSLHGVPKKIVSDRGSQFTSHFWKKLQEELGTRLNFSTAYHPQTDGQTERLNQILEDMLRACVLDFGKTWDKSLPYAEFSYNNSYQASIQMAPYEALYGRKCRTPLMWDQVRESQVFGTDILREAEAKVRTIRDNLKVAQSRQKSYADNRRRDLEFAVDDFVYLRVTPLRGVHRFRTKGKLTPRYVGPFRIVARRGEVAYKLELPASLGNVHHVFHVSQLKKCLRVPSEQADSEQIEVREDLTYVERPVKILDTMERRTRNRVIRFCKVQWSNHAEEEATWEREDELKAAHPDLFASSSESRGRDSV

SEQ ID NO: 194013 - protein, 1832 aa, Oryza sativa
  Clone ID: PAT_MRT4530_90097C.1.pep
MATAGDHRGAGAASRRLRRLGRPRARRVAAAWGPARPYKDRSSGLCCKALPYFHMSSGANEGYTSCGPMAGSVTRRGLDMSGFVLELRGMCVVLGYPHGVDYQARPLPEQEGEDAEPHAGWEVTAVILSGSPKRTSLAVTAGGDSFPAACQNAALLAIGTLHQRYPDELQHSPYRYHPRRGGARDFATFRDASSEDDATVVHLARMVEAYDAARIDFHQMVRRGMVENNMKILELRQENLQLKKDLDALEAQLHQLKIAQGEDSRPKRRRVCRSQKITARKSTSRPELVRQSLAWTCFVETPRAEPAPVVPQEGEASGVGSSEGALLLTFRPGPSQRRNVNTGEGNQPEGSNPNPQGNPPPPPPPDTNAILTQILAQQANMMNAFLHHLQNPPQQNAPPPPPQHSKLTEFLRIRPPTFSSSNNPVDALDWLHAVGKKLDTVQCSDEEKVVFAAHQLQGPASLWWDHFQATQPEGQPITWARFTAAFRRTHVPAGVVALKKREFRELKQGNRSVMEYLHEFNNLARYAPEDVREDEEKQEKFLAGMDPELSVRLVSGDYPDFQRLVDKSIRLEAKHKELESHKRRLANFRNQQGANQRVRYTNPYPGGSSSQQQQQQQQPRPAPRPQFVVRVPQQQQQQNQQGTRAPRPPTPAGQPVQGRRDASGPQRLCFNCFEPGHFADKCPKPRRQQGQAPPRPNNGGKDVIRGRVNHVTAEDVLTTPDVIVGTFLVHSIPATILFDSGASHSFISVPFVGKNQLGVERLRNPLLITTPGGVMTAKYYSPAVPIEIQGIPFPSDLILLDTKNLDVILGMNWLAQFQGVVDCARRTVTLYRGPEQPVVFFAPPTSVRSSELHQIELSEIPIVREFGDVFPEELPGMPPKREIEFRIDLAPGTTPLHKRPYRMAANELAEVKKQLEELKEKGYIRPSTSPWGAPVIFVEKKDKTKRMCVDYRALNEVTIKNKYPLPRIDDLFDQLKGATVFSKIDLRSGYHQLRIREEDIPKTAFTTRYGLYEFTVMSFGLTNAPAFFMNLMNKVFMEYLDKFVVVFIDDILIYSQSEEDHQHHLRLVLGKLREHQLYAKLSKCEFWLSEVKFLGHVISAKGVAVDPETVTAVTDWKQPKTVTQIRSFLGLAGYYRRFIENFSKIARPMTQLLKKEEKFVWSPQCEKAFQTLKEKLVSSPVLILPDTRKDFMVYCDASRQGLGCVLMQDGHVVAYASRQLRPHEGNYPTHDLELAAVVHALKIWRHYLIGNRCEIYTDHKSLKYIFTQSDLNLRQRRWLELIKDYDVGIHYHPGKANVVADALSRKSHCNTLNVRGIPPELNQQMEALNLSMVGRGFLAALEAKPTLLDQIREAQKNDPDMHGLLKNMKQGKAAGFTEDEHGTLWNGKRVCVPDSRELKQLILQEAHESPYSIHPGSTKMYLDLKEKYWWVSMKREIAEFVALCDVCQRVKAEHQRPAGLLQPLQVPEWKWDEIGMDFITGLPKTQGGYDSIWVIVDRLTKVARFIPVKTTYGGNKLAELYFARIVSLHGIPKKIVSDRGSQFTSHFWKKLQEELGTRLNFSTAYHPQTDGQTERLNQILEDMLRACVLDFGKTWDKSLPYAEFSYNNSYQASIQMAPYEALYGRKCRTPLLWDQVGESQVFGTDILREAEAKVRIIRDNLKVAQSRQKSYADNRRRDLEFAVDDFVYLRVTPLRGVHRFRTKGKLAPRYVGPFRIVARRGEVAYQLELPASLGNVHDVFHVSQLKKCLRVPSEQANSEQIEVREDLTYVEKPVKILDTMERRTRNRVIRFCKVQWSNHAEEEATWEREDELKAAHPDLFASSSESRGRDSV

SEQ ID NO: 194014 - protein, 1494 aa, Oryza sativa
  unsure (1)..(1494): unsure at all Xaa locations
  Clone ID: PAT_MRT4530_90098C.1.pep
MVMPMVTTRRNAVTGDGNQPEGSNHNHQGNPPPPPPPPPPPPPDTNAILTQILAQQANMMNAFLHHLQNPPQQNAPPPPPQHSKLAEFLRIRPPTFSSSNNPVDALDWLHAVGKKLDTVQCSDEEKVVFAAHQLQGPASLWWDHFQATQPEGQPITWARFTAAFRRTHVPAGVVALKKREFRELKQGNRSVMEYLHEFNNLARYAPEDVREDEEKQEKFLAGMDPELSVRLVSGDYPDFQRLVDKSIRLEAKHKELESHKRRLANFRNQQGANQRVRYTNPYPGGSSSQQQQQQQQQPRPAPRPQFVVRVPQLQQQQNQQGTRAPRPPTPTVQPVQGRRDAQGPQRLCFNCFEPGPFADKCPKPRRQQGQAPPRPNNGGKDVIRGRVNHVTAEDVLTTPDVIVGTFLVHSIPATILFDSGASHSFISVPFVGRNQLGVERLRNPLLITTPGGVMTAKYYSPAVPIEIQGIPFPSDLILLDTKNLDIGLSEIPIVREFGEVFPEELPGMPPKREIEFRIDLAPGTTPLHKRPYQKKDKTKRMCVDYRALNEVTIKNKYPLPRIDDLFDQLKGATVFSKIDLRSGYHQLRIREEDIPKTAFTTRYGLYEFTVMSFGLTNAPAFFMNLMNKVFMEYLDKFVVVFIDDILIYSQSEEDHQHHLRLVLGKLREHQLYAKLSKCEFWLSEVKFLGHVISAKGVAVDPETVTAVTDWKQPKTVTQVRSFLRPHEGNYPTHDLELAAVVHALKIWRHYLIGNRCEIYTDHKSLKYIFTQSDLNLRQRRWLELIKDYDVGIHYHPGKANVVADALSRKSHCNTLNVRGIPPELNQQMEALNLNIVGRGFLAALEAKSTLLDQIREAQKNDPDMHGLLKNMKQGKAAGFTEDEHGTLWNGXAEFVALCDVCQRVKAEHQRPAGLLQPLQXAYHPQTDGQTERLNQILEDMLRACVLDFGKTWDKSLPYAEFSYNNSYQASIQMAPYEALYGRKCRTPLLWDQVGESQVFGTDILREAEAKVRIIRDNLKVAQSRQKSYADNRRRDLEFAVDDFVYLRVTPLRGVHRFQTKGKLAPRYVGPFRILARRGEVAYQLELPASLGNVHDVFHVSQLKKCLRVPSEQADSEQIEVREDLTYVERPVKILDTMERRTRNRGPPVIAFLPPLPPLARALAPPPPPNPPHPAVPARHNEGGIIPRDSLSRFPLFPLSLSLGFVRIQSRKPRRRNQWRPDPPRRFPSPPAAFPHSQPYINVPRASLLRFRRSPLALPVGIALAPSHLLSAVAAELRFAAVVAPDILPSRRHLLRLRRVPVDLGRSSISLADRRSAVVLVVPSRAAAFLRFGRRSRRRRRPGVSRRPPFRFLLLSALSGAAPPRRWSPAVTIGARACRLPSAVPARPPSGAPSRLPSGPGHQPPAPAAPRPYKDRSSGLCCKALPYFHMSSGANEGYTSCGPVVEMSWQRVGALLLGAQSCLPVPGVPAVGGIGLAQFFPSPEEELHEDEGFGV

SEQ ID NO: 194015 - protein, 147 aa, Oryza sativa
  Clone ID: PAT_MRT4530_90099C.1.pep
GGLPQSTSGRLGALGWRRCRRRGSRDRASGRRGHLLHRRATPPPPSLPPSYTVPAAASPPTRVDPAAARQIYHGGEQRPVRRPWAPPPPPLGGSTASLLHGFGNDAADLATMGGTAPGGGGSGVGDGGLGLRQLAPAKKWVGTGARV

SEQ ID NO: 194016 - protein, 202 aa, Oryza sativa
  Clone ID: PAT_MRT4530_9009C.1.pep
MLHRRVWSSKESIGKHALSRDGGLCIQDCAGKGPGDPYTPPCVHGQEGIDAAAASTEALQRVGSDASAVMDCRQLCGTIATAMFKLGSSAIYVCVVAPQQAHVPAVPLRCQAARHATGVVHGRRPAQERRQWRCRRREGGEVGLPLRSPSAKPFWPKLRVIAAGFDFGIRRHRRSLSKIEHGAPPLNVPAQAENTSSSKSTP

SEQ ID NO: 194017 - protein, 77 aa, Oryza sativa
  Clone ID: PAT_MRT4530_900C.1.pep
KKKDHMLSSGRLHDKEVNNIHKSPSKTGSITSQVHGPGQNMTRTSHGPPNPAKGQKVVHTLPKAKAYPSHTNQRILN

SEQ ID NO: 194018 - protein, 1713 aa, Oryza sativa
  Clone ID: PAT_MRT4530_90100C.1.pep
MSWHRAGVLLLGAQSCLPVPGVPAVGGIGSVLLSMARMGWKLCHVFRPYTMVMAGSVSRRGLDMTGFVLELRGMCVVLGYPHGVDYQGRPLPEQEGDDAEPHAAWERYPDELQHSPYRYHPRRGGARDYATFWDASSEDDATIMHLARMVEAYDAARIDFHQMVRRGMVENDLKILELRQENLQLKKDLDAVEAQLHQLKITQGEVCRPKRRRVCRSQKITARKSTSRPELVRQSLAWTCFVETPRAEPAPVVPQEGEASGVGSTEDALLLTFRPGPSQWRNAATSDGNQPEGSNHNNHGSPPPPPPPPPPPPPDTNAILTQILAQQANMMAAFLHHIQNPPQHNAPPPPPQHSKLAEFLRIRPPTFSSSNNPVDALDWLHAVGKKLDTVQCSDEEKVVFAAHQLQGPASLWWDHFQATQPEGQPITWARFTAAFRRTHVPAGVMALKKREFRELKQGNRSVMEYLHEFNNLARYAPEDVREDEEKQEKFLAGMDPELSVRLVSGDYPDFQRLVEKSIRLEAKHKELESHKRRLANFRNQQGANQRIRYTNPYPGGSSSQQQQPRSAPRPQFVVRVPQPQQQQSQQGTRAPRPPTPAAQSGQGRRDVQGPQRLCFNCFEPGHFADKCPKPRRQQGQAPPRSNNGGKDVIRGRVNHVTAEDVLTTPDVIVGTFLIHSIPATILFDSGASHLFISVPFVGRNQLGVERLRNPLLITTPGGVMTAKYYSPAVPIEIQGIPFPSDLILLDTKNLDVILGMNWLAQFQGVVDCARRTVTLYRGPEQPVVFFAPPTSVSSSELHQIGLSEIPIVREFGDVFPEELPGMPPKREIEFRIDLALGTTPLYKRPYRMAANELAEVKKQLEELKEKGYIRPSTSSWGAPVIFVEKKDKTKRMCVHYRALNEVTIKNKYPLPRIDDLFDQLKGATVFSKIDLRSGYHQLRIREEDIPKTAFTTRYGLYEFTVMSFGLTNAPAFFMNLMNKVFMEYLDKFVVVFIDDILKQPKTVTQIRSFLGLAGYYRRFIENFSKIARPMTQLLKKEEKFVWSPQCEKAFKTLKEKLVSSPVLILPDTRKDFMVYCDASRQGLGCVLMQDGHVVAYASRQLRPHEGNYPTHDLELAAVVHALKIWRHYLIGNRCEIYTDHKSLKYIFTQSDLNLRQRRWLELIKNYDVGIHYHPGKANVVADALSRKSHCNTLNVRGIPPELNQQMEALNLSIVGRGFLAALEAKPTLLDQIREAQKNDPDMHGLLKNMKQGKAAGFTEDEHGTLWNRNRVCVPDNRELKQLILQEAHESPYSIHPGSTKMYLDLKEKYWWVSMKREIAEFVALCDVCQRVKAEHQRPAGLLQPLQVPEWKWDEIGMDFITGLPKTQGGYDSIWVVVDRLTKVARFIPVKATYGGNKLAELYFARIVSLHGVPKKIVSDRGSQFTSHFWKKLQEELGTRLNFSTAYHPQTDGQTERLNQILEDMLRACVLDFGKTWDKSLPYAEFSYNNSYQASIQMAPYEALYGRKCRTPLLWDQVGESQVFGTDILREAEAKVRTIRDNLKVARSRQKSYADNRRRDLEFAVDDFVYLRVTPLRGVHRFQTKGKLAPRFVGPFRIIARRGEVAYQLELPASLGNVHDVFHVSQLKKCLRVPSEQADSEQIEVREDLTYVERPVKILDTMERRTRNRVIRFCKVQWSNHAEEEATWEREDELKAAHPDLFVSSSESRGRDSV

SEQ ID NO: 194019 - protein, 128 aa, Oryza sativa
  Clone ID: PAT_MRT4530_90101C.1.pep
FFFFFFFQGGHTHATSIPFNQHNSPACSPHSPPQSFCPVPHSPRVSSSSQVPISHQPHTHSAPNFISSAHISHEGVHTTSVHITHHSLILASPLCHHHHHSCLGVRATTGLQICQPAALLSPHYLLQK

SEQ ID NO: 194020 - protein, 1096 aa, Oryza sativa
  Clone ID: PAT_MRT4530_90102C.1.pep
MNWLAQFQGVVDCARRTVTLYRGPKQPVVFFAPPTSVRSSELHQVGLSEIPIVREFGDVFPEELPGMPPKREIEFRIDLAPGTTPLHKRPYRMAANELAEVKKQLEELKEKGYIRPSTSPWGAPVIFVEKKDKTKRMCVDYRALNEVTIKNKYPLPRIDDLFDQLKGATVFSKIDLRSGYHQLRIREEDIPKTAFTTRYGLYEFTVMSFGLTNAPAFFMNLMNKVFMEYLDKFVVVFIDDILVYSQSEKDHQQHLRLVLGKLREHQLYAKLSKCEFWLSEVKFLGHVISAKGVAVDPEIVTAVTDWKQPKTVTQVRRFLGLAGYYRRFIENFSKIAQPMTQLLKKEEKFVWTPQCEKTFQTLKEKLVSSPVLILPDTRKDFLVYCDASRQGLGCVLTQEGHVVAYASRQLRPHEGNYPTHDLELAAVVHALKIWRHYLIENRCEIYTDHKSLKYIFTQSDLNLRQRRWLELIKDYDVGIHYHPGKANVVADALSRKSHCNTLNVRGIPPELNQQMEALNLSIVGRGFLATLEAKPTLLDQIREAQKNDPDMRGLLKNMKQGKAAGFTEDEHGALWNGNREKYWWVSMKREIAEFVVLCDVCQRVKAEHQRPAGLLQPLQVPEWKWDEIGMDFITGLPKTQGGYDSIWVVVDRLTKVARFIPVKTTYGGNKLAELYFARIVSLHGVPKKIVSDRGSQFTSHFWKKLQEELGTRLNFSTAYHPQTDGQTERLNQILEDMLRACVLDFGKTWDKSLPYAEFSYNNSYQASIQMAPYEALYGRKCRTPLLWDQVGESQVFGTDILREAEAKVRTIRDNLKVAQPRQKSYADNRRRNLEFAVDDFVYLRITPLRGVHRFRTKGKLAPRFVGPFRIIARRGEVAYQLELPASLGNVHDVFHVSQLKKCLRVPSEQADSEQIEVREDLTYVERPVKILDTMERRTRNRSAAVVAPDLLPLRRRLLRVRRNLADLVHPSVSPADRRNAAVPVDPSRAAAFVRSGRRSRRRCRPGVSRGPPFRFPLPSSLSGAAPPRWWSPAATIGARVRHLPSAVPAWPPSGAPRGCHVGPGRQPPAPSASEDPLFVEVEADVWESEQGKSHHP

SEQ ID NO: 194021 - protein, 54 aa, Oryza sativa
  Clone ID: PAT_MRT4530_90103C.1.pep
MAPTVMASSATSVASFQGLKSTAGLLDSRRCTNSGYSCVSNGGRIKCLHVWPIE

SEQ ID NO: 194022 - protein, 1750 aa, Oryza sativa
  Clone ID: PAT_MRT4530_90104C.1.pep
GLHFGPVFKLSWHKGGCLVLGAQSCLPVRGVPAVGGIESVLLSMARMGWKLCHVFRLYTVVMAGSVSRRGLDMTGFVLELRGMCVVLGYPHGVDYQGRPLPEQEGDDAEPHAAWEVTAVILTGSPERTSLAVTAGGDSFPAACQNAALLAIGTLHQRYPDELQHSPYRYHPRRGGARDYAIFRDASSEDDATIMHLARMVEAYDAARIDFHQMVRRGMVGNNMKILELRQENLQLKKDLDAVEAQLHQLKIAQGEMVKTRRNAATGDGNQPEGSNHNHQGSPPPPPSPPPPPPPDTNAILTQILAQQANMMTAFLHHLQNPPQQNAPPPPPQHSKLAEFLRIRPPTFSSSNNPVDALDWLHAVGKKLDTVQCSDEEKVIFAAHQLQGPASLWTHVPAGVVALKKREFRELKQGNRSVMEYLHELNNLARYAPEDVREDEEKQEKFLAGMDPELSVRLVSGDYPDFQRLMDKSIRLEAKHKELESHKRRLANFRNQQGANQRVRYTNPYPGGSSSQQQQQQQQPRSAPRPQFVPGQGRRDAQGPQRLCFNCFEPGHFADKCPKPRRQQGQAPPRSNNGGKDVIRGRVNHVTAEDVLTTPDVIVGTFLIHSIPATILFDSGASHSFIFVPFVGRKQLGVERLRNPLLITTPGGVMTAKYYSHAVPIEIQGIPFPSDLILLDTKNLDVILRMNWLAQFQGVVDCARRTVTLYRGPEQPVVFFAPPTSVSSSELHQIGLSEIPIVREFGDVFPEELPGMPPKREIEFRIDLAPGTTPLYKRPYRMAANELAEKKDKMKRMCVDYRALNEVTIKNKYPLPRIDDMFDQLKGATVFSKIDLRSGYHQLRIREEDIPKTAFTTRYGLYEFTVMSFGLTNAPAFFMNLMNKVFMEYLDKFVVVFIDDILIYSQSEEDHQHHLRLVLGKLREHQLYAKLSKCEFWLSEVKFLGHVISAKGVAVDPETVTAVTDWKQPKTVTQVRSFLGLAGYYRRFIENFSKIARPMTQLLKKEEKFVWSPQCEKAFQTLKEKLVSSPVLILPDTRKDFMVYCDASRQGLGCVLMQDGHVVAYASRQLRPHEGNYPTHDLELAAVVHALKIWRHYLIGNRCEIYTDHKSLKYIFTQSDLNLRQRRWLELIKDYDVGIHYHPGKANVVADALSRKSHCNTLDVRGIPPELNQQMEALNLSIVGRGFLATLEAKPTLLDQIREAQKNDPDMRGLLKNMKQGKAAGFTEDEHGTLWNGNRVCVPDDRELKQLILQEAHESPYSIHPGSTKMYLDLKEKYWWVSMKREIAEFVALCDVCQRVKAEHQRPAGLLQPLQVPEWKWDEIGMDFITGLPKTQGGYDSIWVVVDRLTKVARFIPVKTTYGGNKLAELYFARIVSLHGVPKKIVSDRGSQFTSHFWKKLQEELGTRLNFSTAYHPQTDGQTERLNQILEDMLRACVLDFGKTWDKSLPYAEFSYNNSYQPSIQMAPYEALYGRKCRTPLLWDRVGESQVFGTDILREAEAKVRTIRDNLKVAQSRQKSYADNRRRNLEFAVDDFVYLRVTPLRGVHRFQTKGKLAPRYVGPFRIIARCGEVAYQLELPASLGNVHDVFHVSQLKKCLRVPSEQADSEQIEVREDLTYVERPVKILDTMERRTRNRVIHFCKVQWSNHAEEEATWEREDELLPFRRRLLRVRRDLADLVHLSVSVADRRNTAVPVGGDHRGAGAPPPVGCAGVAAFGRVPRPVHRGPWGCRVGPTPVDPVRAPSPLGSAI

SEQ ID NO: 194023 - protein, 58 aa, Oryza sativa
  Clone ID: PAT_MRT4530_90105C.1.pep
MAKTWAKEGKNSTFANSQSQANKQSNSGEDHQTEKILYIALKQHASIYLLVLHILQWK

SEQ ID NO: 194024 - protein, 1024 aa, Oryza sativa
  Clone ID: PAT_MRT4530_90106C.1.pep
MVMPMVTTRRNAATGDGNQPEGSNHNHQGNPPPPPPPPPPPPPDTNAILTQILAQQANMMTAFLHHLQNPPQQNAPPPPPQHSKLAEFLRIRPPTFSSSNNPVDALDWLHAVGKKLDTVQCSDEEKVVFAAHQLQGPASLWWDHFQATQPEGQPITWARFTAAFRRTHVPAGVVALKKREFRELKQGNRSVMEYLHEFNNLARYAPEDVREDEEKQEKFLAGMDPELSVRLVSGDYPDFQRLVDKSIRLEAKHKELESHKRRLANFRNQQGANQRVRYTNPYPGGSSSQQQQQQQQQPRPAPRPQFVVRVPQPQQQQNQQGTRAPRPPTPAVQPVQGRRDAQGQQRLCFNCFEPGHFADKCPKPRRCDNVIRGRVNHVTAEDVLTTPDVIVEKKDKTKRMCVDYRALNEVTIKNKYPLPRIDDLFDQLKGATVFSKIDLRSGYHQLRIREEDIPKTAFTTRYGLYEFTVMSFGLTNAPAFFMNLMNKVFMEYLDKFVVVFIDDILIYSQPEEDHQHHLRLVLGKLREHQLYAKLSKCEFWLSEVKFLGHVISAKGVAVDPETVTAVTDWKQPKTVTQVRSFLGLAGYYRRFIENFSKIARPMTQLLKKEEKFVWSPQCEKAFQTLKEKLVSSPVLILPDTRKDFMVYCDASRQGLGCVLMQDGHVVAYASRQLRPHEGNYPTHDLELAAVVHALKIWRHYLIGNRCEIYTDHKSLKYIFTQSDLNLRQRRWLELIKDYDVGIHYHPGKANVVADALSRKSHCNTLNVRGIPPELNQQMEALNLNIVGRGFLAALEAKPTLLDQIREAQKNDPDMHGLLKNMKQGKAAGFTEDEHGTLWNGNRVCVPDSRELKQLILQEAHESPYSIHPGSTKMYLDLKEKYWWVSMKREIAEFVALCDVCQRVKAEHQRPAGLLQPLQVPEWKWDEIGMDFITGLPKTQGGYDSIWVVVDRLTKVARFIPVKTTYGGNKLAELYFARIVSLHGVPKKIVSDRGSQFTSHFWKKLQEEFGTRLNFSTAYHPQTDG

SEQ ID NO: 194025 - protein, 1295 aa, Oryza sativa
  Clone ID: PAT_MRT4530_90107C.1.pep
MVTPMVTTRRNVNTGEGNQPEGSNPNPQGNPPPPPPPDTNAILTQILAQQANMMNAFLHHLQNPPQQNAPPPPPQHSKLAEFLRIRPPTFSSSNNPVDALDWLHAVGKKLDTVQCSDEEKVVFAAHQLQGPASLWWDHFQATQPEGQPITWTRFTAAFRKTHVPAGVVALKKREFRELKQGSRSVMEYLHEFNNLARYAPEDVREDEEKQEKFLAGMDPELSVRLVSGDYPDFQRLVDKSIRLEAKHKELESHKRRLANFRNQQGANQRVRYTNPYPGGSSSQQQQQQQQQPRSAPRPQFVVRIPQPQQQQNQQGTRAPRPPTPTVQPVQGRRDAQGPQRLCFNCFEPGHFADKCPKPRRQQGQVPPRSNNGGKDVIRGRVNHVTAEDVLTTPDVIVELHQIGLSEIPIVREFGDVFPEELPGMPPKREIEFRIYLAPGTTPLYKRPYRMAANELAEVKKQLEELKEKGYIRPSTSPWGAPVIFVEKKDKTKRMCVDYRALNEVTIKNKYPLPRIDDLFDQLKGATVFSKIDLRSGYHQLRIREEDIPKTTFTTRYGLYEFTVMSFGLTNAPAFFMNLMNKVFMEYLDKFVMVFIDDILVYSQSEEDHQHHLRLVLGKLHEHQLYAKLSKCEFWLSEVKFLGHVISAKGVAVDPETVTAVTDWKQPKTVTQIRSFLGLAGYYRRFIENFSKIARPMTQLLKKEEKFVWSPQCEKAFQTLKEKLVSSPVLILPDTRKDFMVYCDASRQGLGCVLMQDGHVVAYASRQLRPHEGNYPTHDLELAAVVHALKIWRHYLIGNRCEIYTDHKSLKYIFTQSDLNLQQRRWLELIKDYDVGIHYHPGKANVVADALSRKSHCNTLNVRGIPPELNQQMEALNLSIVGRGFLAALEAKPTLLDQIREAQKNDPDMHGLLKNMKQGKAAGFTEDEHGTLWNGNREKYWWVSMKREIAEFVALCVVCQRVKAEHQRPAGLLQPLQVPEWKWDEIGMDFITGLPKTQGGYDSIWVVVDRLTKVARFIPVKTTYGGNKLAELYFARIVNLHGVPKKIVSDRGSQFTSHFWKKLQEELGTRLNFSTAYHPQTDGQTERLNQILEDMLRACVLDFGKTWDKSLPYAEFSYNNSYQASIQMAPYEALYGRKCRTPLLWDQVGESQVFGTDILREAEAKTKGKLAPRFVGPFRIIARRGEVAYQLELPASLGNVHDVFHVSQLKKCLRVPSEQADSEQIEVREDLTYVERPVKILDTMERRTRNWVIRFCKVQWSNHAEEEATWEREDELKAAHPDLFASSSESRGRDSV

SEQ ID NO: 194026 - protein, 808 aa, Oryza sativa
  Clone ID: PAT_MRT4530_90108C.1.pep
MVTTRRNAVTGDGNQPEGSNHNHQGNPPPPPPPPPPPPPDTNAILTQILAQQANMMTAFLHHLQNPPQQNAPPPPPQHSKLAEFLRIRPPTFSSSNNPVDALDWLHAVGKKLDTVQCSDEEKVIFAAHQLQGPASLWWDHFQATQPEGQPITWARFTAAFRRTHVPAGVVALKKREFRELKQGNRSVMEYLHEFNNLARYAPEDVREDEEKQEKFLAGMDPELSVRLVSGDYPDFQRLVDKSIRLEAKHKELESHKRRLANFRNQQGANQRVRYTNPYPGGSSSQQQQQQQQPRSAPRPQFVVRVPQPQQQQNQQGTRAPRPPTQTVQPGQGRRDAQGQQRLCFNCFEPGHFADKCPKPRRQQGQAPPRPNNGGKDVIRGRVNHVMAEDVLTTPDVIVVTAVTDWKQPKTVTQVRSFLGLAGYYRSVSRQSTNDRPDFSNLSKYQNGNGMKLGWISSPDFQKPKVARFIPVKTTYGGNKLAELYFARIAGPPATLADRWGPPVIPYLAPLPPPARALAPPPPPNPPHPAVPARHKEGEITPRDSLSLSPRFSLSLSLGFARIYSRNPRRRNQWRPRFPRPIPSSPAALSPSRRYIIVPRASLLRFRHSPLTLPVGFVPAPSSSLSAVAAELRFAVVVAPDLLPTRRHLLRLRRVLVDLVRSSVSVADCRSAAVLVDPNRAAAFLRSGLSFPPSSSTRGEPRTVVSLPPSLPSLGRRSVAPEVAAGDHRGAGAPPPVGRAGEAAFGRAPRLPGGPGRQPPAPAGAADAWDPRRRSAAAACTRSTVDREAGAWAPLPWTRSARPLSRLTQ

SEQ ID NO: 194027 - protein, 163 aa, Oryza sativa
  Clone ID: PAT_MRT4530_90109C.1.pep
MSGSNFGDSMGWGNSGRSSPAGSSRKGKRGGGSGGADKPKQPQRGLGVAQLEKIRLQSEMAEYFNPLGQPGSLIHRTGSLNLMAYGERGDVRYGEFQTPIMRSPSSSTIYGAPHYTHNPSITLPLFEPEESARLRGHHDRSRSADSTSMNSDDPQDVDLELKL

SEQ ID NO: 194028 - protein, 67 aa, Oryza sativa
  Clone ID: PAT_MRT4530_9010C.1.pep
MDDDGGGSSQPRYDLGRSFTIRRRGASEIGLVGGGRPICCRCRCRCCCMRVGGVAVDCSIGRTRLEI

SEQ ID NO: 194029 - protein, 386 aa, Oryza sativa
  Clone ID: PAT_MRT4530_90110C.1.pep
MAFMNRQDPEASGFFSDDDSGQTAAIAAAAAMENEDFSYMLREFDYYTSSEDLFELMWQGGGGGGASSFDQPPPPVSYHRLSPPPPAMGTTTTTLLPEQPLVDDHHLPAAAAAPPSEEEMAAWLYPIVSGHEVAGGGWRSPEAQDDRRAAPAPEKKQMEKMPAAASPTTTMNKDETSDDSGERKKKKASSAAGKSKQASPRGCRSSQPYRKSGDSIDELFTKFHRRRFKITERFRTLQRLVPGCDKSNQASTLDQTIQYMKSLQHQLKAMSVVGSPPALLYPAAVHPQSYMHPPPPPPPVTMPMHPGMVLAAPPPGAAPPPGPPAMVPFGAMLPYPPYPAVLLPPAAATLYGRPPAPAPGVAARRHGSSGGGRISKSSSSSLCKKL

SEQ ID NO: 194030 - protein, 51 aa, Oryza sativa
  Clone ID: PAT_MRT4530_90111C.1.pep
GLHLLDLGLCKTSISRPFWVLATLQCLICSTLGCIQNECQVRMTSVVLSLC

SEQ ID NO: 194031 - protein, 84 aa, Oryza sativa
  Clone ID: PAT_MRT4530_90112C.1.pep
RQLVLITRTQETSLMEALPASIVAEQKCNTNTPSWSLHQHQNSRRMIQRKASVHLSHFIRLVATKMGRIQQTDQTYQGTPSFTE

SEQ ID NO: 194032 - protein, 460 aa, Oryza sativa
  Clone ID: PAT_MRT4530_90113C.1.pep
MASMQEKMIREAMAAMNGQTAADVAVNLYPFIRKYTDGRVERLLTSSYVPASEDAGRGRGGVGVATRDVVVDRDNGVSARLFLPSSAATGGGGGGRRLPVVLYFHGGSFCTESAFCRTYHRYASSLASRAGALVVSVEYRLAPEHPIPAAYDDAWAAFRWVESLSDPWLAEYGDLRRTFVAGDSAGGNIAYHTVARAGRENVGGGIQGLIMVHPFFWGPERLPCETVWDGASVFPAFGVDWLWPFVTAGQADNDDPRIDPADDELASLPCRRVLMAVAGRDTLRDRGRRLASRMRGDVTVVESEGEDHGFHLYSPLRATSKRLMQSIVQFINQPPSPCPPPPAPAPSPAMRWPATILPEFDEWSSTYSDDTANSSQILLGMPARAYKAIFVDRMDRKAAKTGRLSSNPTVNASLSIGPSGKASKTSCYGMSFGRTRAYNFRGVAAAGSGQCQPPFRGVTI

SEQ ID NO: 194033 - protein, 88 aa, Oryza sativa
  Clone ID: PAT_MRT4530_90114C.1.pep
MAHVGARSTNMIAKRWWYYCKVRVSSKYNLFGRIGDQERPSVQAKGRYASRHRRRKTVQSCYLERRDEEKTKTERGKKAQLASEDIKK

SEQ ID NO: 194034 - protein, 128 aa, Oryza sativa
  Clone ID: PAT_MRT4530_90115C.1.pep
MADGVDASAGGQPRSPTVYDCSRVPDVKTMGKFIRKLNVTVLFGLLKELRQIRFGSRRWRRISKSQRTQEASNRVSWKGKFIWTKGESNGRFCGDHFSTTPASWSRKTLLAQKMYLNAPSTHDMARVL

SEQ ID NO: 194035 - protein, 235 aa, Oryza sativa
  Clone ID: PAT_MRT4530_90116C.1.pep
MAAAAAAATSPRNYTDFVPPHQLVEEAGKKFDFRGFSSHSVFQHQLLDRIQIVFYCSVHAMQGFKKEQLRVQIDNHGKLRISGERQVSGNRWSRFHKDFQVPDDCNAGDVRARFDSRDRVLHITMPKLSPAEEEPKAAAAAAPADHGAAQAQQTAAPADQEKEDKEEEDDDGAANDGAAAGGTALVTGRRKTPWRVVLAVVLALVAAAGFYAKYRLMMDPSAADGGHGLIGFSDH

SEQ ID NO: 194036 - protein, 372 aa, Oryza sativa
  Clone ID: PAT_MRT4530_90117C.1.pep
MESTLITITRSPILPCPFSRRPASPARCFAGARRSRCAAASASFFSPAGGRGGGDAGAGSSLSSAAAAAALGEAAAAGGGGSDSEAILLSVQGMMCDGCAASVKRILESQPEVTSATVDFKEAKARAARRAPLRRDMSRFGRSGPPPIRDTYSLLVLNITFRTTADDLSPLFEKYGEVVDIYIPRDRRTGDSRGFAFVRYKYEDEAQKAVDRLDGRVVDGREIMVQFAKYGPNAERIHKGKIMETVPRSRGRSRSRSPRRGYRDDYRERDYRKRSRSRDRYGRDRYRERDYRRRSRSRSYTPDDYRRRGRDSVSPARRSLSRSRSRSYSPDDYRKRGKHRSPSRSPRRTPSSQEGSPVKRYDEPRRSRSPST

SEQ ID NO: 194037 - protein, 43 aa, Oryza sativa
  Clone ID: PAT_MRT4530_90118C.1.pep
MALGFGPSSGRSAISYDYLLLFCSDVYNKIAEAESLYEAQAQV

SEQ ID NO: 194038 - protein, 81 aa, Oryza sativa
  Clone ID: PAT_MRT4530_90119C.1.pep
MEKQPVHASLLICRGLVGVVSYGHRTVVLGLIGTDARIHSNRRGRVPPPHRIAQPASPHPLHNPAIIVSRVRRCRLPHLLH

SEQ ID NO: 194039 - protein, 184 aa, Oryza sativa
  unsure (1)..(184): unsure at all Xaa locations
  Clone ID: PAT_MRT4530_9011C.1.pep
SHRPSRKPMDRPATLPPRPGPLHPTECSRPPPASQPPXAPPDACPPDQGADLPASSSTASVARGKPQRNTSSNVPSLXPPPLPRHRRLPLSVACRVTRRPALAPQPPAPSPPPRRQPGFSLPPPTPSPALGRKPPSPPAAETVPPTSVSRSSRAGSGETGVVNPAAAVLASRWLCRHLVRAAAR

SEQ ID NO: 194040 - protein, 95 aa, Oryza sativa
  unsure (1)..(95): unsure at all Xaa locations
  Clone ID: PAT_MRT4530_90120C.1.pep
RHIGDAAKNQVVRNPINTGFDAKRLIGRRLSEAPVARDNKLWPCKAIAGPGDKPMNGDQNKGEEKHLAAEENLLMVLIKKREIGEAXPGTTIKNA

SEQ ID NO: 194041 - protein, 35 aa, Oryza sativa
  unsure (1)..(35): unsure at all Xaa locations
  Clone ID: PAT_MRT4530_90121C.1.pep
LCLAVVREHRVPLSLIIEAMSLMAAASAXLWRXRT

SEQ ID NO: 194042 - protein, 91 aa, Oryza sativa
  Clone ID: PAT_MRT4530_90122C.1.pep
MVVKAAFAVAMFLLTTNMLVSVATRSPDNLLNSFPEETGHVYSASTVQKMTEYKPTTEYLHTSYLTLDSLFLDSSRSRIQFRRENSHDWAQ

SEQ ID NO: 194043 - protein, 350 aa, Oryza sativa
  unsure (1)..(350): unsure at all Xaa locations
  Clone ID: PAT_MRT4530_90123C.1.pep
YPWAHITESHQPRPQRRGVPPPSTTTPPPPSATTDAPTATVLRINNVQLQCLPTAVLGGGVVALGGGASSWGSGGAWWRRSAAGWWRSGSGARWHSAVGWWHSALEAEYASHWRRGRWISWSENNPSRRFLAILCKGSAPTLPQQSITLQLDQRSPHTQEPNCSKPTARPTTSETGRRKPTPPXHPYHTKELPGNDWKQPSLRREEDLRRGQRTPHRRSAAPSQVSGSRRRSAPPXPDWSRRRRMRAAADPMPWSPTSPRRRSPSPVHPPTPERRRSRPSPSXGHPGQRGNRIWRLRRPSPSLEPTATGSPTAAPPSRWRAPPPRSPIATTSPSRRHRRHARAGTRRSRG

SEQ ID NO: 194044 - protein, 1185 aa, Oryza sativa
  Clone ID: PAT_MRT4530_90124C.1.pep
MSLSKTIGFISGINECFNFFQWAKSAMSCVHSRWSNTQDQKLQGELLQLQSSLQCLRDTLPAKYDLIDRAEWRSHERRVAELLPNLKDAMYNADDLLDEFRWYEQKVALEGNASQSPFMDFFDSVIQGSFNKVNDVIKRLYNISSQLEKMGLHEVPRRFDNSLRPETSSFLNEREIFGRDNELQQVMELLGVPKNGTDARSKRRRKNNDESTSTSRCNQESIPVLPIVGIGGVGKTTMAQHILHDPRVISHFDMIIWICVSDDFDVKRLTKEAIQSSSKKESTTFDGKRITKEAIQSYSKKESTADHLDSLQHALSEKVRDKTLLIILDDMWDDALRESGRCWKRFCAPFSNVLAQGSIMLVTTRSLEVAHEVKTMEPVRLEGLKDDIFWNFFKICTFGSSDSSDYPELERIGRNIVPKLKGSPLAAKTLGRLLRTSLDIAHWNNILQSELWELRQHNTEILPALRLSYLYLPFHLKRCFSFCALYPKDHLFEKAGLAEIWIAEGFVEPEGSIPILDIGCQYFEELVNRSFFQKVHGNYVIHDLLHDMAQLVSKHECFILKDKDDFEKVPSSVRHLFILPSTNFDCNLLLSLCKHKKLRTLLCHRSLQDKTLACVMDRWCTELQHMRVIVCPYTKELPASIGKLKHLRYLKISGDCPFKSLPQEFCHLYNLQIFSATKCRLENLPSDFNKLRNLRRFDSCAFRCDPKFQTHFDAINGQEVGAILQYVNHICGGLTIDNIGLIRKDIAAKAALKNKKYVNTMTLKWSSMGQQVQKLTEVLQVLIPPTSLSYLNLTGCPGEFLPTWFHPSNLPMLTSLELIACHDFVTIPTPSMSQSIDPNEIPKVLTENNKGRPGIFSSLNHVIIESCNKLSNLDQFLQPAYLPAIKTIKITKCRQLVELPTDRLGEFHFLEELEVSHCPNLNDPQSLSIPTLKKLKLINSWNLLGDIECCSLTSLVFSLWHVTSIPLHVWSSSFPALQKLQIADSGITGESQSSVLTSLSVPGEYSSIRTFSCLTDLKISSCNNMTTLDHLLWPEHQPAVEKIYVALCSSLRTLPCELLKDFSVLKDLKICFCPSLKWHRRLVLPSTLQRLSLTRCGDISPCVPSCLENLASLVSLEITFCSIVAYIPASLWRGNLSSLRDLHIRGCEDLVSIGGAGAIAEINKVKIEGCLKLKEIEQPMSRARL

SEQ ID NO: 194045 - protein, 213 aa, Oryza sativa
  unsure (1)..(213): unsure at all Xaa locations
  Clone ID: PAT_MRT4530_90125C.1.pep
WRRRPRRRQNRSRSAAPGQVSGSRRRSALHREPDWSRRRRMRAAADPMPSSPTSPXGEARHRPSAYARXRRRRPSPSPVAPARGATGSSDSVTRRRSQSRPPRRAPPPRRGEPHRRAVPVAATSPSRRHRRHARAGARWSRGGWPRRRHPSASPGFAGDKLRQRRSTEEGGGGAAAARVSPPSRRARATCNNIEWFLSSAPNLFMPFDNLHKS

SEQ ID NO: 194046 - protein, 343 aa, Oryza sativa
  Clone ID: PAT_MRT4530_90126C.1.pep
MAACRGTIGPYIGRIFLGPYMDRNHNPGQLCWAHIAHVERAAHTGWWKTSPTTGVLARGFQADGGEVSPANPPWQRCPPPPRRRFRSPPARDGRRSSRAPTYSTRFRLPPPLAIASVHCLSDLAPRPRRAGDALARGAQLMWSLGVPEDVAEFHDVYSLDADALEMVPQPVLAVVFCFPDPTQLSTIMGFSLYLIYTLSPTSVQDASNPSQHLLITGEKETLFFIKQIESLGNACGTIALLHAVGNAYSEISLCKRAVFLEKDDDMARAHLSAASAGDTKLSDDVEEHYICFVECDGTLYELDGMKPGPINHGPSSSKSLLQVYQEENYRRESENVYITTFHE

SEQ ID NO: 194047 - protein, 138 aa, Oryza sativa
  Clone ID: PAT_MRT4530_90127C.1.pep
GEVFPGQLFFFPPPFPVVKKAQKKGCVFFAFKTNPFFLVTPLPGKSSFFRVFPNFFFANAFRFSKKKAPGLPPYKGDGFGAFPPIPFKGSPTVFYAAESFLVGFRLKNNLFIFFPPIFFFFFSVPFFPYFLLSLSFSF

SEQ ID NO: 194048 - protein, 58 aa, Oryza sativa
  unsure (1)..(58): unsure at all Xaa locations
  Clone ID: PAT_MRT4530_90128C.1.pep
SSKLGSRFTGLSSEAMGRRVSXVMISGPTTASDVPVPLCEKGAAERDAAINVSVLSSH

SEQ ID NO: 194049 - protein, 108 aa, Oryza sativa
  unsure (1)..(108): unsure at all Xaa locations
  Clone ID: PAT_MRT4530_90129C.1.pep
RRNRWPGQRARRGAAGQEEQTAKRSGGGSGHQXSFPPDAGGGGEADSGGSADSTGRSTPKAGRKRGTGRQWQRQRSPRSRAAAPDGGGEPSAGHGPAYENHLFSQTMG

SEQ ID NO: 194050 - protein, 89 aa, Oryza sativa
  Clone ID: PAT_MRT4530_9012C.1.pep
MPGSPNRHYRHPPKPFVAPWCRYPLLCNQPPFSTTTVMKQLSSKVPQHRRSLLPPAALLLPSNQLAKMPLLLAPSSTDYAALAAPPLAC

SEQ ID NO: 194051 - protein, 134 aa, Oryza sativa
  Clone ID: PAT_MRT4530_90130C.1.pep
MERRFLLLAGLLLATAAGEQQPSRTAMADHQQPAATAAPCDPLCISGAAAGATPEAMAAAAMAGGNESESALPPRQLDRPDSSGLPTTHQSWIYHEPVAMPYSTAPPAAISLVGATAAATAVFSTMLLAAAAAR

SEQ ID NO: 194052 - protein, 72 aa, Oryza sativa
  Clone ID: PAT_MRT4530_90131C.1.pep
MVRQMGWRRMTSLRAEISPEVKSPGDRFASEESPEREKIEERSEAEIEFGNRAGIGWSPDRLRLGSAGSESD

SEQ ID NO: 194053 - protein, 307 aa, Oryza sativa
  Clone ID: PAT_MRT4530_90132C.1.pep
MQIPVDLITGATLTLEVEPSDTVESVKAKIKAMSGITEDFGLAYDGKQMDEADGHRTLADYGIRDPATEMQILVSGLRGNTWTLWVEPSDTVESVKLQLQEKDGLPPCQQRLIFEGRQLDDGDTVASCGIRKHSYLNLCGRLASCDCIRTHMEAQKLIQEHHQTLTTRPAATDEMQIFVRVLGGKKETALKVQPSDTVGSVKVKLYYRKKKKTMPCKQRLVFSGMELADDRTLASYGIEEESTLYLCAQRPMAAGRRMVTGGEKGRRMEEIQLALEATVRPIRANVFRAHARMALAADSVHRWQRRH

SEQ ID NO: 194054 - protein, 36 aa, Oryza sativa
  Clone ID: PAT_MRT4530_90133C.1.pep
SALRPAPNYDARDAMDMGAMSDPERMFFFEPACQNA

SEQ ID NO: 194055 - protein, 403 aa, Oryza sativa
  Clone ID: PAT_MRT4530_90134C.1.pep
MEHSPSNRMTFLLLLLLQLLIGCTHYAQANPGHHMIDSIFSFGNSYSDTGNFVKLAAPLLPVIPLDNLPYGETFFGHPAGRASNGRLIIDFIAGHFGVPFLPPYLGQVQNFSHGANFAVVGATALDLAFFQKNNITNVPPFNSSLSVQLEWFHKLRPTLCSKTQGCKHYFERSLFFMGEFGGNDYVFLLAAGKTVDEVMSCYVPKVIGAISAGVEAVIEEGARYVVVPGQQPTGCLPVVLTPYASPNATDYDAGTGCLWRFNELARYHNAALLAAVSLLRRKYPSATIVFADYYDPVIEFMQKPDDFAGWLQIPIEANLVTYTAAFSDSSKLRACCGGGGGPYNYNATVACGLPGTSVCPTPNTSINWDGIHLTEAAYARIAACWLHGPHAHPPILAAVRRRT

SEQ ID NO: 194056 - protein, 62 aa, Oryza sativa
  Clone ID: PAT_MRT4530_90135C.1.pep
PPFSRSLELLVSYIERVAIYIQCICTYLGGVFCTYTDCNTVHLYAVRRGILASRRRLRKKKK

SEQ ID NO: 194057 - protein, 522 aa, Oryza sativa
  unsure (1)..(522): unsure at all Xaa locations
  Clone ID: PAT_MRT4530_90136C.1.pep
TYSPHQYGVVERKNRTLISHKRIHTALSKSHSIDQVLGDITKGVQTRSHVDLICEHDLFVSCLEPKHVVEALCDPDWMNAMHEELNNFARNKVWTLVERPRGHNVIGTKWVYRNKQDENGLVVRXKARLVAQGFTQVEGLDFGENFALVARLEAIRILLKFASCFDIKLFQMDVKSAFLNDFKIGKVDTTLFTKIIGADFFMCQIYVDDIIFGSTNEVFCREFGDMMSREFEMSMIGELSFFLGLQIKQLKDGTFVSQTKYIKDLLKRFGLDDAKPIKTPMATNGHLDLDEGGKPVDLMLYHSTIGSLLYLTAYRPDIMFSVCMCARFQAAPKECHLVAVKRILRYLKYSSTIGLWYPKGAKFKLVGYFDSDYAGCKLDRKSTSGSXQMLGRSLVSWSSKKXNSVALSTAEVEYVSRGSCCAQLLWMKQTLLDYGISFTKTPLLCDNDRAIKIANNPVQHSRTKHIDIRHHFLRDHVTKCDIVISHIRTEDQLADIFTKPLNETRFCKLRNELNVIDFSNVA

SEQ ID NO: 194058 - protein, 275 aa, Oryza sativa
  Clone ID: PAT_MRT4530_90137C.1.pep
MTFSVTLLLLIGYYGPPHGYGDGNYCDLHYARDASHLDETHLHSSALTYDLYNPSVGIYHPGNAGEHDHDTVYIEPTSSNSCPDTDDSFPMDEEVGKRFYPMVPVPHVPKINGEIPSVDEATMDHERLTERLRLYELVEHKVKGDGNCQFRALSDQLYQSPDHHEFVRQQIMSQLKSNRDAYDGYVPMAYDDYLEKVSHGAVELLGGGSLQLHISAERCAEVADDEEEEMVAVLSQPPPSPPLMPGLQSFSSLIKMTQVDQDDPERKLVLIVLLV

SEQ ID NO: 194059 - protein, 89 aa, Oryza sativa
  Clone ID: PAT_MRT4530_90138C.1.pep
MEGGSGGDSQQFGKMVVESKSRRKRRRGGTTILAGTMDTEGMMDQEEEKEDDEQPADVLEDRKHRDGSIYRGTDYWSIYYRIADTNETH

SEQ ID NO: 194060 - protein, 99 aa, Oryza sativa
  unsure (1)..(99): unsure at all Xaa locations
  Clone ID: PAT_MRT4530_90139C.1.pep
LPTCIKEGDRKVQWIEDTNFIFVYILFIHIXKNIYIYIYIYIYIYVCMYVCMYVCMYVCMYVCMYVCMYVCMYVCMYVCMYVCMYVCMYVFLYTIYYII

SEQ ID NO: 194061 - protein, 77 aa, Oryza sativa
  Clone ID: PAT_MRT4530_9013C.1.pep
MAATTSGENGHRRPNKEVEGTSVAQRQSSDGVDAVFDGEANARIWEEKGNGSARGGGGLNDHSAREIEKGRNKITLD

SEQ ID NO: 194062 - protein, 142 aa, Oryza sativa
  Clone ID: PAT_MRT4530_90140C.1.pep
GDSAVEKNWILSTASPAIPRNTIMSADRSWAREGRRGIERSRKNRSRLRRRGRSTATLRVHTTRGRTHRSARRRRGTSAAEERRRWWMTTPMSGSGGGEGSFGRRRAATRPHDIAARRSREQPATGEFVVGLPAAREREIAA

SEQ ID NO: 194063 - protein, 152 aa, Oryza sativa
  Clone ID: PAT_MRT4530_90141C.1.pep
FPGRPTRPGDGNCQFRALSDQLYQSPDHHEFVRQQIMSQLKSNRDAYDGYVPMAYDDYLEKVSQNGEWGDHVTLQAAADKYGVKIFVMTSFKDTCYIEIQPKVQKSNKVVLLSFWAEVHYNSIYPQNDAPRSQTTRKRRWWPFSHNHHHHHH

SEQ ID NO: 194064 - protein, 146 aa, Oryza sativa
  Clone ID: PAT_MRT4530_90142C.1.pep
MNSGAGGAGGAAVGRMPAGSLQWAQWRLADERCELREEEMEYMRRFHRHEIGSNQCNSFIAKHVRAPLQNVWSLVRRFDQPQIYKPFVRKCVMRGNVETGSVREIIVQSGLPATRSIERLEFLDDNEYILRVKFIGGDHMLKKCGP

SEQ ID NO: 194065 - protein, 64 aa, Oryza sativa
  Clone ID: PAT_MRT4530_90143C.1.pep
LTRSGYRLPLRTRSSPTRPDEMFSEGCSTLKPWRFFYSISSHVSYVGDLLIYSLLYSPAKLRKA

SEQ ID NO: 194066 - protein, 53 aa, Oryza sativa
  Clone ID: PAT_MRT4530_90144C.1.pep
LGYKTYLQSVGGIYNLHVQYLQVYVSVPATELFYMVEDDVHDIYMWCQSHIFL

SEQ ID NO: 194067 - protein, 60 aa, Oryza sativa
  Clone ID: PAT_MRT4530_90145C.1.pep
MHTASGSGCIRQALTESQLHCTSYPTAVDRRTEQRKKKGKPATGAPMRGLAPLRRAILVP

SEQ ID NO: 194068 - protein, 65 aa, Oryza sativa
  Clone ID: PAT_MRT4530_90146C.1.pep
CLLAKALGHTRLTESMGTKSWIHPREGGHRAHRPRRRRHHRHQRNQRHRPASTRHCLDRDLALAN

SEQ ID NO: 194069 - protein, 183 aa, Oryza sativa
  Clone ID: PAT_MRT4530_90147C.1.pep
MPLFHQILKTFFHALIIAEVILGQSDREVLLELKNFLQFQNPINHGGYNSWPESGTSPCHWQGVGCDASGRVNFLDLSNSNISGPAFQNLSRLSGLTHLDLSANSITGELHDDLKNCLHLQYLDLSYNLISGILDVSSLANLQTLDVSQNRFEGGISANFPAICRNLSAINLSSNNLTGSISG

SEQ ID NO: 194070 - protein, 361 aa, Oryza sativa
  Clone ID: PAT_MRT4530_90148C.1.pep
MEDNVLVSSKIHGRSKSTTAKRNCIICGQRISKRRRTQHNFQKISRGQLNLQRTRPCLLNFQSLPKDIVLRVMSKLTLKEVAQLSVVSTNWRQAWTFHPNLYFGIKTALGNNAKRKGTSSDLNCRISSGNKFIKRVDAILEKHCGTMGCHLQRMELHAPNLTTFEYDGSLALVTLNECSNIKASTIRLFDEKTLQNILTGIPSVLPHVETLYVEVHVKTQMSGFTQSPLKFTQLKCLTLEITFERGSFDRNSVFQLTNLFVAAPFLEDLYLDMYCSLNRCPLDLDDIVDQPHYHLKMVCIFGFCGNTGQVELAKCILRNALILEQMIIDPKGRYRLDGYFGRQEADEKLVPEDIDGVLTIL

SEQ ID NO: 194071 - protein, 487 aa, Oryza sativa
  unsure (1)..(487): unsure at all Xaa locations
  Clone ID: PAT_MRT4530_90149C.1.pep
MEGVRAQQPKGLVIICGQRISKRRRTQHNFQKISRGQLNLQRTRPCLLNFQSLPEDIVLRVMSKLTLKEVARLSVVSTNWRQAWTFHPNLYFGIKTVLGNNAKRKGTSSDLNCRISSANKFIKRVDAILEKHCGTMVNKFAVKFGLSNEHANHVNGWVAFAIASKARVIILDFSPDWKSHENNYDFPCHIFDKHNGSYLEALRLDSVTLNPPLDFCGFANLKLLALDNVRLQHLEQLISKCHVLEWLSIQSCNQLHNLHVSEPLCRLQCLSIQGCHLQRMELHAPNLTTFEYDGSLALVTLNECSNIKASTIRLFDEKTLQNILTGIPSVLPHVETLYVEVNVKTQMSGFTQSPLKFTQLKXTLEITFERGSFDRNSXLQLAYLFVAAPFLEDLYLDMYCSLISXCPLDLDDIVDQPHYHLKMVCIFGFCGNTGQVELAKYILRNALILEQMIIDRKGRYRLDGCFGREEADEKLVPEDMDGVLTIL

SEQ ID NO: 194072 - protein, 168 aa, Oryza sativa
  unsure (1)..(168): unsure at all Xaa locations
  Clone ID: PAT_MRT4530_9014C.1.pep
MGFKDDDDVDDAVGEVVDDGDGFARXRRSDPRPRDGIPEPPXECVGETAAGNGAVVDLRASVVVTAVPTPSGVAANKGTGAADEQIXAALALDSSRGGDEGGGREQRPLLYLFPETPSRLEIHLPNPLRRYGAPPTTSQVTTPMNHAYVFLLGPRHGSEVLSLAGKKE

SEQ ID NO: 194073 - protein, 617 aa, Oryza sativa
  unsure (1)..(617): unsure at all Xaa locations
  Clone ID: PAT_MRT4530_90150C.1.pep
FFAASSGFGFLGGVWFPGWCLLVNVVFSGGKEGPPFLPPGFLPRFPVAWSLPVAQKASLGTPPSVVDPALIAGGGIFAHISGFDVIFRYNFRSVLVPQYLSYIDIVALPVNGVLTDFPVTPSEAIGCFTNLKKRKTDHGKPLIISHNGASGDYPACTDLAYQKAVDDGADVMDCPVQLTKDGITICMSSINLMDDTTVAKSQFASQTAVIKDIESVLGVFTFNLTWDDIVKNLRPKISTPFSSFKLETXASKFKPPGMWLNVQHAAFVAEELGFDMVDSVIKTLDAAGYSNQTAQKVMIQSSNSSVLVKFKQQTKYDLVYMINEEVKDAAPSSLAAIKKFADAVSVEGNSIFPENRHFTTYQTNLVESLQNAGLPVYVYTLMNEFASQPYDFFSDATAQINAYVQGAGVNGVITDFPATARRYKLNTCMHMGNNTPSFMAPARPGDLLQIISKPAQPPAMSPMPLLTGSDVAEPPLPPARTAQAPSLASRMQAHAAIVVTLAMLLACHPLRMLSRTTRWRPASSALLAVPPPARRPRLLHTSSSSHVLAVEAPHHARHGEQAPSPSERLAPPAAATPRPRASSSSPAPACPPTSALSSTTRAVRLRRRNRDSTPHIP

SEQ ID NO: 194074 - protein, 73 aa, Oryza sativa
  Clone ID: PAT_MRT4530_90151C.1.pep
GFFTNSQRTLKQPCALIRGAAKDSITFSFYETPSPLFTIVYSHTEILIIRYASEAPVVLTRLEWPHPNSIDCS

SEQ ID NO: 194075 - protein, 876 aa, Oryza sativa
  unsure (1)..(876): unsure at all Xaa locations
  Clone ID: PAT_MRT4530_90152C.1.pep
MLGVEKERKIWIEMGPITIVVSTLKYEYAIEKLKSTGFGILERCGGLLVAIKAIAGLLNHKEINKIEWGKYQVLHGFVNGKSNEPEELGKEYYNELIIRNLIQAMPNSEWSMHDVGRSFCQHLAKDEALSSQMGQLRVSDILGCSRLQIASTLKDEYAIEKLKSTGFRILERCGGLPLAIKAIAGLLNHKEINEIEWGKVLRSPSWLVDGMPEEINHAIYLSYDDLDPHLKQCLLYCSLFPKYDNAGDNNNWTMHDVVRSFCRHVAKDEALPFHMEHLRVTDLDSNRYRWLCIQNELDWSAWQEQNSVRTLFFYGSTHIKLKANDLCSKFSNLRVLSIVYAQLATFDSLCQLKNLRHLYFSRTDIRSLPDGIGKMKFLEYIGITCCEQIQQLPGSIIKLERLRSLNLMGTNIKSIPRGFGRLTSLRTLYSFPAQMGSSSSKDEWCSLEELGPLSQLRDLHIKGLENVSASSSAAKAMLGAKKHLAIWWLECTDRQRDDGFLKEEGIISIDEQRRIKEVFDELCPSYCLEQLYIRGYFGWQLPKWMTSKASVRLDRLTSLKLDGLPCCTKLPDGLCQLSCLKLXVFYSAPAIERIGHEFLQIQQHNGDCHPSRAAVAFPILETLEFTVVLELEEWVWEEHIQAMPLLHELTLDRALSVLKLFMVHNLKSLQNLPSVVELHLYKNPDMESIRGVPKLQVLSINYCPKLKLLEGIPALQKLYLLDFSMKTLPGYLQDVKPKSLVLDCSLPLLGNISMGASCSDWDKISHIQQISGYAGEMRIRRRWYVFYTREPFKLDTNIVCSSISRGLNRSLRRKPFISSSVWIFLINLSCIAGIIDGLLKDKERRAKELRMVKLLCALLAVVGFVSILPHCYGLLL

SEQ ID NO: 194076 - protein, 50 aa, Oryza sativa
  Clone ID: PAT_MRT4530_90153C.1.pep
WHVDLDLSYTGMKGVVWLFVFFLLGCLTNHAYLCRIRVTGIKGGNKNDRN

SEQ ID NO: 194077 - protein, 30 aa, Oryza sativa
  Clone ID: PAT_MRT4530_90154C.1.pep
SLIMYILELLYKWHYQYHLYPCHNLNQFLL

SEQ ID NO: 194078 - protein, 41 aa, Oryza sativa
  Clone ID: PAT_MRT4530_90155C.1.pep
CAAVCCRGVQQVLRHQLGELTTGLPNNTAGIIRGYQLLQQI

SEQ ID NO: 194079 - protein, 152 aa, Oryza sativa
  Clone ID: PAT_MRT4530_90156C.1.pep
MAVATNVSCQAHPLIPNPASSLSHAACAQGGKMHSISCCDGCDFSPLSRTILSPGGKVVVAVVLPEAMGKGSVTRKHSGLGAGHQLDLRRSDGTAGFAAATTLLDAIITFSKASTYLPLTGDGTVAALEPMPTLVGVEDVDSDVTDYPSWTR

SEQ ID NO: 194080 - protein, 137 aa, Oryza sativa
  unsure (1)..(137): unsure at all Xaa locations
  Clone ID: PAT_MRT4530_90157C.1.pep
MAVATNVSILSPGGKVVVAVVLPEAMGKGSVTRKHSGLGAGHQLDLFASGDPSVDASSAATXLLQTGDGTVAALEPMPTLVGVEDVDSDVTDYPSMVHLGFQVELGDIRLRTIQYSPSLLRVGYVYGPAEGVARRAN

SEQ ID NO: 194081 - protein, 98 aa, Oryza sativa
  Clone ID: PAT_MRT4530_90158C.1.pep
IRGCTLLGLEAASAYDTIKRMIPVAEEVVKAREIVTKGGAAGSRPCPPIPVIPSEASDRGGRGRGGDAEDGAVAGGLTATVEHCARMKSWVTGRCAAA

SEQ ID NO: 194082 - protein, 88 aa, Oryza sativa
  Clone ID: PAT_MRT4530_90159C.1.pep
MEVAAPSVSLRAPGRRFASWREKKVVLSVNILSSDYFKELYRLKTYHEVINVIYNQVDHVEQWMTGQLLWPLQRLLPPLQVLHHEAHG

SEQ ID NO: 194083 - protein, 434 aa, Oryza sativa
  unsure (1)..(434): unsure at all Xaa locations
  Clone ID: PAT_MRT4530_9015C.1.pep
SGCSTRGCSRHLHPLPEAEESIPHTPRHRQAAPPPLAXPMDAPWFNLNADVLRLVHKRLPCLVDRRRMARVCHNWRVAVKPQPQPQPPPGTRPLPSILVPRADGPSFACALAGCATHGFGHPLPAEARAARYFGAYDGGWVFVAFGRILEYALLSLRNGTRFHVPDMSMGMVAATLSSPPGDERCVAAAISHSCMMDNPRIHAFGILRHRVAEEATHDPAEFVTTSVLEDVIHHNKAFKFLTREENLHVFPVAGFHEDVNGNLEIPPVEVHRFSRGGRDYGGAVAVRYLVESGGNLLMVVRLVTDPLLLPTRTSAFKVFEMVEPPTRTPIHDKEPAFAWKELESLGGRMLFVARGCSRSYSKNNYPDAEFNEGVYFLDDGRLYREGLSFLAPDSPEYPCRDNGKWTAAAAGSSMDKFLPEQGPLNYSPLAWLLP

SEQ ID NO: 194084 - protein, 390 aa, Oryza sativa
  Clone ID: PAT_MRT4530_90160C.1.pep
MAPSNRLAGAAAAAAAAPPPPPPPPPPPLPPRGSPAPSENHTAISAPLLQPAGAGAGDAAPLAKWLRRLEAFLSAAGLAASSPLGKAGAASALAVLGVALPALAVALSPCRGRGRGCDEFEVEVFEVCVLLSQAAAAAVALACVSRKMAMYGLRKFLFVDPELGMRIRFQKEYVAKIKDFFSTILWWILPCFVVKVTREMFRFSHIFQESTWRSCAVLFASIMSWMYLTTIILTSCMLFNLVCNLQVIHFDDYGKLLEQDSDPLVYLKEHLQLRHNLSKISHRFRMFLLLLFFSVTASQFAILFKTTAYTGPINFTNGGDIAVSSVVQVVGLVLCLHAAAKISHRAQNIASLASRWHALVTCSSDSTYCCIFWATQVASRYLAGSLIGHS

SEQ ID NO: 194085 - protein, 92 aa, Oryza sativa
  Clone ID: PAT_MRT4530_90161C.1.pep
PVFVIYTRQTPILGKCGVRVLFACDPPWRLGNFLCRLCSWCVVRYAWPDVCATHCCDGYASVMDDHQKPLLLYVLLCQLSLLMVLNICGTLF

SEQ ID NO: 194086 - protein, 194 aa, Oryza sativa
  Clone ID: PAT_MRT4530_90162C.1.pep
MAQRRIGGREEERGEADQWVPDVTMATMDTTIAHIMNQQEDIKIKSFMCCNLIRPCALLLTSNGRQIYIRAPFWAREYLMESSQSPLSKGSSLISEFRFVWPQSQKLICTSKNPRRGVSIAKAQHNNISYGCSRVFNSPKDRANNSLECLEWSSGFTSPTPVSALHCHVGMLRGQKWQIVKMASYKRGKKNVQT

SEQ ID NO: 194087 - protein, 308 aa, Oryza sativa
  Clone ID: PAT_MRT4530_90163C.1.pep
VILDYTEIHLVWILPCFVVKVTREMFRFSHIFQESTWRSCAVLFASIMSWMYLTTIILTSCMLFNLVCNLQVIHFDDYGKLLEQDSDPLVYLKEHLQLRHNLSKISHRFRMFLLLLFFSVTASQFAILFKTTAYTGPINFTNGGDIAVSSVVQVVGLVLCLHAAAKISHRAQNIASLASRWHALVTCSSDSTYVSTPNSSGNLVPFPAHMFLRDFSESDLESLESGSVQGNSHGTAQLASYMSSYHKRESLVLYLLGNPGGITIFGWIVDRTFLNTILMLELTLVLFVLSKTVVVPAKTLVLDYIRFS

SEQ ID NO: 194088 - protein, 71 aa, Oryza sativa
  Clone ID: PAT_MRT4530_90164C.1.pep
MVTAPTQAAAAIGSARDAMHASMRQVAQPDSPRGDGNSGANPQLRVDDGVAALQSYRGEVGVPRDRLQETR

SEQ ID NO: 194089 - protein, 47 aa, Oryza sativa
  Clone ID: PAT_MRT4530_90165C.1.pep
SKHSQMPKFTCTKMGLLTLVHPTENCKTENCLNRATKNGYNAANNVK

SEQ ID NO: 194090 - protein, 104 aa, Oryza sativa
  Clone ID: PAT_MRT4530_90166C.1.pep
LHIPKSYLGVKVFHGIKGTPKGRRRASNLIANTPTKVYEAGVCRADLPGGLVESLDYDLVGIACFSYSLCNLTRGLNQYNPCLLSALMSYYVDPCSNVPRYSMH

SEQ ID NO: 194091 - protein, 553 aa, Oryza sativa
  Clone ID: PAT_MRT4530_90167C.1.pep
MRSPSRPLPRLLLLRRRCLSSAPHRDRRFLPLLRFAALAKELSDHRPRPGTPPPPTRPRSPHPYDYNRLMSAHAGTRDGAGADRALHLLDEMRALLRRRPDAACFTTVAAALSSASRPGAALAVLDAMAADGVAPDAAACTVLVGVYACRLRRFDAAYEVVRWMVANGVAPDVVTYSTLISGLCSAGQVAEALGVLDLMLEEGCQPNAHTYTPIVHAYCTGGRIHEAKRLLNTMIASGFAPSTATYNVLVEALCKVGAFEEVDALLEESTAKGWTPDVITYSSYMDGLCKAGRIDKSFALVDKMLSNGLQPSEVTLNILLDGVCRSSTAWAAKRLLECSAELGWDANVVNYNTVMRKLCDEHRWLSVVKLFTDMAKKGIAPNSWTFNIVVHSLCKLGRLHKALFLLRSKEFVATVITYNTLIRHLSISGEGNEVCLLLYQMIEGGIAPNDITYSLVIDCLCREEKFLVALCCFYQSLEDDFFPSAFLSIIRGLIVGGMLGQLHTLIGCVLGQGFIIEVYIYQELIKALCKNGYCQSVEMYKVCHILERMLRLR

SEQ ID NO: 194092 - protein, 41 aa, Oryza sativa
  Clone ID: PAT_MRT4530_90168C.1.pep
ILYLNLPFFKISRGELYLFAGGGLLLPGIPHLHLILANCFF

SEQ ID NO: 194093 - protein, 63 aa, Oryza sativa
  Clone ID: PAT_MRT4530_90169C.1.pep
MGAVAGGRAADKRTATPAGARPMPRAPTPRAYVPSRNRVVVVHADDCRCAKRPYVTRATGRGG

SEQ ID NO: 194094 - protein, 221 aa, Oryza sativa
  Clone ID: PAT_MRT4530_9016C.1.pep
MAGEGRKLRVYGMALSANVVRVATVLNEKGLDFDLVPVDLRTAAHKQPHFLALNPFGQIPVLQDGDEVLYESRAINRYIATKYKAEGADLLPAEASPAKLEVWLEVESHHFYPAISGLVFQLLIKPLLGGATDTAAVDEHAAALAQVLDVYDAHLAGSRYLAGNRFSLADANHMSYLLFLSKTPMAELVASRPHVKAWWDDISSRPAWKKTAAAIPFPPAA

SEQ ID NO: 194095 - protein, 340 aa, Oryza sativa
  Clone ID: PAT_MRT4530_90170C.1.pep
MEKLLSSSGAAAAVASQGQLPDCFVFPADRRPPASTAAVSLPVIDLSGPRDAVRRAVLDAGKELGFFQVVNHGVPPETMREMAAVCEEFFRLPAEDKAAFYSDAEENPNRLFSSTIYEVGDQRYWRDCLRLACGFPVADDTNTHWPDKPHHLRDVTEKFFVATRGLGIELLRLLCEGMGLRPDYFERDLTAGDVIINVNHYPPCPDPSLTLGLPPHCDRNLITLLLQGDVFGLQVSYNGDWINVDPVPDAFVVNFGHLLEIATNGVLKSIEHRAMTNSAVARTSVATFMMPPMDCLVGPAKELVGDGGQPQYRTVTFREFMRIYKTVGARRDSVEKAFKI

SEQ ID NO: 194096 - protein, 58 aa, Oryza sativa
  Clone ID: PAT_MRT4530_90171C.1.pep
PKRTGVIIILYPELNQGGGATSTSSSSSSPLLERVPTKRGLSSSNAHARGSNSLFAWG

SEQ ID NO: 194097 - protein, 76 aa, Oryza sativa
  Clone ID: PAT_MRT4530_90172C.1.pep
MASPSTQHGGTEEAAAAAPPGNDRSVDVPLDCLCPIAVAIVRELKIGEDDDGGVVGSQWWGDERYGGMKKYIEIDM

SEQ ID NO: 194098 - protein, 153 aa, Oryza sativa
  Clone ID: PAT_MRT4530_90173C.1.pep
MPTRQSNAVLSRSGSVYVKTTGTQTEGPAESQRSGQVKGAIIQMHMTSELDKLGQTKLILLLLYDNNLQLHQYKSARLCLLLDGCISVPPSRQRCKRWIQRWCRNSLPGERKFDVMEKVESLKKKLGSKHGVSLALAKAYPSLDPFASFAPCQ

SEQ ID NO: 194099 - protein, 399 aa, Oryza sativa
  Clone ID: PAT_MRT4530_90174C.1.pep
MSSSLAVLLLVMRLAAAMAASPKSYISRTTEQQVIATVAPAVDVGQSAQPFLTSPSGSYAAYLRRAVDSSAGGPGADACYVQIQQAGGGAGGGGSVWESECTLVGGADACDLAFSPVGLELFAGGHSLWDTGIDAEPGTLSLDDGGDMRIVSKDGVSVWQASGEPWTGQQCGAAAPVSPSPTMDVLPPPSTTTTAKLLTPPASTLAGAGSSDLSFGDQLAPPVDTSLPASPDQPPVDTMPDQPLLPPPPADATPATPDLPLPPPPPADTHALSPPIPARQRPLPGAPGGIALPHVAPAGGGMPQQHGSPHHLPLGASPPPEAAPVPDALAPSAGHGAAAGGLPIGGQGQQQGAFGQHQVLNGAGQPLEDSSGERPRGAHAAVVVTSGLVSLLIALGFGF

SEQ ID NO: 194100 - protein, 45 aa, Oryza sativa
  Clone ID: PAT_MRT4530_90175C.1.pep
SARNQARPTTTASPALRPTFLLEDVPASSSAGHDRSIGRPSYLIR

SEQ ID NO: 194101 - protein, 429 aa, Oryza sativa
  Clone ID: PAT_MRT4530_90176C.1.pep
MSSSLAVLLLVMRLAAAMAASPKSYISRTTEQQVIATVAPAVDVGQSAQPFLTSPSGSYAAYLRRAVDSSAGGPGADACYVQIQQAGGGAGGGGSVWESECTLVGGADACDLAFSPVGLELFAGGHSLWDTGIDAEPGTLSLDDGGDMRIVSKDGVSVWQASGEPWTGQQCGAAAPVSPSPTMDVLPPPSTTTTAKLLTPPASTLAGAGSSDLSFGDQLAPPVDTSLPASPDQPPVDTMPDQPLLPPPPADATPATPDLPLPPPPPADTYPVSPDQPLYSSPPPAPTAFVPHTPLPPVDVPALSPPLPHGKTPSGAPGGIALPPAAPAGGGMPQQHGSPHHLPLGASPPPEAAAVPDALAPSAGHGAAAGGLPIGGQGQQQGAFGQHQVLNGAGQPLEDSSGERPRGAHAAVVVTSGLVSLLIALGFGF

SEQ ID NO: 194102 - protein, 126 aa, Oryza sativa
  Clone ID: PAT_MRT4530_90177C.1.pep
TPAVLAALPRVAGGPHVFSPRVSFSLPASGPGVLPRVPFHPRPPQPGWRWSCSSPCSCPPSRPRRPSAPPSPCFSSPPPAAWFRPLRGGPFGMTAFPPLVPCLFPSEILKFQYNKKPVIKHIDPHP

SEQ ID NO: 194103 - protein, 1346 aa, Oryza sativa
  Clone ID: PAT_MRT4530_90178C.1.pep
MFACLSQRRRRRQAERYYPGFAVPSYTPQHMSGEAPFLRPPSASGSMNFSAGQSQGVSPMMSSGQAYGQSTSYGQQQRLTSANYSTGSQGGGAARSVAASGELSVGNTKAFTFDELYDITAGFARDKLLGEGGFGCVFQGTLADGKAVAVKQLKGGGGQGEREFQAEVEIISRVHHRHLVSLVGYCIAEDHRLLVYDFVSNDTLHHHLHGRGRPVMDWPTRVKIAAGSARGLAYLHEDCHPRIIHRDIKSSNILLDEHFEAQVADFGLARLAENDVTHVSTRVMGTFGYLAPEYASTGKLTEKSDVFSFGVVLLELITGRKPVDSSRPLGDESLVEWSRPLLNRAIENQEFDELVDPRLDGEYDDVEMFRVIEAAAACIRHSAARRPKMGQVVRVLDSLTDVDLSNGVQPGKSQMFNVANTADIRQFQRMAFGSQDFSSEYSQSRRQKGFREVSLELVGNERQDRCRVAHFGLAKLAKNDVTNVSTRVMGTFGYLAPKYAWKLAEKSDMFSFGVVLMELITGWKPVDSSRPLGNESLIEWESSNTSAPSDCKYLLRDAQFYHVINTNRRFLLSISFSSVALHAIKFLADIVGGDEIPLPTFFAGSHVNGTKVNIIVGSHVWAEDPEIAWVDGEVVKIKGEEAEIQATNGKTSNPVLEAFGNAKTVRNNNSSRFGKFVEIQFDKQGRISGAAVRTYLLERSRVCQISDPERNYHCFYLLCAAPQEEVEKYKLGNPKTFHYLNQSNCYELVGVSDAHEYLATRRAMDIVGISTQEQDAIFRVVAAILHIGNIEFAKGKEVDSSVLKDDKSKFHLDTTAELLMCDSGALGDALCKRVMVTPEEVIKRSLDPYNATVSRDGLAKTIYSRLFDWLVDKINSSIGQDPNSKSLIGVLDIYGFESFKLNSFEQFCINYTNEKLQQHFNQHVFKMEQEEYTKEQIDWSYIEFVDNQDVLDLIEKVLYQSDQFLDKNKDYVVAEHQELLSASKCSFISGLFPPLPEETSKSSKFSSIGARFKQQLQALMETLNSTEPHYIRCVKPNNVLKPAIFENVNVMQQLRCGGVLEAIRISCAGYPTRRTFYEFLHRFGILAQEALEGNCDEKVACKRILEKKGLVGFQIGKTKVFLRAGQMAELDARRTEVLGAAAKTIQGKIRTHIMRKKFVNWRKASISVQAIWRGRLACKLFDQMRRVAAAIKVQKNHRMHQARRSYKHLNASVLVVQTALRAMAARNTFRYKKQSKAAVKIQARYRCHTAHVYHKKLKRAAIVAQCRWRGKIARKELRKLKMEARETGALKEAKDKLEKKVEELTWRVQLEKRMRTDLEEAKAQKLSKLQSSMEALQAKLDETSAK

SEQ ID NO: 194104 - protein, 85 aa, Oryza sativa
  Clone ID: PAT_MRT4530_90179C.1.pep
SAAKLPTKGNSLQPAVSSLLSSPPNPSLPSGSVLDGIAQKEANGSSNGEHTTRPPPTPSPLRFSKFSQANLMILVTGGAVFIGSH

SEQ ID NO: 194105 - protein, 231 aa, Oryza sativa
  unsure (1)..(231): unsure at all Xaa locations
  Clone ID: PAT_MRT4530_9017C.1.pep
IPFPSTPAATTASGCRRRRRRRRRRLPAAWTSSCRSKARRRDEGEMGWTLFAITVNDRXLRHLHPRVEQPDQAQRQQQDGHHRRSTQPAGPPSSPRLDREIPCARSAATALPTFKFRRRRVPLLWICRRRPPYLQASPPLEPAASTSPQPLSSSIAMSGGMVPSISLVAATSVEAGGRGGAXGGRGGASAVVEVVAGGRXERRRSPRRHCVLRPSGTSSSGQFCRMGLSRI

SEQ ID NO: 194106 - protein, 1194 aa, Oryza sativa
  Clone ID: PAT_MRT4530_90180C.1.pep
MDYFNGTDAHCGGAVGAMGSYVYNLTSSYADQKNEVSIVATSLTMLLLAALLLAFDLLAGAATLRPAARLVLSVSLALFLPVTSYLFSEAKNDVPGAGDATDAELPLRARLILAWMLLVELLRKKVEATVTGTKGASGGGPTSRAGRVAFLGYLVFFNVHGAGRKAVFGALWVVAAAKLVQRVAIGEFVKRSFAFGKNPQLLAGYMAQTLEQQERRPRRDDELMTSCKYAVMGEENLQREAGPNGYLVDLRKTVAGDDDAVVTVGRVWSLAESDQLLVSNPKLKRLCLSYALFKLLRREFEETPLTAAEAGDCRELIFRGLCNDGGAATAAATLFEVIDDELGFVTEYYHSVLPVMLASPFFLLVNYIVFPVLHQEGQLRRVVRLAEDDEVPPEQSTPVAVALFSSIDLSITFLLFLTILYEEAWELAVFLLSNWLTVSMVCDYAVKPPSRLRRAAIRGVQWVTNRMSRRNYLRVKQYSVLWFCRLPLKLPAAAVPEEAKQSIVEYLAAYDGAVAPLSAGRSAVAARNALCNASRLISSACESGSVAEVILTWHIATSLLEVRCPPHAEEEAAAAARSSTVATRLSRYCAYLVAFRREMLPDDVDCTARVYGAMTTELKRELGLKGYYFSTDATRYGKMMAIAGGQEDDEAAAEETTVVRKGARLGKALMDEAAGGDEAAVWKLVADVWTEIVVYVAPARDAEQVRAHGEALARGGEFVTVLWALVTHTGIARPAAASDTLTLYGLVYTTPATLNRTCAATATLNGPCGYYGHADAFLPSCVVLMDTNAARDCDLRLLRSVSENGSVRTSPPARLDRRRLVFPPARLAYYAAVVGRLRHHHRLASTAADWCFRLHGWPIMPPLLGVYVFTNRLAFAAADWCFHLHGWPIMPPLLGVYVFTDRLAFAAADWCFHLHGWPIMPPLLGVYVFTDRLALAAADWCFRLHGWPLCRRCWASTSSPTGLPSPLPTGVSACTAGLYAAVVGRLRLHRPAASSAADWCFRLHGWPIMLPLLGVYVFTNRPPHPPLPTGVSAGRLVRRRLVLPRLHRPACLRRRRLVFPPARLAFMPPLLGVYVFTDRLAFAAADWCFRRPACLRRRRLVFPPARLAFMPPLLGVYVFTDRLAFAAADWCFRRPAAASAADWCHRLHGWPVITPTDAIFFTAGYIAVATNRHQYLQHKLPTFAMATDCFLHFH

SEQ ID NO: 194107 - protein, 52 aa, Oryza sativa
  Clone ID: PAT_MRT4530_90181C.1.pep
AGIRNSRTRPFSCYSRHPLSRPLLLLKAGRMSATDGREMNSGRVAIYTIGLR

SEQ ID NO: 194108 - protein, 138 aa, Oryza sativa
  unsure (1)..(138): unsure at all Xaa locations
  Clone ID: PAT_MRT4530_90182C.1.pep
RNXPQXGMTRENFRGQRKEEREAXEINHTXXQXXXXKXXSXXXXLXKVFHXRXXXDVFNQXXPXEXESKKNXXEXDLXHXXXXNXTLXTRPPXXTXLXSXTRLXKIKXKTXKKEGTRXNPELXHXYSXKKQGXGXTST

SEQ ID NO: 194109 - protein, 850 aa, Oryza sativa
  unsure (1)..(850): unsure at all Xaa locations
  Clone ID: PAT_MRT4530_90183C.1.pep
QQRPHHRPASVAAGWCPCLYGWLVTPPFMGVHVFTTGLPPSPPTGVLAYTVGWSHHRSWASTSSPPACLRRRRLVSSPIRLVGHTTVHGRPRLHHRLASVAAGWCLRLHGWSIMPPPLGVYDFTAGLPPSPPGGASAYTAGLLCRRCWASTTSPXGLPPSPPSGASAYTAGLLCRRCWASTTSPPACLRRRRLVSSPIWLVGHTTAVGRLRLHRRPASVAADWCPRLHGRLVTPPLMGIVIYTAGLPPSPPSGASAYTAGLLCRRCWASTTSPPACLRRRRVVPPPTRLAYYAAAVGRLRLHRRPASVAAEWCLRLHGWPIMPPLLGVYDFTAGLPPSPPSGASSYTAGXIMPPLLDVYIVTVGSPSLPSTGMDQSEHHHRLASTAADWCFRLHGWPIMPPLLGVYVFTDRLAFAAADWCLRLHGWPLCXPLLGVYVFTDRXPSPPPTGASACTAGPYAAVVGRLRLHRPAASSAADWCFRLHGWPIMLPLLGVYVFTDRPPRPPPTGVSACTAGLLCCRCWASTSSPXPACLRRRRLVFPPARLAFMPPLLGVYVFTDRLAFXAADLCFRLHGWPLCRRCWASTSSPTGXPRPPPTDASACTAGLXYAAVVGRLRLHRPACLRRRRLVFPPARLAFMPPLLGVYVFTDRLAFAAADWCFRLHGWPLCRRCWASTSSPTGRLVRRRLVLPPARLAYYAAVVGRLRLHRPACLRRCRLVFPPARLAXYAAVVGRLRLHRPACLRRCRLVFPPARLAYYXPLLGVYVFTDRXAASAADWCHCLHGWPVITPTDATFFTAGYIAVTTNRHQYLQHKLPTFAMAADWFLHFHGCMILPVLIGLIFFTAGRLVCC

SEQ ID NO: 194110 - protein, 70 aa, Oryza sativa
  Clone ID: PAT_MRT4530_90184C.1.pep
TFPGFFFPLFIIPSPLIPPQTQIPPLLEFSSPFKLAIWPPKKSLYKILNSQPPTPSLTNRLILLGNRPLL

SEQ ID NO: 194111 - protein, 547 aa, Oryza sativa
  unsure (1)..(547): unsure at all Xaa locations
  Clone ID: PAT_MRT4530_90185C.1.pep
LQHHHRLAVVAADWCPHLYGWVVTPPLLGVVFFTDRLPRPPSTGVFAYMIGWSHRRCWAPFSSPXLAASSAVDWCFRLYGWLVTPPFVXVYVFTDRLAFAAADWCLHLHDWPIMPXLLGVYVFTDRLAFVATDWCLSLHGXPIMPPXLLGVYVFTXGLPSPPPTGVSTCTASLLCHRLLGVYVFTDRLAFATADWCLRLHGWSIMPPXLLGVYVFTXGLPSSPPTGVSACMAGLLCRRCWVSTSSPPARLRRRRLXCLRLHGWFIMPPLXDVYIFSDWPPHMTPTGAIVFTVGHVATTANRHHHLQRKLSTSAADWFLYFHGYMILPVLIGLIVFTAGSPCLTPTGLFASTAARLHRHXWRHRHRRFAFTAAHCDFTFMAGLFYHRXRTSPFSSLFYFFRRQLVLSPPTXCSLHHSYATLSPWWSYFIFIVFGTGKLYCRYFASFATSLAMTSTRASTSRYASPNMMPCYFTTTSGAPIFKISLRTSSIHIFTQVMATRRQEATVLDSMFSCFPTNQRVGGYTNTRLSKFDKMKQSINQRLLFHLHG

SEQ ID NO: 194112 - protein, 616 aa, Oryza sativa
  unsure (1)..(616): unsure at all Xaa locations
  Clone ID: PAT_MRT4530_90186C.1.pep
MLVMDSRRLSFPVDRPRVHSAGLSSPPPLLIATTTSPPACLRRRRLVSSPIRLVGHTTVHGRPCLHRPXAFAAADWCFRLHGWPIMPLLLGVYDFTTGLPPSPPTGVLAYTVGWSHHRXWASSSTPPACLRRRRVVPPPTRLAYYAAAVGRLRLHRRPASVAAEWCLRLHGWPIMPPLLGVYDFTTGLPPSPPIGASAYTAGLLCRRCWASTTSPPACLRRRRLVPPPTRLAYYAAAVGRLRLHRRLASVAAEWCLRLHGWPIMPPLFGVYDFAXGWPSSPPTGVPAYTVGRSHHRSWASTSSPXAGLRRCRLVFLPIRLTDFAAVNGLHHLHHWLGSTXPTGVFVTIDGLLRSHIGYFCCHRGNITKLSHHLFYSLYDILSFPLPHYINWIQIQICIKGIHGFKLISYAPGMDQSEHHHRLASTAADWCFRLHGWPIMPPLLGVYVFTDRLAFAAADWCFRLHGWPIMPPLLGVYVFTDRXPSPLPTGVSACTAGLYAAVVGRLRLHRPAASSAADWCFRLHGWPIXRRCWASTSSPTSXLRRRRLVLPPARLXIMPSLLGVYVFTDRPPRPPSTGVSACTAGLLCCRCWASTSSPTGRRIRRXLVSPPARLACY

SEQ ID NO: 194113 - protein, 386 aa, Oryza sativa
  Clone ID: PAT_MRT4530_90187C.1.pep
MSSGRVGDRIAIPAAGTARRRRRDPTTGPESPVYLEGSRWSLSPAYQPSRRRRHDEEGYSRRRGRSRSNSPRRRRRRRPRSCRSRSRTRSYECEDSRCCHTRPSPRSDDREDDDDEQDGSWYHPPADNEFTVRIDGIGADDGIFRCDGCFAMLSSPIYECANGDVICERCSYDDGGARVCRKCGTMELARSRAIGHLLRCIRFACKNRRYGCPSFLPRQDMDEHELSCDHEPCFCPIRRCGFAGAADSLARHLTARHGWGRLRVAYGEAAVVPVQSPTILRADDGRIFHLSCTRERGGGGGTAMSMVCIRPDHVAGAEEEFTYEVRTACQRLQMQAAVEGTSLRYGMKDAVQARVTVPDDMLLRQGDAVQVFVRKATSAAGAANNN

SEQ ID NO: 194114 - protein, 964 aa, Oryza sativa
  unsure (1)..(964): unsure at all Xaa locations
  Clone ID: PAT_MRT4530_90188C.1.pep
VSCATPFYYCRIHVSTVGAPGRGCVEFPINEHDGINFMSRRLRFRFGSFHFLSVDHFFKLLFSDLIQISQGETQSDFYHYLSXIFNLRLISCYFLLLFAYNXTTTSPPACFRRRRPVSSPIRLVGHTTVHGRPCLHRPXAFAAADWCFRLHGWPIMPPPLGVYDFTAGLPPSPPTGVSAYTAGLLCRRCWASTTSPPACLRRRRVVPPPTRLAYYAAAVGRLHPHRWLTFATVDWCFRLHGWPIMPPLLGVYDFTAGLPPSPPTGVSAYTAGLLCRRCWASTTSPPACLRRRRVVPPPTRLAYYAAAVGRLXLHRRPASVAAEWCLRLHGWPIMPPLLGVYDFTAGLPPSPPSGASAYTAGLLCRRCWASTSSPLAHLRCRRLVFPPTRLAYYAAAVGRLRLHRRPASVAAEWCLRLHGWPIMPPLLGVYDFTAGLPSSPPTGVLACTAGLSCRRCWASTSSPXPAGLRRCRLVFLPIRLTDFAAVNGLHHLHHWLGSTGADWIQIQICIKGIHGFKLISYALGMDQSEHHHRPPRPPPTGVLACTVGLLCRRCWAPTSSPTGSPLPPPTGVLACTAGLXMPPLLGAYVFTDRLAYFAADWCPRLHGWPIMPPLLGAYVFTDRLAFVAADWCPRLHGWPIMPPLLGAYVFTDRLAFAAADWCPRLHGWPXYAAVVGRLRLHRPACLRRCRLVLPPAQLAYYAAAVGRLRLHRPARXAAADWCFRLHGWXVFTDRLAFAATDWCFRLHGRLIMLPLLGVYVFTDRXAASAADWCHRLHGWPVITPTDATFFTAGYIAVTTNRHQYLQHKLPTFAMAADWFLHFHGCMILPVLIGLIFFTAVTTTDGHHRLPLPTGYAAADXCFYLHNCASSLPVCFCCRRLVFTSSRRCNFVIMVEQLHLYYLRHWQTLLLLLRKFYYFTNHDVFVSLDISACDAMLFYYNKRLSNIQDFYLDIFNTYLQSSNDY

SEQ ID NO: 194115 - protein, 76 aa, Oryza sativa
  Clone ID: PAT_MRT4530_90189C.1.pep
MARCGVGGGVVVHFLARSSSSSTCALADSISTTSSAGSSSATSPSHRRTPSPSSSTPQRARRRPSASSPPARRHPG

SEQ ID NO: 194116 - protein, 366 aa, Oryza sativa
  Clone ID: PAT_MRT4530_9018C.1.pep
MDSPWRDLDADVLGFILKRLPCLVDRRRMARVCRNWRVAVKPEQPRPGTRPLPSILVPRADGPSFACALAGCATHAFRPPLPADARTARYFGAYDGGWVFVAFGQILDYALLSLRNGTRFHFPDTGTDMVAATLSSPPDHQVVEKATAVEFVTTSVLEDVIHHKGSFHFLTREENLHVFPVAGFHEDDDGNLEIPPMVVRRFSRGGRDYGGAIAVRYLVESGENLLMVVRLVPHPPQLPPGTWAFKVFEMVHETPINNDGAPYAWKELESLGGRMLFVARGCSRSYDADKYPGAEFNEGVYFLDDGRLYDEAFQILNPFAQFPCSDNGKWLPPAAAAAAEAVTGRVDKLLPEQGPSYYTPPVWILP

SEQ ID NO: 194117 - protein, 473 aa, Oryza sativa
  unsure (1)..(473): unsure at all Xaa locations
  Clone ID: PAT_MRT4530_90190C.1.pep
HNWPISAGVEGLLPFHRPAASSAADWCFRLHGWPXLCRRCWASTSSSTGRLVRRRLVFPPARLAYYAAVVGRLPFHRPAASSAADWCFRLHGWLIMPPLLGVYLFTTGLAFAAADWCFRLYGCRTPPLLMGLIIDTTGLVPLAPTGSRSXCIEGIHGFKLXLLRFRNGLXLEHHHRLAVVATDWCPRLYGXVVTPPLLGVYIFTDRLAFAAADWYSCLHGRPIMPXRCWASTSSPTGLPSPPPTGVSACTAGLLCXAFVGRLRFHRPAXAFAAADCIFFDRPPRMTPTGAIVFTTGHVSATANRRHHLQRKLSTSAADCWFILLPLLMDVIVFIAGRLXSDADWLVHLHGCATSSSLTGIIVIAVCFCCCXLVFTSSRLSNFVIMVEQLHLYYLRHRQTLLLLLRKFCYFTNHDVFVNLDISACDAVLFYYNKWLSNIQDFYLDIFNTYLQSANDYSTTRSXSSRLYVQLFPN

SEQ ID NO: 194118 - protein, 470 aa, Oryza sativa
  Clone ID: PAT_MRT4530_90191C.1.pep
MNLISLALHEVKIWAFSGYIKRKHVREARELFDSMPSPPTSVCNALLSGYVELGYMRAAEVLFGQMQTRNPVSWNVMITGYARAGSMGIAQRLFDEMPEKDVLSRTAIMRGYLQNGSVDAAWKVFKDMPHRDTVAWNTMMDGFVRNDRLDDALKLFSEMPDRDQISWNAILQGYVQQGDMDSANAWFRRAPNKDAISWNTLISGYKDEGALSLLSEMIRGGLKPDQATLSVVISICASLVSLGCGKMVHLWAIKTGFEHDALVMSSLISMYSKCGLISEASQVFELILQRDTVTWNAMIATYAYHGLADEALKVFDMMTKAGFRPDHATFLSILSACAHKGYLYEGCYHFRSMQEDWNLVPRSDHYSCMVDLLGRSGFIHQAYDFTRRIPSDHRTTAWETLFSVCNSHGEIQLGEIIARNVLKARPSDGGMYTLLSNIYAAKEMWSSPASGKPRHPTPTQTTRPAAAGAT

SEQ ID NO: 194119 - protein, 1003 aa, Oryza sativa
  unsure (1)..(1003): unsure at all Xaa locations
  Clone ID: PAT_MRT4530_90192C.1.pep
VGNRILLIFIFWKLMLAGVSISYPVGGISVLRVSVLSNHPVGGNIFVWLVIVGDHYFRSTSSSFCLRRCRLVSSPPRLVCAAAVAXWRYRLHRRPASVAADWCPRLYGRLVTPPLMGIVIYTAGLPPSPPTGVPAYTVGWSHHRXWASSSTPPACLRRRRVVSPPIRSVGHTTVDGHRHLHRRPASVAADWXSPPIRSVGHTTVDGHRHLHRRPASVAADWCLRLHGMPIMPPLLGVYDFTAGLPPSPPSGASAYTAGLLCRRCWASTTSPPACLRRRRVVPPPTRLAYYAAAVGRLRLHRRPASVAAEWCLRLHGWPIMPPLLGVYDFTAGLPPSPPSGASAYTAGLLCRRCWASTTSPPACLRRRRLVSSPIRLVGHTTVHGRPRLRRPXAFAAADWCFCLHGXPIMPPLLGVYDFTAGLPPSPPTGVPAYTVGWSHHRXWASSSSPPACLRRRRLVPPPTRHAYYAAAVGRLRLHRRPASVAADWCLRLHGWPIMPTLLGVYDFTAGLPPSPPSGASAYTAGLLCRRCWASTTSPPACLRRRRVVPPPTRLAYYAAAVGRLRLHRRPASVAAEWCLRLHGWPIMPPLLGVYDFTAGLPPSPPSGASAYTADLLCRRCWTSTSSPLAHLRCRRLVFPLTRLTYYAAISGHLRFHRRPPSSPPTGVFIVIDGRLCSHIGHFCHHQGEYYKXIQIQICIKGIHGFKLISYAPGMDQSERHHRLASTAADWCFRLHGWPXMPPLLGVYVFTDRXASSAADWCFRLHGWPLXPPLLGVYVFTDRXPSPPPTGVSACTAGLYAAVVGRLRLHRPACXAAADWCFRLHGWPLCRRCWASTSSPTGRLVRRRLMLPPARLAXMPPLLGVYVFTDRPPRPPPTGASACTAGLLCCRCWASTSSPTGRRIRHXRLVFPPARLAYXPPLLGVYVFTDRLAFAAADWCLRLHDWPIMPPLLGVSVFNDRPPRVTPTSAIVFTAGHVAATANRRHHLQRKLSISTADWFLHFH

SEQ ID NO: 194120 - protein, 1102 aa, Oryza sativa
  unsure (1)..(1102): unsure at all Xaa locations
  Clone ID: PAT_MRT4530_90193C.1.pep
ITCLESATAIADNNNDFTAGLPPSPPSGASAYTAGLLCRRCWASTTSPPACLRRRRLVSSPIRLVGHTTVHGRPCLHRPXAFAAADWCFRLHGWPIMPPLLGVYDFTTGLPPSPPTGVIAYTVGRSHHRSWASMSSPXPAGLRRRRLVFPPARLAYYAAAVGRLRLHHRPASVAADWCPRLYGRLVTPPLMGIVIYTAGLPPSPPTGVIAYTVGRSHHRSWASMSSPXPAGLRHRRLVFPPARLAYYAAAVGRLRLHHRPASVAADWCHRLYSWSVTPPFMGVHVFTXGWPSPPPTGVSACTAGLLCRRCWASTTSPPACLRRRRLVSSPIRLVGHTTVDGHRHLHRRPASVAADWCPRLYGRLVTPPFMGVHVFTXGWPSPTGVSACTAGLLCRRCWMSTSSPLAHLRCRRLVFPLTRLAYYAAVGGHLRFHRRPPSSPPTGVFIVIDGRLCSHIGHFCHHQGEYYKAKIQIQICIKGIHGFKLISYAPGMDQSEHHHRLAVVAADWCLRLYGWLVTTPLSGVYIFTXRFAFAAADWCHRLHGWPIMPPLLGVYVFTDRPPRPPPTGVFACTLAYYATVVGPLRLHRPAASSAADWCFRLHAGLLCHRCWASTSSPTGRLVRRRLVFSPARWLIMPPLLGLYVFTDRPPRPPPTGVSACTLAYYATVXWASTSSPTGRLRRRRLVSSPGLLXPPLLGAYVFTDRLAFAAADWCPRLHGWPIMPPLLGAYVFTDRXPSPPPTGVSACTAGLYAAVXWASTSSPTGLPSPLPTGVSACTAGLYAAAVGRLRLHXPACLRRRRVVPPPTRLAXMPPLLGVYVFTDRXPSPLPTGVSACTAGXLCRRCWASTSSPTGRLVRRRPMSSPARLAXYAAIVGRLRLHRPAASSAADRCPRLHGWPLCRRCWTSTSSPTGXLRRRRLVFPPARLAXYAAVVGRLRLHRPACLRRRRLVSPPARLACYDAPLRLVXTATTTDKHHRFPSPTXMLSPTGAFIFTTARLHYQFTSSRQCNFVIMVERLHLYYLRHWQTLLLLLREFCYFTNHDVFVSLDISAYDAMLFYYNKRLSNIQDFYLDIFNTYLQSSNDYSTTRSYNSRLYVQLFPN

SEQ ID NO: 194121 - protein, 262 aa, Oryza sativa
  unsure (1)..(262): unsure at all Xaa locations
  Clone ID: PAT_MRT4530_90194C.1.pep
GNQVLHGPATSSAADCCFRLHGWLIKPWLLAVYDSTXRLASVAADWCPRLNGWLVTPPFMGIHVFTDRXASTAADWRFRLHGWPIMPPLLGVYVFTDRLASAAADWCFRLHGWPIMPPLLGVYVFTDRXPSLPPTGVSACTAGXLCRCCWASTPSPTGLPSPPPNGVSACTASLLCRCCWASTPSPTGLPSPPPTGVSACTASLLCRCCWASTSSPTGLPSPPPTGVSACTAGLLCRRCWAFTSSPTGRLARRRMVFPLCKC

SEQ ID NO: 194122 - protein, 115 aa, Oryza sativa
  unsure (1)..(115): unsure at all Xaa locations
  Clone ID: PAT_MRT4530_90195C.1.pep
MAVSWLLSWNVSVNREGHSPPPGRGPPAAXAPRPPRGSPPPGRHPPPCARPPPPAALRSPPCWLRRHHWGRPSVRDGRRPPPPPPSLLPSRIRSPPGSDGGEAAAAAQPPPLPDL

SEQ ID NO: 194123 - protein, 95 aa, Oryza sativa
  Clone ID: PAT_MRT4530_90196C.1.pep
GVKTGLPYVMKSDPKPGKALESFKKWEGVKVMEVVLPFFESLKLSRPSVPVKNCVKELPSIVKEKLGPQNAIFAKTADPMEEWPQLWKSPGAQSA

SEQ ID NO: 194124 - protein, 353 aa, Oryza sativa
  Clone ID: PAT_MRT4530_90197C.1.pep
MEDSSLFMEWAMETLQHLHPLPATPPPAGGGYAGDNATFPSLQALRESSVSQNGMAPPEPTAHEGHRASNSWSSGDTDSVSGGGGGAVMEHDGWSTSPNSVRCAAGGGGGGGGGGLWPVSWNFSSAMTQPCNDQATPSNPPTTTRARYGGGGVRYLPAAVSPSPSAQTRRASSKGNGGGGSGSSSAAPYAQEHIIAERKRREKINQRFIELSTVIPGLKKMDKATILSDAVRYVKEMQEKLSELEQHQNGGVESAILLKKPCIATSSSDGGCPAASSAVAGSSSSGTARSSLPEIEAKISHGNVMVRIHGENNGKGSLVRLLAAVEGLHLGITHTNVMPFSACTAIITIMAKE

SEQ ID NO: 194125 - protein, 195 aa, Oryza sativa
  Clone ID: PAT_MRT4530_90198C.1.pep
MASMAFTLVGAFKGMSLSSPCHSSSSASFLRADRVSLSVGGGVGMGVPMTMPVRRLTIQMAHKKGAGSTKNGRDSPGQRLGVKIYGDQVAKPGAIIIRQRGTRVYPGNNVGMGKDHTLFSLIDGLVKFEKYGPDKKKVSVYPYEKQPENPNSYRARKREYFRMQRERKKARAEGIVEVQLVLAAADESPEVNADC

SEQ ID NO: 194126 - protein, 756 aa, Oryza sativa
  Clone ID: PAT_MRT4530_90199C.1.pep
METKYSILELLLVSAEGLKHAHHLGLYSSPYLVSETLMLMTSDFAHWHGMFAGTQRHYVNIQFGDQIFTSKITQGKGKKVWWNEKFRFPLSSDECKELAKVTLKIMERDKFSEDSLVGETKVHVGDIISEGIEREFLQMKPAPYNVVLEDGRYKGELKLGLKFLPNMSSKCGAPKVRKPTINYHRLPLDGHQFDLDAFLTKDRNANNQSKPSTQSGSKSIDRRLTTPQLVSALTGIWNLVGQPESSGTAQISESHEILHKDEPVCFSKEQKEHALMSCCAENSTGLSSQNFLSTPKSIFEDLSLVKKMLMLTSCSSMAGGSSTWRHVHVGSAYYLKYQNIYPMQTRMMHTYAVSGSTEFKKDQSFRRDDNHSSQTRNMPTELCTSSSEEAHIYESSLHEHTDQNVDGLMSQEHSVDKYSPQLESSVQHRFYGAVNLNRHAVAGALAGTVVSVSLHPIDTVKTIIQVNSSRRSSFYHTLRRALVERGVLGLYGGLASKIACSAPISAIYTLTYEIVKGSLLPILPKEYHSIAHCTAGGCSSIATSFVFTPSECIKQQMQVGSQYQNCWDALLGCLRKGGITSLYAGWGAVLCRNIPHSVIKFYTYESLKQFMLKSAPANANLDSGQTLFCGGFAGSTAALCTTPFDVVKTRVQLQALSPISKYDGVLHALKEIFQHEGLQGLYRYGHFRTILAMLLNLGSYTSTQIIKQHMYFQGFGSKSFMQGTFDHRMMQRGSGTLKASEFQEQSHELSGMVLLG

SEQ ID NO: 194127 - protein, 316 aa, Oryza sativa
  unsure (1)..(316): unsure at all Xaa locations
  Clone ID: PAT_MRT4530_9019C.1.pep
MEGGEAHMAGFLNGEALRPNRSCSTERLHNGVPRVHVPSVPSLVGTQLVQEAWDEGEMGWTLFVIIVNDRRLRHLHPRVEQPDQAQRQQQDGHHRRSTQPAGPPSSPRLDREIPCARSAAAALPTSKFRCRRVPILWIRRRRPPYLQASPPFEPAASTSPQPLSSSIAMSGGMAQSISLVAATGVEAGGRGGASAVVEVVAGGRGGAPAVIEEAAGAGADERRRSPRRRRATTAGGHVEGGGRGRGRAPAVAEETXVLRPSGTSSSDRFCRMGLSRIWEEYSFIGANPSHSLLNQTPLKMGSSHPIPSYPTNQKLP

SEQ ID NO: 194128 - protein, 120 aa, Oryza sativa
  Clone ID: PAT_MRT4530_901C.1.pep
MGHALSGGEGEARPRPSQAGRLPPLPGVADRWGPPVGPFPNLRPPAHVAIAAETAAPRLLRSTSAMPPPLHSPPHRAVAAVGFARPRSTSSTPPPSMFAAGAPSPSCAGALALSHSPLSL

SEQ ID NO: 194129 - protein, 205 aa, Oryza sativa
  Clone ID: PAT_MRT4530_90200C.1.pep
MASMAFTLVGAFKGMSLSSPCHSSSSASFLRADRVSLSVGGGVGMGVPMTMPVRRLTIQMAHKKGAGSTKNGRDSPGQRLGVKIYGDQVAKPGAIIIRQRGTRVITILFLYLLVYPGNNVGMGKDHTLFSLIDGLVKFEKYGPDKKKVSVYPYEKQPENPNSYRARKREYFRMQRERKKARAEGIVEVQLVLAAADESPEVNADC

SEQ ID NO: 194130 - protein, 484 aa, Oryza sativa
  Clone ID: PAT_MRT4530_90201C.1.pep
MAGDRNSELLLSKLPSPPLRLPVIGHMHLVGSLPHVSLRDLAAKHGRDGLMLVHLGSVPTLVVSSPRAAEAVLRTHDLAFASRPRAMVPDIITYGATDSCYGPYGDHFRKVRKAVTVHLLNSHKVQAYRPAREEEVRLVIAKLRGAAAMAGAPVDMTELLHSFANDLICRAVSGKFFREEGRNKLFRELIDTNASLLGGFNLEDYFPSLARTKLLSKVICVRAMRVRRRWDQLLDKLIDDHATRLVRRHDHDQQQDSDFIDILLYHQEEYGFTRDNIKAILVDMFEAGTDTSYLVLESAMVELMRKPHLLAKLKDEVRRVIPKGQEVVNEDNIVDMVYLKAVIKETLRLHPPAPLYIPHLSREDCSISGYMIPTGIRVFVNAWALGRDAKFWDMPDEFLPERFMDSNIDFKGHDFHYLPFGSGRRMCPGIHSATVTLEIMLANLMYCFNWKLPAGVKEEDIDMTEVFGLTVHRKEKLFLVPQAA

SEQ ID NO: 194131 - protein, 189 aa, Oryza sativa
  unsure (1)..(189): unsure at all Xaa locations
  Clone ID: PAT_MRT4530_90202C.1.pep
DAVGRGDSDGKDVGTKVILPSSFTGGRRYMVQNYHDSMEICRSYGPPQIFSTFTCNSKWPEIIEAICFEAGQRPSDRSDMVTRXVYHMKLDEYITYIKSGEAFGPIQAVVYTVEFQKRGLPHSHTLTWLTAQSDEPSPAFIDVLICAEIPDIAADKFGFGLVDEFMIHGPCGEYNPSCPCMKDGRCSKG

SEQ ID NO: 194132 - protein, 114 aa, Oryza sativa
  Clone ID: PAT_MRT4530_90203C.1.pep
MSSTPAAADTAETDQADLKLVKAEPGTGPGLITITVTSQTFADVYFAIKPRVKLRRVMDLYCGKHSLDPKTVKFIDDDGRFVRSEQTPEEVGLQDGSTISLAIDQQGGACICEN

SEQ ID NO: 194133 - protein, 225 aa, Oryza sativa
  Clone ID: PAT_MRT4530_90204C.1.pep
MLINTYEWLEAKAVTALGDGACVPDRPTPPVYCIGPLIVKGEDAAKGERHACLAWLDAQPERSVVFVSFGSMGAVSAEQLKEIARGLENSGHRFLWVVEVLRHAATAAFVTHCGWNSVLEAASAGVPMLCWPQYAEQRMNKVLLVDGMQLGVVMDGYDEELVKAEEVEKKVRLVMEFEEGKKLRDRLTMAKEMAAKALADGGSSSLAFTEFLKDLNFGNTTKEKA

SEQ ID NO: 194134 - protein, 50 aa, Oryza sativa
  Clone ID: PAT_MRT4530_90205C.1.pep
VSGRLLVRGVDRQRRALPVQVVRGVVVIAHQHVVVPRAQEAGAAEAGRVG

SEQ ID NO: 194135 - protein, 480 aa, Oryza sativa
  Clone ID: PAT_MRT4530_90206C.1.pep
MEADPNPMVVLHACLGVGHLIPMVELAKLLLRRGLAVVIAVPTPPASTADFFSSSAPAVDRMAAANPSISFHHLPPPEYPDPDPDAFLQMLDTMRLTVPPLLAFLRSLPSVAALVLDLFCVDALDAATAAGVPAYFYYTSSAGDLAAFLHLPHHFATTEGSLKDMGKTPLRFPGVPPIPASDMPHTVLDRADRTCATRLGHYGRIPEARGILINSYEWLEARSVRALREGACIPDRPTPPVYCIGPLMAKGEEAANGERHACLSWLDAQPERSVVFLCFGSLGAVSVKQLKEIARGLENSGHRFLWVVRSPPQDPAKFFLPRPEPDLGMLLPEGFTERTRDRGMVVTSWAPQVEVLRHAATAAFVTHCGWNSVLEAASAGVPMLCWPQYAEQRMNKVLLVDGMQLGVVMDGYDEELVKAEEVEKKVRLVMEFEEGKKLRDRLTMAKEMAAKALADGGSSSLAFTEFLKDLNFGNTTKEKA

SEQ ID NO: 194136 - protein, 150 aa, Oryza sativa
  unsure (1)..(150): unsure at all Xaa locations
  Clone ID: PAT_MRT4530_90207C.1.pep
KIXTXXGCKIGXGPKKXXGVXXPXDPXXGFKIXPPKFXXXXXXKXRGXXGXASHXGGDDFFGSPXXGGQXXSFXXGXGXWGXGXNXXRXXXXNGXTXDXPVXFFCXLXFWXRXPXXXRKSXXVRXFGFFKRXXEXXIFXXXGGXXFPVLV

SEQ ID NO: 194137 - protein, 203 aa, Oryza sativa
  unsure (1)..(203): unsure at all Xaa locations
  Clone ID: PAT_MRT4530_90208C.1.pep
YYQHFLFYSREPKKLLEYSNTSTPLAIEANLDEEKIEGNDASKXYITKFYKKFFRPPEVSSLSLDDSKLDDIPQVSEAENDHLIAPLSEEEVRDAVFGMETNRAPDPDGFPAEFXRKFWDVLKHDLLLMFNEFYAREFPIFSLNFRVITLIPKVKEANRIHIQTDIXLLNASFQIFIKVATNRINSVADXYIVRPTQTAFMRG

SEQ ID NO: 194138 - protein, 83 aa, Oryza sativa
  Clone ID: PAT_MRT4530_90209C.1.pep
IAGGRSRSRTSPRVRDLVGAAAARRHVRDQDMAGSRAAGPRGTPLFTGGTWTSASSYSGSLLFLTGVFMIVMTIICFIKVYDI

SEQ ID NO: 194139 - protein, 63 aa, Oryza sativa
  Clone ID: PAT_MRT4530_9020C.1.pep
KIRYTAWRRTLLMNMFEKGTQSVQNVQDGAEVLPLRVRSRWARQRLVVTLWLWNTQTLNTEAP

SEQ ID NO: 194140 - protein, 1030 aa, Oryza sativa
  unsure (1)..(1030): unsure at all Xaa locations
  Clone ID: PAT_MRT4530_90210C.1.pep
QQRLHHRPASVAADWCLRLHGWPIMPPLLGVYDFTAGLPPSPPTGVSAYTAGLLCRRCWASTTSPPACLRRRRVVPPPTRLAYYAAAVGRLRLHRRPASVAAEWCLRLHGWPIMPLLLGVYVFTTGLPPSPPIGAFAYTAGLLCRRCWASMTSPPACLRRRRLVSSPIRSVGHTTVDGHRHLHRRPASVAADWCPSLYGRLVTPPLMGIVIYTAGLPPSPPTGVIAYTVGRSHHRSWASMSSPXPAGLRRRRLVFLPARLAYYAAAVGPLLLHHRPAYVAADWCHRLYGWSVTPPFMGVHVFTXGWPSPPPTGVSACTAGLLCRRCWASTTSPPACLRRRRLVSSPIRSVGHTTVDGHRHLHRRPASVAADWCPRLYGRLVTPPFMGVHVFTDRLXPSPTGVSACTAGLLCRRCWMSTSSPLAHLRCRRLVFPLTRLAYYAAVSGHLRFHRRPPSSPPTGVFIVIDGRLCSHIGHFCHHQGEYYKAKIQIQICIKGIHGFKLISYALGMDQSEHHHRXASSAADWCSRLHGWPIMPPLLGVYVFTDRLAFAAADWCFRLHGWPFMPPLLGVYVFTDRXPSPPPTGVSACTAGLYAAVVGRPRLHRPACXAAADWCFRQHGWPIXRRCWASTSSPTGRLVRRRLVFSPARLVFMPLLLGVYVFTDRXPSTPPTGVSACTAGLYAAVXWASTSSPTGXLRRRRLVFPPARLAYXQPLLGVYVFTDRXASSAADWCFRLHGWSLXPPLLGVYVFTDRPPRPPPTGASACTAGLYAAVXWASTSSPTGSPSSPPTGVLACTAGLXYAAVVGRLRLHRPARLRRRRLVSTPARLAXMPPLLGAYVFTDRXPLPPPTGVLACTAGLLCRRCWAPTSSPTGXRLLRRRLVSTPARLAYYAAAVGRLRLHRPARXVAADWCPRLHGWPLCRRCWASTSSPTGXLRRCRLVLPPAQLAYYAAVVGRLRLHRPACLRRRRLVSSPARLAYYAAVVGRLRLHRPACLRRYRLVLPPARQTYYAAVVGRLRLHRPAAASAAD

SEQ ID NO: 194141 - protein, 856 aa, Oryza sativa
  unsure (1)..(856): unsure at all Xaa locations
  Clone ID: PAT_MRT4530_90211C.1.pep
PITPPLLGIHVFTDRPAFAAADRCLRLRGWPIMPPLLGILVFTDRLSFVAADWCFRLHCWPIICCRCWASTSSPTGXLHHRRLVSPPTRLAYYAAVVGHARLDRPACHRRRRLVSPPARLAYYAAAVEHQQLHXPAWLRRRRLVSPPTRLAYYAAVVGRIRLHRRPASVAAQRCLCLHGWPVMPLLLGVYDFTXRPAFAAADRCLRLHGXPITLPLLGIHVFTDRPAFAAADRCLRLHGWPIMPPLLGIHVFTDRXPSSPPTGVSACTAGLXICCRCWASTSSPTGLPSSPPTGVSAYTAGLLRRRCWATTSSPTGLPSPPPTGVSAFTAGLLCRRCWASTSSPTGXLRRRRLVSPPTRLAYYDAVVGQPRLHRPACLRRRRRPVSPATRLAYYAAAVGHLRLHRRPSFAAADWCLRLHGWPIMLPLLGIHIFTDRLAFVAADXCLRLHGWPNMPPLFGIYDFTXRPAFAAANWCLRLHGWPIMPPLLGIHLFTDRLAFVAADWCLRLHGWPITPPLLGIYDFTAGLPSPPLTGVSTYTAGLLCRRCWASTSSPTGLPSSPPSGVSASTAGLLRRRCWASTTSPXGLPSPLSTGVSAYTAGLLWRRCWASTSSSTGLPSSPPTGVSASTAGLLYAAVVGPPSTGVLTYMVGWSHHRTWASTSSPTGXLRRRRLVFPPAQLAYYAAAVWRLRLHRRPASAATDWCVRLYVWRTSPPLMGFIIYTTGFVPLAPTGVFVTIDGLYAXRDGSVRTSPPACRRPPPTGVSACTAGLLCRRCWASTSSPTGRLVRRRLVSPPARLAYYAAVVGRLRLHXRLALAAANWCFHFHAWPIIPPLLGVYVLTDRLSRPKTTLKYIL

SEQ ID NO: 194142 - protein, 977 aa, Oryza sativa
  unsure (1)..(977): unsure at all Xaa locations
  Clone ID: PAT_MRT4530_90212C.1.pep
VSCATPFYYCRIHVSTVGAPGRGCVEFPINERDGINFMSRRLRFRFGSFHFLSVDHFFKLLFSDLIQISQGETQSDFYHYLSXLIFNLRLISCYFLLLFAYNYAALLRRLMLVMDSRRLSFPVDRPRVHSAGLSSPPPLLXQQRLHRRLASVAADWCHRLYGWSVTPPFMGVHVFTXTGWPSPPPTGVSACTAGLLCRRRWASTTSPPACLRRRRLVPPPIWLVGHTTVVGRLRLHHRPASVAADWCLRLHGWPIMPLLLGVYDFXPPTGASAYMVGWSHHRCWASTSSPPACLCHRRLVPPPTRLAYYSAAVGRLRLHRRPASVAAEWCLRLHGWPIMPPPLGVYVFTAGLPPSPPIGASAYTAGLLCRCCWASTSSPPAXLRRRRLVPPPTRLAYYAAAVGRLRLHRRPASVAAEWCLRLHGWPIMPPLLGVYDFTAGLPPSPPSGASAYTAGLLCRRCWASTTSPPACLRRRRVVPPPTRLAYYAAVVGCLHPHRWLTFVAVDWIQIQICIKGIHGFKLISYAPGMDQSEHHHRXPRPPPTGVSACTAGLLCRRCWASTSSPTGLPSPPPTGVLACTAGLXYAAVVGRLRLHRPACLRRRRSMSSPARLAFMPPLLGVYVFTDRLAFAAADWCFRLHGWPIMPPLLGVYVFTDRLAFVAADWCPRLHGWPXMPPLLGVYVFTNGLAFAAADWCFRLHGWPXYAAVVGRLRLHRPACLRRRRLMSSPARLAXYAAVVGRLRLHRPAASTAADWCFCLHGWPIMLPLLGVYVFTDRXAASAADWCHRLHGWLVITPTDAIFFTAGYIAVTTNRHQYLQHKLPTFAMAADWFLHFHGCMILPVLIGLTIFIASTTTDEHHRLPSPTGYAVADXCFYLHNCASSLPVCFCCRRLVFTSSRQCNFVIMVERLHLYYLRHWQTLLLLLRKFCYFTNHDVFVSLDISACDAMLFYYNKRLSNIQDFYLDIFNTYLQSSNDY

SEQ ID NO: 194143 - protein, 172 aa, Oryza sativa
  Clone ID: PAT_MRT4530_90213C.1.pep
MAFYKLVLVARDLLSKKLPYSRNASTWMPSLIQSSFDVDGIRRQGWGRQWMWRRRVAVCQSPVIEGAPCKATIPELKQPRVMVVRLREMTQLGSGEEKRWWLLGRWRWAEKGPASGSRHALPPSATIVSSPTTFPHAAAESSPVTVPEGNVTEIFWPEQFCNGMDKINTKIY

SEQ ID NO: 194144 - protein, 471 aa, Oryza sativa
  unsure (1)..(471): unsure at all Xaa locations
  Clone ID: PAT_MRT4530_90214C.1.pep
RTFNTFSSHVSSSSSQFFLLGLGFSSDLVSTTFSFSFSFSSPYVCLRRRLPTSPPWWRSTHSSSMRRLRLLTRRGTTLADWCFRLHGWPIKPPLLGVYDFTTDLPPSPPTGVPAYTVGWSHHRXWASSSSPPACLRRRRLVPPPTRLAYYAAAVGRLRLHRRLASVVAEWCLRLHGWPIMPPLLGVYDFTAGLPSSPSIGASAYTAGLLCRRCWASTTSPPVCLRRRRLVPPPTRLAYYAAAVGRLRLHRRPASVAADWCRRLHGWPIMPPLLGVYDFTAGLPPSPPIGASAYTAGLLCRRCWASTTSPPACLRRRRLVSPPIRSVGHTTVDGHRRLHHRPASVAAEWCLRLHGWPIMPPLLGVYDFTAGLPPSPPSGASAYTAGLLCRRCWASTTSPPACLRRRRVVPPPTRLAYYAAAVGRVRLHRRTASINADWCLRLHGWPIIPPLLGXYDFTAGLLRTPQLVPPPN

SEQ ID NO: 194145 - protein, 42 aa, Oryza sativa
  Clone ID: PAT_MRT4530_90215C.1.pep
PSPRVESSLCILLSNIHYFNYKLLIDVNIGDKLFYLQESIKA

SEQ ID NO: 194146 - protein, 600 aa, Oryza sativa
  Clone ID: PAT_MRT4530_90216C.1.pep
MPPPRTKHRPLLLATTFLSLLLLLLLLSLLSTAHKAFAVADDDGHRARVLLAADGGERNADAEHAAAVDRHCAGTLHRDVCVSTLSTIPNLARKPLRDVISEVVGRAASAVRASSSNCTSYLQRPRQLRTRDRLALSDCLELFGHTLDLLGTAAAELSAGNSTAEESAAGVQTVLSAAMTNQYTCLDGFAGPSASEDGRVRPFIQGRIYHVAHLVSNSLAMVRRLPTQRRRGAEEEPLEGYGRVRRGFPSWVSASDRRRLQQQVAADVVVAKDGSGKFTTVSEAVAAAPNNSETRYVIYIKAGGYFENVEVGSEKTNIMFVGDGTWKTVIKASRNVVDNSTTFRSATLGNQSFCSIREPIFQTFFCMHTAVVGTGFLARDITVENAAGPSKHQAVALRVNADLSAFYRCSFAGYQDTLYAHSLRQFYRDCDIYGTVDFIFGDAAVVLQNCNLYARRPDPNQKNVFTAQGREDPNQNTGIAIQGCKVAAAADLVPVQANFSSYLGRPWKTYSRTVFLQSKIDSLIHPRGWLEWNGSFALDTLYYAEYMNRGDGADTSARVSWPGYHVLTNATDAANFTVLNFVQGDLWLNSSSFPYILGLS

SEQ ID NO: 194147 - protein, 331 aa, Oryza sativa
  unsure (1)..(331): unsure at all Xaa locations
  Clone ID: PAT_MRT4530_90217C.1.pep
MEAAIFAPHQVAILELLAVEAEATAATAPGRMAANGMSSISKGGAENSEPMELLEEREYVPERNLGRDRAIDAGHGLEASQLSGRSAASPLCRLVFATAIADNNNDFTAGLPPSPPSGASAYTAGLLCRRCWASTTSPPACLRRRRLVPPPTRLAYYAAAVGRLRLHRRPASVAADWCLRLHGWPIMPPLLGVYDFTAGLPPSPPTGASAYTAGLLCRRCWASTTSPPACLRRRQLVPPPTRLAYYAADVGRLRLHRRPASVAADWCPRLYGWLVTPPFMGVHVFADRLAFAXADWCFCLYDWRXFAAVNGLHHLHHWLGSTGADWCFCHH

SEQ ID NO: 194148 - protein, 316 aa, Oryza sativa
  unsure (1)..(316): unsure at all Xaa locations
  Clone ID: PAT_MRT4530_90218C.1.pep
KSASSSSQAVPPPPVGRSHHRSWASMSSPTGXLRRRRLVPPPTRLAYYAAAVGRPRLHRRLASVAAEWCLRLHGWPIMPPLLDVYILTVGSPXCRRLWASSLSPSXPSSPPTGVFIVIDGRLCSHIGHFRHHQGEYYKANQNITXRLASTAADWCFRLHGWPXMPPLLGLYVFTDRLAFAAADWCFRLHGWPLCRRCWASTSSPTGLPSPPPTGVSACTAGLYAAVVGRLRLHRPAASSAPDWCFRLHGWPVITPTDAIFFTAGYIAVTTNRHQYLQHKLPTFAMAADWFLHFHGCMILPVLIGLIFFTAGHLVCC

SEQ ID NO: 194149 - protein, 40 aa, Oryza sativa
  unsure (1)..(40): unsure at all Xaa locations
  Clone ID: PAT_MRT4530_90219C.1.pep
SGHGRMPRNIRVDPWGGPFSMYITAXEKGGYGKESTFDTF

SEQ ID NO: 194150 - protein, 231 aa, Oryza sativa
  unsure (1)..(231): unsure at all Xaa locations
  Clone ID: PAT_MRT4530_9021C.1.pep
NRRAARRDGKRWGRGRLTGSAAGSTETRRRGRRRSTARRRGTSRRRGASAQRRRWRLPMRRXAGDGKEREKGGQPARGGVAGFXTTTGRRGGVGLGALATRGGGTARRNGDSARRGRGSRRSWRRRXREGVVAARGSGRGSGSGRRRQDGRAAGRRREAARGRACGGSGXRGQRRRLAAHGDGDATGDTTAATGVARGSARRSRRGRQRRGAARAGARGVRGSAAVEGGKG

SEQ ID NO: 194151 - protein, 518 aa, Oryza sativa
  unsure (1)..(518): unsure at all Xaa locations
  Clone ID: PAT_MRT4530_90220C.1.pep
WRRCWASTTSPPACLRRRRVVPPSTRLAYYAAAVGRLRLHRRPASVAAEWCLRLHGWPIMPPLLGVYDFTAGLPPSPPSGASAYTAGLLCRCCWASTSSPPACLRRRRVDPPPTRLAYYAAAVGRLRLHRRPASVAAEWCLRLHGWPIMPPLLGVYDFTAGLPPSPASGASAYTAGLLCRRCWASTTSPPACLRRRRVVPPPTRLAYYAAXGHLRFHRRPPSSPPTGVFIVIDGRLCSHIGHFCHHQGEYYKAKXDSRCLGTMTRMDQSEHHHRLASVAADWCPRLNGWLVTPPFMGIHVFTDRXTSSAADWCFRLHGWPIMPPLLGVYVFTDRPPRPPPTGVFACTAGLLSRRCWASTTSPTGRLVRRRLVFPPARWPIMPPLLGVYVFTDRPLRPPPTGVSACTAGLLCRRCWAYTSSPTGRLVRRRLVFPPARWPIMPPLLGVYVFTDRLPXSAADWCFRLHGWPIMPPLLGVYVFTDRPPRPSPTGVSTCTAGLLCRRCWASTSSSPVVSSAAD

SEQ ID NO: 194152 - protein, 51 aa, Oryza sativa
  Clone ID: PAT_MRT4530_90221C.1.pep
PLGRPLGLKGGGGGESLLFFQLYTLKFTKNQTQPITDSITLLKPLNPSNWG

SEQ ID NO: 194153 - protein, 269 aa, Oryza sativa
  unsure (1)..(269): unsure at all Xaa locations
  Clone ID: PAT_MRT4530_90222C.1.pep
QQRLHRRPASVAADWCLRLYGWLVTPPLLGVYVFTTGLPPSPPTGASAYTAGLLCRCCWASTTSPPACLRRRRVVPPPTRLAYYAAAVGRLRLHRRPASVAADWCLRLHGWPIMPPLLGVYDFTAGLPPSPPSGASAYTAGLLCRRCWASTTSPPACLRRRRVDPPPTRLAYYAAAVGRLRLHRRPAFVAXEWCLPLHGWPIMPPLLGVYDFTAGLRCRRLVFPLTRLTYYAAISGHLRFHRRPPSSPPTGVFIVIDGRLGSHIGHFCH

SEQ ID NO: 194154 - protein, 253 aa, Oryza sativa
  Clone ID: PAT_MRT4530_90223C.1.pep
MAGAFSLRLGPRIAGTPPPPASATKGEGRGGGRPTGSRALVSKKPNKEHHLWIRKDSAGSGKKALHLVNTVSKLPNEKEAVYGALDKWTAFEPEFPTIAAAKALEMLKRRRQWLRIIQVAKWLMSKGQVLTWTTYDTLLLALFMDGRIDEAESIWNNIIQTHTRSVPKRLFSRMILIYDTRHCPDKVLEVIYADMEELGVHPDEDTTRRIGRAFVTLGQEDKEKIVLEKYLKKYKYMHFNGERVRVRRGGPLT

SEQ ID NO: 194155 - protein, 1205 aa, Oryza sativa
  unsure (1)..(1205): unsure at all Xaa locations
  Clone ID: PAT_MRT4530_90224C.1.pep
EWICQNITDRLAFAAADWCFRLHXWPIMPPLLGIYVFTXTGLPSPLPTGVSACTAGLYAAVVGRLRLHRPAASSAADWCFRLHGWPXMPPLLGVYVFTDRPPRPPTGVSACTAGXLCRRCWASTSSPTGRLVRRRLVLPPARLGXYAAVVGRLRLHRPAASSAAGWCFRLHGWPXMPPLLGVYVFTXGLPSSPPTGVLACTAGPLCRRCWAPTSSPXPACLRRRRLVFPPARLAXYAAVVGRLRLHRPAASSAADWCXLPARLAXYAAVVGRLRLHRLAASSAADWCFRLHGWPXMSPLLGVYVFTDRPPRLPPTGVSACAAGXLCRRCWASTSSPTGRLVRRRLVLPPARLAXYAAVVGRLRLHRPAASTAADWCFRLHGWPXMPPLLGVYVFTDRPPRLPPTGVSACTAGXLCRRCWASTSSPTGRLVRRRLVLPPARLGXYAAVVGRLRLRRPAASSAADWCFRLHGWPXMPPLLGVYVFTXGLPSSPPTGVLACTAGPLCRRCWAPTSSPXPACLRRRRLVFPPARLAXYAAVVGRLRLHRPAASXAADWCFRLHGWPXMSPLLGVYVFTDRPPRLPPTGVSACAAGXLCRRCWASTSSPTGRLVRRRLVLPPARLAXYAAVVGRLRLHRPAASTAADWCFRLHGWPXMPPLLGVYVFTXGLPSPPPTGVSACTAGXLCRRCWASTSSPTGRLVRRRLVLPPARLAFMPPLLGVYVFTDRPPRPPLTGVSACTAGLLCCRCWASTSSLTGRLVRRRLVLXACTAGLYVAVVGRLRLHRPAASTAADWCFRLHGWPXMPPLLGVYVFTDRXASTAADWCFRLHGWPLXPPLLGVYVFTDRPPRPPPTGVSACTAGLXYAAVVGRLRLHRLAASSADCCFXRLHGWPLCRRCWASTSSPTGRRIRRLLVLLLHGLPIMLPLLGVYVFTDRPPRPPPTGGSACTAGLLCCRCWASTSSTTGRLVRRRLVLPPARLAYYXPLLGVYIFTDRLAFAATDWCFRLHGWPLXPPLLGVYVFTDRPPRPPPTGASACTAGLLCCRCWASTSSPIGLPSPPPTGVSACTAGLYAAVVGRLRLHRPACLRRCRLVLPPARLAYYXPLLGVYIFTDRPPRPPPTGASACTAGLLCCRCWASTSSPTGRLVRRRLVLPPARLAYYAAVVGRLRLHRPAASTAADWCFRLHGCPXLCCRCWASTSSPTGRRIRR

SEQ ID NO: 194156 - protein, 147 aa, Oryza sativa
  unsure (1)..(147): unsure at all Xaa locations
  Clone ID: PAT_MRT4530_90225C.1.pep
LRHGXRGRXXTTPXPHXAPADYXXXRKSASGMXGXPKKGXRXGNFSWDGAXGFPXXDLXLISPXKLHLPLQFXRFRRPPPNXXXXXXSGDDQXXAXGPXPPPGVXRXVFIPSPILXVLXNXCVLFXRXXWIXRPCWDLXXISSLSXF

SEQ ID NO: 194157 - protein, 687 aa, Oryza sativa
  unsure (1)..(687): unsure at all Xaa locations
  Clone ID: PAT_MRT4530_90226C.1.pep
AAAVGRLRLHRRPASVAAEWCLRLHGRPIMPPXLGVYDFTAGLPPSPPSGASAYTAGLLCRRCWASTTSPPACLRRRRVVPPPTRLAYYAAAVGRLRLHRRPASVAAEWCLRLHGWPIMPPLLGVYDFTAGLPPSPPSGASAYTAGLLCRRCWASTTSPPAXPPSPPSGVFIVIDGRLCSHIGHFCHHQGEYYKAKXMDQSEHHHRLASTAACLRRXDWCFRLHGWPXMPPLLGVYIFTDRLAFAAADWCFRLHGWPLXPPLLGVYVFTDRLAFAAGDWCFRLHGWPLCRRCWASTSSPTGXLRRCRLVFPPARLAFMPPLLGVYVFTDRPPRPPPTGTSACTAGLLXPPLLGVYVFTDRLAFAAADWCFRLHGWSIMPPLLGVYVFTDRXPSPLLTSVSACTAGLYAAVVGRLRLHRPACLRRRRLVFPPARLAXMPPLLGVYVFTDRXPSPLPTGVSACTAGLLCRRCWASTSSPTGLPXAAADWCFRLHGWPLCRRCWASTSSPTGRLVRRRLVLPPARLAYYATVDGRLRLHRXPPHPPPTATTTDGHHRLPLPTXMPPPTSAFIFTTARLRYQFASVAADSCXTSSRQHNFVNMVERLHLYYLRYQQTLLLLLHKFCYITNHDVVVNLDISACDAVLFYYNKWLSNIHDFYLDIFNTYLQSSNNYSTTRCYSSRLYVQLFPN

SEQ ID NO: 194158 - protein, 39 aa, Oryza sativa
  Clone ID: PAT_MRT4530_90227C.1.pep
VLQGCRAGGVQQGNQAQWEHFQHEVETTRTMRGGGHLGR

SEQ ID NO: 194159 - protein, 53 aa, Oryza sativa
  Clone ID: PAT_MRT4530_90228C.1.pep
RVLQGCRAGGVQQGNQAQWEHFQHEVETTRTMRGELVDACCAMFVEGGGHLGR

SEQ ID NO: 194160 - protein, 59 aa, Oryza sativa
  unsure (1)..(59): unsure at all Xaa locations
  Clone ID: PAT_MRT4530_90229C.1.pep
KHFSVKAYRVEHDAHDIVXEVYQYGPEEEAGTEYEERAHYKXSVYKHIAGDMTGGHADK

SEQ ID NO: 194161 - protein, 304 aa, Oryza sativa
  unsure (1)..(304): unsure at all Xaa locations
  Clone ID: PAT_MRT4530_9022C.1.pep
PTNGDTDVGHASRPYLNGCPIVAHLPHSGAGGTARWQAVGEGEAHRFGGGVDGDAAARSTAEHGAATRHIAAAGRVGSAAAAAAXQRGGNAGDGKEREKGGEVVGVVWGAMGSRGGAYXARGGVAGFKRRRDGAAAGRLGATATRGGGTARRNGDTARGSGRGSGSGXRRRDGRAAGRRREAARGRADGDGARXARGGATARGGNSGAGRKAARRRGAAAAERGDGDGGAXGARRRAAVGGSGAARRVQGHGARGGARQWRGEGPLKNQRHELPSDPHGLLTASQSVLNCHEHDLQNHALTTHH

SEQ ID NO: 194162 - protein, 94 aa, Oryza sativa
  Clone ID: PAT_MRT4530_90230C.1.pep
MDNGDEASRRCPHLAWPSPPAPGLHSRRPRPGRRRRPRRSRLAVDAAVRAWPTSPPPPAPGQRRCRAWSPTPPPAPGRRHRPCLAVNAAAACVV

SEQ ID NO: 194163 - protein, 90 aa, Oryza sativa
  Clone ID: PAT_MRT4530_90231C.1.pep
SNIITYLSGWLGLAWNVPRLAGGEPRWRRRRRPWRSCSRKGRGIRRTRCRRRATATDAWMKRRRRRRLNGGRSGKSSALSSSLGHSAMAA

SEQ ID NO: 194164 - protein, 1009 aa, Oryza sativa
  Clone ID: PAT_MRT4530_90232C.1.pep
MKVGVEILDASELAPKDGAGACNAFVEVEFDGQKQRTPTKPADRSPQWNHTLVFDVRDPSRLPSLPVDVSVHHDRSLTDHHATRLHTFLGRVRISAASLAPSPQDALLQRYPLEKRGLFSRVSGDIALRLYLIANDSPDPPPAPAVHHHQHQPPQSVSAEQPDSRPPPAFPHGEAQAQAQPPPPESESKGKTTHDHEPPRVFRSVPACHAPRGGRAATAARPDRDHAAPSRPRPRAPPSAFGLVETKPPLPAKMGPRAAVAAAAKIASTYDMVEPMSYLYVSVVKARDLPNMDITGALDPYVEVRLGNFKGVTRHLEKNPNPVWRQVFAFSRDHLQSSQLEVVVKDKDVLKDDFVGRVVFDMTDIPNRVPPDSPLAPQWYRLADRSGEKIRHGEIMLAVWNGTQADEAFPEAWHSDAHSVSLDSLASTRSKVYYSPKLIYLKVVAIAAQDLIPAEKGRPLAPSIVKIQLGGQTRRTRSQGSANPMWNEEFLFVAAEPFDEPLVVTVEERVAAGRDEPVGRVIIPVAAPYVPRNDLAKSIEAKWFSLSRALTADEAAAAEATKLKSSFASKIHLRLSLETAYHVLDESTHYSSDLQPAAKKLRKSPIGILELGILGARNLAGGKSPYCVAKYGAKWVRTRTLVGTAAPRWNEQYTWEVFDLCTVVTVAVFDNCHLTGGGDAKDQRIGKVRVRLSTLETERVYTHFYPLMTLTPGGLKKTGELHLAVRFTCTAWANMLAMYGKPLLPKMHYTHPISVLQMDYLRFQAMQMVAARLGRAEPPLHREVVEYMLDVDSHMFSLRRSKANFKRMTSLFSGAVAVARWMDGICKWKNPVTTILVHVLFLILVCYPELILPTVFLYLFVIGVWNYRRRPRKPAHMDTALSHAEAEQVHPDELDEEFDTFPTSKPGDVVRMRYDRLRSVAGRVQTVVGDLATQGERAQALLSWRDPRATSIFVLLSLIIAVVLYVTPFQVVAVVVGLYLLRHPRFRSKQPSVPFNFYKRLPAKSDVLL

SEQ ID NO: 194165 - protein, 183 aa, Oryza sativa
  unsure (1)..(183): unsure at all Xaa locations
  Clone ID: PAT_MRT4530_90233C.1.pep
DLSAHFLEPQXGQFGGGWVYRRGTIPGITYACNVYSGGGSFFTMPSSPHFIHCHDWASSPFCXLYKGYYAKSRLATSPNLIYTCITLILLEAHSYLYKXMTYCDXASTVSHTYSQEISSHCDLIIHLXTFYLILLGICPHLXHPYTDYFIPXHYTSXNCPSGNNAAKRALHQRFGLQQTDVPI

SEQ ID NO: 194166 - protein, 90 aa, Oryza sativa
  Clone ID: PAT_MRT4530_90234C.1.pep
MVHGVAGQTTEQHVDWCHRRYAINNLTPLVQNPSPAVAAAAVVTMGGSSLTRTSTNRRLHGTYFEQKLAVHNSSAPCRKNGSEENLDAKE

SEQ ID NO: 194167 - protein, 185 aa, Oryza sativa
  Clone ID: PAT_MRT4530_90235C.1.pep
MKPHPLIGEFNHRLHHLPPALSDWMRFKGTENPPLQADLYFSTQGVLAVFLTLNRCGGGAADLSGLAKGHLASMDELVQEQRHLVHIRSKMLLSEILRSIGANEARYNCHAVTDGYVGSAEASVYGVRGGEEPFLVRAHGIPAIRPCDAEESAAHALIAVIKKECRVEIEDTNWLDMNRYHAEVF

SEQ ID NO: 194168 - protein, 58 aa, Oryza sativa
  Clone ID: PAT_MRT4530_90236C.1.pep
DVSHWGLTGSFIHCIRPSLASMQSEENASVQLLRRPHRSKNNLALQQQLLVKERRVGL

SEQ ID NO: 194169 - protein, 54 aa, Oryza sativa
  Clone ID: PAT_MRT4530_90237C.1.pep
LSGLPFFFWGIIYTVVHSRGGTHDASECAPTTKITLHQLAHLQRSCTLRFLLHT

SEQ ID NO: 194170 - protein, 457 aa, Oryza sativa
  Clone ID: PAT_MRT4530_90238C.1.pep
MDTPSTTCDESSEVDARDDYGDIDDVERRRGRHRREASSDVSSECSGEPGSPYGSPYPRWPVCSIAKAPPPPLLQKLGAARRGAGRDRKAGDGELQLIKERFSKLLLGEDMSGSGKGVSTAVAISNAITNLYATVFGGCHRLEPLLAEKRSMWRREMDCLLSVCDYIVELFPSKEIMPDGTVREVMATRPRSDIYVNLPALEKLDDMLLEILDSFQKTEFWYVNDKGQKDSCAAAAAAPCRPVSHRDGDKWWLPVPCVTKPGLTESARRDLRQKHDCASQIHKAAMAINNGVLAEIRIPELYKQTLPKCGRASVGDLIYRHMSFPGKFSPEYLLDRLEISSEHDALEAADRVEAAMHVWRRKASQGHSRSPWSAVKELMESDKNVMLASRAGDVLLCLKQRFPGLSQTTLDASKIQYNKDVGQAILEGYSRVLESLAYNIVTCIDDVLFADESARKI

SEQ ID NO: 194171 - protein, 126 aa, Oryza sativa
  unsure (1)..(126): unsure at all Xaa locations
  Clone ID: PAT_MRT4530_90239C.1.pep
HEGTIEDCEQVIKNLDGSLYSGRTMRVNFADKPKPKLPLYPXETEHKLFVGNLSWTVTSDXLTEMFQKCGNVVGARXLYDGETGRSRGYGFVCYSTKEEMDEALSSLNGTELEGREIRVNLALGKK

SEQ ID NO: 194172 - protein, 122 aa, Oryza sativa
  Clone ID: PAT_MRT4530_9023C.1.pep
SMSSTFCDYQPITEPRHEKRQQLDLGRVKVAITALFAILIIMIHRAARTFSTPRASTMVTALPPPVHFQTAGHTPALTAWARISRPCARTPTRLTLTRRASSKPAATPARARHVVAQDVAHA

SEQ ID NO: 194173 - protein, 779 aa, Oryza sativa
  unsure (1)..(779): unsure at all Xaa locations
  Clone ID: PAT_MRT4530_90240C.1.pep
RHRLHHWLASVAADWCLRLHGWSIMPPLLGVYDFTAGLPPSPPSGASAYTAGLLCRRCWASTTXTPPACLRRRRLVPPPTRLACYAAAVGRLRLHRRPASVAADWXPPPTRLAYYAAAVGRLRLHRRPASVAADWCLCLYGWLVTPPLLGVYDFTAGLPPSPPTGVFAYMVGWSHHRCWASTSSPTGRLVRRRLVFPPARLAYYAAAVGRLRLHRRPASVAAEWCLRLHGWPIMPPLLGVYDFTAGLPPSPPIGASAYTAGLLCRRCWASTTSPPACLRRRRLVPPPTRLAYYAAAVGRLRLHRRPASVAAEWCLRLYGWLVTPPLLGVYIFTDRPSRPPPTGVSACTAGLLCRRCWASTTSPPACLRRRRLVSSPIWLVGHTTVVGRLRLHRPAVSSAADWCLRLHGWPIMPPLLGVYDFTAGLPPSPPSGASAYTAGLLCRRCWASTTSPPACLRRRRLVPPPTRLAYYAAAVGRLRLHRRPASVAADWCLRLHGWPIMPPLLGVYDFTAGLPPSPPSGVFAYMVGWSHHRCWASTSSPTGRLVRRRLVFPPARLAYYAAAVGRLRLHRRPASXSPPTGVFAYMVGWSHHRCWASTSSPTGRLVRXPTGMDQSEHHHRLASTAADWCFRLHGWPIMPPLLGVYVFTDRLAFAAADWCFRLHGWPLXPPLLGVYVFTDRXPSPPPTGVSACTAGLYAAVVGRLRLRRPAASSAADWCFRLHGWPLCRRCWASTSSPTGRLDCRRLVFPPAASTAADWCFRRPPHPPLTGVTACTAGLL

SEQ ID NO: 194174 - protein, 455 aa, Oryza sativa
  Clone ID: PAT_MRT4530_90241C.1.pep
MAGEVVAIHVDVGHGVPDEAQASTKIQKLDGSHITPIAQGKIHRFPRGLIGIGGSNEQRYIVPTFVAIGPYHHGKPHLHKMEEVKLAAMNRFIATANGASAGDVSGKLLSVVGDVRGCYADDEKLKCFSDDDFAAMMLVDGCFLLQFMMEKRKPLFEGRALSSEYSILKDMMLLENQVPWLVLDTLMEFLPMEMEVEQNVRCFVADVGDMFLRNNKEHEVSLTTSCFSVLFEVSPHKSSFLKDYKPANLLDLLRSSQIFRMPTEELSVRLVGSSLLSSSAVELAQIGVNLTASTAEWFGDMSVKEGPVYGELSLSPIFLNDVSAGWLVNMAALEASGGATTADQSSSSSSVMCSFLSVVAMLMDREEDVHQLRAKQVLYSTLSNAQTLDFFKRISQHLGFGHRYFYILQQINKFKQGRPVRSAVHKFLYKHIRAISIILSIASVLVGIFKALREL

SEQ ID NO: 194175 - protein, 39 aa, Oryza sativa
  unsure (1)..(39): unsure at all Xaa locations
  Clone ID: PAT_MRT4530_90242C.1.pep
QHRLQADSTVPSIEQQTIXNLQSFQPPHYYAKSKDRKAQ

SEQ ID NO: 194176 - protein, 111 aa, Oryza sativa
  Clone ID: PAT_MRT4530_90243C.1.pep
HIYITDHIPWPLRKPTLSESETPDRYTPVSAIPKLDVGATAIPASALSAADSSNCTNIMADPLRIPRIEDRIRRPFAPDVRAYTSVILPPSARLQLRRNLGHGAVAARVDA

SEQ ID NO: 194177 - protein, 1259 aa, Oryza sativa
  unsure (1)..(1259): unsure at all Xaa locations
  Clone ID: PAT_MRT4530_90244C.1.pep
DFTAGPPPSPPTGVLAYAVGWSHHRSWASTSSPXPAGLRRRRLMFPPXTRLAYYAAAVGRLRLHRRPASVAAEWCLHRRPASVAAEWCLRLHGWPIMPPLLGVYDFTAGLPPSPPSGASAYTAGLLCRRHAGYXCWASTTSPPACLRRRRLVPPPTRLAYYAAAVGRLRLHRRPASVAADWCLRLYGWLVTPPLLGVYDFTAGLPPSPPIGASAYTAGLLCRRCWASTTSPPACLRRRRVVPPPTRLAYYAAAVGRLRLHRRPASVAAEWCLRLHGWPIMPPLLGVYDFTAGLPPSPPTGVFAYMVGWSHHRSWAFTSSPPACLRRRRLMLPPTRLAYYAAAVGRLRLHRRPASVAAEWILRLHGWPIMPPLLGVYDFTAGLPPSPPSGASAYTAGLLCRRCWASTTSPPACLRRRRXWCLRLHGWPIMPPLLGVYDFTAGLPPSPPSCASAYTAGLLCRRCWMSTSSPLAHLRCRRLVFPPTRLTYYAAISGHLRFHRRPPSSPPTGVFIVIDGRLCSHIGHFCHHQGEYYKAKIQIQICTKGIHGFKLISYAPGMDQSEHHHRLAFAAADWCFRLHGWPIMPPLLGVYVFTDRLAFVAADWCFRQHGWPIMPPLLGVYVFTDRPPRPPPTGVFACTAGLYAAVVGRLRLHRSACXAAGDWCFRLHGWPLYRRCWASTSSPTGXLRRRRLVFPPARLAFMPPLLGVHVFTDRXPSPPPTGVSASTAGLLCRRCWASTSSPTGRLVRRRLVFPPLLLGVHVFTDRLAFAAANWCFRQHGWPIMPPLLGLSSPTGLPLPPPTGVSASTAGLLCRRCWASTSSPTGRLVRRRLVFPPXLPSPPPTGVFACTAGLYAAVVGRPRLHRPACLRRRRLVFPPARLAXMPPLLGVDRXPLPPPTGVSACTAGLYDRCCWASTSSPTGXLRRRQLVFPPARLAYYAAVVGPRPACXAAADWCFRQHGWPXLCRRCWASTGRLVRRRLVFPPARLAYYAAVVGRLRLHRPACLRRLRLVFPPARLAYYAAVGGRLRLXDRPPRPPPTGVFAMASAADWCHRLHGWPVITPTDAIFFTAGYIAVTTNRHQYLQHKLPTFAMAADWFLHFHGYMILPVLISLIFFTAAPLRLVYTATTTDGHHRFLPPTRVMPPSTGAFIFTTARLHYRFTSSRQHNFVIMVDRLHLYYLRNQQTLLLLLNKFCYITNHDVVVNLDISACDAVLFYYNKWLSNIQDFYLDIFNTYLQSSNNYSTTRCYSSRLYVQLFPN

SEQ ID NO: 194178 - protein, 667 aa, Oryza sativa
  unsure (1)..(667): unsure at all Xaa locations
  Clone ID: PAT_MRT4530_90245C.1.pep
NHHWASSSSPTSXPRQPPTSVSACTAGLLCRRLLGLYVSTAGLPSPPPTDVSACTAGLLCRRCWGSTSSPPARLRRRRLVFPPTRXTIVVGRLRLHXPACLRRRXLVPPPTWLVYYAAVDGRLRCHRPAVSSAADWCFRLHGXPIIPLLLGVHIFTNRLAFAAADWCLCLHGWPIMSPLLGVYDFIAGLPLSPPTXCFRLYGWWTPSPLMGLVIYTXRLASAAADWCFHCHXMDDFVPILLILYVCSVGSRSRYAXKGFMALSLSLTLQEWISQNITNGLPSPRPTSVTACMAGLLCRRCWAFTSSPXGLPSPHATGVTACTAGLFCRRCRASTSSPTGLPSPPPTGVFAYTAGLLCRRCWASTSSPPACLRRTRLVSLPARLAYSAAVVGRLHLHRPACXAAADWCLCLHGWPIMPPLLGIYVFXPPPTGVADCTASLLCRRCWASTSSPTGLPSPPPTGVFAYTAGLLCRRCWASTSSPPACLRRRRMVSSPTRLAYYAAVVGCLCLHRLAASYDANWSYRLHGWPXVVIILLLPSPTGYAAAGWCFYLHNYASSLPICFCCCRLIFTSSRLCNFITIMGXLHLHYLRHRQILLPLLCKICYFTNQDVYKSSDISACITKYDAMLFYYNKWCSNIQYFYSDIFNTYLHSSNDYSTTRSYSSRLYI

SEQ ID NO: 194179 - protein, 950 aa, Oryza sativa
  unsure (1)..(950): unsure at all Xaa locations
  Clone ID: PAT_MRT4530_90246C.1.pep
MAQTLVAKIICMCRSSVGMCLCIQETRRTPTAAVGRLRLHRRLASVAAEWCLRLHGWPIMPPLLGVYDFTAGLPPSPPTGASAYTAGLLCRRCWASTTSPPACLRRRRLVPPPTRLAYYAAAVGRLRLHRRPASVAADWCLRLHGWPIMPPLLGVYDFTAGLPPLPPTGASAYTAGLLCRRCWASTTSPPXLRRRRLVPPPTRLAYYAAAVGRLRLHRRPASVAADWCLRLHGWPIMPPLLGVYDFTAGLPPSPPSGASAYTAGLLCRRCWASTTSPPACLRCRRVVPPPTRLAYYAAAVGRLRLHRRPASVAADWCPRLYGWLVTPPFMGVHNITTGSPRPPPTGVSACTAGLLCRRCWASTSSPXACLRRRRLVFPPARLAFMPPLLGVYVFTDRPPRPPPTGASACTAGLYAAVVGRLCLHRPAAFAAADWCFRLHGWPXMPPLLGVYVFTDRLAFAAADWCFHLHGWPLXPPLLGVYVFTDRPPRPPPTGASACTAGLYATVVGRLRLHRPAAFAAADWCFRLHGWPLYRRCWASTSSPTGXLRRCRLVFPPARLAFMPPLLGVYVFTDRXPSPLPTGVSACTAGLYAAVXWASTSSPTGRLRRRRLVFPPARLAYXPPLLGVYVFTDRLAFAAADWCFRLHGWPLXPPLLGVYVFTDRPPRPPPTGASACTAGLLCRRCWASMSSPTGLPSPLPTGVSACTAGLYAAIVGRLRLHRPACLRRRRLVFSPARLAFMPPLLGVYVFTDRPPRPPPTGASACTAGLLCRRCWASTSSPTGRLVRRRLVLPPARLAXYAAVVGRLRLHRPACXAAADWCFRLHGWPLCRRCWASTSSPTGRLVRRRLVLPPARLAYYAAVVGRLRLHRPACLRRRRLVFPPARLAFMPPLLGVYVFTDRPSRPSPTGASACTAGLLCRRCWASTSSPTGHLDRRRLSRHSTSTTSNISV

SEQ ID NO: 194180 - protein, 204 aa, Oryza sativa
  Clone ID: PAT_MRT4530_90247C.1.pep
MAEVANVGTKSSINNNEDTSRRRRRRSTVKAKMPTNGGIIGQPCKRKHQSTAAKVSQRLSFPLTDLDQVREEELEEVVDGKEVKTPKAKAKSATHEIDSIALVDRKLDATPTWRANCRNMISAIIKGGSARDLKVDGCRDQGFRQVQALSMRASRITMPCGYGVPIISTLHQWEAKLMEKLGTLTQWIDTLDSKMEEQRGDWIK

SEQ ID NO: 194181 - protein, 106 aa, Oryza sativa
  Clone ID: PAT_MRT4530_90248C.1.pep
SPRVPCVKVGGTGSPKPGTPYFTLVMVSTVGGAGTLPGLSVKGTKRVKWPPLKPPWGQECPPSGVPPGGSLPFRVMPGAPPKAPSWRVPPPDGQLGVPPRAPKNFN

SEQ ID NO: 194182 - protein, 1167 aa, Oryza sativa
  unsure (1)..(1167): unsure at all Xaa locations
  Clone ID: PAT_MRT4530_90249C.1.pep
LEIAFLFTCTAGAIVTDRFAFAAADWCLRLHGWHIKPPLLGVYVFTXGLPPPPPTGVSAYTAGLLCRRCWVSTTLPPACLCRRRLVXPPSIRLVGHTTVHGRSCLHRPXAFAAADWCLHLYGWPIMPPLLGVYDFTAGLPPSPPTGVLAYTVGWSHHRSWASMSSPXPAGLRRRRLVFPPARLAYYAAAVGRLRLHRRPASVAADWCPXPIRLVGHTTVHGRPRLHRPXAFAAADWCFRLHSWPIMPPLLGVYDFTAGLPPSPPTSVLAYTVGWSHHRSXRPSLYRPAGLRRRRLVFPPAWLAYYATAVGRLXLHRWPASVAADWCPCLYDWLVTLPFMGIHVFTXGWPLPPLTGVFACTAXGLLCRRCWASTTSPPACLRRRRLVSSPIRLVGHTTVHGHPSLHRPXAFATVDWCFRLHGWPIMPPLLDVYDFTAGLPPSPPTGVLAYTVGWSHHRSWASTSSPXPACLRRRRLVSPPTRLAYYAAIVGRPRLHRPXAFAAADWCLCLHGWPIMPLLVGIAFTVDXPPSPPIDFFIVIDGRLRTSPPACLRXRRRLVFSPARLAXYATVVGCPRLHRPAASSAADWCFRLHGWPIMPPLLGVHVFTDRPPRPPPTGVSACTAGLLCRRCWASTSSPXACLRRRRLVFPAXRLAFMPPLLGVYVFTDRLAFAAADWCFRLHGWPIMPPLLGVYVFTDRLAFAAADWCFRLHGWPLXPPLLGVYVFTDRPPRPPPTGVSACTAGLXYAAVVGRLRLHRPACXAAADWCFRLHGWHLCRRCWASTSSPTGCLVRRRLVLPPCTAAXIMPPLLGVYVFTGWXPSPPPTGVSAXCTAGLYAAVCWASTSSPTGXLRRCRLVLPPAQLAYXPPLLGVYVFTDRLAFAAADWCFRLNGWPLXPPLLGVYVFTDRXPSPPPTGVSACTAGLLCRRCWASTSSPTGLPSPPPTGVSACTAGLXYAAVVGRLRLHRPARLRRHRPXLVSSPARLAFMPPLLGVYVFTDRLAXRPSPTGVSXACTAGXLCRRCWASTSSPTGXLRRRRLVSSPARLAXYAAVVGRLRLHRPACXAAADWCFRLHGWPLCRRSWASTSSLTGXLRRRRLVFPPARLAXYAAVVGRLRLHRLACLRRRRLVFPPARLAFMPPLLGVYVFTDRPPHPPLTGVTACTAGLL

SEQ ID NO: 194183 - protein, 205 aa, Oryza sativa
  Clone ID: PAT_MRT4530_9024C.1.pep
MLRHAARRLATTRAAAAAGRSSRALSTAEVPAEAATDSAFAEAWKKVAPNIEAPATPMSLMQPRPPTPAAIPSKLTVNFVLPYKSEIANKEVDMVIVPATTGQMGVLPGHVSTIAELKPGVLSVHEGNDITKYFVSSGFAFVHANSIADIVAVEAVPLDQIDPAAVQQGLAEFNAKLGSASTELEKAEAQIGVDVHSALNAALAG

SEQ ID NO: 194184 - protein, 309 aa, Oryza sativa
  Clone ID: PAT_MRT4530_90250C.1.pep
MDRGGEVRGGQFRYRRIPFVVPPLVLLCHHPPPRDPDVRAAIAESILEPLYAAGGEGGGEGYDDRRWVRDGVPPVREEERDLERRRRRWPFAVSENCDIFAGGPLNSVASEDQFSLAGRTAAFVTPPASSSLVVAEGHLAGESHIKAPCHFLATRRHYSSRHLDAIHPATSSDLVKSTLDLHMGMPNPTAPIVAFTTAHYPASILLHCCSCSGTKRTPAETGPPVLSVKDEDAEAADESGGPGQSSQGRGLLLDRLHHHRGELLRLHLRPPSNSMLRTGGSSGASASASMAVASLPWLQPLSQSQQSFS

SEQ ID NO: 194185 - protein, 59 aa, Oryza sativa
  Clone ID: PAT_MRT4530_90251C.1.pep
SHSLGVVQYQLLFPCLWIKPFGLLYVILFVWHQLRHLRVAIVDYIILCSCSFSLLLLLV

SEQ ID NO: 194186 - protein, 908 aa, Oryza sativa
  unsure (1)..(908): unsure at all Xaa locations
  Clone ID: PAT_MRT4530_90252C.1.pep
QQRLHRRPASVAAEWCLRLHGWPIMPPLLGVYDFTAGLPPSPPSGASAYTAGLLCRRCWASTTSPPARLRRRRVVPPPTRLAYYAAAVRRLRLHRRPASVAAEWCLRLHGWPIMPPLLGVYDFTAGLPPSPPSGASAYTAGLLCRRCWASTTSPPARLRRRRVVPPPTRLAYYAAAVGCLRLHRRPASVAADWCLRLHGWPIMPPLLGVYDLTAGLPPSPPTGVLAYTVGWSYHRSWASTSSPXPAGLRRRRLVFLPTRLAYYAAAVGCLRLHRRPASVAAEWYLRLHGWPIMPPLLGVYDFTAGPPPSPPSGASAYTAGLLCRRCWVSTTSPPACLRRRRLVPPPTRLAYYAAAVGRLRPHRRPASVAADWCPRLYGWLVIPPFMGVHIFADRLAFAAADWCFCLHGXAYYAAAVGRLRLHRRPASVAADWCPRLYGWXSHHRSWASTSSPTGXLRRRRLVFPPARLXIMPPLLGVYVFTDRXPSPPPTGASACTADLLCRRCWASTSSPTGXLRRRRLVFPPARLAFMPPLLGVYVFTDRLAFAAADWCFRLHGWPLXPPLLGVYVFTDRPPRPPPTGASACTAGLYAAVVGRLRLHRPAXLDRRRLVFPPARLAFMPPLLGVYVFTDRPPRPPPTGASACTAGXLCRRCWASTSSPTGRLDRRRLVFPPARLAYYAAVVGRLRLHRPAASSAADWCHRLHGWPVITPTDAIFFTAGYIAVTTNRHQYLQHKLPTFAMAADWFLHFHGCMILPVLIGLTIFIAATTTDGHHRLPPPTRVMPPPTSAFIFTTARLHYRFASVAADSCXTSSRQHNFVIMVERLHLYYLRYQQTLLLLLHKFCYITNHDVVVNLDISACDAVLFYYNKWLSNIHDFYLDIFNTYLXSSNNYSTTRCYSSRLYVQLFPN

SEQ ID NO: 194187 - protein, 1203 aa, Oryza sativa
  unsure (1)..(1203): unsure at all Xaa locations
  Clone ID: PAT_MRT4530_90253C.1.pep
PSWLTYSSLRLHSWPIMPPLLGVYDFTAGLPPSPPSGASAYTAGLLCRRCWASTTSPPACLRRRRVVPPPTRLAYYAAAVGRLRLHRRPASVAAEWXPPPTRLAYYAAAVGRLRLYRRPASVAADWCLRLHGWPIMPPLLGVYDFTAGLPSSPPSGVSAYTAGLLCRRCWASTTSPPACLRRRRVVSPPTRLVYYAAAVGRLRLHRRPASVAAEWCLHGWPIMPPLLDVYILTVGSPSLPSTGVSAYTADLLCRHXWASSLSPSARLGRRRLVSSPARLAYYAAVVGRLRLHRPXAFVAADWCPRLHGWPIMPPLLGAYVFTXGSPSSPPTGVLACTAGLLCRRCWAPTSSPXPARLRRRRRVFPPARLAYYAAVVGRLRLHRPXAFVAADWCPRLHGWPIMLPLLGAYVFTXGSPSSPPTGXSACTAGLLCRRCWAPTSSPXPARLRRRRLVSSXPARLAYYAAVVGRLRLHRPXAFAAADWCFRLHGWPXMPPLLGVYVFTXGSPSSPPTGXSACTAGLLCRRCWAPTSSPXARLRRRRLVSSPARLAYYAAVVGRLRLHRPAXPSSPPTGVLACTAGLLCRRCWAPTSSXDRLAFVAADWCPRLHGWPIMPPLLGAYVFTDRLAFVAADWCPRLHGWPIMPPLLDVYVFTDRXPSSPPTGVLACTAGLXYAAVVGRLRLHRPARXVAADWCPRLHGWPIXRRCWAPTSSPTGXRLRRRRLVFPPTRLAFMPPLLGVYVFTDRLPRPXTPTGALAFTTGLLCRCCWASTTSPLACLRRCRLVSSPIRLVXTPPSMGVHIFTDRLAFTAADWCLRLHGWPIMPPLLGIYDFTAGPPSSPLTGVLAYTVGXSAAVDGPRHLHHWLACTAPAGVFIIIDGRLCSHIRHLCRHQVSXLLHSRNGSVRTSPPACRRRHRLVSSPIRLVXTPPSLGVYIFTAGLPSPPPTGVTACTASLLCCRCCASTSSPTGXLHRCRLVSSPTWLAYYAAIVGXSAVDWCPRLYSWYIPLALXWASSSSLLAFAFAAXMVSSLSQLAYFATVQGRLRFHHHSASSVAVWLRHRRLVFLSSRLRIFAIGLLLLPLTRVHFITAMHFVTMVERLHLYCFLHWQTLLPPLCKICYFTNHNVGKSSDILACVTKYDAVLFYYNKWYFNIQYFYLDIKRCISLLYTHARIKETTRALISSRQFDGLLSLTSSPAPLLRRP

SEQ ID NO: 194188 - protein, 204 aa, Oryza sativa
  Clone ID: PAT_MRT4530_90254C.1.pep
MAASRRVAISLLLLVAAMASSFSFSPCTAQSSSSCASYTFSSNQQYGSCATLPRLGATLHYNYTAAASTVAVAFRAPQPAGGKGWVAWGINPSGSGMVGTQAVVAFRHPNGSLVAYPTVLGSYAPSMAPAAAKDLALPVSGVSAEENGKAKEVVVYATVALPAGKGTKFNHVWQQGSSVAGDVPAAHPTSGDNVLSVGSIDFSK

SEQ ID NO: 194189 - protein, 1367 aa, Oryza sativa
  unsure (1)..(1367): unsure at all Xaa locations
  Clone ID: PAT_MRT4530_90255C.1.pep
RHRLHHWLASVAADWCLRLHGWSIMPPLLGVYDFTXRPASVAAEWCLRLHGWPIMPPLLGVYDFTPPACLRRRRLVPPPTRLACYAAAVGRLRLHRRPASVAADWCLRLHGWPIMPPLLGVYDFTAGLPPSPPTGVFAYMVGWSHHRCWASTTSPPACLRRRRLVSSPIWLVGHTTVVGRLHLHRPAVSSAADWCFRLHGWPIMPPLLGVYDFTAGLPPSPPSGASAYTAGLLCRRCWASTTSPPACLRRRRLVPPPTRLACYAAAVGRLRLHRRPASVAADWXPPPTRLAYYAAAVGRLRLHRRPASVAAEWCLRLYGWLVTPPLLGVYIFTDRPSRPPPTGVSACTAGLLCRRCWASTTSPPACLRRRRLVSSPIWLVGHTTVVGRLRLHRPAVSSAADWCLRLHGWPIMPPLLGVYDFTAGLPPSPPSGASAYTAGLLCRRCWASTTSPPACLRRRRLVPPPTRLACYAAAVGRLRLHRRPASVAADWCLRLHGWPIMPPLLGVYDFTDRPSPSXPPSGVYACTAGLLCRRCWASTTSPPACLRRRRLVPPPTRLAYYAAAVGRLRLHRRLASVAAEWCLRLHGWPIMPPLLGVYDFTAGLPPSPPSGASAYTAGLLCRRCWASTTSPPACLRRRRVVPPPTRLVYYAAAVGRLRLHRRPASVAADWCLCLHGWSIMPPLLGVHDFTAGLPPSPPSGASAYTAGLLCRRCWASTTSPPACLRRRRVVPPPTRLVYYAAAVGRLRLHRRPASVAAEWCLRLHGXVYYAAAVGRLRLHRRPASVAAEWCLRLHGWPIMPPLLGVYDFTXRPASVAAEWCLRLHGWSIMPPLLGVYYFTAGLPPSPPTGVFIVIDGRLCSHIGHFCHHQGEYYKAKSSFILFXYDIFPFPLPHYTNWSSIEXVSRGLQILYHIFYNIYLDCLRHILSTKVPLPLGRFLAPGGSLDGPSNARCXVLFGINQKHRDKIIYFLLLIIAKXPSSKLRSVKLCSINDELMSLICMFGKCLGRLPVLGGYDXRAERLNVISHLLGEIKLDKRXIHIYKYFKILDFFSSIIFISDTTHPRIHGFKLISYAXEWISQNITTGSPRPPPTGVSAXRLAYYAAVVGHLRLHRPAXLRHRRLVFPPERLAFMPPLLGVYVFTDRPPRPPPTGVSACTAGLLCCRCWASTSSPTGRLDRRRLVFPPARLAYYAAVVGRLRLHRPAAASAADWCHRLHGWPVITPTDAIFFTAGYIAVTTNRHQYLQHKLPTFAMAADWFLHFHGCMILPVLIGLTIFIAATTTDGHHHLPSPTXMPPPTERLHLYYLRHWQTLLLLLRKFCYFTNHDVFVSLDISACDAMLFYYNKRLSNIHDFYLDIFNTYLQSSNNY

SEQ ID NO: 194190 - protein, 1142 aa, Oryza sativa
  unsure (1)..(1142): unsure at all Xaa locations
  Clone ID: PAT_MRT4530_90256C.1.pep
QQRLHRRPASVAADWXSSPIRLVGHTTVHGRPCLHRPXAFAAADWCFRLHGWPIMPPLLGVYDFTTGLPPSPPTGVIAYTVGRSHHRSWASMSSPXPAGLRRRRLVFPPARLAYYAAAVGRLRLHHRPASIAADWCPRLYGRLVTPPLMGIVIYTAGLPPSPPTGVIAYTVGRSHHRSWASMSSPXPAGLRRRRLVFPPARLAYYAAAVGRLRLHHRPAYVAADWCHRLYGWSVTPPFMGVHVFTXGWPSPPPTGVSACTAGLLCRRCWASTTSPPACLRRRRLVSSPIRSVGHTTVDGHRHLHRRPASVAADWCPRLYGRLVTPPFMGVHVFTDRLXPSPTGVSACTAGLLCRRCWASTTSPPACLRRRRLVSSPIRSVGHTTVDGHRHLHRRPASVAADWCPRLYGRLVTPPFMGVHVFTXGWPSPTGVSACTAGLLCRRCWMSTSSPLAHLRCRRLVFPLTRLAYYAAVSGHLRFHRRPPSSPPTGVFIVIDGRLCSHIGHFCHHQGEYYKAKIQIQICIKGIHGFKLISYAPGMDQSEHHXRLAFAAADWCFRLHGWPXMPPLLGVYVFTDRLAFAAADWCFRLHGWPLXPPLLGVYVFTDRXPSPPPTGVSACTAGLXYAAVVGRLRLHRPACXAAADWCFRLHGWPLCRRCWASTSSPTGXLRRRRLVFPPARLAFMPPLLGVYVFTDRPLHPPLTGVTACTAGLLXRQLMLSSSRLATSLSLRRLVFPPARWPIMPPLMGVYVFTDRLAFAAADWCLRLHGWPIMPSLFGVYDSTTGLPPSSPISVSACTLAYYATVXWASTSSPTGXPRPPPTGVSACTLAYYATVDGRLRLHRPACLRHRRLVSPSARLAXMPSLLGVYDSTTSLPPSPPTGVSACTXGLLCHRXWASTSSPTGXLRRRRLVSPSARLAYYAVVVGRLRLHHRPASIAADWCFRLHGWPXLCRRCWASTSSPTGRLVRRRLVFPPARLAYYAAVVGHLHLNRRSSRLLXLVPLPLRLVYTATTTDGHHHLPSPTXMPPPTGAFIFTTARLHYRFTSLRQYNFVIMVERLHLYYLRDRQTLLLLLRKFYYFTNHDVFVNLDISACNAMLFYYNKWLSNIQDFYSDIFNTYLQSSNDYSMTRSYSSRLYVQLFPN

SEQ ID NO: 194191 - protein, 68 aa, Oryza sativa
  Clone ID: PAT_MRT4530_90257C.1.pep
MMTTSRRLSHRKQARCENNVTNSSSGPETVKKGNDYPGGPIVLELFGFVLVASSPCQIISTGHNAGYF

SEQ ID NO: 194192 - protein, 402 aa, Oryza sativa
  unsure (1)..(402): unsure at all Xaa locations
  Clone ID: PAT_MRT4530_90258C.1.pep
PASAVEQEASSTAEEPVVSVSRRSLLPWKKKRKLNLRLLKVLKNKGEPLLKKGNDEEGGDDIDYDRRLLTTSDGNALEGSDSSINSMVSIFGDDNFVVGNWESKEVLSRDGHLRLSTQVFFASIDQRSERAAGESACTALVAVIADWFEANQDLMPIRSQFDSLIREGSLEWRKLCENETYRERFPDKHFDLETVLHAKIRPLTVSPNRSFIGFFQPESTEDGSGGDFLDGAMSFDNIWDEISRAAECSTEKPTLYIVSWNDHFFVLKVEAGAYYVIDTLGERLYEGCSQAYILKFDDNTTIHKVPAEKKEANPDSSGRLKDSSDSSSTDQDSGTDTEECELVXKGKESCKEYIKSFLAAIPIRELQADIKKGIIASTPLHHRLQIEFHYTESCPEEIRLPA

SEQ ID NO: 194193 - protein, 128 aa, Oryza sativa
  Clone ID: PAT_MRT4530_90259C.1.pep
MARGGRWVASPRRRAEDDEQPRRGAHGWPFNGRPPHGGARRMASGRVEGLRGGRSSGSLPTGWPLNRRPSHGGAEDCEQLSRGAQGQPVDVRSYRGVRTPHDGVRRWTPRGGARWEASGRSTGGLSRG

SEQ ID NO: 194194 - protein, 385 aa, Oryza sativa
  Clone ID: PAT_MRT4530_9025C.1.pep
MGRRALPPSSSSSSSSSTTTTSPELRRKRTAAPPPPPSPRRYRSISDVMRRSLPVDAAPPVARAYESTRCDVCGSGERDEELLLCDGCDRGRHTFCLRPIAARVPTGPWFCPPCAPRSKPVKRFPMTQTKIVDFFRIQKGAEDAEAEKYGLFQDVKKRRKRSLVMHKKRRRILPYVPTEDKVQRLKQMASLATAMTSSKMKFSNELTYMPGMAGRSCNQATLEEGGMQILPKEDKETIELCRTMQKRGECPPLLVVFDSREGFTVQADADIKDMTFIAEYTGDVDFLENRANDDGDSIMTLLLTEDPSKRLVICPDKRGNISRFINGINNHTLDGKKKKNIKCVRYDIDGESHVLLVACRDIACGEKLYYDYNGYEHEYPTHHFV

SEQ ID NO: 194195 - protein, 57 aa, Oryza sativa
  Clone ID: PAT_MRT4530_90260C.1.pep
LPSPRTIQNHITPPRERTNSGSPPLDERIRVWKKEQGKLARSSLSLSLASQIGRKKD

SEQ ID NO: 194196 - protein, 790 aa, Oryza sativa
  Clone ID: PAT_MRT4530_90261C.1.pep
MHLKQISMVHPDISFVSMGLGKTLLVVFSLLHALVLATSVGVEHATDDVSTYIIHVAHVHATPPTHASQCMDQHAIAHYTSFLQGILPSHLSEPTPRLVYAYSHAATGFAAKLAKHQATHIVHHPSILAIFPDKRNELQTTLSPSFLGLSPSNGLVQASNDGGTGAVIAVVDTGVYPKNRRSFTVDPSLPPPPSTFRGHCISTPSFNATAYCNNKLVGAKYFCRGYEAALGHPIDETQESKSPLDTEGHGTHTASTAAGSAVPGANLFGYANGTAQGMAVRAHIAIYKVCWAKGCYDSDILAGMDEAIADRVNVISLSLGGRSEQLYNEPTSVGAFNAIRRGIFVSAAAGNDGPDMSTANNLAPWMVTVGASSINRRFPANIILGNGETYVGTSLYSGRNIAASLIPLVYSGDAGSRLCEPGKLSRNIVIGKIVLCEIGYAPAQEAAVQQAGGVGAIVPSRNVYGQFFLSSPDLIPASTVTFADANAIYSYTQSAANPVARIEFRGTMISQSPYAPRVAAFSSRGPNRFVAEILKPDIIAPGVDILAAWTGENSPSSLSIDTRRVEFNIISGTSMACPHVSGIAAMLKVARPDWSPTAIKSAMMTTAYEVDNGGNAIMSSVNGRAAGPFELGSGHVDPNNALDPGLVYNATTDDYIAFLCGLGYTPNQIAIFTRDSTTTYCSRRPPIGDLNYPAFSMVFARSGGQVTQRRTVTNVGANTNAVYDVTITAPPGTRLTVAPMRLTFNAQRKTLDYAITLSAGSSNSPYNAWGDIVWSDGQHMVRSPVVATWK

SEQ ID NO: 194197 - protein, 267 aa, Oryza sativa
  Clone ID: PAT_MRT4530_90262C.1.pep
RNPGSTHASGNMNAALRCAKEYIDAIGGSVSKGWRLLALVLSAQQRYPEAEVATNAALDETAKLDQGSLLSLKAKLKVAQSSPMEAVEAYRALLALVQAQKNSSGSSKTDAEGQNDSVSEFEIWQGLANLYSSLSIWRDAEICLRKARALKSYSAATMHAEGYMLEARDQNKEALAAYVNAFSIELEHVPSKVAIGALLCKQGSRYLPAARCFLSDALRIEPTNRMAWLHLGKVHRNDGRINDAADCFQAAVMLEESDPVESFRSLA

SEQ ID NO: 194198 - protein, 72 aa, Oryza sativa
  Clone ID: PAT_MRT4530_90263C.1.pep
AHEMEEESQGYPLRRLLLPQRASTWPWACFKLLVVVVSFTPKKLLPGIWGVYSYTFRESPHNFGWLPPVDKQ

SEQ ID NO: 194199 - protein, 1610 aa, Oryza sativa
  Clone ID: PAT_MRT4530_90264C.1.pep
MAEKLPPSPSSASPSSVKEKIQKLGQGDGTQGVQGGGVSQDGNAAQEFFNNFQDWVDYAVHNALINQSGVLVNTLSNMMKSMVDGSMAESKATGPVYLPGGVFPNYRPLITDNQPVIQSAPLNAPSAQPTAPALAPAPAAPPSAPGQLVNPQLLQVVNQIIPEHLVHHVQPDGTVIPQVVPEHLPYLEWFERVPLPNRFKVPDFSKFLGQDSTSTYEHISRFLAQCGEASAVDALRVRLFRLSLSRSAFTWFSSLPYGSTNSWADLEKQFHSYFYSGIHEMKLSDLTSIKQKHDEPVHEYIQRFREMRNKCYSLSLTDAQLADLAFQGTIAPIREKFSSEDFESLSHLTQKVALHEQRFAEARKNSRKINHVCPYIYGSDSEDDDSEIAAAEWVRSKKVIPCQWVKSSGKEERYNLDITKAGTIFDLLLREKQIQLPAGHTIPSAEELGKKRYCKWHNSGSHTTNDCKVFRQQIQAAIEGGKIKFDDSKRPMKVDGNPFPVNMVHTAGRAADRGCARGFQINSAKIINKYQRKYDKQQEKHYGEDYDGFDPHWGCEFFRFCWNESMRLPSIEDCLGCSNIAESSSRSFNRSNRLRQTRVPVHQMLGLVNQDYSQEDNENRKIQWCPSGIFTKNKKRRVQRLRNREHFQEVEQEINHRLRRTKPRQEWRVKNQAPTGDEVTADEAKKLAKGKSVVTASVNMVFTLPAEFGIKQADIDEVEEESAKLVLSPEQAVFEKPEGTENRHLKPLYINGYVNVKPMSKMMVDGGAAVNLMPYTTFRKLGRNAEDLIKTNMVLKDFGGNPSETKGVLNVELTVGNKTIPTTFFCHRWEGQLKMENPSYYFEGIVEGSNVYIKDTVDDLDDKQGQGFMSADDLEEIDICPGDRPRPTFIVSRIQNQAEIKRLYDAGFIRPCRYAEWVSSIVPVIKKNGKVRVCIDFRDLNKAPPKDEYPMPVADQLVDAASGHKILSFMDGNARYNQIFMAEEDIHKTAFRCPGAIGLFEWVVMTFGLKSVGATYQRAMNYTYHDLIGLEIEDHIADLRKVFERTGKYGLKMNSTKYAFGVSAGQFLGLLVHERGIEITQRSVNAIKKIKPPENKTELQEMIGKINFVRRFISNLSGRLRHYLLSNECTVICKADVVKYMLSAPILKGRVGKWIFFLTEFDLRYESPKAIKRQAIANFIVENRDDSIGSVEIVPWTLFFDGSVCTHGCGIGLVIISPRGACFEFAYTIKPYVTNNQAEYEAVLKGLQLLREVEADTIEIMGDSLLVISQLAGEYECKNDMLIVYNEKYQELMKEFRLVTLKHVSREQNIEANDLAQGASGYKPMIKDVKIEVAAITADDWRYDVHQYLQNPSQSASRKLRYKALKYTLLEDELYYRTIDGKFGAIQRAPASAMNPIIKPWPFRGWGINMIGMINPPSSKGHKFILVATDYFTKWVEAIPLKKVDSGDAIQFVQEHIIYRFGIPQTITTDQGSIFVSDEFVQFADSMGIKMLNSSPYYAQANGQAEASNKSLIKLIKRKISDYPRQWHTRLAESLWSYRMACHGSIQVPPYKLIYGHEAVLPWEVRIGSRRTELQDGLTADEYYNLMADERKDLVQSRLRALAKVTKDKE

SEQ ID NO: 194200 - protein, 430 aa, Oryza sativa
  Clone ID: PAT_MRT4530_90265C.1.pep
MDWASLPADLLFSISSHLREPEDFVRFRAVCPQWRAAVSHKEHAFFQPWIMASRWLEDEYSENVLFYSLSTLKTIKVHVPDMKSRRIAASGSSHLIAIDKDDDLSAVLINPLSGKTTALPRLPKFFHDNGAHGWITGEGVITVVLNNWMSENMALWYRGGGITMKGWAVVPRWKLRLRVSHYLRKLAAYGDQMEMHLIDLGGDNEDSVVLLQETKKVELLGGCWPRSDEVFKATRPCHHEWFSLYRNVEQEEIPVHDIGNVMVVQSRDSCTRTYMIPASRDFAALGSRNAFYYLWKQFDAGGSYNALFKKREGGGGASPPPDLAESGGHGPAGGEAAAAGGTHGPTCHPQPPSIPAATAMGANVAVSPARFRLPRSQLTVWTGSPPPSRPKPPLVTQKPTPAEPPPPHIGAPPPPADPASPGHDFHLPDL

SEQ ID NO: 194201 - protein, 73 aa, Oryza sativa
  Clone ID: PAT_MRT4530_90266C.1.pep
WRNGGEGQQGCSPSVGPALVWASTRRGHASNVPEGCRLGLFLSSGRLEKLHRGRASQGGCQVGPGRCMWILLK

SEQ ID NO: 194202 - protein, 277 aa, Oryza sativa
  unsure (1)..(277): unsure at all Xaa locations
  Clone ID: PAT_MRT4530_90267C.1.pep
MASPPSSPSLPDAEAPPPPTSPSTVTGGAVSGTIPAAEAFAVHYPGYPSSPARAAQTLGGLPAIAKVRGSDPGARLELRFRPEDPYCHPAFGEPRMSAGLAQGRYRAAARRGGCACPERLPLRXVGPSLLHGRSKQACSVDAQKKKSSLFKDHTKIVVYVRMIWGCVQDQTPLNGIFEKATRVCISVNSHKISGENENRTFLSDNEDVMMLVPPLFSIKDKPTKIALLPSSNALSKSMQRGVVQHRWEMDIGPTLALPFNVQDILFYCCPVKFAFFP

SEQ ID NO: 194203 - protein, 43 aa, Oryza sativa
  Clone ID: PAT_MRT4530_90268C.1.pep
KKKKKKKKKKKKKKKKKKKKKKKKKKKRRKRNKKKKIIKNNEN

SEQ ID NO: 194204 - protein, 103 aa, Oryza sativa
  Clone ID: PAT_MRT4530_90269C.1.pep
MDPRAEESARGNHIKDGCNFCLVDSLENCVEKPAGFICECPSCDKARDMKVQRRNENWQIKVCKRIAAETNFPNEEIINLYLSDDNLDNGILFPNNTSFNISY

SEQ ID NO: 194205 - protein, 113 aa, Oryza sativa
  unsure (1)..(113): unsure at all Xaa locations
  Clone ID: PAT_MRT4530_9026C.1.pep
YSVYRLRGTENCGNWIHATPSRFPSKIFIRPPAAGGPHLPSLSSLSSSSLSTTVDAAGGVVSVVSIVVSERSGQAAPASSLLSSTSSRSRXATRSLSPFKGGGGGGGGGITDD

SEQ ID NO: 194206 - protein, 48 aa, Oryza sativa
  Clone ID: PAT_MRT4530_90270C.1.pep
CGSIDLSSGFSQEDPHGREKHSPASRCCRQLGSHPTVLSYLMDAFGDS

SEQ ID NO: 194207 - protein, 78 aa, Oryza sativa
  unsure (1)..(78): unsure at all Xaa locations
  Clone ID: PAT_MRT4530_90271C.1.pep
YGENHRSPGYYDGRYWTMWKLPMFGCTDATQVLKKLEKAKKVYHYALVGIIGFEKGEKFCLISFKDLIXXGCEESGGN

SEQ ID NO: 194208 - protein, 115 aa, Oryza sativa
  Clone ID: PAT_MRT4530_90272C.1.pep
TIHQSLKVYNMRLALSLQYVSGFLQLATCILSPLPPDYKNAAAQWAFLSYKNPSLAVLPGHFNRSVFVPFTDSELSDPSLAKDLDYINSTNFVAYDERLFHPLGPMSTHAKHTTS

SEQ ID NO: 194209 - protein, 117 aa, Oryza sativa
  unsure (1)..(117): unsure at all Xaa locations
  Clone ID: PAT_MRT4530_90273C.1.pep
IDLLLFTSKRERRHLHRXMAATXTAVAASXSVAGGLXRPLARXSSPAGRLKAASXAAARRAVXXXXSSSXXPVRREKASPAAAAAXDSRGGARGGGXGGAREWRSDAXPXAXLKNFP

SEQ ID NO: 194210 - protein, 1068 aa, Oryza sativa
  unsure (1)..(1068): unsure at all Xaa locations
  Clone ID: PAT_MRT4530_90274C.1.pep
MATSTRALLLLPLLLLFLLSRSLSLRADPGAAVSRIAFGSCANQSAPQPVWEAVVGFDPQVFIWLGDNVYGDNKRPFRVFGRERTVGPWRNVPRFYPSTEAELRRRYEMAKAKPGYAKLRERAQVIGTWDDHDYGLNDAGKEFGGKVTSQRLLLDFLDEAEDSSRRQQAGVYASYMFGPEGKRVKVILLDTRYHRDPLSSDGAVLGDPQWQWLERELHGPRSEITIIGSSIQNCFKIIQFSSYALQRNGVFFISGDVHFGEISRYDCGAQYPLYDITSSGLTQSVENSVPSVFQPLMRLVALLTPTTLRVFSPNCRYKSCTYGQPNFGAIEIDWNAVPPQIKLELRDVEGNSVGGVEFPISELDPSKAHAITKQGHSYQRHCALETELPWLVWHRLALLLFGTIAVLVIAVKDMKELVAWHVVRLQISNPIVMSIIVFCESGEPKVWNTLSCRNRQKQPLLADLCSSAFGAHGFSAQTASANCLIRFIRPRQSTSSSRCRGHPSLSIRRREQTGDGTTHAQGRMAAKIPVIDLRLAGEAPGEAARLRDAARRLGCFRVSGHGVPRELQAGMRAAVRALFDLPGDAKRRNADVIHGSGYMAPSAANPLYEAFGLYDAASPADVDAFCSCLDAPPHARRPRLHRRPAFVAAEWCLRLHGWPXLCRRCWASTTSPTGXCLRRRRLVSTPARLAYYAAAVGRLRLHRRPASVAADWCHRLYGWSVTPPFMGVHVFTDRLAFVXAADWCFRLHGWPXLCCRCWASTSSPTGLPSPPPTGVSACTAGLYAAVVGRLRLHRPACLXAADWCFRLHGWPIMPPLLGVYVFTDRLASTAADWCFRLHGWPXLCCRCWASTSSPTGXPRPPPTGVSXPAAASAADWCHRLHGWPVITPTDAIFFTAGYIAVTTNRHQYLQHKLPTFVMAADWFLHFHGCMILPVLIGLTIFIAATTTDGHHHLPSPTDYAAADWCFYLHNCASSLPVCFCCRRLVFTSLRQYNFVIMVERLHLYYLRHRQTLLLLLRKFYYFTNHDVFVNLDISACNAMLFYYNKWLSNIQDFYLDIFNTYLQSSDDY

SEQ ID NO: 194211 - protein, 1170 aa, Oryza sativa
  unsure (1)..(1170): unsure at all Xaa locations
  Clone ID: PAT_MRT4530_90275C.1.pep
QQRLHRRPTSVAADWCHRLYGWSVTPPFMGVHVFTDRLAFAAADWCFRLHGWPIMPPLLGVYDFTTGLPPSPPTGVLAYTVXVGHTTVDGHRHLHRRPASVAADWCPRLYGRLVTPPLMGIVIYTAGLPPSPPSGASAYTAGLLCRRCWASTTSPPACLHRRRVVPPPTRLAYYAAAVGRLRLHRRPASVAAEWCLRLHGWPIMPPLLGVYDFTAGLPPSPPSGASAYTAGLLCRRCWMSTSSPLAHLRCRRLVFPLTRLTYYAAISGHLRFHRRPPSSPPTGLISYAPGMDQSEHHHRLASAAADWCFRLHGWPIMPPLLGAYVFTXGLPSPPPTGVSACTAGLLGRRCWAPTSSPXPACLRRRRXWCFRLHGWPIMPPLLGVYVFTXGLPSPPPTGVSACTAGLLCCRCWASTTPPPACLRRRRLVSSPKRLVGHTTVHGRPRLHRPXAFAAADWCFRLHGWPIMPPLLGVAGLPPSPPSGASAYTAGLLCHRCWASTTSSPACLRRRRLVSSPIRLVGHTTVHGRLRLHRRPASVAADWCPRLYGWLVTPPFMGVYDFTAGLPPSPPTGVSAYTAGLLCHRCWASTTSPPACLRRRRLVSSPIRLVGHTTVHGRLRLHRRPASVAADWCLRLHGWPIMPPLLGVYDFTAGLPPSPPSGASAYTAGLLCRRCWMSTSSPLAHLRCRRLVFPLTRLTYYAAISGHLRFHRRPPSSPPTGVFIVIDGRLCSHIGHFCHHQGEYYKAKIQIQICIKWIHGFKLISYAPGMDQSEHHHRLAVVAADWCLRLYGWLVTTPLSGVYIFTTXFAFAAADWCHRLHGWPIMPPLLGVYVFTDRXPSPPPTGVSACTAGLXYATIVGRLRLHRPACXAAADWCFRLHGWPLCRRCWASTSSPTGXLRRRRLVFPPARLAFMPPLLGVYVFTDWXPSPLPIGVSACTAGLYAAIXWASTSSPTGRLVRRRLVLPPARLAYXPPLLGVYVFTDRXASSADDWCFRLHGWPIMPPLLGVYVFTDRXPSPPPTGVSACTVGLYAAVXWASTSSPTGLPSPLPTGVSACTAGLYAAIVGRLRLHRPACLRRRRLVFPPARLAFMPPLLGVYVFTDRPPRPPPTGASAYTAGLLCRRCWASTSSPTGHLDRRRLVFPPARLAYYAAVVGRLRLHRPAAASATD

SEQ ID NO: 194212 - protein, 98 aa, Oryza sativa
  unsure (1)..(98): unsure at all Xaa locations
  Clone ID: PAT_MRT4530_90276C.1.pep
XPXXVXDMXQXXXXCGRCAXNXFTQGXXMXMXXPXSKLTLSXGHKXWRYXASGGRSRXSGSPGXXEFXHEAFXMXLXXTRXRXQSXXSYXVXXLVXXK

SEQ ID NO: 194213 - protein, 967 aa, Oryza sativa
  unsure (1)..(967): unsure at all Xaa locations
  Clone ID: PAT_MRT4530_90277C.1.pep
AAAVGRLRLHRRPVSVAADWCPRLYGWLVTPPFMGVHVFTTGLPPSPPIGVSAYTAGLLCRRCWASTTSPPACLRRRRVVPPPTRLAYYAAAVGRLRLHRRPASVAAEWCLRLHGWPIMPLLLGVYDFTAGLPPSPPSGASAYTAGLLCRRCWASTTSPPACLRRRRVVPPPTRLAYYAAAVGRLRLHRRPASVAADWXPPPTRLAYYAAAVGRLRLHRRPVSVAADWCPRLYGWLVTPPFMGVHVFTTGLPPSPPIGVSAYTAGLLCRRCWASTTSPPACLRRRRVVPPPTRLAYYAAAVGRLRLHRRPASVAAEWCLRLHGWPIMPLLLGVYDFTAGLPPSPPIGASAYTAGLLCRRCWAFTTSPPACLRRRRLVSSPIRLVGHTTVHGRPRLHHGPASVAAEWCLRLHGWPIMPLLLGVYVFTAGLPPSPPIGASVYTAGLLCRRCWASTTSPPACLRRRRLVPPPTRLAYYAAAVGRLRLHRRPASVAADWCPRLYGWLVTPPFMGVHVFTTGLPPSPPSGASAYTAGLLCRCCWASTSSPPACLRRRRLVPPSTRLAYYAAAVGRLRLHRRPASVAAEWCLRLHGWPIMPPLLGVYDFTAGLPPSPPSGASAYTAGLLCRCCWASTSSPPACLRRRRLVPPPIWIQIRICIKGIHGFQLISYAPGMDQSEHHXRLAFAAADWCFRLHGWPXMPPLLGVYVFTDRLAFAAADWCFRLHSWPLXPPLLGVYVFTDRXPSPLPTGVSACTAGLYAAIVGRLRLHRPACXAAADWCFRLHGWPLCRRSWASTSSPTGXLRRRRLVFPPARLAFMPPLLGVYVFTDRXPLSPPTDVLACTAGLYAAVXWASTSSPTGXLRRRRLVFPPARLAFMPPLLGVYVFTDRXAASAADWCHRLHGWPVITPTDAIFFTAGYIAVTTNRHQYLQHNLPTFAMAADWFLHFHGCMILPVLIGLTIFIAGRLVCC

SEQ ID NO: 194214 - protein, 252 aa, Oryza sativa
  Clone ID: PAT_MRT4530_90278C.1.pep
MAENLLVLCTILAARMALAAADDWIPATATFYGGNDGSGTMGGACGYGNLYDQGYGLENAALSTALFNDGAACGQCYLIVCDTDKAGRWCKPRGAVTVTATNLCPPNWALPSDGGGWCNPPRRHFDMSQPAWERIGVYRAGIVPVLYRRVRCWRRGGVRFTVGGFDHFELVLVANVAGSGSVAAVSVRGAGTGWLQMSRNWGANWQSLAGLAGQPLSFGVTTTGGQYILFQDVAPAGWKFGQTFSTSKQFDY

SEQ ID NO: 194215 - protein, 164 aa, Oryza sativa
  Clone ID: PAT_MRT4530_90279C.1.pep
MASTARVAAALFLLLLGLSATAPLAARDLMSAAPSAKKQPAGRKPSVQPGYPGTNPGGGGGGGIPTIPGFGSIPGMGGGMGGFNVPGMGGGWGGGYGTPSGGYSRGGVVVPTVVCSDKGPCYRKKVTCPKKCFSSYSSSGKGYGGGGGGGGCTIDCKTKCTAYC

SEQ ID NO: 194216 - protein, 64 aa, Oryza sativa
  Clone ID: PAT_MRT4530_9027C.1.pep
HIEDHHLQRLHEGGVGDRLGRHLRCQKRPDNAAVDVVGTGGVQAPDGVAQHFLSLFFFSLSILI

SEQ ID NO: 194217 - protein, 525 aa, Oryza sativa
  unsure (1)..(525): unsure at all Xaa locations
  Clone ID: PAT_MRT4530_90280C.1.pep
MAGVLCHHCWWRHCLHQPAASVAADWCPRLYGWSVTPPFMGVNVFIDRLXPSPPPTGVSACTAGLLCRRCWASTTSPPAYLRRRRVVPPPTRLAYYAAAVGRPRLHRRPASVAAEWCLRLYGWLVTPPFMGVHVFTAGLPPSPPIGASAYTAGLLCRRCWASMTSPPACLRRRRLVPPPTRLAYYAAAVGRLRLHRRPASVAAEWCLRRXGWPIMPPLLGVYDFTAGLPPSPPTGVLAYTVGWSHHRSWACTSSPTGWPSPPPTGXQIQICIKGIHGFKLISYAPGMDQSEHHHRLASTVADWCFRLHGWPIMPPLLGVHVFTDRLAFAAADWCFRLHGWPLXPPLLGVYVFTDRXPSPPPTGVSACTAGLYAAVVGRLRLHRPAASSAADWCFHLHGXLLCRRCWASTSSPTGXLRRRRLVFPPARLXIMPSLLGVYVFTDRPPRPPSTGVSACTAGLLCCRCWASTSSPTGRRIRRXLVSPPARLASSLSLSLVATLLLAGSPTSSSSSCRLRLSSSTTQLYR

SEQ ID NO: 194218 - protein, 762 aa, Oryza sativa
  unsure (1)..(762): unsure at all Xaa locations
  Clone ID: PAT_MRT4530_90281C.1.pep
TGVSCATPFHYCRIHVSTVGAPGRGCVEFSIDECDGINSTSRRYYLRFCIVRSAAVDTTRRSNQSTERFNLLWLPPASLLSSPGSFWTSSLPPKIRPAPISRLRDHTPAALVAADWITRLHGWCAPSPLLMATXLFTAGLPPSPPSGASAYTAGLLCRRCWASTTSPPACLRRRRLVPLPTRLVYYAAAVGRPRLHRRPASVAAEWCLRLHGWPIMPPLLGVHDFTAGLPPSPPSGASAYTAGLLCRRCWASTTSPPACLRRRRVVPPPTRLVYYAAAVGRLRLHRRPASVAAEWCLRLHGWPIMPPLLGVYDFTAGLPPSPPSGASAYTAGLLCRRCWASTTSPPACLRRRRLVSSLNGSVRTSPPARLDRRRLVFPPARLAXMPPLLGIYVFTDRLAFATADWCFRLHGWPXMPPLLGVYVFTXGLPSPPPTGVSACTAGXLCRCCWASTSSPXPACLRRRQLVFPPARLAYYAAVVGRLRLHRXRLAFAAADWCFRLHGWPIMPPLLGVYVFTDRPPRPPPTGVSACTAGLLCRRCWASTSSPXPACLRRRRLVFPPARLAXYAAVVGRLRLHRPXAFAAADWCFRLNGWPFMPPLLGVYVFTDRPPRPPPTGVSACTAGLLCCRCWASTSSPTGRLDRRRLVFPPARLAYYAAVVGRLRLHRPAAASAADWCHRLHGWPVITPTDAIFFTAGYIAVTTNRHQYLQHKLPTFAMAADWFLHFHGCMILPVLIGLTIFIAATTTDGHHHLPSPTDYAAAD

SEQ ID NO: 194219 - protein, 884 aa, Oryza sativa
  unsure (1)..(884): unsure at all Xaa locations
  Clone ID: PAT_MRT4530_90282C.1.pep
MELISGVAGFVKPTEIKINGCHLGIHVFTNRLDFATADWIQIQICIKGIHGFKLISYALGMDQSEHHHRLAVVAADWCLRLYGWLVTTPLSGVYIFTAGLLSPPPTGVTAYTAGLLCRCCWASTSSPTGRLVRRRLVFPPARWPIMPPLLGVYVFTDRPPRPPPTGVSACMLAYYATVDGRLRLHRPACLRCRRLVSPSARLAXIMPSLLGVYDSTTGLPPSPPTGVSVCTAGLLCRRCWASTSSSTGRLVRRRLVFPPARLAXMPPLMGVYVFTDRLAFAAADWCLRLHGWPIMPSLLGVYDSTTGLPPSPPTGVSACTXGLLCHRXWASTSSPXPACLRRRRLVSPSARLAYYAVVVGRLRLHHRPASIAADWCFRLHGWPIMPPLLGVYVFTDRPPRPSPIGVSACTAGLLCRRCWASTTSLSAYLRRRQLVSSPKRLVXTPPFMGVHVFTDRLAFVAADWCSRLYGWMVAPPFIGIHDFTAGLPPSPPSGASAYTAGLLCRRCWASATSPPACLRRRRVVPPPTRLAYYAAAVRRLRLHRRPASVAAEWCLRLHGWPIMPPLLGVYDFTAGLPPSPPSGASAYTAGLLCRRCWASTTSPPACLRRXEWCLRLHGWPIMPPLLGVYDFTAGLPPSPPSGASAYTAGLLCRRCWASTTSPPACLRRRRAVPPPTRLAYYAAAVGRLRLHRRPASVAAERCLRLHGWPIMPPLLGVYNFTAGLPPSPPSGASAYTAGLLCRRCWASTTSPPACLRRRRVVPPPTRLAYYAAAVGRLRLHRRPASVAADWCLRLHGWPIMPPLLGVYDFTAGVPPSPPSGASAYTAGLLCRRCWASTTSPPACLRRRRVVPPPTRLTYYAAAVGRLRFHNRPPXVAADWCLHCY

SEQ ID NO: 194220 - protein, 165 aa, Oryza sativa
  Clone ID: PAT_MRT4530_90283C.1.pep
FIDIIISESNIRRSDGVQERGDGADGVVGRWRGGGGRGREGALAEVVQRLHPRRRRRRRPRGHDVSPPGEGRTDEDLARAPLVRFKYSVVLRPGRYRDNINAIVLPTTAMPQPLDRAVKHPMYLQKSVRNWNSRGNLNIFLVCTYTRIYGSWKMISSTAKWKQIC

SEQ ID NO: 194221 - protein, 157 aa, Oryza sativa
  Clone ID: PAT_MRT4530_90284C.1.pep
MGRGGGSSSSAAVAAGASSSSSSSSVAAAARRGAGRAGGGAPSGGGGGPRCQVERCGVDLSEAGRYNRRHKVCQTHSKEPVVLVAGLRQRFCQQCSRFHELTEFDDAKRSCRRRLAGHNERRRKSAADTAHGENCRHADQDAGRSHQGTGNPPFQIR

SEQ ID NO: 194222 - protein, 1030 aa, Oryza sativa
  unsure (1)..(1030): unsure at all Xaa locations
  Clone ID: PAT_MRT4530_90285C.1.pep
AAAVGRLRLHRRLASVAAEWCLRLHGWPPPSPPTGASAYTAGLLCRRCWASTTSPPACLRRRRLVPPPTRLAYYAAAVGRLRLHRRPASVAADWCLRLHGWPIMPPLLGVYDFTAGLPPSPPTGASAYTAGLLCRRCWASTSSPPACLRRRRLVPPPTRLAYYAAVVGRLRLHRRPASVAADWCLRLHGWPIMPPLLGVYDFTAGLPPSPPTGASAYTAGLLCRRCWASTSSPPACLRRRRLVPPPTRLAYYAAAVGCLRRHRRPASVAADWCLRLHGWPIMPPLLGVYDFTAGLPPSPPTGASAYTAGLLCRRCWASTSSPPACLRRRRLVPPPTRLAYYAAAVGRLRLHRRPASVAADWCLRLHGWPIMPPLLGVYDFTAGLPPSPPTGALAYTVGWSHHRXWASSSTPPACLRRRRLVSLPIRSVGHTTVHGRPRLYRPAGLRRXIQIQICIKGIHGFKLISYAPGMDQSEHHHRLASTAADWCFRLHGWPIMPPLLGVYVFTDRLAFAAADWCFRLHGWPLXPPLLGVYVFTDRPPRPPPTGASACTAXYYAAVVGRLRLHRPAASTAADWCFRLHGWPLCRRCWASTSSPTGRLVRRRLVLPPARLXIMPPLLGVYVFTDRXPSPPPTGASACTAGLYVAVXWASTSSPTGRLYRRRLVFPPARLAYXPPLLGVYVFTDRLAFAAADWCFRLHGWPLXPPLLSVYVFTDRXPSPPPTGASACTAGLYAAVXWAFTSSPTGLPSPPPTGVSACTAGLXYAAVVGRLRLHRPACLRRRRLVFPPARLAFMPPLLGVYVFTDRXPRPPPTGVSACTAGLLCRRCWASTSSPTGXLRRRRLVFPPARLAXYAAVVGRLRLHRPACXAAADWCFRLHGWPLCRRCWASTSSPTGXLRRRRLVFPPARLAYYAAVVGRLRLHRPACLRRRRLVFPPARLAFMPPLLGVYVFTDRPPRPPPTGASACTADLLCRRCWASTSSPTGRLDRRRLVFPPTRLAYYAAVVGRLRLHRPAAASAADWCHRLHGWPVI

SEQ ID NO: 194223 - protein, 840 aa, Oryza sativa
  unsure (1)..(840): unsure at all Xaa locations
  Clone ID: PAT_MRT4530_90286C.1.pep
QQRLHRRPASVAADRCHRLYGWSVTPPFMGVHVFTDRLAFAAADWCFRLHGWPICRRRWASTTSPPACLRRRRLVFPPTRLAXMPPLLGVYDFTAGLPPSPSSGASAYTAGLLCRRCWASTSSPLAHLRCRRLVFPPTRLAYYAAAVGRLRLHRRPASVAAEWCLRLHGWPIMPPLLGVYDFTAGLPSSPPTGVLACTAGLSCRRCWASTSSPTGWPSPLPTGVFAYTVDXFAAVNGLHHLHHWLGSTGADWCFCHHXMDCFVPTLATSAITKGNITKLSRHLFYSLYDIFPFPLPHYTNWSSIEXVSRGLQMLYHIFYNIHLDCLRHNLSTKVPIICSGKSKLTRGEIHIYKYFKILDFFSSIIFISDTTHPICLFCRIQIQICIKGIHGFKLISYALXWISQNITTGRLVRRRLVFSPARLAYYAAAVGRLRLHRPARXAAADWCPRLHGWPIMPPLLGAYVFTDRLAYFAADWCPRLHGWPXLCRRCWAPTSSPTGSPSSPPTGVHACTAGLXYAAAVGRLRLHRPARLCRRRLVSSPARLAFMPPLLGVYVFTDRLAFAAADWCFRLHSWPIMPPLLGAYVFTDRLAFAAADWCFRLHGWGASSPTGLPSPLPIGASACTAXYYAAVVGRLRLHRPAAASAADWCHRLHGWPVITPTDATFFTAGYIAVTTNRHQYLQHKLPTFAMAADWFLHFHGCMILPVLIGLIFFTAVTTTDGHHRLPLPTGYAAADXCFYLHNCASSLPVCFCCRRLVFTSSRRCNFVIMVEQLHLYYLRHWQTLLLLLRKFYYFTNHDVFVSLDISACDAMLFYYNKRLSNIQDFYLDIFNTYLQSSNDY

SEQ ID NO: 194224 - protein, 187 aa, Oryza sativa
  unsure (1)..(187): unsure at all Xaa locations
  Clone ID: PAT_MRT4530_90287C.1.pep
FMLTNKENTSRINKAHSQGILSMPIPQVEXKFPIIQYADDILIILKACQKELFXLKGITQPFAYSTTPSGVFENFHKSCTMPIHVNEEKLEILTGTFRCNIVSMPFTYLGLPVGTTKPRIVEFPPSPLIDRVERRLMAITMFLNHGQRLTLVTLVNFVLSSPPTFYMCTLKLPKKVIEHIDAPLLRW

SEQ ID NO: 194225 - protein, 846 aa, Oryza sativa
  unsure (1)..(846): unsure at all Xaa locations
  Clone ID: PAT_MRT4530_90288C.1.pep
PSWLVYVAAVGCIRLHRRPASVAADWXPPPTRLAYYAAAVGRLRLHRRPASIAADWCLRLYGWLVTPPLLGVYVFTTGLPPSPPTGASAYTAGLLCRCCWASTTSPPACLRRRRVVPPPTRLAYYAAAVGRLRLHRRPASVAVEWCLRLHGWPIMPPLLGVYDFTAGLPPSPPSGASAYTAGLFCRRCWASTTSPPACLRRRRVVPPPTRLAYYAAAVGRLRLHRRPAPVAAEWCLRLHGWPIMPPLLGVYDFTAGLPPSPPSGASAYTAGLLCRRCWASTTSPPACLRRRRVDPPPTRLAYYAAAVGRLRLHRRPASVAAEWILRLHGWPIMPPLLGVYDFTAGLPPSPPSGASAYTAGLLCRRCWASTTSPPACLRRRRVVPPPTRLAYYAAAVGRLRLHRRPASVAAEWCLRLHGWPIMPPLLGVYDFTAGLPPSPPSGASAYTAGLLCRRCWMSTSSPLAHLRCRRLVFPLTRLTYYAAISGHLRFHRRPPSSPPTGVFIVIDGRLCSHIGHFCHHQGEYYKAKIQIQICIKGIHGFKLISYAPGMDQSEHHHRLAFAAADWCFRLHGWPIMPPLLGVYVFTDRXASAAADXCPRLHGWPLXPPLLGVYVFTDRXPSPPPTGVSACTAGLYAAVVGRLRLHRPACXAAADWCFRLHGWPLCRRCWASTSSPTGRLVRRRPMSSPARLAFMPPLLGIYVFTDRPPRPPPTDVLACTAGLYAAVXWTSTSSPTGXLRRRRLVFPPARLAFMPPLLGVYVFTDRLAFAAADWCHRLHGWPVITPTDATFFTAGYIAVTTNRHQYRQHKLPTFAMAADWFLHFHGCMILPVLIGLIFFTAGRLVCC

SEQ ID NO: 194226 - protein, 1192 aa, Oryza sativa
  unsure (1)..(1192): unsure at all Xaa locations
  Clone ID: PAT_MRT4530_90289C.1.pep
MHRRRLQPRRCLPAVLRRADGHQRRPRLRPPPTPLRLRINLSWNGSVRTSPPARLDRRRLVFPPARLAYYAAVVGRLRLHRPACLRRRRPMSSPARLAFMPPLLGVYVFTXGLPSSPPTDVLACTAGLYXRRCWASTSSPXPACLRRCRLVFPPARLAXYAAVVGRLRLHRPAASSAADWCFRLHGWPITPPLLGVYVFTDRPPRPPPIGVFAYTVGWSHHRCWASTSSPTGLPSSPPTGVSACTAGLLYHHCWASTSSPTGRLRXRRRLVFPPARLAYYAAVVGRLRLHRPXAFVAADWCLRLHGWPIMPPLLGVYVFTDRPPPSXPPTGVSACTAGLLCHRCWASTSSPTGRLRXRRLVFPPARLAYYAAVVGRLRLHRXRLAFAAADWCVRLHGWPIMPPLLGVYVFTXTGLPSPPPTGVYVVTDRLAFAAADWCFRLHGWPXMPPLLGVYVVTDRLAFAAADWCFRLHGWPLCXPLLGVYVFTDRPPRPPPTGASACTAXYYAAVVGRLRLHRPAASTAADWCFRLHGWPIMLPLLGVYVFTDRPPHPPLTGVTACTAGLLCRRCWASTTPPPACLHRRRLVFPPARLAFMPPLLGVYVFTDRLAFAAADWCFRLHGWPLCRRCWASTSSPTGLPSSLPTGVSACTAGLYAAVVGRLRLHRPACLRRCRLVFPPARLAFMPPLLGVYVFTDRLAFAAADWCFRLHGWPLCRRCWASTSSPTGRLVRRRLVLPPARLAYYAAVVGRLRLHRPACLRRHRLVSPSARLAYYAAVVGRLRLHRPACLRRCRLVFPPARLAFMPPLLGVYVFTDRLAFAAADWCFRLHGWPLCRRCWASTSSPTGRLVRRRLVLPPARLAYYAAVVGRLRLHRPACLHRCRLVFPPARLAXYAAVVGRLRLHXRLAFAAADWCFRLHGWPLCRRCWASTSSPXPACLRRRRLVFPPARLAFMPPLLGVYVFTDRXASSAADWCFRLHGWPIMLPLLGVYVFTDRXPSPPPTGVSVCTAGLLCRRCWASTSSPTGLPSPLPTGVSACTAGLYAAVVGRLRLHRPACLRRRRLVFPPARLAFMPPLLGVYVFTDRPPRPPPTGASACTAGLLCCRCWASTSSPTGLPSPPPTGVSVCTAGLLCRRCWASTTPPPACLHRRRLVFPPARLAIMPSLLGVYDSTTGLPPPSPTGVSACTLAYYATV

SEQ ID NO: 194227 - protein, 91 aa, Oryza sativa
  Clone ID: PAT_MRT4530_9028C.1.pep
MVTGRHHNMSDCDIDATFYWTGMAIIAIVTVLLPTLLGVTALFAKLGLMVAGGVVLASFMTYASEHIAISAFYKGQRDRNVSRSRSICFLF

SEQ ID NO: 194228 - protein, 71 aa, Oryza sativa
  Clone ID: PAT_MRT4530_90290C.1.pep
MDISRANEDYTSYGPVVEMSWHRAERQHRSLVSIDGALEVWGAAPTTIALRKCHPLAVSFPLDLDLPVRWL

SEQ ID NO: 194229 - protein, 71 aa, Oryza sativa
  Clone ID: PAT_MRT4530_90291C.1.pep
DRRGPLWSKISHIILGKAVFGPNFCTAHIAAIPDEHQETPTSRDSLGLTPSSRRTELWHIPFRISRSLHCN

SEQ ID NO: 194230 - protein, 166 aa, Oryza sativa
  unsure (1)..(166): unsure at all Xaa locations
  Clone ID: PAT_MRT4530_90292C.1.pep
AALPVRPPPAGARPPPPAGCRPPSLPCFSFRPPGSGLASAASLGPRLRXFHPPRPPPSRAPASPPCASLLPLHPSGGAPGGGGPVPRALAPPPPAPRRLPPHGGGGVLLTAPSWFPRPRRPAPHCSRPRLLAPLARPGSGSRSAPPHLPPALLSSRLRSSATWRPP

SEQ ID NO: 194231 - protein, 493 aa, Oryza sativa
  Clone ID: PAT_MRT4530_90293C.1.pep
MGSKDGSGAASSGGGGGFFSSIAAGVRSLGTAVHKSVNGLVGYEGLEVINPDGGTEDAEAEALGFSLSPVDHLQIARAMGSKEGSGAASSGGGGGFFSSIAAGVRSLGTDVHKSVNGLVGYEGLEVINPDGGTEDAEAEALRGRWKQEDRDSYWKMMHKYIGADVTSLVTLPVIIFEPMTMLQKMAELMEYCELLDISFIAEQVSHHPPMGAAHCENAHFTYDITSKLKTKFLGNSLEVYPLGRTRVSLKKSGVKLELVPPLTKVNNLIFGRTWVDSPGEMVLTNLTTGDKVVLLFQPCGWFGAGRYEVDGYVYSAAEEPKIMITGKWNQSMSCQPCDQEGDPLPGTELKEIWRVAPTPPNDKYQYTHFAHKINSFDTAPKKLLASDSRLRPDRYALEKGDMSKSGSEKSRLEEQQRAEKRTREAKGEQFTPRWFNRTDEIAPTPWGELEVYEYNGKYTEHRAAIDSSSVADDDTDVTSIEFNPWQYSSSSSQ

SEQ ID NO: 194232 - protein, 248 aa, Oryza sativa
  Clone ID: PAT_MRT4530_90294C.1.pep
MKASNYVCRCRPENRRNKGWAYYSSLSCVNFTLFYLKSRPFLQRGEILEDAHDKKDELRAEDLELKLNEPFLNFMRLRLIPQWGQGFTSECQLKTAQDQLEWHSQIKPTRLPVLALHIGNKKFARTNECDIFVKFFYHKKSVIFQMSKDKLCRKVDIPFDDITSFCFVFGQQSDILTIEVKSSLIPLSAAKPLPGKFLDWKVDYSKDDEYYFPESKSLWVEAEKGSLEKTYAKLKGTRRYKSEKKLFF

SEQ ID NO: 194233 - protein, 197 aa, Oryza sativa
  Clone ID: PAT_MRT4530_90295C.1.pep
MEETAAAAAEKATSYSYWVREATGDAAPLPAPRKIDAADLAAKPAPTTLGSVWNKAGTWEEKNLNSWANGRIKDLLGSLDPLEFSTGKASVYEVSKCSGDAFLVTVRNKKRVGYTYELGLKFKGEWLIKEENKKVKGYLDIPEFSFGELEDLEVQISFTDIKDLSSDNKAQISKDLKSFLAPIREKLRKFEEELKDR

SEQ ID NO: 194234 - protein, 225 aa, Oryza sativa
  Clone ID: PAT_MRT4530_90296C.1.pep
MEETAAAAAEKATSYSYWVREATGDAAPLPAPRKIDAADLAAKPAPTTLGSVWNKAGTWEEKNLNSWANGRIKDLLGSLDPLEFSTGKASVYEVSKCSGDAFLVTVRNKKRVGYTYELGLKFKGKQPLVLEFTSSHELSPAENWHSWEYSSGEWLIKEENKKVKGYLDIPEFSFGELEDLEVQISFTDIKDLSSDNKAQISKDLKSFLAPIREKLRKFEEELKDR

SEQ ID NO: 194235 - protein, 122 aa, Oryza sativa
  Clone ID: PAT_MRT4530_90297C.1.pep
HRSTSPRSIVRRRFPFFSASPPPRSIVRRRGLPRRFLAPPPSWSSLEPPQPAALAAGLLTSSRAVPPLPPSPSAVTLRRRPFSPSIPVAVSLPVSQATVPSRRLGRSRLISPFAAPPSSAAA

SEQ ID NO: 194236 - protein, 66 aa, Oryza sativa
  Clone ID: PAT_MRT4530_90298C.1.pep
FLDASIQDYQDYQRKRQETVKELSVDLISQHHNETVAIRTLSEPTSQHHKRPKYEYKPGAQRTNFQ

SEQ ID NO: 194237 - protein, 128 aa, Oryza sativa
  unsure (1)..(128): unsure at all Xaa locations
  Clone ID: PAT_MRT4530_90299C.1.pep
MASINRPIVFXTACLLLLGDGSLAQQLLGQSTSQWQSSRRGSPRGCRLDRLQAFEPIRSGRXQAGTTDVFDVSXEVFYCTGVYVGRRGIEPRGLLLPHYTRGAXVRYIIQGERYXTGPTIPGWTETYQ

SEQ ID NO: 194238 - protein, 51 aa, Oryza sativa
  Clone ID: PAT_MRT4530_9029C.1.pep
SASPSCRPADVHRSRRLRAAFRAVCPADYRPRRMAPLPFLQNVCKLTSTRS

SEQ ID NO: 194239 - protein, 107 aa, Oryza sativa
  Clone ID: PAT_MRT4530_902C.1.pep
MDFTATNAAEPIAPTTPSQGSSTRASAAVAVDDVDVDLGILGATATAARVDEPRLVVVRVVVPTLDYEQRTALRWSSLYRRIVVGHGGRPVRRTLRTWDEDERCLGK

SEQ ID NO: 194240 - protein, 100 aa, Oryza sativa
  Clone ID: PAT_MRT4530_90300C.1.pep
RPKIGQPNLLKIRGNVFEEITVEGETIQSSRWPCTRSFADPVNFFRDKNSHERSDSPSLTADSAAKNNSPRTDSSPKNSASALATENNLTPGKRQPSKKI

SEQ ID NO: 194241 - protein, 63 aa, Oryza sativa
  Clone ID: PAT_MRT4530_90301C.1.pep
EKIPLWTGPNFWVLNRNPLWAHLPRSGLILGGNFNLSPFYFGVFWAFAHFATCRWFGVHIKPL

SEQ ID NO: 194242 - protein, 1408 aa, Oryza sativa
  unsure (1)..(1408): unsure at all Xaa locations
  Clone ID: PAT_MRT4530_90302C.1.pep
MFRQLARQQQRLHRRPASVAADWCHRLYGWSVTPPFMGVHVFTDRLAFAAADWCFRLHGWPIMPPLLGVYDFTTGLPPSPPTGVLAYTVXVGHTTVDGHRHLHRRPASVAADWCPRLYGRLVTPPLMGIVIYTAGLPPSPPSGASAYTAGLLCRRCWASTTSPPACLRRRRVVPPPTRLAYYAAAVGRLRLHRRPASVAAEWCLRLHGWPIMPPLLGVYDFTAGVPPSPPSGASAYTAGVLCRRCWASTTSPPACLRRRRLASSPIRLVGHTIVDGRLRFHRPACFRRRLVFSPIRLADFAAVNGLHHLHHWLGSTGADWCFWIHGFKLISYAPGMDXQNITTGSPSSPPTGVFAYTVGVFTDRPPCXRRRLVFPPARLAXYAAVVGRLCLHRPXPSSAADWCFRLHGWPIMTPTDAIFFTAGYXPSPLIGVIIFKRKLSTSAADYCFHHCQLVISPSWLTYYANTDERLRHYHRPXNTTIDWILHLHDWWISSSPLMHVYIFTVGLLLSPPTGILAFMDGLLCRHXWASSSSSPXCIVYHRLIISLPWLHNFIAGRLHIHXLADLTVADWFLRLYIGSLVSSRLASAIITAGLPPSPPTGVLAYTVGWSHHHSWASMFSPTGCLVRCRLVFPSARLAYYMLXRCWASVDWCPRLYGWLVTPPYMGVYVFTXGWPSPPPTGVSACTAGLLCRRCWASTTSPPACLCRHXLVFSPIRLADFAAVNGLHYLHHWLGSTXPTGVFVTTDRLLHSHIGYFCCHRGXYDKAKIQIQICIKGIHGFKLISYASGMDQSEHHYRLAXSSAAGWCLRLHGWPIMPXLLGVYIFTDRXASSAADWCLRLHGWPIMSPXLLGVYVFTDRPPRLPPTGVSACTAGLXYAAVVGRLRLHRPAASSAADWCLCLHGWPIMPXRCWASTSSPTGRLVCRRLVSSPARLAYYAXPLLGVYVFTDRXPSPPPTGVSAYTAGLXYAAVCWASTSSPPACLRRRRLVSSPIRLVXTPSLMGVFAFTDRLXLTAADWCFRLHGWPIMPPLLGVYVFTDRXPSSPPTGVSACTAGLLCRRCWASTSSPTGLHSPPPTGVSACTAGLYAAVVGRLRLHRPACLRRCRLVFPPARLAFMPPLLGVYVFTDRPPRPPPTGASACTVDLLCRRCWASTSSPTGRLDRRRLVFPPARLAYYAAVVGRLRLHRRPASVAADWCLRLHGWPXLCRRYWASTTSPPACLRRRRVVPPPTRLAYYAAAVGRLRLHRXACLRRRRLVPPPTRLAYYXRCVYDFTAGLPPSPPSATTTDGHHRLPPPTGAFIFTAAXLVFTSSRQHNFVIMVERLHLYYLRYQQTLLLLLHKFCYITNHDVVVNLDISACDAVLFYYNKWLSNIHDFYLDIFNTYLQSSNNYSTTRCYSSRLYVQLFSN

SEQ ID NO: 194243 - protein, 157 aa, Oryza sativa
  Clone ID: PAT_MRT4530_90303C.1.pep
AKRGGALTVSPSGRGGEGPPGGASPNGANKSRGGVQKTNRPPPGAGRNTDPEGPPGFPGGNPPVGPPPLKLVSPPIRPPGLYTEAPGPQGAGKAEGKPILNRGPPPPPQKEGKKRNKKKGAGPPARKKKKKKKKKKKKKKKKKKKKKQKKKIKKKQK

SEQ ID NO: 194244 - protein, 794 aa, Oryza sativa
  Clone ID: PAT_MRT4530_90304C.1.pep
MNPFYAYLDLDLSFVIFPLVMAEVANVGTKSSINNNEDTSRRRRRRSTVKAKMPTNGGIIGQPCKRKHQSTATKVSQRLSFPLTDLDQVREEEVEEVVDGKEVKTPKAKTKSATHEIDSIALVDGKLDATPTWRANCRNMNSAIIKGGSARDLKVDGCGDKGFRQVQALSMRALRFTVHIFYILPPFHNGNSKRAGLVGVGVWQSREAAKRGSKLRTTPTRDESSASIKAAGEESGGVDGKRVLSPKEETIQFIMSGGSGDSSPSSGRASFSSLSGLKDLELSSESGCLSIVVLGASGDLAKKKTFPALFHLFQQGFLQSGEVHIFGYARSNISDDGLRERIRGYLKGASDEHISQFLQLIKYVSGSYNSGEGFASLNNAISENETSKNNKPGSSRRLFYLALPPSVYPSVCKMIRSYCMNPSSHSGWTRVIVEKPFGKDLESAEELSAQLGELFNEQQLYRIDHYLGKELVQNLLVLRFANRLFLPLWNRDNIANVQIVFREDFGTEGRGGYFDQYGIIRDIIQNHLLQVFCLVAMEKPVSLKPEHIRDEKVKVLQSVTPIKHDEVVLGQYDGYKDDSTVPDDSNTPTFASLVLRVNNERWEGVPFILKAGKALNNRKAEIRVQFKDAPGDIFKFLSAIVLLLPMVSKTLFLFHPDKGKKQGRNEFVIRLQPSEAMYMKLTVKKPGLEMATEQSELDLSYGLRYQDVKIPEAYERLILDTIRGDQQHFVRRDELKAAWEIFTPLLHDIDDGKVKALPYKPGTRGPPEADELSKRMGYVQTHGYVWIPPTLSKF

SEQ ID NO: 194245 - protein, 142 aa, Oryza sativa
  Clone ID: PAT_MRT4530_90305C.1.pep
MTTPGANPPPQHLRGSRKKQTQPRRQLPKVIPRQRPTAPKTVIGRWSNYCGLAARENFGILHKDIGKVTKAEKERAWTATEKWFTFPAEAKDRLKWKAFHKMGYIGKEAIWAQEDAAAAAANVPAPFSDIPEQGARNWSRAR

SEQ ID NO: 194246 - protein, 41 aa, Oryza sativa
  Clone ID: PAT_MRT4530_90306C.1.pep
MRAATPKVPSNHQAKKQEPSTNSSISHLYLKPRNEYSAPPT

SEQ ID NO: 194247 - protein, 1030 aa, Oryza sativa
  unsure (1)..(1030): unsure at all Xaa locations
  Clone ID: PAT_MRT4530_90307C.1.pep
WASSSTPPVCLRRRRLVSPPIRSVGHTTVDGHRHLHRRPASVAADWCPRLYGRLVTPPLMGIVIYTAGLPPSPPTGVPAYTVGWSHHRSWASTTSPPACLRRRRLVPPPTRLAYYAAAVGRLRLHRRPASVAADWCPGLYGWLVTPPFMGVYDFTAGSPPLPPSGASAYTXGLLCRRCWASTTSPPACLRCRRVVPPPTRLVYYAAAVGRPRLHRRPASVAAEWCLRLHGWSIMPPLLGVHDFTAGLPPLPPSGASAYTAGLLCRRCWASTTSPPACLRRRRVVPPPTRLAYYAAAVGRLRLHRPAASSAADWCLCLHGWPIMPPLLGVYDFIAGLPPSPPSGASAYTAGLLCCRCWMPTSSPLAHLRCRRLVFPLTRLTYYAAISGHLRFHRRPPSSPPTGVFIVIDGRLCSHIGHFCHHQGEYYKAKIQIQICIKGIHGFKLISYAPGMDQSEHHHRLASTAADWCFRLHGWPXMPPLLGVYVFTDRLAFAAADWCFRLHGWPIMPPLLGAYVFTDRXPSSPPTDVLACTAGLYAAVVGRLRLHRPACXAAADWCFRLHGWPIXRRCWASTSSPTGXLRRRRLVSPPARLAFMPPLLGVYVFTDRXPSPPPTGVSACTAGLLCRRCWASTSSPTGXLRRRRLVSPPARLAFMPPLLGVYVFTDRLAFAAADWCFRLHGWPLXPPLLGVYVFTDRXPSPPPMVSRCTXGIYAAVVWAFYVFHGPGLPLPPQMGSSVGRAGIYPAVVGRLRLHRPACLRRRRLVSPPARLAXMPPLLGVYVFTDRPPRQPPTGVSACTAGLLCRRCWASTSSPTGXLRCRRLVFPPARLAYYAAVVGRLRLHRPAASSAADWCFRLHGWPXLCRRCWASTSSSTGXLVHRRLVFPPAXWPVMTPTDAIFFTVGYVAVTANMRLHRPAXLVHRRLVFPPAXLACYDADXMLSSSRLATSPSPLICVIIFNASCLRLPPTGAFIVTIARLHYQFASVTSSWQCNFVIMDFYLDIFNTYLQSSNDYSTIRSYNSRLYVQLFPN

SEQ ID NO: 194248 - protein, 379 aa, Oryza sativa
  Clone ID: PAT_MRT4530_90308C.1.pep
MAEKFSSKPHIYNGVDFDYWKKKMESYITSQGYDVWMKVARVYEIPERIETIAQKTDFENNCKAQNILLSGISQSNFDRVSHLETANEIWKALNNFHTGSTNIKELQKDVFKKDYIKFEMSSGESLDDYLGRFNKILSDLRSVDDSCDVNYSQSEIARHFMNGFDMIVCDVKVTSIQESVDMNTLILDVLYRKEDDHLVAFIVEDLNKKQFKNMKMKKFYQKALDEAFAAVQESSDVEFESDEDDDKGNKGKNDVCLMARSVDEDSDCDNEPCAAVVSVVVVARGGRHRGRQVVAVLVRRFTAAEDRRSTVAAVDPISAAASSSSPTPSVAFPPLFWSPVSSPRRPLPVGVLSSLSQPLTGGPHLSVSSSSSGRRRPKP

SEQ ID NO: 194249 - protein, 47 aa, Oryza sativa
  Clone ID: PAT_MRT4530_90309C.1.pep
RETAGSISLTSAESASAKSTGRPKQPAILLHITEWGANMAYDRWTTI

SEQ ID NO: 194250 - protein, 517 aa, Oryza sativa
  Clone ID: PAT_MRT4530_9030C.1.pep
MEVNGGGAAGLPEAWSQVRAPVIVPLLRLAVAVCLTMSVLLFLERMYMAVVISGVKILRRRPDRRYRCDPIPDDDPELGTSAFPVVLIQIPMFNEREVYQLSIGAVCGLSWPSDRLVVQVLDDSTDPVIKEMVRIECERWAHKGVNITYQIRENRKGYKAGALKEGMKHGYVRECEYVAIFDADFQPDPDFLRRTIPFLVHNSDIALVQARWRFVNADECLMTRMQEMSLDYHFTVEQEVSSSVCAFFGFNGTAGVWRVSAVNEAGGWKDRTTVEDMDLAIRASLKGWKFVYLGDVQVKSELPSTFKAFRFQQHRWSCGPANLFRKMLMEIKVTIWKKIHVIYNFFLIRKIIAHIVTFAFYCLIIPATIFVPEVRIPKWGCVYIPTIITLLNSVGTPRSFHLLFFWILFENVMSLHRTKATLIGLLEAGRANEWVVTEKLGNALKMKSSSKSSAKKSFMRVWDRLNVTELGVAAFLFSCGWYDLAFGKDHFFIYLFFQGAAFFIVGIGYVGTIVPQS

SEQ ID NO: 194251 - protein, 553 aa, Oryza sativa
  unsure (1)..(553): unsure at all Xaa locations
  Clone ID: PAT_MRT4530_90310C.1.pep
QQRLHHRPASVAADWCPRLYGWLXPIMPPLLGVYDYTAGLPPSPPTGVPAYTVGWSHHRXWASSSSPPAAGXCLRRRRVVPPPTRLTYYAAISGHLRFHRRPPXVAADWCLRLHGWPIMPPLLGVYDFTAGLPPSPPSGASAYTAGLLCRRCWASTTSPPACLRRRRLVSSXPIRLVGHTTVHGRLRLHRRPASVGADWCLRLHGWPIMPPLLGVYDFTAGLPPSPPTGASAYTAGLLCRRCWASTTSPPACLRRRRLVXLRLYGWLVTPPFMGVYDFTAGLPXCWMSTSSPLAHLRCRRLVFPLTRLTYYAAISRHLRFHRRPPSSPPTGVFIVIDGRLCSHIGHFRHHQGEYYKAKIQIQICIKGIHGFKLISYAPGMDQSEHHXRLAFAAADWCFRLHGWPIMPPLLGVYVFTDRLAFAAADWCFRLHGWPLXPPLLGVYVFTDRLPRPPPTGVSACTAXYYAAVVGRLRLHRPAASSAADWCFRLHGWPIXRRCWASTSSPTGHLDRRRLVFPPARLAYYXPLLGVCVFTGRPPHPPLTDVTASTAGLL

SEQ ID NO: 194252 - protein, 1136 aa, Oryza sativa
  Clone ID: PAT_MRT4530_90311C.1.pep
MDISEANEGYASCGSVIEMSRQMKTTRVGARTTKDGLNARRDLEDMGVRSELHPITTESGRKIIDPEGLDELQAELVRTLCHLEMYFPPTFFDIMEHLPVHLVRQTKCCGPAFMTQMYPCERYLGILKGYVWNRSHPEGSIIESYTTEEAIEFCVDYMSETSSIGLPRSHHEGRLDGVGTVGRKTIRLDRKVYDKAHFTVLQHMTEVVPYVDEHLAVIRQENPGRSESWVRNKHMSSFNEWLKNRIARLQNLSSETLQWLSQGPEWSATTWQGYDINGYTFHTVKQDSKCTVQNSGLRIEAASDGGRRDQYYGKVEQILELDYLKFKVPLFRCRWVDLRNVKVDNEGFTTVNLANNAYKDEPFVLAKQVVQVFYIVDPCNKKLHVVREGKRKIVGLDNIADEDDYNQHVHGIGQEIPLEEEEEEDEVQYARPSQVTSPVTAQSVGPVTGGLTCDGSTVGARHRIAAGTTYVDVGRDKCKPTAPRTVIGRWSNCCGLAARENFGILHKDIGKVTEAEKERAWTAMEKWFTFPAEAKDRLKRKAFQKMGKAWKNWKSKLFTEFVNPPGNHTSFDEYPQITEAVWEEFCSLKTTQEFRELSEAHRVLQQRNEHPHRLGTAGYIGKEAIWAQEDAAAAAANVPAPFSDIPEQRARNWARARGKVNPDGSVTFENKSDAIVYQELLGLVAEQASQSEVESAPKRREDDILTKALGTKEHPGRTRGIGSDVPWKHGLPQYSSQYRKRKVSKEERDARLKAELKVEVIQELEASMNARVEERVNKVLADMNIPRVTTPAVQPTPRVQHDASPSQHRSSCASTEVPAPGLPIAPLAAVDHIEGVAQCVLLARVHPTFAPEVAEGMAFKPSVTDKVHGADLLAGYAKVSIDTVKDTWSGYPLPVPPNDEIMTLGDARKTFIQWPKEDIVVKMTPRPSRPTELTPPKSKLSIEAPRGPALSVPHSPGGADMDLADIAQSLAPIKTTRKADSSPPLVKGQKRERGKGKVGELAPEPKRGKAATSMPVSKSGKVVRAPAQFELGMPLVEDNVGFLDPSMVNEVNLRQSFTEVVDYVNREITKALNMAWGPYVEKGGRHKEGKNELYHDTKFACAQQIGDQCGFHVCHNMSTLLREVKDFDPEVVANGE

SEQ ID NO: 194253 - protein, 1059 aa, Oryza sativa
  Clone ID: PAT_MRT4530_90312C.1.pep
MNSAIIKGGSARDLKVDGCGDKGFRQVQALSMRDYSKAEYFNHLCHDLPSTFTKSEDCGGLKNKVSSNELWAPTSIPPQVTYPNMMEWFEELGVEMELSDMSFSVSAQLQDGDEQTMEWGSRNGLAGLLAQKTNAVSPAFWRMIREILKFKDDVLTYLEEHDKNPDLDRNETLGHFVQSHGYSRLFQQAYLVPICACIWSCPSQGVLGFSAFFVLSFCRNHHLLQLFGRPQWLTVKGRSHTYVNRVREELESLGCQIKTGCEVQSVSALEGGGYRVVEAGGTEEAYDSIIFAVHAPDALNILGDEATHDERRILGAFQYVYSDIYLHCDKSLMPRNPSAWSSWNFLGTTTTGVCVTYWLNLLQNIEQSAGRGRRPFLVTLNPPRVPDHVLLAWKTSHPVPSVAAAAAAGELRRVQGCRGLWFCGAYQGYGFHEDGLKAGMAAARGLLLAANGGAGERRLLANPRQMVPSWTEAGARLLVTRFLAGYVSVGNLTLLEEGGTMFSFGEAGKKCQAKCVMRVHDPLFYWKVATEADLGLADAYINGYCSFVDKKQGLLNLLLILIANRDANKQSSTSTSRIRGWWTPMLLTAGVASAKYFLRHVSRKNTVTQTRQNISQHYDLDEDESLEAAQQRKVSLLIHKARVERDHHVLEIGSGWGSLAIQVVKQTGCKYTGVTLSEEQLKYCQRKVKEAGLEDHMTFLLCDYRQIPTVRKYDRIISCEMIEGVGHEYMDDFFGCCESLLAQDGLFVLQFISIPEERYEEYRRSSDFIKEYIFPGGCLPSLSRITSAMSTSSRLCIEHLENIGYHYYPTLIRWRDNFMANREEIKSLGFDDKFIRIWEYYFIYCAAGFKSHIFSSIIEFLFLKQDVQNMATIPNDIARLLLEKLLSRATESGQLTTIGSCHARFKTSLYADDAAVFLNPCQNEVDVLIGILRGFGKATGLHVNLDKSLVAPIRCQGIDLDDVLCNFSGSKASFPLTDLGLPLTPSRLRKVHLQPVHDKIKGRLSSWKALLLYTGGCWVEVISVLSSIPTYVLTVLKPPKQFFQEIDKPKRCFLWAGNE

SEQ ID NO: 194254 - protein, 721 aa, Oryza sativa
  Clone ID: PAT_MRT4530_90313C.1.pep
MAPGGFGANQRVAAAAPRSARPVLNHPHLHRYSATAHLHLATAQPSIYRPGDKALHAGGRTERVDSGCAEHGGERFIMRARDGDETSCRCCLPEIVLVPLVGDAGHHRGRRLMPIQEVLLTTTRMPPSCPDEDILHYYPLAKTPTSDSDRTIESLKHYQAVLVHAIPSEAAGRHAIVIMSDCRSIAAYATCPHGAEPLSTVRLSRLPCGQRPNACRTRQTTVMPSAECHPAEEATAAANVPAPFSNIPEQRARNWARACGKVNPNDSVTFENKSAAVIYQELLGLVAEQASQSEVESTPKRREDDILTKALGTKEHPGRTRGIGSDVPWKHGLPQYSSQYRKRKVSKEERDARLKAELKVEVIQELEASMDARVEERVKKVLADMNIPRGTTHAMHPTPRAQHNASLSQRRSSCASTEVPAPGLSVAPLAAVDHIEGVAQCILLARVQPTFAPEVAEGMAFKPSVIDKVHNADLLAGYAKVSIDTVKDTWSVYPLPVPPNDEIMTLGDARKMFIQWPKEDIVVKMTPRPSQPTELTPPKSKLSIEAPRGSALSVPHSPSGAAMDLADIAQSLAPIKTTRKADSSPPLVKGQKRQRGKGKIGELAPVPKRGKAATSMSVSKAGKVVRAPAQFELGMPLVEDNVLAVMGFDDLFDLFRIRKLDTGLLKCYSLHKEGKDELYHDTKFACAQQIGDQCGFHVCHNMSTLLREVKDFDTEVVANGE

SEQ ID NO: 194255 - protein, 150 aa, Oryza sativa
  Clone ID: PAT_MRT4530_90314C.1.pep
MAPCMHCPGRLAAPPAIFRREEHGSASVYYRDGIDHSRARTPQSPLCPYYVSARPALAACCWSQERLSTARQEQNRACPIPFPTRTTTTSWECLRVHVAHRHSTLGIQQRPKLTILPQILEICLYLDSDPDTSTVQDTSTVQEYAKTYRG

SEQ ID NO: 194256 - protein, 95 aa, Oryza sativa
  unsure (1)..(95): unsure at all Xaa locations
  Clone ID: PAT_MRT4530_90315C.1.pep
GTTSPXGRLWCCXQRXHNXXXRXRXXXVXQXXXXFVCXHSDXXSRXXHMLXFQWXCLXKKXXXXLYFLGLXXHLXVXFXXKKKKKKKKKKKKKKK

SEQ ID NO: 194257 - protein, 723 aa, Oryza sativa
  unsure (1)..(723): unsure at all Xaa locations
  Clone ID: PAT_MRT4530_90316C.1.pep
MEKWFTFPAEAKDRLKRKAFQKMGKAWKNCKSKLFTEFVNLPGNHTPFDEYPQITKAVWEEFCSLKNTQEFRESSEAHRLLQQRNEHPHWLGTVGYIGKEVIWAHEDAAAAAANVPAPFSDIPEQRARNWARAKGKVNPDGSVTFENKSDAVVYQELLGLVAEQASQSEVESAPKRREDDILTKALGSKEHPGRTRGIGSDVPWKHGLPQYSSQYRKRKVSKEERDARLKAELKVEVIQELEASMNARVEERVNKVLADMNIPRVTTPAVHPTPRAQHDASPSQHRSSCASTEGAAQCVLLARVHPTFAPEVAEGMAFKPSVTDKVHGADLLAGYAKLTPPKSKLSIEAPRGPALSVPHSPGGADMDLADIAQNLAPIKTTRKTDSFPPLVKGKKRERGKGKVGELALEPKRGKAVTSMPVSKAGKVVRAPAQFELGMPLVEDNVLAVMGIACRELHKQYMELSNAKRKMRESSIVGHHDHQPFLSSPAYIAIGFDDLFDLFRIRKLDTGLLKCYTLLCWIESRRLGNQVGFLDPSMVNEVNLQQSFTEVVDYVNRCLWAHQDKEYIMCAHNQERQWILLVIVPKWSRVTYLNSNKSKDYDFSEITNALNMAWGPYVEKGGRHKEGKDELYHDTKFACAQQIGDQCGFHACHNMSTLLREVKDFDPEVVANGEKAHFNTYIAIQNVVEVDDIIALIHLRAWLANPEASQYLAFIFFXLELTHQ

SEQ ID NO: 194258 - protein, 1209 aa, Oryza sativa
  Clone ID: PAT_MRT4530_90317C.1.pep
MKSHDCHVLITQLLPVAIRNTFPPKVRHTIQRLCSFFHAIGQKIIDPEGLDELQAELVRTLCHLEMYFPPTFFDIMEHIPVHLVRQTKCCGPAFMTQMYPCERYLGILKGYVRNRSHPEGSIIESYTTEEVIDFCVDYMSETSSIGLPRSHHEGRLDGVGTVGRKTVRLDRKVYDKAHFTVLQHMTEVVPYVDEHLAVLRQENPGRSESWVRNKHMSSFNEWLKNRIARLQNLSSETLQWLSQGPEWSATTWQGYDINGYTFHTVKQNSKCTVQNSGLRIEAASDGGWRDQYYGRVEQILELDYLKFKVPLFRCQWVDLCNVKVDNEGFTTVNLANNAYKDEPFVLAQQVVQVFYIVDPCSNCEAVTGAQNAGPVTGGLSCDEPALCARHRSGHSLTLTHSLDRHLDRRRCSPSPPRPLRPPLHRRRLALSAAISAALYAFLSTAAPRPLRRPSIDFPDLPDPDLPDTGIHDAVHLHLHDAGTPTTAGPLRRHLHHHCRLDLSTAAHSATISTTALVIAPGITYVDVGRDKCKPTAPRTVIGRWSNCCGLAARENFGILHKDIDKVTKAEKERAWTAMEKWFTFPAKAKDRLKRKAFHKMGKAWKNWKSKLFTEFVNLPGNHTPFDEYPQITEAVWEEFCSLKNTQEFRESSEAHRLLQQRNEHPHRLGTAGYIGKKAIWAQEDAAAAAANVPTPFSDIPEQRARNCAREGLGLVAEQASQSEVESAPKRREDDILTKGLGTKEHPGRTRGIGSDVPWKHGLPQYSSQYRKRKVSKEERDARLKAELKVEVIQELEASMNARVEERFNKVLANMNIPRGTTPAVHPTPRAQHDASPSQHRSSCASTEVPAPGLPVAPLAAVDHIEGVAQCVLLARVHPTFAPEVAEGMAFKPSVTDKVHCAYLLAGYAKVSNDTVKDTWSGYPLPVPPNDEIMTLGDARKTFIQWPKEDIVVKMTPRPSRPTELTPPKSKLSIEAPRGPALSVPHSPDGANMDLADIAQSLALIKTTRKADSSPPLIKGQKRERGKGKVGKLAPEPKRGKAVTSMPVSKAGKVVRAPAQFELGMLLVEDNVLAVMGIACRELHKQYMKLSNAKQKMRVGFLDPSMVNEVNLRQSFTEVVDYVNRVTYLNSNKSKDYDFTEITKALNMAWGPYVEKGGRHKEGKDELYHDTKFACAQQIEDQCGFHVCHNMSTLLREVKDFDPEVVANGE

SEQ ID NO: 194259 - protein, 78 aa, Oryza sativa
  unsure (1)..(78): unsure at all Xaa locations
  Clone ID: PAT_MRT4530_90318C.1.pep
TQSGRRRCTSARRSEVIYHTQPGYGSSSQYESEGDRRRXSGGGGGAGSGSNGGGGGXFGPAFHAVGGYIDRKFGLDQD

SEQ ID NO: 194260 - protein, 156 aa, Oryza sativa
  unsure (1)..(156): unsure at all Xaa locations
  Clone ID: PAT_MRT4530_90319C.1.pep
CTLQLCKLCCCWTMATGKYAKDSXSVLGTEDVQAVNDEENDGPSTTDDRSEVSSASKSKKAKTQENEDEGLIGAFTSVGDKLVAAILKVGEPDSKLPEGLFDTLKNLPSFQEIHKXFYCAHLVANPHIARAFDGLLFENKLHSVAMFIGEKFPGSM

SEQ ID NO: 194261 - protein, 144 aa, Oryza sativa
  Clone ID: PAT_MRT4530_9031C.1.pep
FFFFFFVQSSQGGHVTFNTAISPQHTRQTFNTPSVQRPLPPPRQVISSSQSSTHQSTHHCTLPLVLRSHFHFFGGSPAHACSTNTQQPPSFVCILQTLHWPCIPTQHQLRPGQLLSIPMFALRKASTPQKELQGFATPIGSQPV

SEQ ID NO: 194262 - protein, 1700 aa, Oryza sativa
  Clone ID: PAT_MRT4530_90320C.1.pep
MKKYTCWTKHGEQEAPDVAAEEVLDQDVENTAAAREGMFVPSPLGGETIDLDTQCLSTMLHDIEDAEDNDIDYEKFSKLVEDCQMPLYDGCKSKHSKLSCVLELMKLKASNGWSDKSFTELLELLKDLLPEGNNLPQTTYEAKQVLCPLGLEVRRIHACPNDCILYYKEYADLDVCPICGASRYKRAKSEGEGSKSKRGGPAKVVWYLPIAERMKRMFANKEQAKLDLEVRHCIDLMHVEKNVCESLMGLLLNPGTTKDGLNARRDLEDMGVRSELHPITTESGRVYLPPACYTLSKEEKIDLLTCLSGIKVPSGYSSRISRLVSLQDLKLIGMKSHDCHVLITQLLPVAIRNILPPKVRHTIQRLCSFFHAIGQKIIDPEGLDELQAELVRTLCHLEMYFPPTFFDIMEHLPVHLVRQTKCCGPAFMTQMYPCERYLGILKGYVRNRSHPEGSIIESYTTEEAIEFYVDYMSETSSIGLPRSHHEGRLDGVGTVGRKTIRLDRKVYDKAHFTVLQHMTEVVPYVDEHLAVIRQENPGRSESWGPEWSATTWQGYDINGYTFHTVKQDSKCTVQNSGLRIEAASDGGRRDQYYGKVEKILELDYLKFKVPLFRCRWVDLRNVKVDNEGFTTVNLANNAYKDEPFVLAKQVVQVFYIVDPCNKKLHVVREGKRRIVGLDNIADEDDYNQHVHGIGPSQVTSPVTAQSVGPVTGGLTCDGSTVGARHRSGTHSHSLTLSTAASPPPSPPPPPHSLSRPPPSSPPPSPPSPPQPLLRPLRRHLRCPLCRHLRRPLHRHLRRRRLNLSSSLSAAISAALSAAISALSAAASTAALAAGRPLRRPSIDFPDLPDPDLPDAGIPDHRRPPRPLRHCLSAAATRIQDDYGLRRRLQVRRFSKIAAGTTYVDVGRDKCKPTAPRTVIGRWSNCCGLAARENFGILHKDIGKVTEAEKERAWTAMEKWFTFPTEAKDRLKRKAFQKMGKAWKNWKSKLFTEFVNPPGNHTPFDEYPQITEAVWEEFCSLKTTQEFRESSEAHRVLQQRNEHPHRLGTAGYIGKEAIWAQEDAAAAAANVPAPFSDIPEQRARNWARARGKVNPDGSVTFENKSDAVVYQELLGLVAEQASQSEVESAPKRREDDILTKALGTKEHPGRTREIGSDVPWKHGLPQYSSQYRKRKVSKEERDARLKAELKVEVIQELEASMNARVEERVNKVLADMNIPRVTTPAVQLTPRVQHDTSPSQHRSSCASTEVPAPGLPIAPLAAVDHIEGAAQCVLLARVHPTFAPEVAEGMAFKPSVTDKVHGTDLLAGYAKVSIDTVKNTWSGYPLPVPSNDEIMTLGDARKTFIQWPKEDIVVKMTPRPSRPTELTPPKSKLSIEAPRGPALSVPHSPGGADMDLADIAQSLAPIKTTRKADSSPPLVKGQKRERGKGKVGELVPEPKRGKAATSMPVSKSGKVVRAPAQFELGMPLVEDNVLAVMGIACRELHKQYMELSNAKRKMRESSIVGHHDHQPFLSSPAYITIGFDDLFDLFRIRKLDTGLLKCYSLLCWIESRRHGNQVGFLDPSMVNEVNLRQSFTEVVDYVNRCLWAHEDKEYIMCTHNQERHWILLVIVPKWSRVTYLNSNKSKDYDFSEITKALNMAWGPYVEKGGRHKEGKNELYHDTKFACARQIGDQYGFHVCHNMSTLLREVKDFDPEVVANGE

SEQ ID NO: 194263 - protein, 794 aa, Oryza sativa
  Clone ID: PAT_MRT4530_90321C.1.pep
MSTPGANPPSPTPARIQEEANPATEAVAEGHPATTAVQQPEIHAEAKDRLKRKAFQKMGKAWKNWKSKLFTEFVNPPGNHTPFDEYPQITEAVWEEFCSLKTTQEFRESSEAHRLLQQRNEHPHRLGTAGYIGKEAIWAQEDAAAAAANVPTPFSDIPEQRARNWARARGKVNPDGSVTFENKSDAVVYQELLGLVTEQASQSEVESAPKRRKDDILTKALGTKEHPGRTWGIGSDVPWKHGLPQYRSQYRKRKVSKEERDARLKDELKVEVIQELEASMNARVEERVNKVLADMNIPRVTTPAVQPTPRVQHDASPSQHRSSCASTEVPAPGLPIAPLAAVDHIEGAAQCVLLARVHPTFAPEVAEGMAFKPSVTDKVHGVDLLAGYAKVSIDTVKDTWSGYPLPVPPNDEIMTLGDARKTFIQWPKEDIVVKMTPRPSRPTELTPPKSKLSIEAPRGPALSVPHSPGGADMDLADIAQSLAPIKTTRKADSSPPLVKGQKRERGKGKVGELAPEPKRGKAATSMPVSKSGKVVRAPAQFELGMPLVEDNVLAVMGIACRELHKQYMELSNAKRKMRESSIVGHHDHQPFLSSPAYITIGFDDLFDLFRIRKLDTGLLKCYSLLCWIESRRHGNQVGFLDPSMVNEVNLRQSFTEVVDYVNRCLWAHQDKEYIMRHWILLVIVPKWSRVTYLNSNKSKDYDFSEITKALNMAWGPYVEKGGRHKEGKNELYHDTKFACAQQIGDQCGFHVCHNMSTLLREVVQVDDIMALIHLRAWLANPEASQYLAFIFFWN

SEQ ID NO: 194264 - protein, 1737 aa, Oryza sativa
  Clone ID: PAT_MRT4530_90322C.1.pep
MPLGFGRMRGFEGKDTLRQILTPLTGYLDCKNEQMIEDKDEVHAHLIMNGFMKKYTCWTKHGEQEAPDVAAEEVLDQDVENTAAAREGMFVPSPLGGETIDLDTQCLSTMLHDIEDAEDNDRDYEKFSKLVEDCQMPLYDGCKSKHSKLSCVLELMKLKASNGWSDKSFTELLELLKDLLPEGNNLPQTTYEAKQVLCPLGLEVRRIHACPNDCILYYKEYADLDVCPICGASRYKRAKSEGEGSKSKRGGPAKVVWYLPIAERMKRMFANKEQAKLVRWHAEERKVDRTEVHNLVMGITNEFGKKRKVGKRKEKSTSKEKTEEHVEKQKTKERSMWKKKSIFWRLPYWKDLEVRHCIDLMHVEKNVCESLMGLLLNPGTTKDGLNARRDLEDMGVRSELHPITTESGRVYLPPACYTLSKEEKIDLLTCLSGIKVPSGYSSRISRLVSLQDLKLVGMKSHDCHVLITQLLPIAIRNILPPKVRHTIQRLCSFFHAIGQKIIDPEGLDELQAELVRTLCHLEMYFPPTFFDIMEHLPVHLVRQTKCCGPAFMTQMYPCERYLGILKGYVRNRSHPEGSIIESYTTEEAIEFCVDYMSETSSIGLPRSHHEGRLDGVGTVGRKTIRLDRKVYDKAHFTVLQHMTEVVPYVDEHLAVIRQENPGRSESWVRNKHMSSFNKWLKNRIARLQNLSSETLQWLSQGPEWSATTWQGYDINGYTFHTVKQDSKCTVQNSGLRIEAASDGGRRDQYYGKVEQILELDYLKFKVPLFRCRWVDLRNVKVDNEGFTTVNLANNAYKDEPFVLAKQVVQVFYIVDPCNKKLHVVREGKRRIVGLDKIADEDDYNQHVHGIGQEIPLGPSQVTSPVTAQSVGPVTGGLTCDGSTVGAHHRSGTHSHSLTLSTAASPLSLSIRHPPRHRLDLSTALLAAASSLTLSTAAVLSTAISTVAASTSPPPSPPPSPLPSLPPSPPSSPPPSPPSPPQPLLRHLRCPLCRHLRRPLHRHLHRRRLNLSSSLSAAISAALSAAISALSAAASTAALAAGRPLRRPSIDFPDLPDAGIPDHRRPPRPLRHCLSATATRIQDDYGLRRRLQVHRFSKIAAGTTYVDVGRDKCKPTAPRTVIGRWSNCCGIAARENFGILHKDIGKVTEAEKERAWTAMEKWFTFPAEAKDRLKRKAFQKMGKAWKNWKSKLFTEFVNPPGNHTPFDEYPQITEAVWEEFCSLKTTQEFRESSEAHRVLQQRNEHPHRLGTAGYIGKEAIWAQEDAAAAAANVLAPFSDIPEQRARNWARARGKLGLVAEQASQSEVESAPKRREDDILTKALGTKEHPGRTRGIGSDAELKVEVIQELEASMNARVEERVNKHRSSCASTEVPAPGLPIAPLAAVDHIEGAAQCVLLARVHPTFAPEVAEGMAFKPSVTDKVHGADLLAGYAKVSIDTVKDTWSGYPLPVPPNDEIMTLGDARKTFIQWPKEDIVVKMTPCPSRPTELTPPKSKLSIEAPRGPALSVPHSPGGADMDLADIAQSLAPIKTTRKADSSPPLVKGQKRERGKGKVGELAPEPKRGKAATLMPVSKSGKVVRAPAQFELGMPLVEDNVLAVMGIACRELHTQYMELSNAKRKMRESSIVGHHDHQPFLSSPAYITIGFDDLFDLFRIRKLDTGLLKCYSFEITKALNMAWGPYVEKGGRHKEGKNELYHDTKFACAQQIGDQCGFHVCHNMSTLLREVKDFDPEVVANGE

SEQ ID NO: 194265 - protein, 60 aa, Oryza sativa
  unsure (1)..(60): unsure at all Xaa locations
  Clone ID: PAT_MRT4530_90323C.1.pep
FGSITSHKFARXFTFSXLCYQLLNLFFTYFVNLLXXRTHTDHTNMGGPYCKLTKVNYFHP

SEQ ID NO: 194266 - protein, 53 aa, Oryza sativa
  Clone ID: PAT_MRT4530_90324C.1.pep
NPRPGISRGTQTITADTAIRIVLLWPEVYHTVHLSWIIITPSTTRGMDSPATP

SEQ ID NO: 194267 - protein, 166 aa, Oryza sativa
  Clone ID: PAT_MRT4530_90325C.1.pep
MDPKATTLTSRAWRCYSPASGARGGSRRRRRRPAGTTSRRCSRADRLDTLRPYVTSAAAGNDALRIDPPAEDVSLLPCCRALVAVAEKDILSERGRQYTAQLRGGGGGREVFPHISSSCQGCFGVRRYILRHRKTQQAPTPAHDRAAPPQLRCRTGPRLAAPAPSV

SEQ ID NO: 194268 - protein, 59 aa, Oryza sativa
  Clone ID: PAT_MRT4530_90326C.1.pep
MQIRADDADQLQKIVNLSSAHKRDESVVSDLAGHELEEEDYPVVDYESDLQTAMSTTVR

SEQ ID NO: 194269 - protein, 95 aa, Oryza sativa
  Clone ID: PAT_MRT4530_90327C.1.pep
GPGQLIYVCCLIWVQRCSSLQFLFQWSVVARMASCFPQVLIYGHDKFPIRCCLPIVEVCPLCGPGPGYPGLPHVFCIKSNRQVTPLSSINHYCLL

SEQ ID NO: 194270 - protein, 79 aa, Oryza sativa
  Clone ID: PAT_MRT4530_90328C.1.pep
HSFSQAKPILKRFFNRGFFFTTSPPPFPTPFFLFPFAPPFVIPAPVFTPYLHTIHRRSQPFSLIIKFKGLKTIDIIFLA

SEQ ID NO: 194271 - protein, 49 aa, Oryza sativa
  unsure (1)..(49): unsure at all Xaa locations
  Clone ID: PAT_MRT4530_90329C.1.pep
GIRXCKPIPQRLXXXIXVXQXPYXXTXXLLSGTXSNSGRVHDXXSPSIR

SEQ ID NO: 194272 - protein, 205 aa, Oryza sativa
  Clone ID: PAT_MRT4530_9032C.1.pep
MSQRAGRHQRRASQSVFVLPENFASLEDVAADVIGGGGAEQRKPAAAADASSEQQPARMQAGRHRRAMSMAVAARDLEMITEDIASYKYALRRLPSATTSAAALPLANPNRRHHLLLSPMLPLIPTPRHRVRRRPRSAIEPPSTPAFRLTPSMPHHAFTSTPPAPPRVAVDSRLSTSTLTPIIVESRLQIDVADAPTSASIPASR

SEQ ID NO: 194273 - protein, 57 aa, Oryza sativa
  Clone ID: PAT_MRT4530_90330C.1.pep
LLVSKIPIKVVAIVSMVCENAPPKAPPLVWLESSRNFYAQMFPPAPRNVSKNWDFLL

SEQ ID NO: 194274 - protein, 133 aa, Oryza sativa
  Clone ID: PAT_MRT4530_90331C.1.pep
DCCTSSGASCSVDGRGRDRKQRAPAWPPVTSSRRGMVVDGGGCNLRRRAPAHGCGWWRIQPPVTSSGVTAGDELRRGAARGQQRTWLSATSLAWRVAAEDATASNKPAKDTAADNDLRREAWTTEDAAAGDDL

SEQ ID NO: 194275 - protein, 123 aa, Oryza sativa
  unsure (1)..(123): unsure at all Xaa locations
  Clone ID: PAT_MRT4530_90332C.1.pep
MASAAAAAASMSVVGHGEREIEIERERGSGGSHPRDATAASAAEAARTAKRRRETTAASARGCPRHGGGEGEAXDGKTSKCWWRRRECTENIYXPRSLVPIFTPGCSHQPGLKIFSRYFQILF

SEQ ID NO: 194276 - protein, 129 aa, Oryza sativa
  Clone ID: PAT_MRT4530_90333C.1.pep
SCSVDGRGRDRKQRAPAWPPVTSSRRGMVVDGGGCNLRRRAPAHGCGWWRIQPPVTSSGVTAGDELPAWHGYGRRRTQPPAMSSDAARHVDSRGRGYQRRAWRGAWRQRTLRREAWTTEDAAAGDDLRH

SEQ ID NO: 194277 - protein, 874 aa, Oryza sativa
  Clone ID: PAT_MRT4530_90334C.1.pep
MVIPSFPLPRLHLSLQLHNPSAIPSPRRRPRPAPTSETLRRRLLRKGVSPTPKILHALRKKEALKSLRRARKDTAAAAAAAEAASNALPREEDGAAVVGEDDEARFRAAVAEYRALMGRPWHGGASAPPRGALRGEGEGLDGLREMLAARRAGKFEWLLEDDDVEEGEEEAAVGRRGRAGVGWNSDFRDEERRIESLVRRLNEDDLSMRDWRLTRLMKKADLIYNEDNLLQILEGLEARGNWRQALSVTEWVYNENIYKHRKSRFVYTKLLSILGKAWRPTEALRVFTIMRSDAQIYPDMAAYHSIAVTLGRAGLLNELIKIIEYMRQKPSKRVMKMRRKDWDPSLEPDVLIYNSVLNACVLSQQWKGVFWVFQQMRRNSLIPTGATFGLAMEVMLKAKKYDFVQKFFQKMQKSGVPPRAITYKVLVRAYWEQGKVNEAVEAVKDMEQRGIVGAASVYYELACCLCNKGRWRDALSQVGERKQLPLTKPLEFTFTGMILASFDGGYISECISIFESMEGHCAPNIGTINVMIKVYGRCDMFVKARDLFETIKVNLPSSNHSSHKADAYTYSSMLEAAASAQQWEYFENVYREMTLSQYHLDQSKYSWMLIKASKAGKSYLLEHALDSILERGETPNVQLFSEMICQTIAQRNYAKTLHLINIMAEASTDVSELQWSKLLEQNMHRFSVNALKDLLKYLSTSDIIKSDPELCFVSALQSQCGTTFVNDTSFVADGTYTGQSQLSLPENITKSSNSNLDQLSCMNSLNTNVFPDEKVSSEFSDYIMNTPQSDANAGLSEDIVIGSHFESEQKEQHDLGWLGTGVSAVDEVLDSMNLYGDGSCGEMPSASEILELWEQDRINGTFSAKTAEPPCEDR

SEQ ID NO: 194278 - protein, 69 aa, Oryza sativa
  Clone ID: PAT_MRT4530_90335C.1.pep
VVKDPIRCCKKKKKKKKKKKKKKKKKKKKKKIKKKKKKKKKKKNKIKNKKLKGGGLFKGPRFTSACLQR

SEQ ID NO: 194279 - protein, 850 aa, Oryza sativa
  Clone ID: PAT_MRT4530_90336C.1.pep
MGGSAVNCAVQNVSLDTLFLIVIQGAAVIVLGKFIHLSLRRHNLPSAISQIVAGVAVGSLGLHDMVVHVEVQNVEDTYGWYVSEARIFYMFYVGLDADLAALWNDAHRCTVVTYASVATCLLLAAFVSGGIYGSMMHTPVRSPELLSAVLMLTLANTASVDVSRMAAELDLTATGGGRLAVSTAIATNIICIVGEGVFSCMKLASSRTPGYSASERLGMGVLALLKVGVTMALLRPVAAYMNRRNAGRHRIGNWELVLLLVAVSFVGNFPEHAGFDGVPASLLLGLAFPREGPVARSVMDAIAYPLHALALPFYFGAMGMRINFGAMSGAIVVPAVLLTLLGLFGKCAGTMAAARYLKMPLADAIRLGVLLNIKGHVNMIDMSFASSEGVTCLHPTSSLATTMAPLIWPRVQIWAEQALMAMVVGSIISTVVAGPVFAVLFRKEKEAYACSDQALEHMAPDKELRMLACVHGARGAPAMLSLLELLATTPRAQPTIHVLHLFDASRKHVGPKRYHQRVQDSDKHIDRRIDDATQVNWAVDVFTSVTGLAIRQFDVGDRGAAMKNAKNIHRRLEEVRAGLLLLPYHKEQRYDGKMVCRRDDRCELNRKVLELAPCTVGVFADRPFWRGGASFRLPTKISTSEETTAARNQGDQKAGTQIAAVFLGGPDDREAVAFACRLAKNDGAIRLTVIRLVLGVATNDDHRIPTTSAANHIGIYDDDDEDGGEEEVLSVVVQDDDPDERCVSELRREYVAKERAEYVERAVSGAVDVAAALRATAGAFALVVVGRGGRQPPELVVGLEGWVQMIEYPEVGPVGEMLASEESLEMGSVLVVQQRTAPPPPFHLNIPPAI

SEQ ID NO: 194280 - protein, 193 aa, Oryza sativa
  Clone ID: PAT_MRT4530_90337C.1.pep
MEPSPVGGGSASGSVERWRAEASRAFQHYLDRAAPHTAGRWAGTLVAAAVYALRVYYVQGFYVVTYGLGIYLLNLLIGFLSPMVDPELEALDAGPALPTRGSDEFKPFIRRLPEFKFWYAITKAFCVAFLMTFFSVFDVPVFWPILLCYWVVLFVLTMKRQIVHMIKYKYVPFSIGKQKYGGKKGPGASTSKD

SEQ ID NO: 194281 - protein, 359 aa, Oryza sativa
  Clone ID: PAT_MRT4530_90338C.1.pep
MAACLHQIYMSYLIQLGPQKRHPLECGLFGLSALLGTASGYAGLRLNKPTRNLFDQGITIYKINSINLRISLVSLTVTPIRRSAAAVVMADLDANSGSGIAVAVAAASSHSHVIDMPQLDASSRTVAAASATDHSRAVETTRIRTSCSAGDDDKCSTGSDDIPSCAVCMEPLEWVAVGPCGHRVVCPACAARVRSAPKPDHLCCICRTLCPTVLVTKAAAAADGELTFSEMPAATQDGQVGEYWYCAAMSAYFDDERQYEATAKAEAAAAAGCLKQRPAGADDDDGERDQRYGTAQFLKYSFFAALFGVCIGFVFAVDAPGWGGRVGIVAGSAALSVAVGSVLWFLRKHGYFCGQQQQD

SEQ ID NO: 194282 - protein, 63 aa, Oryza sativa
  Clone ID: PAT_MRT4530_90339C.1.pep
GSLAAKRFFFYLTQLASCFFIFTASVELTRTAQTEYTGRQSTTRQSGHRKVKNSPLRKVPGSD

SEQ ID NO: 194283 - protein, 48 aa, Oryza sativa
  Clone ID: PAT_MRT4530_9033C.1.pep
MQCITYKKIVHITNKISYEHRYAAYFLTKLSHLSAFLLTSLLGIHMTN

SEQ ID NO: 194284 - protein, 193 aa, Oryza sativa
  Clone ID: PAT_MRT4530_90340C.1.pep
MRSPRSRALERDAGGVAVEHVELIPGMPDDVAVDCLARVPHGAHRAMRRVCRGWRSAAATPAFAMARAEAGANEDLVYLLQFANPAAAAAAAEEAKEDGDAPANSPAYGVAVYNVTTGEWRREKAAPPVPMFAQCAAVGTRLAVLGGWDPETFEPVADVHVLDAFTGVWWSAPPMRSARSFFACADAGGRIYV

SEQ ID NO: 194285 - protein, 1354 aa, Oryza sativa
  Clone ID: PAT_MRT4530_90341C.1.pep
MWKKKSIFWRLPYWKDLEVRHYIDLMHVEKNVCESLMGLLLNPGTKKDGLNARRDLEEMGVRSELHPITTESGRVYLPPACYTLSKEEKIDLLTCLSGIKVPSGYSSRISRLVSLQDLKLVGMKSHDCHVLIRQLLPVALRNILPPKVRHTIQRLCSFFHAIGQKIIDPEGLDELQAELVRTLCHLEMYFPPTFFDIMEHLPVHLVRQTKCCGPAFMTQMYPCERYLGILKGYVRNRSHPEGSIIESYTTEEVIDFCVDYRSETSSIGLPRSHHEGRLDGVGTVGRKTVRLDRKVYDKAHFTINPDPAPTLTHSLSRPPTRLSRPLRRPLRPPLHRRLDLSTTALAAAKSAALSAISAALSASISALYAALSTAASTSPPPSPPPPSHSLSRPPPSISTAISTVAASTSPPPSPPPSLSPSPPSTPPSPPPPRPLHRPPRCCPLHRCRLTNSLDGRRDLLSVSTPGPSSPPPGSPLRRLLLSTGTSTVSPLPPPPLIYYCSPINPLFSSSVPPCQEAAAAPPCREAVRRAPAGTRHRRRAPPPLLVVSSPDHDNARRKSTLPNTCEDPGRSKPSHGDTCLRIAAGTTYIDVGRDKCKPTAPRTVIGRWSNCCGLAARENFGILHKDIGKVTEAEKERAWTAMEKWFTFPAEAKDRLKRKAFQKMGKAWKNRKSKLFTEFVNPPGNHTPFDEYPQITETVWEEFCSLKNTQEFRESSEAHRLLQQRNEHPHRLGTVGYIGKEAIWAQEDAAAAAANVPAPFSDIPKQRARNWARARGKVNPDGSVTFENKSDAVVYQELLGLVAEQASQSEVESEPKRREDDIFTKALGTKEHPGRTRGIGSDVPWKHGLPQYSSQYRKWKVSKEERDARLKAELKVEVIQELEASMNAKVEERVNKVLADMNIPRGTTPVVHPTPRAQHDASPSQHRSSCASIEVLAPGLPIAPLAAVDHIEGVAQCVLLARVHPTFTPEVAEGMAFKPSVTDKVHGADLLAGYAKVFIDTVKDTWSGYLLPVPPNDEIMTLGDTRKTFIQWPKEDIVVKMTPRPSRPTELTPPKSKLSIEAPRGPALSVPHSPGGADMDLADIAQSFAPIKTTRKADSSPPLVKCQKRERGKGKVGELAPEPKRGKAATLMPVSKAGKVVRALAQFELGMPLVEDNVLAVMGIACRELHKQYMELSNAKRKMRESSIVGHHDHQPFLSSPAYITIGFDDLFDLFRIQKLDTGLLKCYSLLCWIESRRLGNQVGFLDPSMVNEVNLRQSFTEVVDYVNRVTYLNSNKSKDYDFTEITKALNMAWGPYVEKGGRHKEGKDELYHDTKFACAQQIGDQCGFHVCHNMSTLLREVKDFDPKVVANGE

SEQ ID NO: 194286 - protein, 398 aa, Oryza sativa
  Clone ID: PAT_MRT4530_90342C.1.pep
MEFFANHFIILSPPAFNLSSSKTLELEDANEVYLWSGNNNNEGNPTLAQVLAQQTQLMNMMIQQMQNQLNQGNNNAPPPQNKLADFLRVRPPTFSSTTNPVEAGDWLHAIEKKLELLQCTDQEKVVFASHQLQGPASEWWDHFRMNRAEGQPITWAEFTEAFKKTHIPAGVVALKKREFRALKQKDRTVTEYLHEFNRLARYAPEDVCTDEERQEKFLEGLKDELSVTLISHDYVDFQQLVDKAIRLEDKKNRMDNRKRKMTVFQEAQGSSQRQCIKPLQIGESSSAGQGQSQQLNIGGEIKSETNESKEVNIEQANQPVPVQQGQFQENNSSGREQQVCFNCYKPGHFARECPKPKHQQPQGQVNNIVVTGANAVPVASSRVVSSSVTAQPPVSKRQ

SEQ ID NO: 194287 - protein, 575 aa, Oryza sativa
  Clone ID: PAT_MRT4530_90343C.1.pep
MLHDIEDAEDNDRDFEKFSKLVEDCQMPLYDGCKSKHSKLSCVLELMKLKANNGWSDKSFTELLEVLKDLLPEGNNLPQTTYEAKQVLCPLGLERNEHPHRLGTAGYIGKEAIWAQEDAAAAAANVPAPFSDIPEQRARNWARARGKVNPDGSVTFENKSDAVVNQELLGLIAEQASQSEVESAPRRREDDILTKALGTKEHPGRTRGIGSDAELKVEVIQELEASMNARVEERVNKVLADMNIPRVTTPAVQPTPRAQHDASPSQHRSSCASTEVPAPGLPIAPLAAVDHIEGAAQCVILARVHPTFAPKVAEGMAFKPSVTDKVHGADLLARYAKVSIDTVKDTWSGYPLPVPPNDELMTLGDARKTFIQWPKEDIVVKMTPRPSRPTELTPPKSKLSIEAPRGPALSVPHSPGGADMDLADIAQSLAPIKTTRKADSSPPLVKGQKRERGKGKVGELAPEPKRGKAATSMPVSKAGKVVRAPAQFELGMPLVEDNVGFLDPSMVNEVNLRQSFTEVVDYVNRAVRDELPVTASSLLPSSFLPLSISSTQWRADGSFAQWWVSGLPTAQWLEI

SEQ ID NO: 194288 - protein, 56 aa, Oryza sativa
  Clone ID: PAT_MRT4530_90344C.1.pep
FPYFSASTVHHSWIIITPSITRGMDSPATPTDFSPLFSLAPRNEPCLIVMSTTFKT

SEQ ID NO: 194289 - protein, 136 aa, Oryza sativa
  Clone ID: PAT_MRT4530_90345C.1.pep
PHQWPDQDGDLAGDWMVGCDFGGHEHVEDDETNPTVLTLEPNDERRRPATRSSGGTASVDGGDGAPVTGDSGERAAGLLHTSAHLTAVTATGGDDGGDGTTRMELGRRRRRGGAPRGGGATRHGRPRERGQTKEED

SEQ ID NO: 194290 - protein, 362 aa, Oryza sativa
  Clone ID: PAT_MRT4530_90346C.1.pep
MVNTRASGSGNNNNEGNPTLAQNKLADFLRVRPPTFSSTTNPVEAGDWLHAIEKKLELLQCTDQEKVVFASHQLQGPASEWWDHFRMNRAEGQPITWADFTEAFKKTHIPTGVVSLKKREFRALKQKDQTVAEYLHEFNRLARYAPEDVRTDEERQEKFLEGLKDELSVTLISHDYADFQQLVDKAIRLEDKKNRMDNRKRKMTVFQEAQGSSQRQRIKQLQIGESSSAGQGQSQQLNIGGEIKTETNESNEVNIEQANQLVPVQQDQSQENNSSGREQQVCFNCYKPGHFARECPKPKHQRPQGQVNNMSCAAIKMIANHVYHADKIANNIVVTGANAVPVASSRVVSSSVTTQPPVSKQQ

SEQ ID NO: 194291 - protein, 863 aa, Oryza sativa
  Clone ID: PAT_MRT4530_90347C.1.pep
PKRRRKTNGRRRRRGGSGEALRVDDGDGAPTVFGGGEAVDGDGDDLANPMVATATDDGGCNGGAARLNRRQRRRRLGLRGGGARRDGRLRQRRRRINYLDFKDFGFRNIPIGPPPRISVWKGGMIKEYSKMDECKTGDFGKRPLIDDISTVCKWFTRELSDTTYGKNAQLAAKVLDCVYMSKASLFTQKDSTITREEKSREEKIKEGRKQGGSNVAHNGNAPPLEQNHPNNTDVCSQLPKTPQTKSTVEHETKSNINNTSTSKGAPPTENVICSQLQTTPPSKQTEQENSKSNSNKDNACKETQYADKKASSKDFVCSQQSNNSVASRTRAKILHSASPLSVVSISPSKKNSSDQKIRKAVRKQPLKATQPISTQPDKEESNKDGLFVEPICTIPAKKEEKQIDIVLENTSNFRKQMKLEHTGTNIMDIEHSSIQVTQGERYMNTPKTCINNKVGVQHLSANFTANMGNRRLEGQHCDENEYQDDFAEFLYEEEPSDNIDMVEQRAQPQINNEQSSPQTPLHINITSARTPATKKSSQSSPNIEERQYSMTRIIDSLNASGNCSGTRHNLYRPKRIVHPSKYKSSPYDNYTRHQTISAAELNHYNNILSIGETQQYKNKFAVLMDNVKVTWSSLSKYLSPRGVVDTYVLNAYAKKIANDQNNKENEYMNFYFFHRSSVYFLKNWEGAGKEEDYENCARQAFTLARNKKPLHYYDLLIFPCLYDNHWFVFTVDIKGHHFVFLDSIYDENSKYHKKIQGLLIPGFIAMWEEFSDVEKDFSKFDIQYPQITRQNNGHDCGIYAMKCMEWWNPRMHLKDMIRPEYIPNMRKQIANDLLFSEYNSQEEAKILARSFNPTKHGKYARQQ

SEQ ID NO: 194292 - protein, 74 aa, Oryza sativa
  Clone ID: PAT_MRT4530_90348C.1.pep
VLSKVRHTCTAGVFAEAATVPPLHLIYRNLIDYWRVHLPRVHQASERMGPAYSSDDIDAPESYLQRASDFNSMT

SEQ ID NO: 194293 - protein, 57 aa, Oryza sativa
  Clone ID: PAT_MRT4530_90349C.1.pep
LARDVPLYPEDTIPHMLPCPEVPPRHTVHHSWIIISPSKPEAMDSPATPTDFSPLLS

SEQ ID NO: 194294 - protein, 466 aa, Oryza sativa
  Clone ID: PAT_MRT4530_9034C.1.pep
MKLDSFDGSGTPVEAADWLSYVEDKMEVFDVLTPDRFHYGTQLLKGEAQIWWKGVQSAHTAAHGPLSWPEFVRQFERRFYPATFLDRLKIDLNNYTQEKKSVAEYEVGFNQIVRFVPHVARDEVEKARQFRQGLKPSIRHVLGAFPVVDFRTMVEQALGVEMQQVSLVLKEGVILNIVLFLNLGWECDFFSHYRHSADDGYTLYTTPTCVPCAIVLDGAYPTSLLNCTSSTALPDGTPSYADGFSDPSVWGYSAAPGYYSFSTRCSVGFFISWFCHWSLFFIWCSGGVTTKNKYPLPRIDALFDMLRGAKVFSKIDLQSGYHQLRIQEEDIEKTAFSTRYGHYEFIVMSFGLTNAPAVFIEAMNRMLHDYLDDFVIVFIDDILIYSKTEEKHEIHLGLVLEALRKNKFYAKLKKCAFCLSEVGFLGHVINQHGITVDPKNVASVVEWQRPTSVTEVRSFLGCHDRK

SEQ ID NO: 194295 - protein, 61 aa, Oryza sativa
  Clone ID: PAT_MRT4530_90350C.1.pep
QPPCSAGLEVVLNLILLPRWDRLSPKESEDILRTTHDRPAVCSDSRYRIRVHRVSHHLRQF

SEQ ID NO: 194296 - protein, 168 aa, Oryza sativa
  unsure (1)..(168): unsure at all Xaa locations
  Clone ID: PAT_MRT4530_90351C.1.pep
MASAPLPQAAQLGYKPNVFSFWILYLQLRLIDYCKNEHMTYSTSHTANMQVHKDTKGWHNIGSFAKSAFSKXLRERTHEPSQRRKRQANTQNEEKRPAAXWRACTRRGRRDEPNGTHHNDKRRPTTAGNDGERAAARVDRRRRXYGDRRRRRTGGRASSLLGAPLGGG

SEQ ID NO: 194297 - protein, 42 aa, Oryza sativa
  Clone ID: PAT_MRT4530_90352C.1.pep
MDEDKYSFSSGYVQITEDTNDGELTNDYDNDFLCEPLDVVGI

SEQ ID NO: 194298 - protein, 54 aa, Oryza sativa
  Clone ID: PAT_MRT4530_90353C.1.pep
LCRQTILPSFHLNDDDSSQSFELDLGFCPFFHTHTQKIKKKTKPLAWTYLKVEL

SEQ ID NO: 194299 - protein, 395 aa, Oryza sativa
  Clone ID: PAT_MRT4530_90354C.1.pep
MVRCGGLCYARGTVTAPFRVCVPRLIPGRGFYAQICSEITSEFPGVTSWYQSHLDCRISQMCNPSPSILSNKQQMVNTRASGSGNNNNEGNPTLAQVLAQQTQLMNMMIQQMQNQLNQGNNNAPPPQNKLTDFLRVRPPTFSSTTNPVEAGDWLHAVEKKLELLQCTDQEKVVFASHQLQGPASEWWDHFRMNRAEGQPITWADFTEAFKKTHIPTGVVSLKKREFRALKQKDQTVAEYLHEFNRLARYAPEDVRTDEERQEKFLEGLKDELSVTLISHDYADFQQLVDKAIRLEDKKNRMDNRKRKMTVFQEAQGSSQRQRIKPLQIGEPFSAGQGQSQQLNIGGEIKSETNESNEVNIEQANQPVPVQQDQTQENNSSRREQQPFRISGRDSL

SEQ ID NO: 194300 - protein, 73 aa, Oryza sativa
  unsure (1)..(73): unsure at all Xaa locations
  Clone ID: PAT_MRT4530_90355C.1.pep
LSCTNYFRKSFAEVLAWAKEXRPSVTNAWMIKXVDWGPNQDLLQVYFYLTTSLLVHRRQEIKLYTFWIRIRAS

SEQ ID NO: 194301 - protein, 109 aa, Oryza sativa
  Clone ID: PAT_MRT4530_90356C.1.pep
MAARRISFSLQLACAKSLSPLLVGACCSGQRQLAAGLRLCGCLTNPGYSLTKNVCPILAPRSSLGHAFVKAKAKIFPLSKNKAASKPCTGNGLMNVRTSTAQIWTVSSP

SEQ ID NO: 194302 - protein, 155 aa, Oryza sativa
  unsure (1)..(155): unsure at all Xaa locations
  Clone ID: PAT_MRT4530_90357C.1.pep
KSWNRPTGIIKSPIFLSCKKGLVSTHINTYIRGYCKLSHRSIXLVSAHRHPLFXRFYLSTSEIWHLTRSCIGFRSPAKGXVLCYAGPGNCIGYADVVQGCIALISWVALVRLIXLPTYLSYILVNLXLVAQFTCISLDLLQGXCRYRLNHFTRLD

SEQ ID NO: 194303 - protein, 927 aa, Oryza sativa
  Clone ID: PAT_MRT4530_90358C.1.pep
MVPTCSLSSMPSEHRRPRRPRRMAEGVVGSLIGKLGAALAKEAATYGASLLCQEVSALKRLFAQIRDVKDELESMEAYLHGAERFKDIDETTGNYVKKIRGLAFEIEDAVDEFTYKLEDKHGGFTAKMKKRIKHVKAWRRLALKLQDIKQRLKNADERKIRYDLSGIEKNGHSKSPEQSFQFAREEDLVGIEINKELLMQWLVGDSEQGCKIATVWGMGGVGKTTLVSQVYKTVKLDFDVSGFVTVTNSYQFDDLLKKISTEFEIPIDADNIAVGSLVESIHHHLQGKRYILVLDDVWQPDVWFKLRNAFPTESTGRFIFTTRMQEVALLATKKCTIELAPLDAHCSWQLFCKEAFWNADNKTCPEELQDIASMFVDKCAGLPIAIACIGRLLSCKHPIYSEWEHVYKDLELQLTNNVILDVDIVLKVSLEDLQRNLKNCFLHCTIFPESYAFNRKRLIRHWIAAGYIQEVGSKTVEEVAEGYLNELVNRSLLQVVERNLSGRVRRCRMHDIIRLLALRKSKEEFFCQVYKGSEACSIENTRRLSIQNVSIQHLSGSSAPCLRSLHVFSIYRRIDSLEAFLKSFKFLSTLDLQGISIKRLPKIVFDLFNLRFLGLRKTYIEYLPKELSRLQNLEVLDAYDSKLLILPVEVATLWKLKYLYVVRVPEGSYDRVLAFDGLQVPMGICNLIDLLALQLIEASTEVLRHIGCLTKLRTFAIGKVRNEHCADLCDAIMRMTCLVHITIISADEKEVLQLETLCLPSTIAKIDLGGRLSKESMSQLISTSSNLVNLTELNLCFSKLNEDSFACILNLHNLVELYLSKAYDGKELIFHATSFPKLKLLAVWDAPYLRKVAIQQGALQSLVRLWLADCPELRDVPDGIEHLRTLEHLRIKGSSDELWRKLEIKGKSNKRNEDRMKISHVKWVEIV

SEQ ID NO: 194304 - protein, 587 aa, Oryza sativa
  Clone ID: PAT_MRT4530_90359C.1.pep
MGEEAATAAAAERDEQGSVTAALDAITGLVSASLAASLFPYKWQLIRDRLNRLHAGLADIATGGGEGGEGHGALAGVLGAVVETAREASELVPRSQGRHYGGGKLRLRSDLDVVAGTLDALVARVDEVYASGALTRARALVVSRPCAGASRDDVRFYVRDLFARLRVGGAEMRGEAAAALAEVLHDDEKCVRVVVSDVADGVCVLVWLLECPDACVQEEVLEAVSVIAGFEAYRGDLVVGGVIAPVIRVLDSAGDRPSAKERAARLLCKLTENSDNAWAVAAHGGVTALLNVCADYTASGGELVCAACRVLRSLAGVDEIRKYMVAEAGAAPVLVSLCRGAADEAAQIQAMELLAAIASGDSSVREAVLQEGAVESLVSVLDPASPRSSKAREVALRAIDALCLSSPPLTSRLVAAGFLDRVLVFLRSGDATLQHCALKAAHRLCHASEDTKKAMGDAGFMPELVSILHAAKSLEARDMAAEALCAMVSVHRNRKRFVQEDRNVAQVLQLLGPDDEKLSPAKRFLLSTLMHLSDSTSGRRKIMSSEHLRNLERLAETNVTDAKKIVKKLGGSKLRNIFHGIWSLQKA

SEQ ID NO: 194305 - protein, 146 aa, Oryza sativa
  unsure (1)..(146): unsure at all Xaa locations
  Clone ID: PAT_MRT4530_9035C.1.pep
CRRRRRRRRDRXQSGEAVHPPRPRRNPGRRRRGGLGVRGPQPGGDEILRRPGRARLRGEEWPRRDEHDLHHRRRHPREARRRQVQRGRRRPGAPGGSDAVHPVLLGGGEERRHEVAVRAAAAGERDEHHGAALHRLQGLGQRHHRP

SEQ ID NO: 194306 - protein, 417 aa, Oryza sativa
  Clone ID: PAT_MRT4530_90360C.1.pep
MFGRAPKKSDNTRYYEVLGVPKDASQDDLKKAYRKAAIKNHPDKGGDPEKFKELAQAYEVLSDPEKREIYDQYGEDALKEGMGPGGGMHDPFDIFSSFFGGGFGGGSSRGRRQRRGEDVVHPLKVSLEELYNGTSKKLSLSRNVLCSKCNGKGSKSGASMKCSGCQGSGMKVQIRQLGPGMIQQMQHPCNECKGTGETISDKDRCPGCKGEKVAQEKKVLEVVVEKGMQNGQKITFPGEADEAPDTVTGDIIFVLQQKEHPKFKRKGDDLFYEHTLNLTEALCGFQFVLTHLDNRQLLIKSKPGEVVKPDSFKAVNDEGMPMYQRPFMKGKLYIHFSVEFPDSLNPDQCKALETVLPPRPVSQYTDMELDECEETMPYDVNIEEEMRRRQQQQQQEAYDEDEDMHGGGAQRVQCAQQ

SEQ ID NO: 194307 - protein, 82 aa, Oryza sativa
  unsure (1)..(82): unsure at all Xaa locations
  Clone ID: PAT_MRT4530_90361C.1.pep
PRVRATMALSSSFAAVAAAAGGAPWLAAVRFPTRRRVALIGRAHIEPEVESTKEETVDPXPPTPWVSVGRLIVKEGHSTGLW

SEQ ID NO: 194308 - protein, 419 aa, Oryza sativa
  unsure (1)..(419): unsure at all Xaa locations
  Clone ID: PAT_MRT4530_90362C.1.pep
MFGRAPKKSDNTKYYEILGVPKTASQDDLKKAYRKAAIKNHPDKGGDPEKFKELAQAYEVLSDPEKREIYDQYGEDALKEGMGGGGSHVDPFDIFSSFFGPSFGGGGSSRGRRQRRGEDVIHPLKVSLEDLYNGTPKKLSLSSTTPTATNARATVSNXGAYHDRGSGLLXDSMEMSRMXQGPSMIQQMQQPCNECKGTGESINEKDRCPGCKGEKVIQEKKVLEVHVEKGMQHNQKITFPGEADEAPDTVTGDIVFVLQQKDHSKFKRKGDDLFYEHTLSLTEALCGFQFVLTHLDNRQLLIKSNPGEVVKPDQFKAINDEGMPMYREAFHEGELYIHFTXEFPDSLAPEQCKALEAVLPPKPASQLTEMEIDECEETTMHDVNNIEEEMRRKAQAAQEAYDEDDEMPGGAQRVQCAQQ

SEQ ID NO: 194309 - protein, 88 aa, Oryza sativa
  unsure (1)..(88): unsure at all Xaa locations
  Clone ID: PAT_MRT4530_90363C.1.pep
LPILXNHSCEPNCYSRVISVLGDEHIIIFXKRDINPWEELTYDYRFVSSDQRLPCYCGFPKCRGVVNDVESEGQSAKIRVNTSELFHQ

SEQ ID NO: 194310 - protein, 67 aa, Oryza sativa
  Clone ID: PAT_MRT4530_90364C.1.pep
SSKKRALKETEHQQIDQDRRFEEAGCRKLEKGSFGRHPPNSLNEVGELEHLGKLEAFFGLRRRPFFL

SEQ ID NO: 194311 - protein, 106 aa, Oryza sativa
  Clone ID: PAT_MRT4530_90365C.1.pep
KRTKRSNLKTLILQAPTHLPWPRSARPPRRARPPRRPTARQAGRAAAARRRGRAPPPGAPPRPAPDPRPLPTTPPCSPPPRPPPPSTFVAASDFRRRRRRRPWLPE

SEQ ID NO: 194312 - protein, 112 aa, Oryza sativa
  Clone ID: PAT_MRT4530_90366C.1.pep
MAAALGSLLGRPPLTTHFRRLLHGAPAPDQKLANKMMKKKLQDEQQQDWDAIVRMIVQSKMQTYNVVPDGEDPPWARRVFHVLVMIPASFICGCNLGERIYHELGLRTNRRP

SEQ ID NO: 194313 - protein, 86 aa, Oryza sativa
  Clone ID: PAT_MRT4530_90367C.1.pep
PRPHPRRLPLHTAANDEEEDGDSAAAFATVPGSHAPPTARDRAAPPPIPPRPRPPPCCLPPPRQLPRRQQQNFCDFSRVTFLRCLL

SEQ ID NO: 194314 - protein, 132 aa, Oryza sativa
  Clone ID: PAT_MRT4530_90368C.1.pep
MMRKQYSFTLCLMLLLVAALLCTMNTISVEAAKNIFSLKYTPFSKRGLKFGSASSCPIFGSGRSGYNSVNPDGRSGYNSVNPDGRSGYNSVNPDGRSGYNSVNPNGRGGYNSVNPNGRSGYNSVPRNGGGSP

SEQ ID NO: 194315 - protein, 138 aa, Oryza sativa
  Clone ID: PAT_MRT4530_90369C.1.pep
MASAPLPQAAQLGYKPNVFSFWILFLQLSGDVSDDVSTGDSSASRARRRTTAQRRKRRTPMGRGQHGELTGDQNHGGRATDGADDEEEAATVFGSTVTAVLRRSSTAAKQWTGTATTSRSRWWRWRPTTAAATAARRG

SEQ ID NO: 194316 - protein, 76 aa, Oryza sativa
  Clone ID: PAT_MRT4530_9036C.1.pep
MSNEREATIAAKGNFNHYHVQFPLKYLGNARTPLAAVNNTFRAYEDISSWNSRTHGIEYRDSYGTLIWVKEDPYDY

SEQ ID NO: 194317 - protein, 71 aa, Oryza sativa
  Clone ID: PAT_MRT4530_90370C.1.pep
IQWYCKLICNFLLPSNNTEFMSVMEMRMFPCSKIGTCNWNVVSENDFQSGYDSTYEWLLLAVWRSFSDNTT

SEQ ID NO: 194318 - protein, 124 aa, Oryza sativa
  unsure (1)..(124): unsure at all Xaa locations
  Clone ID: PAT_MRT4530_90371C.1.pep
MDSPATPVGLSPPLLSLINGRTXDGDLAGDWMVGCDFRGQEHVEDDETNPTVLTLEPNDERRRPATRSSGGAASVDGGDGAAVVGGFGEIAAGLLHPPAHRRSSPNGRPGPVLFRRGYVEEAVH

SEQ ID NO: 194319 - protein, 506 aa, Oryza sativa
  Clone ID: PAT_MRT4530_90372C.1.pep
MASAVLVFAGRSVATPAISFFVNKAFSYLNKYHKSEGLGDMKKRLKMNIPKIQSVIDVADPDYIKERSEDLDTWLWQLRDAVEKAEDAIDELEYYELKEKQKDLKDSHLGSSFAKMNHKFFQSVKHVKMLGKTSDSPLKRLKKAMEDLDEAAKGVENFLTVVDQITRPNLNIPQRHHSISRYRETGRMLTADRVFGRENEKERIVGWLTSTSSEENEVVMNNNPVPIMSIVGHGGIGKTTLAQLIAKENRIKEHFKTVIWVSVSTNFNAETLISKIIQSVTLSKPSFDTYDALQEHLARTLETIKYLLILDDVWEDKEISEWEKLFASLRTGVYGRKILLTTRMQSVADLASAIPKNLKNYKKLEKKLQETKRVSLGNKGMEDIMKVLKVCFRYCSIFPQDHEFKKEELVQMWIASGLISQTTGECARIFDANGSKKVKRTVRHLSVVGINSFPADIIKSFSRFKNLRTIVFEDCHDIQDNTVCSVEEVVRRDLKSPACRESSLIQ

SEQ ID NO: 194320 - protein, 371 aa, Oryza sativa
  Clone ID: PAT_MRT4530_90373C.1.pep
MAGRGHAALWVKLYELELQLRLMRAARGEEGAAAAADDDDEVGDVASRAGAEGACRGRQYDAYMRRRDARRHTTGGVAAAASERHTTRPRGGARAAGGGGGGEEVAAGGVYSDHPEEGEFGRGAAQGEDGEHRRGRGEAGAPEAEQPRGGAVRLRRLRHAAAVPPARQRHGRRHDDDVDDAAAACAADAEGARRPTDQRRGHGQPEATSSSARPARAGGGASPPPLPVRVGASTPPPPHGGAGLPEVGGGAAIAAAATGEEAVGKPGDDDDAADAAGDPLLRRRRLAQGFRQGDQEAAQLREEEQQQERRRPAAFPGASGRRKARDGHGMARRRGGASGDSLAQLAPVLMAPWLRLAWRWFAMTQPAGIFG

SEQ ID NO: 194321 - protein, 627 aa, Oryza sativa
  Clone ID: PAT_MRT4530_90374C.1.pep
MTTPGANPPSPTPVRIQEEANPATEAVAEGHPSTTVVEQPEIHELPQEQHTSMSGGTSASRSSRNPRSQNIWLITVQVIREVDASGRPTAPRTVIGRWSNCCGLVARENFGILHKDIGKVTEAEKERAWTAMEKWFTFPAEAKDRLKRKAFQKMGKAWKNWKSKLFTEFVNPPGNHTPFNEYPQITEVGTSARRQYGPKKMQPLQQRMSLPRFQTSLNKELATRRGLGGIAQCVLLARVHPTFAPEVAEGMAFKPSVTDKVHSADLLAGYAKVSIDTVKDTWSSYPLPVPPNDEIMTLGDARKTFIQWPKEDIVVKMTPRPSRPTELTPPKSKLSIEAPHGPALSVPHSPGGADMDLADIAQSLAPIKTTRKTDSFPPLVKGQKRERGKGKVRELAPKPKRGKAATSMPLHKQYMKLSNAKRKMRESSIVGHHDHQPFLSSPAYITIGFDDLFDLFRIRKLDTGLLKCYSLLCWIESRRLGNQVGFLDPSMVNEVNLRQSFTEVVDYVNRCLWAHQDKKYIMCAHNQERHWILLVIVPKWSRVTYLNSNKSKDYDFIEITKALNMAWGPYVEKGGRHKEGKDELYHDTKFACAQQIGDQCGFHVCHNMSTLLREVKDFDPEVVANGE

SEQ ID NO: 194322 - protein, 209 aa, Oryza sativa
  Clone ID: PAT_MRT4530_90375C.1.pep
MNILNQPINPGGHPAFPAARETGQLMPASVRFDGLSTQQSTAAAVGRAHAGQSPRWQAQTLRRPSSYVGVEHDEPADAAAADALAPFQPLTLDFLRSLLDRNAAVAADQGGGADVAPPPPPLHALRVVVSSAVELDARQTELIARKMRRITGFASLTIENVVDPSLIAGFVVCYGPGESHVIDLSVKGKLAMLKNRVDSFDQTIAHPHQ

SEQ ID NO: 194323 - protein, 727 aa, Oryza sativa
  Clone ID: PAT_MRT4530_90376C.1.pep
MAVQQPEIHELPQEQHTSMSGGTSASRSSTNPRSQNIWPTTVQVIREVDASGRPTAPRTVIGRWSNCCGLAARENFGILHKDIGKVTEAEKERAWTAMEKWFTFPAEAKDRLKRKAFQKMGKAWKNGKSKLFTEFVNPHGNHTPFDEYPQITEAVWEEFCSLKITQEFRESSEAHRLLQQRNEHLHRLGTAGYIGKEAIWAQEDAAAAAANVPALFSDIPEQRARNWARARGKVNPDGSVTFENKSDAVVYQELLGLVAEQASQSEVESAPKRREDDILTKALGTKEHPGRTRGIGSDVPWKHGLPQYSSQYRKRKVSKEERDAHLKAELKVEVIQELEASMNARVEERVNKVLADMNIPRVTTPAVQPTPLVQHDASPSQHRSSCASIEVPAPGLPIAPLAAVDHIEGAAQCVLLARVHPTFAPEVAEGMAFKPSVTDKVHGADLLARYAKVSIDTVKDTWSGYPLPMPPNDEIMTLGDARKTFIQWPKEDIVVKMTPRPSRPTELTPPKSKLSIEAPRGPALSVPHSPGGADMDLADIAQILAPIKTTRKADSSPPLVKGQKRKRGKGKVRELAPEPKRARLRRRCRLCWIESRRHGNQVGFLDPSMVNEVNLRQSFTEVVDYVNRRHWILLVIVPKWSKVTYLNSNKSKDYDFSEITKALNMAWGPYVEKGGRHKEGKYELYHDTKFACAQQIGDQCGFHVCHNMSTLLREVKDFDPEVVANGE

SEQ ID NO: 194324 - protein, 1171 aa, Oryza sativa
  Clone ID: PAT_MRT4530_90377C.1.pep
MRPASASAADERPLVELTSAAATAPASTETSTFSSAPGFTRAVRCSGAGSSSSSSSSSDEGGGGVYPGNAISTTKYTAASFVPKSLFEQFRRAANCFFLVVACVSFSPLAPYRAVSVLLPLVVVVGAAMAKEPVEDWRRKQQDIEVNSRKVEVYDGTQSFHQTEWKKLQVGDIVKVKKDEFFPADLVLLSSSYEDGICYVETMNLDGETNLKRKQSLDVTAGLNEDHSFHTFKAFIQCEDPNEKLYSFLGTLHYNGQQYPLSPQQILLRDSKLRNTNQIYGIVIFTGHDTKVMQNAMEPPSKRSSVERRMDKIIYLLFVILFAIASFGSVMFGIRTRAELSAGNYAWYLRPDNSTMYFDPNRATLAAICHFLTSLMLYVCLVPISLYISIEIVKVLQSTFINQDQNMYCEESDKPARARTSNLNEELGQVHTILSDKTATLTCNSMEFLKCSIAGVAYGNRPIEVQMPYGGIEEECVDIGQKGAVKSVRPVKGFNFTDDRLMNGQWSKECHQDVIEMFFRVLAVCHTAIPVADRTSGGMSYEAESPDEGALVAAARELGFEFYHRSQTSISVHEYDPVFGRKVDRTYKLLNTLEFSSARKRMSVIVSTEEGRLFLFCKGADSVILERLSKDNSKACLTNTKCHIDEYSEAGLRTLALAYRELTEDEYVAWNMEYSAAKNSVHNDHDVAVEKASENIEKDLVLLGATAVEDRLQKGVPECIHKLAQAGIKIWILTGDKLETAVNIGLVPYVAYVPDNYACNLLRKGMEEVYITLDNPGTNVPEEHNGESSGMAPYEQIGRKLEDARRQILQKGTSAPFALIIDGNALTHALMGGLKTAFLDLAVDCASVLCCRISPKQKALITRLVKNRIRKTTLAIGDGANDVGMLQEADIGVGISGAEGMQAVMASDFAIAQFRFLERLLLVHGHWCYRRIAAMICYFFFKNITFGFTLFWFEAHAMFSAQPGYNDWFISFYNVAFTSLPVIALGVFDKDVSSRVCLEVPSLHQDGVNNLFFSWSRILSWMLNGVCCSIIIYFGALHAVLIQAVRQDGHVAGFDILGVTMYTCVVWTVNCQLALYISYFTWIQHFVIWGSILIWYTFLVIYGSFPPTISTSAYHVFWEACASSPLYWLSTLVIVVTALIPYFLYKITQSLFCPQHCDQVQRPNSKELVAQ

SEQ ID NO: 194325 - protein, 1641 aa, Oryza sativa
  Clone ID: PAT_MRT4530_90378C.1.pep
MPSPVRHLAAARHRYPLTCDGPKGKPVRAEEVLDQGVENTAAAREGMFVPSPLGGETIDLDTQCLSTMLHDIEDAEDNDRDYEKFSKLVEDCQMPLYDGCKSKHSKLSCVLELMKLKAINGWSDKSFTELLELLKDLLPEGNNLPQTTYEAKQEYADLDVCPICGGSRYKRAKSEGEGSTTKDGLNARRDLEDMGVRSELHPITTESNRVYLPPACYTLSKEEKIDLLTCLSGIKVPSGYSSRISRLVSLQDLKLVGMKSHDCHVLITQLLPVAIRNILPPKVRHPIQRLCSFFHAIGQKIIDPEGLDKLQAELVRTLCHLEMYFPPTFFDIMEHLPVHLVRQTKCCGPAFMTQMYPCERYLGILKGYVRNRSHPEGSIIESYTTEEAIEFCVDYMSETSSIGLPRSHHEGRLDGVGTVGRKTIRLDRKVYDKAHFTVLQHMTEVVPYVDEHLAVIRQENPGRSESWVRNKHMSSFNEWLKNRIARLQNLPSETLQWLSQGPEWSATTWQGYDINGYTFHTVKQDSKCTVQNSGLRIEAASDGGRRDQYYGRVEQILELDYLKFKVPLFRCRWVDLRNVKVDNEGFTTVNLANNAYKDEPFVLAKQVVQVFYIVDPCNKKVHVVREGKRRIVGLDNIADEDDYNQHVHGIGQEIPLEEEEEEDEVQYARPSQVTSPVMAQSVGPVTGGLTCDGSTVGARHRSIQIRRPLSLTHSLDRRLASLDLSATLYALLSTAASTSPPPSSPPPNPPPSPPPSTPSSPPPRPRPLRHHLCRRPLRRPPHRRLDLSAALSTAAASRPPPSISIDLSAAISAALSTAISALYAALPTAASTSPPLPPHSLSRRPPGPPLSRHARTVVAATGISSPPPPPLDRDSSSPCAASSARRLLSRPTAPRTVIGRWSNCCGIAARENFGILHKDIGKVTEAEKERAWTAMEKWFTFPAEAKDRLKRKAFQKMGKAWKNWKSKLFTEFVNPPGNHTPFDEYPQITEAVWEEFCSLKTTQEFRESSEAHRLLQQRNEHPHRLGTAGYICKEAIWAQEDAAAAAANVPAPFSDIPEQRARNWARARGKVNPDGSVTFENKSDAVVYQELLGLVTEQASQSEVESAPKRREDDILTKALGTKEHPGRTRGIGSDVPWKHGLPQYRSQYRKRKVSKEERDARLKAELKVEVIQELEASMNARVEERVNKHRSSCASTEVPAPGLPIAPLVAVDHIEGAAQCVLLARVHPTFAPEVAEGMAFKPSVTDKVHGADLLAGYAKVSIDTVKDTWSGYPLPVPPNDEIMTLGDARKTFIQWPKEDIVVKMTPRPSRPTELTPPKSKLSIEAPRGPALSVPHSPGGADMDLADIAQSLAPIKTTRKADSSPPLVKGQKRERGKGKVGELAPEPKRGKAATSMPVSKSGKVVRAPAQFELGMPLVEDNVLAVMGIACRELHKQYMELSNAKRKMRESSIVGHHDHQPFLSSPAYITIGFDDLFDLFRIRKLDTGLLKCYSLLCWIESRRHGNQVGFLDPSMVNEVNLRQSFTEVVDYVNREITKALNMAWGPYVEKGGRHKEGKNELYHDTKFACAQQIGDQCGFHVCHNMSTLLREVKDFDPEVVEWEAAAAATTSSRLLGAESDRGSGGGGRVSGGATGGTDERRR

SEQ ID NO: 194326 - protein, 32 aa, Oryza sativa
  Clone ID: PAT_MRT4530_90379C.1.pep
IKIFQLVGLLNFKHAFNKHNPKRKTQSVTLYL

SEQ ID NO: 194327 - protein, 85 aa, Oryza sativa
  Clone ID: PAT_MRT4530_9037C.1.pep
MAAATTSHQIGYSRETKEEEQQHELTTNKQNEKKPPVAIDDDVRGLRLWPWWRRKDGGGNQDEGGSGKSAGVRSDLHKLPPANHK

SEQ ID NO: 194328 - protein, 1039 aa, Oryza sativa
  Clone ID: PAT_MRT4530_90380C.1.pep
MESKRRLMSQLKKCWIRVYRTPPQLEKAYAEDNDRDYEKFSKLVEDCQMPLYDGCKSKHSKLSCVLELMKLKAINGWSDKSFTELLELLKDLLPEGNNLPQTTYEAKQVLCPLGLEDLEVRHCIDLMHVEKNVCESLMGLLLNPGTTKDGLNARRDLEDMGVRSELHPITTESGRVYLPPACYTLSKEEKIDLLTCLSGIKVPSGYSSRISRLVSLQDLKLVGMKSHDCHVLITQLLPVAIRNILPPKVRHPIQRLCSFFHAIGQKIIDPEGLDKLQAELVRTLCHLEMYFPPTFFDIMEHLPVHLVRQTKCCGPAFMTQMYPCERPTAPRTVIGRWSNCCGIAARENFGILHKDIGKVTEAEKERAWTAMEKWFTFPAEAKDRLKRKAFQKMGKAWKNWKSKLFTEFVNPPGNHTPFDEYPQITEAVWEEFCSLKTTQEFRESSEAHRLLQQRNEHPHRLGTAGYIGKEAIWAQEDAAAAAANVPAPFSDIPEQRARNWARARGKVNPNGSVTFENKSDAVVYQELLGLVTEQASQSEVESAPKRREDDILTKALGTKEHPGRTRGIGSDVPWKHGLPQYRSQYRKRKVSKEERDARLKAELKVEVIQELEASMNARVEERVNKHRSSCASTEVPAPGLPIAPLAAVDHIEGAAQCVLLARVHPTFAPEVAEGMAFKPSVTDKVHGADLLARYAKVSIDTVKDTWSGYLLPVPPNDEIMTFGDARKTFIQWPKEDIVVKMTPRPSRPTELTPPKSKLSIEAPRGPALSVPHSPGGADMDLADIAQSLAPIKTTRKADSSPPLVKGQKRERGKGKVGELAPEPKRGKAATSMPVSKSGKVVRAPAQFELGMPLVEDNVLAVMGIACRELHKQYMELSNAKRKMRESSIVGHHDHQPFLSSPAYITIGFDDLFDLFRIRKLDTGLLKCYSLLCWIESRRHGNQVGFLDPSMVNEVNLRQSFTEVVDYVNREITKALNMAWGPYVEKGGRHKEGKNELYHDTKFACAQQIGDQCGFHVCHNMSTLLREVKDFDPEVVANGE

SEQ ID NO: 194329 - protein, 862 aa, Oryza sativa
  unsure (1)..(862): unsure at all Xaa locations
  Clone ID: PAT_MRT4530_90381C.1.pep
MTTPGANPPSPTPARIQEEANPATETVAEGHPSTTAVEQPEIHELPQEQHTSMSGGTSASRSSRNPRSQNIWPTTVQVIRQVDASGRPTAPRTVIGRWSNCYGLAARENFGILHKDTGKVTEAEKEQAWTTMEKWFTFPAEAKDRLKRKAFHKMGKAWKNWKSKLFTEFVNPSGNHTSFDEYPQITKARNEHPHRLGTAGYIGKEAIWAQEDAAAAVANVPAPFSDIPEQRARNCARARGKVNPDGSVTFENKSDAVVYQELLGLVAEQASQSEVESAPKRREDDILTKALGTKEHPGRTRGIGSDVPWKHGLPQYSSQYRKRKVSEEERDARLKAELKVEVIQELEASMNARVEERVNKVLADMNIPRGTTPAVHPTPRAQHDASPSQHRSSCSSTEVPAPGLPVAPLAAVDHIECVLLARVHPTFAPEVAEGMDFKPSVTDKVHGADLLAGYTKVSIDTVKDTWSGYPLPVPPNDEIMTLGDACKTFIQWPKEDIVVKMTPRPSRPTELTPPKSKLSIEAPHRLALSVPQSPGGADMDFADIAQSLAPIKTTRKADSSPPLVKGQKRERGKGKVGELAPEPKRGKAATSMPVSKAGKVVRAPAQFELGMPLVEDNVLAVMGIACRELHKQYMELSNAKRKMRESSIVGHHDHQPFLSSLAYITIGFDDLFDLFRIRKLDTGLLKCYSLLCWIESRHLGNQVGFLDPSMVNEVNLRQSFTEVIHYVNRCLWAHQDKEYIMCAHNQERHWILLVIVPKWSRVTYLNSNKSKDYDFSEITKALNMAWGPYVEKGGRHKEGKDELYHDTKFACAQQIGDQCGXFHVYHNMSTLLREKGRAGFKISPINPPLSEAKLWRSRTLWL

SEQ ID NO: 194330 - protein, 179 aa, Oryza sativa
  Clone ID: PAT_MRT4530_90382C.1.pep
KFSFLPYLEFFANRFVVLPPSSFNLSSHRVKFGIYLRTYAAKVAERQPITWEEFTEGFKKTHVPVGVVALKKREFRALKHKDRTVAEYLHEFNRLARYAPEDVRTDEERQEKFLEGLKDELSVMLISHDYEDFQELVDKAIRLEDKKNRMEQKILLPIQLRIRDGGRARQDGVDDEAGE

SEQ ID NO: 194331 - protein, 492 aa, Oryza sativa
  Clone ID: PAT_MRT4530_90383C.1.pep
MEKWFTFPAEAKDRLKRKAFQKMGKAWKNWKSKLFTEFVNPPGNHTPFDEYPQITEAVWEEFCSFKTTQEFRESSEAHRVLQQRNEHPHRLGTAGYIGKEAIWAQEDAAAAAANVPAPFSDIPEQRARNWARARGKVNPDGSVTFENKSDAVVYQELGAAQCVLLARVHPTFAPEVAEGMAFKPSVTDKVHGADLLAGYAKVSIDTVKDTWSGYPLPVPPNDEIMTLGDARKTFIQWPKEDIVVKMTPRPSRPTELTPPKSKLSIEAPRGPALSVPHSPGGADMDLADIAQSLAPIKTTRKADSSPPLVKGQKRERGKGKVGELAPEPKRGKAATSMPVSKSGKVVRAPAQFELGMPLVEDNVLAVMGIACRELHKQYMELSNAKRKMRESSIVGHHDHQPFLSSPAYITIGFDDLFDLFRIRKLDTGLLKCYSLLCWIESRRHGNQVGFLDPSMVNEVNLRQSFTEVVDYVNRCLWAHQDKEYIMCAHNQE

SEQ ID NO: 194332 - protein, 59 aa, Oryza sativa
  Clone ID: PAT_MRT4530_90384C.1.pep
AKPTQPHAETHTNGLGYYSMPVEKATVAERILLREKKQAVSQRVKLVRIGYHAVRIWRS

SEQ ID NO: 194333 - protein, 922 aa, Oryza sativa
  Clone ID: PAT_MRT4530_90385C.1.pep
MATPGANPPTPTPARIQEEANPATGTVAEGHPSTTAVEQPEIHELPQEQHTLMSGATSASRSSRNPRSQNIWPTTVQVIREIDASGRPTAPRTVIGRWSNCCGLAARENFGILHKDIGKVTEAEKERAWTAMEKWFTFPAEAKDRLKRKAFQKMGKAWKNWKSKLFTEFVNPPGNHTPFDEYPQITEAVWEEFCSLKNTQEFRESSEAHRLLQQRNEHPHRLGTAGYIGKEAIWAHEDAAAAAANVPAPFSHIPEQRARNWARARGKVNPDGSVTFENKSDAVVYQELLGLVAEQASQSEVESAPKRREDDILTKALGTKEYPGRTRGIGSDVPWKHGLPQYSSQYRKRKVSKQERDARLKAELKVEVIQELEASMNARVEERVNKVLADMNIPRVTTPVMHPTPRAQHDPSPSQHRSSCASTEVPAPGLPIAPLAAVDHIEGAAQCVLLARVHPTFAPEVAEGMAFKPSVTDKVHGADLLARYAKVSIDTVKDTWSGYPLPVPPNDEIMTLGDARKTFIQWPKEDIVVKMTPRPSQPTELTPPKSKLSIEAPCGPALSVPHSPGGADMDLADITQSLAPIKTTRKADSSPPLVKDKKRERGKGKVGELAPEPKRGKAATSMPVSKAGKVVRAPAQFELGMPLVEDNVLAVMGIACRELHKQYIELSNAKRKMRESSIVGHHDHQPFLLSPAYITMGFDDLFDLFRIRKLDTGLLKCYTLLCWIESRRLGNQVGFLDPSMVNEVNLQQSFTEMVDYVNRCLWAHQDKEYIMCAHNQEQHWILLVIVPKWSRVTYLNSNKSKDYDFSEITKALNMACGPYVEKGGRHREGKDELYHDTKFACAQQIGDQCGFHVCHNMSTLLREVKDFDPEVVANREKAHFNTYIAIQNMLINLLFIKQKVVEVDDIMALIHLRAWLANPEAS

SEQ ID NO: 194334 - protein, 46 aa, Oryza sativa
  Clone ID: PAT_MRT4530_90386C.1.pep
MSGLSSSKDMNLQRGGGVHRWAGIDVLKKWFRVVQIATKVKIPSPK

SEQ ID NO: 194335 - protein, 103 aa, Oryza sativa
  Clone ID: PAT_MRT4530_90387C.1.pep
LAAIFLAVLPGPFFPLRIKNPFFFLKKKKKQNGGALFRDPNFPSPCFQRIIFFLGPPNLIPWPAFYHPRSWKTLGFPHFIPLEKIPLFPSVVITKRPPPVPLS

SEQ ID NO: 194336 - protein, 86 aa, Oryza sativa
  Clone ID: PAT_MRT4530_90388C.1.pep
MSWACRSLPNCPNGKSSWSELVGKKGSEAMAVILRERPDITRAILVPQDAVITDDYCCNRVRILVDCGDGGGDCGDASVTAVPMIG

SEQ ID NO: 194337 - protein, 176 aa, Oryza sativa
  Clone ID: PAT_MRT4530_90389C.1.pep
LEKDAACLFTPSIFKKVKIEISKSIDWEVIDYIDEDTVHRYVICLKDNPDKVKILNCNYEDSILKTLSCPCRKLECESLPCHHIFAVLFHLKLDAIPKFCVERRWTVQAKNVFPSDRYGEAYTWSDQMERYRRLRSFGSEVLLKCSMSKECTLKVMEMLEQLDIETEGSEQKDIVL

SEQ ID NO: 194338 - protein, 52 aa, Oryza sativa
  unsure (1)..(52): unsure at all Xaa locations
  Clone ID: PAT_MRT4530_9038C.1.pep
PLVITTNXXQEPAGIFKRVWGLHPIGTDSLIQRYSRKCIEVQSIFVQISCYY

SEQ ID NO: 194339 - protein, 36 aa, Oryza sativa
  Clone ID: PAT_MRT4530_90390C.1.pep
VIICTVNSILHWIVNISYVYKKNFASQKKNSPNNML

SEQ ID NO: 194340 - protein, 47 aa, Oryza sativa
  Clone ID: PAT_MRT4530_90391C.1.pep
RAAGIGTRRESLCISLSVATFIYFNLQSALIDVNIRLQVILATKEYK

SEQ ID NO: 194341 - protein, 476 aa, Oryza sativa
  Clone ID: PAT_MRT4530_90392C.1.pep
MAATEATTIEDTPTWIVAAVCSAIVLISFAFERSLHYLGKALERRRRTLYEALLKLKEELMLLGFISLLLVVFQEPIQRICIAESLMGHWLPCRSDGKASSHHGVAAASAAVVSGAGARRLLGEGTAGSGHCSSKGKVPLLSLHAIEQIHIFIFVLAITHVVLSAVTVLLGLLQMRRWRHWENAIKADGDFGPKMINRAQQFKFIQDRYKGFDKVTMVIIWMRSFFKQFYGSVTKDDYTAMRLGFVMEHFRGHPKFNFYDYMIKALEKDYKRVVGIKWYLWIFVMIFLLLNITGWHSYFWISLIPLVLLLLIGTKLEHIITQLAYEVATKHTAVEGDIAVSPSDNLFWFHSPRLVLALLRFILFQNAFEFAYFIWTMATFGFNSCIMDRLPYRVSRIVICVVVQVLCSYSTLPLYAIVSHMGSSFKSAVFSDDVADNLRKWADEARRRTGRAAAGVGCLGAAAGSSRREGIHIQNM

SEQ ID NO: 194342 - protein, 55 aa, Oryza sativa
  Clone ID: PAT_MRT4530_90393C.1.pep
MDDVAAEELGGGDAIDNGDDVRPRHDPQQHDSGDYALHHVADTLHRFASDEHDQR

SEQ ID NO: 194343 - protein, 61 aa, Oryza sativa
  Clone ID: PAT_MRT4530_90394C.1.pep
LRLHHRLAFTAADWCLRRLPRMMPTGAIVFTVGHVAATANRHHHLQRKLSTSAADWFFHFH

SEQ ID NO: 194344 - protein, 365 aa, Oryza sativa
  Clone ID: PAT_MRT4530_90395C.1.pep
MAVIFQLDIRHPFYYCRNLVSTVVTSHGVGGGGGVKVKHVLEVSLDLKRYEYYTFGEYDHAADAYVPDAALADGDDGLRYDYGNFYASKTFLDTARHRRVLWGWANESDSAADDVRKGWAGVQAIPRKVWLAPDGKQLMQWPVAEIESLRGNHVNVTDKLVRGGGGGNYFEVSGLATPAQADVEATFQVMDLDKAEPFDPAWRGADAQAVCAARGADARGGVGPFGLWVLASDELKERTAVFFSVFKRDDADVARVDGGKKHVVLTCNDPSRSSYAEQLYKPTYAGFVDVDIAPTGKISLRTLIDHSVVESFGGHGKTAILARVYPTKAVGDKARLFVFNNGESDVKVTNLNAYDMGSAKITTDA

SEQ ID NO: 194345 - protein, 230 aa, Oryza sativa
  unsure (1)..(230): unsure at all Xaa locations
  Clone ID: PAT_MRT4530_90396C.1.pep
SLSKRHAEPPPPLLSARSTPSTDDDDRDSRRWLTIRSRSARRRLPPLQRPRRRVHSTTKSRAPPHPSSPPAPSLTRRPRRRRWLPPLQXARRWLPPLPTSTPPVPSTTMSASRHIPPRRRRPPSSTTTTTTTPPTAPSSPDPRXRRLPPLPRPRRRLPPRRRPRAAASLRRRPRRTTTRAAGFSPHRLRRPLRRRRRRRRRQRTERSPGRRRPVVFFYFPEMIFAGGPVH

SEQ ID NO: 194346 - protein, 105 aa, Oryza sativa
  Clone ID: PAT_MRT4530_90397C.1.pep
MTMITPSFILTHYRESWYACRYRSRNSPGLTHSVRPGVPVLTPATSSRPDVKGKGGKAYGQYGALCLETPRGSPTPVNHPHFPLGDREARNTVYTAPRWCTQFSF

SEQ ID NO: 194347 - protein, 296 aa, Oryza sativa
  Clone ID: PAT_MRT4530_90398C.1.pep
QAPSPSSPSSSSSSSSGNGSNKAPPPEESDNSSSNGSSSSSPTPPSSQSSDSDSGGGSSSPSQGSSSPSPPPPSGSSSESHSSPPPAPPQSSSSSSSSSSSGGGSKSSPEAPSPPSESSGNGGGGGGGGRSSPPPNWSPPPQQQQQHQSGGSTPSPPPSPSSNQPPPSSGSSASSSEPSPPRSSPPPSPPQSSGGNNGQPPKPSGGQQQAPPQSPPSAANQSVVFIPVPVASNSPPGMLPPPQVIDATPSGAISSTNFPGGRNSTAGSSNTSLSQQQHTTVSSTAQASSSGHIAAA

SEQ ID NO: 194348 - protein, 92 aa, Oryza sativa
  Clone ID: PAT_MRT4530_90399C.1.pep
YSSLSTPWCIHRLNYLLFFECDRTKLRKHNSTEIRDKLNGPPSHAVVCQEPIPTSSTSFNCWSNQQPHESIHAASIHMHKNSMYSSADDPRA

SEQ ID NO: 194349 - protein, 51 aa, Oryza sativa
  Clone ID: PAT_MRT4530_9039C.1.pep
MHPLFFIVDRPELGVVGSVQSGKYLYLPMKGRILFFLVCCKLMGRFQVIFL

SEQ ID NO: 194350 - protein, 107 aa, Oryza sativa
  Clone ID: PAT_MRT4530_903C.1.pep
MNALRKEFILIIRVFKGLSMDAKELGAEFRWAAILCHPISDSKNKSVLRLSTIAIGRIVSLNRKIGYIGSFNYKNQTNYLLERFERQFRPECRIDRVFIPLNVYMAS

SEQ ID NO: 194351 - protein, 308 aa, Oryza sativa
  Clone ID: PAT_MRT4530_90400C.1.pep
MTVTQSLSHKPPHLTRLPLRRDMLPLRRLPPLSFPLPRGPTPRRLFATAASASTAASPLPWPGLHAWRRAPPSDLRTWGPHGPCASPDAADESGSEEASAGSSLAEMGALVLSTADPLSKARLTHAAFSRLVAGLPVGMAEAPDHPARPDKPIVVTQKEITTHKQMGVPLNAYMLHMLAHVELNAIDLAWDTVVRFSPLRDTLGDGFFVDFARVADDESRHFRWYSQRLAELGFRYQEKFKHETPSKLSEIYIYGRCTGQTLAASHGNSHDRPFGPSNGSDLPLADYLNPGPKSPTTVLHLAAAEGWV

SEQ ID NO: 194352 - protein, 138 aa, Oryza sativa
  Clone ID: PAT_MRT4530_90401C.1.pep
MMTSSKAAGSDGDLAGARATGCGFGGHLHVENDETNPMVLTEVPNDDRRRPATRGATAAARLTGGGGAPVAGDDGEGAAGLAHTSAHLTAVTATGGDDGGGGATRMELGRRRRRGGARGGSATRHGRPRERGQTKEED

SEQ ID NO: 194353 - protein, 227 aa, Oryza sativa
  unsure (1)..(227): unsure at all Xaa locations
  Clone ID: PAT_MRT4530_90402C.1.pep
MDSPATPVGLSPPLLSLVLCNEPCYTKGKEGLLRQRLGFAVDRVHGGGSRERTAEIXLSKTDGRDRSVHARLTGEGDDDVSDDVSTGGGSAALRHKRRAPRRRSRRGELTDDQNVGGRPTDGGGVEEKAAEKIGSTAATVLRRSSAAAKRWTGTAATLRTRWWRRRLTTAAATAARRGXTDGNDGGXRATRRRRXRRRRAKAKVAAGRRDTGGPYKGASERRRRPTA

SEQ ID NO: 194354 - protein, 301 aa, Oryza sativa
  unsure (1)..(301): unsure at all Xaa locations
  Clone ID: PAT_MRT4530_90403C.1.pep
MASAPLPQAAQLGYKPNVFSFWILFLQLRLIDYCKNEHMTYSTSHTANMQVHKDTKGWHNIGSFAKSAFSKTFRRRTGEPSQRRKRQANTQNXRKRLXKPKAPKRCGRRGELTGDQNGGGRATDGAGDEXRSGGGLRVNGXRRCSGGLRRRRSGGRASPSPCARRCHASSRPIPPRTVXSPHRLQPVASPVAAASPSHRRAPPRRRPIAARRRPSRRRARVAITACHRTPSPAPPRAPHRHPSHRRSEPCALPSPFSFLFLFSVSSSFARSRLXLPPPPLPPLAAAPRPLPSPLPPPPLPR

SEQ ID NO: 194355 - protein, 167 aa, Oryza sativa
  unsure (1)..(167): unsure at all Xaa locations
  Clone ID: PAT_MRT4530_90404C.1.pep
MASAPLPQAAQLGYKPNVFSFWILFLQLRFDDYCKNEHMTYSTSHTANMQVHKDTKGWHNIGSFAKVAFSKYLREVKHSPPERRKLXAKEQNQQNRPADWRAPTRRGRRRDLNDTHQRDERRRMTAGGELXGGGGSVXRRRRVSGDRRQRGEGGRGSSPPCAPNGGE

SEQ ID NO: 194356 - protein, 57 aa, Oryza sativa
  Clone ID: PAT_MRT4530_90405C.1.pep
GNFRVGNPNLLIRINQRYYLPVFQNIKRPGICCVWYNVFKVSGLENTPPGYVSPGKK

SEQ ID NO: 194357 - protein, 198 aa, Oryza sativa
  Clone ID: PAT_MRT4530_90406C.1.pep
MKRFAFEDSDMARVLMLMSSHGQQEQALALPVPVQLPLAAARGDRAPERAFVCKTCNRVFPSFQALGGHRASHKKPRLDGDGDLSLSKPKLHGCSICGLEFAIGQALGGHMRRHRAMTGGMPRAIVVDKKPDVVDVHVHGHDDDGGIKRGGLWLDLNHPPCDDAGDDDAECGHNAAGAGITFHQFLDTGAMAVDCVGY

SEQ ID NO: 194358 - protein, 63 aa, Oryza sativa
  Clone ID: PAT_MRT4530_90407C.1.pep
MAMSALKFCGECSNMLYPREDKETHTLLYACNSCEHQAPTKGEKGLTLYFICCNPSCGHRWRD

SEQ ID NO: 194359 - protein, 835 aa, Oryza sativa
  Clone ID: PAT_MRT4530_90408C.1.pep
MSTPGANPPSPTPARIQEEANPATEAVAEGHPATTAVQQHTSMSGGTSASRSSRNPRSQNIWPTTVQVIREVDASGRPTAPRTVIGRWSNCCGLTARENFGILHKDIGKVTEAEKERAWTAMEKWFTFPAEAKDRLKRKAFQKMGKAWKNWKSKLFTEFVNPPGNHTPFDEYPQITEAVWEEFCSLKTTQEFRESSEAHRVLQQRNEHPHRLGTAGYIGKEAIWAQEDAAAAAANVPAPFSDIPEQRARNWARARGKVNPDSSVTFENKSDAVVYQELLGLVAEQASQSEVESAPKRREDDILTKALGTKEHPGRTRGIGSDVPWKHGLPQYSSQYRKRKVSKEERDARLKAELKVEVIQELEASMNARVEERVNKVLADMNIPRVTTPAVQPTPRVQHDASPSQHRSSCASTEVPAPGLPIAPLAAVDHIEGAAQCVLLARVHPTFAPEVAEGMAFKPSVTDKVHGADLLAGYAKTFIQWPKEDIVVKMTPRPSRPTELTPPKSKLSIEAPRGPALSVPHSPGGADMDLADIAQSLAPIKTTRKADSSPPLVKGQKRERGKGKVGELAPEPKRGKAATSMPVSKSGKVVRAPAQFELGMPLVEDNVLAVMGIACRELHKQYMELSNAKRKMRESSIVGHHDHQPFLSSPAYITIGFDDLFDLFRIRKLDTSLLKCYSMLCWIESRRHGNQVGFLDPSMVNEVNLRQSFTEVVDYVNRCLWAHQDKEYIMCAHNQERHWILLVIVPKWSRVTYLNSNKSKDYDFSEITKALNMAWGPYMEKGGRHKEGKNELYHDTKFACAQQIGDQCGFHVCHNMSTLLREVKDFDPEVVANGE

SEQ ID NO: 194360 - protein, 119 aa, Oryza sativa
  unsure (1)..(119): unsure at all Xaa locations
  Clone ID: PAT_MRT4530_90409C.1.pep
MGKEKTHINIXXIGHXDSGKPTTTGHLIYKLGGIDKRGIDRLEKEAGEMNKRAFKHARGLDKLKAERERGXTIGTALGKPETTRGYCPAIRAPGHRDVIKNMSTGTSQADCAALIIDST

SEQ ID NO: 194361 - protein, 107 aa, Oryza sativa
  Clone ID: PAT_MRT4530_9040C.1.pep
SVIFGVPVPRQVGPVAHYVLKWVPSAFRMFQRLQSILLGTYMDIGSVQAPRFGIYLVSCLGAPDIGSLALLGSITWRMLPPLFRVYQGCVLNFISAVQCFAYDMMIP

SEQ ID NO: 194362 - protein, 116 aa, Oryza sativa
  Clone ID: PAT_MRT4530_90410C.1.pep
MAMSALKFCGECSNMLYPREDKETHTLLYACNSCEHQEPATDTCVYKRVLRKPAGEPKDILKDAATDPTLPRTRSIKCYNCGHPEAAFFQAPTKGEKGLTLYFICCNPSCGHRWRD

SEQ ID NO: 194363 - protein, 1599 aa, Oryza sativa
  unsure (1)..(1599): unsure at all Xaa locations
  Clone ID: PAT_MRT4530_90411C.1.pep
MKKYTCWTKHGEQEAPDVAAEEVLDQDVENTAAAREGMFVPSPLGGETIDLDTQCLSTMLHDIEDAEDNDRDYEKFSKLVEDCQMPLYDGCKSKHSKLSCVLELMKLKASNGWSDKSFTELLELLKDLLPEGNNLPQTTYEAKQVLCPLGLEVRRIHACPNDCILYYKEYADLDVCPICGGSRYKRAKSEGEGSTTKDGLNARRDLEDMGVRSELHPITTESGRVRHTIQRLCSFFHAIGQKIIDPEGLDELQAELVRTLCHLEMYFPPTFFDIMEHLPVHLVRQTKCCGPAFMTQMYPCERYLGILKGYVRNHSHPEGSIIESYTTEEAIEFCVDYMSETSSIGLPRSHHEGRLDGVGTVGRKTIRLDRKVYDKAHFTVLQHMTEVVPYVDEHLAVIRQENPGRSESWVRNKHMSSFNEWLKNRIARLQNLSSETLQWLSQGPEWSATTWQGYDINGYTFHTVKQDSKCTVQNSGLRIEAASDGGRRDQYYGRVEQILELDYLKFKVPLFRCRWVDLRNVKVDNEGFTTVNLANNAYKDEPFVLAKQVVQVFYIVDPCNKKLHVVREGKRRIVGLDNIADEDDYNQHVHGIGQEIPLEEEEEEDEVQYARPSQVTSPVTAQSVGPVTGGLTCDGSTVGARHRSGAHSHSLTLSTAASPLCRPLRPPLHRRLDLSTAVLAAAKSAALSVLSATLYALLSTAASTSPPPPRPLHCRPLCRSPSPSTFPTPACTTAAALTLSTAAIHLRRPRRLLLHRRLLTHSLDRRHPLHRHLHRRRLNLSSALSAAISAALSAAISAVLSTAISAAASTATLAAGRPLRRPSIDFPDLPDPDLPDAGIPDHRRPPRPLRHCLSTAATRIQDDYGLRRGLQVRRFSKIAAGTTYVDVGRDKCKPTAPRTVIGRWSNCCGLAARENFGILHKDIGKVTEAEKERAWTAMEKWFTFPAEAKDRLKRKAFQKMGKAWKNWKSKLFTEXTQEFRESSEAHRVLQXRNEHPHRLGTAXDIPEQRARNWAWARGKVNPDGSVTFENKSDAVVYQELLGLVAEQASQSEVESVPKRREDDILTKALGTKEHPGRTRGIGSDVPWKHGLPQYSSQYRKRKVSKEERDARLKAELKVEVIQELEASMNARVEERVNKHRSSCPSTEVPAPGLPIAPLAAVDHIEGAAQCVLLARVHPTFAPEVAEGMAFKPSVTDKVHGADLLAGYAKVSIDTVKDTWSGYPLPVPPNDEIMTLGDARKTFIQWPKEDIVVKMTPRPSRPTELTPPKSKLSIEAPRGPALSVPHSPGGADMDLADIAQSLAPIKTTRKADSSPPLVKGQKRERGKGKVGELAPEPKRGKAATSMPVSKSGKVVRAPAQFELGMPLVEDNVLAVMGIACRELHKQYMELSNAKRKMRESSIVGHHDHQPFLSSPAYITIGFDDLFDLFRIRKLDTGLLKCYSLLCWIESRRHGNQVGFLDPSMVNEVNLRQSFTEVVDYVNRCLWAHQDKEYIMCAHNQERHWILLVIVPKWSRVTYLNSNKSKDYDFSEITKALNMAWGPYVEKGGRHKEGKNELYHDTKFACAQQIGDQCGFHVCHNMSTLLREVKDFDPEVVANGE

SEQ ID NO: 194364 - protein, 213 aa, Oryza sativa
  unsure (1)..(213): unsure at all Xaa locations
  Clone ID: PAT_MRT4530_90412C.1.pep
MSSVGLITKNIVRPAHNRGHGYSNSFTLARDVPLYPQDMIPHMLPCPEVPPRHCKGGNRDNILRTTQLTTVHHSWIIITSXKTRGMDSPATPMDFXTLLSLAPHNEPCYTKGKAVATLACGWHGWKARALKRRVEQDRPYPHXTTTIDDERQPATSFEQRRDRDDCDGSFTANTGEEEGMAGVELGLAEPREATAQVGDDRGGGATWLERRPA

SEQ ID NO: 194365 - protein, 420 aa, Oryza sativa
  unsure (1)..(420): unsure at all Xaa locations
  Clone ID: PAT_MRT4530_90413C.1.pep
TVKDTCSGYPLPVPPNDEIMTLGDARKTFIQWPKEDIVVKMTPRPSRPTELTPPKSKLSIEAPRGPALSVPHSPGGADMDLANIAQSLAPIKTTRKADSSPPLVKGKKRERGKGKVGELAPEPKRGKAATSMPLSKAGKAVRAPAQFELGMPLVEDNVLAMMGIACRELHKQYMELSNGKRKMRESSIVGHHDHQPFLSSPAYITIGFDDLFDLFRIRKLDTGLLKCYTLLCWIKSRRLGNQVGFFDPSMVNEVNLQQSFTXRCLWAHQDKEYIMCAHNQERHWILLVIVPKWSRVTYLNSNKSKDYDFTEITKALNMAWGPYVEKGGRHKEGKDELYHDTKFACAQQIGDQCGFHVCHSMSTLLREVKDFDPEVVEVHNEQNTRNFGNHLRTFMGDGLEEKSITGNLTCDGLANVGPSQ

SEQ ID NO: 194366 - protein, 46 aa, Oryza sativa
  unsure (1)..(46): unsure at all Xaa locations
  Clone ID: PAT_MRT4530_90414C.1.pep
RQXPRQPSRPGARSARAQAAYSSAGSLSLTRPPHKVRAEGLSHRED

SEQ ID NO: 194367 - protein, 155 aa, Oryza sativa
  unsure (1)..(155): unsure at all Xaa locations
  Clone ID: PAT_MRT4530_90415C.1.pep
MDSPATPMGLSPPLLSLVLRNEPCYTKDGDLAGDWMVGCDFGGHVHVEDDETNPTVLTLEPNDERRRPATRWTAGAASVGGGAGAAVTGDSGEGAAELAHTSAHLTAVTATGGNGGGGGATRMELGRRRWRGGARGGGATRHGRSRERGXTKEED

SEQ ID NO: 194368 - protein, 260 aa, Oryza sativa
  Clone ID: PAT_MRT4530_90416C.1.pep
MPSSSSSSVAAAPSGSNGTRRDGGSGSVTGCLPADQACFALSSSASSPGYLHASATTTRRDASATVARACCTTASYVVVLGISFGSLLAILLILCIIRWYLVWRSARPRRDDGAADEAVGSAKKRSAGLDDDAIAALPVFAYKQREEGGGGAVGAAEEEEEERECAVCLPVMADGEAARRLPRCMHVFHRGCVDVWLREHSTCPVCRAEVVVRPAGAARVEKLPESSASRALTSPVPAPAPRPTGTVVDDGRERDLEAQQ

SEQ ID NO: 194369 - protein, 417 aa, Oryza sativa
  Clone ID: PAT_MRT4530_90417C.1.pep
MAFKPSVTDKVHGADLLAGYAKVSIDTVKDTWSGYPLPVPPNDEIMTLSDARKTFIQWPKEDIVVKMTPRPSRPTELTPPKSKLSIEAPRGPVLSVPHSPYGANMDLADIAQSLAPIKTTKKADNSPPLVKGQKRELGKVGELAPEPKRGKAATSMPVSKAGKVVRAPAQFELGMPLVEDNVLAVMGIACRELHKQYMELSNAKRKMRESSIVGHHDHQPFLSSLAYITIGFDDFFDFLRIPKLDTRLLKSYSLFCWIESRRLGNQVGFLDPSMMNEVNLRQSFTEVVDYVNRHKKGKDELYHDTKFACAQQIGDQCGFHVCHNMSTLLREVKDFDPEVVEVHNEQDTRNFGNHLRTFMGSDEAEERHANGLGARGVEVHGPDELSRHRGYASVSPTTTLPMSLSTCSAVATVTKLL

SEQ ID NO: 194370 - protein, 55 aa, Oryza sativa
  Clone ID: PAT_MRT4530_90418C.1.pep
MKAWSDCNEPTINPLSMNLRPTGLALSKIKAQNVWTLADFLMLGIIEKFQVLNDD

SEQ ID NO: 194371 - protein, 70 aa, Oryza sativa
  Clone ID: PAT_MRT4530_90419C.1.pep
PGARTRRLPFLLKPSLIRVCNPLGPRGGGGPPSDKTCFRKGFPKKKKKKKKKKKKKKKKKKKKKKKKKKQ

SEQ ID NO: 194372 - protein, 67 aa, Oryza sativa
  Clone ID: PAT_MRT4530_9041C.1.pep
GVVYTHMDIYLHYYQSYSHDVNFFPLIKNYILCLYGIPKFYVLLSREIGLHERSSVFPFGLLVNERI

SEQ ID NO: 194373 - protein, 207 aa, Oryza sativa
  unsure (1)..(207): unsure at all Xaa locations
  Clone ID: PAT_MRT4530_90420C.1.pep
CSHVTYLKKVKTYRENSIXIAQEKTRRFRSALVTTLPTVARARSVAPPLDLCAWGGAPARSAXEEGGGGGGGDAALLARQLMAAYSAAAAPPEVMELTKPAARPLANHPNIRQRAPQPACISGRSSSLSPSLSRASSGKPARRGVVAREMLFXRHRVRPPRATSIHAEARAAHVIVVVLVVKLPPAREARPLSATPSARRGPPRRRR

SEQ ID NO: 194374 - protein, 162 aa, Oryza sativa
  Clone ID: PAT_MRT4530_90421C.1.pep
MASESSQPQFRYTQPPSKALHSRNSPWERTEEELIELGKPCGKVVNTKCNVGANRNQACTEFADLNQAIATISHYASSSEPAQVRGKTVYLQYSNRQEIVNNKTTADVPGNVLLVTIEGADARLVSIDVLHLVMSAFGSVHKITTFEKTAGYQALVQFSDAE

SEQ ID NO: 194375 - protein, 161 aa, Oryza sativa
  unsure (1)..(161): unsure at all Xaa locations
  Clone ID: PAT_MRT4530_90422C.1.pep
THLQHKLIYELTKKGKRNKSWKIVQNQVYLCFYPSLSRERERGKIGANNSQVRSMRGLDVATSSLVFTSCQLHRLLPITTSDPGKSRERAPAAPFFLISIVGHQEDEGRQRNRAAAVSSSFAFLNLVSMPVPSPLISAPXNAVVLWERGPSHRCSGFTSSF

SEQ ID NO: 194376 - protein, 99 aa, Oryza sativa
  unsure (1)..(99): unsure at all Xaa locations
  Clone ID: PAT_MRT4530_90423C.1.pep
DKRAALDTCLCTXDSWNEDHPDKLCDQVSDAVLEVRLGGDPDSKVVCETWANTNMVMVFGESTTXANGDCEKIDRETCRDIXCASADDCLHADQCKVLV

SEQ ID NO: 194377 - protein, 277 aa, Oryza sativa
  unsure (1)..(277): unsure at all Xaa locations
  Clone ID: PAT_MRT4530_90424C.1.pep
SLLSRHVDWFRKSMDIPFRLLLDFYFKKYQTSFPPSXPNNSYKKNVSVSDFLSIETEGNFTLPLSVQAFQEFQELTSFLLDVELVNENDIWSYIWGDMKYSSXKFYALNFRAVKPPVHYLWLWKCKAVSNVKVFGWLLLMSILNTKFMLDHKKCAPPNCDLSCVLCQSIVIEDLMHLFFQCPFAQNCWNLLCITWDTTRSLEGMFIKAKLDYQGSCFMEKFLCAAWNIWKQRNSFILYQKTPSLSSWRRLLKSDLFLLLFRINARYHDVIISWINLL

SEQ ID NO: 194378 - protein, 377 aa, Oryza sativa
  Clone ID: PAT_MRT4530_90425C.1.pep
MDPYTSRAPASGGVAAGDDDEEAACLQAFELMCIFTVPMTLKAAIELGLLDALAAAGDGRALTADELAAARLPDAAPDKAEAASSVDRMLRLLASFDVVKCSTEAGPAGEPLRRRYSPAPVCRLFTAGGNSHHGSLAPSVLFGVDEDYLSTWRQLAAAVGGGGAVAFERAHGAPMFEYMGTNRRLNTLFNQAMAQQSMIVINKLLDRFHGFDGVGVLVDVGGGTGGTLEMIMSRHKHITGVNFDLPHVISQAPSLPGVKHVAGNMFESIPNGDAIFLKSILHLQNDEDCIKILKNCHQALSDNGKLIAVEIVLPAIPEPVPTAQYPFQMDMIMLNNFRGGKERTELEFTKLAMDSSFSGTLRTTYIFANYWALEFNK

SEQ ID NO: 194379 - protein, 635 aa, Oryza sativa
  unsure (1)..(635): unsure at all Xaa locations
  Clone ID: PAT_MRT4530_90426C.1.pep
MALAADAGGDADVAVAAAATETRQPFTALSRLTPAITLARVLQVSEGNNYGSSDVGSYEYDYEDEEDYKEELRVPGNKSGSNMGARGSSHPTPLHPHREEKEGREKKRGVEEEEDVPPSPPFLEPPLHGTNIINMLKRTLLTYYSSSSNTDPSASIENLSQPKRPRAEFSHSDIIGDPGLHKPIEAYPPEIRDQVKYSVXKDAAYCLYCYIFFEPGKREKFESVVFAMEGYVNWKKGXKFKEMFDWYKDKVHEVNDAYEKGLKNCQMLSHHIKKDLTKACAEKVTAIIMYEIGNRNFSMLIDESRDVSIKEQMDVILRFVNDEGKVMERFLGLQHIERCTAIALKEALCGMLSITDDLSRALQRKDQDIVEAMSLLIDVKELLQDMRENGWKPLLNRVISFCNKHEIKVPKMDKEVNERGTSTRRRHNVTNKHYYHVEIYLAAIDAILVEMNHRFSEVSSELLVCMSSLNPRNSFSNFDVDKLVRLAEIYAEACWVCDLMLLRTQLGNFISKVRRNKEFLGCKDLAKVVELMVQTGKNKTYHLVYRLIELSLILPVAMASVEMVFSAMSLIKIDLRNKMGDEWLNDSMICYTEEQIFINISDEKXIIQHFEEMKRRRTLLPQQKXVVCSMPPLSS

SEQ ID NO: 194380 - protein, 173 aa, Oryza sativa
  Clone ID: PAT_MRT4530_90427C.1.pep
MAPPRTSAFKVFEMVEPLSGTRIEALYAWKELESLGGRMLFVARGCSRSYDAGDYPGDEFGEGVYFLDDGRLYRESAVFTARRRRYPCRDTGKWLPAAAAAVPRMIRCRFDPSRCGTDFSISMALDMKIRLCFHLSLKAGLKLGVLDDQIAFVRHRRQNANQHSSRHFGNGGG

SEQ ID NO: 194381 - protein, 138 aa, Oryza sativa
  unsure (1)..(138): unsure at all Xaa locations
  Clone ID: PAT_MRT4530_90428C.1.pep
MVRVSVLNDALKTMYNAEKRGKRQVMIRPSSKVIIKFLIVMQKHGYIGEFEFVDDHRSGKIVVELNGLLNKCGMXRLNKCGVISPRFDVGVKEIESWTARLLPSRQFGYIVLTTSAGIMDHEEARRKNVGGKVLGFFY

SEQ ID NO: 194382 - protein, 53 aa, Oryza sativa
  Clone ID: PAT_MRT4530_90429C.1.pep
KPQLKTMSDGRSNKTRHNCHITNELHQNTNPPHDLHTLQTLTKNFYLPIYART

SEQ ID NO: 194383 - protein, 143 aa, Oryza sativa
  Clone ID: PAT_MRT4530_9042C.1.pep
MTVNRGWEGGGLAAAAGRAAERRVAGQAPGEAGKATRGEIYLGVGALDRLRQVSEHGRGRDCRRICAQKGERPPVSPLPPPPPMDPCAKERESPTADRPFQDSGAKSTAFETAIVIVRSHRTAMQATQGATAEATIELRHNAA

SEQ ID NO: 194384 - protein, 121 aa, Oryza sativa
  Clone ID: PAT_MRT4530_90430C.1.pep
MPRRLQADALVYTARRWRLLSMRSRRRLPASHRRYIGLRPCRPMEWSRRQPGGHDIHFVIDALNLANLVEPPVTPSAEGHLVGRRLRAVIAAPPLDSEHVSSLRLRRPATLSRSSRYLRRC

SEQ ID NO: 194385 - protein, 98 aa, Oryza sativa
  unsure (1)..(98): unsure at all Xaa locations
  Clone ID: PAT_MRT4530_90431C.1.pep
AQVCRGDFCTISNTTVLYQDIPPSSSGARLYKLGHHLAEAIHEPDVTKFTDAIXVYDIITLINTCNTSLLLRAKNELNKMEEHEDELHLKSMHRHLHP

SEQ ID NO: 194386 - protein, 879 aa, Oryza sativa
  unsure (1)..(879): unsure at all Xaa locations
  Clone ID: PAT_MRT4530_90432C.1.pep
HLTHQVAFPCITDEFQFFLGLIGNLDPTEFINGETNQIPFRFANLDLSCWKNTFKSWPXPKKAWPAWYKRISATKSTHWEEIGISQALALTAADMARDEPMMAATSYFWSRAMNTFLFSQGPMTPTLLDSIMITGLDVTSSANLSSLDTQLTHEFKTRSIGGWTSYVAKNMGTGPVSPREHAAFLMMWLEKFLFCGPSCGPTANWQRVAENLVEKKHFPLGKYLLGYLYQTLNTAINKIASGELFGTGGPWWLLRIWLNLHTRMVVNRPPLVDARSPRFEPIIDDDGETSTTRRCMSFGEAASVSITSRLSAKPFGEWFNNFYDGFPKNSRIWFAYEGHGIFELLGDFRFDEINSKKYDKSREVFSAAISPCIIPVGIHQGKNIQMTYEFYHPTSAARQFGMGQLPISLFFADKIQSRGEITSLLMMDRLLNLPRPPLGSINNINFRMLRGAAFDRXWIEWKKHLFHQPASMYLTNLFPKAVPQTTESSPPHHSNSGVDIQYAPGLLPXGGGLTPLVIGYNAXPKTSTLLHGLPRVPIAPAAGKKRAKSAAAPSAAKKKARKQKTAADDLPAIDPDVAEFLEDEAMAEEVDEAAEHISETREHTPPTDSPSPXRTPSPPIRPTYQPRVCIKKKVASKKPQGTSPPQPPRPPTLVSESSENTPSAVGSHHVEEEEVASPAPXAIPVLADMFSFDIRPFLDEEEETTSQALVPLADDTKSTIPDELANAITPTAYLEQHRLKLEKAQKRIADRRERRDLEATIQANRASINEEKAKLDELEAGPSATQANIDRLNNRKIELLAEPEQRNAQLALEQEKLADLPKAIEDQKSKLKASVKHLTELTKSLKPISSTDAADAKTIDEVDQIRQRAISAIQRYVSG

SEQ ID NO: 194387 - protein, 267 aa, Oryza sativa
  Clone ID: PAT_MRT4530_90433C.1.pep
MEFKAAMFAAAVVAVLLSSPSPALAQKKSPPAAPSPVSLPPSLAPAPAPAPHYVDLAELLSVAGPFHTFLNYLEKTNVIETFQSQANKTKEGVTIFVPKDSAFAAIKQSTFSNLTGDQLKTLLLYHAFPKFYSLAEFKNLSELNPVNTFAGAPYTLNLTDDMGTISVQSMWSRPKISSSVYATRPVAVYALNKVLLPMQIFSKDPPLAPAPAPAPVSGASDLAPGPASGKTGAGGGKADSTSAACGVGAGVVNGLVMALAGSLMLLW

SEQ ID NO: 194388 - protein, 38 aa, Oryza sativa
  Clone ID: PAT_MRT4530_90434C.1.pep
LECGLGWGRIPNPFARVGLPFSGKKFLKIHGKKFLTPK

SEQ ID NO: 194389 - protein, 436 aa, Oryza sativa
  Clone ID: PAT_MRT4530_90435C.1.pep
MVGTQWSNVSSTYCKDMASSVYRPHSVTITEFGAVGDGVTLNTKAFQNAIFYLNSFADKGGAQLFVPAGRWLTGSFSLISHLTLSLDKDAEIIGSPDSSDWPVIDPLPSYGRGANGTIERQGGLWWDWFHSNTLNYTRPHLVELMYSTDVVISNLTFKNSPFWNIHPVYCSQVLVQHVTILAPLNSPNTDGIDPDSSTNVCIDHCYVRNGDDVIVIKSGWDEYGISFARPSTNISISNITGETRGGAGIAFGSEMSGGISEVRAEGLRIVNSMHGIRIKTAPGRGGYVKNVYISDVSMDNVSMAIRITGNFGEHPDDKYDRNALPMISNITIENVVGVNVGVAGILEGIEGDNFSSICLSNVSLSVQSMHPWNCSLIEGYSNSVIPESCEQLRTDCGQTPICYDGGSSSAIHAQAARHRLSSASRLLNPLLKLAML

SEQ ID NO: 194390 - protein, 282 aa, Oryza sativa
  Clone ID: PAT_MRT4530_90436C.1.pep
MSAEKQSPPLTGKPPVPPQTKLPKPPGTNLPSIGVESKVNETNIVPVTVDKLSPEQKKEYELMMKSAQEQFMKSFAATRQGKVIQKYKVKVVAADEVGTSSSQGGKGTADGSGDKGDGLQDGVVEDLGEDGTEVREEPPRCTNFQDQVDYAVQRALINQSGVLVNTLTNKIKFVIDGTIAEYENMGPVYLPGGVFPNYRNLVIGNQQHASNAPSVQPTATVYAPAPVAPSSAQRQVVNPRLLSRDQPQHVGQNINRLTQEQTATMFPTTQPIVEPVQSAPIQ

SEQ ID NO: 194391 - protein, 378 aa, Oryza sativa
  Clone ID: PAT_MRT4530_90437C.1.pep
MEIEPHQILPDDLVLEIIARSSPATIIRCGAISKPLRRRILHPAFLRRLRVVNAGDDTGNSRCGFVPSLLLGLYRRAKDLCSPLALVPPDTAGAASIATSLALVPPATPINHGANHSACIFGPYLPLSSRRSLIVLRRRCRVIGHQDYLHSGLTVCNPVSGERWVLPPHEVSDETVVLLDVNHNDQAIGTHSFKLLAAQLLVSPARTLIFQVFSSDEREWGTPVACPIYRICLSDGDSNVVVLRGAVYWLCCEYSGYSILSLKRRGDGGEPKASLVNLPESCKSGMHNMCLALSPAAAADDGTSNAALLSVVVHGSDRILVWVRRLRTTARGRSRRWELRHVIRENSIRRPGFSRRMVERKVARAVLRGEWRPRFGGG

SEQ ID NO: 194392 - protein, 570 aa, Oryza sativa
  Clone ID: PAT_MRT4530_90438C.1.pep
YIGKEAIWAQEDAAAAAANVHAPFSDIPEQRARNWARARGKVNPDGSVTFENKRDAVVYQELLGLVAEQASQSKVESAPKRREDDILTKALGTKEHPGRTRGIGSDVPWKHGLPQYSSQYKKRKVSKEERDARLKAELKVEVIQELEASMNARVEERVNKVLADMNIPRGTTPAVHPTPRAQHDASPSQHRSSCASTEVLAPGLPVAPLAAVDHIEGVAQCVLLARVHPTFAPEVAEGMAFKPSVTDKVHGADLLAGYAKVSIDTVKDTWSGYPLLVPPNDEIMTLGDAHKTFIQWPKEDIVVKMTPRPSRPTELTPPKSKLSIEAPRGPALSVPHSPGGADMDLADIAQSLAPIKTTRKADSSPPLVKGQKRERGKGKVGELAPEPKRGKAATSMPVSKAGKVVRAPAQFELGMPLVEDNVLAVMGIACRELHKQYMELSNAKWKMRESSIVGHHDHQPFLSSPAYITIGFDDLFDLFRIRKLDTGLLKCYSFEITKALNMAWGPYVQKGGRHKEGKDELYHDTKFACAQQIGDQCGFHVCHNMSTLLREVVEVEDIMALIHLEFVSLT

SEQ ID NO: 194393 - protein, 753 aa, Oryza sativa
  Clone ID: PAT_MRT4530_90439C.1.pep
MSGGTSASRSSRNPRSQNIWPTTVQVIREVDASGRPTVPRTVIGRWSNYCGLVARENFGILHKDIGKVTEAEKERAWTAMEKWFTFPAEAKDRLKRKTFQKMGKAWKNWKSKLFTEFVNPPGNHMPFDEYPQITEAVWEEFFSLKNTQEFRESSEAHRLLQQRNEHPHRLGTTGYIGKEAIWVQEDAAAAAANVPVPFSDIPEQRTRNWARARGKVNPDGSVTFENKSDAVVYQELLGLVAEQASQSEVESAPKRREDDILTKALGTKEHPGRTRGIGSDVPWKHGLPRYSSQYRKRKVPKEERDARLKAELKVEVIQELEASMNARWKKVLTRLSHMQGVAQCVLLARVHPTFAPEVAGGMAFKPSVTDKVHSVDLLAGYAKVSIDTVKDTWSGYPLPVPPNDEIMTLGDARNTFIQWPKEDIVVKMTPRPSRPTELTPPKSKLSIEAPRGPALSVPHSPGGADMDLADIAQSLAPIKTTRKADSSPPLVKGQKRERGKGKVEELAPESKRGKAATSMPVSKAGKVMRAPAQFELGIALVEDNVLAVMGIACRELHKQYMELSNAKQKMRESSIVGHHDYQLFLSSPAYITIGFDDLFDLFKIRKLDTGLLKYYSLLCWIESRRLGNQVGFLDPSMVNKALNMAWGPYVEKGGRHKEGKDELYHDTKFTCAQQIGDQCGFHVCHNMSTLLREVVEVEDIMALIHLNKRVGISRDARCPSMFVVWMSNAEVADTLVTLNPYSKSLKNGGSGLH

SEQ ID NO: 194394 - protein, 553 aa, Oryza sativa
  Clone ID: PAT_MRT4530_9043C.1.pep
MSSKKNYYKEKMMRRKSIYISQAVDPAEWHLREEKKEEPETPRYRDRAKERREDQNPDYEPTELGSFHAVAPPGADLRLADAHKISIEKSKYLGGDLEHTHLVKGLDYALLHKVRSEIEKKPEAEDGKDTQSRSTKEDQAVSFRTAAAKEDGLTNDIPTTLHRSKADCSVPEEMVTVSVDGSVLDRIAKIMSYLRLGSSGKVLKKKKKERDTKGKNSLASGDYDEVARPGQTNGSALKHQFQKDMPPPPPPRNNNLSKNEEPSAPVARADEDDIFVGDGVDYSVPNKEMSQSPVSEDMDESPHNHQKQSYFTEEKPVYGPIPPSDPAQAWPQPNAYDAIQAQMVAAGYQGEWSGYQYGEQQMAYPEQYMQQSAQDCDVLADPNITQDPRLMTQADKDRGLGSVFKRDDERLKQLREKDAREKDPNFISDSYSECYPGYQEYNHEIAGSDEEDDLSKMDMGGRAKGRLHRWDFETEEEWATYNDQKEAMPKAAFQFGVKMQDGRKTRKQNKDQKLTNDLHKINKILARKKGDKDGGDDGGHYDDDMPSGKKQRA

SEQ ID NO: 194395 - protein, 121 aa, Oryza sativa
  unsure (1)..(121): unsure at all Xaa locations
  Clone ID: PAT_MRT4530_90440C.1.pep
MSSVGLITKNIIRPAHNRGHGYSNNFTLARGVPLYPXDTIPHMLPCPEVPPRHCKGGNRDNTLRTTQLTTVHHSXIIIIPSKTGGMDSPATSTDFSPLLSLAPRNEPCYTKGKAVAHAGLR

SEQ ID NO: 194396 - protein, 124 aa, Oryza sativa
  Clone ID: PAT_MRT4530_90441C.1.pep
MEKASDDPDDVSNDVTDSGGGSAERTARTAHARRRTAALQHKRRAPRRRSRRGELTDDQNVGGRPTDGGGVEEEAAKLFGSTTATALRRSSAAAKRWTGTATTLRTRWWRRRPTTAAATAVRRG

SEQ ID NO: 194397 - protein, 198 aa, Oryza sativa
  Clone ID: PAT_MRT4530_90442C.1.pep
MDSPATPVGLSPPLLSLVLRNESCYTKGKEGLLRQRLGFRWTGRTGDGSRERTAEINPIQNGRLRSIGPRPAHGRRDDNASDDVTDSGGGSAERTARAAHARRRTAALRHKRRAPARRGRRGELTGDQNGGGDEEEAAKLFGSTTATALRRSSAAAKRWTGTATTWRTRWWQRRPTTATATAARRGHSPAARVRFWHS

SEQ ID NO: 194398 - protein, 77 aa, Oryza sativa
  Clone ID: PAT_MRT4530_90443C.1.pep
QTETNPALTILGAWGATHRNITLTGTKAESLVNRLIRRTIEACKNRSKDADITTKAVDEVLLVGVMTRDTQVQYIAF

SEQ ID NO: 194399 - protein, 138 aa, Oryza sativa
  Clone ID: PAT_MRT4530_90444C.1.pep
PHQWPDQDGDLAGDWMVGCDFGGHEHVEDDETNPTVPTLEPNDERRRPATRSSGGAASVDGGDGAAVVGGFGEIAAELAHTSAHLTAMTATGGDDGGGGATRMELGRRRRRGGARGGGVSALHGSVRSSSAHSPARHT

SEQ ID NO: 194400 - protein, 605 aa, Oryza sativa
  Clone ID: PAT_MRT4530_90445C.1.pep
MARLLLLLVLIGGICAAAAASSPLLPAAETMRVSFAGKSEFRTVNRKPLGTCLDPSPYLEISVSTGGAPLPDEAFLNVTVSGVRRPDRSHWLAMITPSNSSVLGCPLNGVNYIETGDLASLPLLCHYPVKAQYLTSDPGYLGCKASACQKRRASGTCKVRTCAATLAFHVINFRTDVEFVLFSGGFATPCVLKRSGALPFANPAKPLHGHLSSVDSKATSMRLTWVSGDARPQQVQYGTGKTATSVATTFTHKDMCSIAVLPSPAKDFGWHDPGYIHSALMTGLQPSQSYNYRYGSDSVGWSNTTEFRTPPAAGSGELSFVIFGDMGKAPLDPSVEHYIQPGSTSVAKAVAAEMQTGKVDSIFHIGDISYATGFLVEWDFFLHLITPLASQVSYMTAIGNHERDYAGSGSVYPTPDSGGECGVPYESYFPMPASGRDKPWYSIEQGSVHFVVMSTEHEWSEKSDQEYIVYMFMSLSKFCCRSNKQKILFSETKQVDLVFFGHVHNYERTCAVYQGNCKGMPKKDAKGVDTYDNSNYAAPVHAVVGAGGFNLDGFPKIGLHSWSLSRISEFGYARVHATKTDMLVQFVNSNTSAVQDQFRIVKGAR

SEQ ID NO: 194401 - protein, 44 aa, Oryza sativa
  unsure (1)..(44): unsure at all Xaa locations
  Clone ID: PAT_MRT4530_90446C.1.pep
HPWPARVCDLAGDWMVGCDFXGHVHLXDDETNPTVLTTTTNDEQ

SEQ ID NO: 194402 - protein, 55 aa, Oryza sativa
  Clone ID: PAT_MRT4530_90447C.1.pep
MSQACRIVLLASSSLLVSIVYRNLVGEGAVLLKVVAAALRATAGEVLPVEAHDTE

SEQ ID NO: 194403 - protein, 175 aa, Oryza sativa
  Clone ID: PAT_MRT4530_90448C.1.pep
METAARRHRRWPAAATGWSTWRRRYEARETTGEGANERGGLGGPIYSLGLKRSDSSRKKSIREIKNSVLEINSKTSLIRIRYSTICSDFWGVKIEEDKRNISPQLNWKKEQRGGEIWKEEAAAQGTARAARLCPELEDEQCQGGKVDFLLGFYFQRLIKGGTKADFGKERKRAAG

SEQ ID NO: 194404 - protein, 390 aa, Oryza sativa
  Clone ID: PAT_MRT4530_90449C.1.pep
MALVLFASSSSCKRPKHVAFFDSNHDGIISFSETYEGFRALGFGVVTSRFSATVINGALGTKTRPENATASRFSIYIENIHKGVHGSDTGAFDSEGRFVNEKFDEIFTKHAKTVPDGLTAAELDEMLRANREPKDYKGWVGASTEWETTFKLGKDKDGFLRKDTVRTVYDGSFFSKVASKKKAEARRRRLSSLAGDNDMAAVAAVPLLLLSAACFWSQPAAVGGDAPATELQKHVAFFDSDHDGIITFGETYRGLRTLGFGIFGATVSATFINGDIGPKTRPNIHKGIHGSDTGAFDSEGRFVSEKFNEIFTRHAKTVPDGLTSDELDEMLHAYADHTEHKDSSGWLQAATEWRATFEAAKDKDDILRKDTVRAVYDGSFFSKLAKENDD

SEQ ID NO: 194405 - protein, 56 aa, Oryza sativa
  Clone ID: PAT_MRT4530_9044C.1.pep
MVEDSTWKRSWLQEVEATGIGGRGGAAPASGDCPVGVGILIQQEAHSDGRTLIGEA

SEQ ID NO: 194406 - protein, 124 aa, Oryza sativa
  unsure (1)..(124): unsure at all Xaa locations
  Clone ID: PAT_MRT4530_90450C.1.pep
MSSVGLITKNIVRLAHNRGHGYSNSFTLARDVPLYPEDTIPHMLPCPEVPPRHCXGGNRDNTLRTTQLTTVHHSWIITSPSKPEAMDSPATPTDFSPLLSLAHYNESCYTKDKVVAHAGLWLAR

SEQ ID NO: 194407 - protein, 381 aa, Oryza sativa
  Clone ID: PAT_MRT4530_90451C.1.pep
MEEKKLSFSIPSKARPARPAFRPADTDGAAGAFDDGEYSARAPAPQFVTEFDPTQTLATGAAPSVIAPLQNSGHFLNHRSRKPFSLPTPEEERLAAAGGPSFVLDTGDLMLRRYKEDMASLPDHRGLDEFRDVPVEGFGAALLAGYGWSEGKGIGRNNKGDTKVVEYDRRAGTQGLGYNPSEADPKKTRAGEWVVGGNKETQNGNAKKRDRDSRGRTEDRDSSSRQKRSGERRAEREVQEKDRNSRHTKQVKIGGGGGDKMRWLHSDIKVRVVSERLSKKLYLKKGRVLDVVGPTTCDIIMDDQSELVQGVEQDMLETVLPRMNGLVLLLAGEHKGLCGHLVEKNSEEETGVVELSNTKDMIRVKYDQIAEYIGDPESLEY

SEQ ID NO: 194408 - protein, 428 aa, Oryza sativa
  Clone ID: PAT_MRT4530_90452C.1.pep
MEEKKLSFSIPSKARPPRPASRPAATAAAAAASDDGEYSARAPAPQFVTEFDPTQTLATGAAPSVIAPLQNSGHFLNHRSRKPSSLPTPEEEAALAASAAGGPSFVLDTSTAPDNPSSHIAYGLTVRNAAAELEKAAEPEKTPPPPPAAGAPSGDLMLRRYKEDMASLPDHRGLDEFRDVPVEGFGAALLAGYGWSEGKGIGRNNKGDTKVVEYDRRAGTQGLGYNPSEADPKKTRAGEWVVGGNKETQNGNAKKRDRDSRGRTEDRDSSSRQKRSGERRAEREVQEKDRNSRHTKQVKIGGGGGDKMRWLHSDIKVRVVSERLSKKLYLKKGRVLDVVGPTTCDIIMDDQSELVQGVEQDMLETVLPRMNGLVLLLAGEHKGLCGHLVEKNSEEETGVVELSNTKDMIRVKYDQIAEYIGDPESLEY

SEQ ID NO: 194409 - protein, 114 aa, Oryza sativa
  Clone ID: PAT_MRT4530_90453C.1.pep
MGCIGEVIAGGAPRAAANDAMVETRLGMETHTPPRFLHHDLQRRLPCDGALHTTADDAMVETRSRTETCIASSSPPPSQPTTPRRVLELAPYVLSSMSPSDARELPELKNKGRH

SEQ ID NO: 194410 - protein, 198 aa, Oryza sativa
  Clone ID: PAT_MRT4530_90454C.1.pep
MRGASALASLVAAAAVALLLLIDGCGGAMYKVGDLDAWGIPPPSKPDVYSRWAKSIHFALGDSIWFLYPPSQDSVVQVTPVAFAACQASDPVLKLDDGNSVFNLTTPGRVYYISAALGHCRKGQRLAVDVPMANGTYLPPTANDLAAFAPMPAEAPAGFESAALGPAGARQSAAPRAAAAGGAGSVLLAALAFAVFLL

SEQ ID NO: 194411 - protein, 358 aa, Oryza sativa
  unsure (1)..(358): unsure at all Xaa locations
  Clone ID: PAT_MRT4530_90455C.1.pep
KWLIVCSSFSLSRYLFGWITLRESFPIKYLGLPLLLGRMRKTDIQPIFDKIAARVTGWRXKNMGPVGRSTLEAVGLLEVKRKRFLWTGEQEAXTGSMAGPAFCTMLPTVQRGLGVLNMEKFTRALRLRWLWHEWKDPTKPWVGLKTPCDETYKLLFTTTTTITIGDNKTIRFWDSSWLXGKGIMPLPYAVSKNKKRXKILREGIKNDVWIDDLDLNGSTHFTVDLINKLVSLXDTTQSILLDQNKPDHTAXKLSSHGEYLGASAXERCMGTIGTNFNGLIWKSWAPTKCKFXAWLVIQNRVWTSDQLVARGWPNSGTCPLXRTSTETASHLVAQCRYTKRIWSLTTAWVAYQQLDPSH

SEQ ID NO: 194412 - protein, 279 aa, Oryza sativa
  Clone ID: PAT_MRT4530_90456C.1.pep
MLPSYIDYYASHAPAAPMPTTLVWTQVGSIAFPVCTTATVTPGQPAVVNLADAEGKSNQKWTTLPAQAEDRALAIMTTKEQPPEATFRYQAPAREVRIKVTTWCAIHKTTKHSLEDYKAVQRVKAYVEENGQQEGARMFANWCPIHNSKAHSILDCRVFLKAVKYVAPREAPRSTRARRDTEKTEEEYSSDCFVGAIIFDEQESYTSDGDDGYSASESDNTRGVYAINDGKNTASTSGTPAQHLATMREILNETPFDAAANPEIAQWAERIRTMATNLD

SEQ ID NO: 194413 - protein, 194 aa, Oryza sativa
  Clone ID: PAT_MRT4530_90457C.1.pep
MGQALRRLFDAFFSTREMRVVMLGLDAAGKTTILYRLHMGEVLSTVPTVGFNVEKVQYKNVVFTVWDVGGQEKLRPLWKMYLSNSDALIYVVDSLDRERIIDARQEFQTIIKDPLMANSIILVFANKQDLRGAMSPDEVSEGLGLHDLRNRIWHIQGTCALRGEGLYDGLDWLASTLKQLQETGHATSVAGPSI

SEQ ID NO: 194414 - protein, 241 aa, Oryza sativa
  Clone ID: PAT_MRT4530_90458C.1.pep
MASGVEERVRGEVRGEEDDRPQLSAAAAEALREFLLEQGRDGGEEGEEGGGGVELVAEDWRLSQFWYDERTARALAEEVARLVSLSGPASSAAVACVACPTLYTYLKTSSPDVTAQLLEYDVRFGQYGGDFTFYDYNQPEELPAAMKHAYRIVVADPPYLSKECLEKVAKTVSFLAHPEGSFLLLLTGEVQRDRAFELLNVRPCGFKPQHSNKLGNEFRLFTNYDPEDRLGGWEQNDGATV

SEQ ID NO: 194415 - protein, 345 aa, Oryza sativa
  Clone ID: PAT_MRT4530_90459C.1.pep
MVSANQPPPDAAAAAAGSAGEDASKKVRKPYTITKSPESRQEEKPAEPETLSRRADADAYAEPPARSAPMVSANQPPPDAAAAAAGSAGEDASKKVRKPYTITKSRESWTEQEHDKFLEALQLFDRDWKKIEAFVGSKTVIQIRSHAQKYFLKVQKNGTSEHVPADSSSMLRELRHECHCFVMDTQFYPTNCSLIHGERFVVRVMPDFAQVYSFLGSVFDPSTSGHLQKLKEMNPIDVETALLLMRNLSINLTSPDFEDQKKLLSSYSTPSDGLELGSTRSSVLADRPLSAPFIMCKGATVYSRLAQLVMAFSFLSSGREGTTAPSDPWHSQKQNAPSVHLMRYV

SEQ ID NO: 194416 - protein, 118 aa, Oryza sativa
  unsure (1)..(118): unsure at all Xaa locations
  Clone ID: PAT_MRT4530_9045C.1.pep
FQAKPPPASFKGTCQTGERFPSDSCMGKIVGARWFARAGQATGEFNATMXLAFSYQPYGHGSHTASTAAGNFHTPAISKGYNFGHASGVTPXAHFAIYKAAYSFGGYMSDVIAAVDKA

SEQ ID NO: 194417 - protein, 66 aa, Oryza sativa
  Clone ID: PAT_MRT4530_90461C.1.pep
YQLFSTKTLDRREKNMAPQLTYSHHKDVFNQILQSTFDKTLCLALFEICSLFYNLDKRNTPSNNCN

SEQ ID NO: 194418 - protein, 275 aa, Oryza sativa
  Clone ID: PAT_MRT4530_90462C.1.pep
ARGAELIGGEAERSHSPRADYPGRLRSGRPADLAARADSVAWILKVRELYGMLPVTAYLAVSYMDRFLSLHRLPQGNGWAMQLLAVTCLSLAAKMEETLVPSILDLQMEDARYIFEHRTIFRMELLVLDALDWRLRSITPFTFMYLFADKVDPNGKHIRELIHQATQVTLATIHDTEFLDHCPSSIAAAAVLCASSEIMQLVSIDHGTLVSWRIIGLDEEAIIRCYRLMQQLISSNNVGRESTEITMATTTTTATTAVSSEEVVSSSPPSKRRKM

SEQ ID NO: 194419 - protein, 103 aa, Oryza sativa
  Clone ID: PAT_MRT4530_90463C.1.pep
MDCVVIASGLPMGCTVDTNLVVMTHDVAVDWLSIESSPSMPSCRRITLPKILDGSRRKGENRMDIPESITWELIKPPAGGRTALPPRPYDSMDHVGVSASPPN

SEQ ID NO: 194420 - protein, 45 aa, Oryza sativa
  unsure (1)..(45): unsure at all Xaa locations
  Clone ID: PAT_MRT4530_90464C.1.pep
LRVRPPTFSSTNNLMEANDXLHAIEKKLNLLQCNDQEKVARECSH

SEQ ID NO: 194421 - protein, 80 aa, Oryza sativa
  unsure (1)..(80): unsure at all Xaa locations
  Clone ID: PAT_MRT4530_90465C.1.pep
RSVATVVLCCVHTSPVFGSSCVNDLPRSTIFHVDTLHACSVSLHILHINLVPETGILQLFCVWRLVFGWTNHXDCDRVLH

SEQ ID NO: 194422 - protein, 1082 aa, Oryza sativa
  Clone ID: PAT_MRT4530_90466C.1.pep
MRRGAAASVPTACSEMRYGRRMVQLGASVSVMQGGRRARCSVAPQRLSPRRAARGMRWGKRSEMRERKPMRALAQERSDAVGRGAGGARCAMRNQITVMVLILCTSTYFMLLVVSGDVRQQNFNESGAAIMERQTARRTPSSVTQMPEFPPACVNLAKELTARCRARALQLTDDEILSITQDLESVIENLCDYIGRVPTSALGSNAYTDGAVKALSVRGFLEDDMLTNAVNSMPNRKYFHDSNMPRLVEFLQGMYHESDEFGGHLFSSLPEVSEYIEPLYDALFCPLTNQVMTDPVLTESGVTYERRAIEEHFERFADSSENVICPVTKMPLQSKTLMNNASLKSVIAEWTMRNEAMRIRIARTALSLSSTEAMVLEAIHELKSLAKLRGKNREQMHKIGVTRLLARLLDNHNVQIRHSALELLCFLVEDEEGKDIIGKTKAIARTIKLLSTNGTDERHAAISFLLELSKSQLLLEDIGSTAGSILILTTMRINDSDDPIAAQKAGEVLKNLEKCSKNIKYMAESGYLEPLQSHLVEGSEEMQMEMVGYLAELIQEQELTIDINGSTSGVLIKMVHSCNTVARKAALDVLVQLSSHRPNSKTLVEAGVVPVMVEELFIRKVDDEPLSYKAMAAAVLANVVESGIDPDNTVVNKEGHVLTSKYSIYNFVHMLKCFMPDELNLSIIRVLLALTAHAKALAAVVSVVRENHRGHSIVELMSSWTEALGVASTRLLITLSAHMGHTIAERLCKTQGQPRRLVRSIFRAGRAAITERHAAAVTLLSRLPYRNVSLNLALVQEGAVPAILRGIEEMGSGAARMTTSRHAAPYMEGLVGTLVRLTATLYNPDVLKAAMDHDFASVLTALLAGAAGSGEVQRLAAVGLENLSYHSIKLSRPPPPPEDEPRPKKMTILKRLKDARVHNHSSSKNPPLNVCPVHRGVCTPATTFCLLEAGAVEGLLACLENDDARVVDAALGALCTLVDDRVDVEKAVVALAGQGAARRVLAALRQHRGNSLWHRCFSVVEKLLVHGDDVCVREVTGDRMLPTALVSAFHRGDANAKQAAESILRRLHKMPDYSATYMSVEF

SEQ ID NO: 194423 - protein, 379 aa, Oryza sativa
  unsure (1)..(379): unsure at all Xaa locations
  Clone ID: PAT_MRT4530_90467C.1.pep
MVNTRNGSRAAGEGSNGEERTDGGHPNSDSVNGPPPLPENPTLAQVMAHQTQMMAAMMQQMQQQHQQMHQRMXSKPSXQQQQFGPPPPLSKLPEFLRVRPPTFSSTNNLMEANDXLHAIEKKLNLLQCNDQEKVAFATHQLQGPASAWWDNHMATRPPGMEVTWAEFYRSFRKAQVPDGVVAXKKREFRALHXGNRTVTEYLHEFNRLARYAPENVRTDAEKQEKFLAGLDDGGSSRVDLQACKLEYSIVSDNAIRQEDQXGPKMDRKRKVAQFRSNQGSHQRPRFTPGQQGGPTTMIVRQHRPLNSSSFHQGASGSQSHQGGQPNRSAAPRPPMAPAQSAPLAQAKKEIGTKPGSYYRGSSRVDLQACKLEYSIVSPK

SEQ ID NO: 194424 - protein, 91 aa, Oryza sativa
  Clone ID: PAT_MRT4530_90468C.1.pep
PGGSFAIGFSFPVSLQPFRKRFNVQDALRYRRKCATSVPRIPRGAMNRPFPQAPNFPCLERGRKGLGRPRVTLAACSRPPMVKNSFLCVSI

SEQ ID NO: 194425 - protein, 71 aa, Oryza sativa
  Clone ID: PAT_MRT4530_90469C.1.pep
FVDFGNSPSSKEEGVTGLSGVEHKGLSLCGFSSSVKNFGDVCEKVLNPPKGRVLGRSPCKVRQTVYLVRYG

SEQ ID NO: 194426 - protein, 80 aa, Oryza sativa
  Clone ID: PAT_MRT4530_9046C.1.pep
LGTPYSRSSRGDMKDPRGLSHQRFSACDRIRFGSRPSDVDTTTEIWWFHLMMRMSTRNHLVHIDDQPMPYGYRASTRIRG

SEQ ID NO: 194427 - protein, 75 aa, Oryza sativa
  Clone ID: PAT_MRT4530_90470C.1.pep
AQLAPFGNVYGLCSPVIQCPLNCNAIASSLASVQQHHQKSRQVFLQQIQTSDLGTLHYPIIKLQVLNQRAMPSLS

SEQ ID NO: 194428 - protein, 756 aa, Oryza sativa
  Clone ID: PAT_MRT4530_90471C.1.pep
MEFTTGALGTLLPKLGKLLKEEYDLQKSVKEGIIFLKTELESIQAALEKVSKVQLDQLDKQIKIWARDVRELSYDIEDNIDTFMLHINDIEPNKKYNFTWLIDKCQKSLSKVKIRHKIANDIKDIKRQVMEVMERHKRYMIDDIATKLPTTIDPRILTLYEKVTKLVGIDKASNDLIKMLSVGDAVSETMLKMVSVVGFGGLGKTTLAKVVLDKLKVQFDCFGFIPVGQNPDIKKVLKDILIEVNKDRYMVLDVSTLSERHMIDELREYLGNRRYLIVIDDVWEIFTWKRINCALVDSNCGSKVITTTRISEVAEVVGDVYRMKPLSSDNSKRLFNNRIFGIGSNGPTNNQSVEATEKILKKCNGMPLSIVTMASLLVNKPVEDWIEVYDSIGFGPTGQNQEVENMRKILSFSYYELPSYLKTCLLYLSIYPEDHRIMKKPLIWKWIAEGFVQEEQQTWLFEVGERYFTELVNRSMIQPIEMYGRVFACRIHDMVLDLIRILATEENFVKILDRLYDVHSSSSQSSTARRVAWHKSLNQDKFDNLTTGMAQLRSLNAIECPISMIPPLVSFEILHVLALESCGVITGYHLKHIGKLQRLRYLGLRGTRITELPSEIGDLMHLLVLDVRGTNALPATVGKLRRLIRLCVGGTIVPSGVIGNLTSLPHLSHLNLHLLAVEQRDLDALAMMPELRVLEVNSDLSISWTIAGGGLFPSLRCFSTDIEIMFLQGAMPMLTNISFEPSGDDSANDIGLRYLP

SEQ ID NO: 194429 - protein, 371 aa, Oryza sativa
  Clone ID: PAT_MRT4530_90472C.1.pep
MVNTRASGSENNNNEGNPTLAQVLAQQTQLMNMMIQQMQNQLNQGNNNAPLPQNKLADFLLVRPPTFSSTTNPVEAGDWLHTIEKKLELLQCTDQEKVVFASHQLQGPASEWWDHFRMNRAEGQPITWEEFTEGFKKTHIPVGVVALKKREFRALKQKDHTVAEYLHEFNRLARYAPEDVRTDEERQEKFLEGLKDELSVTLISHDYVDFQQLVDKAIRLEDKKNRMDNRKRKMTVFQEAQGSSQRQRIKPLQIGESFPAGPGQSQQLNIGGEIKLETNESKEVNIEQANQPVLVQQGQSQENNSSGREQQVCFNCYKPGHFARECPKPKHQQPQGQVNNIVVTGANAVPVASSRVVSSSVTTQPPVSKRQ

SEQ ID NO: 194430 - protein, 177 aa, Oryza sativa
  Clone ID: PAT_MRT4530_90473C.1.pep
MDLGGGGREGSEKITATITKAAISTNKVGTDQIHCLARGLLHLPVGQAAVTTIAPAVVVAMSRLYSHPSVADASDLIFVDDDSDNLSHLIELYSPLSSTGGGAFTVFLPSGNVSISSHSVGNCNFDGQHGGLLMGGLQGIGVTGRVAFWLGAVDITEGYGTPFDQGITVSFARYVTV

SEQ ID NO: 194431 - protein, 256 aa, Oryza sativa
  unsure (1)..(256): unsure at all Xaa locations
  Clone ID: PAT_MRT4530_90474C.1.pep
MDSPATPVGLSPPLLSLVLRNESCYTKGKEXLLRQRLGFAVNRVHGSGSRKRTAEIDPSKTDGRDRSVHDRLTGEGDDDVSDDVSTGGGSAALRHKRRAPRRRSRRGELTDDQNVGGRPTDGGGVEEKAAEKIGLTAATVLRRSSAVAKRWTGTATTWRSRRWPSRATTTTGTAATHGWSDGGDGGDXGLRGGGARXRRAKAKVAAGRGDTGGPYIGARRRRRRPTAAGGEKERSXDSEEREESDSTSNPQVSKPN

SEQ ID NO: 194432 - protein, 339 aa, Oryza sativa
  Clone ID: PAT_MRT4530_90475C.1.pep
MDDADIPPRLLSDSDLDLMGEREMQAYHMLKDRSFAHTRAYDPELLRKTCAKRGRILGHLPIFPCGYMGKLGDGDVESFERVGGLMHKWLGMTLFLRADLRPIHEDELIILFSMVRKIKVTPVQCMICQWLENIKFTGPIECTSLGTRIANGLGVIQGNLIAYISTIRSYVDEAYLVQGHTVNHGPDNTLVFFFLGYTNESRYLTRGTSHRATHNMAWEEPEESTSSPPVMMCEADWAPTKDAPGWTQVPYHDAGSLAWQSAIDSRWQAPHDTHWGHSRSSSSISMPPFSRMWSSSSSRGNLGKLTRRMGTLELQAGEIQYTLEGHIAQAHKWQENIDA

SEQ ID NO: 194433 - protein, 301 aa, Oryza sativa
  Clone ID: PAT_MRT4530_90476C.1.pep
MATQGKQCNTLEDLLFDDIGDPLPIKLSVLQSITNDFSEEQIIGSGGFGIVYKQLTYRVENSQGVLGDELVAVKKLYSFHAIKDEPFQREVDCLMRIRHCNIVWFVGYCAETSTNVICYQIIKGICLGLHYLHERKIIHLDLKPDNVLLDDSMVPKIADFGLSRLLSEEKSRMVTERIFGTRRYMAPEYLVNGDITVKSDIYSLGLIIREMVMGPNNEGTTTENVLEIWRHRLEQDSSKMRQTPIEMRYRQIIEACIEISETCIAGKPDKRPTTGDILRRLEKEEAGNWSIVPVTPVVDWV

SEQ ID NO: 194434 - protein, 213 aa, Oryza sativa
  Clone ID: PAT_MRT4530_90477C.1.pep
MDPPNMKGDLWCRVWCQYKFTAPTLARGVRINCTRKRPRLAENTWMGTGVLHRYLTTSTASASRESLQTFGNSHSSLPKERVDVPPLHMSYEEPSISYSYDTSHFNAFSPQQIDCAYTGIMAEQNSDTKSIGGQFVEEFNVKIDSLTEKICRDVEEKFNSYILSKGSKPIFSQEQKPINPELSANEDKVSTWNTPQATQQICKCTRIPKDGII

SEQ ID NO: 194435 - protein, 70 aa, Oryza sativa
  Clone ID: PAT_MRT4530_90478C.1.pep
WNVSWNVFLRCLERPSISPWSYHSVMRAMLGDSPLHDGADARTCTAERWRAASEQQQRSSHPDEFKFSES

SEQ ID NO: 194436 - protein, 332 aa, Oryza sativa
  Clone ID: PAT_MRT4530_90479C.1.pep
QILAQVATCSTSAEQGSLSRFGTFDRGSPKSRNFGNFELSVLQSITNDFSEEQIIGSGGFGIVYKVCLTNYELVAVKKLYSFHAIKDEPFQREVDCLMRIRHCNIVWFVGYCAETSTNVIILQFILQGYDVLFICRTAGSCVLQWQICYQIIKGICLGLHYLHERKIIHLDLKPDNVLLDDSMVPKIADFGLSRLLSEEKSRMVTERIFGTRRYMAPEYLVNGDITVKSDIYSLGLIIREMVMGPNNEGTTTENVYSKIWRHRLEQDSSKMRQTPIEMRYRQIIEACIEISETCIAGKPDKRPTTGDILRRLEKEEAGNWSIVPVTPVVDWV

SEQ ID NO: 194437 - protein, 67 aa, Oryza sativa
  unsure (1)..(67): unsure at all Xaa locations
  Clone ID: PAT_MRT4530_9047C.1.pep
ADRMQKELTXALAPSXMKIKIIAPPERKYSVWIGGSILASLSTFQQMWISKEEYDESGPSIVHRKCF

SEQ ID NO: 194438 - protein, 248 aa, Oryza sativa
  unsure (1)..(248): unsure at all Xaa locations
  Clone ID: PAT_MRT4530_90480C.1.pep
LAVAHLLLKATVRQVHEAVLECELIPAHNRGHGYSNSFTLARGVPLYPQDTIPHMLPCPEIPPRHCKGGNRDNTLCTTQLKTVHRSWIIITPXKQGMDSPATPVDFSPLLSLAHYNEPCYTKDKAVAHAGSRDLGRVIGGHLRVEDDEANPTVLTTMTNDERXWPATKRTAAAARLDGDGGAPVVGGEGGRAAEVLLTTAHLTAAAASGGDDASDGAAWLKTRRGGARGGGATRHGRPRERGQTKEED

SEQ ID NO: 194439 - protein, 124 aa, Oryza sativa
  Clone ID: PAT_MRT4530_90481C.1.pep
MAVMWAGLCTGSTEPGWCGAHVTVGWCMQTGCSRGGGEASNSGREATVLCAPRPRRIQIHPCSADLILSPPHFLLTSNTTNKEVAAHKAAAPVLRDRASEPERSSARGNLAISKKFSPLLTQKL

SEQ ID NO: 194440 - protein, 174 aa, Oryza sativa
  Clone ID: PAT_MRT4530_90482C.1.pep
MVGCDFGGYEHVEDDETNPTVLTLEPNDERRRPATGLAAASVGGGTGAAVVGGFGGQAAGLLHPPAHLTVVTATGGDDGGGGATRMELGRRRWRGGARGGGATRHGRSRERGQTKEEDKGVLYIAMEGQDRAHNDGKNSGKFRSSPEKGKVEPRNWKGFPYKLLGISWGQGRGD

SEQ ID NO: 194441 - protein, 96 aa, Oryza sativa
  unsure (1)..(96): unsure at all Xaa locations
  Clone ID: PAT_MRT4530_90483C.1.pep
VWLVRXGXLXFFVWXCVLFFXXXXWCXCCSPCCXXXLLRSXWFSGASSXCLVFGAXXLPLVCCFLCGSVKLXLRSCVRVGAAVXRAEDXRXGPCGR

SEQ ID NO: 194442 - protein, 49 aa, Oryza sativa
  Clone ID: PAT_MRT4530_90484C.1.pep
LLDRDRLLSEVHIWMVNHTLRRVDFEVAAVSLGFFRSRDVSTMRWFEFS

SEQ ID NO: 194443 - protein, 81 aa, Oryza sativa
  unsure (1)..(81): unsure at all Xaa locations
  Clone ID: PAT_MRT4530_90485C.1.pep
EAPAPLPQAAQLGYKPNVFSFWILFLQLRLIDYCKXEHMTYSASHTANMQVHKDTKGWHNIXGSFAKAAFSKIFKRNKTVE

SEQ ID NO: 194444 - protein, 124 aa, Oryza sativa
  unsure (1)..(124): unsure at all Xaa locations
  Clone ID: PAT_MRT4530_90486C.1.pep
RLPSTCKRGKDGHYLNLVKHVREAYEACELVREGCSRHNKSXCTWPGASLSDARILYLTXAMELEHILDALGKDRISSLAPLDGIAFKVASDQLLHXKEPGSGSALTPIALGYNAPFFKKMPLI

SEQ ID NO: 194445 - protein, 343 aa, Oryza sativa
  Clone ID: PAT_MRT4530_90487C.1.pep
MVNTRASGSGNNNNEGNPTLAQVLAQQTQLMNMMIQQMQNQLNQGNNNAPPPQNKLTDFLRVRPPTFSSTTNPVEAGDWLHAVEKKLELLQCTDQEKVVFASHQLQGPASEWWDHFRMNRAEGQPITWEEFTEGFKKTHIPVGVVALKKQDVRTDEERQEKFLEGLKDELSVTLISHDYVDFQQLVDKAIRLEDKKNRMDNRKRKMIVFQEAQGSSQRQRIKPLQIGESSSAGQGQSQQLNIAGEIKSETNESNEVNIEQINQPMPVQQDQSRENNSSRREQQVCFNCYKPGHFARECPKPKHQQPQGQVNNIVVTGANAVPVVSSRVASSSVTAQPLVSKRQ

SEQ ID NO: 194446 - protein, 68 aa, Oryza sativa
  Clone ID: PAT_MRT4530_90488C.1.pep
CCGPARMPTFLPEIFGLRDCRYTGGQPIAPYIGFIHIRRVSDRYEGCCTGQIHKSCLYKASKFTAGKK

SEQ ID NO: 194447 - protein, 170 aa, Oryza sativa
  Clone ID: PAT_MRT4530_90489C.1.pep
GLRWTGCTAAVHGNERPRSTLSKTDGRDRSVHDRLTGEGDDDVSDDVSTGGGSAARRRKRRAPGRRARRDELTDDQSNGGGATDGAGDEEEAAATFGSTAATVLRRSSAAAKGRTRTATRRRPRRRPSRATATAGTAAAHGWSGGGDGGAKAHGARALHTTAGEGEGGDG

SEQ ID NO: 194448 - protein, 58 aa, Oryza sativa
  Clone ID: PAT_MRT4530_9048C.1.pep
LIKRGISVYYMEDLNIFSQKGATFTRLQSKLFRAQDSHNLNFTGGIKQAFPLPRKAFL

SEQ ID NO: 194449 - protein, 293 aa, Oryza sativa
  unsure (1)..(293): unsure at all Xaa locations
  Clone ID: PAT_MRT4530_90490C.1.pep
LFLKRKRGLLRQRLGFAVDRVHGGGSRERTAEIDPSKTDGRDRSVHDRATGNGNDDVSTGGGSATHARRRTTARRRERRAPGRCGHCGKLTGDQXSGGGATEVDGDGGAPAVFGGGEAADEDGDDLATTMATSXRATTTTGTAAAHGWSDGDDGGTRSHGARALPTARDEGEGGDGGKEAAAKAHGCRRREGKVGVWRKETDPNRPRIHEFPNDFSRXFQKRKGGGDREDHFPSINFTGEGKDRWDPPVSDREREESGSSADWADLGRGRERREVLGRLSAQSQKKTFKNLFQ

SEQ ID NO: 194450 - protein, 193 aa, Oryza sativa
  Clone ID: PAT_MRT4530_90491C.1.pep
MDSPATPVGLSPPLLSLVLRNESCYTKGKEGLLRQRLGFAVDRVHGGGSRERTAEINPTKTDGRDRSVHDRLTGEGDDDVSDDVTSGGGGSAARTARTAHARRRTAALWHKRRAPRRRGRRGELTGDQNHGGRATDGAGDKEEAAAEIGSTAATVLRRSSAAAKRRTRTATTLRTRWRRRRPTTAAATVARRG

SEQ ID NO: 194451 - protein, 42 aa, Oryza sativa
  unsure (1)..(42): unsure at all Xaa locations
  Clone ID: PAT_MRT4530_90492C.1.pep
STIHPPLSIEFWLQKPGSPGKVPATYGWVPPFXNGGGGXXFP

SEQ ID NO: 194452 - protein, 451 aa, Oryza sativa
  Clone ID: PAT_MRT4530_90493C.1.pep
MVEQKGNILMKRYEIGKLLGQGSFAKVYHGRNIKNSQSVAIKVIDKEKILKCELMDQIRREISVMNLVRHPCIVQLYEVMATKTKIYFILEYVKGGELFNKVRRGRLKEEVARKYFQQLISAIDFCHSRGVYHRDLKPENLLLDENRNLKISDFGLSALAECKRQDGLLHTTCGTPAYVAPEVINRKGYDGAKADVWACGVILYVLLAGYLPFQDKNVINMYKKICKAEFKWPSWFSSDIRKLLRRILDPNPATRISVSEIMEDPWFRVGLNSDLLNKTIPTDKVDKVVHVDMDSTFGNLSNNINEGKQEAENLTSLNAFDIISLSSGFDLSAMFEDENSKEESKFTSTNTATTITKKLEDVAKNLRLKFLKKNGGLLKMEGSKPGRKGVMSINAEIFQITPDFHLVEFTKINGDTLEYQKVKQEMRPALKDIVWAWQGEQPQPQSLNEQS

SEQ ID NO: 194453 - protein, 164 aa, Oryza sativa
  Clone ID: PAT_MRT4530_90494C.1.pep
WRKSHLQPTTDKLRANRPPTRSRALRRERAAAMSSPDSTMHDDRSNATGTIRRQRSLSSIARNPWEATSCTHHRHIGSIQRQGDSPEQKRQGSGALKGTHCSRNGASEQSRASVEFPQEWNRRTKALQGAAWQRRARRGKGEALRFSLPPFCAALPLHAVHQPS

SEQ ID NO: 194454 - protein, 38 aa, Oryza sativa
  Clone ID: PAT_MRT4530_90495C.1.pep
ETPGVSSVRQGTVLVHQVHWCSRDAAIVLPIHMLQRFG

SEQ ID NO: 194455 - protein, 79 aa, Oryza sativa
  Clone ID: PAT_MRT4530_90496C.1.pep
GNRITYPSLGGRNYNSTTPVKFTKLAKPLKVGDTEVFVEDMRTYDIGAVDTTANKITLNKPWAVANPNSSDGIFPIRIN

SEQ ID NO: 194456 - protein, 1004 aa, Oryza sativa
  Clone ID: PAT_MRT4530_90497C.1.pep
MRATGEHTAAVPIPAPPQLPAPGAVTEDAAEKERRRRRRAPRRTKQAAAQQEEPAAAAGPRSCRSMPPMHVSAPLDAEAVEEEEAAGTSRSCPLLPTPSPVEALPVAGMGRGAAGRRFFQSHWPEQAVEEAIKAYCTIEGIPVDVLITGVAQNRAIEGDLVAMTLEPVAYWTRMKGPNITCNPAIGEGSAVREVGETNGNHDGKKENCGKDLGEGKSEASRALHRICSMVYSNPSRRPTGKVLAIIKKSPRRDTVVGFLAPFAVCPDPEQQKNQMSMLSKRMNHRASSYFSGLILLLPTDSKFPHMVVNVSTLPDSVRNHLEEGDAAKELVAARISDWNEESLYPCAHVIQLLGKGGQVKTHMDAILFENAISDAEFSPESMECLPDICWKIPQEELEVRKDLRNVLTFTIDPPTATDLDDAISIEMLSGGIVRIGVHIADVSYFVHPETALDAEAQIRSTSVYTLRRKISMLPLRLSEDLVSLNPGVDRLTFSIIWDIDPHGNIINRWIGRTVISSCCKLSYDLVQDLICSDGTKFKSASSLQVHGIFEQDDVIKSLRCLYEISKNLKEIRFKGGALSLETAKLMIQFDEGGAPCDSFRYERNDACFIVEELMLLANMSAAEVISNAFPNCALLRRHPEPNLRKSREFEAFCARNGFELDGSSSGQLHLSLSRMKEKLKDDPVLFDILMFYASKQMQSAEYFCTADLISKRDDWAHYALSVPLYTHFTSPLRRYPDIIVHRTLNAVIEAEKMYLKHRRSLTGQNGFNTASCEMMHGCFTGLQFSKDAAESKEGSEALSAAAKKFKVPSPDNLGEVAEHCNERKWASRRAEDAGQKLYMWALIKRKEVLVANARVLGLGPKFMSVYVPKLAMERRIHYDEVEGLSIEWLEATGTLVLDSCRNRPPQRRGNQVKYRAFEEVAMMVNPSESIFSEEDEESGATEAGCDTAKSVLLSDEAVKAQVAPAVLPLVIQYLSEIPVVLHAIGGEDSALDIGVRLYMSSYFK

SEQ ID NO: 194457 - protein, 73 aa, Oryza sativa
  Clone ID: PAT_MRT4530_90498C.1.pep
PSDSDRPFRFGHWWNSEFREIWWKIGKFRTNFINQNLNTNSLSLPTSYRKPVGFGEIPIEIIENSISDLFSFF

SEQ ID NO: 194458 - protein, 225 aa, Oryza sativa
  unsure (1)..(225): unsure at all Xaa locations
  Clone ID: PAT_MRT4530_90499C.1.pep
MSKTLIXVGRSYAMIAPYDVDGNRITYPSLGGRNYNSTTPVKFTKLAKPLKVGDTEVFVEDVSLWNGQAPQDYQRSIIMWGYKNSFGYTYPDGTYSQLMQMRTYDIGAVDTTANKITLNKPWAVANPNSSDGIFPVGHTLSPTSDGSTYLYLNGHVNIQVPTTYTKYSHLISGSSEFANTTIIPVETGFIQLGFLLNRDTTGEKSWLNGLRLRDYTDTYKLNDDV

SEQ ID NO: 194459 - protein, 122 aa, Oryza sativa
  unsure (1)..(122): unsure at all Xaa locations
  Clone ID: PAT_MRT4530_9049C.1.pep
ILIGTIFYGFDEDITSSDTHIXSHVLMIIPSPSPVQPXETSLTSNGPSVFMPTLIWVILDFMERLSRHLSNTFGLISXNSFRVNRNHQNKTVLFLKPNLGLGLCNRLGLSRKCLPPPPRINT

SEQ ID NO: 194460 - protein, 128 aa, Oryza sativa
  unsure (1)..(128): unsure at all Xaa locations
  Clone ID: PAT_MRT4530_904C.1.pep
INANFTLCSCYTDYIASLSGRCIGTGIMFAYAIILCHDDXRVVSGSLGVVSRLLDIIIWGYMLRMRGRPLLVTAQHXYSSTRVYTPKLLSWRGYSSVFSPVCMVMTGCREELDSKGWLLEVLGGHRKK

SEQ ID NO: 194461 - protein, 219 aa, Oryza sativa
  unsure (1)..(219): unsure at all Xaa locations
  Clone ID: PAT_MRT4530_90500C.1.pep
EGCVWLGFSTCFCFCKSQKPTKGPKSHNSSSPPLLLAETPPLPLLLNEPPPPLSSRAGPNPPTRRWGRRKRSTKGRRRRWRRYRCPRRPPSRPTPPTPLSPAXTSPPVPPDAVPAHPQPTPANPTPAPLLPFPDRCRRPFVRRPWRRRRSSSPPLLPSTRPPCRTAAAAPPRRAASLPPPLVPATRPPPRRTTAFALLAEPPPRRPRPRPTAXPWPSPP

SEQ ID NO: 194462 - protein, 92 aa, Oryza sativa
  Clone ID: PAT_MRT4530_90501C.1.pep
ARWWPPRPPPAPSARTPASASRQPSPRAPPPPRPSSPRTPSRPPPRTTPSAPRTLPPRGPRRRRRRPPRSPASARRPPRSRPWRTPAPRGGT

SEQ ID NO: 194463 - protein, 81 aa, Oryza sativa
  unsure (1)..(81): unsure at all Xaa locations
  Clone ID: PAT_MRT4530_90502C.1.pep
GRNSRVCNKLALEEKKSKCHDINNEQAISHQIQLQEWGNNXFDRNLVHSDAMMAINVPSRYGIYHRYYGAHRTITTLERVL

SEQ ID NO: 194464 - protein, 157 aa, Oryza sativa
  Clone ID: PAT_MRT4530_90503C.1.pep
WWGCDCSSFSPARALKPLATATSAAAAALKTLRVLAAASSPLVVVIATSKATSKSYKAACTLSLATCLPSLPSDKCLKAAFAAATSLLCLTAGAPPPSPRRFPHRCRGPRIPQVWVQAVQEHDGDDEDIGGYSRGDDDREDAAATTREKGGDGSYDA

SEQ ID NO: 194465 - protein, 311 aa, Oryza sativa
  Clone ID: PAT_MRT4530_90504C.1.pep
MESNAADELLLELDSLRIYRSGKMDRLHHPVLAPAGVDAATGVTSKDVVVDADTGLSVRVFLPARPDPSKKLPVLVFFHGGAFVIESAFSTTYHGYAASLAAAAGVVAVSVEYRLAPEHPVPAAYDDAWAALQWAASGKDEWLAEHADNGRLFLAGDSAGGNMVHNVMIRAASSHPAPRIEGAILLHPWFGGNAVIEGESEATARDMAKIWEFACPGAVGGADDPRMNPTAGGAAGLENLRCERVLVCTGEKDWAGARGCAYHAAVAASAWRGSAAWLESEGEGHVFFLEKPECAKAKELMDRVVAFISAS

SEQ ID NO: 194466 - protein, 153 aa, Oryza sativa
  Clone ID: PAT_MRT4530_90505C.1.pep
MEAAVGVASWLLGKVLTQLSSDLVAAYVASTELGLNVEEIKRDLKYTQGLLHMAQGRKDIRDNIGLQGLLQDLSKKADEAEDALDEIHYFIIQDQIDGTHEVIPEADGGLRGHALHGRHALRHTAVGPGGIGKTTFAQHLYNDKRTDAYFPIK

SEQ ID NO: 194467 - protein, 101 aa, Oryza sativa
  Clone ID: PAT_MRT4530_90506C.1.pep
PLYQKGRKKKTGKKKGKNCLKKKMENQTKQKKKKKPKEKRKKPGGKKKGKNKNEWRRANKTKKQAGNKGGNKEKKKGQRAGRGRLHTGPQGENTKNRGDGQ

SEQ ID NO: 194468 - protein, 1270 aa, Oryza sativa
  Clone ID: PAT_MRT4530_90507C.1.pep
MEAAVGVASWLLGKVLTQLSSDLVAAYVASTELGLNVEEIKRDLKYTQGLLHMAQGRKDIRDNIGLQGLLQDLSKKADEAEDALDEIHYFIIQDQIDGTHEVIPEADGGLRGHALHGRHALRHTAGNWFSCFFCSSARARHDADDSQDTANSHGDVIDQVGNLPFNRVDMSNKIKSVVKGIHDLCTCISRLLQINQTAGEWDTSLERPPTSSTITQDKLFGREIIFRQTLHDLTNCNIPSGTLSVLPIVGPGGIGKTTFAQHLYNDKRTDAYFPIKVWVCVSTNFDVLRLTQEILKCIPHDKSAGSEAVHNSSNLDQLQKAIAERLKSQMFLLVLDDMWKCGSEAEWKNLVAPFTKGEAKGSVILVTTRFPSIAQMLKTTETIQLQGLEDSEFFTFFEECIFGQDKPECYKRDLIGIAKEISKKLRGSPLAAKTVDRLLKNNLSHECWTEVLEMDEWKNLQSNVDIMPALKISYDYLPYYLKKCFSYCALYPEDHRFNNLEITCFWEAIGIIDSGYQNDRAEAIGLKYLDELIGNGFLMKESLCLHACSSVDNRFAATHNVFRRSAAALAERHGNYILPDDINRLANLHYFLAKKELCSNIRGIGKMKYLRRLQEFHVKKERTGFELRELGYLKELGGALQINNLENIATTEEANGAELMLKRNLKTLELVWGAEQQNSGSEIIEGLQPPSNLRAFGIRNHGGSTGPSWLCDDICVKGLRSLHLEGISWGTLPPFGQFIYLEELTLINIAGIRQFGPDFGGVTQRSFLHLKKVRFVAMPELVEWVGGAHCHLFSKLASIECEECPNLSMLLPPSSERCISHAQDINITCFPNLCSLNIRNCPKLSLPPMPHTSTLTHIIVEGDYQEVLHLEEKILSVNGYGGSLAFHNLQKVENMKIEKMSHISWTDLQKLNSLSSLTIIGCKSLLCSEVDEGVIFHSVEQLNLYKCHLAGISLAKLLNCFPALTKFELNRSGEAQEVEEAELRFPSPRLLRYVKIFGYENLVLPMEVGGSFQDFSSLQELEFWRCGKIFASWFMVEAGTHHTSKPFLAPLKELTIYSESSVQSMAVLSSLTSLTRLRLVDCDNLTVVGFDPVMTGSLSELVIYNKPDIDDNNHRCSVAAHLFAAVSTTKAIPVGSFQQLKKLEVDSISAVFVAPICSLLASTLYRLRFTYDLWMKNFTKEQEQALQLLTSLRNLEFYECHRLQSLPEGLHLLSSICTLGIVGCPEIRSLPEEGIPASLKKLLAMRCSVDLKDQLKRLEESNQDLQVFYI

SEQ ID NO: 194469 - protein, 46 aa, Oryza sativa
  Clone ID: PAT_MRT4530_90508C.1.pep
ARQDLTATAELVPSPSGYWDSSRREIGRAICRAIGSCIGRTGSGGE

SEQ ID NO: 194470 - protein, 70 aa, Oryza sativa
  Clone ID: PAT_MRT4530_90509C.1.pep
FTYSRKLLDVVQVSKKGYGACCNDNNFFAFRSDIDLVALGAVGIRYFLCGLTGYCGKGMKIRIEVVAAAS

SEQ ID NO: 194471 - protein, 523 aa, Oryza sativa
  Clone ID: PAT_MRT4530_9050C.1.pep
MREYWTSLASLMGAVAFLQGVVHAVFPAELRAAVARLLGRATRAFSPYCYFDVTETEGMGTNEIYDAVQLYLSSSAAPAAGARLTLSRPHNASSFTFGLAASDRVLDAFRGAAVTWEHVVAPRQAQGFSWRPLPEEKRRFTLRIRRGDRGVLLPAYLDHILAAAADIRRRSQDRLLYTNARGGAMDARGLPWDPVPFKHPSTFDTLAMDPERKAAIMADLRDFADGSAFYERTGRAWKRGYLLYGPPGTGKSSMIAAMANHLGYDVYDLELTEVGSNAELRKLLMKTTSKSIIVIEDIDCSVDLTNRATAAAAAQPPKPRASIDGGAIDQDAAAAPAGAAARSITLSGLLNFTDGLWSCCGSERIFVFTTNHIEKLDPALLRSGRMDMHIFMSYCTFPALKILLRNYLDDDSSASSSSAAAAATMAGLETWIDAAEITPADVSEVLIKNRRNGREQAMEQLLEVLKARAEKRPPSAAAGNATGGGDNEEEEEEEEKRALESPKEGGGEDGQDEETEAKKQLSE

SEQ ID NO: 194472 - protein, 240 aa, Oryza sativa
  unsure (1)..(240): unsure at all Xaa locations
  Clone ID: PAT_MRT4530_90510C.1.pep
GKEGLLRQRLGFAVDRVHGSGSRKRTAEINXSKTDGRDRSVHDRLTGEGDDDVSDDVTTGGGGSAARARMLAGERRHGDANGEHQDVEDDAANSPVTKGTAEKQRTTPATRMKRRRRSGRRRRRCSGGLRRRXSGGRGRRRLGDHDDDLPERRRRLERRRRTAGAAATTAARDGTALGLYGRREAKARVATGRGELGGPFKGARRRRQRPTATGGEKERLGSXEESRSDSNSNQTHSKPI

SEQ ID NO: 194473 - protein, 256 aa, Oryza sativa
  unsure (1)..(256): unsure at all Xaa locations
  Clone ID: PAT_MRT4530_90511C.1.pep
MDSPATPVGLSRPLLSLVLRNESCYTKGKEGLLRQRLGFAVDRVHGGGSRERTAGINPIQNGRXDRTVHDRLTGDGDDDVSDDVTTGGGTAALRHKRRAPRRRSRRGELTDDQNVGGRPTDGGGDEEEAAATFGSTAATALRRSSAVAKRXTGTATTLRTRWWRRRPTTAAATAARRGXTNGNDGGDXGLRGGGARRDCRXKAKVAADRGELGGPFKGARRRRRRPTATGDEKERSGXREKSRSDSTSNPRISKPK

SEQ ID NO: 194474 - protein, 52 aa, Oryza sativa
  Clone ID: PAT_MRT4530_90512C.1.pep
MEMSEGSDLLTCYCVERGDREVTTKWFPRSMVTRASPAHEQNSTAIHDNARQ

SEQ ID NO: 194475 - protein, 638 aa, Oryza sativa
  unsure (1)..(638): unsure at all Xaa locations
  Clone ID: PAT_MRT4530_90513C.1.pep
HPYPEWFERVPLPNRYKVLDFSKFSGQNNISTYEHVSRFLAQCGEASAVDALRVRLFPLSLSRSAFTWFSSLPCNSVQGWVDLEKQFHSYFYSGTHQMKLSNFTAVRQRHDETMQDYIQRFRDMRNKCYSLSLTDSQLTDLAFQGLIAPIKEKFSSQEFESLTMHEQRFVEAKKSFKKINHVYPYMYILKKKPKEREVKQSRENRVLPVISCQKALSSRKEERYDIDITKADKIFDLLLQEKQIQLLASHIIPSAEELGKRKYCKWHNSDSYSTNDCKVFRQQIQTAIEGGKIKFDDSKKPMKVERLPFLVNMVHTAGRAADGGKTRSSQLNSAKIVNKYQKRHDKQQEKYYEQDDEGMRLPSIEDCPGCNDNAGSSSRSYDRSNRLSDKRVPVHXRLGPVNQDCHQDENEDRKTQWCSSGIFTKNQKRRKTKPRHEWRVKSKVATADEVEADKAKRLARGKNVASTSVNMVFMLPAEFDARXANVDDVEEASARLVLSPEQAIFEKPEGTENRHLKPLYVNGFVNGKPMSKMMVDGGAAVNLMAXATFRKLGRSSDDLIKTNMVLKDFGGNPLETXNVELTVSSKTVPTTFFVIDGKGSYSLLLGRDWIHANXCIPLTMHQCLIQWQGDKIEIVPAD

SEQ ID NO: 194476 - protein, 150 aa, Oryza sativa
  unsure (1)..(150): unsure at all Xaa locations
  Clone ID: PAT_MRT4530_90514C.1.pep
MDSPATPTDFSPLLSLINGRTXDGDLAGDWMVGCDFGGQEHVEDDETNPTVLTLEPNDERRRPATRSSVGAASVDGGDGAAVVGGFGEIAAGLLHPPAHLTVVTATGGDDGGGGATRMELGRRRRRGGARGGGATRHGRSRERGKTKEED

SEQ ID NO: 194477 - protein, 213 aa, Oryza sativa
  Clone ID: PAT_MRT4530_90515C.1.pep
WEGFLERGCFQACGGAFQGGGSRNREGATAFPGQGNLLEPDSLKDIMEGVSAVVSCVGGFGSNSYMYKINGTANINAISVAAEKGIKRFVYVSAADFGFVNYLLQGYYEGKRATEAELLSKFTYGGVILRPGFIHGTRRVGSVKIPLGLVGSPMQMVLQSAKPLTRLPLVGPLLTPPVSVASVAKVAVRAATDPVFPSGIVDVYGIMRYSDQK

SEQ ID NO: 194478 - protein, 313 aa, Oryza sativa
  Clone ID: PAT_MRT4530_90516C.1.pep
MRSAMTRLIRSSSPVVSPSRLSAANLLKNNNGKAFLSEDASKRVEEPFKVEEAETVKVPPPSPDKLLVLGGNGFVGSHVCKEALDKGFTVASLNRSGKPSISESWADKVIWNKGNLLEPDSLKDIMEGVSAVVPFIRLLDLKLPRGSMSTGLISMMEIFPLRVKPFIIIPGTPLIPFKFIMHRYSNKVSCVGGFGSNSYMYKINGTANINAISVAAEKGIKRFVYVSAADFGFVNYLLQGYYEGKGLNYLMEIKMIDLGSERGRGERETYRRRSLSLMRPWRRCGGVGVDDGGGGGAAVRNPPTSTPSRIGGF

SEQ ID NO: 194479 - protein, 367 aa, Oryza sativa
  unsure (1)..(367): unsure at all Xaa locations
  Clone ID: PAT_MRT4530_90517C.1.pep
MASAPLPQAAQLGYKPNVFSFWILFLQLRLIDYCKNEYMTYSTSHTANMQVHKDTKGWHNIGSFAKAAFSKTFKRRTREPSQRRKRQANTQNKEKRTALNXRTTQHGRMNEARGTPRSNERRQKMAGDELRRAARYCPRRRRLSGDVRRQRRGGRASLRSCESNGGSDTHIPSPPPESPTSPRSSQPPRSXPSMARSLSPPLPPPLLASTAPPPRSPPHRHCGASLKDVVPTHPSRASSSCDPVTSQISSTSILPFPFSAFPVSSHPPRTQRRHLRPAHHAAPLRPPHAILLPRLLRHRRPLGATQLALPRRGDRRRRRRTPPAPPRRRRXATAASPSGTRARASSFTARQAELPPGQVGRPYRLRR

SEQ ID NO: 194480 - protein, 85 aa, Oryza sativa
  Clone ID: PAT_MRT4530_90518C.1.pep
MDVARRPASSRRTAVGDSGRHTRKGDAAGLAHCLLLAADPAWCGLVGGWSPYQPQQWIRQWVGSRMTAVACHRLAGVLMPQPSPL

SEQ ID NO: 194481 - protein, 82 aa, Oryza sativa
  unsure (1)..(82): unsure at all Xaa locations
  Clone ID: PAT_MRT4530_90519C.1.pep
MDLIVTCHSKQDLHYLSIEVCYIRTLPFTDTYLSSCYKKLXXGGPVXXXPYIXXXXXXLAVVLQRXDWENPGVXQLNPLAAH

SEQ ID NO: 194482 - protein, 55 aa, Oryza sativa
  Clone ID: PAT_MRT4530_9051C.1.pep
LFHVSIEPKPTCCYKVSCCRLQQPRAIQWRKPSFFLIHSLFCACVRACKRCLVER

SEQ ID NO: 194483 - protein, 292 aa, Oryza sativa
  Clone ID: PAT_MRT4530_90520C.1.pep
MRSAMTRLIRSSSPVVSPSRLSAANLLKNNNGKAFLSEDASKRVEEPFKVEEAETVKVPPPSPDKLLVLGGNGFVGSHVCKEALDKGFTVASLNRSGKPSISESWADKVIWNKGNLLEPDSLKDIMEGVSAVVSCVGGFGSNSYMYKINGTANINAISVAAEKGIKRFVYVSAADFGFVNYLLQGYYEGKRATEAELLSKFTYGGVILRPGFIHGTRRVGSVKIPLGLVGSPMQMVLQSAKPLTRLPLVGPLLTPPVSVASVAKVAVRAATDPVFPPGIVDVYGIMRYSDQK

SEQ ID NO: 194484 - protein, 607 aa, Oryza sativa
  unsure (1)..(607): unsure at all Xaa locations
  Clone ID: PAT_MRT4530_90521C.1.pep
MATAWQRRREARGSGTGLEAAARGARPTATMPTAARRASGARWRHGLPQYSSQYRKRKVSKEERDACLKAELKVEVIQELEASMNARVEERVNKVLADMNIPQGTTPAVHPTPRAQHDASPSQHKSSCASTEVSAPGLPVAPLAAVDHIEGVAQCVLLARVHPTFAPEVAEGMAFKPSVTDKVHGTDLLAVYAKVSIDTVKDTLSGYPLPMPPXDEIMTLGDSRKMFIQWPKEDIVVKMTXTPHPSRLMELTPPKSKLSIEAPRGPALSVPHSPDGANMDLADIAQSLAPIKTTRKADSSPPLVKGQKHERGKGKVGEFAPEPKMGKATTSMPVSKAGKVVSAPAQFELSMPLVEDNVLAVMGIACRELHKQYMELSNAKRKMRESSIVGHHDHQPFLSSPAYITIGFDDLFNLFRIWKLDTGLLKCYSLLCWIESRRLGNQVGFLDPSMVNEVNLRQSFTEVVDYVNRCLWSHQDKEYIMCAHNPERHWILLVIVPKWSRVTYLNSNKSKDYDFTEITKALNMAWGPYVEKGGRHKEGNDELYHDTKFACAQQIGDQCGFHVCHNMSTLVVEVDDIMALIHLRAWLANLEASQYLAFIFFLELTHQ

SEQ ID NO: 194485 - protein, 624 aa, Oryza sativa
  unsure (1)..(624): unsure at all Xaa locations
  Clone ID: PAT_MRT4530_90522C.1.pep
MKKYTCWTKHGEQEAPDVAAEEVLDLDVENTAAAREGMTIGIHNTGIHNAGIQDDRRPAPPSPLRPLLLGQFSLTRIAPARTYVNIGWDKYEPTAPRTVIGRWSNCYGLAARVNFGILHKDIGKVTEAEKERAWTAMEKWLTFKAKAKDRLKRKSFHKMGKAWKNWKSKLFTEFVNPPGNHTPFDVYPQITEEVWEEFCSLKNTQEFRESSEKHHQLQQRNEHPHRLGTAGYIGKEPIWAQEDAATAAANVPAPFSDIPEHRARNWARARGKVNPDGSVTFQNKSDVVVYQELYNSQYRKRKVSNEERDARFKAELKVEVIQELQASMEDRVEERVNNVLADMNIPRGTTPAVHPTPRAQHDAXGVAQCVLLARIHXTFAPEVAEGMAFKPSVTDKVHGADLLAGYAKVSIDTVKDTWSGYRLPMPPNDEIMTLGVGRKTFIQWPKEDIVVKMTSRPNRPTELTPPKSKLSIEAPRGPALSVPPSPDGDDMDLGDITQSLAPIKTTRKADSSPPLVKGQKRERVKGKVGELAPVPKRGKAATSMPESKAGKVVRAPAQFELGMPLVKDNVLAVMGSTKLEDFRLARLVDYGADPRTTQEVGRECGTVDRDCDWQLQRTVTVGLE

SEQ ID NO: 194486 - protein, 95 aa, Oryza sativa
  Clone ID: PAT_MRT4530_90523C.1.pep
MSVPIGGFEMGGGGRTQEEGMEWRREPNISSSEGYGTNTAALFNNGLSCGACFEVGAYLCIGYRCPRTPGPPVNFVMGLPLLRGVVRILLDEMPL

SEQ ID NO: 194487 - protein, 372 aa, Oryza sativa
  Clone ID: PAT_MRT4530_90524C.1.pep
MVNTHANKSGNNNNEGNPTLAQVLAQQTQLMNMMVQQMQNQLNQGNNNAPPPQNKLTDFLRVKPPTFSSTTNPVEAGDWLHTIEKKLELLQCTDQEKVVFASHQLQGSASEWWDHFRMNRAERQPITWAEFTEAFKKTHIPVGVVALKKREFRALKQKDHTVAEYLHEFNRLARYAPEDVRTDEERQEKFLEGLKDELSVTLISHDYVDFQQLVDKAIRLEDKKNRMDNRKRKMTVFQEAQGSSQRQRIKPLQIGEPSSAGQGQSQQLNIGGEIKSETNESNEVNIEQANQPVPVQQDQSQVNNSSRREQQSPSSVAVATIGFAKSSPSPSTASPPPKTVGVPSPSSTRRASPLPPRRRRRPLVFRRRFGHR

SEQ ID NO: 194488 - protein, 112 aa, Oryza sativa
  Clone ID: PAT_MRT4530_90525C.1.pep
MDQNGALSGAGRSISSTTTKKAEAASRSPQQQQPDHDVEAMEPDAEWEILRPLSPDPPELEEALRRLAEAERITGDERAAAAARARPGEKRISVLSWLVAPPSSTTPTATPN

SEQ ID NO: 194489 - protein, 147 aa, Oryza sativa
  unsure (1)..(147): unsure at all Xaa locations
  Clone ID: PAT_MRT4530_90526C.1.pep
GGGSRERTAEINPXKTDGRDRSVHARLTGEGDDDVSDDVSTGGGSAARTARTAHARRRTAALRHKRRAPRRRSRRGELTDDQNVGGRPTDGGGVEEKAAEKIGSTAATVLRRSSAAAKRWTGTAATLRTRWWRRRLTTAAATAARRG

SEQ ID NO: 194490 - protein, 641 aa, Oryza sativa
  Clone ID: PAT_MRT4530_90527C.1.pep
MEKWFTFPAKAKDRLKRKAFHKMGKAWKNWTSKLFTEFVNPPSNHTPFDEYPQITEALWEEFCSLKNTQEFRESSEAHRLLQQRNEHPHRLGTTGYIGKEPIWAQEDAAAAAANVPAPFSDIAEQRARNWVRARGKLGLVAQQASQSEVESTLKRREDDILTKALGTKEHPGRTRGIGSDLPWKHGLPQHSSQYRKRKVSKEERDARLKAERKVEAIQELEASMDARVEERVNKVLADMNIPRGTTHAVHPTSRAQHDASLSQRRSSCASTEVTTPGLLVAPLAAVDHIEGVAQCILLASVHPTFAPEVAEGMAFKPSITDKVYGTDLLAGYAKVSIDTVKDTWSGYPLPVPPNDEIMTLGDARKTFIQWSKEDIIVKMTPRPSRPTELTPPKSKLSIEAPCGPALSVPHSPRGADMDLADIAQSLAPIKTTRKADSSPPLVKGQKRERDKEKVGELAPVPKRDKAATSEAVSKAGKVVRAPAQFELGMPLVEDNVLAVMGIACRELHRQYMQLSNVKRKMRESSIIGHHDHQSFLSSPAYITIGFDGLFNLFRIRKLDTGLLKCYSLLCWIKSHCLGNQVGFLDPSMVNEVNLRQTVTDVVDYVNRCLWAHQDKEYIMCAHNQESCRFTTNRIQEILVII

SEQ ID NO: 194491 - protein, 72 aa, Oryza sativa
  Clone ID: PAT_MRT4530_90528C.1.pep
RISEVRGGKFFTDPAKPKNSRGWAKKKNSLVFLKSESNIVKRKTKKKKKKKKKKKKKKKKKNKPKKKKNNPQ

SEQ ID NO: 194492 - protein, 137 aa, Oryza sativa
  Clone ID: PAT_MRT4530_90529C.1.pep
QNYSIAIPNQNKKSPQNQHPKSNRRRTVVTISTFQITKSSKYSQIKKSNHRRLHVGEVRGSQGGGELLPTPGEGSSCRPPLRGGGSSSHRITARGAAALESAAGGSCCHPIHSQPAPPPPDPHAVAVPAVRSTVGGR

SEQ ID NO: 194493 - protein, 270 aa, Oryza sativa
  Clone ID: PAT_MRT4530_9052C.1.pep
MMAAEGEAKKDSASNPPGGGGGGGGGEEEEDSSLAVGEAAVGVGEAGGGGGGGEKADREEEEGKEDVEEGGVCKDLVLVEDAVPVEDPEEAAATAALQEEMKALVESVPVGAGAAFTAMQLQELEQQSRVYQYMAARVPVPTHLVFPIWKSVTGASSEGAQKYPTLMGLATLCLDFGKNPEPEPGRCRRTDGKKWRCWRNAIANEKYCERHMHRGRKRPVQLVVEDDEPDSTSGSKPASGKATEGGKKTDDKSSSSKKLAVAAPAAVEST

SEQ ID NO: 194494 - protein, 321 aa, Oryza sativa
  Clone ID: PAT_MRT4530_90530C.1.pep
MPSTTTAPETDPSKTVVEEITGWLRLYSDGTVERLTPPGAEPFTVIVPPYTEPRNGVTVHDSIVGSLPQLLRASLTTKLDVAGIVSVFLPLAPEHRLPAAIDAGHAALLWLRDVACGEDENNNGAAHHLDPAVERLRDEADFARVFLIGDSSGGNLVHLVAAHAAAKDDGAGADLHPVRLAGGVLLNPGFAREDKSRSELENPPSLFLTEEMVDKLLALGVPLGMNKDSPYTSPSLAAEAVARLHMPPMLLMVAEKDLLHDPQVEYGEAMARVGKTVETVVSRGAVAHVFYLNFFAVESDPLTAERTRELIDTIKTFIDRY

SEQ ID NO: 194495 - protein, 49 aa, Oryza sativa
  Clone ID: PAT_MRT4530_90531C.1.pep
GRRLSSAPPATRREPAASRAHPRPRTEAPHTAVAVAAMIDGGVSSRACL

SEQ ID NO: 194496 - protein, 107 aa, Oryza sativa
  unsure (1)..(107): unsure at all Xaa locations
  Clone ID: PAT_MRT4530_90532C.1.pep
MAPHAEVGTGSSNGSVYNGRGSSATQDLFTVNSPNVTYTDAEIRSRYTYRTTKVEVDASGKYVATPNETLYDFKVDRKVPKVGMMLVGLGGNNGTTVTAGILANXRQ

SEQ ID NO: 194497 - protein, 356 aa, Oryza sativa
  Clone ID: PAT_MRT4530_90533C.1.pep
MPSTTTAPETDPSKTVVEEVTGWLRLYSDGTVERLTPPDAEPFTVIVPPYTEPRNGVTVHDVTTARGVDVRLYLPAEPPAAAPRPRRRRPLLLHLHGGGFCLSRPSWALYHNFYAPLAAKLDVAGIVSVFLPLAPEYRLPAAIDAGHAALLWLRDVACGDEGNLDPAVERLRDEADFSRVFLIGDSSGGNLVHLVAAHAAAKDDGAGADLHAVRLAGGVLLNPGFAREEKSRSELENPPSLFLTEDMVDKLLALGVPLGMNKDSPYTSPSLVAEAVARLHMPPMLLVVAEKDLLHDPQVEYGEAMARVGKTVETVVSRGAVAHVFYLNFFAVESDPLTAERTRELIDTIKTFIDRY

SEQ ID NO: 194498 - protein, 208 aa, Oryza sativa
  Clone ID: PAT_MRT4530_90534C.1.pep
MARSCCGAVVGNRRVWGGDRWGRRETGLRRSATGDEAAAATTREQEGLPPRRRRRRNAAARDKAAESKDQTSGFLGEKTEKAKQKATETDETARWRPVALAPSERARVPPLQLLLVLTTAAGGFVSMGTLLISSSSAGAAKQKTTETAYFRHRRLVARCLLLSRLAPTTSPHPPGGLPLAVAEKEKRIFGVLFPFAKLVMSGEGDLSR

SEQ ID NO: 194499 - protein, 95 aa, Oryza sativa
  unsure (1)..(95): unsure at all Xaa locations
  Clone ID: PAT_MRT4530_90536C.1.pep
GARRGRPAGSSPAGCSRARSGGGSGGAPTPPPRPPSRRRASPGTARSSARPPGRGSCRGTXAPCAPPPPPPPPSSPPPPRRRRCSTTRRLGPSRS

SEQ ID NO: 194500 - protein, 97 aa, Oryza sativa
  unsure (1)..(97): unsure at all Xaa locations
  Clone ID: PAT_MRT4530_90538C.1.pep
ATXTXLXSXAKXPKHTQXXCSQTQXSXXSKSVNHXADPPRQXFXPFSLDLWXPVXGFPXXSGGXXXAAAALPSGQXXXGGLRXERIXWKETXRCTFS

SEQ ID NO: 194501 - protein, 452 aa, Oryza sativa
  Clone ID: PAT_MRT4530_90539C.1.pep
MKDLAVLGHLFVAAFMFHFASYMVIPAITDVTMDAVCPGRDECSVAIYLSGFQSAITGMGALVVTPIVGNLSDKYGRKALMTLPVTVAILPLFILACNRSKVYFYVYYVVKVLAGIFCEGSMHCLLLAYVADQVGARRRAAAFGLLSGVSAAGFVSGTLTARFLQTSTTFQVAAAVAAATAIYLRAVVPDSGGANSFVDEACDPFLQGSSCSAATSSSSSSDEEISPRLPPHKGGVPSLSDMVSLLTGSLTLSGAAIVTFFYSLGEHGLQTALLYYLKAQFGYSKDEFANLLLIAGAAGMLSQLTVMPVLARFVGEDILLIIGLLGGCTHVFLYGIAWSYWVPYLSAVFIILSAFVHPSIRTNVSKSVGSNEQGIAQGCISGISSFASILAPLIFTPLTAWVLSETAPFKFKGFSIMCAGFCTLIAFIISMRMRAGQSGASEMLAIVQHEQA

SEQ ID NO: 194502 - protein, 180 aa, Oryza sativa
  Clone ID: PAT_MRT4530_9053C.1.pep
MIKTIAKTRDFTSSSSSAHDSTPSPPRRGRGSHRCRPPRQQRSRGSASRRRRDESATLGLVVGPLRLLRGVKEEVIIVIHPAGDEVEDPASRRWRWDGSAMLGLVVAPLRLLRSVEEEVVVIVQHVGGEVEDRSHGDGVPSASVRFSGGDGAIRLWTARRLTMSKKTRLPVWSSYGRDVH

SEQ ID NO: 194503 - protein, 64 aa, Oryza sativa
  Clone ID: PAT_MRT4530_90540C.1.pep
ARGGAPLSIPHPHPIKTLMSPSRNRIVNSLIPLNSQSLLKTPPNQTHPKGFSLFANCKHYILNC

SEQ ID NO: 194504 - protein, 395 aa, Oryza sativa
  Clone ID: PAT_MRT4530_90541C.1.pep
MARHAKTDSDVTSLAPSSPPRSPRRSAYYVLSPAASHPDVVVASGGAGGGGGGVAAAEKMSFAGSTPAESPLHYHYHHSGAAVHHSRESSTGRLLFSDQLRSGAAAGVPWRRLAQGSGAGSVGDDDDDEGGLAGAASQWRCYALGAFAFVAVFAFFLLVLWGASKSYKPHVVVKSVVFETYHIQGGTDRTGVPTKMMSVNATVRLRFRNRGTFFSLHVTSTPFHLFYDDLTVATGHAGLGFSVLHTEPLSVYTHTDGELMAEFYQPRRSGRVVTVSVVGKQVPLYGAGAELHSKPNNGRLGPAVVPVRMAFVLRARAHILGLLVRSKFYRRVLCRLDVREASLGKPVHGVAADCEYHDGRWPCSHPHADNEGNELQSRYTLFLVWHKKCALNIFS

SEQ ID NO: 194505 - protein, 370 aa, Oryza sativa
  Clone ID: PAT_MRT4530_90542C.1.pep
EVRSVSGHIRCGFIQGYEFDCERGDAVAHGLVTVECDPDTGEISHREATFLVLRRGESGRRDAVRMFEATCRLRGSVAIANAFLVANCDGLKRWVICYEKLAGILSDYPDDHMLTTFGAFSSNGTDSLSPYWSNQIKMIITTLSDMGIRNVSHGGMSNPESYALTESLDIKLINMGKNENSRTYQHDLADFGTFLCQTPYIGASKCTSWTGFHFLINSNAMSQRYLWADIVKGHPLFLDPPSKLRCYVNLFEWSELIQISEKTAFCDACYKLMPDLTQKTLWGWISCCPASVKIYLNQAYKGISIYEDIITFVKNMILHGRQELMNANGGRWSDAHFCHKIEQLFPGFMSVAYALSKATRSDLNKLLGRA

SEQ ID NO: 194506 - protein, 42 aa, Oryza sativa
  Clone ID: PAT_MRT4530_90543C.1.pep
MASPLRCLRILSGEISPDTDSRRKTILLSTTGWFYGLQVDNR

SEQ ID NO: 194507 - protein, 37 aa, Oryza sativa
  Clone ID: PAT_MRT4530_90544C.1.pep
PLRIGSDMMQVPVHREPFSSSALQSYHVNNLLLQLKI

SEQ ID NO: 194508 - protein, 203 aa, Oryza sativa
  Clone ID: PAT_MRT4530_90545C.1.pep
MFRHLAALILSAVVLAASTSSGVVDARPVHTGPYHVVIRTAAKPSRRLIGLGGNAAICQEVHYKALCGTLTTLPGVMTPQQLLDAALRVAESKAMMAEKRLADVMKSRAVKAEGTSMSSTLDTCKGAYSSLADALQKARDTIKSGGSHDDLMTELSSASTFSTDCGEAFDEFPDLTSPIPGAQRHVNRLVSNCLDLAATIKEN

SEQ ID NO: 194509 - protein, 279 aa, Oryza sativa
  Clone ID: PAT_MRT4530_90546C.1.pep
MAEEVSDNNGRGVSLPPSWICGWLASRGANPTAVVLGEADPVVVGGRLGGGGRASPTIRENPFRAVCKNPFSTSVCSRLKRPPYFVTKAYIGLVAHIATSTAATDNAVASQCRRWEGDLGPPPSFLPPDLAEGERLQPATAPPAERRRRPTLLQRRGRRCRAAAALPPVGSGGGRAPPGSRRSSCRTPTTPTHVADDTDTDTAAPPAALPAAGRGEREDEEKRRGVVGEVVKLDELVQTDEELVKLATNPLAAQHALLLRDTPLSPHLISYLIGPPLAR

SEQ ID NO: 194510 - protein, 821 aa, Oryza sativa
  unsure (1)..(821): unsure at all Xaa locations
  Clone ID: PAT_MRT4530_90547C.1.pep
MSSSASPSVAPSAEYVEHLSNLVXSLSHEHHYFLGPIGNLDPTEFIIAKTNRIPFRLANPNLGHXKNTLKSWPSLEKTSPEKSCAVWYKRVSASKQVHWDEPGIGQALALTLANSAKDEPLMASAAYFWSNTLNAFLLNQGPMTPTLIDITMITGLDVISSANPMSLNNKNQFDFRTKSIGGWSGYVATYMGKGSVTPREHTTFLMMWLEKFLFYGSSYGPTTNWQFLAEALETKRQLPLGKILLDYLYQMLSNASAKIATGSVVGAGCELATPDRSXIPEAGTHYSFYEGFQRDAXVWFPYEDSVNFDHPADFRFEDINSEKYKKSTEVFSAAISPCILPIGIHQGRNIHVSYEFYHPMSSARQFGMGQMPISLFFADKIQCRGEISSTLMMDRLLNIPGPSLGSIDNIELARFRSRNFDRWWGEWKQHIFHXPASTYMTVLFPDVVPQTTXSPPPRKSNSGRDIEYALGLLPNGGRKRKTKAPAVDPSALVHKKKAKKHKPKLADDLPALDPSIEQALDEEEIEEDVDQAAAELSDEGEKTPLASPKQTPPTPAAPTHFSRKKKTAVRKKSTATTLKPAPPQMSIDRTPSATGSHHVEEEEQPAAPAILTLADLFSFDIKDYFDKEVEEESTSKALAPLDENVKKTLEDISLRLESSLDNLVADCGSIRARFAEIQALIPDDLANTITPAVSLEQHQFKLEKAKQRIADQQVRKDIEATIQANRQLSNIDRLEAHKIDLIAQLEECNAELDHEKQKLANLPSAVEEQXSRLRSAIKNVADMTKSLKVISGTDAQDIQAIEEVDQIRQRAVLAIQRYLSG

SEQ ID NO: 194511 - protein, 497 aa, Oryza sativa
  unsure (1)..(497): unsure at all Xaa locations
  Clone ID: PAT_MRT4530_90548C.1.pep
MKGGGGGGKEAVTASILRFLLLLLLPLTALYFFYTLHLLLASAASSSSSSCPPDAASSSSSVRLSTNGTSAGAAAVTVAAGKKAPAAASTETTLQHVVFGIAASSRFWDKRKEYIKVWWRPRGAMRGYVWLDREVRESNMSTARTGLPAIRISSDTSGFPYTHRRGHRSAIRISRIVSETFRLGLPGVRWFVMGDDDTVFFPDNLLTVLNKFDHRQPYYIGSLSESHLQNIYFSYGMAYGGGGFAISRPLAEALARMQDGCIRRYPALYGSDDRIQACMAELGVPLTKHPGFHQYDVYGDLLGLLAAHPVAPIVTLHHLDVVQPLFPNAKSRPAAVRRLFDGPIELDPAGIMQQSICYDGGNRWTVSVAWGFAVLVSRGVMSPREMEMPARTFLNWYRRADYTAYAFNTRPLARSPCQKPAVYYLSSARRAAALRGGDTTVTRYERWRRANETRPACRWNIADPDAHLDHIVVLKXPDPGLWDRVFFSANPSSAATV

SEQ ID NO: 194512 - protein, 163 aa, Oryza sativa
  unsure (1)..(163): unsure at all Xaa locations
  Clone ID: PAT_MRT4530_90549C.1.pep
SLQEVAIRASHWPARHSMLRKRNVLKFVKDSSILRPGYYIAIDPRTKXVILGIRGTHTVYDLVTDLIALSDKKVSPKGFSTHFGTYEAARWYLRHELGLIRKCLEKHKDYKLRLVGHSLGGASAALLAIMLRKKSKEELGFSPDVISAVGYGTPPCVSREIAQ

SEQ ID NO: 194513 - protein, 102 aa, Oryza sativa
  Clone ID: PAT_MRT4530_9054C.1.pep
SGPRWRRPSWRQRRCGRRHSSGPRRPAGGGARRTAAIIGAAAEAGWLEVARGGRRLSSGRGGGGWRCSSGPQRRWAGRRRRRRCGCPRRDTRWGWIGGRGSM

SEQ ID NO: 194514 - protein, 164 aa, Oryza sativa
  unsure (1)..(164): unsure at all Xaa locations
  Clone ID: PAT_MRT4530_90550C.1.pep
MAMPKVIEESITKAPLLCGADRRGSTARRTHEEEKVEPARAAARTDGDGGGCRRGRWPAATATAMTARGGRXDGNRPPRGSGGSGHPPRGSGGATAAASAPAWIRRRRPPPARIRRRDGGDGDGKATATTGRRREGGRSGDGNGDDDGKAADLAMATATTTGRR

SEQ ID NO: 194515 - protein, 49 aa, Oryza sativa
  Clone ID: PAT_MRT4530_90551C.1.pep
SVSVGGSLRAVYSFESIWWFIRQFMGVFVLCVIFVGITSASYVFVWFRI

SEQ ID NO: 194516 - protein, 110 aa, Oryza sativa
  Clone ID: PAT_MRT4530_90552C.1.pep
RAFAFLLPFNNMPWAVSIFPPPRQLPNPSSLAPTHLSFIPPYGQVPLVPFTLAPHSPAPPFPKPQPLISFLLACNPPVLESPKASIPPRFLLLPSPHTPFSFFPLFFPVF

SEQ ID NO: 194517 - protein, 187 aa, Oryza sativa
  Clone ID: PAT_MRT4530_90553C.1.pep
MNHVIQKEKEDYCVSELGFRWSGCTATVHGNGRPRSTLSKTDGRDRSVHDRLTGDGDDDVSDDVTSGGGSAALRHKRRAPRRRSRRGELTDDQNVGGRPTDGGGVEEKAAEKIGSTAVTVLRRSSAAAKGRTRTATTLRTRWRSSRATATTGTAAKDGWSGGGNGGSRLLGARALQATRGEGEGGGG

SEQ ID NO: 194518 - protein, 283 aa, Oryza sativa
  unsure (1)..(283): unsure at all Xaa locations
  Clone ID: PAT_MRT4530_90554C.1.pep
RQHRRRLGRRKLAGERRRDDANGGHQRVEGDSANSPVTKTTAEKQWTAPATRKKRRRSSGRRXRRCSGGLRRRRSGGRGRRRLGDHDDDLPERQRRLERRRRTAGATAATAAQGYTGLGLYRQREAKARVATGSGDTGXPFIGARRRRRRPMAAGDEMERSGSERXKADPIRLRIKHFPSQFSRYFQRGKGRGDPEDHFSSINSAGEGKDRPDLEGNGGGAALGFRAAAAGGRRRXPTGGTHLSATAXSRGRLRLRTGPXWAEGERERGVFGPTFGPKPKETF

SEQ ID NO: 194519 - protein, 855 aa, Oryza sativa
  unsure (1)..(855): unsure at all Xaa locations
  Clone ID: PAT_MRT4530_90555C.1.pep
MSTPGANPPSPTPARIHEEANPATEAVAEGHPATTAVQQPEIHELPQEQHTSMSGETSASRSSRNPRSQNIWPTTVQVIREVDASGRPTAPRTVIGRWSNCCGIAARENFGILHKDIGKITEAEKERAWTAMEKWFTFPAEAKDRLKRKALQKMGKAWKNWKSKLFTEYVNPPGNHTPFDEYPQITEAVWEEFCSLKTTQEFRESSEAHRVLQQRNEHPHRLGTAGYIGKEAIWAQEDAAAAAANVPAPFSDIPEQRARNWARARGKVNPDGSVTFENKSDAVVYQELLGLVAEQASQSEVESAPKRREDDILTKALGTKEHPGRTRGIGSDVPWKHGLPQYSSQYRKRKVSKEERDARLKPNLRLRVEESVNKVLADMNIPRVTTPAVQPTPRIQHDASPSQHRSSCASTEVPAPGLPIAPLAAVDHIEGAAQCVLLARVHPTFAPEVAEGMAFKPSVTDKVHGADLLAXDTWSGYPLPVXPPNDEIMTLGDARKTFIQWPKEDIVVKMTPRPSRPTELTPPKSKLSIEAPRGPALSVPHSPGGADMDLADIAQSLAPIKTTRKADSSPPLVKGQKRERGKGKVGELAPEPKRGKAATSMPVSKSGKVVRAPAQFELGMPLVEDNVLAVMGIACRELHKQYMELSNAKRKMRESSIVGHHDHQPFLSSPAYITIGFDDLFDLFRIRKLDTGLLKCYSLLCWIESRRHGNQVGFLDPSMVNEVNLQQSSTEVVDYVNRCLWAHQDKEYIMCAHNQERHWILLVIVPKWSRVTYLNSNKSKDYDFSEITKALNMAWGPYVEKGGRHKEGKNELYHDTKFACAQQIGDQCGFHVCHNMSTLLREVKDFDPEVVANGE

SEQ ID NO: 194520 - protein, 231 aa, Oryza sativa
  Clone ID: PAT_MRT4530_90556C.1.pep
MVNTRASGSGNNNNEGNPTLAQVLAQQTQLMNMMIQQMQNQLNQGNNNAPPPQNKLTDFLRVKPPTFSSTTNPVEAEWWDQFRMNRAEGQPITWADFTEAFKKTHIPTGVVSLKKREFRALKQKDQTVAEYLHEFNRLARYAPEDVRTDEERQEKFLEGLKDELSVTLISHDYADFQQLVDKATRLEDKKNRMDNRKRKMTVFQEAQGSSQRQRIKPLQIGESSSAGQGQS

SEQ ID NO: 194521 - protein, 1172 aa, Oryza sativa
  Clone ID: PAT_MRT4530_90557C.1.pep
MATSLSSAPTQLRPSPSPSHHRLLHRSSLLPFPRRHHHRRRRCGALSIARASASAKDGVTVRRFPAAPTEGGRLAGVRKIMILGAGPIVIGQACEFDYSGTQACKALAEEGYEVVLVNSNPATIMTDPDLAHRTYIGPMTPPLVERIIAAERPDALLPTMGGQTALNLAVSLADSGALDRLGVRLIGASLPAIRAAEDRQLFKQAMDRIGLKTPPSGIGTTLEECISIAEDIGEFPLIVRPAFTLGGTGGGIAYNRAEFEDICRAGLAASHTQQVLVEKSLLGWKEYELEVMRDMADNVVIICSIENIDPMGVHTGDSITVAPAQTLTDKEYQRLRDYSVAIIREIGVECGGSNVQFAVNPADGEVMVIEMNPRVSRSSALASKATGFPIAKMAAKLSVGYTLDQIPNDITKKTPASFEPSIDYVVTKIPRFAFEKFPGSEPVLTTQMKSVGEAMALGRTFQESFQKAVRSLETGFAGWGCAPIKELDWDWEKLKYSLRVPNPDRIHAIYAAFKKGMRIQDIHEISFIDKWFLTELKELVDVEQFLISRGLDQLSKDDFYQVKRRGFSDTQIAFATSSSETDVRLRRLALEVAPTYKRVDTCAAEFEANTPYMYSSYEYECESVPTNKKKVLILGGGPNRIGQGIEFDYCCCHASFALREAGYETIMMNSNPETVSTDYDTSDRLYFEPLTVEDVTNVIDLERPDGIIVQFGGQTPLKLALPIQQYLEDKKLVSASGTGLVKIWGTSPDSIDAAEDRKRFNAILEELGIEQPKGGIARSESDALSIASEVGYPVVVRPSYVLGGRAMEIVYNDEKLIKYLATAVQVDPERPVLVDKYLIDAIEIDVDALADSVGNVVIGGIMEHIEQAGIHSGDSACSLPTRTVSAKCLDIIRSWTTKLAKRLNVCGLMNCQYAITTSGEVFLLEANPRASRTVPFVSKAIGHPLAKYASLVMSGVTLPELGYTQEVVPKHVSVKEAVLPFEKFQGCDILLGPEMRSTGEVMGIDYEFSGAFAKAQIAAGQKLPLNGTVFLSLNDLTKRHLAEIGRGFRELGFNIIATSGTAKVLQLEGIPVEPVLKIHEGRPNARDMLKNGQIQVMVITSSGDALDSKDGLQLRRLALAYKVPIITTVDGARATIDAIKSLKNKSIETLALQDYFQTTDASQNLQAAQSAS

SEQ ID NO: 194522 - protein, 137 aa, Oryza sativa
  Clone ID: PAT_MRT4530_90558C.1.pep
MTSSMVAGSEGKLAGARAAGCGFGRHAHVEDDETNPTVLTLEPNDERRRPATKWVAAAASVDGGDGAPVTGDSGERAAELHLAPANTTVVTATGGDDGGGGAAQMELGRRRRRGGARGGGATRHGRPRERGQTKEED

SEQ ID NO: 194523 - protein, 131 aa, Oryza sativa
  Clone ID: PAT_MRT4530_90559C.1.pep
DRKNTFGGQSEIPPPPPVGRPFRRLGKMIFPLVSAHLGPVDEFAHGSLIARPGSLSAFLVGEGVGRSWLWRVSVIHVFVLSSSLLCPSASLGTTIPLFGVCFAFSVFLFSPPFCQKFCPPTMSSSSYVNSP

SEQ ID NO: 194524 - protein, 75 aa, Oryza sativa
  Clone ID: PAT_MRT4530_9055C.1.pep
CIGSDVHWCRRHVYRWPSGCKSFIPTVLELLLTIVFQVILGLTSIVEQRSLLAAPGIKACKHTASSFWHISPFLT

SEQ ID NO: 194525 - protein, 72 aa, Oryza sativa
  Clone ID: PAT_MRT4530_90560C.1.pep
MAAKQRIQALDDNVRSHLLSTDPFQFLAKLQLMNQATALERERNSDRSATIGGISSSELGSVPRTTDMDVRR

SEQ ID NO: 194526 - protein, 169 aa, Oryza sativa
  unsure (1)..(169): unsure at all Xaa locations
  Clone ID: PAT_MRT4530_90561C.1.pep
MDSPATPTDFSPLHSLAHYNESCYTKDKANDLAGARVVGRGFGGHLHVQDDDANPMVLTEATNGDRRRPATRXRRRRLGLXGGGGLRRTATTGKWRPGFLTPVRTXWRRRRATATADAAARRGXGGWPAAAARLRSTRELGEGGKRKRTTRGSYLXPWIEEIGLLPRGI

SEQ ID NO: 194527 - protein, 255 aa, Oryza sativa
  unsure (1)..(255): unsure at all Xaa locations
  Clone ID: PAT_MRT4530_90562C.1.pep
MDSPATPVGLSPPLLSLVLCNEPCYTKGKEGLLRQRLGFXVDRAHGGGSRKRTAEINPIQNGRXDRSVHDRLTGEGDDDVSDDVTSGGGSAALRHKRRAPRRRGRRGELTGDQNNGGGATDGAGDEEEAAAEIGSTVTAVLRRSSAAAKRRTRTAATWRPRRRSPRATTTTGTAAAHGWSDGDDGGARRHXLGRFGRXEAKAREAAGRGDTGDPFKGARRRRRRPTATGGGMERSGXRERSRSESNSNPPVSKEN

SEQ ID NO: 194528 - protein, 137 aa, Oryza sativa
  unsure (1)..(137): unsure at all Xaa locations
  Clone ID: PAT_MRT4530_90563C.1.pep
MIPHQWPDQDGDLAGDWMVGCDXEGHVHVEDDETNLTVLTLEPNDERRRPAMRSSGGAASVDGGAGAAVVGGFGGQAAGLLHPPAHLMVVTATGGDDGGGGATRMELGRRRWRGGARGGGATRHGRSRERGQTKEED

SEQ ID NO: 194529 - protein, 78 aa, Oryza sativa
  Clone ID: PAT_MRT4530_90564C.1.pep
MASALLPQAAQLGYKPNVFSFWILLLQLRLIDYCKNEHMTYLTSHTANMQVHKDTKGWHNIGSFAKAAFSKHLRVVKQ

SEQ ID NO: 194530 - protein, 65 aa, Oryza sativa
  Clone ID: PAT_MRT4530_90565C.1.pep
CKCLRYIVICHRSLFQEAKKYIGSSTNRCLFFIIIENLALGQFKFLDRARFFTTLQLLMVSNFGN

SEQ ID NO: 194531 - protein, 237 aa, Oryza sativa
  unsure (1)..(237): unsure at all Xaa locations
  Clone ID: PAT_MRT4530_90566C.1.pep
VSSVGLITKNIVKPTHNRKHGYSNSFTLARDVPLYPQDTTPXMSPCASVPPQYLGXNCDNISHTTQLTTVHCSWIIISPSKPEAMDSPATPTDFSPLLSLAPHNESCYTKALDDATTSDRGLGRAIRGHLREEDDDANSPVXRNNEVRRPVTRTNGSSARLDVDGGAPAVFGGCEGADGVLLHRANPVVATDGDGDDAGGGAARLERRRRRRXLGLRGGGTTGDGEARDLRQMEEDD

SEQ ID NO: 194532 - protein, 95 aa, Oryza sativa
  Clone ID: PAT_MRT4530_90567C.1.pep
MPSPPTPAHRHPPAPRLRRLAAHRRAAASPSHPSKPGELPLLPPPPPTLPTPPHSRTLIRRLFAGVWVVAGAGEEEEFVGVGEEAAGVRIVKHIQ

SEQ ID NO: 194533 - protein, 97 aa, Oryza sativa
  Clone ID: PAT_MRT4530_90568C.1.pep
KRDYCVSGLGFGGPGARAAVHTNGRPRLIRSKSDGRDRSGPRRFTADGLDDASNDVTDGGGGSARQTARAAHAHRRTAAPRHQQRAPARRGQHGEHT

SEQ ID NO: 194534 - protein, 52 aa, Oryza sativa
  Clone ID: PAT_MRT4530_90569C.1.pep
ISRTRPSPVHSSNSHSLSPGMLAHARICGVSVLSDLSGPASNVVKQSQVICI

SEQ ID NO: 194535 - protein, 1263 aa, Oryza sativa
  unsure (1)..(1263): unsure at all Xaa locations
  Clone ID: PAT_MRT4530_9056C.1.pep
MAPQPPRQMYVPPRPQTQLVRQVPRAVQAAGDASRNANVTCYNCGKXGHYSPSCPYPKTPAPTFGRGRLNHVTAEEATDAPGVVLGTFLVHSIPLTVLFDSGATHSFMSTLKAKQLDLKTEFLSDAMRIQSPGSTMVTKLLCKGVELIIDGVKFKANLILLDTLGLNVILGMDWLTKHEGTIDCAHRTVTLRSTDGQFVRFTFEQTSTSNQPSIQSLSIPELKSVPIVNEYSDVFPDELPGMPPDRDIEFVIDLIPGTAPIAKRPYRMTSENLMELKKQLNEQLAKGFIRPSSSPWGCPVLFVPKKDGTMRMCVDYRPLNEVTIKNKYPLPRIDDLFDQLTGTRVFSKIDLRLGYFQLKIRPEDIPKTAFTTRYGLFEYTVVSFGLTIAPASFMNMMNKIFMEYLDKFVVVFIDDILIYSKSEEEHAQHLRMVLDKLREHQLYAKFSKCEFWLKEVEFLGHVLSEGGIAVNPRNVQNVLNWKQPQNVPEIRSFLGLAGYYRRFIENFSKIARPLTQLLKKENKFIWSEACETSFHELKRRLTTAPVLVMPDVLKPFNVYCDASHHGLGCVLMQEGKVVAYASRQLRPHEINYPTHDLELAAVVHALKIWRHYLVSNRCEIFTDHKSLKYFFTQPDLNLRQRRWLELIKDYDLGIHYHPGKANVVADALSRKLHHLAVIETINQPSLSSEFQKLNLGLVEDGYVAALALQPTLYSQIKAAQSIDEEVAEIMKEINSKPQSIYTLNSDGMVMLGKRIFVPNNQHLRETILDEAHQTPLSIHPGCTKMYQDIRTQYWWPSLRRDIAAYVAICDVCQRVKAEHQRPAGLLQPLQVPEWKFDEVGMDFITGLPKTPNHVTYGGAKLAELYLTHIVRLHGVPKVIVSDRGTQFTSRFWKNLHELLGTKLFLSTAFHPQTGGQVERTNQILEDMLRACVLEHNTNWEKCLSFAEFSYNNSFQSSIQMSPFEALYGRNCRTPLYWSEVGERQFFGPAIINEAEKNVTLIRDRLKEAQTRQKSYSDRRRRELSFDVGDHVYLKVSPMRGTQRFQIHGKLAPRYIGPYQIISKRGQVAYQLELPFQLSNIHDVFHVSQLKKCLRTPIEHTSLEDINLKPNLSYQEYPILNSHATRVSTRRARERASSSCPSPPATILNPTGRFEEEALPHILWLMLQHLGYDHPPEYHFFSHERSSSLEHIWLSCVYRDFGPMNHPFTFKLVVGMHPQQCRKLHYKQLCITDIIGQGWTGSFISFQLAQTNPPLITIQVLRET

SEQ ID NO: 194536 - protein, 262 aa, Oryza sativa
  Clone ID: PAT_MRT4530_90570C.1.pep
MERAAGGLNSKAVERHVGQVMISGPTTASNIPVPLCEKGAAERDDAINALPLTDIIGPLTDHQVAASLKEKVAKEASDAAAATTSGGNVLTKGRKFSSVSGHRRKTSTPSELQVEMGRLLEAGAHGIGREIAQARSEAALANERADRLVRELAEAREDLTKMRELVAGNERQRQGLEDRMSELGNNLSEIRGSLRVTYTGLHQLAGECGIKSTIPVNPDEFSLTSSLAELATAMGEIPSKHAARIAEETSNGIYTGACHVLA

SEQ ID NO: 194537 - protein, 657 aa, Oryza sativa
  unsure (1)..(657): unsure at all Xaa locations
  Clone ID: PAT_MRT4530_90571C.1.pep
MTSSKLLPIKPSVWDRSDRPRNVGQTTLSARSDWPSRAGQTTGTTGQTGRAMLVTKGTMELDEAGEIVIKLIRLDPRRFGSCRLRLLAPNFCLNEPVRPITTSDVEADVVLGVGTVETGHDREHRVKPNGHDNLGPFTGDLRSAMDLGKSSSTSASLKELQEDGALPGRGAMEREAGGTNPQPVLESFLDLFRFYYELRWMESNRVSGSVGFRLRDGXKQPGKISSWTAKPPLTPXLQSFIDFINDLRVRGLSGYEVVADFVGLSSRAVERQVGQLMISGPTTASDVPVPLCEKGATERDAAINALPLTDIIGPLADHQVAASLKEKVVKEASDAAAATTSGGNAPTKGRKFSSVSGHRRKAPTPSALDASPPPPRRQRLVTIGEKEAWAKAAQSKSGGASSASPTAASTDVVLAAGSREVTPSGPVSDPAAGRGPPTAILAWEELQVEMGRLLEAGARSIGHEVAEARSEAALANARADRLVRELAEAHEDLTKMRELGSLRVTYTGLHQLAGECGIKSTIPVNPDEFSLTSSLAVLLTAMTEIPSKHAARVAEETSNGIYTGACYVLADADDEGVQQRGQPESPVIPPILAFEGHALLDDVNDIVPGRAGTATTSFGWWPFHPFRSSDLINRVLEREEQPNVVVSMSNRPRERTC

SEQ ID NO: 194538 - protein, 253 aa, Oryza sativa
  Clone ID: PAT_MRT4530_90572C.1.pep
MDLGKSSSTSASLKELQEDGALPGRGAMEREAGGLSSRAVERQVGQLMISGPTTASDVPVPLCEKGATERDAAINALPLTDIIGPLADHQVAASLKEKVVKEASDAAAATTSGGNAPTKGRKFSSVSGHRRKAPTPSALDASPPPPRRQRLVTIGEKEAWAKAAQSKSGGASSASPTAASTDVVLAAGSREVTPSGPVSDPAAGRGPPTAILAWEELQVEMGRLLEAGARSIGHEVAEASSEAALANARADRL

SEQ ID NO: 194539 - protein, 84 aa, Oryza sativa
  Clone ID: PAT_MRT4530_90573C.1.pep
SSIDLEIMEADVAHSAGHTDSVDPFGVAARPEHAMRCIHRKTGGRAGPGGDSGILAFPAQRPQAPELHRIRTGHARSLESVLYY

SEQ ID NO: 194540 - protein, 117 aa, Oryza sativa
  unsure (1)..(117): unsure at all Xaa locations
  Clone ID: PAT_MRT4530_90574C.1.pep
MLTSGIFVLCRDADDEGVQQRGQPESPVIPPILAFEGHALLDDVNDIVPGRAGTATTSFDLENALADRDRRIQYWKTKFEVVELERAMLEVKKEQAVETLXGREVWFNSYLKSCCTS

SEQ ID NO: 194541 - protein, 56 aa, Oryza sativa
  Clone ID: PAT_MRT4530_90575C.1.pep
FQFIYLAVKLFLADEKPFYSFCQLRINNHIYVLLPYCFHALFVYASSKQIKSGLNK

SEQ ID NO: 194542 - protein, 72 aa, Oryza sativa
  Clone ID: PAT_MRT4530_90576C.1.pep
MTSWWSWRSLFSSLGNGGGSNADASSGSGTSSPPPPPQPAPRKNRPSPRKAMPKASKAKAQLHLGDVEPKKS

SEQ ID NO: 194543 - protein, 110 aa, Oryza sativa
  Clone ID: PAT_MRT4530_90577C.1.pep
MTSWWSWRSLFSSLGNGGGSNADASSGSGTSSPPPPVPYPQQAAAGAPRWRSNCTMKPWEEGPAEAQAKPSQSQPQPAPRKNRPSPRKAMPKASKAKAQLHLGDVEPKKS

SEQ ID NO: 194544 - protein, 394 aa, Oryza sativa
  Clone ID: PAT_MRT4530_90578C.1.pep
MTPARGIGWWLNGEGGFGGGAQRPELGKTESISQLAPPILVVLGAFCRGGRGDLHGVVAWLGADRFSRATMTLKRRRRPVRASSSPAPADPMPTPAASSALAPATSSPRPASPPTPPWTTAPPPGIAAPPLWITFSQQSPTKRGTRKNNKEASPSNTNGEEETIQREKAAPQEYCDTNLLPFPQHNRKPSIDEQFARFIEAIQKIHINIPILDAMQVPMYGCYLKDILNNKRPMPTAEVLADSSVRYPAGIAEDALVKIRDFFILVDFVVLDINSDKETPLILGRPFLSIVEANIDVGAGEIRLDLNGKEEKFEFRPRIEQCSMVKIKYGPNPQNIREVEVKPSKTDSLIAFMKNFLEKEAMGRHRPDPKVASRTQAKKPVTPAAKKPQDAPKT

SEQ ID NO: 194545 - protein, 159 aa, Oryza sativa
  Clone ID: PAT_MRT4530_90579C.1.pep
MAKLEEPVGPRMGNSAPTTRITTTTTTRPRAGRWPAADHHISATQFGHKFDLEIVALYANCRLPMMEHTMEDGAPLVLVLVLSLGVTVVPAAACHFCASGMDAGSPHRPATGMAVNIHLGSSSRLLALSGSGLAPHLVVPPQRHPPPLQPSIPHVSSSF

SEQ ID NO: 194546 - protein, 444 aa, Oryza sativa
  Clone ID: PAT_MRT4530_9057C.1.pep
MAALTDDANGEGASQPRTGPYSSGRAGGSRRAATAEQHDDEPSLAQLLANQNRLFERMVANSENMGAAMAQQANQAPSKLADVQRTHPPHFSSAADPLAADDWLRDIEIKLNLCRCDPVEKATFAAYYLQGAAAAWWETYKTLIPPDEPITWTVFREGFRSAHIPAGLMEIKKKEFLNLKQGNMPFMEFMERFNYLGRYAASDLNTETKKVELCRDRLAPELKHALAAHEITSMKTLVALRVESSEKEVVEDRKRKWAAKKFAGSSSSTRPRLAPSPAVRPMAPQPPRQMYVPPRPQTQLVRQVPRAVQAAGDASRNANVTCYNCGKKGHYSPSCPYPKTGTSGPYSQGAPQQPRGPPQVQPGQRGAPAVPKPAPTFGRGRLNHVTAEEATDAPGVVLGMPPDRDIEFVIDLIPGTAPIAKRPYRMTSENLMELKKKLNEQLAK

SEQ ID NO: 194547 - protein, 157 aa, Oryza sativa
  unsure (1)..(157): unsure at all Xaa locations
  Clone ID: PAT_MRT4530_90580C.1.pep
VATATAACSRSSPESGGARARAGSTGDGMRSSGRRGKRKRRARGCFLXARGGEIVAGRGCFEAATAVFLCDIVGEVGARFGAENWGEVGDLVEEVEGNRFYAVWGRGREREGARXAGRGRQPPAMAASAWEAEVANANLILRLSLPKVGWTVSKCFQ

SEQ ID NO: 194548 - protein, 32 aa, Oryza sativa
  Clone ID: PAT_MRT4530_90581C.1.pep
DRLCTGNQQSISIRQSSTMTYYRVDPLRGQRT

SEQ ID NO: 194549 - protein, 134 aa, Oryza sativa
  Clone ID: PAT_MRT4530_90582C.1.pep
MARWPPRAPAGCSPCGRRRSRGSFVDDQPVTGLDKAVIAPGKGFRSALGLSEGGPLFGFTKANELFVGRLAQLGIAFSIIGEIITGKGALAQLNIETGVPINEIEPLVLFNVVFFFIAAINPGTGKFVSDDDEE

SEQ ID NO: 194550 - protein, 703 aa, Oryza sativa
  Clone ID: PAT_MRT4530_90583C.1.pep
MDRLRRRNPKSVPSGSSSMKPPRPPRGPSFQAPAVPRPLPEPSSPGGRPRKRVRFASEASSHQICVRQDANTGKRPQESHNVMPGRKLPAQKSTFSSEETPATPCKNEEIYHEQVNAKASHSEHGNNDTPQLNPHDYLTVHVHTPITQVSFEAVGISRNTEFFADILQRLGANSMIKKHRKESMRMMKVCGHTPTGTGCHFENMLDYRISDFDLRTKLRTEKESSSYATQESRQFMALPWGYNQGPSGSLDWKIDLPHRGNEARESMALPWVHTVGLPNSGWKRDTAHNQVSNLLLEDVQPHSEGKLASATELNCNVETRPCTYHGWVPMLSQGFSGSIPNRFFTPCQIEETHVVPYEISNTYRRPDPCNPLEQCFPPVGLDRQGQKEARFSHNYGAELLEQFTSSSVGLERQDQHGSELVNFDTGLLSSFDQLYAKCSASSFLDTRNGILNHSDFSYISNLAASESNDIVSNASMSCLNSIFSTSEHPFQLGSKRLHETSLAGLEEKYSKEAEIFDNSDIGPIQELDQLPAKFTYTSFSNYISGTLDHQHHLRYMPPKDSSSTLFMDANGACLNSLSPYTDHPCKQDGKGLCDSSTELWSSVHHLQSHDDDFGAVLGFMSEENTYNDLEDHCSFMLAEGNPNDLCTSDLPLFGLCSAMDGIREASVRLDGLRFILLADGTSMNVEGTEVYVDDVMRYSQMFT

SEQ ID NO: 194551 - protein, 268 aa, Oryza sativa
  Clone ID: PAT_MRT4530_90584C.1.pep
MAQSMLVSGANGTVAAASTSRLQPVRPTPFSRLVLSQPSSSLGRAVSVKTVALFGRSKTKAAPARKAEPKPKFKTEDGIFGTSGGIGFTKENELFVGRVAMLGFAASILGEAITGKGILAQLNLETGIPIYEAEPLLLFFILFTLLGAIGALGDRGSFVDDQPVTGLDKAVIAPGKGFRSALGLSEGGPLFGFTKANELFVGRLAQLGIAFSIIGEIITGKGALAQLNIETGVPINEIEPLVLFNVVFFFIAAINPGTGKFVSDDDEE

SEQ ID NO: 194552 - protein, 65 aa, Oryza sativa
  Clone ID: PAT_MRT4530_90585C.1.pep
GPGFGPRMWRDNTNYEEPGFGGRSTSGETSGAANVKVELDPDHCSGVTRASLLCCEHKGCWIGFR

SEQ ID NO: 194553 - protein, 174 aa, Oryza sativa
  Clone ID: PAT_MRT4530_90586C.1.pep
MRRETAVGPIPSSHSWHVGFWNWPRCRPFHRSSVVDGCGVAGPWDDNSGAWWVPLHTTLHVIVARFPTVSKLALKCDYRAEGVTNPTFVLLVDRLDPTLQRLKLRSLRLVTDYGVVVLAVAATSLRKLSIASCTFGAKGIEVVLRSYLQLKELFVNAASHLQDNGADWSSADSK

SEQ ID NO: 194554 - protein, 491 aa, Oryza sativa
  Clone ID: PAT_MRT4530_90588C.1.pep
MVNTRASGSGNNNNEGNPTLAQVLAQQTQLMNMMIQQMQNQLNQGNNNAPPPQNKLTDFLRVRPPTFSSTTNPVEAGDWLHAVEKKLELLQCTDQEKVVFASHQLQGPASEWWDHFRMNRAEGQPITWADFTEAFKKTHIPTGVVSLKKREFRALKQKDQTVAEYLHEFNRLARYAPEDVRTDEERQEKFLEGLKDELSVTLISHDYADFQQLVDKAIRLEDKKNRMDNRKRKMTVFQEAQGSSQRQRIKPLQIGEPFSAGQGQSQQLNIGGEIKSETNESNEVNIEQANQPVPVQQDQTQENNSSRREQQPRRAAASVVAAGRRRYHRVREVVAVPVHRFAAAEDRRSAVAVVDPKSFAASSSSPAPSFAPPPSFWSSVSSSRRDLRLGALRLHRRAVVRRRACAARAVRSAEPPPLVGDVIADVIGVVRHEPHGSLRGTRLRSGGDKPTGVAGESMPLVFEGWYTSGQSKTIRIAVPAVIGGLSNVFRD

SEQ ID NO: 194555 - protein, 64 aa, Oryza sativa
  unsure (1)..(64): unsure at all Xaa locations
  Clone ID: PAT_MRT4530_9058C.1.pep
FFFFLIEYTSSLENLEVSAQKSWRQLPXCFSWVHTAPLWGMSVPFWSDHDIIFVCVSNLRIDKY

SEQ ID NO: 194556 - protein, 75 aa, Oryza sativa
  unsure (1)..(75): unsure at all Xaa locations
  Clone ID: PAT_MRT4530_90590C.1.pep
GIQAPLSQAAQLGYKPNVFSFWILFLQLRLIDYCKXEHMTYSASHTANMQVHKDTKGWHNIGSFAKAAFSKNLRE

SEQ ID NO: 194557 - protein, 62 aa, Oryza sativa
  Clone ID: PAT_MRT4530_90591C.1.pep
SCCSVVHWLSHEARAALGRGRGVRVPACAALLLARHPACVHHLIPLGLSFCWHAYSRAARHT

SEQ ID NO: 194558 - protein, 39 aa, Oryza sativa
  unsure (1)..(39): unsure at all Xaa locations
  Clone ID: PAT_MRT4530_90592C.1.pep
VTTVIVLHYSRFVRINKINFRSLIFYDARSMVKYISXGY

SEQ ID NO: 194559 - protein, 155 aa, Oryza sativa
  Clone ID: PAT_MRT4530_90593C.1.pep
MDSPATPVGLSLPLLSLVLRNESCYTKDGDLAGDWMVGCDFGGHVHVEDDETNPTVLTLEPNDERRRPATRSSGGAASVDGGDGAAVVGGFGEIAAGLLHPPAHLTVVTETGGDDGGGGATRMELGRRRRRGGARGGGATRHGRSRERGQTKEED

SEQ ID NO: 194560 - protein, 161 aa, Oryza sativa
  Clone ID: PAT_MRT4530_90594C.1.pep
MAGARIQTQHFGTHRTPDVQTKAHARAVKTFNAIGSGGFPKHNIEDGWRNQWRRREAVETDVKGGPMGNSGAVEPPPPTCHANCLTSPRFYSDMSCKQKMPQVNPVVTLLPLDARLAPITIRRRVGDGVGRIGFGSPPKIAHSEAHPIALLFGLESKLLNP

SEQ ID NO: 194561 - protein, 94 aa, Oryza sativa
  Clone ID: PAT_MRT4530_90595C.1.pep
MAEQEALIGDDPVDQCRNAVAAGVQEDTRTWHVAVLLVILVRQLEHREAVMAGDKLRMNCTMVAAPVAYWWQRRPRVAYCNCRTEVLKRGWGWI

SEQ ID NO: 194562 - protein, 120 aa, Oryza sativa
  Clone ID: PAT_MRT4530_90596C.1.pep
RRLRVALAAAVVAAAPAVLRRRSSRRRRSGKSPSWSPSRRRPRPPLRRRRRPPEHRRHRRPEDRRRFFLVAGAIRCSSPLFWSSVSSPRRPLPVGVLRSRRRAVVRRRACIAEPPPVLTS

SEQ ID NO: 194563 - protein, 240 aa, Oryza sativa
  unsure (1)..(240): unsure at all Xaa locations
  Clone ID: PAT_MRT4530_90597C.1.pep
MLYKREKRFIASAARVCGEPGARRRLTETNGRDRSIQNGRPRSIGSRRVYGTATMTSATTSAPAAARQRMLAGERRLDDANGGHQRVEGDAANSPVTKTTAEKQRTAPATRKKRRRSSGRRRRRCSGGLRRRRSGGRGRRRPREPDGGDGDRRRLLQRQRGAAEPMATTATARATRRRRXTRRRAKAKVAADRGELGGPFKGARRRRRRPTATGDAKERLGLEERDESESNSNPPVSKEN

SEQ ID NO: 194564 - protein, 852 aa, Oryza sativa
  Clone ID: PAT_MRT4530_90598C.1.pep
MSTPGANPPSPTPARIQEEANPATEAVAEGHPATTAVQQPEIHELPQEQHTSMSGETSASRSSRNPRSQNIWPTTVQVIREVDASGRPTAPRTVIGRWSNCCGLAARENFGILHKDIGKVTEAEKERAWTAMEKWFTFPAEAKDRLKRKAFQKMGKAWKNWKSKLFTEYVNPPGNHTPFDEYPQITEAVWEEFCSLKTTQEFRESSEAHRVLQQRNEHPHRLGTAGYIGKEAIWAQKDAAAAAANVPAPFSDIPEQRARNWARARGKVNPDGSVTFENKSDAVVYQELLGLVAEQASQSEVESAPKRREDDILTKALGTKEHPGRTRGIGSDVPWKHGLPQYSSQYRKRKVSKEERDARLKAELKVEVIQELEASMNARVEERVNKVLADMNIPRVTTPAVQPTPRVQHDASPSQHRSSCASTEVPAPGLPIAPLAAVDHIEGAAQCVLLARVHPTFAPEVAEGMAFKPSVTDKVHGADLLAGYAKVSIDTVKDTWSGYPLPVPPNDEIMTLGDARKTFIQWPKEDIVVKMTPRPSRPTELTPPKCKLSIEAPRGPALSVPHSPGGADMDLADIAQSLAPIKTTRKADSSPPLVKGQKRERGKGKVEELAPEPKRGKAATSMPVSKSGKVVRAPAQFELGMPLVEDNVLAVMGIACRELHKQYMELSNAKRKMRESSIVGHHDHQPFLSSPAYITIGFDDLFDLFRIRKLDTGLLKCYSLLCWIESRRYGNQVGFLDPSMVNEVNLRQSFTEVVDYVNRCLWAHQDKEYIMCAHNQEHKEGKNELYHDTKFACAQQIGDQCGFHVCHNMSTLLREVVQVDDIMALIHLRAWLANPEASQYLAFIFFLELTHQ

SEQ ID NO: 194565 - protein, 350 aa, Oryza sativa
  Clone ID: PAT_MRT4530_90599C.1.pep
MAQKEANGSSNGEHTTRPPPTPSPLRFSKFFQANLRILVTGGAGFIGSHLVDKLMENEKHEVIVADNFFTGSKDNLKKWIGHPRFELIRHDVTQPLLVEVDQIYHLACPASPIFYKHNPVKTIKTNVIGTLNMLGLAKRVGARILLTSTSEVYGDPLEHPQTEAYWGNVNPIGVRSCYDEGKRVAETLMFDYHRQHGIEIRIARIFNTYGPRMNIDDGRVVSNFIAQAVRGEPLTVQKPGTQTRSFCYVADMVNGLIKLMNGDNTGPINLGNPGEFTMLELAENVKELINPEVTVTMTENTPDDPRQRKPDITKAKEVLGWEPKIVLRDGLVLMEDDFRERLQVPKKNQA

SEQ ID NO: 194566 - protein, 1456 aa, Oryza sativa
  Clone ID: PAT_MRT4530_9059C.1.pep
MPGLAAADNSPPVAAPPPRRLSSPLPRSRAPPSPSPSTSSRAKPRKVAAQPETDEAALDNPDLGPFLLKQARDAMVSGEGGGAARALEFAERAARALERRGEGAELELAMSLHVAAAIHCGLGRHADAIPVLERAVAVVTPPPPPPPPEGESSAEEQPPEDQQKGEEWALAAFSGWMQLGDTHAMLGRMDESIACYGKGLEIQMAALGERDPRVAETCRYLAEAHVQALQFDEAEKLCRKALEIHREHSAPASLEEASDRRLMALILDAKGDYDGALEHLVLASMTMVANGRDIEVATIDVAIGNTYLALARFDEAVFSYQKALTVLKSARGDDHPSVASVFVRLADLYHRTGRLRESKSYCENALRVYAKPAPGAAPDEVAGGLMEIAAIYEALGDLDEALKLLQRALKLLEDSPGQWSTVAGIEAQMGVLYYMVGRYADSRNSFENAVAKLRASGERKSAFFGVLLNQMGLACVQLFKIDEAAQLFEEARAVLEQECGASHPDTLGVYSNLAAIYDAMGRVEDAIEILEHVLKVREEKLGTANPDVEDEKLRLAELLKEAGRSRNRKQKSLENLFVTNSQRVKKDAGRRFIHLLIPGVHMLSHVPLSCKKCFWVCLSCCAVYQLCDFACAVAFISWWGWVGEVRISLLLFDRTTRVRVWNMRSLCSYFWLRLRFEAGILGREMGNPNDIKDLFGDSISSEYESSPNDDEFCDNEDSESSYVGISKDELLNSLKRKLSKKKNTDEGTSKLDSALLEIYRDNVLNGMKRKLYSHKSKKNPMKSAATLDTKLTSTKYLSVFEDLSCIDNLDWSSLVFDWLMKHLSKLDKSKTFGGCFYCLVVNYLDFLNFGMRLVLKHVPRIKVWKGSMIKKISKFDKISKGVYGKRPVKDFSECCYKMIGSDDVKENVPVKPIERSFLDMLDSSVGADLTQDMKNKINELLIQHFGPDENCIDERAKNLLVDVFVLLSNSKPIVPENTNVNLNEDDKSKFNDDSSMVKDQNTCNDNAIGNEQTPMKISSSPKDKIAVVDGIMKKLSKPGLSNTSPKKAISSIVGFNERKSIFLGHEKPSFKIWDSDDDFPNEEKHFRTQIIPKDLSQDFDDDSQSQLNDSTNEDKLVMITLEDTDTEILTQHNEEENLNIEQLQKKDSPDVIFLGEKQCPDNCFDITSKTNVLYNKINTFVVKLDKKLKMSTGSPERILLCNVDKSVGQCSTSQKPKHDLRRILQPARYYTDPYSPERHSFPVTQYDRQVYNVVCKISKSNFQEMTHTRSMAALTDDANGEGASQPRTGLHSSGRAGGSRRAATAEQHDDEPSLAQLLANQNRLFERMVANSENMGAAMAQQANQAPSKLADVQRTHPPHFSFAADPLAADDWLRDIEIKLNLCRCDPVEKATFAAYYLQGAAAAWWETYKTLIPPDEPITWTIFREGFRSAHIPAGLMEIKKKEFLNLKQGNMPF

SEQ ID NO: 194567 - protein, 84 aa, Oryza sativa
  Clone ID: PAT_MRT4530_905C.1.pep
MPACRGEYIGDPDPPGVLTARPQPAARCRSQNWGIGGVGGGEEATRRVVLTSPREPIKFKNTEDGRCLTAAQGLAVHVATEKLP

SEQ ID NO: 194568 - protein, 335 aa, Oryza sativa
  unsure (1)..(335): unsure at all Xaa locations
  Clone ID: PAT_MRT4530_90600C.1.pep
QDPSHNSTKSSAPFLDRSHPLRNDGNDKLTRKTKKTNKNQINNIYKDHPNDQPKPANRTSGSELKDDSTRTNERSXGTPHSNERANDSTTATTKPVVXKRTSHRTKMIGEGEMTTATQRQHTETMTMLDKQRIRLXLRPWGKNYTGERRRRRWVMTADGRQRGRGGDGVGSAMAATGFPGFSVQENWLPGFTLTLRSRXSDGTEWRRPRRWRGAAGPAAGGGEAWIHIGEVLPEVFGVEEVEAGLLLLLANPTAAATTKGDDHSDYMGLLERRPEVEREGARGEKVSGGGRRRRRWRPKEEREGXLYIAMGGRNRAHIDGKNSGKSRVLAGKRKD

SEQ ID NO: 194569 - protein, 94 aa, Oryza sativa
  unsure (1)..(94): unsure at all Xaa locations
  Clone ID: PAT_MRT4530_90601C.1.pep
QKGVLLCSFKSHFNFNPICFTGWGFETAVXLNSHPVMQIGCLFKRALYPAWFSPFRRAWLYNFLFPCVYTLRIPNLYSYGGPRFLDSMLFFAFL

SEQ ID NO: 194570 - protein, 212 aa, Oryza sativa
  Clone ID: PAT_MRT4530_90602C.1.pep
MASAPLPQAAQLGYKPNVFSFWILFLQLRFDDYCKNEHMTYSTRHTANMQVHKDTKGWHNTGSFAKAAFSKTFKRKKFSNLNHLKRIYGYLGGRPGKRRACTRRGRRDEPNGTHHNDKRRRTTTGNERGDGGGSVDRRRRGSGGRRRRGTGGRASPRLGAPKGDGGKRRRRRRRLLGAAATRPAAAADGFTRRRLYGSREGTGEGANERGGL

SEQ ID NO: 194571 - protein, 115 aa, Oryza sativa
  unsure (1)..(115): unsure at all Xaa locations
  Clone ID: PAT_MRT4530_90603C.1.pep
DVGDDVTXSGGGSAERTARAAHARRRTTARRRKRRAPGRRSRRGELTDDQNDSGGAKDGAGDEEEAAKLFGSTTATVLGRSSAAANGWTGTATTSRTRWWRRRPTTAAATAARRG

SEQ ID NO: 194572 - protein, 237 aa, Oryza sativa
  Clone ID: PAT_MRT4530_90604C.1.pep
MSSVRLITKNIVRPTHNRGHGYSNSFTLARDVPLYPQDTIPHMLPCPEVPPRHCKGENRDNTLRTTQLTTVHHSWIIITPSKTRGMDSPATPTDFLPLLSLAPRNEPCYTKALDDAATGDRELGWAIRGHLREEDDDANSPVQRTTTDDDVRRPATSSDDGTARPDVDGSAPAACDGGEGAAEVLLLRTNPTAATGSGGDGYSGGAAWLERRRLGLRGGGATGKDRARDLRGNVEDD

SEQ ID NO: 194573 - protein, 71 aa, Oryza sativa
  Clone ID: PAT_MRT4530_90605C.1.pep
TPKKKNRHFITGGGLTLGSKTWKDQPGLIPLKHKVTFRPTDRLTPKKLNYSPGKGGEKEKGETFGAPYNGL

SEQ ID NO: 194574 - protein, 89 aa, Oryza sativa
  Clone ID: PAT_MRT4530_90606C.1.pep
KKIPPFFAPPFFRQKKGCYHLLNPGLGWEFPSPPPKGNFAKSPLRFFLKRSPPPQFIPLGFNLHLPGTKNRATLPFFFFPLFKTLPPFF

SEQ ID NO: 194575 - protein, 336 aa, Oryza sativa
  Clone ID: PAT_MRT4530_90607C.1.pep
MAGQESLTLAGVLRGHNDMVTAIAAPIDNSPFIVSSSRDKSLLVWDITNPSTAVATDPEAAPPEYGVSYRRLTGHSHFVQDVVLSSDGQFALSGSWDGELRLWDLATGRTTRRFVGHTKDVLSVAFSVDNRQIVSAARDNTIKLWNTLGECKYTIGGDHGAGEGHTGWVSCVRFSPNPMAPTIVSGSWDRSVKVWNLTNCKLRTKLEGHNGYVNAVAVSPDGSLCASGGKDGTTLLWDLTEGKMLYKLDAGAIIHSLCFSPNRYWLCAATEDSVKIWDLESKLVMQDLKPEVQAFKSQMLYCTSLSWSADGSTLFAGYTDGTIRVWKVSGFGGYAI

SEQ ID NO: 194576 - protein, 56 aa, Oryza sativa
  Clone ID: PAT_MRT4530_90608C.1.pep
MAAAAGLAAPPPTSRISSFPRAFSTVAELGSCGMAYGELGIKGSARWNGVTRLFLL

SEQ ID NO: 194577 - protein, 120 aa, Oryza sativa
  Clone ID: PAT_MRT4530_90609C.1.pep
AQTGSLCAPGGKDGTALFWDLTEGKMLYKLDAGAIIHSLCFSPNRYWLCAATEDSVKIWDLESKLVMQDLKPEVQAFKSHISMLYCTSLSWSADGSTLFAGYTDGTIRVWKVSGFGGYAI

SEQ ID NO: 194578 - protein, 831 aa, Oryza sativa
  Clone ID: PAT_MRT4530_9060C.1.pep
MRSLCSYFWLRLRFEAGILGREMGNPNDIEDLFGDSISSESESSPNDDEFCDNEDSESSYVGISMDELLNSLKRKLSKKKNTDEGTSNRKKTKTVDVDFKNKLDSALLEIYRDNVLNRMKRKLYYHKNKKNPMKSAATLDTKLTRFSVKYFSHVLTSLSEHQREIISKTCFKTLLLFEKCPVPYKFALWVAQRVDVTSCDIIVRDKVIPLSKESVHIVLGLPIGGLPISSDFEVGKQILLDSFGLSSLPSVKYFGEKLIKNETMSDEQILMCFMIVSLNCFLCPNSSLQPSTKYLSVFEDLSCIDNLDWSSLVFDWLMKHLSKLDKSKTFGGCFYCLVVNYLDFLNFGMRLVPKDVPRIKVWKGSMIKIFSKFDKISKGVYGKRPVKDFSECCYKMINDLLIQHFGPDENCIDERAKNLLVDVFVLLSNSKPIVPENTNVNLNEDDKSKFNDDSSMVKDQNTCNDNAIGNEKTPMKISSSPKDKIAVVDGIMKKLSKPDDDFPNEKKHLKTQVTPKHQDNSNIIPKDLSQDFDDNSQSQLKNSTNEDKLVMITLEDTDTEILTQHNEKENLNIEQLQKKINTFVVKPDKKLKMSTGSPERILLCNVDKSVGQCSTSQKPKHDLRRILQPARYYTDPYSPERHSFPVTQYDRQVYNAVCKISKSNFQDKVAVDIDGVHCKFYTFGDSFKPSGELSNFVACVFCRYMFRSCHPSKSKKHYFFSSIGDDLLKDRSMTNFSAVKKCFDGASLARPVHTCDLLFFPIVKSCHWVVFVIDLKFERFVFLDSLYDEESFYHAELRPKLALLSYMKILNEHGRTCRTIWWSFSSVLAGR

SEQ ID NO: 194579 - protein, 259 aa, Oryza sativa
  Clone ID: PAT_MRT4530_90610C.1.pep
MAPPSDSDDSAPIPAGAISKLLIVIAMQTEALPLVNKFHLVEAEESIFPKGAPWIRYHGNYKGLHVDLVWPGKDPVLGVDCVGTVSAALVTYASIQSLKPDLIINAGTAGGFKAKGADIGDVYLASDVAFHDRRIPIPVFDMYGIGTRKTFATPNILKELNLKVGKLSTGDSLDMSPHDESAILNNDATVKDMEGAAVAYVADMFSTPAIFVKAVTDIVDGEKPTAEEFLQNLVAVTAALDKAVTEVVDFISGKCISDL

SEQ ID NO: 194580 - protein, 81 aa, Oryza sativa
  unsure (1)..(81): unsure at all Xaa locations
  Clone ID: PAT_MRT4530_90611C.1.pep
SSRLPYSLVLQVLLXGKAPQDGTPGQPEGQXKLAIQPMGIPTGXEPWXWKKGKSGFSNFQLFFAFSGNRLLANTLLDIPKH

SEQ ID NO: 194581 - protein, 58 aa, Oryza sativa
  Clone ID: PAT_MRT4530_90612C.1.pep
MAAAEEARSCANDDANGGWLITTQHASGQARAKNLQGGNQTTSKMCQASLRSGHFFSG

SEQ ID NO: 194582 - protein, 49 aa, Oryza sativa
  Clone ID: PAT_MRT4530_90613C.1.pep
TKKFLVKLFLLGDFGPVNLKSECLSCVVLKKTLCYHHKAFLPFIKKPPP

SEQ ID NO: 194583 - protein, 165 aa, Oryza sativa
  Clone ID: PAT_MRT4530_90614C.1.pep
MMISDAGRGPNLPMYNAMIDLCCSVGDTDYALRMLDEMPFNGVFADFITYNAILEGLIKQRKAREAEAFLAEMSKNEQLPSPTNCAAAISMFSKEFNPSAAIDVWHCIVEHQITPADESARELIVGLLDFGRFAEVKKYTDEMLDMGIELPQSTIDNMKRTFDKV

SEQ ID NO: 194584 - protein, 59 aa, Oryza sativa
  Clone ID: PAT_MRT4530_90615C.1.pep
EEPMTQLGIGVTSFSNLTVRSQGTDLGYGKYYNSRHGLGLSFCSITIILVSLQVHHAQT

SEQ ID NO: 194585 - protein, 32 aa, Oryza sativa
  Clone ID: PAT_MRT4530_90616C.1.pep
VTLPAFCNVAIPNGTGGVCYWVGYPRTPRSGP

SEQ ID NO: 194586 - protein, 530 aa, Oryza sativa
  Clone ID: PAT_MRT4530_90617C.1.pep
MEFGGEGDPVPGHDDQVEADGWIDYDGAARDFCCTDEDQGGDGGRAADVGDVQDDAGAAPAYLGLGVPDGIQGDPSHIHPAAVDPVLVPAGVQAAAAPSNAQQAAYPGLLPGLGSGGTQVVVGLVPVAGAFLGADNAFSSDVIDNMVEGGMWFELDGYLQRFTPRSFSSNDPAILHKILYLICRKGCLKMLLDAKLFEQADSFFASSILPLAAAPASPYARDDDVQARIHVLQQAVELRDGRLLELPADETAVPKLQQKINDYLRFYLPREIGYTPEPGLRSTMWEFAIKCDNRPYKRGNKPDIRCLLCQKLFLHADITQCMKGHLSKHCPMSTQSSLERFHIALKKEGKKKKPVTDEFEKNKRIKIGGTMPNQQGQLSLINHIDSSDIDKQIDAGRKVLDKFRSCENEMCKSALEEMEQVLNNISRSARQQTHENRQVAIGMPPLAPVLPSDAAAGHPQLPAAAAAGPQDLPEAGDVLPQPHQPEPHHLQDAPDLPAAGNPLQPEPHLLQVQAPLENPPFAGPPHQPEA

SEQ ID NO: 194587 - protein, 56 aa, Oryza sativa
  Clone ID: PAT_MRT4530_90618C.1.pep
PCGVCSRYITKGPKESTEVYSVSLTLSTTPITKKILLFSSQCSSTGHCCDQAHLYQ

SEQ ID NO: 194588 - protein, 628 aa, Oryza sativa
  Clone ID: PAT_MRT4530_90619C.1.pep
MNGQTPMGLAAAAAAAVRPCRRRLLSSATAAAAAATVATATPLFPRCPHPHHHLHGRRLPFLASAASQQQQQSGQTAASPATPPIPSDPRAAVSGNLPFFDRVLFPDTFPVETPPPSSAAASAAAAADEEVASALKAREETEAEREAWRLLRRAVVSYCGEPVGTVAAEDPECTETLNYDQVFIRDFVPSALAFLMRGETEIVRNFLLHTLQLQSWEKTVDCYSPGQGLMPASFKIRAVPLDDNNEAFEEVLDPDFGESAIGRVAPVDSGLWWIILLRAYCKITGDNALQERVDVQTGIKLILSLCLSDGFDMFPTLLVTDGSCMIDRRMGIHGHPLEIQALFYSALRCSREMLVMNDGSKNLLRAINNRLSALSFHIREYYWVDMKKINEIYRYKTEEYSHDATNKFNIYPEQIPSWLVDWIPEKGGYLIGNLQPAHMDFRFFSLGNLWAITSSLTTPKQAEGILSLIDEKWDDLIANMPLKICYPAMEDDEWRIITGSDPKNTPWSYHNGGSWPTLLWQFTLACIKMGRPELARRAIAVAEEKLAADKWPEYYDTRSGRFIGKQSRSYQTWTIAGFLTSKMLLENPELASILTCDEDLELLEGCACCLSKKRTRCSRRAAKSHVVE

SEQ ID NO: 194589 - protein, 1498 aa, Oryza sativa
  Clone ID: PAT_MRT4530_9061C.1.pep
MAALTDDANGEGASQPRTGPYSSGRAGGSRRAATAEQHDDEPSLAQLLANQNRLFERMVANSENMGAAMAQQANQAPSKLADVQRTHPPHFSSAADPLAADDWLRDIEIKLNLCRCDPVEKATFAAYYLQGAAAAWWETYKTLIPPDEPITWTVFREGFRSAHIPAGLMEIKKKEFLNLKQGNMPFMEFMERFNYLGRYAASDLNTETKKVELCRDRLAPELKHALAAHEITSMKTLVALRVESSEKEVVEDRKRKWAAKKFAGSSSSTRPRLAPSPAVRPMAPQPPRQMYVPPRPQTQLVRQVPRAVQAAGDASRNANVTCYNCGKKGHYSPSCPYPKTGTSGPYSQGAPQQPRGPPQVQPGQRGAPAVPKPAPTFGRGRLNHVTAEEATDAPGVVLGTFLVHSIPLTVLFDSGATHSFMSTLKAKQLDLKTEFLSDAMRIQSPGSTMVTKLLCKGVELIIDGVKFKANLILLDTLGLDVILGMDWLTKHEGTIDCAHRTVTLRSTDGQFVRFTFEQTSTSNQPSIQSLSIPELKSVPIVNEYSDVFPDELPGMPPDRDIEFVIDLIPGTAPIAKRPYRMTSENLMELKKKLNEQLAKGFIRPSSSPWGCPVLFVPKKDGTMRMCVDYRPLNEVTIKNKYPLPRIDDLFDQLTGARVFSKIDLRLGYFQLKIRPEDIPKTAFTTRYGLFEYTVVSFGLTNAPASFMNMMNKIFMEYLDKFVVVFIDDILIYSKSEEEHAQHLRMVLDKLREHQLYAKFSKCEFWLKEVEFLGHVLSEGGIAVNPRNVQNVLNWKQPQNVPEIRSFLGLAGYYRRFIENFSKIARPLTQLLKKENKFIWSEACETSFHELKRRLTTAPVLVMPDVLKPFHVYCDASHHGLGCVLMQEGKVVAYASRQLRPHEINYPTHDLQLAAVVHALKIWRHYLVSNRCEIFTDHKSLKYFFTQPDLNLRQRRWLELIKDYDLGIHYHPGKANVVADTLSRKLHHLAVIETINQPSLSSEFQKLNLGLVEDGYVAALALQPTLYSQIKAAQSIDEEVAEIMKEINSKPQSIYTLNSDGMVMLGKRIFVPNNQHLRETILDEAHQTPLSIHPGCTKMYQDIRTQYWWPSLRRDIAAYVAICDVCQRVKAEHQRPAGLLQPLQVPEWKFDEVGMDFITGLPKTPNGHDSIWVIMDRLTKVAHFIPVHVTYGGAKLAELYLTHIVRLHGVPKVIVSDRGTQFTSRFWKNLHELLGTKLFLSTAFHPQTGGQVERTNQILEDMLRACVLEHNTNWEKCLSFAEFSYNNSFQSSIQMSPFEALYGRKCRTPLYWSEVGERQFFGPAIINEAEKNVTLIRDRLKEAQTRQKSYSDRRRRELSFDVGDHVYLKVSPMRGTQRFQIHGKLAPRYIGPYQIISKRGQVAYQLELPFQLSNIHDVFHVSQLKKCLRTPIEHTSLEDINLKPNLSYQEYPIRILEESERRTRKSSIKILRVQWSNHTADEATWEREDRLKAEFPSFF

SEQ ID NO: 194590 - protein, 249 aa, Oryza sativa
  Clone ID: PAT_MRT4530_90620C.1.pep
MGNIVLQLLAILALCIAPARSGWLQGTATFYGGADGSGTMGGACGYGNLYDQGYGINNAALSTPLFNNGASCGQCYLIICNYDKAPSGCRMGTAITVTGTNFCPPNYDLPYGGWCNTTRPHFDMSQPAWENIGIYSAGIVPILYQQVKCWRSGGVRFTITGLNYFELVLVTNMAGSGSIASMSVKGSSTGWIQMSRNWGANWQCLAGLAGQALSFTVTSTGGQTIVFDSVVPAGWSFGQTFSTYQQFDY

SEQ ID NO: 194591 - protein, 266 aa, Oryza sativa
  Clone ID: PAT_MRT4530_90621C.1.pep
MGNIFLQLLAVVALCIAPARSDWLPGTATFYGGADGSGTMVTFVYKIFAKSIPFSSLKNVRAENERGGACGYGNLYDQRYGINNAALSTPLFNDGASCGQCYLIICDYGKAPDWCKLGKAITVTGTNYGGWCNATRPYFDMSQPAWENIGIYSAGIVPILYQQVKCWRYGGVRFIINGFNYFELVLVTNMPGSGSIVSMSVKGSCTGWIQMTRNWGANWQCLAGLAGQALSFNVTSTGGQTIVFDDAVPAGWSFGQTFSTYHQFDY

SEQ ID NO: 194592 - protein, 105 aa, Oryza sativa
  Clone ID: PAT_MRT4530_90622C.1.pep
GRMYDREARRQGAVAVAAGKKELTCIGVKCYKDSFLIVAGVTVAAAVVMAALAWRTRKFYAGDIYARFREEAAAGGGGAGNGTGAGEDEKVESKEEKAVMTPTST

SEQ ID NO: 194593 - protein, 51 aa, Oryza sativa
  Clone ID: PAT_MRT4530_90623C.1.pep
MKATSDHLVQKGNINGIDLTKQEKLTKKTTITTTSTRQARTHDPSHTLHCR

SEQ ID NO: 194594 - protein, 83 aa, Oryza sativa
  Clone ID: PAT_MRT4530_90624C.1.pep
LGWPFIFEPPSFVVCPWCVLDLYPVGKPVFFFVDRRFSFCTLVGIWFSVPFCVFLKYWDANMFSPWIEAQKKKKKKKKKRTTK

SEQ ID NO: 194595 - protein, 757 aa, Oryza sativa
  Clone ID: PAT_MRT4530_90625C.1.pep
MRLLVVKPVGQEHGARSCSVEDDLDRLIRSINVRTSARASGQTSTDRRLIALGKSPISSSEIVESVSLKQALRKMCISQASEMAAMKRMPKPTAVSNTPEAGAIKKLYTSVVVQTNKERDEKNKFGKVSVLPEKDVISSSVKSTEAKNKVRNKSPAKKNVRSASPTTTKVQKTRIQDVISNKSSEASEDLPAGPAVAKQRKGKMKTSSPRAVPVGGSRLVFRSKTSTKKKVKPEPAAAVVSHKTCEAKSSNSQANKKHEALQDEPRTPTPINKKAAASSISTDGANCGTKGCGVGEIHGSKPSELSRSKEKGECSQSSKSSMGDYSTSTSISDDSYGSFSGNGCRPHMSKDVRWGAIRRMAIQQGSLGLKNFKLLKQLGCGDIGTVYLAELVGSECMFALKVMDIEYLISRKKMLRAQTEREILQMLDHPFLPTLYSFFTTDNLSCLVMEYCPGGDLHVLRQKQPTRTFSEAAARFYVAEVLLALEYLHMLGVIYRDLKPENILVREDGHIMLSDFDLSLRCSVNPMLVRASSVGRDEPSRPSGPCAESCIDPLCIQPSWANSSCFTPRLVSSTPSRPRRPRGEPQKKPSLPQLVVEPTDARSNSFVGTHEYLAPEIIRGDGHGSSVDWWTLGIFLYELLYGRTPFRGPGNEETLTNVVSQGLKFPDNPAVSFHARDLIRGLLVKDPEYRLGSTKGAAEIKRHPFFEGLNWALIRWTAPPETPKSFDAASLTTARKKKEGKCLEFRLNGDDIEFELF

SEQ ID NO: 194596 - protein, 98 aa, Oryza sativa
  Clone ID: PAT_MRT4530_90626C.1.pep
AGVRKNGAASKIVFTNGSQDPWRHASKQKSSKYMPSYIIKCRNCGHGTDLRGCPQLPFRIEGDPSNCSSPAAVSTVRKQIASHISLWLSQCQEPTRAW

SEQ ID NO: 194597 - protein, 121 aa, Oryza sativa
  unsure (1)..(121): unsure at all Xaa locations
  Clone ID: PAT_MRT4530_90627C.1.pep
GPRSRIFEGPIIEGSFFMGGAFXQPXADKKLLGEKGGLPLGAGKDFPLRRAILPQEVCFGENVKITQVAQVPETPKKTDGSFIKTGIVSLIKEALLPNGPVLSSSCAISEGASAPGPRRAL

SEQ ID NO: 194598 - protein, 189 aa, Oryza sativa
  Clone ID: PAT_MRT4530_90628C.1.pep
METLATGRGRERGKIQITPRTVRLVLGTPLGGNDIVLPSHKVVRTVQESITDELGIHKKARLSAKQLIEGDVRVASDLDRVAAIDWSKTVFRALSDSIRCWRQNPASSIASCVVFLVMFTKDIVDKLVAADQEASRDGMPPFGNLPLRPLESTCYANKPADRGKGPMVEDIRAAAYTFPNMSTILGMAK

SEQ ID NO: 194599 - protein, 446 aa, Oryza sativa
  Clone ID: PAT_MRT4530_90629C.1.pep
MEMTGKMPARVKRIRFADSQNECEVVLPQTLPSGGASSSRAVGEAAQSKPKRRRRATSAGEGPSVDEPYETKGPNLTRCSAAIAAKACRALSPVHHEKLEEIGLDAVACMSLESLEQPDLIRWLMDRTDPDTMCISINDDMKIQITPRIVRLVLGTPLGGNDIVLPSHKVVRTVHESITDELGMHKKARLSAKQLIEVIKSQKDDHRAVRYFIMVLMSKLLVRTTDFYVPKGDVGVASNLDRVAAIDWSKAVFRALSDSIRCWRQNPASSIASCVVFLAVLYLDNILPPRDIGLDLTFTPRIQMFTKDIVDKLVAADQEAGGDGTLPFGNLPLRPLESTCYANKPAGRAKGPMVEDIRAPAYTFPNMSTIIGPHFAGLPPDQRLGLLESIAEYDRQAKESAMEIERQFRLVVDKQHMLCQSVIDALQANRVPHPPTVAPLSRPEIH

SEQ ID NO: 194600 - protein, 62 aa, Oryza sativa
  unsure (1)..(62): unsure at all Xaa locations
  Clone ID: PAT_MRT4530_9062C.1.pep
PVRPACISRSDXAARGDSMSRESIYGDGPGTGGKQRSDRREHGGQTGGGNRRGRRHRRSDRL

SEQ ID NO: 194601 - protein, 418 aa, Oryza sativa
  Clone ID: PAT_MRT4530_90630C.1.pep
MDLEKPGLMDTASSSASVNHAAKPSKTCWYECTSRAPLAGGCHVAGEERHVPAPQLAVVHHAGVCSRLQEDKEDWANVVGVEMIRMVAQKATSITRTDAIATDEWRMRTTALAELVAPPSEVSKRRLSAATGVSCERERWLPRLRICLHLYRRCGRLLVSASFLTIRGGQEAHGSVHKEYKILKKEGRYNVKAVVEIVLSGEVYRIIDGGASHKSEYRIVGAGGERGRHRAADGAEDGPRWSPPSPMMRRADEELRAHQSQRRRLAGHSPMPSMSNHSLCYFRLTHRAEQELAEPASNPAPPQELATRADADLQGRGELESLAYSEVRMQTAWKRDRRAILAVELLLPPDGDDINCGLVEPKPRVVALSGRPVGTACNGSGGDDDSSGRRAARAGVDDEVEYNVCEGDGAGSGRVLTR

SEQ ID NO: 194602 - protein, 71 aa, Oryza sativa
  unsure (1)..(71): unsure at all Xaa locations
  Clone ID: PAT_MRT4530_90631C.1.pep
RIIAIXSXEILDXKTVRSFXEDEGXFNXSVDSRFXALDXNRDXLLSYTEMAGELMSLRVLEKHFGVDEAAM

SEQ ID NO: 194603 - protein, 205 aa, Oryza sativa
  unsure (1)..(205): unsure at all Xaa locations
  Clone ID: PAT_MRT4530_90632C.1.pep
MNSHPDPHRRHRACRRTRVVAPARGVGEDRPRRALARRRGRGGGCGHRHCXQIHQRTPPDQPREEGERGRREPPPLDLPVAAAAAATTAGESALKGRLEGKMEPPLPPPPPPPPPLLYPLRERGERERRRGRGRRDKAEGVVAGEGGETGRRKPAAPSPPPLAGREEGRRRSCSCLGLRTVHLIGWLWLLPHRAAGLLGLQMGRD

SEQ ID NO: 194604 - protein, 66 aa, Oryza sativa
  Clone ID: PAT_MRT4530_90633C.1.pep
NTHKLPTGGAYILYGGATHPITISILHDLLPQDCTLDDNGRTHSTCPSRNLMASQHLLLSPPDLLG

SEQ ID NO: 194605 - protein, 74 aa, Oryza sativa
  Clone ID: PAT_MRT4530_90634C.1.pep
FFIGFPFMVHCYVASCTNHRYMVTSYNYIGKKIRPISLCACYFAVCKKMKICAITTLLLNKWNPSNIYKTIMHP

SEQ ID NO: 194606 - protein, 54 aa, Oryza sativa
  Clone ID: PAT_MRT4530_90635C.1.pep
PVCATQEIWPNINPHPLGESNLGGPYYIKGGLICGLLCWRQVWKTPISHPLSNR

SEQ ID NO: 194607 - protein, 97 aa, Oryza sativa
  Clone ID: PAT_MRT4530_90636C.1.pep
LSSIVPITKSPIDPQLQLVLPMLMATIAYRRRISCEFERRRRRSRRPERVTIATTGRDAARRFATAAAAAAAPPSRERVRRRVVLPPASSLYRPGHA

SEQ ID NO: 194608 - protein, 72 aa, Oryza sativa
  Clone ID: PAT_MRT4530_90637C.1.pep
PVHFLEELDKNPPGLNVFFFGTSPPCGEIKIGNPCNLTEFLIKTGFFFRVKIAGECMFFFTGESTLIMLISF

SEQ ID NO: 194609 - protein, 61 aa, Oryza sativa
  Clone ID: PAT_MRT4530_90638C.1.pep
IAKRIVNAYNCSQICYTSCDQTTITGDVGASCVASIHCACAPAILSFLLFELFPFLLQLQL

SEQ ID NO: 194610 - protein, 153 aa, Oryza sativa
  unsure (1)..(153): unsure at all Xaa locations
  Clone ID: PAT_MRT4530_90639C.1.pep
MAVNADEGGGDRCGQGEGDGVDGQGRRCRQPRRPQTRTTSAVDEDGGTSAGNGDGCGGRGRRPRAWTRTTAEDEDSATDASDGGKREXXWWGGHEGRGRRPLARMAGRPRAMAVVVVEEDGGRDMGXARRTRTATAGEDGGTAAGDGGGRRGR

SEQ ID NO: 194611 - protein, 188 aa, Oryza sativa
  Clone ID: PAT_MRT4530_9063C.1.pep
MQEAALQAIVYYRHYRPGLDGFFHFFPARTNQSSANYYPGLEGNMREIDTPGLFLAGLVRAMDRYLAKTITELRRLQARVVMLDRRIEPLGHQGHFDNAIIYGNHELQPLTETLPPPMGIYHNINTRARMRVGFHRNRRTMPDPALAGDPVLLGPFYEFERNGRQYRLTMATPSTTVPQPPIGFSEVP

SEQ ID NO: 194612 - protein, 446 aa, Oryza sativa
  Clone ID: PAT_MRT4530_90640C.1.pep
MDCALITLLPLLTASPLPSPTFVRTPTTRWFKGTGDNGDSGLGHVNPLLCLGGRLSSRGLLVTFTTVPHDGLKLKLQPNDDGAAMDVGSGRLRFEPLRGGRLWAPADPRYRAPGDMQRHIQDAGPAALEGLIRRQANAGRPVSFIVANAFAPWAAGVARDMGVPRAMLWTQSCAVLSLYYHHLYSLVAFPPAGAETGLPVPVPGLPALTVGELPALVYAPEPNVWRQALVADLVSLHDTLPWVLVNTFDELERVAIEALRAHLPVVPVGPLFDTGSGAGEDDDCVAWLDAQPPRSVVFVAFGSVVVIGRDETAEVAEGLASTGHPFLWVVRDDSRELHPHGESGGGGDKGKVVAWCEQRRVLAHPAVGCFVTHCGWNSTTEALAAGVPVVAYPAWSDQITNAKLLADVYGVGVRLPVRRRGHERAGGGGDAAEGAGVERQGERGGG

SEQ ID NO: 194613 - protein, 78 aa, Oryza sativa
  Clone ID: PAT_MRT4530_90641C.1.pep
NLKLHCQFPFFFFKKKKVYFKGGFTFPKMFPGLFSKPQKEKGGENFLKGPPPMGTLKKQIPKGLKKTFPNLKIGFFSW

SEQ ID NO: 194614 - protein, 70 aa, Oryza sativa
  Clone ID: PAT_MRT4530_90642C.1.pep
WNEGIFDAKGGIVFNHNFVKLVAWVDKEGGFSNRVIDLVRPMAKTQENPFGCQGIPWPPNRKNREALFMV

SEQ ID NO: 194615 - protein, 607 aa, Oryza sativa
  Clone ID: PAT_MRT4530_90643C.1.pep
MDLGKSTSTAATLKKLQEEGGLPGHDKAEREAGVPLFSQHVPFQCPSSRSKWQNRWFYLEIKDSNPALIVPDEQPNKIPVWTAKPPLTPSLQSFIDIIDDLRERGLSGYEVVADFVGRSIQPLQARAHPAYNYSRPDDATRVSPRALSSDGVERRVGQVMISGATTASDIPVPLCEKGEAERDEAINVAASLKEKVVEEASDAAAGSGGKAPSFRRIPSSCSRQRLVTIGEKEARAKAARAKSGGTSSASPVTASTDVAPVIGTREATPSGPSGDPVRNRGAPESILTWEELQVEMGRLLEAGARGIGREVTEARAETAAANARAERLLRELAEAREDLVKMRELVAGNECQRKGLENRMAELGDNLSEIRGSLRVTYTGLHQLAAEDVDDEDVRQRGQPESMAITPVLELEPSAAHIVDGQVADAETEVAATDPNLEDAFATQDRRIQYWKTKCEVAELERAMLAMKKDQAVETLRGREVWFSSYLKNCCTSMARVCRDLRVARGDPEESAAGYISWLNGACAQLDGIGQRIDEALKQECRRASRYAGGHVLACVRDHRPRLDLEFLREGFGRSRRNPAEIDHLARSMSPLAEKIFVGLLGRICTL

SEQ ID NO: 194616 - protein, 588 aa, Oryza sativa
  unsure (1)..(588): unsure at all Xaa locations
  Clone ID: PAT_MRT4530_90644C.1.pep
MTPTLIDITMITGLDVTSSANPMSMNTKNQFDFRTKSIGGWSGYVAAYMGKGPVTPREHVAFLLMWLEKFLFCGSSCGPTTNWQFVAEALESKKQFPLGKILLGYLYHMLNNASAKIAVGLVVGAGGPWWLLQSWLNLMVMKVVNRPSVTEAEFPRLEPIVEDDGEERTHRRCKSYGEYASTPADARAKLSAELLKDWFCSFYEGFQKDARXWGEWKLHLFHQSASMYMMDLFPDVIPXGLIPNGGGPSPPVIGYHAPKTSTLLQGLIRELADASKKRRTRSSAADTLALAPKKKAKLKKPKPTDDLPVLDPYIEQALDEEDIEDDVDQSAAEVSDTERTPSASPKQTPPTPSAPTHFSRALADLFSFDIKDYLDEETEEYTTSKSLVPLSDDVKKTLEDISHRLEASSLDNLVVNCGPIRTRLHEIHPLIPDELADILTPAIYLEQHQFKLEKAKLRLAERRERKDIEATIQANRQLVHEEKSKLDQLPEGPIKSNIDRLEACKIELLVQLEECNAELDIEHKKLADLPRSIEEQKARLKSTIKNVADLTKSLKVIPGTDTQDAQAIEEVEQIRQRAISAIQQYLSW

SEQ ID NO: 194617 - protein, 442 aa, Oryza sativa
  Clone ID: PAT_MRT4530_90645C.1.pep
MDLGKSTSTAATLKKLQEEGGLPGRDKAEREAGGTTPQPVLGRMVAIEDYIVCGVFVHLCEAYIGVEPFLDLFRFYYELRWMESNKVSGCVGFRLRDGMKSRYVPFQCPSSRNKWRNMWFYLEIKDSDPALIVPEEQPDKIPVWTAKPPLTPSLQSFIDIIDDLRERGLSGYEVIADFVALSSDGVERRVGQVMIIGPSTASNIPAPLCDKGAVERDEAINVAASLKEKVVEEASDAAAGSGGKAPSKPRKFSSVLGHRRKAETSTVSEARAETAAANARAERLVRELAEAREDLVKMRELVAGNERQRKGLENRMAELGDNLSEIRGSLRVTYTGLHQLAAECGVKSTIPKNPDEFSLTSSLEELATAMGEIPAKQAARLAEETSNGIYTGACHVLACVRLSRPELDLREILDQGAASDARKGVMEEVGDLGESVVPLFEE

SEQ ID NO: 194618 - protein, 188 aa, Oryza sativa
  Clone ID: PAT_MRT4530_90646C.1.pep
MDLGKSTSTAATLKKLQEEGGLPGHDKAEREAGGTTPQPVLVAIRPLPVPLFSQHVPFQCPSSRSKWQNRWFYLEIKDSNPALIVPDEQPNKIPTSLVGVSSRFRLEPTRRIIIPGQMTRPGFLLGVMISGATTASDIPVPLCEKGEAERDEAINALPLTDVIGPLADHQVAASLKEKVVEEASDAAA

SEQ ID NO: 194619 - protein, 127 aa, Oryza sativa
  Clone ID: PAT_MRT4530_90647C.1.pep
TRSTRLNEPQSQSQPSPSLGVNSNILAPTSSSFSSYETNQLPPVTVDPSTAAAMSSDVPGYFVGRPMNQAEPAKEQQQGADEQRPATNAQIPGAAHASTAELRDRRTSAAAGVTVNSMGKLKQICLE

SEQ ID NO: 194620 - protein, 688 aa, Oryza sativa
  Clone ID: PAT_MRT4530_90648C.1.pep
MDLGKSTSTAATLKKLQEEGGLPGHDKAEREAGGTTPQPVLGRMVAIEDYIVCGFLPPPSEFLLLVLNFYGLSLLHLNPNSIAFLSIFVHLCEAYIGVEPFLDLFRFYYELRWMELNKSQYVPFQCPSSRSKWQNRWFYLEIKDSNPALIVPDEQPNKIPVWTAKPPLTPSLQSFIDIIDDLRERGLSGYEVVADFVGRSIQPLQARAHPAYNYSRPDDATRVSPRALSSDGVERRVGQVMISGATTASDIPVPLCEKGEAERDEAINVAASLKEKVVEEASDAAAGSGGKAPSFRRIPSSCSRQRLVTIGEKEARAKAARAKSGGTSSASPVTASTDVAPVIGTREATPSGPSGDPVRNRGAPESILTWEELQVEMGRLLEAGARGIGREVTEARAETAAANARAERLLRELAEAREDLVKMRELVAGNECQRKGLENRMAELGDNLSEIRGSLRVTYTGLHQLAAEDVDDEDVRQRGQPESMAITPVLELEPSAAHIVDGQVADAETEVAATDPNLEDAFATQDRRIQYWKTKCEVAELERAMLAMKKDQAVETLRGREVWFSSYLKNCCTSMARVCRDLRVARGDPEESAAGYISWLNGACAQLDGIGQRIDEALKQECRRASRYAGGHVLACVRDHRPRLDLEFLREGFGRSRRNPAEIDHLARSMSPLAEKIFVGLLGRICTL

SEQ ID NO: 194621 - protein, 1469 aa, Oryza sativa
  Clone ID: PAT_MRT4530_90649C.1.pep
MGDDLKASIEALSKDMALMHESIKANAASIAANAKAIAALATTTSSSTSGARPGFGDQPPDRPPKHWRPDFPHYDGKSDPLIFINRCESFFLQQRIMQEEKVWMASHNLLEGAQLWYMQVQEDERGTPTWTRFKELLNLRYGPPLRSAPLFELSSCRRTGTVEDYQDRFQALLPRAGRLDEEQRVQLFTGGLLPPLSLQVQMQNPQSLAAAMSLARQFELIEQYTAVPAKAPGRGVLPAPAPRPQLALPAPAGAAKPAPPAATAADNRPVRRLNQAEQEERRRLGLCFNCDEKYSRGHNKVCKRLFFVDSVEDEDEEAPEDEVDAEAPVFSLHAVAGVAVGHPILLRVQLGATTLVALVDTGSTHNFIGESAAARTGLSVQPRPRMTATVANGEKVACPGVLRHAPITIEGMPFHVDLYVMPLAGYDIVLGTQWMAKLGRMSWDVTTRALTFDLEGRTICWQGAPNQDGPAVRAASADDSLLGGLLDSFADVFTEPTGLPPQRGRDHAIVLKQGTSPVAVRPYRYPAAHKDELERQCAAMISQGIVRRSDSAFSSPVLLVKKADGSWRFCVDYRALNALTVKDAFPIPVVDELLDELHGARFFSKLDLRSGYHQVRMRPEDIHKTAFRTHDGLYEFLVMPFGLCNAPATFQALMNDVLRSFLRRFVLVFFDDILIYSDTWADHLRHLRAVLTVLREHKLFIKRSKCAFGVDSVAYLGHVISAAGVAMDPAKVQAIREWPQPRSARAVRGFLGLAGYYRKFVHNYGTIAAPLTALLKKEGFAWTEAATAAFDALKAAVSSAPILAMPDFTKAFTVECDASSHGFGAVLIQDGHPLAFFSRPVAPRHRALAAYERELIGLVLAVRHWRPYLWGRHFTVKTDHYSLKYLLDQRLSTIPQHHWVGKLLGFDFTVEYKPGAANTVADALSRRDTTEDASVLVLSAPRFDFIERLRQAQDVDPALVALQAEIRSGTRAGPWSMADGMVLFAGRLYLPPASPLLQEVLRAVHEEGHEGVQRTLHRLRRDFHFPNMKSVVQDFVRTCEVCQRYKAEHLQPAGLLLPLPVPQGVWTDVALDFVEALPRVRGKSVILTVVDRFSKYCHFIPLAHPYSAESVAQVFFAEIVRLHGVPQSMVSDRDPVFTSAFWSELMRLVGTKLHMTTAFHPQSDGQSEASNRVIIMYLRCLTGDRPRQWLRWLPWAEFVFNTAYQTSLRHTPFRVVYGRDPPSIRSYEPGDTRVAAVAKSMEERSEFLEDIRYRLEQAQAIQKKYYDKSHRAVSFQVGDWVLLRLRQRAPASLSLAVSGKLKLRYFGPYRIAEMINEVAARLALPAGARLHDVFHIGLLKKWHGAPPDAPPPLPNVHHGAVACEPERVIKARLARGVRQVLVQWKGTSAASATWEDREPFFARYPALQLEDELPLDGGGDVMWGRTYVRRRRARDVRRAAERAARAEAERAAAADQATPGASYPRDQRP

SEQ ID NO: 194622 - protein, 339 aa, Oryza sativa
  Clone ID: PAT_MRT4530_9064C.1.pep
ALMALILDAKGDYDGALEHLVLASMTMVANGRDIEVATIDVAIGNTYLALARFDEAVFSYQKALTVLKSARGDDHPSVASVFVRLADLYHRTGRLRESKSYCENALRVYAKPAPGAAPDEVAGGLMEIAAIYEALGDLDEALKLLQRALKLLEDSPGQWSTVAGIEAQMGVLYYMVGRYADSRNSFENAVAKLRASGERKSAFFGVLLNQMGLACVQLFKIDEAAQLFEEARAVLEQECGASHPDTLGVYSNLAAIYDAMGRVEDAIEILEHVLKVREEKLGTANPDVEDEKLRLAELLKEAGRSRNRKQKSLENLFVTNSQRVKKDAGRRWSNFGFRS

SEQ ID NO: 194623 - protein, 151 aa, Oryza sativa
  Clone ID: PAT_MRT4530_90650C.1.pep
QNLQHKHRSEPYHSKQICFNFPIEFTVTPAAALVRLSLSSAVEAWAAFGQEARSLLRPRRLRRRLLRVCRTPDEVVTRDLRVGSRPLLVGALLLFFRRLRLVHRPPHEVPRNIAAHGGGGRRIDGHRRQLVGFVGGEATEHTRRWRRRRRG

SEQ ID NO: 194624 - protein, 121 aa, Oryza sativa
  unsure (1)..(121): unsure at all Xaa locations
  Clone ID: PAT_MRT4530_90651C.1.pep
VWFSSYLKNCCTSMARVCRDLRVARGDPEESAAXYISWLNGACAQLDGIGQRIDEALKQECRRASRYAGGHVLACVRDHRPRLDLEFLREGFGRSRRNPAEIDHLARSMSPLAEKIFVGLL

SEQ ID NO: 194625 - protein, 147 aa, Oryza sativa
  Clone ID: PAT_MRT4530_90652C.1.pep
MAAVILANSGKGGGHGEHQWSKGSAVVAAARPGAAGSGGTPYGWRRPNRAATSGGGAGDVPAMDLKGKERGKGVLGMENPFVPSISEDLQLEGRRSYGGGKLEVSSGHSFVVRPRVRACERVAYAGWHELGVSVREHGAGSARDNTG

SEQ ID NO: 194626 - protein, 102 aa, Oryza sativa
  Clone ID: PAT_MRT4530_90653C.1.pep
MDLQGGNFMYLFLLGYRHLCLGVDHQPIFGVLCSSSTDLSVRCGRASRVALWKFHPDPRAERWSPFPTLALRDVTIGRCRVVQGDTRRWIAAVRPSVPAPLS

SEQ ID NO: 194627 - protein, 75 aa, Oryza sativa
  Clone ID: PAT_MRT4530_90654C.1.pep
MRKKMKWCGRGKDRVSVTARRRRAVARGWEKRRGAAAPAAADATLDSNVGPFECVEQPHHEVIAGLRLRMKGNWR

SEQ ID NO: 194628 - protein, 87 aa, Oryza sativa
  Clone ID: PAT_MRT4530_90655C.1.pep
GPGECPSWPSGGELTMHPPLRHQTIPCIVKLNLVKLDHQLQTFCTRTVTSPSWPVNQVFNVVGGLFRFCFSGPKKYFKTSIYKFSCF

SEQ ID NO: 194629 - protein, 199 aa, Oryza sativa
  unsure (1)..(199): unsure at all Xaa locations
  Clone ID: PAT_MRT4530_90656C.1.pep
ESPQFPDLGRTTNTWQTEVPSNIQDRGHKDNMSQATRXMNGPKIEPVSSFTSSNQIPLLGNEMQGQVASLASNVPIAFNQDTXPFNYGSGTNSRDMLNNSHVFSNSSINTSLPNLSLDNPAVPRQTLDRGNTGIVSPMQDGRIHHQAVSNQLNYNDDLMRTTGLQRGLSGGLDDIVVDMFRPDREDDGVPYIDGDWELV

SEQ ID NO: 194630 - protein, 72 aa, Oryza sativa
  Clone ID: PAT_MRT4530_90657C.1.pep
IPRVRHHCCPALRILIGTTGLAPEIPEDHRYFLDQERLSLLLGRHLGEDTRIGPQDSTVQALFLVETTDHNR

SEQ ID NO: 194631 - protein, 87 aa, Oryza sativa
  unsure (1)..(87): unsure at all Xaa locations
  Clone ID: PAT_MRT4530_90658C.1.pep
MCIKPLSRTSQGTQTTIVDIQIHVLQKYKTLQMQRKTRRLHSTGILDGSDEANFFETSSTEKDFNSSVGEKXSKTEYYPLYSASHTG

SEQ ID NO: 194632 - protein, 71 aa, Oryza sativa
  Clone ID: PAT_MRT4530_90659C.1.pep
AILGRAFCFRRPYIYISPFISFISTGCQICVQRSCFVQCERLCTMQGCKTVCPCRGLVVRVTSCLLSGAIK

SEQ ID NO: 194633 - protein, 33 aa, Oryza sativa
  Clone ID: PAT_MRT4530_9065C.1.pep
LEHQIDSRMILYFVLPIKTDRWELVTSGAYKFE

SEQ ID NO: 194634 - protein, 170 aa, Oryza sativa
  unsure (1)..(170): unsure at all Xaa locations
  Clone ID: PAT_MRT4530_90660C.1.pep
MGGVTSSVAAKXAFFPPTPPSYALVDDHLAGVTTMTGQPHRENIEVLHLRTRRWNTVVAVYVRHLDATTTLLYSHGNAADLGHLYQLFLHLSFNLRVNVLSVFHATGIPLEGWRGWRLAGEERCGEEGRCDGRRRRWLLSRGWPRRRGRAGVRLPVAARRPPCRLRRALL

SEQ ID NO: 194635 - protein, 165 aa, Oryza sativa
  unsure (1)..(165): unsure at all Xaa locations
  Clone ID: PAT_MRT4530_90661C.1.pep
LRLAXWPNXYIEHXXLVFPLQIHSDGGFGXXXXRPXAXXPIPPXXXDEXSSLXSXXCPDHXSLLHRLKHSSRXGGFRXRXXXPEVGEXGGRYPHSXHRLRYLKRELKKKSXRRAGRXXGQVXSITGRGXFAAXCXTXXXTXLGXPRXXNXEGLTPFSXNKXXCXK

SEQ ID NO: 194636 - protein, 52 aa, Oryza sativa
  Clone ID: PAT_MRT4530_90662C.1.pep
YANIQTRPHRQSLAKSLTTDSISTQTYFYFYIIKCDSYPLKTYFYFYIIKCR

SEQ ID NO: 194637 - protein, 95 aa, Oryza sativa
  Clone ID: PAT_MRT4530_90663C.1.pep
TNGCNCKHTLGNPTIEIMYQDHEQTCRHQSITCQTKNFEHHSSKKTSFLPTCSTNLSSHHLFCSSGGRHRAQRKTSISPDNRTDKVINLLVHLRT

SEQ ID NO: 194638 - protein, 109 aa, Oryza sativa
  Clone ID: PAT_MRT4530_90664C.1.pep
MPEEGGGFATTGGGAQWRLAGMEETKRNRWRREEERRKKEKLDLGPSGLPVVKCPRCGRCSSGVQIVKARWSGWDLAPGFSGAFLGDLLLSPATGAGCELEPAYNCFPW

SEQ ID NO: 194639 - protein, 111 aa, Oryza sativa
  Clone ID: PAT_MRT4530_90665C.1.pep
LRLSCPYTSPQNGKAERMLRTINNSISTLLIQASMFPSCWAEALATATYLLSRRPSSSVHHSLPFQLLPPLRPPLAGRHGHRGQRCHWCPLGRCLLGRHCPFGRCHLSRHH

SEQ ID NO: 194640 - protein, 195 aa, Oryza sativa
  Clone ID: PAT_MRT4530_90666C.1.pep
AQVELAVHAAESCMRTTPSPDALVLPLASLGSCPRSRLDLSYSFCPASSSFSSSSSCSSRRADYTLVCPRLPQDMMLPLDVILARNWLPESEQTNTFSSLAEMVSSPGMSSLHRGAAASLAEMVSSPGMSSLQQGSCCNDDDALPLIGDDRTLSGHAPSSQGSCCDGDDALPLMGGDCILSLSLCSQGSSCDGDD

SEQ ID NO: 194641 - protein, 118 aa, Oryza sativa
  unsure (1)..(118): unsure at all Xaa locations
  Clone ID: PAT_MRT4530_90667C.1.pep
IATHRKLWFPDRIHRDYLEVMFTNRKERAELLEGLVVSNKDATXPVLPQKILLLWGENDXIFNIELAMTMKEQLGEKAMLQSISKAGHLVHIERPCVYNQHLKEFLAYVNAESPKETA

SEQ ID NO: 194642 - protein, 1824 aa, Oryza sativa
  unsure (1)..(1824): unsure at all Xaa locations
  Clone ID: PAT_MRT4530_90668C.1.pep
MGGDKGRVAGGSGGSAEGELRAAVGALAEGGEDGGGAKRDEDGGEHGWRQRQGDRTPEADATVDDLGEFDFEDEDGFNAYPFLVVDDGVTEDIDNIIGKLSMEKNSVAATHVDAVLYKAAIRPYLISLNASLRELIRSAASTLIPLLSACGLCELRSAASTGIASAAVGLRERFEPARMKSRRALWISRERTRRTANYEDRENPFWALAGMPPPSSVPCQLQSTGGTGMESSPEHLPSPPCQARTPSPPPSGRASSPSQLLPWEQRERERIQSPPMSGRASSPSQQLPWEEGACPERVRSSPMSGRASSSLQQLPWEERTCPERIPSLPKKKMYWFARSREANSVQVSRPGEASYPEATEGKPEYNLHVLKSMKKKKKKKKKRGKRNKRGQGGSEDKSQEKQEVAQEHLGSVSSSYSSPLREPQAPLVPMWTSPSGEVVYGITDDPTAAEAYHWAFHEYKNKRDGREINQGTGIIIECDEVKNSAIILTSAWLICIKKPFDDWSHKDYAPEAKVTVHMLDDTISVCRLLYFSKHFDIALFETVGGLTIPIMPLKSDLEYGQDFCVLTRDINIDLICTTVKVKYLDPYEHQHNHYMFIGGSIPKCGTGGALADFSGNTVGMLFCTLPMVAFLPSSLILTCLRLWKKFGQIVRPQLGLKFKTVDFQEMTLIELLSRKYNITSGLIVGEVSAECAAEKLGIRVGDIILSLSREKAFQLENILLSIGERYLEEGNDSSSKVDIKHVVVATVFSTMSTESTQSSTSSSSSGGSSSNITSEFLHPYATVAVKSHVPITLENNHPNYNKWRAFFTSLCGKFGLMAHIDGSAPPRPDDPAWEQADCCIRSWIFGSVTDNVVDLAMELDQTARELWVAIEDMFHANKEPRAIFLSHQFHSMLQGDSSIADYCQKMKTAADALRDVGHAVSKSQLVLNLLRGLNDRFSNTADQIASADVLPSFTSALNTLLLKELRIANQAKVAAATALVTGASSGSGSSCPPGGCASSGGQACTGGNNSRRSGKGNGSWIGGGNGGAGTGGGWGSGSGGGGSGCPLPPAGGGGYQGVANPSWRPAGPWLVHCDVWTSPVLSTSGFKYYFVVLDDFSHFCWTFPLRHKSDVHRHIVEFAEYVSTQFGLPLKSLQADNGGEFVNTATTSFVTNRGTQLRLSCPYTSPQNGKAERMLRTINNSISTLLIQASMFPSCWAEALATATYLLSRRPSSSVHHSLPFQLLHLTTPDYSHLRVFGCLCYPNLSATTPHKLAPRSTACVFLGYPASHKGYRCLDLSTRRIIISHHVVFDESRFPFAATPTAASSFDFLLQGFPPAVASSSEVEQPRPLTEAPSSEVEQPQPLTVAPEQPRSLTVAPSVELHSMVTRSQTGSLRPVDRLTYTATHATVSPIPANYRSALAYPNWRTAMADEYKALVDNGTWRLVPRPLGANVVTGKWIFKHKFHSDGSLARHKARWVLKETVYCQQPSGFVDPAAPDAVCLLQKSLYGLKQAPRAWRILRYVKGSLXSLHIGSGPVQSLTAYSDADWAGCANSCCSTSSYCLFLGDXLVSWSSKRQTTVSCSSAEAEYRVVAHAVAKCCRLRQLLQELHVPVALAIIVYCDNVSAVYMTTNPVHHRWTKHIEIDIHFVREKVALGQIRVLHVPSSHQFADIMTKGLPVQLFTEFQSSLCVRHPPVATAGGLVYFMCVNVPEDLSLYQYGCLVILKSFAELHPLVPCHILAVLHLSLCEFSVGISSAWTPEDELESKTKQRRTKPIPVEEENEHYQRRGFCNAQSGGPCVSALCGIVAELVDGATAEYATGAARAAGVACTPRSNDGSRASQHP

SEQ ID NO: 194643 - protein, 517 aa, Oryza sativa
  Clone ID: PAT_MRT4530_90669C.1.pep
MAGGVIVANDGDGSAVDHGGRLTFSVVITCLVAASGGLIFGYDVGISGGVSTMEPFLRRFFPGVVRRMAEARPGNEYCVYDSQALTAFTSSLYVAGLVASLVASRVTRAMGRQAVMVMGGALFFAGGAVTGFAVNIAMLIVGRMLLGFGVGFTNQAAPLFLAEMAPTRWRGSLTAGFQFFLAVGVVIATVTNYFASRVPWGWRLSLGLAGAPAVVIFLGALFLTDTPSSLVMRGDTARARAALLRVRGAGADVEAELKGIVRAVEVARQGEDGAFRRMAARREYRPYLVFAVAMPMFFQLTGVIVISFFSPLVFRTVGFGSNAALMGNVILGAVNLVCLMLSTLVIDRYGRKVLFMVGGAIMIIAQVGVAWIMGAQVGKNGSEAMARPYAVAVVAFTCLHTAGFGWSWGPLGWVIPGEIFPVDIRSAGQAMNVSIGLGLTFVQTQSFLAMLCRFRYGTFAYYAAWVAVMTVFIAVFLPETKGVPLESMATVWARHWYWKRFAREQPKTSADEPTGTY

SEQ ID NO: 194644 - protein, 103 aa, Oryza sativa
  unsure (1)..(103): unsure at all Xaa locations
  Clone ID: PAT_MRT4530_9066C.1.pep
CRASHSALKFGELVPNIGGPSPMFFFILPKFFNTGEVCMVKVLPPQPGGVEAFFXSPPLGRYAVGPLRHSVAVGVIKNVEKKYPPGAQVAQFAAKKKLASFQK

SEQ ID NO: 194645 - protein, 534 aa, Oryza sativa
  Clone ID: PAT_MRT4530_90670C.1.pep
MAGGVIVANDGDGSAVDHGGRLTFSVVITCLVAASGGLIFGYDVGISGGVSTMEPFLRRFFPGVVRRMAEARPGNEYCVYDSQALTAFTSSLYVAGLVASLVASRVTRAMGRQAVMVMGGALFFAGGAVTGFAVNIAMLIVGRMLLGFGVGFTNQHDGFDRVVWVLDERNGQAAPLFLAEMAPTRWRGSLTAGFQFFLAVGVVIATVTNYFASRVPWGWRLSLGLAGAPAVVIFLGALFLTDTPSSLVMRGDTARARAALLRVRGAGADVEAELKGIVRAVEVARQGEDGAFRRMAARREYRPYLVFAVAMPMFFQLTGVIVISFFSPLVFRTVGFGSNAALMGNVILGAVNLVCLMLSTLVIDRYGRKVLFMVGGAIMIIAQVGVAWIMGAQVGKNGSEAMARPYAVAVVAFTCLHTAGFGWSWGPLGWVIPGEIFPVDIRSAGQAMNVSIGLGLTFVQTQSFLAMLCRFRYGTFAYYAAWVAVMTVFIAVFLPETKGVPLESMATVWARHWYWKRFAREQPKTSADEPTGTY

SEQ ID NO: 194646 - protein, 163 aa, Oryza sativa
  unsure (1)..(163): unsure at all Xaa locations
  Clone ID: PAT_MRT4530_90671C.1.pep
HALAFPSLDDLHHSLSYHELNPPIRYGSXPVHHYMAWPLCHYFIYTGXKCYLTSNQLSCYCRDLPXIRAMQRGVRVIXLYMWPNSSKDNFNLLHGRTLTTQVYLLLCLLSIKEHAFDACFYPVIITLEDHLTPDLDDKSAKMALEGFGDFLYYPDLDHLKEFP

SEQ ID NO: 194647 - protein, 323 aa, Oryza sativa
  Clone ID: PAT_MRT4530_90672C.1.pep
MAARGCPRRREQRHDVGGEKNDATVARIAGRRRDDVGDKGSEARKGMPAARMSLAGLTPRWADGVVRPWRDGHRDGSGKAPRRRGRGRRGEREDGAVRWRRSDVLGSGGDGQRQRRRRRGQGGGGEALQRRQRLCLLSKKPRSGGRELATQEGEKAKGGGGGKGALLLPFWEERDENEPRLMVLDARGMGRQAREDDAGDDCKKDGDGLKASVDTVVVGASDDRGRKRERERGRSLSLRARATHVLGGTCRERRVGPGKEESAQKIDGGKIDFYPENFFKEYEEHLTLDLNSNWIFELNRIWRNQGGDSKSEFDTFENGKEFR

SEQ ID NO: 194648 - protein, 107 aa, Oryza sativa
  Clone ID: PAT_MRT4530_90673C.1.pep
MANPRPAPAFALAHVDGSPKPANAQLSTEGSGCRSVKKNTPELRAPLEKQAFDLKICAQRNGLHAIAARQMQDVERGIDSPRSLELSISMDLMDGKYSGDKHRSRFC

SEQ ID NO: 194649 - protein, 108 aa, Oryza sativa
  Clone ID: PAT_MRT4530_90674C.1.pep
PGLQEFGTRMIFQSRIDHFLPVPFLSKSFTRELYMDQFLFCDFVLLDAAIGTEVPTFLAISYGKDLLSGNSMSNGRKWTLNPLINLWTICVYRIFIMVKVDDYHYHTN

SEQ ID NO: 194650 - protein, 824 aa, Oryza sativa
  unsure (1)..(824): unsure at all Xaa locations
  Clone ID: PAT_MRT4530_90675C.1.pep
MDAVETIISTGINIYEATQLSDELSRLQATLPKARFLINRGEWGRFKNKDMAILLSQLKDTTYDAEDLLREFDDQALRQKMEDADRSWAEGAINSVGLSIEAVQHMPETSSVIDVSQVFGRDKERDLVIEKLGPLDLMRPNAXNVSVLPIFSIGGVGKSTLAQFIYNDPRVQAHFGKRRVWVCVSDLFDKRRITKEIIESFTKEEYKPLFSLDALQVEMMEQLGRRKFLLVLDDIWQEAIDEWESFYAPFKNGPKGSMILVTTRFTTVADRVATNNCKPIQLEGLDRDIFWEFFSKCSFGEERPESYPQLQDIGHNIASRLCGSPLAAKTIGRLLNMELTVQHWETVRNSELWELPHRENEILPALQLSYLYLPQELKRCFAFCCMFPKDYSFERDEIVDIWVAEGFVVSSGSTRLEDMGIRSRNERRMLYAVRHMSVEVADESLKSGMRGIQDLNKLHSLRFGINFNVEITWFNQLSNILYLSLKGCTVVKLPESIGELNSLRYLDISYSGCSPKLSEISRLGNLSRLRNLQYFIVETGDGRKIGELRGMNQLSVALLISSICNVKNEEEAAEASLVEKRYLQNLVLQWRKKVTSLVKSSENGVLEALHPPPRIEHLTVQGFGGDSFSPSWFRLESLLTLRSLVLFHCGVLKNLSIPSFPSLELLMLSGNIWLKTVTILGGSTGGETMQHASSSSSSSNGTTCLSGLTYIGLYSCEDLQNLDRCLSPEYLPSIKSIEIDSSSDLGLSMPVDSFVGFKYLQDLKIHCKLLCPQGMVLPPSLRRLSIVSGRKVDFPACLQSLTSLNILHLSSCDGMESIPLGTNL

SEQ ID NO: 194651 - protein, 183 aa, Oryza sativa
  Clone ID: PAT_MRT4530_90676C.1.pep
MDTEEAVHLVVVGVVAVGAVVFLLAAAASGACGCAAAFPAARWRKRAQVGDDDDDVESALGGATTVTTYEQAAAASSSSPAAGAAAEGADTCAICCQEYSGADKVRRVVRCSHFFHAGCVDGWLREKRNCPLCRAVLSSLPPLPNPGCRRGRAAPPCPPPLPPPLSSANYLSGFCRSHFVLDY

SEQ ID NO: 194652 - protein, 1091 aa, Oryza sativa
  Clone ID: PAT_MRT4530_90677C.1.pep
MDAVETIISTGINIHEATQLSNELSRLQATLPKARFLINRGEWGRFKNKDMALLLSQLKDTTYDAEDLLRESDDQALRQKMEDADRNWFGKRYSSILNLAKILIRGSKTKIKEAREKLDKAVADLEGVLNSVGVSIEAVQHMPETSSVICVSQVFGRDKERDLVIEKLGVCSMIGCDSQRDHVIELLGVPLITRSGVARARAKGKRAAAPVIGNTSASSRAKQLKRDTRARPRLAEAKCIDNVPVLPIFGIGGVGKTTLAQFIYNDPRVQAHFGNRRVWVCVSDLFDKKRVTNEIIESFNREEYKPLCGLDALQVELMEQLERQKFLLVLDDIWQEAIDEWESFYTPFKNGPKGSMILVTTRFTTVVDRVATNNCKPIQLEGLDRDIFWEFFSKCAFGEECPESYPQLQDIGRSIASRLCGSPLVAKTTGRLLNMKLTVQHWETVQNSELWELPHRDNEILPALQLSYLYLPQELKRCFAFCSMFPKDYSFERDEIVDIWVAEGFVASGGIMRLEDMGIRYLDDLRSRFLFQTDPMYPDQTRYVMHDLIHDMAQSVYVDECLLMQDLRSRNERRMLHVVRHMSVKVADESLKNGMRGIQDLNKLHSLRFGIKLNVEITWFNQLSNILYLSLKGCKLVKLPESIGELNSLRYLDISRSGVQELPKKFCSLYSLQVVDASRSSLKAISLDVIKLINLRRLALPNDKEAAEASLVEKQYLQELVLLWRGHGKEIGKSSENGVVEALRPPPRIVRLKVQGFGGDSFSPSWFRPECLLNLRSLELSKCDGLKNLSIASLPSLERLMLEANLRMEAVTILGGSTGGEKTKHTSSSSSNCTACLRGLTTIRLVNCYQLQNLDGCLSPEYLPSIECTEINKSSHLGLSIHVDSFVGFEHLQEMKIWRCKLVCPQGMVLPPSLRRLSIVNCRKLDFPAYLQSLTSLDILHFRACNNMESIPLGTNLRVKCLILKSCSELSSIGGSRALSSMQVVSISDGPKLHEVEQPFTKGLLTKEEKVELLKFTGSMYYLNPLCPMSGNGDGWSMGERGSDRDDEVVLAAAAAGAWVTMAAAVCGVEVVMESSEPAIWRQRQGLWRLQ

SEQ ID NO: 194653 - protein, 97 aa, Oryza sativa
  Clone ID: PAT_MRT4530_90678C.1.pep
MDAHARQARQCGAAPRSGVLFFFYGLRLVRRQIAGAMRRCAGDGSKLKGRPLYCLRDTPPCPCPGTVGPNYEGGEPPGNGTAPYTGTPPARATREPV

SEQ ID NO: 194654 - protein, 64 aa, Oryza sativa
  Clone ID: PAT_MRT4530_90679C.1.pep
EGPIRKKLRNLVQPNIAITGRKVHCQKFFGTLEFKLVTANINVLTYFYRETRRARKTNAGFGVS

SEQ ID NO: 194655 - protein, 80 aa, Oryza sativa
  Clone ID: PAT_MRT4530_9067C.1.pep
LLLPGAFHCQVLLILLTQSFPCLAGRCRFRSCKPPVYTRFQQAQARRAKGGSRVDGLDGARTRGSTREFRTGTCRRTSFP

SEQ ID NO: 194656 - protein, 159 aa, Oryza sativa
  unsure (1)..(159): unsure at all Xaa locations
  Clone ID: PAT_MRT4530_90680C.1.pep
LLVFLTTTDKSTSARNTAVALHLRVTSKGYRTQGTIIRTEFRAVTTCRLPLTNLWDTQQTKRCFSELGAECTDSSNTPPEFLLETYTRQGRSQRXAKLSSTPPELPLTIXYFLMCKRYNRTSCNSAQSCVPWXEMSSSFYRLHMTVKAMGNVQNTLQPS

SEQ ID NO: 194657 - protein, 127 aa, Oryza sativa
  unsure (1)..(127): unsure at all Xaa locations
  Clone ID: PAT_MRT4530_90681C.1.pep
ATNLTGFEVLLRFRDVELPRYLGERLARNVVTMAVWEASTKPLAGNXETTEFINALKQEWDRIEDKYTGSPRPPAASLRMWSXGGVASAIGMPHVIPGLMKAVGIVYSEGKIMHIRSSGKKNLPIYK

SEQ ID NO: 194658 - protein, 469 aa, Oryza sativa
  Clone ID: PAT_MRT4530_90682C.1.pep
MGLLALTRLMATQPPRRRRRRRNDAQAQARNGVITSMAKRKGTLLQGGGSSQGGKRLRYSGPDLPEDIWRHIHFLMPLRDAARAACISQAFLRSWRHHPNLILRKKTMGLEHKAYRRVGMARDFTSTVHSILKNHSGIGVKRLKLDIIYDHRNLNICYLNNWLQIAITPGIEEITLLLPSKYTFPCSLLSGGIGRSLQYLKLVRCAFRPTASLGFLSSLTKLHLCEVRIKDDELTCLISKSLALKQLELLNCRQIICLKIPCLLEQLSCLNVSLCENLQMIESKAPNLSTFSYISNLVVELSLKQSSQVKTLDIDCYDESNFLCHVITKFPNIVPNLETLTLHSIDEVQQGEMKHDSVFGDASNLRTMPGHKHESLKDVEIIGFCSATSMVELTCYLLKNAISLEYITLALRREMILEAHRGVMAIERYIRGKVPSKVELTVLELCIWCHDLERLDALDKGKLITFPTS

SEQ ID NO: 194659 - protein, 98 aa, Oryza sativa
  Clone ID: PAT_MRT4530_90683C.1.pep
RISKGYDSLAPKGVPETSTSVGPVHGASPSVEPKVRDSPIQTVLSGNIATDCAKRQDPLVSRVAPVAHNGLLRMPSGKLASLAAQVCNSVRPCTGPLG

SEQ ID NO: 194660 - protein, 327 aa, Oryza sativa
  Clone ID: PAT_MRT4530_90684C.1.pep
MVTFKANRSDPELVPPALATPREMKALSDVDTQPALRFYATGVEFFRHHPIVDDGHDQPENQAKVVKDAVAKALTYFYPVAGRIRELPGGELVVECTGEGVVFVEADADVWLDEFGNPIMPPYPCVDEFLCDPGDTSVIIGKPLVFMQVTRLKCGGFVIGTYSCHNIVDAFGHTQFLKAIVDIARGDDHPTVLPVWGRELMAARNPPNVSLLQHLTPSKLSPDHPVEPNSAAQHVSSSTDHMVGDYFFFGPREIAALQHHAQLQYSSTAFEVITAAMWKCHTVALGYVPDQNKKACLLMTMNARGKWKRDPPLPQGFYGNGFVYLVV

SEQ ID NO: 194661 - protein, 204 aa, Oryza sativa
  Clone ID: PAT_MRT4530_90685C.1.pep
WPLWLLRGLLRRGGLRRRRRPGLGRRRHRRVERHRAGDDARVGVARRARRHGRAPRRRRAQRPRGDPSGDPRRHIRCGVNRNGPSGFSGASTAEEVTAGVDARGLAAVVTGASSGIGLETTRVLALRGVRVVMAVRNVAAGHKAREAIRAEIHGAIVHVLEMDLSSMDSVRRFASEFDSLNLPLNILMPFSTDKSLDGEHEEHK

SEQ ID NO: 194662 - protein, 76 aa, Oryza sativa
  Clone ID: PAT_MRT4530_90686C.1.pep
NLLPTEKKKTPTLEKEKHPAPKAPIHTGSGPEKKGQADSAARTIKEPRSCVKVMIPLDKIPGNLKKYFRASRKEDE

SEQ ID NO: 194663 - protein, 643 aa, Oryza sativa
  Clone ID: PAT_MRT4530_90687C.1.pep
MWFFNFNRNGPSGFSGASTAEEVTAGVDARGLAAVVTGTIIQPMLLPCHLIKLATLVREIQSELDDLAAGASSGIGLETTRVLALRGVRVVMAVRNVAAGHKAREAIRAEIHGAIVHVLEMDLSSMDSVRRFASEFDSLNLPLNILINNAGILSKDCIRSIDGLELHFATNHIGHFLLTNLLLENMKSTSRTTGVEGRIINVSSSGHILTYPEGICFDSVKDLSRFSTYIAYGQSKLANILHSTELARILKGDGVNISANAIHPGFVGTNLFKNWTMANAVVNTIGRIVCKTVEQGAATTCYVALHPQVTGISGKYFSNCNLETPSSQASNAELAKKLWEFSSNIVSAAKLTYFRLRLARLVENPLYFSRVTAFQTVKRLDGGSPVTSWADIEAVIPRSNKILTQPDEQPHNEGETFEEGEAHVSAFSSVRQHNQNRLRSLLPGDAHGDDEGCSRRKRGRRWNLEVHGTVDGEAIGRTEEEARRCAGLRLQSLANTSTPLFPELDVRQLGTESAMCWFNRKGPSGFSGASTAEEVTAGVDARGLVAVITGASSGIGLETARVMALRGVRVVMAVRNVAAGHRASEAIRAEIPGAGIHVLEMDLSSMDSVRRFATEFEALNLPLNILMPLSSNKSLAGEHEEDK

SEQ ID NO: 194664 - protein, 122 aa, Oryza sativa
  Clone ID: PAT_MRT4530_90688C.1.pep
YQDFEDDVLSCRTRLGRLIQAAGRELLEKLNSARSNSPTKIFLVLFGFYTANALATILGQTGDWDVLVAGVVVAAIEGIGMLMYRKPMSRPPGRFQSLIAMVNYWKAGVCLGLFVDAFKLGS

SEQ ID NO: 194665 - protein, 500 aa, Oryza sativa
  Clone ID: PAT_MRT4530_90689C.1.pep
MGIRMGRRLLFTLFLGALFCNGVYAKFTRYSFPKDFIFGTGSAAYQYEGAYKEGGKGPSVWDNFTHIPGKILNNDNGDVANDFYHRYKEDVSLLKDMNMDAFRFSIAWTRILPNGSLSGGINKEGVAFYNSLINDVIAKGMIPFVTIFHWDTPLALESKYGGFLSEDIVKEYVDFAEVCFREFGDRVKYWTTFNEPFTYSAYGYGKGVFAPGRCSSYVSKSCGVGDSSREPYLVAHHIHLSHAAAVQLYRTKYQPTQKGQIGMVVVTHWFVPYDNSDADRGAVQRSLDFIYGWFMDPIVHGDYPGTMRGWLGNRLPEFTPEQSAMVKGSYDFIGVNYYTTYYAKSIPPPNSNELSYDLDNRANTTGFRNGKPIGPQEFTPIFFNYPPGLRELLLYTKRRYNNPTIYVTENGIDEGNNSTLPEALKDGHRIEFHSKHLQFVNHAIKNGVNVKGYFTWTFMDCFEWGDGYLDRFGLIYVDRKTLKRYRKESSYWIEDFLKRH

SEQ ID NO: 194666 - protein, 140 aa, Oryza sativa
  unsure (1)..(140): unsure at all Xaa locations
  Clone ID: PAT_MRT4530_9068C.1.pep
MFLTGMKNIKKHQNMIFGHIGVXIGCVRQKKSLRDSRGELFSINANIGTRGCDVFHRNAKVQKAPKHDFWTYRSVLGVFVAKXNHCVIRAANFCQFMPILAYVGAKFFXQNAKVQKAPKHEFWTYWSVLSKRQPHKSKDV

SEQ ID NO: 194667 - protein, 328 aa, Oryza sativa
  Clone ID: PAT_MRT4530_90690C.1.pep
MASDRRVCTVHHMSHAAIVLVSVLLLCSAHPSAGARRLMELYKPPPSEQLTYHNGTVLRGDIPVSVVWYGRFTPAQKAVVSDFLLLLTVASPAPTPSVSQWWNTINQLYLSKAAAQGKNGGGGGKITTQVRLAGQLTDDQCSLGKSLKLSQLPALAARAKPKKGGIALVLTAQDVSVEGFCMSRCGTHASNAKARTAYVWVGNSATQCPGQCAWPFHQPVYGPQTPALVPPSGDVGMDGMVMNIASMVAGVVTNPFGDGFYQGPKEAPLEAATACPGVYGSGAYPGYAGNLAVDPATGASYNANGAHGRKYLLPALFDPATSTCSTLV

SEQ ID NO: 194668 - protein, 109 aa, Oryza sativa
  unsure (1)..(109): unsure at all Xaa locations
  Clone ID: PAT_MRT4530_90691C.1.pep
WRGGSGPPVNMTXVAXAPSAGAXRSXXVHAXASXMQQMFXACXPIFKGTRXXPAPXXVHXLCSXLHXXXPHHXXLXXHPXXAPAPXHPQXIXLTFPXPXLXXXFFFFXL

SEQ ID NO: 194669 - protein, 62 aa, Oryza sativa
  unsure (1)..(62): unsure at all Xaa locations
  Clone ID: PAT_MRT4530_90692C.1.pep
DYELPRRSNQVSSVLVAKYMXPATREIVKRQLLNTRASQDWEAVRMNGLLPRAGAAGLEAMR

SEQ ID NO: 194670 - protein, 163 aa, Oryza sativa
  unsure (1)..(163): unsure at all Xaa locations
  Clone ID: PAT_MRT4530_90693C.1.pep
GSRGCERAGKIDLSGGRPRSNTYRRRIDLTAVGIGWRREGANPGATRNGGEGENGRLGGECKNWRDSPRIETKSHSAAAWTGAHGVERRFRAAVVVLALSSLRLVQWQWXVDGVGRATARQGGRARASGSEADAQRHGARLSRMPGPRAXGEEEAKKATVLSG

SEQ ID NO: 194671 - protein, 61 aa, Oryza sativa
  Clone ID: PAT_MRT4530_90694C.1.pep
NAHVVLYHGVNNTHQQVLHLTKSILDLTNEAIHHGWSLRDILRGTSIAANITHIMHPNIYQ

SEQ ID NO: 194672 - protein, 71 aa, Oryza sativa
  Clone ID: PAT_MRT4530_90695C.1.pep
SWTSARRFRTGAANAYTMVRMITLPTRERQRERERERERRLFLARDLGNAARVRRAAAAEHYQSCGGAAPP

SEQ ID NO: 194673 - protein, 168 aa, Oryza sativa
  unsure (1)..(168): unsure at all Xaa locations
  Clone ID: PAT_MRT4530_90696C.1.pep
RRRGEWNGPPNGEWRRHGSARHLAAASGDXKGGGGGGQEGDGARAIESXGSTRRDGEKERGDGGGGRRGRRSLGDAXRGGATVAGRGGAGWTRETGPTGGPHLSATRREEGXGRLAXAVAFGRPSGEGKRRGNGPAAHSKEKREKEKKKKKTKEMNFXQGLNIACAKF

SEQ ID NO: 194674 - protein, 60 aa, Oryza sativa
  Clone ID: PAT_MRT4530_90697C.1.pep
FCGHEHQSRESVATQPCIPYGLAWSLGESRASLCPRYAPSWPYPRARPCAGELCAGFPPR

SEQ ID NO: 194675 - protein, 421 aa, Oryza sativa
  Clone ID: PAT_MRT4530_90698C.1.pep
MNNCWFRVKTKTCRPHKGEIGLVFEHPTQPGNQAGGWMARQKHLETSESAVSTLKRSTSTPFLNTATTQYTMSEVRRHTTPESAWIIVHGHVYDCTGFLKDHPGGADSIMINAGTDCTEEFDAIHSDKARGLLEMYRIGELIVTGSDYSPQSSSADLTSIVESPTAAAAPAVPPVYNVRLFRFALPSPDQKLGLPVGKHVYVCASIGGKLCMRAYTPTSSVDEVGYIELLIKIYFKGEDPKFPDGGLMSQYLDYLPLGATIDIKGPIGHIEYAGRGAFTVNGERRFARRLAMVAGGTGITPVYQVIQAVLWDQPDDGTEMHVVYANRTEDDMLLREEIDRWAAAHPARLKVWYVVSKVARPEDGWEYGVGRVDERTLREHLPPGDGETLALVCGPPAMVECTVRPGLEKMGYDLDKSCLVF

SEQ ID NO: 194676 - protein, 280 aa, Oryza sativa
  Clone ID: PAT_MRT4530_90699C.1.pep
MQLNPEKFAPMRSRTKDLSYYFISHDSTTVGDKMRGIEDGRGQEVFGSLDWVSEIQNEISTTGTYKKPRYVTKQGVKIMDQDGKLDLLKKMEEVEKKREESEKKRERSEEKSRAELMALKAAVESRFPAVKKRVDALEVCGELKQEIRSAVLMQKPQDLDSACSLAFLQDEILEGSKSVSHKKSDKPILVKNSLKSLSPQSHSNSVVKGNASPPSEDRRGSDNTRARDDRLAALRSYRRSKVLCFTCGERWSKEHKCANSVQLHICHARKFPPLLALKIG

SEQ ID NO: 194677 - protein, 696 aa, Oryza sativa
  unsure (1)..(696): unsure at all Xaa locations
  Clone ID: PAT_MRT4530_9069C.1.pep
MVVPSALLLPLPLLLLCYGFGNIHCSPVHRSSIDLHSLLDFKQGISSDPNEALKSWNTSTHYCKWTGVMCTQTRPWRVSGLNLTGLSLGGQISSSLGNLTFLNYLDLSYNNFFGPHGAIPVSLTNSSSLSYLDLSTNLLVGAIPANISLLSNLEYLDLDQNNLTGTVLQTIGDITSLEILYLFQNQLSGSIPDKIWQLPNLMQLVLGENNLSGGIPQTLHNISSLQRLGLEYNMLSKALPPNIGDALSNLXYLGNNMFEGQIPASLGNASGLQIIMFLNNAFVGKIPPLGKLSNLNFLDLGSNRLEASDSDSWEFLHALGNCSYLQDFSLSQNQLEGHIPDSIGNLSSNLQSLVFSANKLSGIVPLSIGNLQNLTWLGLDFNNLTGPIDEWIGKLTQLVHLNLGENDFIGPIPPSIGNLNQLATLFLGANGFTGYIPPSLGNLQYLVKLDVSFNNLHGSIXHKELFISVATMIVCALTHNDLDGNLRQLSELHLSSNGXIPDSLGAISEIETIRTDHNFLTGKIPISLSNMKSLSILNLSHNNLSGTIHMAIDNLQVLTXFLTQLDLSDNNLKGEVPTNGVLKNSTAIPLNGNXYLCGGLPDLHMPPCYTDFQRKQIQYHLVRVLIPVFGIISVLLLFHFLLIERKISSGKYLLRLSXANIYLKVSYNDLARATSGFFEXNLIGREIYGSILRFKL

SEQ ID NO: 194678 - protein, 100 aa, Oryza sativa
  Clone ID: PAT_MRT4530_906C.1.pep
MVQRWLWCRLAEGGDTVIAEEVADQPGAPIGGRPSRRDGGGLVVQERRRIPTSTAALWAAGLRNLAKHKQMLSASVWSSSSDQMMMDEGGLPGSEWHYFT

SEQ ID NO: 194679 - protein, 889 aa, Oryza sativa
  Clone ID: PAT_MRT4530_90700C.1.pep
MAASVEYKLAPHPWASNAPSSNLDLFPSGGGKRRSGSETDSDDEDSIPPDWRSLYHPRLEVAEPAVKDPRDEATSDAWVRRHPALVRLTGKHPFNSEPPLPRLMSHGFITPAPLHYVRNHGAVPKADWSTWAVEVTGLVKRPARLNMEQLVTGFEAVELPVTLVCAGNRRKEQNMVRQTVGFNWGPGAISTSVWRGVRLRDVLRWCGVMGASAGAANVCFEGAEDLPGGGGCKYGTSLRREVAMDPAHDVILAYMQNGEPLTPDHGFPVRVIVPGFIGGRMVKWLKRIIVASSESESYYHYRDNRVLPSHVDAELANAEAWWYKPEYMINELNINSVITTPGHDEVLPINALTTQRPYTMKGYAYSGGGRKVTRVEVTLDGGETWQVCNLDHPERPTKYGKYWCWCFWSVDVEVLELLAAKEIAVRAWDESLNTQPEKLIWNLMGMMNNCWFRVKTKTCRPHKGEIGLVFEHPTQPGNQAGGWMARQKHLETSESAVSTLKRSTSTPFLNTATTQYTMSEVRRHTTPESAWIIVHGHVYDCTGFLKDHPGGADSIMINAGTDCTEVVDAIHSDKARGLLEMYRIGELIVTGSDYSPQSSSADLTSIVESPTAAAAPAVPVSTVALSNPREKVKCRLMDKKSLSYNVRLFRFALPSPDQKLGLPVGKHVYVCASIGGKLCMRAYTPTSSVDEVGYIELLIKIYFKGEDPKFPDGGLMSQYLDYLPLGATIDIKGPIGHIEYAGRGAFTVNGERRFARRLAMVAGGTGITPVYQVIQAVLWDQPDDGTEMHVVYANRTEDDMLLREEIDRWAAAHPARLKVWYVVSKVARPEDGWEYGVGRVDERTLREHLPPGDGETLALVCGPPAMVECTVRPGLEKMGYDLDKSCLVF

SEQ ID NO: 194680 - protein, 98 aa, Oryza sativa
  Clone ID: PAT_MRT4530_90701C.1.pep
SSPTGDAASPTLQPARPPSPPTDDVASPTTHPGRPSLPLAAGVSARCPPLALGASHLSRTTHDVHSSARPLESGLAPDRRLLVLWQLAAVLSLVWLLW

SEQ ID NO: 194681 - protein, 97 aa, Oryza sativa
  Clone ID: PAT_MRT4530_90702C.1.pep
RPTVYIQQFGPHLLRSNAGWQLKLCWLCPSLLDMVSGVGSMLLPCHTCHLNSSHVWGLNSIVACLLFFSSDIIPCPMCNFRPYEEKKSCRKNLKTNH

SEQ ID NO: 194682 - protein, 63 aa, Oryza sativa
  Clone ID: PAT_MRT4530_90703C.1.pep
TETNFSQKTPLSFLHLLQNTLTKKKICKPIRTRVCFFGFTNGSGIGLGKRPPAFLNPGGPPFN

SEQ ID NO: 194683 - protein, 62 aa, Oryza sativa
  unsure (1)..(62): unsure at all Xaa locations
  Clone ID: PAT_MRT4530_90704C.1.pep
SSYIDTARVQLALVAVVAAMLLALPYNIMGAISCGQGNFVRWPWLKDAGRVSGPXGACCSGG

SEQ ID NO: 194684 - protein, 185 aa, Oryza sativa
  Clone ID: PAT_MRT4530_90705C.1.pep
MAGNASVMRRLYLSFYNWIVFIGWVQVSWSMILALLENGYEAVYAAVEQHLLFAQTAAIMETHTHIFVTSLLISWCITEVTRYCFYGMKESFGFTPSLLLWLMYSTFIVCFPIGTVSEVGLIYIVVPFMKASEKYCLRMPNKWNFSIKYFYASVFFMALYAPVYPHLFHYLIVQRKKALAKSKTT

SEQ ID NO: 194685 - protein, 136 aa, Oryza sativa
  Clone ID: PAT_MRT4530_90706C.1.pep
GTMVHLVTYHPFSKEEQMEALESEKRAIEERKRLKEAGVIGSTMDALGGAASLVGSGVGLVGTGIVGGVGLVGSGIGAGVGLVGSGVGLVGSGIGAVGSGLGKAGKFMGKTVAGPFSMSRKNGSSSTAPQAEQPSA

SEQ ID NO: 194686 - protein, 409 aa, Oryza sativa
  Clone ID: PAT_MRT4530_90707C.1.pep
MASVLRRLYLSVYNWIVFIGWVQVSWSMILALLEKRYEAVYAAVEQHLLFAQTAAIMEVTRYSFNGMKESFGFTPSWLLWLRYSTFIVCFPIGMVSEVGLVYIVVPFMKASEKYCLRMPNKWNFSIKYFYASVFFMAFDEDCEHLFVSCPMIKGWAGIGFQLPAETRQGLRTSYKGAFDTLERSWQSCSTKLYYGGGAGFLLLYNSTPPQKTHYPLKFQCIYTKMPLNYPFLVPTPSPPVLSPHPPSSVEAGGGGGGVGVGVGSGGPPTVGQAAASVEHGLSSSCDAYQVFGNASGVRRLYLSLYNWIVFIGWVQVSWFMILALLKNGYEAVYAAVEQHLLFAQTAAIMEALHSIVGLVRSPVPSTVLQVTGRLFMIWGILWSFPETHSHILVTSLIICWCITEVYATP

SEQ ID NO: 194687 - protein, 131 aa, Oryza sativa
  Clone ID: PAT_MRT4530_90708C.1.pep
MAGVDVRSTGFAAKPRLARAPTSTAARICGSSSATGNKRRRRRDGAEHWRRRAKTFSRALALALVLLYVRVNGIALRVPTMNVSAADLVINTVKTGITADDENAEFRMDEDGPLSGILDVCDVPMENDNFR

SEQ ID NO: 194688 - protein, 505 aa, Oryza sativa
  Clone ID: PAT_MRT4530_90709C.1.pep
MERISSNRSAMDHGGQVSPVPATATAPRKVRREHMRLGVYHDVLQRLRDAGAPEALAPDFAEKLWTHFHRFNASYAMDVNVERAEDVLMHMKLLEKAIHPENQPAFSVRIVQVPLDIDASEADSQSNITEDDNCPTPRTPAEHPAPIFGSTTALKALVRQASSKNLLDDNQDIDAILRPMHEITFASDDKPKGLTQLSSLLGNLNLDIKEVHALSTNDGYFLDIFIVIGWDHKETQLLEEALEKEIHNYEPQMPSKSSCWPPELAGKQSLINSQVNHVQIPKDNTDEWEINFDVLDIQEKVASGTYGDLYRGTYFGEDVAIKVLKSDRLNENMQEEFNEEVFIMRKIRHKNIVRFLGACTKSPTLCIVTDFAHLYVMLIKVADFGVARVKAESGIMTAETGTYRWMAPEVIEHKPYDSKADVFSFGVVLWELLTGKGLRPVIPKATDPKLALLLESCWQQNAVNRPDFVQILQKLDEIAGEHGIDLTHPHKEKEKGGFFTFGKVH

SEQ ID NO: 194689 - protein, 70 aa, Oryza sativa
  Clone ID: PAT_MRT4530_9070C.1.pep
NRKKKVSWLVSQGLDVKVSRSRVINGAAAYPSSCSTEAQPEPAAAEQMEGWQLVHGTEECSGRARAWRWR

SEQ ID NO: 194690 - protein, 76 aa, Oryza sativa
  Clone ID: PAT_MRT4530_90710C.1.pep
KLGNGLRPQGLLKQNPHLYHSPPPQIRQGYFRQKAILIRALKITLLNCDHRRSATLAGSPQSPHGRTSGCQTASSH

SEQ ID NO: 194691 - protein, 101 aa, Oryza sativa
  unsure (1)..(101): unsure at all Xaa locations
  Clone ID: PAT_MRT4530_90711C.1.pep
PGVPAVGPGGPVXIPCVPGVPVDGPGIPFVPVIPWVXPEIVSIILGXPMIAXGMTTLPVPAFVPQIDPGAATGLPGVPSAXETTLQEDPQSLMPFVVTPAP

SEQ ID NO: 194692 - protein, 63 aa, Oryza sativa
  Clone ID: PAT_MRT4530_90712C.1.pep
QAEEWGPHARTQQPAIHMAAHRQPGQAAGGTTTRAGLSLTPRHARCPVSLYQYRPAGMAAALE

SEQ ID NO: 194693 - protein, 96 aa, Oryza sativa
  unsure (1)..(96): unsure at all Xaa locations
  Clone ID: PAT_MRT4530_90713C.1.pep
MVDRAGACADXVCQDCETIAWPLRGILXLDESNACCVQRLESLGLDNTKAQXQAYRSLVCTTSGSGQYISXGAMLFQETLHHSTADANNIEDILSE

SEQ ID NO: 194694 - protein, 198 aa, Oryza sativa
  Clone ID: PAT_MRT4530_90714C.1.pep
RPLCKRRGGRRPLNLNQWQQRVHPPPPAASPRPCPGSLLAAPASLPSNDLGIDPGLLLFENYFPYLEFLPADYNGFDGATWDFGNIANNNNTTAATNDNDVQNFSGDGLFDNIMIPELNVLDTQSSLDVAGDGFLSQEQPLLTVNSTTPIEYPATASSSSSTPHPPPTIRTKSPTSTSAIPGTSTFSLHPSPSLSSSS

SEQ ID NO: 194695 - protein, 68 aa, Oryza sativa
  Clone ID: PAT_MRT4530_90715C.1.pep
NTPIRGQHSWGHTIRGYAIWALKVSIANAVYRICSTLPDAFCRKYMDICAEKGFVALYKNVTLAGFLI

SEQ ID NO: 194696 - protein, 49 aa, Oryza sativa
  Clone ID: PAT_MRT4530_90716C.1.pep
MGRSPIGWAQPTILTASNIDEGLQRQINAMHEEVTHVGSPAKCVQLSKM

SEQ ID NO: 194697 - protein, 89 aa, Oryza sativa
  Clone ID: PAT_MRT4530_90717C.1.pep
NNPPPVQKRQVLYWSMPCMNKIFNPWECKAPPPFKKWSVCPPPRSFCLWVEPKAVFCLRGVPVFPLSLPPRPVQNGILEHQKMFNYIFF

SEQ ID NO: 194698 - protein, 115 aa, Oryza sativa
  unsure (1)..(115): unsure at all Xaa locations
  Clone ID: PAT_MRT4530_90718C.1.pep
KRGPVPQDIPSTSSQSPFAPECPSSVARREPSPLFRILRTLFGLCSXKARYHEDHHIDIPPSPPGFEAEPDEPEEEEIEDPFVGVPPDYDFFGYGHGYGYPPPPPPEDPPQAPLA

SEQ ID NO: 194699 - protein, 372 aa, Oryza sativa
  Clone ID: PAT_MRT4530_90719C.1.pep
MARAGAVLVVVLAAASVLLAPWAATAQTSSCDDALPPALAGNYSGLACRPVWNNFVLRYAQGKDNVLRVVISSMYSTGWVGMGFSKDGMMVGSSAMVGWVGKTGLSHVKQFSLRGKTPSQVVADEGFLLSKDHDHTVVVQQAKIYLAFQLRFQSPLRRQQVLLAFGNAIPVNDRLTEHQGKTSFTFDFTTGSSSGSSYPDGLKRAHGALNLFAWGVLLPIGAIIARYCRRWDPLWFYLHAGIQLVGFILGLAGIVAGVSLYNKIQADVPAHRGLGIFVLVLGILQILAFFLRPHKDSKYRKYWNWYHHWVGRLALFFAAINIVLGIKVGAAGNSWKIGYGFNLAILLITIITLEVLLWTRWKNNNSSSMPTY

SEQ ID NO: 194700 - protein, 511 aa, Oryza sativa
  Clone ID: PAT_MRT4530_9071C.1.pep
MAGAWRKAWLSMLDRGGGSGAGGGGGGSSGSLHVHLHGLLSPSSSSSSLNGYKRGGGKHGGGGGCGGGHVMTSSKAVLACFSVALVVAFFYVSVASGPTADAASFPSPTGASSSSLLSWLSSNSTSAAALPRSTVGDNRVVWTSGVQSGLVSFAKCDVFSGRWVRDDDEGGGAYPFYPPGSCPHIDDDFNCHKNGRADTGFLRWRWQPHGCDIPRLNPIDFLERLRGQRIIFVGDSLNRNMWESLVCILRHGVRDKRRMYEASGRNQFKTRGYYSFRFRDYNCSVDFIRSIFLVKEMINETKGGAVVDAKLRLDELDETTPAYRTADIVVFNTGHWWTHWKTSRGLNYYQEGNYVHPSLEVMDAYKRALTTWARWVDKNIDSTRTQVVFRGYSLTHFRGGQWNSGGRCHRETEPIFNRTHLAEYPEKMRILEQVLGRMRTPVIYLNISAMTDYRKDAHPSVYRVRYETEEERMAAVAKQDCSHWCLPGVPDSWNELLYASLLQAGRGSWRL

SEQ ID NO: 194701 - protein, 151 aa, Oryza sativa
  Clone ID: PAT_MRT4530_90720C.1.pep
PRVRLLAEKGELPTRFGSATLGILLLQDIAVVPLLVILPVLESQNVVEQSVWPMLLAESLKALGGLGLLSLGGKYLIRRIFEFVAESRSSEAFVALCLLTVSGTSLLTQWLGFSDTLGAFLAGAILAETNFRTQIEADIRPFRGLLLGLFF

SEQ ID NO: 194702 - protein, 191 aa, Oryza sativa
  Clone ID: PAT_MRT4530_90721C.1.pep
KETQHLILQVFDEDKLKQDKRLGIAKLPLNDLEMESVQEINLQLLSSLDTTKVKDKKDRGVLTIKVLYHPFTKAEALEALELEKKTVEERRKTKEETAAVSGAADAASGVTSTVTPAAGAGVAAGAAAPGAGATAAGSGVGLVGTGIGAVGSGIGAFGTGLSKAGKFVGRTVTGPFSSARRSASSVPTIDE

SEQ ID NO: 194703 - protein, 670 aa, Oryza sativa
  Clone ID: PAT_MRT4530_90722C.1.pep
MPSRRLLAAAASPPPAAEEKAVVDGLRGSHGARRHAAGSAVGAGVAAVVALVLVALGLGLFVWLRRGRKRGAGAGGGAAARMGVGLPAWRVFTVLEERRYQIQVVHYAPSNGCKGLVPRGTASLGKQETCIHTISISISRTSDVGFLSSRFFNKDEHLGRFAQAADVNALASLDREDVKKICGENLPEWVSFPEYEQVKWLNKQLSKLWPFVEEAATMVIRDSVEPILDDYRPAGISSLKFSKLSLGTVPPKIEGIRIQSFKKGQITMDVDFRWGGDPNIVLAVDTLVASLPIQFKNLQVYTIIRVVFQLCDEIPCISAVVVALLAEPKPRIDYILKAVGGSLTAMPGLSDMIDDTVASLIADMLQWPHRIVVPLGGVDVDVSDLELKPHGKLTVTVVRAESLKNKELIGKSDPYVVLYIRPMFKEKTSVIDDNLNPEWNETFSLIAEDKETQHLILQVFDEDKLKQDKRLGIAKLPLNDLEMESVQEINLQLLSSLDTTKVKDKKDRGVLTIKVSSCPHGGASWVLGTRDAKVFDADRRDNTQVLYHPFTKAEALEALELEKKTVEERRKTKEETAAVSGAADAASGVTSTVTPAAGAGVAAGAAAPGAGATAAGSGVGLVGTGIGAVGSGIGAFGTGLSKAGKFVGRTVTGPFSSARRSASSVPTIDE

SEQ ID NO: 194704 - protein, 96 aa, Oryza sativa
  Clone ID: PAT_MRT4530_90723C.1.pep
WVFKPFKWRFNRYSNLPIFFFNFWPPSALPCLRENLILVDPTIAQLLNDLIPWFGVKVALIQPFTRPRILAMGHNNWHFLDPVPNRNRLDSPPKEA

SEQ ID NO: 194705 - protein, 256 aa, Oryza sativa
  Clone ID: PAT_MRT4530_90724C.1.pep
MDPAPSLAAELWRPHHHRHHFEASSVVTDQGSGSRGGGGSGRRRPRSDAGPEDDDLSKVVSTSAASGGGGGGGQDSDAPEAKRLKPMKSSDKNDSLRTEAGTDSGNSSKAADKNATPPEPPKQDYIHVRARRGQATDSHSLAERARREKISERMKILQDLVPGCNKVIGKASVLDEIINYIQSLQHQVEFLSMKLEAVNSHMINGIVAFPSKDFGAQPYNTAAGLTFDPQTTREFAQGSTSEWLHMQIGNAYERVT

SEQ ID NO: 194706 - protein, 94 aa, Oryza sativa
  unsure (1)..(94): unsure at all Xaa locations
  Clone ID: PAT_MRT4530_90725C.1.pep
TFEFPRCYXXGSHPVTXTIFXXGFQPPVNAGGSISTVXTSSNLIDEPXFSNPNKVVPVKSPLSYSAEQMQVTPLLIFFPHWIGRIPQSKFEAEM

SEQ ID NO: 194707 - protein, 294 aa, Oryza sativa
  Clone ID: PAT_MRT4530_90726C.1.pep
MRRMLEVAADAGSSAAAAAANGAVDWWRDVNESPVWQDRIFHVLAALYGFVSAIALVQLIRIECRVPEYGWTTQKVFHFLNFLVNGVRSIVFVLRRNVQLIHPEILQHVLLDMPGLAFFTTYALLVLFWAEIYYQARAMSTDGLRPTFYWINAVIYAIQIILWMVLWWKPVRVMIILSKMFFAGVSLFAAFGFLLYGGRLFLMLQRFPVESKGRRKKLQEVGYVTTICFTCFLIRCVMMCLNTFDKAADLDVLNHPILNFFYYLLVEIVPSALVLFILRKLPPKRGITQYHPIH

SEQ ID NO: 194708 - protein, 166 aa, Oryza sativa
  Clone ID: PAT_MRT4530_90727C.1.pep
MGVVSAAADAAVVLFSLTVAVAAPLIDAQSVLPRHLFPAPLVSLKRWYAREFGDYLVARPPGFLRGLVWLELAFLWPLALATLYGILARRRWAATTSLIAGVSTLTSMSAILGEIVGSKKATLKLLQMYVPFAVFAVIAILRGLCSSAPRGTAGSSLGPSARKKRA

SEQ ID NO: 194709 - protein, 82 aa, Oryza sativa
  Clone ID: PAT_MRT4530_90728C.1.pep
QIPGDYYCRRGQFCRAPSSFHLLFSIPHLCQCPSGHNTQHFSINTNGHGQSCNPLKRILRIATKHARVYQPVVLFLKHFQQP

SEQ ID NO: 194710 - protein, 123 aa, Oryza sativa
  Clone ID: PAT_MRT4530_90729C.1.pep
MGSPKTYQTYRMGQEQMDTILSWALPEKDYEPVFTVISSHTDEQKEKDRLLAIGTAAIKNKLLHHKRGLQAFVKDNLDRFGYVDINDSMNGVRKRRLSTVKLSVQLSVRQPNGCCSASRAVQL

SEQ ID NO: 194711 - protein, 79 aa, Oryza sativa
  unsure (1)..(79): unsure at all Xaa locations
  Clone ID: PAT_MRT4530_9072C.1.pep
RQLAKRGFSSRPLRLVQSGFCQSPRCEMTVGEFNLGVSIXKLSRRMLEHLSRQPXETSHHHHGRCCQRPPRLRTRGRPG

SEQ ID NO: 194712 - protein, 335 aa, Oryza sativa
  unsure (1)..(335): unsure at all Xaa locations
  Clone ID: PAT_MRT4530_90730C.1.pep
MGRHDLRKVMDGLGERGVAGNHEEGQPEGTSTATELTSRGADGVPAVKGLLVLAVPKEATTHREVVWDGXEEAAGGGKCGGLRNRSGCRGGARHGDVDGDSGAAQXHKGGSGGRLECGMVAAQEDSRSGAAAGVRRGAAQLLVAVAQRGDDESGGGARLEVDGERRRVGAAWGGRERARQARVRRGKERGCSGDRLYGLGMAGPSPGETESGQQPAGSGAPTWGKGWPGFARKVGQLGEDKVGIESTLSQGGVERGRRDVVGWNRRPWRLQEGRLEVRDGPDMWGRRAHLSAREGEGRPGEGDIELRKFTENFREFIRALLTVVIDQFRPSILPK

SEQ ID NO: 194713 - protein, 47 aa, Oryza sativa
  Clone ID: PAT_MRT4530_90731C.1.pep
MENWRRRRSATTSEDEGLVAQHRNNLVHSPNNTEWQMYALNNPGKVM

SEQ ID NO: 194714 - protein, 1938 aa, Oryza sativa
  Clone ID: PAT_MRT4530_90732C.1.pep
MAEPAKAHNLSPSVSGDDGEPNPRRRARTPPPPPRQSPRREEALERVERSATSTSTGDGEGRRDGERRLLVYGDGNTPQGALQAAGALLRHPPVVPDPESPAQRWLDDVANLVMTARQRLDAGGRSSATKTSGTAATGSASSRRRARRAAAAVRHSAATPSSAPPTREDLRGGPDARISIERRRNGRRAAHATEGASSSGVSHQHGRGDQPSVPPVGGVGCRAFVASLRNVRWPPRFRPTIAEKYDGSVNPAEFLQVYMTGIEAAGGDDRVMANFFPMALKGQARGEEADLHAVQRRDDESLRSYIQRFCQVRNTIPCIPAHAVIYVFRGGVRHNRMLEKIASKEPQTTAELFQLADRVARKEEAWTWNPSDSGVAASAAPGSAAQTGRRDRRRKKRSAHSDDEGHVLAVEGASRATRKGRPASDKKREASAPSRERPTGKWCTVHNTSLHDLADCRAVKSLDERTRKWEEERRQERREGKSPAVPSGNRRSEAKQKAPAEDIDDGDDDLGFQEPGATIATVDGGACAHVSRRSLKAMKRELLAAAPTHEATRRAWWSEVALTFDQTDHPPCVARGGQIAMVVSPTVCNVKLGRVLIDGGAALNILSPAAFDAIKVPGMVLRPSQPIIGVTPGHTWPLGHIDLPVTFGGSANFRTERVNFDVADLSLPYNAVLGRPALVKFMAAVHYAYLQMKMPGPGGPISVHGDLKVALACMEQRADHLAAASKPEGGDERLGTSAPAAPRQQIVICDEVPEDALVSFLRANADVFAWRPADMPGVPREVIEHRLAVRPGARPVRQKVRRQAPERQAFIREEVARLLEAGFIREVIHPEWLANPVVVPKANGKLRMCIDYTNLNKACPKDPYPLPRIDQIVDSTAGCDLLCFLDAYSGYHQIRMAREDEEKTAFITPIGTYCYTTMPFGLKNVGPTFQRTTRISLGSQIGRNVEAYVDDLVVKTRNQETLLSDLAETFESLRSARIKLNPDKCVFGVPAGKLLGFLVSARGIEANPEKIRAIERMRPPANLGMCNASPEAERALTQLKAYLSSPPVLVAPEPNEPLLLYLAATPQVVSAALLVERDEDNPHSAHPHPVLAWPGREQGREAPEPNGGPRPPTTGAGPLPACQTVPGAPDPQDGPGATVGRLHLSPSDPEANPVPTRPGREQGEEAPEPNGGLRPLTTGVGPLPACPTTPGAPDPQDGSEATVGRPPLSSSDPEVVGTEDECAPRGRLDKERPRDVAPSEEDRPHRKVQRPVYFVSEALRDAKTRYPQAQKMLYAILMASRKLRHYFQAHRVTVVTSYPLGQILHNREGTGRVALADFVAEWTPAPEPVSIPEASSGPSQLPHTAYRVMQFDGSLSLQGAGAGVTLTSPSGDVLRYLVRLDFRATNNMAEYEGLLAGLRVAAGLGIRRLLVLGDSQLVVNQVCKEYRCSDPQMDAYVRQVRRMERHFDEIELRHVPRRDNTIADELSRLASSRAQTPPGAFEERLAQPSARPDPLGETDAPDRPPRPVGVQASGPEGSAPSSLRLIAWIAEIQAYLTDKTLSEDCEGSERVQRISKRYVLVEGTLYRRAANGILLKCIPREQGVELLADIHEGECGAHSASRTLVGKAFRQGFYWQIALNDAVDLVRRCRACQFHAKQIHQPAQALQIIPLSWPFAVWGLDILGPFRRAPGGFEYLYVAIDKFTKWPEAYPVIKIDKHSALKFIKGITARFGVPNRIITDNGTQFTSELFGDYCEDMGIKLCFASPAHPRSNGQVGRANAEILRGLKTKTFNILKKHSDSWIEELPAVLWANRTTPSRATGETPFFLVYGAEAVLPSELTLRSPRATMYCEADQDQLRRDDLDYLEERRRRAALRAARYQQSLRRYHQRHVRARSLCVDDLVLRRVQTRAGLSKLSPMWEGPYRVIGVPRPGSVRLATGDGTELPNPWNIEHLRRFYP

SEQ ID NO: 194715 - protein, 93 aa, Oryza sativa
  unsure (1)..(93): unsure at all Xaa locations
  Clone ID: PAT_MRT4530_90733C.1.pep
NRQKGPRTEPCPGAWPFEERLAQPSARPDPLGETDAPDRPPRPVGVQASGPEGSAPSSLRLIAWIXLYRRAANGILLKCIPREQGVELLADIH

SEQ ID NO: 194716 - protein, 144 aa, Oryza sativa
  Clone ID: PAT_MRT4530_90734C.1.pep
MAIGRTTLNSAGGAGAPTTTTTPRLPPSHRQASERDTAEEREGETAVRGRRTWRRGDAGAGGVGAVQGSYFVSPADRTYDALGLVKQINVQTAAALAEAREVLAVASGGQSENINYDKENLESPNAKKEPRTTTKLQAKIKRRS

SEQ ID NO: 194717 - protein, 1430 aa, Oryza sativa
  unsure (1)..(1430): unsure at all Xaa locations
  Clone ID: PAT_MRT4530_90735C.1.pep
MAEQAKAHNLSPSVSGDDGEPNPRRRARTPPPPPRQSPRREEALERVEGSATSTSTGDGEGRRDGERRLLVYGDGSTPQGALQAAGALLRHPPVVPDPESPAQRWLDDVAILVMTARQRLDAGGRSSATKASGTATTGSASSRRRARRAAAAVRHSTATPSSAPPTREDLRGGPDARISIERRRNGRRAAHATEGASSSGVSPQHGRGDQPSVPPVGGVGCRAFVASLRNVRWPPRFRPTIAEKYDGSVNPAEFLQVYATGIEAAGGDDRVMANFFPMALKGQARGWLMNLPPASVHSWEDLCQQFTMNFQGTYPRPGEEADLHAVQRRDDESLRSYIQRFCQVRNTIPCIPAHAVIYAFRGGVRHNRMLEKIASKEPQTTAXELFQLADRVLRKEEAWTXNPSVSGVAASAAPGFAAQTGRRDRRRKKRSAHSDDEGHVLAVEGASRATRKXGRPVSDKKKEAGAXSRERPXTGKWCTVHNTSLHDLADCRAVKSLAERTRKWEEERRQERRVGKSPAVPSGNRRSEAKQKAPAEDIDDGDDDLGFQEPGVTIATVDGGACAHVSRRSLKAMKRELLAAAPTHEATRRARWSEVALTFDQTDHPPCVARGGQIAMVVSPTVCNVKLGRVLIDGGAALDILSPAAFDAIKAPGMVLRPSQLIIGVTPGHTWPLGHIDLPVXTFGGSANFPHXERVNFDVADLSLPYNAVLGRPALVKFMAAVHYAYLQMKMPGPGGPISVHGDLKVALACMEQRADHLAAASKPEGGDERLGTSVPAAPRQRMITCDEVPVKEVALGDGPVSFLRANADVFAWRPADMPGVPREVIEHRLAVRPGARPVRQKVRRQAPERQAFIREEVARLLEAGFILEVIHPEWLANPVVVPKANGKLRMCIDYTDLNKACPKDPYPLPRIDQIVDSTAGCDLLCFLDAYSGYHQIRMAREDEEKTAFITPIGTYCYTTMPFGLKNAGPTFQRTTRISLDSQIGRNVEAYVDDLVVKTRNQETLLSDLAETFESLRSARIKLNPDKHRGQPREDTSYRADAPPSKLRDVQCVTRCMAALSRFISRLGEKALPLFKLLKRSGPFTWTEEAERALTQLKAYLSSPPVLVAPEPNEPLLLYLAATPQVVSAALVVERDEDNPHSAHPHPVLAWPGREQGGEAPEPNGGPRPPTTGAGPLPACQTVPGAPDPQDGPRATAGRPHLSPSDPEANPVPTRPGREQGEEAPEPNGGLRPLTTGVGPLPACPTTPGAPDPQDGPEATVGRPPLSSSDPEVVGTEDECTPRGRLDKERPRDVAPSEEDRPHRKVQRPIYFVSEALRDAETRYLQAQKMLYAILITSRKLRHYFQAHQVTVVTSYPLGQILYNREGTGRVVKWAIELSEFDLRFEPSHAIKSQALADFVVEWTPAPELVSAPEASSSPSQLSHTALWVM

SEQ ID NO: 194718 - protein, 294 aa, Oryza sativa
  unsure (1)..(294): unsure at all Xaa locations
  Clone ID: PAT_MRT4530_90736C.1.pep
MFNHLELSDTLYNALSENSIYNYFNCVDKSALPDLLTNKAASEPQLDFSSVELLRQPIDVEQQIREKISQQTEDNAFFIVNLSDIIRKKKQWNNCLPRVEPFYAVKCNPDIEIIKCLAVMGVNFDCASRGEIDLVMSIGVTADRIIYANPCXPKAHLNYAREVGVNMSVFDGEAELYKIKECHPNLKVVMRIATDDRNSMCAFFVKFGARGNPXHRLFDGCQVLEPFKXIGVAFXVGSGXCLDWDTYKSSFRRVSRFFQNGEELGLTMNLLGHLGGFPPILFCFWKLWLRINFF

SEQ ID NO: 194719 - protein, 1944 aa, Oryza sativa
  Clone ID: PAT_MRT4530_90737C.1.pep
MAEPAKAHNLSPSVSGDDGEPNPRRRARTPPPPPRQSPRREEALERVERSATSTSTGDGEGRRDGERRLLVYGDGNTPQGALQAAGALLRHPPVVPDPESPAQRWLDDVANLVMTARQRLDAGGRSSATKTSGTAATGSASSRRRARRAAAAVRHSAATPSSAPPTREDLRGGPDARISIERRRNGRRAAHATEGASSSGVSHQHGRGDQPSVPPVGGVGCRAFVASLRNVRWPPRFRPTIAEKYDGSVNPAEFLQVYMTGIEAAGGDDRVMANFFPMALKGQARGEEADLHAVQRRDDESLRSYIQRFCQVRNTIPCIPAHAVIYVFRGGVRHNRMLEKIASKEPQTTAELFQLADRVARKEEAWTWNPSDSGVAASAAPGSAAQTGRRDRRRKKRSAHSDDEGHVLAVEGASRATRKGRPASDKKREASAPSRERPTGKWCTVHNTSLHDLADCRAVKSLDERTRKWEEERRQERREGKSPAVPSGNRRSEAKQKAPAEDIDDGDDDLGFQEPGATIATVDGGACAHVSRRSLKAMKRELLAAAPTHEATRRAWWSEVALTFDQTDHPPCVARGGQIAMVVSPTVCNVKLGRVLIDGGAALNILSPAAFDAIKVPGMVLRPSQPIIGVTPGHTWPLGHIDLPVTFGGSANFRTERVNFDVADLSLPYNAVLGRPALVKFMAAVHYAYLQMKMPGPGGPISVHGDLKVALACMEQRADHLAAASKPEGGDERLGTSAPAAPRQQIVICDEVPVKEVALSDGPVSFLRANADVFAWRPADMPGVPREVIEHRLAVRPGARPVRQKVRRQAPERQAFIREEVARLLEAGFIREVIHPEWLANPVVVPKANGKLRMCIDYTNLNKACPKDPYPLPRIDQIVDSTAGCDLLCFLDAYSGYHQIRMAREDEEKTAFITPIGTYCYTTMPFGLKNVGPTFQRTTRISLGSQIGRNVEAYVDDLVVKTRNQETLLSDLAETFESLRSARIKLNPDKCVFGVPAGKLLGFLVSARGIEANPEKIRAIERMRPPANLGMCNASPEAERALTQLKAYLSSPPVLVAPEPNEPLLLYLAATPQVVSAALLVERDEDNPHSAHPHPVLAWPGREQGREAPEPNGGPRPPTTGAGPLPACQTVPGAPDPQDGPGATVGRLHLSPSDPEANPVPTRPGREQGEEAPEPNGGLRPLTTGVGPLPACPTTPGAPDPQDGSEATVGRPPLSSSDPEVVGTEDECAPRGRLDKERPRDVAPSEEDRPHRKVQRPVYFVSEALRDAKTRYPQAQKMLYAILMASRKLRHYFQAHRVTVVTSYPLGQILHNREGTGRVALADFVAEWTPAPEPVSIPEASSGPSQLPHTAYRVMQFDGSLSLQGAGAGVTLTSPSGDVLRYLVRLDFRATNNMAEYEGLLAGLRVAAGLGIRRLLVLGDSQLVVNQVCKEYRCSDPQMDAYVRQVRRMERHFDEIELRHVPRRDNTIADELSRLASSRAQTPPGAFEERLAQPSARPDPLGETDAPDRPPRPVGVQASGPEGSAPSSLRLIAWIAEIQAYLTDKTLSEDCEGSERVQRISKRYVLVEGTLYRRAANGILLKCIPREQGVELLADIHEGECGAHSASRTLVGKAFRQGFYWQIALNDAVDLVRRCRACQFHAKQIHQPAQALQIIPLSWPFAVWGLDILGPFRRAPGGFEYLYVAIDKFTKWPEAYPVIKIDKHSALKFIKGITARFGVPNRIITDNGTQFTSELFGDYCEDMGIKLCFASPAHPRSNGQVGRANAEILRGLKTKTFNILKKHSDSWIEELPAVLWANRTTPSRATGETPFFLVYGAEAVLPSELTLRSPRATMYCEADQDQLRRDDLDYLEERRRRAALRAARYQQSLRRYHQRHVRARSLCVDDLVLRRVQTRAGLSKLSPMWEGPYRVIGVPRPGSVRLATGDGTELPNPWNIEHLRRFYP

SEQ ID NO: 194720 - protein, 2087 aa, Oryza sativa
  unsure (1)..(2087): unsure at all Xaa locations
  Clone ID: PAT_MRT4530_90738C.1.pep
MAEQAKAHDLSPSVSGDDGEPNPRRRARTPPPPPRQSPRREEALERVEGSATSTSTGDGKERRDGERRLLVYGDGSTPQGALQAAGALLRHPPVVPDPESPAQRWLDDVAKLVMTARQRLDAGGRSSATKTSGAATTGSTSSRRRARRAAAAVRHSAATPSSAPPTREDLRGGPDARTSIERRRNGRRAAPATEGASSSGVSPQHGRGDQPSVPPVGGVGCRAFEASLRNVRWPPRFRPTIAEKYDGSVNPAEFLQVYTTGIEAAGGNDRVMANFFPMALKGQARGWLMNLPPASVHSWEDLCQQFTMNFQGTYPRPGEEADLHAVQRRDDESLRSYIQRFCQVRNTIPCIPAHAVIYAFRGGVRHNRMLEKIASKEPQTTAELFQLVDRVARKEEAWTWNPSGSGVAASTAPGSAAQTGRRDRRRKKRSAHSDDEGHVLAVEGASRATRKGRPASDRKKEASAPSRERPTGKWCTVHNTSLHDLADCHAVKSLAERTRKWEEERRQERREGKSPAVPSGNRRSEAKQKAPAEDIDDGDDDLGFQEPGAAIATVDGGACAHVSRRSLKAMKRELLAAAPTHEATRRARWSEVTLTFDQTDHPPCVARGGQIAMVVSPTVCNVKLGRVLIDGGAALNILSPTAFDAIKAPGMVLRPSQPIIGVTPGHTWPLGHIDLPVTFGGSANFRTERVNFDVADLSLPYNAVLGRPALVKFMAAVHYAYLQMKMPGPGGPISVHGDLKVALACMEQRADHLAAASKPEGGDERLGTSVPAAPRQRMITCDEVPVKEVALGDGPVSFLRANADVFAWRPADMPGVPREVIEHRLAVRPGARPVRQKVRWQAPERQAFIREEVARLLEAGFIREVIHPEWLANPVVVPKANGKLRMCIDYTDLNKACPKDPYPLPRIDQIVDSTAGCDLLCFLDAYSSYHQIRMAREDEEKTAFITPIGTYCYTTMPFGLKNAGPTFQRTTRISLGSQIGRNVEAYVDDLVVKTRNQETLLSDLAETFESLRSARIKLNPDKCVFGVPAGKLLGFLVSARGIEANPEKIRAIERMRPPSKLRDVQCVTGCIAALSRFISRLGEKALPLFKLLKRSGPFTWTEEAERAFTQLKAYLSSPPVLVAPGPNEPLLLYLAATPQVVSAALVVERDEDNPHSTHPHPVLAWLGREQGGEAPEPNGGPRPPTTGAGPLPACQTVPGAPDPQDGPVATAGRPHLSPSDPEANPVPTRPGREQGEEAPEPNGGLRPLTTGVGPLPACPTTLGAPDPQDGPEATVGRPPLSSSDPEVIGTEDECAPRGRLDEERPKNAAPSGEGRPHRKVQRPVYFVSEALRDAKTRYPQAQKMLYAILMASRKLRHYFXAHWVTVVTSYPLGQILHNREGTGRVVKWAIELSEFDLHFEPRHAIKSQALADFVAEWTPAPEPVSVPEASSGPSQLPHTAHWVMQFDGSLSLQGAGAGVTLTSPSGDVLRYLVRLDFRATNNMAEYEGLLAGLRVAAGLGIRRLLVLGDSQLVVNQVCKEYRCSDPQMDAYVRQVRRMERHFDGIELRHVPRRDNTIADELSRLASSRAQTPPGAFEERLAQPSARPDPLGETDAPDRPPRPVGVQASGPEGSAPSSLRLIAWIAEIQAYLTDKTLPEDREGSERVQRISKRYVLIEGTLYRRAANGILLKCIPREQGVELLADIHEGECGAHSASRTLVGKAFRQGFYWPTALNDAVDLVRRCRACQFHAKQIHQPAQALQIIPLSWPFAVWGLDILGPFRRAPGGFEYLYVAIDKFTKWPEAYPVVKIDKHSALKFIKGITARFGVPNRIITDNGTQFTSELFGDYCEDMGIKLCFASPAHPRSNGQVERANAEILRGLKTKTFNILKKHGDSWIEELPAVLWANRTTPSRATGETPFFLVYGAEAVLPSELTLRSPRATMYCEADQDQLRRDDLDYLEERRRRAALRAARYQQSLRRYHQRHVRARSLCVDDLVLRRVQTRAGLSKLSPMWEGPYRVIGVPRPGSVRLATGDGTELPNPWNIEHLRRFYPSALRGSGRLKSPKGAQNRAVPRGVVNSGVTTGNHPTGRPWVPARPKPTQANHST

SEQ ID NO: 194721 - protein, 63 aa, Oryza sativa
  Clone ID: PAT_MRT4530_90739C.1.pep
RFAIPLSNRFCGNTISLSCGAYPRKKRDNRVVLRSTSGPLADKIGCRLMLLIAVTFSAIGMAI

SEQ ID NO: 194722 - protein, 711 aa, Oryza sativa
  Clone ID: PAT_MRT4530_9073C.1.pep
MAGAWRKAWLSMLDRGGGSGAGGGGGGSSGSLHVHLHGLLSPSSSSSSLNGYKRGGGKHGGGGGCGGGHVMTSSKAVLACFSVALVVAFFYVSVASGPTADAASFPSPTGASSSSLLSWLSSNSTSAAALPRRSLPPHPPIPPAGGGADLRNTARRTQSGAEGSGLPAPAAEQTAKPRVSDLRSGAGNATVGDVDGDQRVGNGTRSRQQREETATPMPRWQRRDEEKNSTHHAIVAAPGNSTDAPAPPLNSTATPRAAAAAAATPSTPPERKADTHHSHRRGIRHKQQQHHQHPRRRKDTVLLAAAAARQEAPDRRDDGAAMPLPAATIINTSTVGDNRVVWTSGVQSGLVSFAKCDVFSGRWVRDDDEGGGAYPFYPPGSCPHIDDDFNCHKNGRADTGFLRWRWQPHGCDIPRLNPIDFLERLRGQRIIFVGDSLNRNMWESLVCILRHGVRDKRRMYEASGRNQFKTRGYYSFRFRDYNCSVDFIRSIFLVKEMINETKGGAVVDAKLRLDELDETTPAYRTADIVVFNTGHWWTHWKTSRGLNYYQEGNYVHPSLEVMDAYKRALTTWARWVDKNIDSTRTQVVFRGYSLTHFRGGQWNSGGRCHRETEPIFNRTHLAEYPEKMRILEQVLGRMTTPVIYLNISAMTDYRKDAHPSVYRVRYETEEERMAAVAKQDCSHWCLPGVPDSWNELLYASLLQAGRGSWRL

SEQ ID NO: 194723 - protein, 44 aa, Oryza sativa
  Clone ID: PAT_MRT4530_90740C.1.pep
MSTVSSALSAILYCCFSPTGGHRHGHRAGAYYYSSHPTSTNTYY

SEQ ID NO: 194724 - protein, 76 aa, Oryza sativa
  Clone ID: PAT_MRT4530_90741C.1.pep
IIREKKLIKKGTKPGTTVTQGTTKGQKKLKKGHGGGEKNDENKGKKKDWPGTENARKKTGAGKNLNWGRSAPIKNL

SEQ ID NO: 194725 - protein, 250 aa, Oryza sativa
  Clone ID: PAT_MRT4530_90742C.1.pep
LTGDGEEVAGTMRTDGRPVTRRRRHGRRGGRRRQEHRGDRARRRAEWGDGEAEQHHTPFAPGVVIWIASSLLLAPFVPSSANGGDISIGREDPLPEQEPVPDPAPTSCAVGTTAQARTRRPRSPQMVKHPAANTAEGVKPLVASMHLPLQDIRTDTGVVERPVCDGGRSVALACGVRLIRGLGMRMYIPMPSSFVACSVSLDEDLAIAYVFTFKSLMALKTHEAVVPTRLVRGRGGTIHWSSPLPVRGVM

SEQ ID NO: 194726 - protein, 141 aa, Oryza sativa
  unsure (1)..(141): unsure at all Xaa locations
  Clone ID: PAT_MRT4530_90743C.1.pep
FFLLGRLSGRIESNPITQIKQSIYSSNSQLQISAQSQMSEYTVHLQFPNYKSPSQIPFXVLQNIPIATGLFFSLSAQHIRSLFLLPLYPCGPSLFPHPFPQPDAHAHHLLDEMSSQAEWHAEPGRLTRRTMQQHVQGRAPL

SEQ ID NO: 194727 - protein, 203 aa, Oryza sativa
  Clone ID: PAT_MRT4530_90744C.1.pep
WGGSSRPDFTCKSTEETEAWFIDSFEEWRKAKNLSNFILLGHSFGGYVAAKYALQHPEHVQHLILVGPAGFSSETEHSSEWLTKFRATWKGMLVNHLWESNFTPQRIVRGLGPWGPGLVQRYTSARFGSHSTGELLTEQESTLLTDYIYHTLAAKASGELCLKHIFSFGAFARKPLLQRSVFFVLTKCRSYEHPGDLESICTI

SEQ ID NO: 194728 - protein, 177 aa, Oryza sativa
  Clone ID: PAT_MRT4530_90746C.1.pep
MAASSSSFVFAAALLVLAAATAAQAQRETKLRVFWHDVVSGGPNSTVAQVAEAPTTNASATGFGAVVVIDDPLTDGPNLTASRLVGRAQGMYVAAGKDALSLMMAMNFVFAGDGPYNGSSLAILGANPAERAVREMPVVGGTGVFRFARGYCQATTWWFNATTGDATVEYNIHLRLD

SEQ ID NO: 194729 - protein, 394 aa, Oryza sativa
  Clone ID: PAT_MRT4530_90747C.1.pep
MANPNASAVFLAFIVILIIVIFILLGICWKFLRPDIMRRLMRPKRAPSEVPEYFSGNMSGNLRTITYFDYATLKKATRDFHQKNQLGRGGFGPVYLGKLDDGRKVAVKQLSVGKSGQGESEFFVEVNMITSIQHKNLVRLVGCCSEGQQRLLVYEYMKNKSLDKILFGVDGAPFLNWKTRHQIIIGIARGLQYLHEESNLRIVHRDIKASNILLDDKFQPKISDFGLARFFPEDQTYLSTAFAGTLGYTAPEYAIRGELTVKADTYSFGVLVLEIAWRLYEQSKILELVDAKLQADGFDEKEVMQVCQIALLCVQPFPNLRPAMSEVVLMLTMKTTEQSVIPAPVRPAFLDRKSLKDKNNGGGSDTAAEMRSTAYWLGTPSPMVDRPYDMSCGI

SEQ ID NO: 194730 - protein, 96 aa, Oryza sativa
  unsure (1)..(96): unsure at all Xaa locations
  Clone ID: PAT_MRT4530_90748C.1.pep
GMNGKVAFGRNITVNEAQSRRSGGGGRGYXGGGGGYASSRGGGGYGGGGXAGYRRSEGGYGGGGGYGXGDVTTTRGGYGGRRGGGYRRHSCGNWRN

SEQ ID NO: 194731 - protein, 100 aa, Oryza sativa
  Clone ID: PAT_MRT4530_90749C.1.pep
MDYSKQGGWDSYSSQVHNLYPYPQPRVYPPPPVSEGYGYQTYFGEDNQEASCGWSREQPSAPSDGPYNYGYNEDPDCLTFLRGCLAGLCCCCLLERCCYF

SEQ ID NO: 194732 - protein, 89 aa, Oryza sativa
  Clone ID: PAT_MRT4530_9074C.1.pep
GPKAFSPPWRPSFPPLWLERRGGHFITGRNPLEKFFPKVFSQIFPVPQPLYFFPSKGPPFFFPPWHPFIPCFGNPFRGFFYFFGRAPRL

SEQ ID NO: 194733 - protein, 89 aa, Oryza sativa
  unsure (1)..(89): unsure at all Xaa locations
  Clone ID: PAT_MRT4530_90750C.1.pep
LIKGGGGXTRXXSIXPPXMGGPGPIXRXRVAQFCWLAGVXFCXLRLCXXRRXFAGCCFVCSVQAPLCGGPLXPGGGCLPAVLGCSCASG

SEQ ID NO: 194734 - protein, 148 aa, Oryza sativa
  Clone ID: PAT_MRT4530_90751C.1.pep
MAAALSAVVSAKLGCPPAAALGSWKGSRISSRNLVSMKTMTARRGLVSLRSPRFRVFCAAKAETVGKVMQIVKQQLALGEEAKLAPESQFTELGADSLDTVEIVMALEEEFGITVEEDNAQSITTIQDAADLIDKLVAGGGGKPPAAA

SEQ ID NO: 194735 - protein, 427 aa, Oryza sativa
  Clone ID: PAT_MRT4530_90752C.1.pep
MERAVPVRKPHTSTADLLTWSATGPDAAAAAASPVASSRPSLKCKHEMFANVQIFSARIQVLAVQAMMLEKIYLPLRLKLWLETVYLACKAPVEFLQHFLIVVQLMIWYIELITLLACYSERKFCSGSKLKEMTGSGIFAENSENDDSEASNPANKTSVRMYQQTVTGISQISFSADGSVSPKKPSSLPEVAKQRELSGTLETDAEAKMNKQHSEAKSKELSGSDIFGPPPEIPARPLAARNMELQGNLDFALPQPRSVHTSVKVSNAFVIEYRTTAPIFCRLNNLLVRYAKKEFIPPFFRKPQLQKGPFLLFLLVIQDIHTPYREWMLKLGCIDIGPAGGPSNITFSEEPVVKTSKKIHNQKFQELTGNNIFKEDATPASAEKSLSSAKLKEMSGSDIFADGAAAPRDYLGGVRKPPGGESSIALI

SEQ ID NO: 194736 - protein, 45 aa, Oryza sativa
  Clone ID: PAT_MRT4530_90753C.1.pep
ILSLNKLNHHLRKLLTKHSLMGVGFARADIARARAGPNVDDLIFR

SEQ ID NO: 194737 - protein, 90 aa, Oryza sativa
  Clone ID: PAT_MRT4530_90754C.1.pep
FFFFFFTFPFLPGFYGALVSKPPSGCAFCIHTPSASVIRSAHTPEVWASPPHGVRINTPCSHYFNPHPTRHTHHIIASLTRHFHINHTAT

SEQ ID NO: 194738 - protein, 616 aa, Oryza sativa
  Clone ID: PAT_MRT4530_90755C.1.pep
MPLLIVQPVPISTGPIACASTARPAAAAHDDDGHLFDDLVLGYGGDDKTSADADDPARKLEWLRSQVIGADAEFASPFGTRRVTYADHTASGRCLRFVEDFVQRNVLPYYGNTHTVDSYVGLHTSKLASEAAKYVKRSLGAGAEDVLLFCGTGCTAAIKRLQEVTGMAVPPTLRSVALDVLPPSERWVVFVGPYEHHSNLLTWRESLAEVVEIGLRPDDGHLDLDALEAALAAPERAGRPMLGSFSACSNVTGIRTDTRAVARLLHGYGAYACFDFACSAPYVGIDMRSGEEDGYDAVYLSPHKFLGGPGSPGVLAMAKRLYRLRRTAPSTSGGGTVVYVSAYGDTVYCEDTEEREDAGTPAIIQKVRAALAFRVKEWVGEACIEAREDHMLALALRRMQASPNLRLLLGGDRPSGGRCLPVLSFVVYSPRDGSEQDERPQLHCRFVTKLLNDLFGVQARGGCSCAGPYGHRLLGITPARAKAIKSAVEKGYHGVRPGWTRVSLAYYTSTREAEFVLDAIDFVASFGHRFLPLYAFDWETGDWEYNHSFGRVLANNNAISNAAAAASSGRVKAEDEYRSYMAFARSLADSLGGCLDNTPARHVPKGIDPQLLYFPM

SEQ ID NO: 194739 - protein, 61 aa, Oryza sativa
  Clone ID: PAT_MRT4530_90756C.1.pep
IRDASAGPKRDGCKKHTPKQFKGPKTHKGLHKAHNPIKTYPEFGAKPDGFSKPNYLTIPPI

SEQ ID NO: 194740 - protein, 354 aa, Oryza sativa
  Clone ID: PAT_MRT4530_90757C.1.pep
MATPSNPANVSPVMPGLIVLLKGWIVWANNVSSSDAGQAQVLDTGNLIVKGKGGSGIKRRLTLDFDGNLRLYSLMNDGTWSVTWIAFPQLCNDEIGRGASGIVYKGILTDRREVAVKMLGSQALLEWKQRFNIALEVAKGLAYLHHECLEWVIHCDVKPENILLDENLEPKIADFGLAKLLNRGGSNLNVSRIQGTRGYLASEWVSSLPITAKVDVYSFGVVLLELLKGARVADLETNKDEEVEMIKWPINNLQARAMMELVVSCLEEDRGKRPTMESVVELLVSVDENRLNNLGVFYLDRSDRVVVAGQTGVYRAAASADLDGSTEVSTSVRPKASGQSDRRNIFGQTVIRRI

SEQ ID NO: 194741 - protein, 126 aa, Oryza sativa
  unsure (1)..(126): unsure at all Xaa locations
  Clone ID: PAT_MRT4530_90758C.1.pep
CKLAYXMPPKKEAGGKSKQIQAAKQQSKGSSGGGKGKKKKWSKGKTREKVQNMVIFDKATYDKLLKEIPSAKVITPSIVSERLRVNGSLARRAIRELSEKGLIKSIAHSHRQLIYTRPTTALKEFL

SEQ ID NO: 194742 - protein, 53 aa, Oryza sativa
  Clone ID: PAT_MRT4530_90759C.1.pep
MRITARIALLHVQLGIETKGNTKHAFPSKETRDPTKTDSDSDPASLTAQIPAV

SEQ ID NO: 194743 - protein, 186 aa, Oryza sativa
  Clone ID: PAT_MRT4530_9075C.1.pep
MKLVRSFSPLIVFSLLLLLTSSTTSRASLVDDACTSFAASHADIGYAYCVRFFQSDEGSATADRYGLAAIAVKISAATARGTAKRIADLQDLERDKRRKDCLSACGEVYDSAVDSLDEAAKGIASRSADGLRDAVTVLSAALDTPDTCEDGFRELGLASPLVAEDEEFSKESAIALGVTSALSPPS

SEQ ID NO: 194744 - protein, 124 aa, Oryza sativa
  Clone ID: PAT_MRT4530_90760C.1.pep
MRRMRRSSDAQKRADLKRRGPEPRRQMEAHPATGTATTTRAAKGWTAAPKQRKERAPQGNSGYKGMVKVSGEDGHWGGTGPATHKRKWVEWRGRPKYGNIRPRSLWRYGTARPQLGPVQAQAGL

SEQ ID NO: 194745 - protein, 61 aa, Oryza sativa
  Clone ID: PAT_MRT4530_90761C.1.pep
HEGFSTNRNTCVRATVARVQRRSPRPPTPQSSPAPTTESCLYGGSGGAGDDQLSSPTPEAS

SEQ ID NO: 194746 - protein, 363 aa, Oryza sativa
  Clone ID: PAT_MRT4530_90762C.1.pep
MPGAATAAVVDSRRCTRHAEGPATVLAIGTANPANICPQDEFTDYYFGLTKSEHLIELKDKMKIISRVDIASIEVPKLAESAARKAITEWGRPATDITYLIFSTYSGWRAPSADLQLATLLGLRPTVSRTILSLHGCSGGSRALQLAKEIAENNHGARVLVALSELTLVCFSTPDESKIVGHGLFRDGAGAIIVGANPLADGERPLFEMVAASQTMIPGTEHALGLQATDKGIDFHLSIQVLTVIKDNIHQCLLDAFQSVGNKDPNWNDLFWAVHPGGRAILDNIEGKLQLEPGKLAASRHVLSEYGNMSGAMIAFVLDELRRRREKEEGVQQQPEWGVMLAFGPGITVEAMVLRNPFSTGIN

SEQ ID NO: 194747 - protein, 131 aa, Oryza sativa
  Clone ID: PAT_MRT4530_90763C.1.pep
MESSTAQLIYGSVDHWRLHDGGVAVVERWTSNIKVEEQRDMPLGSMAIAWWMIDGSCLDKQCRGEWCLLVYLFTHAQHMMGIDNELEDQSDDGLREDDDCLCHADFGVHCLQTFAPTSKECATQPVNFLHA

SEQ ID NO: 194748 - protein, 74 aa, Oryza sativa
  unsure (1)..(74): unsure at all Xaa locations
  Clone ID: PAT_MRT4530_90764C.1.pep
RAHTGSGGVWASHIDSIIMAVLESPREIELKPQXEGGGYILDGGSVRESLQXLETDVCTGLAAYIVMLRIFAPA

SEQ ID NO: 194749 - protein, 569 aa, Oryza sativa
  Clone ID: PAT_MRT4530_90765C.1.pep
MDFELRKAREKLEREQRERVQRAKDKADRERRAKAEAARRRDALEASHRERRLDAARAQEEAQQKMEEVMQLGKGISFLHMFEALRYDGPGDKIKLPPSSFKELSDEGALDKGPMYFRLSKVRDSVPGAPQDNDADEATCCGVLEFTAREGSAELTPHVWNNLFRGDSPDVPLIEVRYVSLPKGTYAKLKPEGVGFSDLPNHRAVLETALRNHATLSENDFVVVNYGQLQYKLKVLELKPASSVSVLETDVEVDIEGPDSVLDNVENQHVLVPLETGKVESGVVEEGKFRYYKFLVDEGMGEKVASRHANIEVKIETYTSGGDTDIYVSRHPLVFPTQHRHEWSSHEMGSKVLILKPRDASLSSGTYSIGVYGFKGTTKYQLSVAIKDVLNGQRIGEQASASSSVDVDSVVCKNCKRYISNRTSLLHEAYCVRHNVVCMHDGCGVVLRKEEATDHVHCNKCGQAFQQREMEKHMKVFHEPLQCPCGVVLEKEDMVQHQSSTCPLRLIVCRFCGDTVQAGGEPLDARDRLRNMCEHESICGSRTAPCDSCGRSVMLKDMDIHVIAVHQKS

SEQ ID NO: 194750 - protein, 170 aa, Oryza sativa
  unsure (1)..(170): unsure at all Xaa locations
  Clone ID: PAT_MRT4530_90766C.1.pep
MAWRHDDGGDTGAPTKRVSGEEGFEVRLDVGWTWPWRPRADELQDASPWDVGETLMAELVLFMWMCMFIDRQTSVSCMQNHRRQQRGNDGXVGDEIGLDAIILYPXESARTGRSCAISDSVGEREQRGGGWAEGPARPMRDDKYLVLLLEDNFVIRXKMRDLRCTFSKTK

SEQ ID NO: 194751 - protein, 137 aa, Oryza sativa
  unsure (1)..(137): unsure at all Xaa locations
  Clone ID: PAT_MRT4530_90767C.1.pep
MADGVAQLSHDVACVSGEEGFEVRLDVGWTWPXVRKADELQDASPWDVGETLMAELVLFMWMCMFIDQQTSVSCMQNQTRQRRGGDGXVGDEIGLDAIILYPAESARTGRSCAISDIERVREGERRGEEEADVWGPR

SEQ ID NO: 194752 - protein, 139 aa, Oryza sativa
  unsure (1)..(139): unsure at all Xaa locations
  Clone ID: PAT_MRT4530_90768C.1.pep
MVPRLSRFAVVARNFLAVGTKHDGRQLVFKEVYHEECAKQINGKYHTNFTSRQVYHKLKAQWKVIMEAKNLSGANFDDAKDKRAKFINVPIRWYDEMEFIFQDKHATGEFNXCLPDQENNTGSSSSSRRAKGRKSDKDN

SEQ ID NO: 194753 - protein, 73 aa, Oryza sativa
  Clone ID: PAT_MRT4530_90769C.1.pep
SLASTLLIPTWSRLAFHGADFGWGAPAMSGPVTLPEKEVILFLAHGEERKSINVLLGLPVSAMDAFQELMDEI

SEQ ID NO: 194754 - protein, 62 aa, Oryza sativa
  Clone ID: PAT_MRT4530_9076C.1.pep
LIRKNQALQSTFTPFNQVGLWHGIKYFSIKWLLFVLCKRSRPSHRWACPVFVNHHMKSRYGL

SEQ ID NO: 194755 - protein, 250 aa, Oryza sativa
  Clone ID: PAT_MRT4530_90770C.1.pep
MAPRLSRFAVVARNFLAVGTKHDGRQLVFKEVHHEECAKQINGKYHTNFTSRQVYHKLKAQWKAKDKRAKFINVPIRWYDEMEFIFQDKHATGEFNVLQTPYDHPMTEDDDFIGDKNGSPGDVDPSSNYDSDCLPDQENNTGSSSSSRRAKGRKSDKGKRVRTDDNVVYEITGATDNMSETMCFTHITHPNESLFKIIDEMTEYPVMVRLELQTYLATHENIAAMLKGRPLDSIKEYVTQWIIQNYPAAM

SEQ ID NO: 194756 - protein, 230 aa, Oryza sativa
  unsure (1)..(230): unsure at all Xaa locations
  Clone ID: PAT_MRT4530_90771C.1.pep
IRSICNHPPPLAELSGILIICSNPVPLYKCSRASSLHVVNRRARPTRFEESLFLQKIAAGHKIARVGVTRYYKERILADGRQLVFQEVYHEECAKQINGKYHTNFTSRQVYHMFHKLKAQWKAKDKMAKFINVPIRWYDEMEFIFXDKHATGEFNVLXTPYDHSMTEDDDFIGDKNGSPGDVDSSXNYDSDYLPDQENNTGSSSSSRLVKGRKTDKGKRVRADDNVVYEI

SEQ ID NO: 194757 - protein, 610 aa, Oryza sativa
  Clone ID: PAT_MRT4530_90772C.1.pep
MGREDDAGDHQRPEPQAKEENSSTSASPSHDPKITQEEKRWEDEDDEYEEEEEELLYDVDDGEDAPAEACVLTGVKHSDGSIYKPKPPYSLLGLYHLDDASETRLEPMRLTAPTDRCRPCLLDCTVHYGCAMIQIFSVRIAALSATAATAPVQIYGFMAARDLYEPLRNYVFRCSRDDPFVLPGHYSDPDSLISLSGPKRGVSLQNPAMIEYDLKIKRGEEEQDDLQLIDGVAVFSDLTPFHGVYTQRIHGVHGAVDISLALLREGMECTIEIRVPEMDGSALINRRIAFFSAFLVAYWTWIIYKRKNSDPIRYSLLEKNRERIVYLQKLYCGEERHCICELRMGKTVFFKLCHKLRSMGALRDTWHCTVEEQIAMFLTTVGHHKKNGDIGFHFTRSGETVSWYFNKVLYAIGHLGTEMLRHRTHDTPSKILGNQRFDPYFKDCIGAIDGTHVPCNVPSRISDRFRGRKPFPTQNVLAVVDFDLMFTYINAGWEGSAHDSTVLRHSLEHPNGLRVPEGKYYLADAGNMAGNNVVWQPQVVEEMLRYYKEKILADGRQLVFKEVHHEECAKQINGKYHTNFTSRQVYHKYSQVEGSVEGDYGGKEFERGQF

SEQ ID NO: 194758 - protein, 78 aa, Oryza sativa
  unsure (1)..(78): unsure at all Xaa locations
  Clone ID: PAT_MRT4530_90773C.1.pep
MLGGISRELGAPHVGPPMSPVFPGSRRGALERPAATLPAFCTVDIPPGGGGVCYWLARSXYKIAPPPPLCMYVVWFLK

SEQ ID NO: 194759 - protein, 94 aa, Oryza sativa
  Clone ID: PAT_MRT4530_90774C.1.pep
IFKRAGKHCTIHTTKGEPPPGDLRQKHFFFRAGDHGTIQQTNRGTPPGDWKTPKRPRRTFIKYPPRTKTEGVKAQGPPRGHPQKKPKYKKRGGD

SEQ ID NO: 194760 - protein, 72 aa, Oryza sativa
  Clone ID: PAT_MRT4530_90775C.1.pep
VYDWMTERRDRFSLSSSDMAIQLDLIAKVRGVSHAEEYFEELPDPLKDKRTYEAEKVSILIDEMMERNVAFD

SEQ ID NO: 194761 - protein, 174 aa, Oryza sativa
  Clone ID: PAT_MRT4530_90776C.1.pep
MARNVPALPPTAVVTGEITGVDIIGGRPGSWLALAQSVAARGSWPKSASSDSQEVIEAGVEHPSKSSHRRRSSASLSSVKPRGGGFGSDDNRDKEVQGRRGGELDGGKKQGHGSGAARHSALVRLILSSVARCSGAKRDLTGDGRRGGTRAQWGDAFGCAPAVVGKRDAELRRV

SEQ ID NO: 194762 - protein, 60 aa, Oryza sativa
  Clone ID: PAT_MRT4530_90777C.1.pep
SRVLVIKFGLAVGVVVGISESLRYRQVGLGVLQDQVDSIRSSFVIIREYNKVACGKYGFG

SEQ ID NO: 194763 - protein, 101 aa, Oryza sativa
  Clone ID: PAT_MRT4530_90778C.1.pep
KKMLSPQQPTVLFANKHFIATITTGGKKKLPHLLTPTFLHILCIHYLSKLQLLDLLTMSIKYYIRLGMRLGFYVLSMQYLKLIITFLQLFIYEFYTLSARS

SEQ ID NO: 194764 - protein, 93 aa, Oryza sativa
  unsure (1)..(93): unsure at all Xaa locations
  Clone ID: PAT_MRT4530_90779C.1.pep
HEGQLEAAAGGEREDLASAGDTSEGGRCSGTGGGAAAGTRLSVGLMRALGGSCGCTSSQRSMSRRAEAETIEPXTIRPTASRKFNQLRTIMMI

SEQ ID NO: 194765 - protein, 83 aa, Oryza sativa
  Clone ID: PAT_MRT4530_9077C.1.pep
IGEEIRGRMGFLLTRSCLVLFSAAAGYPLFSLIDVECYVISLCSSLKDCIICVLLSVYDLKDLHMVRIYYYIRVSAYLNITKL

SEQ ID NO: 194766 - protein, 88 aa, Oryza sativa
  Clone ID: PAT_MRT4530_90780C.1.pep
AGTTLPKAKIPRSEVPIHSPVCRRHYGTGADLLLIILTNTTDDAGPAAEAYNCCAEDFPSRTKCGQAACSIRSSMRHNHDTIENFQTQ

SEQ ID NO: 194767 - protein, 185 aa, Oryza sativa
  Clone ID: PAT_MRT4530_90781C.1.pep
MPPTPTPTATTGAVSAAAAAGENAGFRLVGHRRFVRANPRSDRFQALAFHHVELWCADAASAAGRFAFALGAPLAARSDLSTGNSAHASLLLRSASVAFLFTAPYGGDHGVGADAATTASIPSFSPGAARRFAADHGLAVHAVALRVADAADAFRASVVAEYVFHKPIRWNKVTECCRPKRAHLG

SEQ ID NO: 194768 - protein, 74 aa, Oryza sativa
  Clone ID: PAT_MRT4530_90782C.1.pep
GRADECPFKYHDELVSVEPPSRNTNRARWHASLACRRGRNKRQHGGTSRDTGRALNATASVVTPATAGVESIIQ

SEQ ID NO: 194769 - protein, 119 aa, Oryza sativa
  Clone ID: PAT_MRT4530_90783C.1.pep
HASAHACAQAASPLSLPSPHGSPTTSPTAAPLPLPTGDAAPSPLSPPASPFPLPLPPLALSLPPPVGGGPFPPRRGASTAPLVAISGRSAAWWLRIWLLSLPLNISLAQRWVDDFPARR

SEQ ID NO: 194770 - protein, 372 aa, Oryza sativa
  Clone ID: PAT_MRT4530_90784C.1.pep
MAEDAPSAAAAEGSQHASAAEGGSAAAAASAAPAAKAAEALLPSLSIWPPSQRTRDAVVRRLVQTLVAPSILSQRYGAVPEAEAGRAAAAVEAEAYAAVTESSSAAAAPASVEDGIEVLQAYSKEVSRRLLELAKSRAAPSPAAAAPAEGAASESEAAAAPAPAEDCYVVLNGIPVISAMFFHKCELMIKQDNCIFALAIPLTAVVTSVTVTARVEVELSGGWDEIGLGLSGFGVLFSFLGIIMLFDKGFLAIGNILFVSGVSLTIGPKSTVQFFTKPKNHKGSIAFGIGFFLVLIGWPFFGMLAEAYGFVKLFRGFWPTAAVYLQKSPTFGWIFHHPLVTSVQGKTSPGVIVALLLELDHSKGCRVTSKET

SEQ ID NO: 194771 - protein, 323 aa, Oryza sativa
  Clone ID: PAT_MRT4530_90785C.1.pep
MDGDLKKLRVRFPGLGKGNKGGRQAPTILQEEDTSLQRAPMNSSDGYDAAFAATIAAAAYAIASQEEKLAAQKKPVPIQGQSTTPPVQSPVKRGESMKKPTGGSKISRWFSGKEPAEDNDDGPANVSVRRPLKPAQRKQEDIASDQKVPPKMVDSSLSAKKGSGSSSKLQDKKGSKKFEQEQVIQKTPSTTRPATSYHSRRNGDGTVGLTAVGPADTKTNEWEKAKLASITEEYKNMMDTIAEWENEKKVKAKRQKEQKEKVLDQKRAKALEEYSQEITRINKIAGGARTMAEERKYNDEKKIKEKANKRRLSEKAPRACACF

SEQ ID NO: 194772 - protein, 78 aa, Oryza sativa
  Clone ID: PAT_MRT4530_90786C.1.pep
MKKVKNKIKGLFDRTRYSLQRSKAATVTNVASPRQSLQSVNRTTPKSLWNGGFNEIPELIVLSCSVHLLTMTNLFNYS

SEQ ID NO: 194773 - protein, 129 aa, Oryza sativa
  Clone ID: PAT_MRT4530_90787C.1.pep
MAGGKKKKKTTAGRKVRMTQEEIDSYINYQTIRMPDEIFPIVSKERLACTDLSDHKGDLPVPMDQIDDYVAKIFREINQIDDQFMKHRDGILNQYYRKGYAMRKATDDDDDEQEEEKKEETSWTRFFCT

SEQ ID NO: 194774 - protein, 145 aa, Oryza sativa
  Clone ID: PAT_MRT4530_90788C.1.pep
RRSRQSPAPRSSMDPNGPVVGVPTPSRRTQGQPHRTPPPPAPPTPRSPSSGGRRQTRDTRPGQPSAEPSPTHPPPRPMARRTATPARNTRPSHFSPAHRGPPQSPGMRTKEPRAAPESTRVTRPVPSAQRRHATNGRAHAQHPGA

SEQ ID NO: 194775 - protein, 397 aa, Oryza sativa
  Clone ID: PAT_MRT4530_90789C.1.pep
MLTCIACSKQLAGGAPPLREQSDDADDAAVARGAGECATPSTRQAIKALTAQIKDMALKASGAYRHCKPCAGSSSSSPAAGARRHHPYHAYADSGSDRFHYAYRRAGSGGDATPSVSARTDFLAGDEEEEEEEEEEEGTTADGSEDDEAKEWVAQVEPGVLITFLSLPEGGNDLKRIRFSREIFNKWQAQRWWAENYEKVMELYNVQRFNQQTPLPTTPKSEDESLKEDIPATPPLNSERLPHTLHRSLTGGRTTGYGQPDSLGHQHNLGNGHRQQHHHCYTGHQCYGSVGLASTPKLSSISGAKTETSSMDASMRSSSSPEEVDRSRELSVSVSNASDQEREWVEEDEPGVYITIRALPGGIRELRRVRFSREKFSEMHARLWWEENRARIHDQYL

SEQ ID NO: 194776 - protein, 56 aa, Oryza sativa
  Clone ID: PAT_MRT4530_9078C.1.pep
VKRLAQLDSLRLRVQADPSRTCYQPIRAASFDFPPPTPSVQQPSNELKQTMHTLSP

SEQ ID NO: 194777 - protein, 193 aa, Oryza sativa
  Clone ID: PAT_MRT4530_90790C.1.pep
MAWSHMLLPGGQGFYGSMFHVPRFCYILSYHCNLAKRRQLGKIANLAPVPIEQPQFDRVPADRKSFSSSCCTDHMGCHHPGIDDENNEHVIGIERHPVNGYILTLRHGALADVIFDHIQTLDLEGRLLIAIHRYNHGIIRGTMCPCSRIIALGFLYFSLDCKICMINFLLFKGHEQNESQISLLCFQGNHFWK

SEQ ID NO: 194778 - protein, 84 aa, Oryza sativa
  Clone ID: PAT_MRT4530_90791C.1.pep
LSDGILKSALRKWKAILINLKFPLRFDSIRTCSRTAGEKAHGRGGEEQADRPPVCPRPLSRRRRAPERGEAAEVFRPCLRRERK

SEQ ID NO: 194779 - protein, 43 aa, Oryza sativa
  Clone ID: PAT_MRT4530_90792C.1.pep
MAGTGMDILAYSACVPFNKRVPGGDKSLLTPLASVDPRGGVSS

SEQ ID NO: 194780 - protein, 53 aa, Oryza sativa
  Clone ID: PAT_MRT4530_90793C.1.pep
QVVKKKDCRVWPGPVEPQNVRFRMRVLRFSILSDGSLYLPSCPVTLFLNEARF

SEQ ID NO: 194781 - protein, 826 aa, Oryza sativa
  Clone ID: PAT_MRT4530_90794C.1.pep
MAKMIEALGFGVLLKVLACSCATTSGSYSPSRCLLFLFLRYYLWFLRSEQLFSVPHCSCSCSCAISGSYLFLQSLRSEQVSPELRPLAYMTILFLVLVLALLRLHLRARDGGGATGGGGSENNNINRGNTIASSSTGAFSSSLLAILRSPLSDLYPRSGHPTASADLQRLKRLLSRIQATLEDAEEQGLQDNYVKLWLKELKDLALDAEDVLDDYRYELLQSQVQELQGDYPRKRKHMDNDEEDNDSIDERINEMINRFEEISRDRDALKLRFEDGHKIVDRGNWMKSRPTSHLIDESLVFGRIDEKEDIIKSVLSHQDMEPSGIVVLPIVGMGGIGKTTIAQMVYNDSRVRKHFEHSGWIHVSPTFDVHKLTIAITESLTMKNYGFTQLSLVHGVLLEEVQGKKLFFVLDDLWNECESSWQDFLSPLRHAQTVTILVTTRSKEVARLVQTVQLYHLGCIPDKDCWLLFQHYAFGNQHESEQSILVQIGRKILQKCGGLPLAVKSLGCLLRSTMDEHAWMEILESELWELDEEDNIFPALRLSYYWLPTRLKPCFLLCSLYPRNLGFTKDDIIQLWVAQGYIYSTNGKTCREIGNEYFNELHARSLIETYRKPVCWDINKRKLCLSRFTYNERQGFSSKKRERQGFSSRNEGRQGLSSKEKAREAMFYLKNKLQCETYLKKPSTSIGRFKLHDVIFDLAKSFTRGEQCTAMFGTTCMPPVADLKLQFPNPSFMYLRSLILNSNHDVSGMVYSIGNLRHLRYLSLNCKMRELPESNSDCSKLQSLTLLILPSENMPCKPCHAFVADCPKLKQWCEKHEFNYFQMCLL

SEQ ID NO: 194782 - protein, 836 aa, Oryza sativa
  unsure (1)..(836): unsure at all Xaa locations
  Clone ID: PAT_MRT4530_90795C.1.pep
PLWLLCEGSSHQDRIASIQCDNGREFDNSAARTFFLTNGVHLRMSCPHTSPQNGQAPXSFWVEALHTATHLINRHPTKTLDRHTPHFALYGTHPSYSHLRVFGCKCYPNLSATTPHKLAPRSTMCVFLGYPLYHKGYRCFDPLSNRVIISRHVVFDEHSFPFTELTNGVSNATDLDFLKDFTAPAQAPIGATRRPAVAPTTQTASSPMVHGLERPPPCSPTRPASTPGGPSSPDSRLGPPSPTPALIGPASTSPGPPSAGPAPSASTCPAPPGLPRLDGPHLPPAPHVPRRLRSVRATGAPTPLSGLGISPVVNDHVMTTRAKSGHHKPVHRLNLHAAPLSPVPKTYRAALADPLWRAAMEEEYNALLANRTWDLVPRPAGVNVVTGKWIFKHKFHADGSLDRYKARWVLRGFTQRPGVDFDETFSPVVKPATVRTVLSLAVSRDWPVHQLDVKNAFLHGTLQETVYCTQPPGFVDSAKPDMVCCLNKSLYGLKQAPRAWYSRFATFLQSIGFVEAKSDTSLFILHRGNDTVYLLLYVDDIVLTASSRTLLHWTISALQGEFSMKDLGALHHFLGVSVTRNLAGLVLSQRQYCIDILERAGMADCKPCNTPVDTTAKLSSSDGPPVADPTDFRSLAGALQYLTFTRPDISYAVQQVCLHMHDPREPHLAALKRILRYIRGSVDLGLHIQRSSACDLAVYSDADWAGCPDTRRSTSGYAVFLGDNLVSCAEAEYRAVANAVAEVTWLRQLLQELHSPPSRATLVYCDNVSAVYLSSNPVQHQRTKHVEIDLHFVRERVAVGAVRVLHVPTTSQYADIFTKGLPTPVFTEFRSSLNVC

SEQ ID NO: 194783 - protein, 1006 aa, Oryza sativa
  unsure (1)..(1006): unsure at all Xaa locations
  Clone ID: PAT_MRT4530_90796C.1.pep
MALSGMRGLSVFISDIRNCHNKEQERLRVDKELGNIRTRFKNEKGLSPYEKKKYVWKMLYIYMLGYDVDFGHMETVSLISAPKYPEKQVGYIVTSCLLNENNDFLRMVINTVRNDIIGRNETYQCLALTMVGNIGGKEFSESLAPDVQKLLISSSCRPVVRKKAALCLLRLYRKNPDVVNIDGWSDRMAQLLDERDLGVLTSVMSLFVSLVSNNAEAYWNCLPKCVRILERMARNQDIPQEYTYYGIPSPWLQVKTMRALQYFPTIEDPGARRALFEVLQRILMGTDVVKNVNKNNASHAVLFEALALVMHLDAEKEMMSQCVALLGKFIAVREPNIRYLGLENMSRMLLVTDVQDIIKRHQAQIITSLKDPDISIRRRALDLLYGMCDVTNAKEIVEELLQYLNTAEFAMREELSLKAAILAEKFAPDLSWYVDVILQLIDKAGDFVSDDIWYRVVQFVTNNEDLQPYAAAKAREYLDKPALHETMVKVSAYLLGEYGHLLARRPGCSPKELFAIINDKLPTVSYESYIDVEIQQRAVEYFELSRKGAALADVLAEMPKFPERESALLKKAEDAEVDTAEQSAIKLRSQQQTSSAIVIADQPPVNGSVPASNHLTLVKMPSQNITEESNVAYEEPPVEIPKENGAPVEVESKVENIPETNIESKVEPPAAHPASQADLLADLLGPLAIEGPPAAVEQNPVQGLETNQSPVGDLALATLEDQSNSVQPIVNVEEKFHILCSKDSGVLYEDPHIQIGLKAEWRAHHGRLVLFLGNKNTAPLLSVQALILPPSHLKTELSSVPDTIPPRAQVQIPLEVVNLRASRDVAVLDFSYTFGTSLVNVKLRLPVVLNKFLQPITLSPEEFFPQWKALNVQNLKVQEVVKGVKPLPLPEIASLFMSLHLAVAPGLDNNPNNLVACTTFFSETTRAMLCLVNVXTDPQDRTQPRLTVASGDQYLTFELKEYIKEHLIDIPXGTNSFTSRSGAPTVASAPVPAAYNDPGAMLAGLL

SEQ ID NO: 194784 - protein, 1679 aa, Oryza sativa
  Clone ID: PAT_MRT4530_90797C.1.pep
MSSASSTPPSPTSAALDTAADAVAKAVRAAFQVLPGMEIDPTTANTVVDSAATRASDAARNALSPVLSTLLSGTPATTGAPATTGAPAGAGIAATSVAATHGVAPATTAPLPGTMPADLAALFASARLAHGVHTPEPTVPDFSRPPATPLDDAALAALHAQAVSVLNIKALVPVTLDVAATNYTRWRGLFLVALGKYALTDHVLSDAYHFDRADWVQMDCVVLAWLFGTISFDLLQDVLATDTTARLVWRGLEYQFLGNSEQRALNLTTEFHTFQQGDLSVDEYCRKMKTFADSLGDVGEPVRDRTLVLNTLNGLSEKFNNLRSLVPMQRPFPTFAELRSLLRLEELSKPNHAASASSAVFLATGSTTNGGKGANPAHGTGYGAGNQGGGGKGNSNRRRRGGNGGGGGGGGGGGNSNQGGGSTVPAQAQGAQWRAGSQWPSPQNPWAGTIHMWPGPLGRGVLGPRPAPSPFAGAALAGPSGGPLPGQVYPAPVPYQTAAGLGQQAQLGGVGQFGPSQPPTSVALQQPLGWFGGAPSQWDQASLAGSFNTTTLHQPATNDWYMDTGATAHMTSDTGILSLSHPPNPNSPSHIVVGNGSTIPVTSIGHSKICHPNCSFTLRDILCSPAIIKNLISVRRFVIDNWCSVEFDPFGFSVKDLRTRTVIARFNSSGPLYSLLHALPPPPAATALLANSSTDLLWHRRLGHLGHDALNRLAAVVPMTRGDLTGVCHACQLGRHVRLPFASSTSRASTNFELFHCDLWTSPVVSASGFKYYLVILDDCSHYVWTFPLRFKSDTFTTLSHFFAYVKTQFATNIRSIQCDNGREFDNSAARTFFLTNGVHLRMSCPHTSPQNGKAERILRSLNNIVRSMLFQAKLPGSFWVEALHTATHLINRHPTKTLDRHTPHFALYGTHPSYSHLRVFGCKCYPNLSATTPHKLAPRSTMCVFLGYPLYHKGYRCFDPLSNRVIISRHVVFDEHSFPFTELTNGVSNATDLDFLEDFTAPAQAPIGATRRPAVAPTTQTASSPMVHGLERPPPCSPTRPVSTPGGPSSPDSRLGPPSPTPALIGPASTSPGPPSAGPAPSASTCPASSTWETVARPPTPPGLPRLDGPHLPPAPHVPRRLRSVRATGAPTPLSGLEISPVVNDHVMTTRAKSGHHKPVHRLNLHAAPLSLVPKTYRAALADPLWRAAMEEEYNALLANRTWDLVPRPAGVNVVTGKWIFKHKFHADGSLDRYKARWVLRGFTQRPGVDFDETFSPVVKPATVRTVLSLAVSRDWPVHQLDVKNAFLHGTLQETVYCTQPPGFVDSAKPDMVCCLNKSLYGLKQAPRAWYSRFTTFLQSIGFVEAKSDTSLFILHRGNDTVYLLLYVDDIVLTASSRTLLHWTISALQGEFSMKDLGALHHFLGVSVTRNSAGLVLSQRQYCIDILERAGMADCKPCNTPVDTTPKLSSSDGPPVADPTDFRSLAGALQYLTFTRPDISYAVQQVCLHMHDPREPHLAALKRILHYIRGSVDLGLHIQRSSACDLAVYSDADWAGCPDTRRSTSGYAVFLGDNLVSWSSKRQHTVSRSSAEAEYRAVANAVAEVTWLRQLLQELHSPPSRATLVYCDNVSAVYLSSNPVQHQRTKHVEIDLHFVRERVAVGAVRVLHVPTTSQYADIFTKGLPTPVFTEFRSSLNVC

SEQ ID NO: 194785 - protein, 58 aa, Oryza sativa
  Clone ID: PAT_MRT4530_90798C.1.pep
ARGSPSARRRRAAAAATSSMSSRRDALSCDRTAAVRASEIGIIKRVNYLCLVWYFFLN

SEQ ID NO: 194786 - protein, 96 aa, Oryza sativa
  Clone ID: PAT_MRT4530_90799C.1.pep
MPGGLSLLGLGPLHAHPRCHKRVSFSLIGRPSKPFFSRSTNFFFPWGRWQPIQPFSGCFLTCFLIYKGPILFFLKFLLYLFEPLFWCPFPRNLHIQ

SEQ ID NO: 194787 - protein, 63 aa, Oryza sativa
  unsure (1)..(63): unsure at all Xaa locations
  Clone ID: PAT_MRT4530_9079C.1.pep
XKLDILKXGFRHNAIPQNXVVKMPLPTDAKPXLCHIGHFTXFSPFFLLQXTKIPPXSPAVFXL

SEQ ID NO: 194788 - protein, 55 aa, Oryza sativa
  Clone ID: PAT_MRT4530_907C.1.pep
LRPWPSLGRAPPHRHRCSAASAPIPPSPPPPPPSSTPPGRCRSPSSAVPPAPPIF

SEQ ID NO: 194789 - protein, 90 aa, Oryza sativa
  unsure (1)..(90): unsure at all Xaa locations
  Clone ID: PAT_MRT4530_90800C.1.pep
QTSSLPPSSLALVGIPALLTGLPISFLSVPRASSSKXRSSTLEPPPCRSPTAATTGHHDSCAQAREREGTSAAGRVWRSSAPAAALASAR

SEQ ID NO: 194790 - protein, 137 aa, Oryza sativa
  unsure (1)..(137): unsure at all Xaa locations
  Clone ID: PAT_MRT4530_90801C.1.pep
AYAWALAWTGHVVHVAIPASRGEYVRWNNFLDVLPYPQGLGPLLTGQWNLYAQNPDSSNHLFGTTQGAGTAILTLLGGFHPQTQSLWLTDIAHHHLAIAFIFLIAGHMYRTNFXIGHRIKDLLXAHTXPGGRLGRGP

SEQ ID NO: 194791 - protein, 61 aa, Oryza sativa
  Clone ID: PAT_MRT4530_90802C.1.pep
VELVVTSSFSRVFLFIVCYVRKLGHGGLYSVSHVILMDGFMFGNGIGVFLQLILIKKLCLF

SEQ ID NO: 194792 - protein, 56 aa, Oryza sativa
  Clone ID: PAT_MRT4530_90803C.1.pep
MAASFPSGMRTSRHKEVDRGVLSGLRSEAEARGSSTPVTQDAERVFAVMDRESAWG

SEQ ID NO: 194793 - protein, 139 aa, Oryza sativa
  Clone ID: PAT_MRT4530_90804C.1.pep
FSSSSSAAAAAASSPSKRRGSKGRMGRGRGVSSGGGQSSLGYLFGGGETAPAAKAKPAAAAEKETTPAPVKKAAVAAAASPSAAEKMKEIPAGIQSTQANNYFRAQGQNCGNFLTDRPSTKVHAAPGGGSSLGYLFGGK

SEQ ID NO: 194794 - protein, 475 aa, Oryza sativa
  Clone ID: PAT_MRT4530_90805C.1.pep
MAMDPDAAEWPCIIQALPALPPSPSSTGVPRLPTMVQALPAATDPPPAAARLRRGAEPPSPRRTRSGGAPEWTPAETLALVAEVAAVDDGWSRSVSAFQKWAIVAENLAASRGRAARGRGRGRAASECRRRWEALAAEYGVVRRWEVRARRKAGLPADFDAEVYGAMEALTLVEEALLADATAGAGGAEIGEKSAAAAEVGEGDEVEAGEEDGNGDRGEVGEEDEGEVGEDGEEEDGNEMVEVEDDGNADDKDAQPDGGNAAASDDLGMFLVSFSFSCSSAWTFRTIIVPWAWLTVEIICILDGDDPQSRFSAPLDLLKCKVCETGANNEGKKSQTDACELANKLQENAQHIHMLLKEEAGENENHNLAISSDSMETTRQKGDELIKSLGGLVSYLNQFTDLIKENGFENVVLIKCCRFVADIATCIGITISQRHCVLQCLAICCSGAFLCNCAAEWQEFSKAKLCLSEETPMAW

SEQ ID NO: 194795 - protein, 44 aa, Oryza sativa
  Clone ID: PAT_MRT4530_90806C.1.pep
GQRPLDVVRSEICHVCEFIAWSSTYIYVRHLYCLRYSLIFRWVL

SEQ ID NO: 194796 - protein, 205 aa, Oryza sativa
  Clone ID: PAT_MRT4530_90807C.1.pep
MASEEETSRLFRIRRTVMQMLRDRGYLVTELDIDLPRGDFVARFGDPVDRDHLVFSRHKKDNGADQIYVFFPKDAKPGVKTIRSYVERMKQESVFNGILVVQQALSAFARSAVQEVSQKFHLEVFQEAELLVNIKDHTLVPEHELLTPEQKKTLLERYTVKETQLPRIQITDPIARYYGMKRGQVVKIIRASETAGRYVTYRYVV

SEQ ID NO: 194797 - protein, 217 aa, Oryza sativa
  Clone ID: PAT_MRT4530_90808C.1.pep
MASEEETSRLFRIRRTVMQMLRDRGYLVTELDIDLPRGDFVARFGDPVDRDHLVFSRHKKDNGADQIYVFFPKDAKPGVKTIRSYVERMKQESVFNGILVVQQALSAFARSAVQEVSQKFHLEVFQEAELLVNIKDHTLVPEHELLTPEQKKTLLERYTVKETQILSLTQLVKCVNLPRIQITDPIARYYGMKRGQVVKIIRASETAGRYVTYRYVV

SEQ ID NO: 194798 - protein, 263 aa, Oryza sativa
  Clone ID: PAT_MRT4530_90809C.1.pep
MASITLLSLAPAATLLHLPASTSLSTSFVAAPGPISGRRSVVLRARPRRCVTVVCSAAAAEAAEAEPAEKFRLDNLGPQKGSRRRPKRKGRGIAAGQGASCGFGMRGQKSRSGPGVRRGFEGGQMPLYRRIPKLRGIAGGMHIGLPKYVPFNLRDLARGGFKDGDEISLESLKSRGLINPSGRERKLPLKILGDGDVSVKLNIKAGAFSASAKEKLEAAGCTLSLVPKRKKWLPQSYLKNQARAEEYFSKKNGGAGESGEASA

SEQ ID NO: 194799 - protein, 124 aa, Oryza sativa
  Clone ID: PAT_MRT4530_9080C.1.pep
PHSLLRRHHVHQHGQLLRWDPRTFSSLNPLASSLSHHLAACVVRGLNRCSIPGIQNLLHKNMPPSPPQKEQKDVIPASPSGDEILPMNKDHPGPKKGPLTATSLSTKRSAWRHRRIVAHRTSLK

SEQ ID NO: 194800 - protein, 324 aa, Oryza sativa
  Clone ID: PAT_MRT4530_90810C.1.pep
MAAGLLLGDATALRGDLTVRGPQLRLCNWAPRPRWRPPGAGAADSCCLLFRARARRRGHGHVARFAASASGAGGEEAGEPSEDEAQREWEAEMARRLKEAEEMEELERTAEELQSQAAAEAPDESEEEKRERVRRELQKVAKEQAERRATAKQMFDLGQRAYGRGMYGRSIEFLEAALTIIRPSSLLGGEIQIWLAMAYEANRRHKDCIALYKELESTHPMISIRRQAAELRYISEAPKLKISNDEVVTIPQIGSSWDWYAGTWSDKIKEQEDKKRKMLNGDHACIAATASLFNIMATISSMISDVISSSMQAIVFLLMVIDSL

SEQ ID NO: 194801 - protein, 87 aa, Oryza sativa
  Clone ID: PAT_MRT4530_90811C.1.pep
VTKRWYHSSYLIVLPSIQQNLRLLTSATPLKASDLSPFYAYWIIQNFHCLQNRFTGCLIVSCLLAPATEPYNSRYLVGVKTLPSGFI

SEQ ID NO: 194802 - protein, 81 aa, Oryza sativa
  Clone ID: PAT_MRT4530_90812C.1.pep
GQGGHWRGKQKIGGPTTPPRGANKGRFPFLGEKKRKTSRGEGKPKNSRKPRRRRKGPLRPPPPLRVWGPHFGHGKGHSERV

SEQ ID NO: 194803 - protein, 50 aa, Oryza sativa
  Clone ID: PAT_MRT4530_90813C.1.pep
LTSHVMTLDEELVYDVPSRGTLGSELALHVAIPHLTSDLAFDSVIDCYHG

SEQ ID NO: 194804 - protein, 49 aa, Oryza sativa
  Clone ID: PAT_MRT4530_90814C.1.pep
PSVRERVGERVGGNTMYYTGVWLPIEEQKYKCFLESCKGKYERLKLYLV

SEQ ID NO: 194805 - protein, 109 aa, Oryza sativa
  Clone ID: PAT_MRT4530_90815C.1.pep
FSGPKREPGNKRGVKFLPVFFQSPQDQKAVNLWGSKYQRPPNLVFSKKIWPNQESSEKNFFPNGAAPFGRLIPLGGSFSPGPKGVILGPPPTSGQQLCFVGTNFGFGDF

SEQ ID NO: 194806 - protein, 83 aa, Oryza sativa
  Clone ID: PAT_MRT4530_90816C.1.pep
SAYGSVICSSTTGNVHLPQNVTRTELPREMTPVRPRGISPNTSRASRGGFALRGFPFAHTCKIKHARANGSNHNKQDGKIQRI

SEQ ID NO: 194807 - protein, 258 aa, Oryza sativa
  unsure (1)..(258): unsure at all Xaa locations
  Clone ID: PAT_MRT4530_90817C.1.pep
MDGRESTVASGSNFSSFYVQHRGIGVPGGSGHPAGLHGPPPGGYRQHLDAVSAGYPFQPPHIGGSHIGQGYHHVDASAPVAQHGSGGGGGGMDIGMGVEMSADAKGDQGSGAGQDEPVKKKRGRPRKYKPDGAVTLGLSPSSSTPHSSTSAMGTMVTTPGSGFGSGAGSGGSGSGALTEKRGRGRPPGSGKMQQLASLGKWFLXSVGTGFTPHVIIISPGEXDXAARIMSFSQQGPRAVCIISATGAVSTATLHQDST

SEQ ID NO: 194808 - protein, 1524 aa, Oryza sativa
  Clone ID: PAT_MRT4530_90818C.1.pep
MDGVDDGLICSTSCYKMCGHADKSSIIDGEIGWPSMEISPCSTPYGTPLFSRESSCSSFASCFSSLDDYLVETDSEEEIEVLDTGQLHPGILFSDESMEQRKADSVQVEEYQVSHSAVVNDDSSISIPTNQNNSSGQLQLEIHLDATNEKSVPSNAILDANVTDPHQEVISNGGLIEACYGVPVDDIDLKQSNILDGEEITSLPMADNEMTPLDDQIMDQIDDMKEISSIVYNSTISAEQHVNSGSEFEKGNESSDNLYPLVMPSFDTDPHIWLPPDPVNKDDDTDIVANNDDNSDNNAAEGLSLSDGEADKNWLDIVASLSWRTALLVKPDANVGNAMDPCMYVKVKCIASGSIEQSEVINGLVFKKSAAHKQMRANMKNPRLLLLQGVVGHSSAGLLSMDSMKQENDHLEKILSDVIIKCKPDAILVEKAVSRNNVLATPNLIKQCESLHFEKFIEEHNITGGGKRSAKTLLFLEGFRKPLGCTILLKGSTSEELKKVKRVLHFTVFAAYHLILETSFFADQRLFATGKNAMEKGNCLKTDPQLLVPCTAAPSSKICSDIAQNSDPTQQALNSLASDGEYVNQDDFVDPEKSVCMHDSKIETSREYADRKLDDSNNIQSYSSLPVPDPSRNLIGDISLDFAKLTSCDDFAGSTSGAPSNNGVLQMNGADGKDCLEAISDGISTETRTSLDSQNILISMSSQHIRNQAICEQSHLSRITYYGYFDTSLGRYLQDSLLNEKHSCLSCGEPPEAHMYSYTHHNGTLTVLVKSLPLDVTLSGKDQGRIWMWTRCLRCNGKPTQRVIISSSARNLSFGKFLELSFSTHSAAKKLSTCGRLLHRDCLRFFGMGPKVAMFRYSSVEIYSAFKPPLTLEFHNPNKRECLEVEFNNVYPKTFDLLVKSGTSAHGILGLNWLHQLLLLGIYIWDVRLQHILQYCKANAASSDSTIHIKTPENKPKNYEITSVHGDTLCLTNVGMERREERIDTCHSFDSSFGGMILENEQLTEKSVIQEPGSHVSPDHGEDGGSHEVDKYAHISDSFCLEKSIDLPVKNELPELVRGNEMYPVAKPSKCFHVFLNLLDFSNDARKWIWGNFSHLEKEYKKELQGGFLDKFHLINKYIPTFSSLAQLKSQMDMVQFIVGPGGSILSIVEEEASSMIAYALLISEQQGMYSEAAIVKDEVIAGRKIDKVTPINSIGDTPVPSAILSPNDSLEQDHNLSRNVSSLSSEESTSGFYDSFLSALKDLHPEFCLNNEKLTLKSKYTVLCIYAKQFYDLRKICCPSEIAYISSISRCKEWNAQGGKSKAFFSKSMDDRFIIKQIKKTEFDSFLKFGLEYFKHFGVSQASVNPTCFAKILGIYQVKEIRNGKETRTNFMVMENFLFGRNIIRRYDLKGALFSRYVLDSKNPENVLLDQNFIEDMRAMPIYIEGKTKNLLERAIWNDTAFLSRMTVMDYSLFVGVDKQKKELVFGIIDYLRQYTWDKQLESWVKTSLFVPKNLSPTVISPKEYKIRFRAFMSQYFLSVPDA

SEQ ID NO: 194809 - protein, 373 aa, Oryza sativa
  unsure (1)..(373): unsure at all Xaa locations
  Clone ID: PAT_MRT4530_90819C.1.pep
PCENSLHQSILKPSTANFXYHKESALQEPARGGSCPXVPFLANALTMQAVSLLLPSGXQVSSIHVFTPRYSDANPQMSMKGVDGRSASNNQFFHQGQNGSIGWFARSPLEAPAINNFPRLDRSHNSSLGALAPPMSIPRIDHPSGASPIGSCTVDPRSSAVNNATFQPIPSFKGSSTVNQSIGTSILKVKKNEDLDGNCPGFALDPFCASRPQHQVAISSDEEQTECLMFEHSARHRENPHFANDKGPKNFNLNEALSDGQEDYLVEQDGGSVSSLPQSKASGFPWLIKTTDTCTRPSDLQNPRKVFAHSNRIVIDLNSNTDRKEAALTIHSLSDSASTSLDCGVKKESQDCGIKKDEAFGDITTKTXVACNT

SEQ ID NO: 194810 - protein, 88 aa, Oryza sativa
  Clone ID: PAT_MRT4530_9081C.1.pep
MSSRRSSRGSISEEEINELISKLQSLLPNSRRRGSSQASTTKLLKETCNYIKSLHREVDDLSDRLSDLMATMDHNSPGAEIIRSILRS

SEQ ID NO: 194811 - protein, 1707 aa, Oryza sativa
  Clone ID: PAT_MRT4530_90820C.1.pep
MDGVDDGLICSTSCYNMCGHADKSSIIDGEIGCPSMEISPCNTPYGTPLFSRESSCSSFASCFSSLDDYLVETDSEEEIEVLDTGQLHPGILFSDESMEQRTVGSVQVEECQVSHAAVVDDDSSISIPTNQNISSGQQQLEIHLDATNENSVPSNVIIDANVTDPHQDVISNGGLIEACYGVPLDDIDLKQSNILDGEEITSLPMADNEMTPLNDQIMDQIDDMKEISTIVYNNTISAEQHANSGSEFEKGNESSENLYPLVMPSFDTDPHIWLPPDPVNKDDDTDIVANNDDNSDNNDSWVQSSFNISFDAKRNKTSCEDQLQKAMSEVMNGQFKILVSRFLAAEGLSLSDGEADKNWLDIVASLSWHAALLVKPDANVGNAMDPCMYVKVKCIASGSIEQSEVINGLVFKKSAAHKQMRANMKNPRLLLLQGVVGHSSAGLLSMDSMKQENDHLEKILSDVITKCKPDAILVEKAVSRNNVLATPNLIKQCESLHFEKFIEEHNITGGGKRSAKTLLFLEGFRKPLGCTILLKGSTSEELKKVKRVLHFTVFAAYHLILETSFFADQRLFATGKNAMEKGNCLKTDPQLLVPCTAAPSSKFCSDIAQNSDPTQHALNILASDGQYVNQDDFVNPEKSVCMHDSKIETSREHADRKLDDSNNIQSYSSLPVPDPSRNLIGDMSLDFAKLASCDDFAGSTSGAPSNNGVLQTYGADGKDCLETISDGISTGTRTSLDSQNILISMSSQHIRNQAICEQSHLSRITYYGYFDTSLGRYLQDSLLNEKHNCLSCGEPPEAHMYSYTHHNGTLTVLVKSLPLDVTLSGKDQGRIWMWTRCLRCNGKPTQRVIISSSARNLSFGKFLELSFSTHSAAKKLSTCGHLLHRDCLRFFGMGPKVAMFRYSSVEIYSAFKPPLTLEFHNPNKKECREVEFNNVLRKWRLLLSEAENKIQILKSGGSGQALGENTKVSVHEELFLEVNRILAQEKYEFGVYPKTFDFLVKSGTCAHEILGLNWLHQLLLLGIYIWDVRLQHILQYCKANAASPDSTIQIKTPENKPKNSEITSVHGDTLSLTNVGMERQEARIDTCHSFDSSFGGMILENEQLTEKSVIQEPGSHVSPDHREDGGSYEVDKYAHISDSFCLEKLIDLPVKNNELPELARGNEMYPVAKPSKCFDIFLNLFDFLSNDARKWVWGSFSHLEKEYKKELQGGSLDKFHLINKYIPTFSSLVQLKSQMDMVQFIVGPGGSILSIVEEEASSMIAYALLISEQQGIYSEAAIVKDEVIAGRKIDKVTPINSIGDTPVPSAILSPNDSLEQDHNLSRNVSSLSSEESTSGFYDSFLSALKDLHPEFCLNNEKLTLKSKYTVLCIYAKQFYDLRKICCPSEIAYISSISRCKEWNAQGGKSKAFFSKSMDDRFIIKQIKKTEFDSFLKFGLEYFKHFGVSQASVNPTCLAKILGIYQVKEIRNGKEARTNFMVMENLLFGRNIIRRYDLKGALFSRYVLDSKNPENVLLDQNFIEDMRAMPIYIEGKTKNLLERAIWNDTAFLSRMNVMDYSLFVGVDKQKKELVFGIIDYLRQYTWDKQLESWVKTSLFVPKNLSPTVSSPKTTTGLELPSGGHVSCRYCTPSGKLSSASVFIEMEMSYMVNPQTGYHIQTEFELSLSKIILIFRITKECRSLFNHCDVVTSTNKNLTGPRGGTIFFRRGKN

SEQ ID NO: 194812 - protein, 49 aa, Oryza sativa
  unsure (1)..(49): unsure at all Xaa locations
  Clone ID: PAT_MRT4530_90821C.1.pep
RKKKLKRAAATQPAFCKVDIPNGTGGVRNRXGYLRTQRTGXTETKGRCV

SEQ ID NO: 194813 - protein, 225 aa, Oryza sativa
  Clone ID: PAT_MRT4530_90822C.1.pep
MRQVLQEQTTSTSIIPSGLVHGSICIGYFTRSKGLMLFVANMCTRLCCTPASRHRPIICDVFAESKSSRRALQDDRLRRFYIISGRKGMVPAGSARRGSAPVPACGRRGGGGGKRVEAIQAGARYAEPLRRRWQRRRVVKLRAQSGEAASASEKACGKREKTAVAIGMRKEGGGRGASRKRRHRRHARRKEGGKPADGAVTARSGEGGATTGRFSTAAGRCRLTL

SEQ ID NO: 194814 - protein, 494 aa, Oryza sativa
  Clone ID: PAT_MRT4530_90823C.1.pep
MRMKGVGSVMVGVVFLALLILVHRWVGLDASFLRDSSMVRTSTRQWHPHHNISTPPLMTLPPFSCGNGTAAPATCPATPPSPPPTSKPATGGEPAASCPDYFRYIHDDLRPWRGAGITREAVERGRRHAYFRLVVVSGRAYVETYRRSYQTRDAFTQWGVAQLLRRYAGRVPDVDIMFACDDRGRVRAADFAAAPADAPPVFRYCRDATTLDVVFPDWSFWGWPEVNIGAWPATLEAVRRESARVRWPEREPFAFWKGNPGVARIRGELMKCNPASDGKDWNARLFSQDWNHAIHNGFKDSSIPKQCLHRYKIYIEGEAWSVSEKYIMACDSPVLFVNTPYQDILSRGLVAGEHYWPINRTRMCESIRAAVDWGNAHPAAARRIGEQGSRFVREQMAMDYVYDYMFHLITEYAKLLRYKPTVPANAVEICAESMACAAAAGRERECMDESVEGFVAGFDPCSLPPPFTEEEKREIAAKEEEVLRKVAKLEEENM

SEQ ID NO: 194815 - protein, 87 aa, Oryza sativa
  unsure (1)..(87): unsure at all Xaa locations
  Clone ID: PAT_MRT4530_90824C.1.pep
GVTLVTGGFWGRPMWGTFWVWDARVELSVFILSCLFTLGCTCRFAKAVLVRTXLLIVNPVLGLIDIPXIIKCVSVNWWNTLHQPGKY

SEQ ID NO: 194816 - protein, 140 aa, Oryza sativa
  Clone ID: PAT_MRT4530_90825C.1.pep
GLLVFLSRKSLQFCVYFLNIRQHRHVRSTQVHISAREGKISSPPLNHFNPLPRHWHKGVTKLILSKETPKQLLVDFQHNHECTVYDVVACKGAIQTNFDHIYCFFVLHHTLFCTPPEFLYRLRNAELKPHIKLIWRHAQH

SEQ ID NO: 194817 - protein, 68 aa, Oryza sativa
  Clone ID: PAT_MRT4530_90826C.1.pep
MVVNNFTGPGIGLGFGIGCGFGVGWGFGASFDVGELAVSASPLLSQYSCLNEAALLGTSSMTHSKPLG

SEQ ID NO: 194818 - protein, 82 aa, Oryza sativa
  Clone ID: PAT_MRT4530_90827C.1.pep
GGAGAVNSATAVRFSCCGSRGLENGEEPPDRRATPLHRQILESLATGWNQLVDAEAVKMGDVCVFRFNDSDDELTLEVHVLS

SEQ ID NO: 194819 - protein, 50 aa, Oryza sativa
  unsure (1)..(50): unsure at all Xaa locations
  Clone ID: PAT_MRT4530_90828C.1.pep
IAAKPSHGAPEPPRRQPPQPQPPQEPAPPSXPPPPPPPPPPPSLTTGSFR

SEQ ID NO: 194820 - protein, 57 aa, Oryza sativa
  unsure (1)..(57): unsure at all Xaa locations
  Clone ID: PAT_MRT4530_90829C.1.pep
TQTPFKIPPLEYASISLNPXFTNKPLNNSXXNPPYPIFNFPQLPPPLSFFPLKNLXS

SEQ ID NO: 194821 - protein, 155 aa, Oryza sativa
  Clone ID: PAT_MRT4530_9082C.1.pep
MGRQRRGFELITWLEEDSSKEHVGMPPPSLCCAEKKILEGVVAPLPAVVGASPTVVSEVVVGWRRHRHRQIRRQPRLPSTTVVSEVSPSSGGGGWRAANGDGAAVADGEQLMGMGWQQWRWRMASGGWGWGGGAGGWGWGWGGGGGEDQLSPTAS

SEQ ID NO: 194822 - protein, 188 aa, Oryza sativa
  Clone ID: PAT_MRT4530_90830C.1.pep
KQTRPDEVKVLLAFSSHGRCLLMFVGCLLSPTAALTTAAANCFTVAAAASPLPPPRHALPGSLALLAGRRVPAHRLRLLLPPTGMPWPPRPTCSTQCPTGPRPPGTPPCLAASAAVTTPQPWSFLAACQNERPSDVSFQVTFLARRASSFASNIINTVNVQHASFRCYFAIHPNVPNQTTGNAKKLTG

SEQ ID NO: 194823 - protein, 116 aa, Oryza sativa
  Clone ID: PAT_MRT4530_90831C.1.pep
RCRTLPTTGSFHIRAVASPVALASSTAPVTGRQLSSRDEHRRGSGFHAIFPISHSGAAVGHGWSGGHGEGCGGGRPRAVVFSSVVVGLEGNAQIRRISMLVRKTVEKLLGIDGEMQ

SEQ ID NO: 194824 - protein, 129 aa, Oryza sativa
  unsure (1)..(129): unsure at all Xaa locations
  Clone ID: PAT_MRT4530_90832C.1.pep
KXXPXSKGSKKIXAPTXVXAAXKXVVXXGXQEXGTRGKPSFLFSHQAFIXLPSPLANCYRKTLFDFYAPHTYRNLTRETGWPRFLFTLLMMMIYTGFLSLSAGVLGIYFFCYKVQNGGNCAVGFLIMGS

SEQ ID NO: 194825 - protein, 52 aa, Oryza sativa
  unsure (1)..(52): unsure at all Xaa locations
  Clone ID: PAT_MRT4530_90833C.1.pep
MASLSNALLLLFTALCLLARRAVADYRSWNSAHATLYGGGXDASGTMAGACG

SEQ ID NO: 194826 - protein, 81 aa, Oryza sativa
  unsure (1)..(81): unsure at all Xaa locations
  Clone ID: PAT_MRT4530_90834C.1.pep
LIPAHSTTLHTHWXCQAWKKAXQSSLHNLESFIGSNGNYILSLTTLPGRVGVDPWNSGPVXLEXVPXFPYRLTSYLRRLWA

SEQ ID NO: 194827 - protein, 84 aa, Oryza sativa
  unsure (1)..(84): unsure at all Xaa locations
  Clone ID: PAT_MRT4530_90835C.1.pep
MSTPSNNLLIQNFMRFLYDLFVVISVSPFYINIFLFNAVLFXPLYTPNDGCTFNLTLQFTEYYPNISPFVSFXSLLFYSNFYSF

SEQ ID NO: 194828 - protein, 1517 aa, Oryza sativa
  unsure (1)..(1517): unsure at all Xaa locations
  Clone ID: PAT_MRT4530_90836C.1.pep
WECCLSYRLSVAHPSPDPSKSLARDSWHRFSSKKRSHGWXDFAPSAAAAYLFPPHDSLVIAADISVLAEAASFAEADSRFTWKVLNFGTFREMVRTQKIMSPAFFPAANAGGSDCGLRISVYQSNVSGADHLSVCLESKEPLVQATSGSSASALPSSAGGSGVPDGDRGCWCLFRVSILNQKPGGSHIHKDSYGRFGADNASLGWGDYIKMDDFLAADGGYLLDGAVVFSASVHVIKESNSFTRSLPMIAGMSGAGSGRAGARKSDGHFGKFVWRIENFTRLKELLKKRKITGLCIKSRKFQVGNRDCRLIVYPRGQSQPPCNLSVFLEVTDPRNSSEWSCFVSHRLSVINQKLEERTIVKESQNRYSKSAKDWGWREFVTLTVLFDQDAGFLVQDTVVFAAEVLILKETATIQELSDEDSEACSSGSGCQIDSLPKRPSFTWKVENFLSFKDIMETRKIFSKYFQAGGCELRIGVYESFDTICIYLESDQPSGFDPDKNFWVHYKMAIINQKNSAKTVCKESSICTKTWNNSVLQFMKVSDLLDTDAGFLVRDTVVFVCEIIDCCPWFDFSDLEVLASDDDQDDLSTDPDDFIESEDSEDMSGDEEDMFRNLLSRAGFSLTYGENYTQPQVTLREKILTDARAIALASVRFLTGLRVYLDNPAKVKRMLLPTKVSTRAGGKKDVSKCDSSSTSLISLLMGVSVLKQAIIDLLLDIMVECCQPSEERPAYVSSSASSKTSPDSNGASSPPELNVEGELTECAFSNKYERLKPGNDDIHHRLSVQNTDKCTNDIPARVLEQSCSPPEVSGADLLEDEGSDQASRTKWPEQSEELLGLIVSSLRALDSAVPHGCPEPRRRPQSVQKIALVLEKSPKKLQPDLVALVPKLVDSSEHSLAACALLDHLQKPDTEPSLRLPVFNALSELEFDCDIWKQASFHALELLADSNDEPLVEAITYVLKAASQCQHIAQAARAVRWRLKDLGTEVPLCVLDFLSKTVHSWSDVADALLKDIDSDCEPDSSCLSMSCSTSSTDEFSAEGMHSLQGQAVHGKDHLSDVFILIEMLSIPRLFVEVSQVLQRALLRGAFGLQLVAMVLERRHSHRLSLKSGTGTMVNDSQNKQVLLDGQFEHLPVQEDDFTSVLALGEVLSLSTETRVQDFVRMLYAIIFKIYTEDHYRYRILKGLVERATNTSDSCRAVDIDMDVLVFLVKEEFGIARPVLNMLREVAEVAQADRANLWHQICATEDENMRLREDMDMEQTKFTKEKDVLMQQLTESEAANAHLRSELKAEKDRFVREKKELSEQMLEMENQLEWVRSEKDEQIVKLTADKKNLHDRLHEAETQLSQFKAWKREELKKITKEKNALAERLKGVEASRKRVDDEFKRFVAEAQTREEIRKSLEGEQYIHTLETSIQEEMARHAPVYGVGVEALSLDELETLTNIHERGLRQIHAIRQRKGSSHRLSAPSLPHVPGLYSSPPSMAVGLPSSLIPTSSVAPNGAGIHGNGHMNGSMGSWFNPT

SEQ ID NO: 194829 - protein, 139 aa, Oryza sativa
  unsure (1)..(139): unsure at all Xaa locations
  Clone ID: PAT_MRT4530_90837C.1.pep
MMMVEVRSHPYIGMIAEQLIAEFEVSSDEHAYWNWQSKPAIIKLMKLSLPIEVLSKKNLEHEYLDHGVLTLLKNWFEPLPDGSMPNMNTRSAXVKSLADFPIDLEQYDRRELLKKSGLGKVIFFLSTSDEETTXNRKLA

SEQ ID NO: 194830 - protein, 537 aa, Oryza sativa
  Clone ID: PAT_MRT4530_90838C.1.pep
GTTTYVTSSLSLSLSPLPAARAHARRRRDVAVAVAAMDPTPQSHPILAYVLSRLPSLLPVSPSLSTPRARDIEQPSPRAPSGAAEFDLVSRMPGLRHPSVLSAMTRAVADVSSARDALRLLGPRPDHELVDSARAFLRSHAAEEAEEEEEDEKVAKSREVVRLDEAHESYGGLLREGQERLDRVYRTAMRGRDMQVVAAAHGGGGEEEAGVVDDEVVRVLRDAEEGKAVERLLLADRQLRHLPEQLGRIRGLLVLDVSRNQLKNVPDAIGGLEHLEELRLASNALVSLPDSIGLLTSLKILDVSGNKLRSLPDSISKCRSLVELDVSYNVLSYLPTGIGQEMARLEKLWVHLNKLRSLPSSVCEMRSLRLLDAHFNQLRGLPAGIGRLAALESLNLSSNFSDMRDLPASFGDLLGLRELDLSNNQIHALPDCFGRLQRLERLRLDQNPLAVPPKEVVAGGVGAVKEYMARRWRDARAEEERRGSAVAESPRVSTPKEWLVRSVSSLGSWVSDVTRYGAGQDKAAAEEEEDAYLQQNL

SEQ ID NO: 194831 - protein, 70 aa, Oryza sativa
  Clone ID: PAT_MRT4530_90839C.1.pep
GRVGGRHPTRTLKIPMDLPLKAPSLSLLYQPCHSPYTCSPFSLMEPGNYDISHPEEHVSLCRLYHQVPFS

SEQ ID NO: 194832 - protein, 878 aa, Oryza sativa
  Clone ID: PAT_MRT4530_9083C.1.pep
MKSVAKDNDSDDSSQRLLATIRDHFGTVNCVRWAHHGRYLASGSDDQVIQIHERKAGTGTSEFGSGEPPDVENWKVVMTLRGHTADVVDLNWSPDDSTLASGSLDNTVHIWSMANGICTAVLRGHSSLVKGVTWDPIGSFIASQSDDKTVIIWRTSDWSLAHRTEGHWSKSLGSTFFRRLAWSPCGHFITTTHGFQKPRHSAPVLERGEWSATFDFLGHNAPVVVVKFNHSMFRKHLSSGQDAKAAPAGWANGASKASSKEHQPYNVIAIGSQDRTITVWTTASARPLFVAKHFFTQSVVDLSWSPDGYSLFACSLDGSVATFHFEAKELGYRLRDAELDELKKNRYGDVRGRQSNIAESPAQLLLEEASAKQSASKSPVKQREYRRPDGRKRIIPEAVGFPSNQDMSNRSQNQGVDFSSLDQRMILGENGTRPSYSASGNCNNCGVRGRSGITARTNISESLVIQKASAGAGSDGRLSIEQSGSVVPGSLASCSSLSIHVFNKKDNEDSLPVRLEAKPVERSAGDMIGLGGAFSTKETEITCTRGTETLWSDRISAKVTVLAGNANFWAVGCEDGCLQVYTKCGRRAMPAMMMGSAAVFIDCDECWKLLLVTRRGLMYIWDLYTRTCVLHDSLASLVTSPDEAAGKDTGTVKVISAKFSRCGSPLVVLASRHAFLYDTSLKCWLRIADDCFPASNFASSFSSTQGGELGKLQIDIGKFMARKPIWSRVTDDGVQTRSHLETQLAASLALKSPQEYRQCLLSYIRFLAREADESRLREVCESFLGPPMGMVDAASSADLKNPSWDPDVLGMKKHKLLREDILPSMATNRKVQRLLNEFMDLLSEYEAAETNVEQMDVTPTPPPPPPAAATEGNNNGAS

SEQ ID NO: 194833 - protein, 122 aa, Oryza sativa
  unsure (1)..(122): unsure at all Xaa locations
  Clone ID: PAT_MRT4530_90840C.1.pep
PMPEPCHPLYNACSPMPNPAPTVQCLVPANLQACSLMPEPCHPLYKPACLSLTPTPYTPPTYXPQPECLTPTPTPYTPMPKPEPCLTTYNATCPMPXPTPDACTSLHAQCLTPSPYTPNANS

SEQ ID NO: 194834 - protein, 50 aa, Oryza sativa
  Clone ID: PAT_MRT4530_90841C.1.pep
GPKHGIKTYSQEVTDFTISYRAYAKGKAVLFCSGQKQINPTLTWEKRRGC

SEQ ID NO: 194835 - protein, 135 aa, Oryza sativa
  Clone ID: PAT_MRT4530_90842C.1.pep
PAATSPPCRWPPSRPHAVAPPQASSRRRRADPGKGGPDPAMGAPNPLSPPHLAAVAATDHAGGELRRLRPSRRGGRRYEEKKASLPPSLPAAGFAAGGLQRQRGGGREGEKARAARVFRPRATRRESDAGGFFAF

SEQ ID NO: 194836 - protein, 124 aa, Oryza sativa
  Clone ID: PAT_MRT4530_90843C.1.pep
MQRKIKAGTSSSLFGRHRHLSLLRLTPSRLVARSDGKRPFFSSQHLCHSPIPFTALSSFLKSSRSGFHCFELRARSGSGNRGPHASCGYGLPNGACRPCPHRRPHLDKAPCPLYDLSGFAKNTS

SEQ ID NO: 194837 - protein, 421 aa, Oryza sativa
  Clone ID: PAT_MRT4530_90844C.1.pep
MAMEPPPLFLCPISMELMEDPVTVATGVTYDRRSIERWFFKYGKTTCPATMQRLASFDFTPNHTLKRVISSWLDRASSSSSPSTAGSPATTSSSSSSNAMERERLPSVLAGIEETPFKATALKNLKSCMAGDEAAREDFVACGGIQVLGRVMTQALEESSAGGDFSAFRTCEEAAAVLATLPLSDDASVELLLKPECIRPVSVLVQRGSAEARLHAMSMISKISRASVRDWTAEVDVDDMVKALLELLSDGASAKLSSRALDVLLDVTARYSRGARRAKAVELGAVRVLAELLLDADRHVAERSLLLLKRMCKCPEGRLAFAEHGLAVAAVARAVLRVSGLATRLAVNVLWLVACAPAPAERVLEDMVVGGAVAKLLALMQVESSPSTKDKAVKMLRAHGAFWRQYPCFPTDLKDYLKSLN

SEQ ID NO: 194838 - protein, 105 aa, Oryza sativa
  unsure (1)..(105): unsure at all Xaa locations
  Clone ID: PAT_MRT4530_90845C.1.pep
LLPISLSLLSPPIPHLASPPPPPPPPPGPRPPTPAAPPPPPPPPRPDPTRGSPRRPVRPPESPXPSPAPPPRLGGSFNHLSARYTPKSFRGVMKNLFTCRPPEGS

SEQ ID NO: 194839 - protein, 70 aa, Oryza sativa
  Clone ID: PAT_MRT4530_90846C.1.pep
GPSKRGLYTGMYTRWGTKLGDTHSYTRPKERIQQGNGETISHSLLYKTWLLRLLCTLGAAMGSDRRYRLR

SEQ ID NO: 194840 - protein, 314 aa, Oryza sativa
  Clone ID: PAT_MRT4530_90847C.1.pep
MSMGHYSEQRPGFEVTKDWNGADQVMIRSPRGASVLVSLHGGQVVSWRNDRGEELLFTSSKAIFKPPKAMRGGIPICFPQFGNCGTLEQHGFARNRLWAIDDEAPPLNHNDNNGKVSVDLLLKPSEDDLKCWPHCFEFRLRVSLSTDGDLSLVSRVRNVNGKPFSFSFAYHTYLSVSDISEVRIEGLETLDYLDNLSQRERFTEQGDAITFESEVDRVYVGSPSVIAVLDHEKKRTFIVRKEGLPDVVVWNPWDKKSKTMADFGDEEYKQMLCVDAAAVERAITLKPGEEWTGKLELSAVASTNCSDHLDYPCS

SEQ ID NO: 194841 - protein, 657 aa, Oryza sativa
  Clone ID: PAT_MRT4530_90848C.1.pep
MLFFHHLHCSLPHSRQLSLSLSASASRIHHPWLLAKSTSCAAYCRILLFENILGSCMLQIYAFLVYMGGNLREQKVYHMEGADEERPLIHHLPPQEQCSQYTCDGTVDIDRRPALKHSTGNWRACFFILGAEFTQCLCFSAVVKNLVRYLTSVLQESNVNAARSVSTWIGTCFFTPLIGAFLADTFWGRYRTIVICLSVYSIGMLILTTSASLPFLLHDSYNNGDDIRRVVAYLGLYLIALGAGGIKPCMSALGADQFDGADPVERVTKGSFFNYYYFSNNMGTLLSTTVLVWVQDNIGWGIGFATPMLLMGFGLSMFVAGRRVYRYRKLGRSPLTRVSQVVVAAARNHRLKLPDDSSLLHELPSLTEGGYRIQHTTRFRFLDKAAIPSDSDDNSPVQPDPWRLCTVSQVEELKMLLRVFPVWASLLVFFVVTAQMSSTLIEQSAAMDGRVGPFTVPPASLATFNVVAVLIWVPVYDAVLVPLARRATGNDRGLSHLQRIGVGLALSAVAMAYSAQVERRRRRPAAEEEAMSIMWQAPCYLVLGMAEVFTSIGMLEFFYERSPGSMKSLGTSLAHLAVATANYLNSGVLGVVVAATTRGGGAGWIPDNLDEGHLDYFCAAVALVRSDWASAAGQTGGDLMPQESIAGDGSGVNLEIR

SEQ ID NO: 194842 - protein, 68 aa, Oryza sativa
  Clone ID: PAT_MRT4530_90849C.1.pep
LMSSLCQVIMDPSSTDMICQFDEAVSCGTAVCFMNKLDLNLKKKKKRASRSSRIEALRTGAGDVMLLY

SEQ ID NO: 194843 - protein, 975 aa, Oryza sativa
  Clone ID: PAT_MRT4530_9084C.1.pep
MITEKPSWIRHEGLQIFSIDIQPGGIRFATGGGDQKIRIWSMKSVAKDNDSDDSSQRLLATIRDHFGTVNCVRWAHHGRYLASGSDDQVIQIHERKAGTGTSEFGSGEPPDVENWKVVMTLRGHTADVVDLNWSPDDSTLASGSLDNTVHIWSMANGICTAVLRGHSSLVKGVTWDPIGSFIASQSDDKTVIIWRTSDWSLAHRTEGHWSKSLGSTFFRRLAWSPCGHFITTTHGFQKPRHSAPVLERGEWSATFDFLGHNAPVVVVKFNHSMFRKHLSSGQDAKAAPAGWANGASKASSKEHQPYNVIAIGSQDRTITVWTTASARPLFVAKHFFTQSVVDLSWSPDGYSLFACSLDGSVATFHFEAKELGYRLRDAELDELKKNRYGDVRGRQSNIAESPAQLLLEEASAKQSASKKVSSVQQFQSPPKVSTDAPNPSTSVPNQKAPEALPEDEKKTAGSTADDINKAPRLSSPVKQREYRRPDGRKRIIPEAVGFPSNQDMSNRSQNQGVDFSSLDQRMILGENGTRPSYSASGNCNNCGVRERSGITARTNISESLVIQKASAGAGSDGRLSIEQSGSVVPGSLASCSSLSIHVFNKKDNEDSLPVRLEAKPVERSAGDMIGLGGAFSTKETEITCTRGTETLWSDRISAKVTVLAGNANFWAVGCEDGCLQVYTKCGRRAMPAMMMGSAAVFIDCDECWKLLLVTRRGLMYIWDLYTRTCVLHDSLASLVTSPDEAAGKDTGTVKVISAKFSRCGSPLVVLASRHAFLYDTSLKCWLRIADDCFPASNFASSFSSTQGGELGKLQIDIGKFMARKPIWSRVTDDGVQTRSHLETQLAASLALKSPQEYRQCLLSYIRFLAREADESRLREVCESFLGPPMGMVDAASSADLKNPSWDPDVLGMKKHKLLREDILPSMATNRKVQRLLNEFMDLLSEYEAAETNVEQMDVTPTPPPPPPAAATEGNNNGAS

SEQ ID NO: 194844 - protein, 56 aa, Oryza sativa
  Clone ID: PAT_MRT4530_90850C.1.pep
SIRHCAGVVIDVCKDVAAWPGRHLLEDGEHRRYFGLRTAEHRVIEFECTSQREYEM

SEQ ID NO: 194845 - protein, 128 aa, Oryza sativa
  Clone ID: PAT_MRT4530_90851C.1.pep
MPSRSMMLKTPPSSVQEAAAVAAPLAVHGGDGRWSSGGVATATATGCGGAATATGGAIVGAQRRQGRGKLLLLPLPLPLPQSCWWLGFLDRGLVRQKELGGGDARRRGSHIRCCVVGDGDDVLLPLYC

SEQ ID NO: 194846 - protein, 470 aa, Oryza sativa
  Clone ID: PAT_MRT4530_90852C.1.pep
MVGSVHVNGSVNGGNGTEERLDELRRLLGKSDGDLLKIVGIGAGAWGSVFAALLQDAYGRFREKVQIRIWRRAGRSVDRTTAEHLFEVINSREDVLRRLIRRCAYLKYVEARLGDRTLYADEILRDGFCLNMIDTPLCPLKVVTNLQEAVWDADIVVNGLPSTETREVFEEISKYWKERISVPVIISLAKGIEASLDPIPRIITPTQMISSAKHMTFRSTSSVFLSAGVPTENILYLGGPNIASEIYNKEYANARICGSNKWRKPLAKFLRQPHFIVWDNSDLVTHEVMGGLKNVYAIGAGMVAALTNESATSKSVYFAHCTSEMIFITHLLTEQPEKLAGPLLADTYVTLLKGRNAWYGQMLAKGELSPDMGDSIKGKGMIQGISAVGAFFELLSQPSLSVQHPEENKQVAPAELCPILKRLYRILIKRELSTRDILQALRDETMNDPRERIEMAQSHAFYRPSLLGKP

SEQ ID NO: 194847 - protein, 119 aa, Oryza sativa
  Clone ID: PAT_MRT4530_90853C.1.pep
MAADAPMPLGMTVTVEETPYDLDDPTTSKLDADHQGFTTTRPCRTLKDVLFSIFTVAMVITYVCLVIHDDLSLIQTLFFLVVWVIQWLVIFVMTYSAFDDANQEYRKRYNLVVVNAWFC

SEQ ID NO: 194848 - protein, 806 aa, Oryza sativa
  unsure (1)..(806): unsure at all Xaa locations
  Clone ID: PAT_MRT4530_90854C.1.pep
MGEETLVAMPLAPPHHHHHHAHLPALPHLAAPPPPPPPPAETELTEQREEEVPVDDVVEAAADVPRREEGLVVHGGEDVYYARRMLQGVVLRPPPHLPQPEAPPGLTRALSAPAPDGYVEEEEEQRPVERSASVNSAASAVVVDVASIGRFFRDRRDVLSSAITRRISSLKEASSSPPPPVGMDTYGVQEIHLPNVKVTVRLKDAIEADAEEDDAVGGGGDDGYSFSGSHIKGRVSFFSRSGCRDCAAVRAFFRQSALPYVEINLDVFPEREXAGASARVPQIFLNEKLLGGLVVLNSLRNSGEFERRVRDLAGRRCPDTAPRVPVYGFDNDPGKEGGDREDAMVGIVRVLRHRLPIQDRIVRLKLVKNCFSGADMVDGIVNRVRXTLSXAVEIGRELARKHFIHHVFRENDFEDGSQNLYRFLEHDPAIPKYYNFIRGATNDGEPKLAAAIGQRMTKIMVAILEAYASDDRRHLDYSRIAASEEFRRYANMVQELQRVDMSALPAEERLPFFLNLHNAMAIHAVVRVGQPGAIDRRSSSNFQYVVGGHPYSLATIRNGILRSNRRQPYTIAKPFGSSDKRLELVQGKVNPLVHFGLCDATRSSPIVRFFSTQGVEPELRHAARKFFLNGGVEIDLESRTVHLTSIIKWYSVDFGQDRETLKWILNYLDPTKAGLLTHLLNDEPLSCAFCLIGKMVNGKKSIEHRGNQHVELVARFESEDVYSIVSMSKWVHSIDEKGNMFVRIKCISHLLFLLSVYQIIPKSHTTDLVFKSNGQSSLSNLPPPVQLGRECTFLTPLLASLFLRCT

SEQ ID NO: 194849 - protein, 90 aa, Oryza sativa
  Clone ID: PAT_MRT4530_90855C.1.pep
AMAIHAVVRVGQPGAIDRRCSSNFQYVVGGHPYSLATIRNGILRSNRRQPYTIAKPFGSSDKRLELVQGKVNPLVHFGLCDATRSSPIVR

SEQ ID NO: 194850 - protein, 120 aa, Oryza sativa
  unsure (1)..(120): unsure at all Xaa locations
  Clone ID: PAT_MRT4530_90856C.1.pep
VLFRDENHIVNGTNEHHSRSCSPCYCCMQRLWALGWLGQMYKKYQLHVLCPVTQTXVLRPYTEWGGQKHGITARPLLPXGSMHLTNNQAXEHLELAAQQYNYPDLNIDQAICARSTTAIV

SEQ ID NO: 194851 - protein, 120 aa, Oryza sativa
  Clone ID: PAT_MRT4530_90857C.1.pep
GGDREDAMVGIVRVLRHRLPIQDRIVRLKLVKNCFSGADMVDGIVNHLECSRKKAVEIGRELARKHFIHHVFRENDFEDGSQNLYRFLEHDPAIPKYYNFIRGATNDGEPKLAAAIGQRM

SEQ ID NO: 194852 - protein, 57 aa, Oryza sativa
  Clone ID: PAT_MRT4530_90858C.1.pep
ITIPLCRYSVDFGQDRETLKWILNYLDPTKAGLLTHLLNDGGAINISYLNYDWSLNV

SEQ ID NO: 194853 - protein, 350 aa, Oryza sativa
  Clone ID: PAT_MRT4530_90859C.1.pep
LARLAEMEVKYRCNQILEIGLPLGGLAKLFAQDWEGDVTMVMPATAAQYLKIIQNPTYAELQMAANQGRRCTWEKISAIRTNCAIELALDESIAVLNHKRRLKRSMERVASASQGYTCSSVIRTPRRVPSWSCISRENSTGSLSEDCFATTSSSTHQGIQVVATPNVIHNDGSESESETIDLNSWTRSGGPLMRTSSADMFINFIQNLEIESEFNTGNSSGSTVSKDSCPNNNSGVTAQGTDRSTDTSETGSCNTGNNIASQPSTSTSIAVSEGELLQPERSTNGILINVVKRKSVFGEHESEAETESYVDTTNLDTSDCPGDNKDAADSNDLSAAHTDSVTSQHSSADE

SEQ ID NO: 194854 - protein, 1406 aa, Oryza sativa
  Clone ID: PAT_MRT4530_9085C.1.pep
MGGTMDEARIIEYFKNKSILITGSTGFLGKILVEKILRVQPDVRKIYLPVRAVDAATAKQGKRTEVIGKELFGLLKEQHGKGFQSFIDEKVVPLAADMMHQNLGLEESTLQELAKDLNIIVNGAATTNFYERYDVALDVNVMGVKYLCQLAKKCANLEVFLHVSTAYVCGERSGVVQERALREGETLREGTYLDIETELRLVGEQRQQLEDAGDAKAERKAMKDLGLARARHFGWPNTYVFTKAMGEMMLQEQLVAGAGRRHGIPVVIARPSIITSVHRDPLPGWIEGTRTIDAIIIGYAKQSLSCFLADLDLIMDVVPGDLVVNAMMAAMVAHSRGSSSEMAVYHVTSSMRHPAAYAVLYRTGWRYFLENPRVGKDGVAVRTRPVYFFRTIASFRAFMAVAYALPLQLLRLLSLLCFGLLFARRYADLSRKYSFVMQLVDLYGPFALFKACFDDLNMEKLRLSMATPPSSAAAALFNLDPKNIDWDDYFYRIHIPGVMNALVVLVSGLVSVEAGSDDQVIQIHERKAGTGTSEFGSGEPPDVENWKVVMTLRGHTADVVDLNWSPDDSTLASGSLDNTVHIWSMANGICTAVLRGHSSLVKGVTWDPIGSFIASQSDDKTVIIWRTSDWSLAHRTEGHWSKSLGSTFFRRLAWSPCGHFITTTHGFQKPRHSAPVLERGEWSATFDFLGHNAPVVVVKFNHSMFRKHLSSGQDAKAAPAGWANGASKASSKEHQPYNVIAIGSQDRTITVWTTASARPLFVAKHFFTQSVVDLSWSPDGYSLFACSLDGSVATFHFEAKELGYRLRDAELDELKKNRYGDVRGRQSNIAESPAQLLLEEASAKQSASKKVSSVQQFQSPPKVSTDAPNPSTSVPNQKAPEALPEDEKKTAGSTADDINKAPRLSSPVKQREYRRPDGRKRIIPEAVGFPSNQDMSNRSQNQGVDFSSLDQRMILGENGTRPSYSASGNCNNCGVRERSGITARTNISESLVIQKASAGAGSDGRLSIEQSGSVVPGSLASCSSLSIHVFNKKDNEDSLPVRLEAKPVERSAGDMIGLGGAFSTKETEITCTRGTETLWSDRISAKVTVLAGNANFWAVGCEDGCLQVYTKCGRRAMPAMMMGSAAVFIDCDECWKLLLVTRRGLMYIWDLYTRTCVLHDSLASLVTSPDEAAGKDTGTVKVISAKFSRCGSPLVVLASRHAFLYDTSLKCWLRIADDCFPASNFASSFSSTQGGELGKLQIDIGKFMARKPIWSRVTDDGVQTRSHLETQLAASLALKSPQEYRQCLLSYIRFLAREADESRLREVCESFLGPPMGMVDAASSADLKNPSWDPDVLGMKKHKLLREDILPSMATNRKVQRLLNEFMDLLSEYEAAETNVEQMDVTPTPPPPPPAAATEGNNNGAS

SEQ ID NO: 194855 - protein, 194 aa, Oryza sativa
  Clone ID: PAT_MRT4530_90860C.1.pep
MARTVACWRHVRATAFANLVDRIIERDSITACWSGSISGRGSGLTTERRKPLQRDIWLNQLLHYPAVHGCPRSNNATDHQARTHTHFSAKRASAFSWLFTKYFVANWQLLPLQPFLALAATVAAAASSIDHTLNSSNAVPYDGTRYEQTTYGPTLTKRKPGKERSSTAAGSIHTEMIRAVNHALAHRSCVINQA

SEQ ID NO: 194856 - protein, 57 aa, Oryza sativa
  Clone ID: PAT_MRT4530_90861C.1.pep
LLLMALHVQKTIYHPSSRFLHPKQAILHAVLQQNVKHCQNWFSYQPHPTCTSYYIWH

SEQ ID NO: 194857 - protein, 291 aa, Oryza sativa
  unsure (1)..(291): unsure at all Xaa locations
  Clone ID: PAT_MRT4530_90862C.1.pep
MATPTDAAAHVLVVPYPALGHLIRILDLVRLLASRGLRLTVVVTPATAPLLAAAHPGGVVSALTLPCPSHHAVPAGLEVPKGPPGAAPRLLPTRVVAFAGLRGPLGSWARARAGTPDRVVAVLSDFLCGWTQLLAAELGVPHVVFSPSGVYGTAMLHSLFRVMPRPADENDDESPLEGRYLESPLADLGFRRVRAIGPLAPEADDDASGNRGGETAVADGRXDLCAWLDQFADRSVVYVSFGSMSQLQPLHAAALAAALERTGAAFVWAAGSSHAAAALLLPEGFEERVWR

SEQ ID NO: 194858 - protein, 54 aa, Oryza sativa
  Clone ID: PAT_MRT4530_90863C.1.pep
MARSSRCGWRVTTVERTIENVVDVEPGVFRISLLDGEEPSSICLRAAAIASAIP

SEQ ID NO: 194859 - protein, 476 aa, Oryza sativa
  unsure (1)..(476): unsure at all Xaa locations
  Clone ID: PAT_MRT4530_90864C.1.pep
WRRPPTPPPPPRTSSSSRTRCRATSSPSSTSSXLLASRGLRLTVVVTPATAPLLAPLLAAGHPGGGGGVSELTLSFPSHHAVPTGLEVAKGPPGAAPRLFPMHVVAFAGLRRGTPHRVVAVLSDFLCGWTHPLAKELGVPHVVFSPSGVYGTPMLHSLFRAMPRPADDNDDESPVRFVDIPGSPAYPWRQLTRAYRTHKKGDEIDEGFKSNFLWNLESSSFVSNTFQRLEGRYLERPVADLGFRRVRAIGPLAPEADASGNRGGETAVAASDLCAWLDQFADRSVVYVSFGSMSQLQPPHAAALTAALERTSAAFVWAVGSSHATLLLPEGFEERSTASGRGTVIRGWAPQLAALRHRAVGWFVTHCGWISVVEAVAAGVAMLTWPMVADQFVNARLVVDELRAAVPVSWGGVAAPPTADDVARVLEATVLAADGGXVGARVEELAVEAAAATREGGSSWVEVDELVRELRGHMQR

SEQ ID NO: 194860 - protein, 82 aa, Oryza sativa
  Clone ID: PAT_MRT4530_90865C.1.pep
YSLLQRPIPRQVVPLARARSYAMGLTFLLFLSRCLMMLLFRACSCVPQLLQGPNLVPFGPPICVGAFPFFLTRGHDLGFWVA

SEQ ID NO: 194861 - protein, 189 aa, Oryza sativa
  Clone ID: PAT_MRT4530_90866C.1.pep
MFLMPYVTGCISQCSPYSNFTVTARDGLCTGAGCCQSSLTGNMSYHRVYFNEAFNTSEFYTNTSATDHAEYCGYAVMMEAASFTFRTVYLNTTAFLDENKGRVPVILNWVVGNETCDVAKKKASYACRSNNSRCIDSTSGPGNLCNCTEGYHGNPYLPGGCKDIDECTVNDPPPCPGHCKNTPGNFSCP

SEQ ID NO: 194862 - protein, 133 aa, Oryza sativa
  unsure (1)..(133): unsure at all Xaa locations
  Clone ID: PAT_MRT4530_90867C.1.pep
MVRMAGVDREWLHSMAHAPCAGTGHMDEAKRGRSWPRVDSRFHGRVCRSCVGMVRMAGVDREWLHSMAHAPCXLALDTWTWPREDVPGLGQSPKNSGVKRAWPGAIWVGLEQFGMGEVCRKDMCWSVRAVYDL

SEQ ID NO: 194863 - protein, 187 aa, Oryza sativa
  unsure (1)..(187): unsure at all Xaa locations
  Clone ID: PAT_MRT4530_90868C.1.pep
MGQRRGGDGRRDGDGSQQRRGARGGRLASRRWKIPPAKTIPRVEGAVRLRRSIFAGGPYKRRLRRSIFAGXARCLLPAKIDLRKRRLYGPPANIDLRRRTAPSTPGTFFAGGVLAPNYMPACENRTPTTLKKETTSTIEFHVSCLRWIGMNTLAQSPEDGGMGFTNTTREGLLSNHGYMAIKPGLIS

SEQ ID NO: 194864 - protein, 59 aa, Oryza sativa
  Clone ID: PAT_MRT4530_90869C.1.pep
MLGLFTHVEFKPLKEEKGRRLTRGGHKSHPNHTQLNLHHTGQGVGTKPNTHNDVAGPKK

SEQ ID NO: 194865 - protein, 357 aa, Oryza sativa
  Clone ID: PAT_MRT4530_9086C.1.pep
MMSSSRPVCVTGGSGYIATCLIKKLLQRGCGVHATLRNLGDEKKTALLRRMPGAAERLVLFEADMYDAATFEPAIAGCEFVFLLATPLIHDPLSTKYKNTTEAAVDAMHIILQQCERSKTVRRVIHTASVTAASPLREDGEGYKDFINESCWTPLDLSNRYSNVMMDAYVSSKTLTEKLLLRYNESESRAFEVVTLTCALIGGDTDTTQLYHSLSIPLIVSPLTGQELYHGGLKSLQALLGSVPLAHIDDICEAHIFCMEQQPSIAGRFLCAVGYPNMQDYVDRFAVKYPEIAIKLQGIYECVMYVPYFLRFTMVIGKDVRVKADTNKLGDLGFKYKFTVEETLDSSVECAKRLGLL

SEQ ID NO: 194866 - protein, 77 aa, Oryza sativa
  unsure (1)..(77): unsure at all Xaa locations
  Clone ID: PAT_MRT4530_90870C.1.pep
FFFXXXXXFXXXFXXFFFXFXFXFFFFFXLFXDXDIQTVLXIREVKSLXXNILHIXXXPXIGSIMXWQVTGHKKKKG

SEQ ID NO: 194867 - protein, 107 aa, Oryza sativa
  Clone ID: PAT_MRT4530_90871C.1.pep
SFSDYPIKFLRFCNQTVLYKNPNNAFIIAIAISVHLIRLFCTRNKRSGPSRFASHSGTIHLFYRWRQYLDGSFHLSKCGCVCYCACVCCFPFFFLLPFVLLFLPDEV

SEQ ID NO: 194868 - protein, 99 aa, Oryza sativa
  unsure (1)..(99): unsure at all Xaa locations
  Clone ID: PAT_MRT4530_90872C.1.pep
LVRACLTGDLRAHPTRDLDVQLRGLLHLAWDKWTXAYPATRFYVGMTASEMTHGWVHPKNVYYDVAPSTQKADNYGGFMIWDRYYDKLSNYTSMVKAYA

SEQ ID NO: 194869 - protein, 43 aa, Oryza sativa
  Clone ID: PAT_MRT4530_90873C.1.pep
RLARFYSRMAEYIIQIVICMDLMLGRTMCLYSSLYNESNVNYI

SEQ ID NO: 194870 - protein, 190 aa, Oryza sativa
  Clone ID: PAT_MRT4530_90874C.1.pep
MNTAARSQEIKQGLWKYSDERCRWHTFSSVQANVHSAYMRSDELKETDADKLTDVKIRVDPPKLLVQAHGDQSEDQGSSTVSDFVGRELEEQGYPVVDYESDLQTAMSTTDFDEMGSRDGFSDNILLDNFGYRRSNPTGEIVAVESQPNDDGMWDRFELLIRPSARDIGWKILFDIDEGSMSLWFYTKID

SEQ ID NO: 194871 - protein, 102 aa, Oryza sativa
  Clone ID: PAT_MRT4530_90875C.1.pep
GGPSKEQFFGVWKETKSCGGPPGFKFGPPPKNQPPPFLKKRVFCPPLFFFCPVKKKTPFSQGPRGGGVGPILGKLCFLPQRGKWGRENLGGGPAFPPWGEGF

SEQ ID NO: 194872 - protein, 70 aa, Oryza sativa
  Clone ID: PAT_MRT4530_90876C.1.pep
MDSWHSQLFLWRRSSGAGRSPVKEVDVYVVIVSSRVQNHWLMARDGALGAMAALGGRATPKMRMAAVVAL

SEQ ID NO: 194873 - protein, 177 aa, Oryza sativa
  unsure (1)..(177): unsure at all Xaa locations
  Clone ID: PAT_MRT4530_90877C.1.pep
QSDRWAPPSHGSAAVEDTERRRVTWWRRPGGGRGGDEELGAASPSXLGGVWADGARHGFPLPSRTELRAGYDPTASPSLPSLARRSEQQLVVPALHGGSSSQWLHVLFMATRAVPESRQLAEPATRSLASYSGHAIATSSSGLPRATDEEDDGFHTWRSRCIVGCDGEYHRRHSVRG

SEQ ID NO: 194874 - protein, 158 aa, Oryza sativa
  unsure (1)..(158): unsure at all Xaa locations
  Clone ID: PAT_MRT4530_90878C.1.pep
EELGAASPSXLGGVWADGARHGFPLPSRTELRAGYDPTASPSLPSLARRSEQQLVVPALHGGSSSQWLHPVNPATRSLASYSGHAIATSSSGLPRATDEEDDGFHTWRSRCIVGCDGEYHRRHSIEEAMIGGGKPMTMVLPVDSKGLFLLLLAGLETG

SEQ ID NO: 194875 - protein, 341 aa, Oryza sativa
  Clone ID: PAT_MRT4530_90879C.1.pep
MAFGRRSLFLPVVGVAAILLLAAGHATAVNTGETVVFWGRNKDEGSLREACDTGLYTSVIISFLAVFGHGRYSLDLSGHDVSAVGADIKHCQSKYIPVLLSIGGQGGAYSLPTNASAADVADHLWDSFLGGGRAGVPRPFGDAVVDGVDLFIDQGGAEHYDELARRLFSHYKFEMLLTATTRCSYPDHRLDMALATGLFTHIHVRVFGGGGDAGCTTRHRASWERWAAAYPGSLVYLGVVASPEQDANAYLPRKVKANFACGQSNRMHQKTAAVVAQIRAGPTPLAQSSSAAPIARHHRQQRIHAREAPGAGGSEEERRERERGKEMRGEKEKIERINRQE

SEQ ID NO: 194876 - protein, 198 aa, Oryza sativa
  Clone ID: PAT_MRT4530_9087C.1.pep
MHAGTDRFKFSCDVLLAANSQDTLCTVMLAWRRASHAYVVLSSVHLLLQRTYEATKELKNKLASYLFLIDRFFFFFFFFFFFFFFLVSLTSCVYRDIPGLPQRWMHAKKASRIDAVGGINQIQSRILRASIRYDMYADRSMLPASCVRTYYSIYCTYYAVEHCSIQYVRVGVVVICSHIGVSISINHMVHNSTPNYKY

SEQ ID NO: 194877 - protein, 178 aa, Oryza sativa
  Clone ID: PAT_MRT4530_90880C.1.pep
MGVLISCPVDDETAVEDGQLAAPAAWTNAVQQTVLKASLAPAASCRLSFKMRGEQQQSLQVETKIFVTSLRAAPAPMPMMPRDLCGVQVGEGKNTSSQGAPERRKGISVTPHQKSGPLALYQHKYIILVGAVSVGKLPRLWSVFSQTVNAVSAAPNAVGPGPSLGTRRGINRVDLVKT

SEQ ID NO: 194878 - protein, 377 aa, Oryza sativa
  Clone ID: PAT_MRT4530_90881C.1.pep
MAFGRRSLFLPVVGVAAILLLAAGHATAVNTGETVVFWGRNKDEGSLREACDTGLYTSVIISFLAVFGHGRYSLDLSGHDVSAVGADIKHCQSKYIPVLLSIGGQGGAYSLPTNASAADVADHLWDSFLGGGRAGVPRPFGDAVVDGVDLFIDQGGAEHYDELARRLFSHYKFEMLLTATTRCSYPDHRLDMALATGLFTHIHVRVFGGGGDAGCTTRHRASWERWAAAYPGSLVYLGVVASPEQDANAYLPRKVLFSDVLSHIVEKPNYGGLMIWDRYYDKKTGYSAGKVKANFACGQSNRMHQKTAAVVAQIRAGPTPLAQSSSAAPIARHHRQQRIHAREAPGAGGSEEERRERERGKEMRGEKEKIERINRQE

SEQ ID NO: 194879 - protein, 123 aa, Oryza sativa
  unsure (1)..(123): unsure at all Xaa locations
  Clone ID: PAT_MRT4530_90882C.1.pep
HKSLIPFIGSSSNSTYNLDGEPTPANQLIPVEHYTMEGVNALWAXPLATVPGSXQIWSPSASSLVRPNQGFGQXPSRPRSAPRRTARSLSPRHVARPKIRRDSLARRPTTGELGLLKARCLFQ

SEQ ID NO: 194880 - protein, 104 aa, Oryza sativa
  Clone ID: PAT_MRT4530_90883C.1.pep
MIQKSPVKDERSPIITGDEGGGAALLSLLRSPLLSKKDYEVDYKKEAESTSDTPTDNEKAKNSIRDIFVFVVLSICLLLRSTHPSKYPKSLFTLWHCGRTTLTV

SEQ ID NO: 194881 - protein, 630 aa, Oryza sativa
  Clone ID: PAT_MRT4530_90884C.1.pep
MSSAPQQLLDSSSPGPGPGPEVEDDGGRRVRKPYTITKSRESWTDPEHDKFLEALQLFDRDWKKIEAYVGSKTVIQLVAFVTEYFRVLQFLNLPGGDLIINLGVLAAPQVVLPQQASHLMEQGCLIPMDISPVARNFNANDVFSSWDSALAQSFSPRHTHGAANNCSSSVESQSGTCPTSEAIEQEIMLPTLRAMPDFAQVYNFLGSIFDPETSGHLQRLREMDPIDVETWWIPVTTCGLDNLDIVLLLMKNLSINLTNPNFEAHRKHMACKKLSKIKSSRNSVVCTLSFCLEASTSVYISSKKKKKKKKKRLGAMVQGASGGGWSSKVEEGVIVGGLLVVQCILAGYVVFVDHVLSLGANPLSLIVLGAVASSLFFLPFAVVLERKKWPSKISRTLMAQFVFIALGGTTVFQELMLLGIKKTTPAIASAMPNLSPGLIFIIAACFRLEKFDKGCKYTRAKILGTLVCLVGAMAMSFLQSPVSSSPQLTTTSYYDWILGCFYLFLAVVVLSIYTVLQAATLVSFPAPLTMCSVTSMMGAVFTAILQFIVDGKIDMGSPRIDETIISTIVLMTVCSALLSALLFSQLLCLGSLAGMVLMFCGLYIVLWAKSKEGHSIIHLEGGDVEKALLS

SEQ ID NO: 194882 - protein, 42 aa, Oryza sativa
  Clone ID: PAT_MRT4530_90885C.1.pep
FGFLRVDVLQVCLIYQRDRSIDYNIFVCQRLNSIQKSWGGFK

SEQ ID NO: 194883 - protein, 121 aa, Oryza sativa
  unsure (1)..(121): unsure at all Xaa locations
  Clone ID: PAT_MRT4530_90886C.1.pep
NKIQSKNPYINTKHWIQIHNINLQVNINQHVSFKTKSSXRRQTPLHAVXPPPPSPLCPDLGGREVFAATTAXPXPCWAGXRGGRRGEPXPHSHQXPRHXRXXRTTAVAXXXSXXTVSISLI

SEQ ID NO: 194884 - protein, 106 aa, Oryza sativa
  unsure (1)..(106): unsure at all Xaa locations
  Clone ID: PAT_MRT4530_90887C.1.pep
SSVGPRLASSRACLHLAAFIGRRLPSQTNTSLFCTLCSHSXKNFLIGHPSLNYSRXARLISEFFRDRLPEKKLQLVDMSILLILLSPGPGCHTLTPFKNYVSTIPK

SEQ ID NO: 194885 - protein, 122 aa, Oryza sativa
  Clone ID: PAT_MRT4530_90888C.1.pep
MERDARGRGCGLAGGLAQIASWVDRKLVAPADATGLRLSPSARRHQSPPLPQRPPPLGNPAPAAAGLRLSPSARRRRPPQAPDAAGKLKLVSSWSNSEPFKCQRSYGGEFSPSTVELLPVVN

SEQ ID NO: 194886 - protein, 76 aa, Oryza sativa
  unsure (1)..(76): unsure at all Xaa locations
  Clone ID: PAT_MRT4530_90889C.1.pep
SSYSKIKNHITTLKFVVIVDPQFLAASQLGGVRGSRLNQSTPLXLPTGFGQEXAGVMVNDHGKFLPSTGADERTNC

SEQ ID NO: 194887 - protein, 349 aa, Oryza sativa
  Clone ID: PAT_MRT4530_9088C.1.pep
MTSSSSSRVCVTGASGYIATCLIKKLLQRGCVVHATLRNLGDEKKTAPLRELPGAAERLVLFEADMYDADTFEPAIAGCEFVFLLATPLQHDPRSTKYKNTTEAAVDAMRIILQQCERSKTVRRVIHTASVTAASPLREDGGEGYKDFINESCWTPLDHSHSYNNTMVDVLSPFHSDYASSKTLTEKALLRYNESESRAFEVVTLACALVGGDADTTRLYHPLSVPAIVAPLTGEESYHGGLKYLQALLGSVPLAHIDDICEAHIFCMEQPSIAGRFLCAAGYPNMQDYVDRFAVKYPEITIKLKGVIGKDVRVKADTNKLGDLGFKYKFTVEETLDSSVECAKRLGLL

SEQ ID NO: 194888 - protein, 372 aa, Oryza sativa
  Clone ID: PAT_MRT4530_90890C.1.pep
MDDPMLNAVKEEESHGDGGGLEVVAGEDGAAAVAAGVAPRPMEGLHDAGPPPFLTKTYDMVDDAGTDAAVSWSATSNSFVVWDPHAFATVLLPRFFKHNNFSSFVRQLNTYGFRKVDPDRWEFANENFLRGQRHLLKNIKRRKPPSHTASNQQSLGPYLEVGHFGYDAEIDRLKRDKQLLMAEVVKLRQEQQNTKANLKAMEDRLQGTEQRQQQMMAFLARVMKNPEFLKQLMSQNEMRKELQDAISKKRRRRIDQGPEVDDVGTSSSIEQESPALFDPQESVEFLIDGIPSDLENSAMDAGGLVEPQDFDVGASEQQQIGPQGELNDNFWEELLNEGLVGEENDNPVVEDDMNVLSEKMGYLNSNGPTAGE

SEQ ID NO: 194889 - protein, 34 aa, Oryza sativa
  Clone ID: PAT_MRT4530_90891C.1.pep
LIPKTTINNMVACEFIRFTTTLIFIHNSLSLTPF

SEQ ID NO: 194890 - protein, 102 aa, Oryza sativa
  Clone ID: PAT_MRT4530_90892C.1.pep
PGGLSSGPSLTHGHRHGEQDVTFAQQRRPRSGGQIELPPSTQRHDHKTRSSCQKPDPASSRLLHQMRGDGIHYGHLKPVPLLPPHIMVADDALHMADFGCPQ

SEQ ID NO: 194891 - protein, 100 aa, Oryza sativa
  Clone ID: PAT_MRT4530_90893C.1.pep
RVRCSGVAPISFRLAGGTWGPQTVGTWELHRWLRVSCPARVTRLARAPGAVTSTPQDCCRQLAAVDDSWCRVLALNHMVGGIYRELGATMLAPMASVPAA

SEQ ID NO: 194892 - protein, 716 aa, Oryza sativa [sequence omitted]

SEQ ID NO: 194893 - protein, 755 aa, Oryza sativa
  Clone ID: PAT_MRT4530_90895C.1.pep
MASVDPSRSFVRDVKRVIIKIIRSGALLGLFCGLLDVTAYVEVANLSTLVGTAVVSRQDGRLALGRVGALCEQVPNQRKVAMQVKELNSLGYEVILVTSGAVGVGRQRLRYRKLVNSSFADLQKPQMELDGKACAAVGQSGLMALYDMLFNQLDVSSSQLLVTDSDFENPKFREQLTETVESLLDLKVIPIFNENDAISTRKAPYEDSSGIFWDNDSLAGLLALELKADLLILLSDVDGLYSGPPSEPSSKIIHTYIKEKHQQEITFGDKSRVGRGGMTAKVKAAVLASNSGTPVVITSGFENRSILKVLHGEKIGTLFHKNANLWESSKDVSTREMAVAARDCSRHLQNLSSEERKKILLDVADALEANEDLIRSENEADVAAAQVAGYEKPLVARLTIKPGKIASLAKSIRTLANMEDPINQILKKTEVADDLVLEKTSCPLGVLLIVFESRPDALVQIASLAIRSGNGLLLKGGKEAIRSNTILHKVITDAIPRNVGEKLIGLVTTRDEIADLLKLDDVIDLVIPRGSNKLVSQIKASTKIPVLGHADGICHVYIDKSADMDMAKHIVMDAKIDYPAACNAMETLLVHKDLMKSPGLDDILVALKTEGVNIYGGPIAHKALGFPKAVSFHHEYSSMACTVEFVDDVQSAIDHIHRYGSAHTDCIVTTDDKVAETFLRRVDSAAVFHNASTRFSDGARFGLGAEVGISTGRIHARGPVGVEGLLTTRWILRGRGQVVNGDKDVVYTHKSLPLQ

SEQ ID NO: 194894 - protein, 321 aa, Oryza sativa
  Clone ID: PAT_MRT4530_90896C.1.pep
MTIYDAPEIKEKQEKAQAAQPKQQQVWTNCVGSTTLQEMNHVQSAIPTLHLNLLKKTWSDKLIPPKVKTFMWRLIRNALPTANNLHFRIPDILDSCHRCNSAKTSVHLFFHCSFARLSWMISDFKLNFQIIDSMNSVPEIISFILAASSKTESFQKFCIFLWFIWKARNGSYFKRKNWEPSQVCIAADVMASNYNTLTQAQNQDDNSLFFNSPDSNISIPSGTRCFVDASWKDDKSGFGLFLHDPTSHKALFVKASSDTYTSALQAEHASIYVALCICQKLKITDVVFLSDNQVLVKQLRQRNFAAHPQHWSLLPLLQRSE

SEQ ID NO: 194895 - protein, 710 aa, Oryza sativa
  Clone ID: PAT_MRT4530_90897C.1.pep
MQDHCVGVLLRMAPVVHPFFLLPLLVAIASIPGSVNAAASSQQTDALLAWKSSLADPVALSGWTRASPVCTWRGVGCDAAGGGRVTKLRLRGLGLGGGLHTLELDFAAFPALTELDLNGNSFAGDIPAGISQLRSLASLDLGDNGFNGSIPPQIGHLSGLVDLCLYNNNLVGAIPHQLSRLPKIAHFDLGANYLTDQDFAKFSPMPTVTFMSLYDNSINGSFPDFILKSGNITYLDLSQNTLFGLMPDTLPEKLPNLMYLNLSNNEFSGRIPASLRRLTKLQDLLIAANNLTGGVPEFLGSMSQLRILELGDNQLGGAIPPVLGQLQMLQRLKIKNAGLVSTLPPELGNLKNLTFLEISVNHLSGGLPPAFAGMCAMREFGLEMNGLTGEIPSVLFTSWPELISFQVQYNFFTGRIPKEVGMARKLKILYLFSNNLCGSIPAELGDLENLEELDLSNNLLTGPIPRSIGNLKQLTALALFFNDLTGVIPPEIGNMTALQRLDVNTNRLQGELPATISSLRNLQYLSVFNNYMSGTIPPDLGKGIALQHVSFTNNSFSGELPRHICDGFALERFTANHNNFSGTLPPCLKNCTSLYRVRLDGNHFTGDISDAFGIHPSLEYLDISGSKLTGRLSSDWGQCTNLTYLSINGNSISGNLDSTFCTLSSLQFLDLSNNRFNGELPRRDESAISVLAGHGFEVEGYPVVDYESDR

SEQ ID NO: 194896 - protein, 332 aa, Oryza sativa
  Clone ID: PAT_MRT4530_90898C.1.pep
MASHRRLRLLLLAATLAAAAAAVAGVEEEEAFCGVESMPDAATLRPDRLTVLLSGYSERRLPLLRAIAGAYAAHPLVLAVVVLWSNPSTPDSLLSSFPPAVTLHRTASASLNSRFLPHPSIRTAPVAVADDDVLPDAAALSFAFAAWQQRAPPGTLVGFFPRSHHLDLARGRWAYGAAARQQARYSMVLTKLLVLGAGLLREYSCSPELAAARAVVDRERNCEDILMNFVAAEESGEGPVLVEAGSIRDWGDPRNDDADAGAGAGGEEMKAVGLSSTGGAAHWEKRGDCITEFHRLLGRMPLRYSYGKVVAAAGGEQALCSKRGRLVRCDQE

SEQ ID NO: 194897 - protein, 49 aa, Oryza sativa
  Clone ID: PAT_MRT4530_90899C.1.pep
FITGHLTSIHLWLLKQFLNNTGHLYKGVHMLHLANLNHSQTEDNASTTP

SEQ ID NO: 194898 - protein, 189 aa, Oryza sativa
  Clone ID: PAT_MRT4530_9089C.1.pep
YVGDSFGNVSLLKLDLGQTCLVDMPYWIPFSESYGSGANVGNEVEVAFVSPQPLAENNRVLIIFRDGIMSLWDIKTSKVVSLSGKSMQQQSHQEAKAVTSACWACAKGSKIAIGFDSGDIYLWSIPDILNAQNLSSMGNQNLPLQRLNLGYKLDRVSIVSLRWVNSDGKAGRLYVNGFSDHAYLFQVKH

SEQ ID NO: 194899 - protein, 59 aa, Oryza sativa
  Clone ID: PAT_MRT4530_908C.1.pep
SHRAWDGDLWAACCLCERQWLCKLWAEDKVKPFLLPDRVQIRPGLVTPRWGMGEETYVS

SEQ ID NO: 194900 - protein, 209 aa, Oryza sativa
  Clone ID: PAT_MRT4530_90900C.1.pep
MDRSPRFGSISSDNRPMKTRFRYGSGGFRSLNQATAYESPAHSSTGTRSEITFPSHCLGAQHGVFSLARWSLLIHTGFHVPHATRVRALSLACSWIQQAVQKYPLSSRAGDKRTRTADIRHRVNHRLSGLPDGYRRTRNGELSPFSARLFDLKLKNAGFKNEVYGRSVTPGRRRRPWGDLVVPTGEIVHQAIRKGQLDPLPQGSQMREA

SEQ ID NO: 194901 - protein, 162 aa, Oryza sativa
  Clone ID: PAT_MRT4530_90901C.1.pep
MDRSPRFGSISSDNRPMKTRFRYGSGGFRSLNQATAYESPAHSSTGTRSEITFPSHCLGAQHGVFSLARWSLLIHTGFHVPHATRVRALSLACSWIQQAVQKYPLSSRAGDKRTRTADIRHRVNHRLSGLPDGYRRTRNGELSPFSARLFDLKLKNAGFKNE

SEQ ID NO: 194902 - protein, 155 aa, Oryza sativa
  unsure (1)..(155): unsure at all Xaa locations
  Clone ID: PAT_MRT4530_90902C.1.pep
PLNFVKPFKRFASYEAQKILRLVKFYPNDFSSSDLRRLEFQIDTSIDDVRKDYRFEGIQTLGELSIRLFFXTNNHILYEFLYLLLKLELILLVASISIDGVFSILSLVKTKLRNNICDDLLNHCLVIYTERDIFSKVSEEDIIKIFMAKSKHRVW

SEQ ID NO: 194903 - protein, 100 aa, Oryza sativa
  Clone ID: PAT_MRT4530_90903C.1.pep
ASKGGCFPSPGAAPWRPFVNPGLGFPFFCPPPGGGKIFPRPPFFLPLRGLVRFFSSGFSGGLLRGPPCWFPPGPVFCAPYKWICSPPTLYCVVPPNQKLK

SEQ ID NO: 194904 - protein, 787 aa, Oryza sativa
  Clone ID: PAT_MRT4530_90904C.1.pep
MALPPPPPFSLSRSSRVCVGVAHAVPHRSAETVPDAAPQLLLMRAHARAGRMQPARQAFDAMLPRDRSLVAWTVLMSGYATHGPASEALDLLLRMVEWPLRPDAFVFSVALRACAAAGSLGVGRQVHAAAAKMGYVGADLFVANGLVTMYASCRSLGCAEKVFSGIAAPDSVSWTSMLSAYTENGCDTQALMLFLEMIHGGVSCDAYTLSVALRAASSLGHVRLGYQLHCYMIKSGFVPSEFLENCLIEFYGRCRELQLMQKVFDEMNAKDLVSWNIVIQCYADNLCDEEALVHFRDLMYKCAECDEYTLGSILHVITRRCAFDYGREIHGYLIRAGLDSDKYVMSALMDMYVNWATLRKSRSMLPLRMLKYYLSVQGKLDQFIVASSLKSCASDLDLAAGRMLHACVLKFDVNPDPFVISSLVDMYAKCGSLEEAHILFSRTKDPCTVAWSAIISGSCLNGQFERAIHLFRTMQLEHVQPNEFTYTSVLTACMALGDVVSGMEIHSNSIRNGYGTSDSVLRSLISFYLREGQFNQALRLCLSLSNSEISWGTLFQEFAELGDHLGILNLFHVIQRSGGVLDYPTACLILSSCGKKAHLPEGLQAHAYLMKRGLSSTGCMCDYLIDMYSGCGSLTHAFEAFRNTSGRNSSSWTSIIMASVENGCPETAIRLFVQMLRKEKSPNSLAFLSVLKACAEIGLVNEAFQFFVSMTEVYKIQPSEEHYSHMIEVLGRAGMFKEAEHFIDSVVPSESGASAWSLLCSAAKQNGNAKTMRLAADRLSKLTPDGC

SEQ ID NO: 194905 - protein, 298 aa, Oryza sativa
  Clone ID: PAT_MRT4530_90905C.1.pep
MARVEFSSPKCSSSSSLPSLRLPSISVASPLRPRGPPPSAAGGSFTRRPTAASPPPPAGRASRFRQRHGRGRRRRRMMSTTKHFEAQSTLMGLICKPTRELHTCECDIASWTRPDLVEIGPFATAIANLKCEKDLFSSADTIFIEATITQEEECTQVSNKTTSSSPENMLLSSQGLPDNFTDEATKDQYLCNSGLQAANRESKKKNSTFLTKFQNRIIASLASESSPCRNAFRRPLLSREIVVREYFKLARIIRRTAAACFSPSSDADEDYDYLPHMQLDKVTHAISREAFGPLYLVT

SEQ ID NO: 194906 - protein, 66 aa, Oryza sativa
  Clone ID: PAT_MRT4530_90906C.1.pep
QHSMNRFQQDATSIQESIQHQLHSLKEDQTMIYQNASRRSLDPNTTLYPFGFGWVLPQCRHKINYQ

SEQ ID NO: 194907 - protein, 170 aa, Oryza sativa
  unsure (1)..(170): unsure at all Xaa locations
  Clone ID: PAT_MRT4530_90907C.1.pep
LLNRPQGGGHLSRVPVHPSPPLIRSRGGTPGRRVPTPPAGQRDAAVAPEPRAARGLRKGPCTGGPEPTARVEAWPAPAPGXARGGLGGPRARAAPPHGHRDARQNKIPAAAAEGNPCPWGTPPRRRRRLLPPIRVALFPHRRRRPPITTVRPSQAAPMHSPPIAAEHERH

SEQ ID NO: 194908 - protein, 47 aa, Oryza sativa
  Clone ID: PAT_MRT4530_90908C.1.pep
LWTLPIPKGVMYVMTMTTADSVLARLHCEGRLADCTNADYDMSTNII

SEQ ID NO: 194909 - protein, 36 aa, Oryza sativa
  Clone ID: PAT_MRT4530_90909C.1.pep
MAGVPQRHVVANRQGVKNLSWFSLRPRQMALAVLIV

SEQ ID NO: 194910 - protein, 83 aa, Oryza sativa
  unsure (1)..(83): unsure at all Xaa locations
  Clone ID: PAT_MRT4530_9090C.1.pep
MASSAEVRVVAATRVPLLRRPQPHLEQIPLSLFDAPFVAFPAINRVFFYDDDGXADYSSLVESLKSSLADTIAVYFPLAGKLT

SEQ ID NO: 194911 - protein, 126 aa, Oryza sativa
  unsure (1)..(126): unsure at all Xaa locations
  Clone ID: PAT_MRT4530_90910C.1.pep
MAASVLASLXRLKPSACPLLKRPKLSRKRTMPTPALIISAKTTDKIQTSQPYRPSTXVVTKVGVPAPGTEPHGKDLYHLCNRPGTYVAGYSTPSTPXECSTTGDSSIXXKAGGLFWAITVAGILSG

SEQ ID NO: 194912 - protein, 149 aa, Oryza sativa
  Clone ID: PAT_MRT4530_90911C.1.pep
DVSDNVSDDVSTGGDSGGSGAHARRRTTVRRHERRAPGRRGRREELTGDQRSGGGATDGGGDKVEAAEKIGSTAATVLRRSPAAAKERTRTATTWRSRRWPSRATTTTGTAAAHGWSDGGSRLQGARALRTTRGEGEGGGGYRRARGSF

SEQ ID NO: 194913 - protein, 482 aa, Oryza sativa
  Clone ID: PAT_MRT4530_90912C.1.pep
MVRRKSKSPAVSPTTLGDLPDKLLEHILVRVASPVWLTRAAATCKRWRRIVANDNFPFHMDRRLPNPVAGHYHYSRRRADGRGRSSRLITFVPSSSAVALGVDARRHFSLDFLPGGRSSWDLVDSHSSILLLAATSSTRRRGHRRGLFPDLVVCEPVTRRYKLIPRMEEMKHQRCLGVFLQSYPTSSTSNRSSIMSSLRVICVVYIEYSGVSDGMGTVRACVFDPNGSNSWKPRPRSACWYMFKPSWNMAKHGIHLRGSEHARLLGHAAGAVFWAVGGDDTLLVLDKWRTEFEVLRLPGSVRASGLRAIVDGGNGDNDGKLRVVCLDEENVVRVFATWRGQHSNGEWVLQKSLRLEESTMGLAGYKAGRGGAAMVVAAATAGSVVLAPVEGMTWMFSVDLETMEIAECKEDWAATTMPGPVGSPQSLGEAGPLPSFLLAESHEAYVLHPIVTDSTHLKAVTTVPQMAAIHEAFSLTPENLVN

SEQ ID NO: 194914 - protein, 132 aa, Oryza sativa
  Clone ID: PAT_MRT4530_90913C.1.pep
MDMRLDPFECRLDKLSMKYLHAQIIVLMESWRLSEDFQESQTANATGKEPIGGDEDLEEQGMSRRPVFYLGSGIRGSLQQARVCGCRYFASFRRHNRPSQQGKGRRTMEGRGGEERRRVDVGEEKNDAMGER

SEQ ID NO: 194915 - protein, 150 aa, Oryza sativa
  unsure (1)..(150): unsure at all Xaa locations
  Clone ID: PAT_MRT4530_90914C.1.pep
WLPSATTTTFAPPAPLLSPRPPRLTPSSAPHLRCRRRRRPRRRLRAPATMTTATPAPLLSPRPRAAGXAPSSPMFTRRRLPTSATGRLPPRRRRRPRAASSPPSPHVRAPAAPSSPTSTTSDDDDDGADAAARLLPDNSGARTCIKISVS

SEQ ID NO: 194916 - protein, 568 aa, Oryza sativa
  Clone ID: PAT_MRT4530_90915C.1.pep
MSGSGGGGGGGAGGDGARALDQTPTWAVAAVCAVIVAASILLEGLLHHLGQWFSKRRKKALFDALEKVKSELMTLGFISLLLSVTGRYISRICIPVGAADTMLPCSLRRSSSEQEVPGGGGHGRRHLSGDPTNFKCAKGMVSLVSADGLHQLHIFVFFLAVFHVAFSAITMSLGRAKTRIWKEWEKETCSLTYEFSYDPSKFRLTHQTSFVRQHASCWSKSTILLYFVSFFRQFFRSVRRTDYLTLRHGFIAAHLSLGTRFNFRKYIKRSLEDDFKTVVGISAPLWASALAIMLFNVHGWHNLFWFSTIPLVVTLAVGTKLQAIIAMMAVEIKERHTVIQGMPVVKLSDEHFWFGKPRLVLHLIHFASFQYEFGLRSCFHDNFELIIARVCLGVVVQFMCSYITLPLYALVSQMGSQMKRTIFDEQTAKALKKWHKAAVVKKKQQKGSSHEPGSETPGTETTTTTATATEESQRERDAAAMPVRHLHRYKTIAHVGATGTLSDSDCSDTDTPFASPTRLLIPPTKQRSLDAGRAEVRVDVDSTPTPTPPERHDSFSFPRLPAHNLQQK

SEQ ID NO: 194917 - protein, 750 aa, Oryza sativa
  Clone ID: PAT_MRT4530_90916C.1.pep
MATSPSDDDDWNNGEAWLERRRRQRREVHGARALLTARDEGEEPDIYKDPNPAKDPVEETLVNDTAKDKSEVPRVLRSHDSKKKDEHKEKYMVRWEMRRFHTWYMEASKKGLPNLTIQSPANAFAGEGFFWLDFNDLHAIYRREKTDINYVPAWCLMQSIDAKKIGEPIGFLDPIKICQTQHTMTLSPNSDQLKGKTPAEIAEYKKSLHKQKMIIVAQCIGRAFLHFQNKRVIKATYNFKGTILCGYYACEYLRVTGRYRVNAEDLPSIERREGFDDMSIKNVQQDLCHFIHRMCCHVLGKFFDPDNILDEDTSSSDITMVTLCINQTKSSYWAFLRGSAWINRRGFEMDALMNRSRAFAEAVVIMVCPVLLAVALKKVDLKSQERSRAVPIFMLVMAALTLAFGTVPFLALSLSKRFSDHRWRLPAKATTWLAPSSCACLVGLACWIIHLILSARWAYAFPAMGTVFGLCIVIHSVRYCRAGGDLANLVHPGDVLHTTDELTDRKRREALQKAMEGKLDESLEFLAGVTALLFLGLEGLALEGQINGGQGRLAAPMGLCFFACLFGACFVLVQTIPPSPPPSATDTSLRANIVRNLPAICGMFMACAIAVVMFSIMVVLVKLLALMLLSPLFLILLVHAFDLVFPGGGGGGGGGEDDVVKPASLELSKVAFTGFLTVAISARTTSRGPLSTSTQWFLIFAASAIVSGFAWRLLTQAKVGKSANVASFCTHLCIVLATVPFTVMAGQALH

SEQ ID NO: 194918 - protein, 139 aa, Oryza sativa
  Clone ID: PAT_MRT4530_90917C.1.pep
SSVSALAIMLFNVHGWHNLFWFSTIPLVVTLAVGTKLQAIIAMMAVEIKERHTVIQGMPVVKLSDEHFWFGKPRLVLHLIHFASFQNAFEITYFFWIWYKFGLRSCFHDNFELIIARICLGVCVQFMCSYITTALYALV

SEQ ID NO: 194919 - protein, 254 aa, Oryza sativa
  Clone ID: PAT_MRT4530_90918C.1.pep
MASTSCFLHQSTARVAARVASPSPATRTHLLVCRAQKQDDADVSRRAALALLAGATAAVGVKVAPAAAAYGEAANVFGKPKTNTEFIAYSGEGFKLLIPSKWNPSKEREFPGQVLRYEDNFDANSNVSVIINPTTKKTITEFGSPEEFLAQVDFLLGKQAYSGKTDSEGGFESDAVATANILESSAPVVGGKQYYSVTVLTRTADGDEGGKHQLITATVNDGKLYICKAQAGDKRWFKGARKFVESAASSFSVA

SEQ ID NO: 194920 - protein, 120 aa, Oryza sativa
  Clone ID: PAT_MRT4530_90919C.1.pep
PGSGKIYSEKTPQGLNGPVLGKQAVPLSWGPTPSHKQFRGDFGPRKTNLFFGAPFSGGYGYASPVPPPKMYVAAYGASPVFGRPPLFGFRKKRKRGFLSLPPNGKQGFGPVPMVAPNVRL

SEQ ID NO: 194921 - protein, 105 aa, Oryza sativa
  Clone ID: PAT_MRT4530_9091C.1.pep
THLSQSTQKAFTQLANIHKKSTQLGRIRMPVPGRIQAILLLCRACEDNCSSQLSLFAFYSLQKRYDLQFRRAGIIYRVTPYQMNHQSYGTNLLQCCCNQATNAAI

SEQ ID NO: 194922 - protein, 94 aa, Oryza sativa
  unsure (1)..(94): unsure at all Xaa locations
  Clone ID: PAT_MRT4530_90920C.1.pep
AGGTPSTARRRSWDSGRRFSRSMTDGRGSVSAAGYSQLEVRRVSYRPAGTEQNLLNDISLNRKETSFXLLSGRSGSXQTTLLQLLAGLSVPTHG

SEQ ID NO: 194923 - protein, 65 aa, Oryza sativa
  Clone ID: PAT_MRT4530_90921C.1.pep
FRDLFVFLLFLRLGFWTAISKSICFMFKLYVVALFFNNVSYSSLRNVLLLTSFMFSFKLAVTINK

SEQ ID NO: 194924 - protein, 779 aa, Oryza sativa
  Clone ID: PAT_MRT4530_90922C.1.pep
MASEAEAEVAAGPEVVLPIGAQKHDPAWKHCQMVRSAGRVRLKCVYCHKHFLGGGIHRFKEHLANRPGNACCCPKVPREVQETMLHSLDAVAAKKKRKQSLAEGIRRITHSAPAAAASASPPAPADAAEMESPIHMIPLNEVLDLGSVPLEETPPETREMKGSISKKRKKLAARQASTAPLAHQNQQPLQSTPAGLTQPFHQMVVAFDSAASQLMHFDQPGSNKEQVYMAIGRFLYDAGVSLEAVNSVYFQPMLEAVASAGGKPEAFSYHDFRGSILKKSLDEVTAQLEFYKGSWTRTGCTLLADEWTTDRGRTLINFSVYCPEDPLYELLKNVVEEVGEKNVVQVITNNSEIHAVAGKRLCETFPTLFWSQCSFQCIDGMLEDFSKVGAINEIICNAKVITGFIYNSAFAFNLMKRHLHGKDLLVPAETRAAMNFVTLKNMYNLKDSLEAMISSDEWIHYLLPKKPGGVEVTNLIGNLQFWSSCAAVVRITEPLVHLLKLVGSNKRPSMGYVYAGLYQAKAAIKKELVRKNDYMAYWDIIDWRWNKDAPRPLHLAGFFLNPLFFDGVRGGTSSEIFSGMLDCVERLVSDVKIQDKIQKELNVYRSEAAGDFRRQMAIRARHTLPPAEWWYTYGGACPNLTRLAVRILSQTCSAKGCDRRHISFEQIHDQRMNLFERQRMHHLTFVQYNLRLQHRQQHKTKAFDPVSVDNIDIVDDWVVDRSALISGQAEQSNWTEINQPVNNITSMGPSDDDEFESFIEGVDDKMIQGASRGTQEDDE

SEQ ID NO: 194925 - protein, 66 aa, Oryza sativa
  Clone ID: PAT_MRT4530_90923C.1.pep
KCTMHGYIPQHLTVLETGWCGAFLWVLYHYLLSYQTVLSWTQGFRVKLQGVWGLLTPICPSSTSGS

SEQ ID NO: 194926 - protein, 140 aa, Oryza sativa
  Clone ID: PAT_MRT4530_90924C.1.pep
PQSHPLPGRLPSFFYPFPCAPQKEERQGVVPFEQGPFFPALGPLLARKGPFPLGGVPHLSLLGFPPSGCLKKIPPPPSKVFKNPPPKLFLCVGLRKQAKIWFAIFPHPMVKKKKKKKKKKKKKKKNQKNKKTQKKKRAPA

SEQ ID NO: 194927 - protein, 170 aa, Oryza sativa
  Clone ID: PAT_MRT4530_90925C.1.pep
MEFCCACRGNNFVSVLRLGSREATAWGHTLGENRSLVKRLGKRRGQGELAVVVSTATEGTLPLHVTDEVVSPHPKSLSFTAIADSARPLNLCQDSCIDFFSSISGGLPFFSDTGDTPNFGREHAGGAGVGGRGKRAGTLGKRRGMGRRLAGRSSPAPLTPSGHPTRPGDG

SEQ ID NO: 194928 - protein, 120 aa, Oryza sativa
  Clone ID: PAT_MRT4530_90926C.1.pep
ENEQMLVYEFMPNGTLRDHLSGKSKPPLGFGLRLHIALGASKGILYLHTDADPPIFHRDVKASNILLDSKYVAKVADFGLSRLAPVPDVEGALPAHVSTVVKGTPLYYTNYILVTLAGVS

SEQ ID NO: 194929 - protein, 230 aa, Oryza sativa
  unsure (1)..(230): unsure at all Xaa locations
  Clone ID: PAT_MRT4530_90927C.1.pep
MAASLRSPPPFPAAAFRRRRAVVRAYSSSSSSSSAVSSAPKARFVARRCESTFVQQLARPLAEYMSLPASQYSVLDAERIERVDESTFRCYVYRFRFFALEVCPVLLVRVDEEPNGCCISLLSCKLEGSPLVEAQNDKFSASMVNKVFCNSSMSDSTSQQLTSDTTIEVTIDIPFPFRALPVEAIESSGRQXLEQLLRVMLPRFLKQLVKDYQAWASGDSSRKPLGTGEI

SEQ ID NO: 194930 - protein, 622 aa, Oryza sativa
  unsure (1)..(622): unsure at all Xaa locations
  Clone ID: PAT_MRT4530_90928C.1.pep
MASISGAAAAAPSSSGASCGLRLRRDHLPRSSHFRLARPSSITDVSRSCSSSSSSPPRSLSSKQSGHADVLAHGAVDKDPIRLWNRYVEWLYQHKQLGLFVDVSRIGFTEEFLRRMEAPMGRAFAAMRELEKGAIANPDEGRMVGHYWLRNPALAPNSFLRDKIETTLERILAFASDVISAKIRPPSSPAGRFTQILSIGIGGSSLGPQFVAEALAPDNPPLKIRFIDNTDPAGIDHQIAQLGPELASTLVIVISKSGGTPETRNGLLEVQKAFRDAGLDFSKQGVAVTQENSLLDNTARIEGWLARFPMFDWVGGRTSEMSAVGLLPAALQGIDIKEMLVGAALMDEETRNTVVKENPAALLALCWYWASEGIGNKDMHVLPYKDSLLLLSRYLQQLVMESLRKEFNLDGEPFRHGRSWIEYKGSSDXTEDIQQLREEDFFVTFIEVLRDRPPGHDWELEPGVTCGDYLFGMLHGTRSALYANDRESITVTVQEVNPRAVGALVALYERAVGIYAYLVNINAYHQPGVEAGKKAAGEVLALQKRVLTVLNEASCKDPAEPLTLDQIAERCHCPEDIEMIYKIIQHMAANDRALIAEGSCGSPRSIKVYLGECNVDEDMLAA

SEQ ID NO: 194931 - protein, 604 aa, Oryza sativa
  Clone ID: PAT_MRT4530_90929C.1.pep
MASISGAAAPPSSSAACRLRLRRQLLLRPSHLRLRAPHSIADLSRSSSSSSEQQPSSTPAAPLASRPGQNGSTRGAVEKDPIKLWERYVEWLYQHKELGLFVDVSRMGFTEEFLRRMEPRMQRAFAAMRELEKGAIANPDEGRMVGHYWLRDPGLAPNSFLRTKIETTLDRILAFSQDVVSGKIKPPSSPAGRFTQILSIGIGGSALGPQFVSEALAPDNPPLKIRFIDNTDPAGIDHQIAQLGPELASTLVIVISKSGGTPETRNGLLEVQKAFRDAGLDFSKQGVAVTQENSLLDNTARIEGWLARFPMFDWVGGRTSEMSAVGLLPAALQGIDIKEMLVGAALMDEETRNTVVKENPAALLALCWYWASEGIGNKDMVVLPYKDSLLLLSRYLQQLVMESLGKEFDLDGNRVNQGLTVYGNKGSTDQHAYIQQLREGVHNFFVTFIEVLRDRPPGHDWELEPGVTCGDYLFGMLQGTRSALYSNDRESISVTVQEVTPRAVGALVALYERAVGIYASLVNINAYHQPGVEAGKKAAGEVLALQKRVLTVLNEARHIEMIYKIIQHMAANDRALIAEGSCGSPRSIKVYLGECNVDEDMLAA

SEQ ID NO: 194932 - protein, 66 aa, Oryza sativa
  Clone ID: PAT_MRT4530_9092C.1.pep
ITATGIVKLLLGCSSSNLDVLLGIGRCYAVCVLLGCNRVSASEMKLRAMVTGKQLTCDLLQEFFFP

SEQ ID NO: 194933 - protein, 105 aa, Oryza sativa
  Clone ID: PAT_MRT4530_90930C.1.pep
TPPPPKQGAGKGPPRGLKVPPAETRKGPPHPGKNRGAPPRGRGGGKHPGNRGPLLGDPPGPQNLKGGNPALFWPGGNPPENRFQKPPGGWFGGTHAAPGGGPPPA

SEQ ID NO: 194934 - protein, 147 aa, Oryza sativa
  Clone ID: PAT_MRT4530_90931C.1.pep
GRVGGNRVNQGLTVYGNKGSTDQHAYIQQLREGVHNFFVTFIEVLRDRPPGHDWELEPGVTCGDYLFGMLQGTRSALYSNDRESISVTVQEVTPRAVGALVALYERAVGIYASLVNINAYHQPGVEAGKKAAGEVLALQKRVLAVLN

SEQ ID NO: 194935 - protein, 133 aa, Oryza sativa
  Clone ID: PAT_MRT4530_90932C.1.pep
TRSGAISGARRIRSTVSPIIIQPTKEAIRLGLICISWRQQRRRGHSREEKILHRTLKQTLLATGTDPGRATMDHACRLARPRTAQTHHAPPPASSLPGFVVHGDAARRCGWESREGERERRRRKGERRRERER

SEQ ID NO: 194936 - protein, 117 aa, Oryza sativa
  Clone ID: PAT_MRT4530_90933C.1.pep
VSPSFPLSIPNRNAERRRHGRRSRGVSSPAAEHDGFGPCVVWPTYTRDPWSLCPDLYRWRGEFASKSCIRPSLMASFVGWMMIGDTVDLILLAPEMAPDLVHRLASGGFVHRLEEER

SEQ ID NO: 194937 - protein, 111 aa, Oryza sativa
  Clone ID: PAT_MRT4530_90934C.1.pep
TRSGAISGARRIRSTVSHRTLKQTLLATGTDPGRATMDHACRLARPRTAQTHHAPPPASSLPGFVVHGDAARRCGWESREGKRERRRRKGERRRERERERRKAIRFSVSKS

SEQ ID NO: 194938 - protein, 142 aa, Oryza sativa
  Clone ID: PAT_MRT4530_90935C.1.pep
SVSLSLSLSAFPPSFAVSPSFPLSIPNRNAERRRHGRRSRGVSSPAAEHDGFGPCVVWPTYTRDPWSLCPDLYRWRGEFASKSCVIFFLPYYVPFGAAASTGLRVFSKFSLGDDSTVDLILGARDADQAESDGFLRRLDDDR

SEQ ID NO: 194939 - protein, 192 aa, Oryza sativa
  Clone ID: PAT_MRT4530_90936C.1.pep
MVAKLLITKVSWGTVVGGEVLGEAGLRKPALFAVKSKEPQWNATPAGKRSAWVQPIMLGLAWTSSLTSLVTNMEEPKMMRVVEGNVVVVMKALGPSHVMQPKGLSSEEEVDDEVMDDYLFKSITKESLPHLCELFEKIEQQYATLERQEFLLIRENEQTNELKGELDKQREMSFWRFKHHLDLEYLKQFSSG

SEQ ID NO: 194940 - protein, 38 aa, Oryza sativa
  Clone ID: PAT_MRT4530_90937C.1.pep
FFFGFFFFFFFFFFFFFFFFFFFLNKKKTWGNPSCERK

SEQ ID NO: 194941 - protein, 109 aa, Oryza sativa
  Clone ID: PAT_MRT4530_90938C.1.pep
MAQPAFLSALRSRLRSPQPQAPALPHLQPPRRGFHVELGAREKAVPIVVIGITYYTTRGFRGGLLEEDTALKRFKSYKNSVKQVSKVGNILTGVVLFACAYEIVALANS

SEQ ID NO: 194942 - protein, 126 aa, Oryza sativa
  unsure (1)..(126): unsure at all Xaa locations
  Clone ID: PAT_MRT4530_90939C.1.pep
KYERTPWLERRRRTGKQDRTTLKLQMRHTGTQQRLRSFTRTYYRRAHXTMISYDVTWQHXFNYTKAWSHETDPXTRDTAYTLVPGNNTYLSGNKVCVIIYSXATADEMGIPFTETTAKNSTLLLQR

SEQ ID NO: 194943 - protein, 124 aa, Oryza sativa
  Clone ID: PAT_MRT4530_9093C.1.pep
MSSTRTPPSSWATDEVPASMYASFLIRYYVADITHMPLRRPPPPLGPPLSSLKPMHWIAIATFGSNDKPLDWMLRVESSSIAGVEDACVSPKDYLPAAGPQHCAPPLVRWKAVGGTIWEKRRWC

SEQ ID NO: 194944 - protein, 562 aa, Oryza sativa
  Clone ID: PAT_MRT4530_90940C.1.pep
MAEEAKNLETARADRSVWLMKCPTVVSRAWQEAATAAASSSSSSDAAAGANSNSNANPNPVVAKFKMEMAQTGNGNTPKSYSLNMFKDFVPMCVFSESNQATPGAVGELAELVLPWLPPQDLAAAASASRALRAAASSVSAGRAADAAHGLEPHPIPFDNLVDGKPYAYFLYTPFSLTPSSASASPRRAQPWGRTWARPPGPTWPRSDLGGFPSSGCACAQGACGGARGCPCADPEAEAVGLGSEAGMGSLRECGDGCACGPSCGNRRTQLGVTVRLRVVRHREKGWGLHAAEVLRRGQFVCEYAGELLTTEEARRRQGLYDELASVAQPPGSSKRRGAVERPASGAGLQAEEASSAGPGAPCGACKFLRRRCVPGCVFAPHFSGCGGSGVGAGVGGRGRERGAAEFAAVHRVFGASNVAKLLSRVPAALRREAARTVCYEAQARIADPVYGSVGTILALQHQLSVLESQLFNLRVALASAHPDTPPQHFVVLQPAHSAASTLNQVVVNYDDLPHAVDFMDAEPAALRGLESLQLSQPLQREEDEGHRDMNLFSDSVGQRQL

SEQ ID NO: 194945 - protein, 592 aa, Oryza sativa
  Clone ID: PAT_MRT4530_90941C.1.pep
MEVDEVGGRWTFSRANEGYTSCGPVVEMSWHRVGALLLGAQSCLPVPEVPAVGGIGSVLLSMARMGWKLCHVFRPYTVVRSGKGNFPGRDIADALSRKSHCNNLNVRGIPPELNQQMEALNLSIVGRGFLAALEAKPTLLDQIREAQKNDPNMHGLLKNMKQGKAAGFTEDEHGTLWNGKRVCVPDNRELKQLILQEAHESPYSIHPGSTKMYLDLKEKYWWVSMKREIAEYVALCDVCQRVKAEHQRPAGLLQPLQVPEWKWDEIGMDFITGLPKTQGGYDSIWVVVDRLTKKIVSDRGSQFTSHFWKKLQEELGTRLNFSTAYHPQTDGQTERLNQILEDMLRACVLDFGKTWDKSLPYAEFSYNNSYQASIQMAPYEALYGRKCRTPLLWDQVGESQVFGTDILREAEAKVRIIRDNLKVAQSRQKSYADNRRRDLEFAVDDFVYLRVTPLRGVHRFQTKGKLAPRYVGPFRINARRGEVAYQLELPASLGNVHDVFHVSQLKKCLRVPSEQADSEQIEVREDLTYVERPVKILDTMERRTRNRVIRFCKVQWSNHAEEEATWEREDELKAAHPDLFASSSESRGRDSV

SEQ ID NO: 194946 - protein, 158 aa, Oryza sativa
  Clone ID: PAT_MRT4530_90942C.1.pep
MAEEAKNLETARADRSVWLMKCPTVVSRAWQEAVTAAASSSSSSDAAAGANSNPNANPNPVVAKVIVSLDPLRSEDQQLQFKMEMAQTGNGNTPKSYSLNMFKDFVPMCVFSESNQGKLSCEGKVGHKFDMEPHSDYLVNYGKLCRERTQKSMIKNRK

SEQ ID NO: 194947 - protein, 631 aa, Oryza sativa
  Clone ID: PAT_MRT4530_90943C.1.pep
MPVGLFPVVTSWPRRGGARDYATFRDASSEDDDKFVVVFIDDILIYSQSEEDHQHHLRLVLGKLREHQLYAKLSKCEFWLSEVKFLGHVISAKGVAVDPETVTAVTDWKQPKTVTQVRSFLGLAGYYRRFIENFSKIARPMTQLLKKEEKFVWSPQCEKAFQTLKEKLVSSPVLILPDTRKDFMVYCDASRQGLGCVLMQDGHVVAYASRQLRPHEGNYPTHDLELAAVVHALKIWRHYLIGNRCEIYTDHKSLKYIFTQSDLNLRQRRWLELIKDYDVGIHYHPGKANVVADALSRKSHCNTLNVRGIPPELNQQMEALNLNIVGRGFLAALEAKPTLLDQIREAQKNDPDMHGLLKNMKQGKAAGFTEDEHGTLWNGNRVCVPDNRELKQLILQEAHESPYSIHPGSTKMYLDLKEKYWWVSMKREIAEFVALCDVCQRVKAEHQRPAGLLQPLQVPEWKWDEIGMDFITGLPKTQGGYDSIWVIVDRLTKVARFIPVKTTYGGNKLAELYFARIVSLHGIPKKIVSDRGSQFTSHFWKKLQEELGTRLNFSTAYHPQTDGQTERLNQILEDMLRACLDFGKTWDKSLPYAEFSYNNSYQASIQMAPYEALYGRKCRTPLLWDQVGESQ

SEQ ID NO: 194948 - protein, 1735 aa, Oryza sativa
  Clone ID: PAT_MRT4530_90944C.1.pep
MTGFVLELRGMCVVLGYPHGVDYQARPLPEQEGEDAEPHAGWEVTAVILSGSPERTSLAVTAGGDSFPAACQNAALLAIGTLHQRYPDELQHSPYRYHPRRGGASDHATFRDASSEDDATVVHLARMVEAYDAARIDFHQMVRRGMVENNMKILELRQENLQLKKDLDALEAQPHQLKVAQGEISRPKRRRVCRSQKITARKSTSRPELVRQSLAWTCFVETPRAEPAPVVPQEGEASGVGSSEGALLLTFRPGPSQRRNVNTGEGNQPEGSNPNPQGNPPPPPPPDTNAILTQILAQQANMMNAFLHHLQNPPQQNAPPPPPQHSKLAEFLRIRPPTFSSSNNPVDALDWLHAVGKKLDTVQCSDEEKVIFAAHQLQGPASLWWDHFQAAQPEGQPITWTRFTAAFRRTHVPAGVVALKKKEFRELKQGNRSVMEYLHEFNNLARYAPEDVREDEEKQEKFLAGMDPELSVRLVSGDYPDFQRLVDKSIRLEAKHKELESHKRRLANIRNQQGANQRVRYTNPYPGGSSSQQQQQQQQQPRSAPRPQFVVRVPQQQPQQNQQGTRAPRPPTPAGQPVQGRRDASGPQRLCFNCFEPGHFADKCPKPRRQQGQAPPRPNNGGKDVIRGRVNHVTAEDVLTTPDVIVGTFLVHSIPATILFDSGASHSFISVPFVGKNQLGVERLRNPLLITTPGGVMTAKYYSPAVPIEIQGIPFPSDLILLDTKNLDVILGMNWLAQFQGVVDCARRTVTLYRGPEQPVCQKSPSSESSEIFPEELPGMPPKREIEFRIDLAPGTTPLYKRPYRMAANELAEVKKQLEELKEKGYIRPSTSPWGAPVIFVEKKDKTKRMCVDYRALNEVTIKNKYPLPRIDDLFDQLKGATVFSKIDLRSGYHQLRIREEDIPKTAFTTRYGLYEFTVMSFGLTNAPAFFMNLMNKVFMEYLDKFVVVFIDDILIYSQTEEDHQHHLRLVLGKLREHQLYAKLSKCEFWLSEVKFLGHVISAKGVAVDPETVTAVTEWKQPKTVTQIRSFLGLAGYYRRFIENFSKIARPMTQLLKKEEKFVWSPQCEKAFQTLKEKLVSSPVLILPDTRKDFMVYCDASRQGLGCVLMQDGHVVAYASRQLRPHEGNYPTHDLELAAVVHALKIWRHYLIGNRCEIYTDHKSLKYIFTQSDLNLRQRRWLELIKDYDVGIHYHPGKANVVADALSRKSHCNTLNVRGIPPELNQQMEALNLSIVGRGFLAALEAKPTLLDQIREAQKNDPDMHGLLKNMKQGKAAGFTEDEHGTLWNGKRVCVPDNRELKQLILQEAHESPYSIHPGSTKMYLDLKEKYWWVSMKREIAEFVALCDVCQRVKAEHQRPAGLLQPLQVPEWKWDEIGMDFITGLPKTQGGYDSIWVVVDRLTKVARFIPVKTTYGGNKLAELYFARIVSLHGIPKKIVSDRGSQFTSHFWKKLQEELGTRLNFSTAYHPQTDGQTERLNQILEDMLRACVLDFGKTWDKSLPYAEFSYNNSYQASIQMAPYEALYGRKCRTPLLWDQVGESQVFGTDILREAEAKVRIIRDNLKVAQSRQKSYADNRRRDLEFAVDDFVYLRVTPLRGVHRFQTKGKLAPRYVGPFRIIARRGEVAYQLELPASLGNVHDVFHVSQLKKCLRVPSEQANSEQIEVREDLTYVERPVKILDTMERRTRNRVIRFCKVQWSNHAEEEATWEREDELKAAHPDLFASSSESRGRDSV

SEQ ID NO: 194949 - protein, 592 aa, Oryza sativa
  Clone ID: PAT_MRT4530_90945C.1.pep
MQDGHVVAYASRQLRPHEGNYPTHDLELAAVVHALKIWRHYLIGNRCEIYTDHKSLKYIFTQSDLNLRQRRWLELIKDYDVGIHYHPGKANVVADALSRKSHCNTLNVRGIPPELNQQMEALNLNIVGRGFLAALEAKPTLLDQIREAQKNDPDMHGLLKNMKQGKAAGFTEDEHGTLWNGKRVCVPDSRELKQLILQEAHESPYSIHPGSTKMYLDLKEKYCVSRQSTSDRLDFSNLSKYQNGNGMKLGWISSPDFQKPKVARFIPVKTTYGGHKLAELYFARIVSLHGVPKKIVSDRGSQFTSHFWKKLQEELGTRLNFSTAYHPQTDGQTERLNQILEDMLRACVLDFGKTWDKSLPYAEFSYNNSYQASIQMAPYEALYGRKCRTPLLWDQVGESQVFGTDILREAEAKVRIIRDNLKVAQSRQKSYADNRRRDLEFPVDDFVYLRVTPLRGVHRFQTKGKLAPRYVGPFRIIARRGEVAYQLELPASLGNVHDVFHVSQLKKCLRMPSEQADSEQIEVREDLTYVERPVKILDTMERRTRNRVTRFCKVQWSNHAEEEATWEREDELKAAHPGLFASSSESRGRDSV

SEQ ID NO: 194950 - protein, 236 aa, Oryza sativa
  Clone ID: PAT_MRT4530_90946C.1.pep
MGATAADDDKEAVAGSGGGSMFSPSSRHSREAAGSSDALPTPGSSGGGCPPPRSGDDGGRRGGGDRIRPRGHVAPKSAASDLLSSHVFASYRARSIEPTTQAHDRQKRKKGAPVNQPIPHSLHRVVASDGAAVPLSSRPRASSWHRSPSSLPGEAIGGRRRFFLETAAVSPHPRGTPSCPLPLGFSWASNRCKPLDNFSGCFAWSSSSGSTALIWGSCLSCLSGVELSVSRCFLLS

SEQ ID NO: 194951 - protein, 29 aa, Oryza sativa
  Clone ID: PAT_MRT4530_90947C.1.pep
RTWIFHWSFSGVYFLIVRNEQEVCTLPYF

SEQ ID NO: 194952 - protein, 655 aa, Oryza sativa
  unsure (1)..(655): unsure at all Xaa locations
  Clone ID: PAT_MRT4530_90948C.1.pep
MTQLLKKEEKFVWSPQCEKAFQTLKEKLVSSPVLILPDTRKDFMVYCDASRQGLGCVLMQDGHVVAYASRQLRPHEGNYPTHDLELAAVVHALKIWRHYLIXGYIFTQSDLNLRQRRWXNVVADALSRKSHCNTLNVRGIPPELNQQMEALNLSIVGRGFLAALEAKPTLLDQIREAQRNDPDMHGLLKNMKQGKAAGFTEDEHGTLWNGKRVCVPDNGELKQLILQEAHESPYSIHPGSTKMYLDLKERYWWVSMKREIAEFVALCDVCQRVKAEHQRPAGLLQPLQVPEWKWDEIGMDFITGLPKTQGGYDSIWVVVDRLTKVARFIPVKTTYGGNKLAELYFARIVSLHGVPKKIVSDRGSQFTSHFWKKLQEELGTRLNFSTAYHPQTDGQTERLNQILEDMLRACVLDFGKTWDKSLPYAEFSYNNSYQASIQMAPYEALYGRKCRTPLLWDQVGESQVFGTDILREAEAKVRIIRDNLKVAQSRQKSYADNRRRDLEFAVGDFVYLRVTPLRGVHRFQAKGKLAPRYVGPFRILARRGEVAYQLELPASLGNVHDVFHVSQLKKCLRVPSEQADSEQIEVREDLTYVERPVKILDTMERRTRNRVIRFCKVQWSNHAEEEATWEREDELKAAHPDLFASSSESRGRDSV

SEQ ID NO: 194953 - protein, 805 aa, Oryza sativa
  Clone ID: PAT_MRT4530_90949C.1.pep
MCVDYRALNEVTIKNKYPLPRIDDLFDQLKGATVFSKIDLRSGYHQLRIREEDIPKTAFTTRYGLYEFTVMSFGLTNAPAFFMNLMNKVFMEYLDKFVVVFIDDILIYSQTEEDHQHHLRLVLGKLREHQLYAKLSKCEFWLSEVKFLGHVISAKGVAVDPETVTAVTDWKQPKTVTQIRSFLGLAGYYRRFIENFSKIARPMTQLLKKEEKFVWSPQCEKAFQTLKEKLVSSPVLILPDTRKDFMVYCDASRQGLGCVLMQDGHVVAYASRQLRPHEGNYPTHDLELAAVVHALKIWRHYLIGNRCEIYTDHKSLKYIFTQSDLNLRQRRWLELIKDYDVGIHYHPGKANVVADALSRKSHCNTLNVRGIPPELNQQMEALNLSIVGRGFLAALEAKPTLLDQIREAQKNDPDMHGLLKNMKQGKAAGFTEDEHGTLWNGKREKYWWVSMKREIAEFVALCDVCQRVKAEHQRPAGLLQPLQVPEWKWDEIGMDFITGLPKTQGGYDSIWVIVDRLTKVARFIPVKTTYGGNKLAELYFARIVSLHGIPKKIVSDRGSQFTSHFWKKLQEELGTRLNFSTAYHPQTDGQTERLNQILEDMLRACVLDFGKTWDKSLPYAEFSYNNSYQASIQMAPYEALYGRKCRTPLLWDQVGESQVFGTDILREAEAKVRIIRDNLKVAQSRQKSYADNRRRDLEFAVDDFVYLRVTPLRGVHRFQTKGKLAPRYVGPFRIIARRGEVAYQLELPASLGNVHDVFHVSQLKKCLRVPSEQADSEQIEVREDLTYVEKPVKILDTMERRTRNR

SEQ ID NO: 194954 - protein, 301 aa, Oryza sativa
  Clone ID: PAT_MRT4530_9094C.1.pep
MIRAGGSNSTPGLGGDRAAVPDGNPVRSGGGGEQRGEHAPAAAELGWPDSMATAAREGERSIDRGEGSDDGEGSSAGVVVGEERRGEDDEAEARERERERGRGGFCAWPKSRDPLTSHHLASRAGAAPVKGEAKAIELGTPTPDPDPDPGGRSSHARRRIKVINLARARVLCGRVVVASLHRGIVATREMLIGEKKSRRRGRVRLSRKLISSVWKTRDYKGSGAGKRGAQRRPPPDTGDIPVIPHSLYGDFGGSPCAGSAPGSVPMGRGIPAPTPPDTGRNVGALPPIQSPVTSHRPVKLD

SEQ ID NO: 194955 - protein, 278 aa, Oryza sativa
  Clone ID: PAT_MRT4530_90950C.1.pep
MAAPLPDAVKEEDEGNMDSFQSGQTIIGQDDFMAIFRNDKPLCELLMKIGQRTSGSSGAKPAAPPPIVHLHGLIPDELCKIDHRPALSDFLSAQQQQQQPPPPAQHGACVKRPAIGPPPGFAGVRQPPQKQQQLPPPPRRRAQQQPASAAAHHRNPNRHHLSGVAAPPAAAANALSIMRKAAAAGGGGAALYCGVCNVKCMTRFNLREHEAGRKHRDKVASNAGEKNVRCQLCDVLLASELNVAQHYAGKQHLHRLRLSRGRGGGGGGGNGATGAGAA

SEQ ID NO: 194956 - protein, 69 aa, Oryza sativa
  Clone ID: PAT_MRT4530_90951C.1.pep
HVVVTYAGGSCCSLHRHVAIWFDDTALMSLTRREIRNKLRKQAVVPNKGVQSSWVIKIQDRICSSVRAL

SEQ ID NO: 194957 - protein, 1777 aa, Oryza sativa
  Clone ID: PAT_MRT4530_90952C.1.pep
MDEVGGRWTFSRANEGYTSCGPMAGSVTRRGLDMTGFVLELRGMCVVLGYPHGVDYQARPLPEQEGEDAEPHAGWEVTAVILSGSPERTSLAVTAGGDSFPAACQNAALLAIGTLHQRYPDELQHSPYRYHPRRGGARDYATFRDASSEDDATVVHLARMVEAYDAARIDFHQMVRRGMVENNLKILELRQENLQLKKDLDALEAQLHQLKIAQGEISRPKRRRVCRSQKITARKSTSRPELVRQSLAWTCFVETPRAEPAPVVPQEGEASGVGSSEAPSLFAGSVWGFQMVTTRRNVNTGEGNQPEGSNPNHQGNPPPPPPPDTNAILTQILAQQANMMTAFLHHLQNPPQQNAPPPPPQHSKLAEFLRIRPPTFSSSNNPVDALDWLHAVGKKLDTVQCSDEEKVVFAAHQLQGPASLWWDHFQATQPEGQPITWARFTAAFRRTHVPAGVVALKKREFRELKQGNRSVMEYLHEFNNLARYAPEDVREDEEKQEKFLAGMDPELSVRLVSGDYPDFQRLVDKSIRLEAKHKELESHKRRLANFRNQQGANQRVRYTNPYPGGSSSQQQQQQQPRPAPRPQFVVRVPQPQQQQNQQGTRAPRPPTPAVQPVQGRRDAQGQQRLCFNCFEPGHFADKCPKPRRQQGQAPPRSNNGGKDVIRGRVNHVTAEDVLTTPDVIVGTFLVHSIPATILFDSGASHSFISVPFVGRNQLGVERLRNPLLITTPGGVMTAKYYSPAVPIEIQGIPFPSDLILLDTKNLDVILGMNWLAQFQGVVDCARRTVTLYRGPEQPVVFFAPSTSVRSSELHQIELSEIPIVREFGDVFPEELPGMPPKREIEFRIDLAPGTTPLYKRPYRMAANELAEVKKQLEELKEKGYIRPKKKDKTKRMCVDYRALNEVTIKNKYPLPRIDDLFDQLKGATVFSKIDLRSGYHQLRIREEDIPKTAFTTRYGLYEFTVMSFGLTNAPAFFMNLMNKVFMEYLDKFVVVFIDDILIYSQSEEDHQHHLRLVLGKLREHQLYAKLSKCEFWLSEVKFLGHVISAKGVAVDPETVTAVTDWKQPKTVTQIRSFLGLAGYYRRFIENFSKIARPMTQLLKKEEKFVWSPQCEKAFQTLKEKLVSSPVLILPDTRKDFMVYCDASRQGLGCVLMQDGHVVAYASRQLRPHEGNYPTHDLELAAVVHALKIWRHYLIGNRCEIYTDHKSLKYIFTQSDLNLRQRRWLELIKDYDVGIHYHPGKANVVADALSRKSHCNTLNVRSIPPELNQQMEALNLSIVGRGFLAALEAKPTLLDQIREAQKNDPDMHGLLKNMKQGKAAGFTEDEHGTLWNGKRVCVPDNRELKQLILQEAHESPYSIHPGSTKMYLDLKEKYWWVSMKREIAEFVALCDVCQRVKAEHQRPAGLLQPLQVPEWKWDEIGMDFITGLPKTQGGYDSIWVIVDRLTKVARFIPVKTTYGGNKLAELYFARIVSLHGIPKKIVSDRGSQFTSRFWKKLQEELGTRLNFSTAYHPQTDGQTERLNQILEDMLRACVLDFGKTWDKSLPYAEFSYNNSYQASIQMAPYEALYGRKCRTPLLWDQVGESQVFGTDILREAEAKVRIIRDNLKVAQSRQKSYADNRRRDLEFAVDDFVYLRVTPLRGVHRFQTKGKLAPRYVGPFRITARRGEVAYQLELPASLGNVHDVFHVSQLKKSLRVPSEQANSEQIEVREDLTYVERPVKILDTMERRTRNRVIRFCKVQWSNHAEEEATWEREDELKAAHPDLFASSSESRGRDSV

SEQ ID NO: 194958 - protein, 72 aa, Oryza sativa
  Clone ID: PAT_MRT4530_90953C.1.pep
WIFLEEQIQQFGSSFEMPLGLRKLSNKLYNHTMHSCIGDYDMSRLRAAKNKHTAVVQIRCIIRLTCRTLIAQ

SEQ ID NO: 194959 - protein, 661 aa, Oryza sativa
  Clone ID: PAT_MRT4530_90954C.1.pep
MQDGHVVAYASRQLRPHEGNYPTHDLELAAVVHALKIWRHYLIGNRCEIYTDHKSLKYIFTQSDLNLRQRRWLELIKDYDVGIHYHPGKANVVADALSRKSHCNTLNVRSIPPELSQQMEALNLNIVGRGFLAALEAKPTLLDQIREAQKNDPDMHGLLKNMKQGKAAGFTEDEHGTLWNGKRVCVPDSRELKQLILQEAHESPYSIHPGSTKMYLDLKEKYWWVSMKREIAEFVALCDVCQRVKAEHQRPAGLLQPLQVPEWKWDEIGMDFITGLPKTQGGYDSIWVIVDRLTKVARFIPVKTTYGGNKLAELYFARIVSLHGIPKKIVSDRGSQFTSHFWKKLQEELGTRLNFSTAYHPQTDGQTERLNQILEDMLRVCVLDFGKTWDKSLPYAEFSYNNSYQASIQMAPYEALYGRKCRTPLLWDQVGESQVFGTDILREAEAKVRIIRDNLKVAQSRQKSYADNRRRDLEFAVDDFVYLRVTPLRGVHRFQTKGKLAPRYVGPFRIIARRGEVAYQLELPASLGNVHDVFHVSQLKKCLRVPSEQADSEQIEVREDLTYVERPVKILDTMERRTRNRVIRFCKVQWSNHAEEEATWEREDERRHRHPDPRRRLPPLRPPFSSSSLFRGEPKTAVRLPPSLLSLGRRSAAPVVAGGDH

SEQ ID NO: 194960 - protein, 860 aa, Oryza sativa
  Clone ID: PAT_MRT4530_90955C.1.pep
SSELHQIGLSEIPIVREFGDVFPEELPGMPPKREIEFRIDLAPGTTPLYKRPYRMAANELAEVKKQLEELKEKGYIRPSTSPWGAPVIFVEKKDKTKRMCVDYRALNEVTIKNKYPLPRIDDLFDQLKDATVFSKIDLRSGYHQLRIREEDIPKTAFTTRYGLYEFTVMSFGLTNAPAFFMNLMNKVFMEYLDKFVVVFIDDILIYSQTEEDHQHHLRLVLGKLREHQLYAKLSKCEFWLSEVKFLGHVISAKGVAVDPETVTAVTDWKQPKTVTQIRSFLGLAGYYRRFIENFSKIARPMTQLLKKEEKFVWSPQCEKAFQTLKEKLVSSPVLILPDTRKDFMVYCDASRQGLGCVLMQDGHVVAYASRQLRPHEGNYPTHDLELAAVVHALKIWRHYLIGNRCEIYTDHKSLKYIFTQSDLNLRQRRWLELIKDYDVGIHYHPGKANVVADALSRKSHCNTLNVRGIPPELNQQMEALNLNIVGRGFLAALEAKPTLLDQIREAQKNDPDMHGLLKNMKQGKAAGFTEDEHGTLWNGKRVCVPDSRELKQLILQEAHKSPYSIHPGSTKMYLDLKEKYWWVSMKREIAEFVALCDVCQRVKAEHQRPAGLLQPLQVPEWKWDEIGMDFITGLPKTQGGYDSIWVIVDRLTKVARFIPVKTTYGGNKLAELYFARIVSLHGVPKKIVSDRGSQFTSHFWKKLQEELGTRLNFSTAYHPQTDGQTERLNQILEDMLRACVLDFGKTWDKSLPYAEFSYNNSYQASIQMAPYEALYGRKCRTPLLWDQVGESQVFGTDILREAEAKVRIIRDNLKVAQSRQKSYADNRRRDLEFAVDDFVYLRVTPLRGVHRFQTKGKLAP

SEQ ID NO: 194961 - protein, 140 aa, Oryza sativa
  unsure (1)..(140): unsure at all Xaa locations
  Clone ID: PAT_MRT4530_90956C.1.pep
MEDSSTGEDGGRCGGYKALAVCQNPRALSEGPIGLAGQIDVEWPVRPASARSDRPQLGLTEYSSVGSASANPEHSIPAIXRPVRPPRSRRSDQPLAPAKLPLLGRPDRPGTGGLTGGRRTVRPALVLLAASGELPMMDRD

SEQ ID NO: 194962 - protein, 37 aa, Oryza sativa
  Clone ID: PAT_MRT4530_90957C.1.pep
GTYSIINVYSTSVFCPNKYTANCSRTELGSSSVSFFF

SEQ ID NO: 194963 - protein, 91 aa, Oryza sativa
  Clone ID: PAT_MRT4530_90958C.1.pep
VTGLHARPTHADKMNVYTRESIGRDLSAHMTDYLRRAALTFGKARERGTPDYGRGRARGTPDFSRGRDRRGPAYEMRASAHGTTTSDDRGE

SEQ ID NO: 194964 - protein, 74 aa, Oryza sativa
  Clone ID: PAT_MRT4530_90959C.1.pep
MGEAPRPKSPPRYPDLCGRRRLQLEMQILNREVGFLEVTSLHFPVMTVYRSVEAMCMCLGLTGGSLFAARATGT

SEQ ID NO: 194965 - protein, 65 aa, Oryza sativa
  unsure (1)..(65): unsure at all Xaa locations
  Clone ID: PAT_MRT4530_9095C.1.pep
TYVEKPIHILETDKRRTRNRVIRFCKVQXSNHSEEEATWEREDELKSAHPHLFASSSESRGRDSV

SEQ ID NO: 194966 - protein, 90 aa, Oryza sativa
  Clone ID: PAT_MRT4530_90960C.1.pep
KGTLRIGAGFQKQRGGPKDDSGGTKMVWTKAEKKKIEGRLMGEGRKIFKGGPKKKKKGGVEKWLELSEQCVKIQEMSMNFQKNQFFKKKN

SEQ ID NO: 194967 - protein, 61 aa, Oryza sativa
  Clone ID: PAT_MRT4530_90961C.1.pep
VTLSVHITVAITSTLSSHLFSYSLSALASAVPSSRYRPLGSSRIRSLVYTPNYAPISCLSL

SEQ ID NO: 194968 - protein, 489 aa, Oryza sativa
  Clone ID: PAT_MRT4530_90962C.1.pep
MATRVLSQNLRKLASFSLLNLSQRAPISPSPEPLRPAIASFGKCLNPFYQFSPPWMVRWASHSSVNLVLSDDGKPKFEIEEVEPSKKRGYLTKKRLKLQRKREKKKRKEANKNDPRRIRPKGKKIKQKFPTPEARLKYKIEKAKLKEAMLVEKLKKYEIAKAQGPMAKQDDLDGEERFYLKKVSQKKSNYVPVGRRGVFGGVILNMHLHWKKHETVKVICKPCKPGQIQEYASEIARLSGGIPINTIGNDTIVFYRGKNYVQPDVMSPVDTLSKKKALEKSKYEQSLETVRRFIAVSEKELELYYRHIALYGNPQSQNVDPVYCDDRRAASLKMEEPSQGKDLSHMDNDGFSDITDASESDEEANPSEYDDNDDETGDNIGTVLYDHGGFKRNWLGVPNRAHFFITVNMAASLWSPYRLAHPHGQKAKFGACKTVVKRIKSGFDVIIMSSSHDTHTSLIDHNIVLNLAAVASFLLGFLLKNNDFAASDL

SEQ ID NO: 194969 - protein, 40 aa, Oryza sativa
  Clone ID: PAT_MRT4530_90963C.1.pep
GSRELTLGQAVCFENCLQDIISCQDRSLSIPLTVSLVEHN

SEQ ID NO: 194970 - protein, 784 aa, Oryza sativa
  Clone ID: PAT_MRT4530_90964C.1.pep
MKSFSFVPLLLIALLLHQSSCLLQVEAENLTAGSTLRPPHYITSPSGDFAFGFRALGSGRPDGWFLLAVWFNDAVQEKAVVWYARDPGSGSAVTATAQSVFSVTLAGQLSLADTAGSNVWTNANPGQQYGSVLVLLDSGNLQFLAAGGRAVVWESFRDPADTLLPGQSMATGAGATLVSKRSDADFSAGRFSLYVQADGNVVLYLNLAAGNVDPYNAYWATGTNQPGNTQDGNTTLFFASPGRVYYQVKDGTVHDLTTPMAKANYYQRATLDPDGVVRVYVRRRSPTSSTSTTTANASWAVAGMFPGDGCSMGTRGLDGFCGPNSYCVVSDDGRLDCACPSGYSFVDAQLRYRGLLAGVRAAELPNTTWTASPYKVYSYTAEEQCGGLCLNDCFCVAALFDGTRCTKMASLTGAGRQGSNVTGKALIKGSDAQYPSGGGGGAEEGATAARLLGRGGFGEVYHGVANSLHLLHSPDTDIAVKKLIVSNEYTEREFANEVQSIGRIHHRSLVRMIGYCKEREQRMLVFEFMPGGSLRSFLFHQQPRRRPPPPPWTWRAEAALAIAKGIEYLHEGCASPIIHCDIKPDNILLDDKNNPKIADFGISRLLGDEQLHTTVTNVRGTRGYIAPEWLHGDRRIDTKVDVYSFGVVLLEMICCRRCQDPITSQLHQDDNGDCDDDTVTLFGWAAGLVSHGRVEVLLRSDDDAAEDLERVERFARVAFWCIVHNPSLRPTIHQVVQMLEGVVEVHAPPHLPSYTDSSSSSFIHTDSPALRPRGSSCPVELDLI

SEQ ID NO: 194971 - protein, 1744 aa, Oryza sativa
  Clone ID: PAT_MRT4530_90965C.1.pep
MAEQGKTHDLSPSVSGDDGEPNPRRRARTPPPPPRQSPKQGEALERVDKSAASPAAGDAGERRDGERRLLVYGDGSTPQGALQAAGALLRHPPVVHDPESPAQRWLEDVANLVMTAQQRLGAGGRSATTTKTSGAATTGSVSSRRRARRAAAAARHSAATPSSTPSTREDQHGEPDARLNIGRRCNSRRTPRATEGASSSRVSLRHGREDQPSVPPAGGVGCRAFVASLRNVRWPPRFRPTITEKYDGSVNPTEFLQVYTTGIEAAGGDDRVMANFFPMALKGQARGWLMNLPPASVHSWEDLCQQFTMNFQGTYPRPGEEADLHAVQRGDDESLRSYIQRFCQVRNTIPCIPAHAVIYAFRGGVRHNRMLEKIASKEPQTTAELFQLADRVARKEEAWTWNSSGSGVAASAAPGSAAQTGRRDRRRKKRSDRSGDEGHVLAVEGAPRATRKGRPASDKKKEAGTPGRERPAGRWCSVHNTSLHDLADCRAVKNLAERTRKWEEDRRQERREGKSPVVPSGKRRGEAKQKAPAVDIDDGDDDLGFQEPGATIATVDGGACAHVSRRSFKAMKRELLAMAPTHEAMRRARWSEVALTFDQTDHPPCIARGGQVAMVVSPTICNVKLGRVLIDGGAALNILSPAAFDAIKAPGMVLQPSQPIIGVTPGHTWPLGHIDLPVTFGGPANFRTERVSFDVADLSLPYNAVLGRPALVKFMAAVHYAYLQMKMPGPGGPISVRGDLKVALACIEQRADRLAAASKPEGGDERLGPSAPTAPRQRMATCDEVPEDALVSFLRANADVFAWRPADMPGVPREVIEHRLAVRPGARPVRQKVRRQAPERQAFIREEVARLLEAGFIREVIHPEWLANPVVVPKANGKLRMCIDYTDLNKACPKDPYPLPRIDQIVDSTAGCDLLCFLDAYSGYHQIRMAREDEEKTAFITPVGTYCYTSMPFGLKNAGPTFQRTTRISLGSQIGRNVEAYVDDLVVKTRNQETLLSDLAETFENLRSARIKLNPDKCVFGVPAGKLLGFLVSARGIEANPEKIRAIERMRPPSKLRDVQCVTGCMAALSRFISRLGEKALPLFKLLKRSGPFTWTEEAENALAQLKAYLSSPPVLVAPEPNESLLLYLAATPQVVSAALVVERDEDNPHSAHPRSVPTWPGSRQGGEAPESNGGLRPPTTGVGPPPACQTVLGAPDPQEGPEATEGRLHLKPFGPEANPVLTRPGKEQGEGAPEPNGGQRPLTTGVGPLPACPTMPGVPDPQDGPEATVGGPLLSSSDPEVISAEDECAPRGHLDEERPGGTAPNEEDRPRRKVQRPVYFVSEALRDAKTRYPQAQKMLYAILMASRKLRHYFQAHRVTVVTSYPLGQILHNREGTGRVVKWAIELSEFDLHFEPRHAIKSQALADFVAEWTPAPETVSMPEASTNPSQLPHAAHWVMQFDGSLSLQGAGAGVTLTSPNGDVLRYLVRLDFRATNNMAEYEGLLAGLRVAAGLGIRRLLVLGDSQLVVNQGITARFGVPNRIITDNGTQFTSELFGDYCEDMGIKLCFASPAHPRSNGQVERANAEILKGLKTKTFNILKKHGDSWIEELPAVLWANRTTPSRATGETPFFLVYGAEAVLPSELTLRSPRATMYCEADQDQLRRDDLDYLEERRRRAALRAARYQQSLRRYHQRHVRARSLCVDDLVLRRVQTRAGLSKLSPMWEGPYRVIGVPRPGSVRLATGDGTELPNPWNIEHLRRFYP

SEQ ID NO: 194972 - protein, 1992 aa, Oryza sativa
  Clone ID: PAT_MRT4530_90966C.1.pep
MAEQGKTHDLSPSVSGDDGEPNPRRRARTPPPPPRQSPKQGEALERVDKSAASPAAGDAGERRDGERRLLVYGDGSTPQGALQAAGALLRHPPVVHDPESPAQRWLEDVANLVMTAQQRLGAGGRSATTTKTSGAATTGSVSSRRRARRAAAAARHSAATPSSTPSTREDQHGEPDARLNIGRRCNSRRTPRATEGASSSRVSPRHGREDQPSVPPAGGVGCRAFVASLRNVRWPPRFRPTITEKYDGSVNPTEFLQVYTTGIEAAGGDDRVMANFFPMALKGQARGWLMNLPPASVHSWEDLCQQFTMNFQGTYPRPGEEADLHAVQRGDDESLRSYIQRFCQVRNTIPCIPAHAVIYAFRGGVRHNRMLEKIASKEPQTTAELFQLADRVARKEEAWTWNSSGSGVAASAAPGSAAQTGRRDRRRKKRSDRSGDEGHVLAVEGAPRATRKGRPASDKKKEAGTPGRERPAGRWCSVHNTSLHDLADCRAVKNLAERTRKWEEDRRQERRDGKSPAVPSDKRRSEAKKKAPAVDIDDGDDDLGFQEPGATIATVDGGACAHVSRRSFKAMKRELLTMAPTHEAMRRARWSEVALTFDQTDHPPCIARGGQVAMVVSPTICNVKLGRVLIDGGAALNILSPAAFDAIKAPGMVLQPSQPIIGVTPGHTWPLGHIDLPVTFGGPANFRTERVSFDVVDLSLPYNAVLGRPALVKFMAAVHYAYLQMKMPGPGGPISVRGDLKVALACMEQRADRLAAASKPEGGDERLGPSAPTAPRQRMATCDEVPEDALVSFLRANADVFAWRPADMPGVPREVIEHRLAVRPGARPVRQKVRRQAPERQAFIREEVARLLEAGFIREVIHPEWLANPVVVPKANGKLRMCIDYTDLNKACPKDPYPLPRIDQIVDSTAECDLLCFLDAYSGPTFQRTTRISLGSQIGRNVEAYVDDLVVKTRNQETLLSDLAETFENLRSARIKLNPDKCVFGVPAGKLLGFLVSARGIEANPEKIRAIERMRPPSKLRDVQCVTGCMAALSRFISRLGEKALPLFKLLKRSGPFTWTEEAENALAQLKAYLSSPPVLVAPEPNESLLLYLAATPQVVSAALVVERDEDNPHSAHPRSVPTWPGSRQGGEAPESNGGLRPPTTGVGPPPACQTVLGAPDPQEGPKATEGRLHLKPFGPEANPVLTRPRKEQGEEAPEPNGGQRPLTTGVGPLPACPTMPGVPDPQDGPEATVGGPLLSSSDPEVISAEDEFAPRGHLDEERPGGTAPNEEDRPRRKVQRPVYFVSEALRDAKTRYPQAQKMLYAILMASRKLRHYFQAHRVTVVTSYPLGQILHNREGTGRVVKWAIELSEFDLHFEPRHAIKSQALADFVAEWTPAPETVSMPEASTNPSQLPHAAHWVMQFDGSLSLQGAGAGVTLTSPNGDVLRYLVRLDFRATNNMAEYEGLLAGLRVAAGLGIRRLLVLGDSQLVVNQVCKEYRCSDPQMDAYVRQVRRMERHFDGIELRHVPRRDNMIADELSRLASSRAQTPPGAFEERLTQPSARPDPLGETDAPDRPPRPVGVQASGPEESVPSSLRLIAWISEIQTYLTDKTLPEDREGSERVQRISKRYVLVEGTLYRRAANGILLKCIPQEQGVELLADIHEGECGAHSASRTLVGKAFRQGFYWPTALNDAVDLVRRCRACQFHAKQIHQPAQALQIIPLSWPFAVWGLDILGPFKRAPGGFEYLYVAIDKFTKWPEAYPVVKIDKHSALKFIKGITARFGVPNRIITDNGTQFTSELFGDYCEDMGIKLCFASPAHPRSNGQVERANAEILKGLKTKTFNILKKHGDSWIEELPAVLWANRTTPSRATGETPFFLVYGAEAVLPSELTLRSPRATMYCEADQDQLRRDDLDYLEERRRRAALRAARYQQSLRRYHQRHVRARSLCVDDLVLRRVQTRAGLSKLSPMWEGPYRVIGVPRPGSVRLATGDGTELPNPWNIEHLRRFYP

SEQ ID NO: 194973 - protein, 112 aa, Oryza sativa
  unsure (1)..(112): unsure at all Xaa locations
  Clone ID: PAT_MRT4530_90967C.1.pep
YACGSVRIPVDHASASSSEEEKEVSKDVAVETSVVVPSVVAASPDDEAAAVASGDGGDVIKHDDEAVVRPDDWASWAQQPAYYFYDVAAAATTTPQAAPEIHTXSLQPAAGA

SEQ ID NO: 194974 - protein, 2160 aa, Oryza sativa
  Clone ID: PAT_MRT4530_90968C.1.pep
MGLETRNFIQGGAEDGASGVECKGEHHEVRLRTAVCLLLLLLLIAILIVEDGDSTGECSWVKARRRLPTHRKENEGDDGRPSKQREELELGRPRSLPPRDDLKLGGLRRMERRVENTTTEPRSCFTSDGDLSDESFDSDGGDESFDFGVGRQRSARPVNRAHTRVYQTTQSPTWPGTFGDVGPEGEARCCVEEGPNHATACHRLPPPGDTEWDPICGPGPDTYPIRRAQPCSHDALTPGGSGELSDSSVCPKFFLFSLMAEQGKTHDLSPSVSGDDGEPNPRRRARTPPPPPRQSPKQGEALERVDKSAASPAAGDAGERRDGERRLLVYGDGSTPQGALQAAGALLRHPPVVHDPESPAQRWLEDVANLVMTAQQRLGAGGRSATTTKTSGAATTGSVSSRRRARRAAAAARHSAATPSSTPSTREDQHGEPDARLNIGRRCNSRRTPRATEGASSSRVSPRHGREDQPSVPPAGGVGCRAFVASLRNVRWPPRFRPTITEKYDGSVNPTEFLQVYTTGIEAAGGDDRVMANFFPMALKGQARGWLMNLPPASRFCQVRNTIPCIPAHAVIYAFRGGVRHNRMLEKIASKEPQTTAELFQLADRVARKEEAWTWNSSGSGVAASAAPGSAAQTGRRDRRRKKRSNRSGDEGHVLAVEGAPRATRKGRPASDKKKEAGTPGRERPAGRWCSVHNTSLHDLADCRAVKNLAERTRKWEEDRRQERREGKSPVVPSGKRRGEAKQKAPAVDIDDGDDDLGFQEPGATIATVDGGACAHVSRRSFKAMKRELLAMAPTHEAMRRARWSEVALTFDQTDHPPCIARGGQVAMVVSPTICNVKLGRVLIDGGAALNILSPAAFDAIKAPGMVLQPSQPIIGVTPGHTWPLGHIDLPVTFGGPANFRTERVSFDVADLSLPYNAVLGRPALVKFMAAVHYAYLQMKMSGPGGPISVRGDLKVALACIEQRADRLAAASKPEGGDERLGPSAPTAPRQRMATCDEVPEDALVSFLRANADVFAWRPADMPGVPREVIEHRLAVRPGARPVRQKVRRQAPERQAFIREEVARLLEAGFIREVIHPEWLANPVVVPKANGKLRMCIDYTDLNKACPKDPYPLPRIDQIVDSTAGCDLLCFLDAYSGYHQIRMAREDEEKTAFITPVGTYCYTSMPFGLKNAGPTFQRTTRISLGSQIGRNVEAYVDDLVVKTRNQEILLSDLAETFENLRSARIKLNPDKCVFGVPAGKLLGFLVSARGIEANPEKIRAIERMRPPSKLRDVQCVTGCMAALSRFISRLGEKALPLFKLLKRSGPFTWTEEAENALAQLKAYLSSPPVLVAPEPNESLLLYLAATPQVVSAALVVERDEDNPHSAHPRSVPTWPESRQGGEAPESNGGLRPPTTGVGPPPACQTVLGAPDPQEGPEATEGRLHLKPFGPEANPVLTQPGKEQGEEAPEPNGGQRPLTTGVGPLPACPTMPGVPDPQDGPEATVGGPLLSSSDPEVISAEDECAPRGHLDEERPGGTAPNEEDRPRRKVQRPVYFVSEALRDAKTRYPQAQKMLYAILMASRKLRHYFQAHRVTVVTSYPLGQILHNREGTGRVVKWAIELSEFDLHFEPRHAIKSQALADFVAEWTPAPETVSMPEASANPSQLPHAAHWVMQFDGSLSLQGAGDSQLVVNQVCKEYRCSDPQMDAYVRQVRRMERHFDGIELRHVPRRDNMIADELSRLASSRAQTPPGAFEERLTQPSARPDPLGETDAPDRHPRPVGVQASGPEESVPSSLRLIAWISEIQTYLTDKTLPEDREGSEREQGVELLADIHEGECGAHSASRTLVGKAFRQGFYWPTALNDAVDLVRRCRACQFHAKQIHQPAQALQIIPLSWPFAVWGLDILGPFKRAPGGFEYLYVAIDKFTKWPEAYPVVKIDKHSALKFIKGITARFGVPNRIITDNGTQFTSELFGDYCEDMGIKLCFASPAHPRSNGQVERANAEILKGLKTKTFNILKKHGDSWIEELPAVLWANRTTPSRATGETPFFLVYGAEAVLPSELTLRSPRATMYCEADQDQLRRDDLDYLEERRRRAALRAARYQQSLRRYHQRHVRARSLCVDDLVLRRVQTRAGLSKLSPMWEGPYRVIGVPRPGSVRLATGDGTELPNPWNIEHLRRFYP

SEQ ID NO: 194975 - protein, 104 aa, Oryza sativa
  Clone ID: PAT_MRT4530_90969C.1.pep
RRSSYSTISKPNNAICTWEGFCCLQWRNGHNDLSIDYKLGFQIHSYTGVAELLVLSIQAHRKSVMFVLHSSDSIFVVFIFVPCKPGQCPSFVRQSTGRCIMHMV

SEQ ID NO: 194976 - protein, 170 aa, Oryza sativa
  unsure (1)..(170): unsure at all Xaa locations
  Clone ID: PAT_MRT4530_9096C.1.pep
DLEEWSELQEMLXSTQLTAENDTMFWKLNQSGTFTTKSLYRAIIFGGIKGTKLQELWKTPVPLKIKVFMWLMLKGRIQVAKQLKKMNWSGSPFCAWSIWLVRNDWVFNDKLLTNVTFLPHKAMSFMIQWKNLAPVQLKEELEKHFYLDSFAVNCEAGIPGTTVSDSYAFL

SEQ ID NO: 194977 - protein, 1891 aa, Oryza sativa
  unsure (1)..(1891): unsure at all Xaa locations
  Clone ID: PAT_MRT4530_90970C.1.pep
MTRGLRQTQPPTWPGTFGDVGPEGEVSALLLISPEGGSGCACPGPEGRGTPTPFRKSAPPQYGAFLYPVCDQSQTGQITDSSVCPKFFLFNLMAEQGKTHDLSPSVSGDDGEPNPRRRARTPPPPPRQSPKQGEALERVDKSAASPAAGDAGERRDGERRLLVYGDGSTPQXRLGAGGRSATTTKTSGAATTGSVSSRRRARRAAAAARHSAATPSSTPSTREDQHGEPDARLNIGRRXAFVASLRNVRWPPRFRPTITEKYDGSVNPTEFLQVYTTGIEAAGGDDRVMANFFPMALKGQARGWLMNLPPASVHSWEDLCQQFTMNFQGTYPRPGEEADLHAVQRGDDESLRSYIQRFCQVRNTIPCIPAHAVIYAFRGGVRHNRMLEKIASKEPQTTAELFQLADRVARKEEAWTWNSSGSGVAASAAPGSAAQTGRRDRRRKKRPDRSGDEGHVLAVEGAPRATRKGRPASDKKNGAGTPSRERPAGRWCSVHNTSLHHLADCRAVKNLAERTRKWEEDRRQERREGKSPAVPSGKRRSEAKQKAPAVDIDDGDDDLGFQEPGATIATVDGGACAHVSRRSFKAMKRELLAMAPTHEAMRRARWSEVALTFDQTDHPPCIARGGQVAMVVSPTICNVKLGRVLIDGGAALNILSPAAFDAIKAPGMVLQPSQPIIGVTPGHTWPLGHIDLPVTFGGPANFRTERVSFDVADLSLPYNAVLGRPALVKFMAAVHYAYLQMKMPGPGGPISVRGDLKVALACIEQRADRLAAASKPEGGDERLGPSAPTAPRQRMATCDEVPVKEEDALVSFLRANADVFAWRPADMPGVPREVIEHRLAVRPGARPVRQKVRRQAPERQAFIREEVARLLEAGFIREVIHPEWLANPVVVPKANGKLRMCIDYTDLNKACPKDPYPLPRIDQIVDSTAGCDLLCFLDAYSGYHQIRMAREDEEKTAFITPVGTYCYTSMPFGLKNAGPTFQRTTRISLGSQIGRNVEAYVDDLVVKTRNQETLLSDLAETFENLRSARIKLNPDKCVFGVPAGKLLGFLVSARGIEANPEKIRAIERMRPPSKLRDVQCVTGCMAALSRFISRLGEKALPLFKLLKRSGPFTWTEEAENALAQLKAYLSSPPVLVAPEPNESLLLYLAATPQVVSAALVVERDEDNPHSAHPHSVPTWPGSRQGGEAPESNGGLRPPTTGVGPPPACQTVSGAPDPQEGPEATAGRPHLSLSDPEANPVPIRPGREQGEEAPEPNGGLRPLTTGVGPLPACPMTPGAPNPQDGPEATVGRPLLSSSDPEVIGTEDGCAPRGHSDEERPGGAAPSEEDRPRRKVQRPVYFVSEALRDAKTRYPQAQKMLYAILMASRKLRHYFQAHRVAVNPLFAFYRFGLLPSSPVVSSHLPTVALSLPRCRPASSRLSLLTGASSGRAVASSSIAAAPSPSAYPPFRAVTAGGAFPPSSSSFLRAGRLQPPLSPCLSAGRRRHHLPRLRDAALIPGITSSSPEHRRNTVARAGLTFLLVDISSGCPVAAPERRPTSPSPPSATPHRPPPRPALGFAGTSPRTSTSASPELFGRPSLLAVYRSATSTTIFGIAAATSSSASQLLPLPRGVATTSPPPAASATSPERRPTSPPPSSAPRRRSHPRHHLLLARTSPERRRLRAGLSFLLVGSSPRCTTTITNVVAACSTLSPPPLSRCCLPSSSSPIVLVIDVPSVARLVVSRRRLRHRHRSGVSHVVLVSVQPLPAVLVASSPVPVVAVVVVLSSFPVVVAFVPPSSRSRPSSAFVKRAAAAPSSSPPSAPRRQAPCRPRLAFVQGSPPKPSPRRSSPLCPSVSAAPVRRCRSHASSRGGKDPSSRFPALVLSASPRTRCAVVDPVRVVSSGVRLSATRLG

SEQ ID NO: 194978 - protein, 2431 aa, Oryza sativa
  Clone ID: PAT_MRT4530_90971C.1.pep
MASASDKLVLSAIVLAVLAAVVAAASGYGDVGEYCRVGKAVSRNPVPSCRNYIARWCAAAGGRMDSRKQPPREFLEPCCRELAAVPMQCRCDALSVLVRGVVTEEGDRVSGMISQHAAPGCDAATIAGMASALTDYGRKGIVTPLSSMRLVRRGAELFSSNGVRDPRQILEAVPQRINAEMNEELTRDFSEEEVKKALDNIGDLKAPGPDGMPSLFYKRFWDVVGDQVVKETLAVLRGAPMPTEWNETTIVLIPKVNKPENIKDLRPISLCNVLYKIVSKVLANRLKGILPDAISPSQSAFVPGRLISDNILVAYEMTHFMRKKRKGKLGYAAIKLDMSKAYDRVEWHFLREMMLRLGFDEGWTNLIMQCVTSVSYRIKVNEGFSALLKQAENEGRMKGDAQCLQEILSLYEELSGQMINKDKSVVMFSPNTSNSITETGNVLHLAKGTNLVTRVNELIDPYTWEWDEPLVRQTFWEEDVEHILSIPVHTDMKDVVGWHFDRGNRRMGLCYQGSGCTSGPSGSGQIDSNARCSLSVIWDRGYRDQRLEADTIAHAAWHLRGRRARGLVKRVTLHAAQCSAFLYPVCDRSQTGQITGERRDGERRLLVYGDGSTPQGALQAAGALLRHPPVVHDPESPAQRWLDDVANLVMTAQQRLGAGGRSATTKTSGATTTGSVSSRRRARRAAAAARHSAATPSSTPSTREDQHGEPDARLNIERRRNSRRTPRETEGASSSRVSPRHGREDQPSVPPAGGVGCRAFVASLRNVRWPPRFRPTITEKYDGSVNPTEFLQVYTTGIEAAGGDDRVMANFFPMALKGQARGWLMNLPPASVHSWEDLCQQFTMNFQGTYPRPGEEADLHAVQRGDDESLRSYIQRFCQVRNTIPCIPAHAVIYAFRGGRHDRRRKKRSVHSGDEGHVLAVEGAPRATRKGRPASDKKKEAGTPSRERPAGRWCSVHNTSLHDLADCRAVKNLAERTRKWEEDRRQERREGKSPAVPSGKRRSEAKQKAPAVDIDDGDDDLGFQEPGATIATVDGGACAHISRRSFKAMKRELLAAAPTHEATRRARWSEVVLTFDQTDHPPCVARGGQIAMVVSPTICNVKLGRVLIDGGAALNILSPAAYDAIKAPGMVLQPSQPIIGVTLGHTWPLGHIDLPVTFGGSANFRTERVNFDVADLSLPYNAVLGRPALVKFMAAVHYAYLQMKMPGPGGPISVHGDLKVALACMEQRADHLAAASKHEGGDERLGTSAPTAPRRRIVTCDEVPVKEEDALVSFLRANADVFAWRPADMPGVPREAPERQAFIREEVARLLEAGFIREVIHPEWLANPVVVPKANGKLRMCIDYTDLNKACPKDPYPLPRIDQIVDSTAGCDLLCFLDAYSGYHQIRMAREDEEKTAFITPVGTYCYTSMPFGLKNAGPTFQRTTRISLGSQIGRNVEAYVDDLVVKTRNQETLLSDLAETFENLRAARIKLNPDKCVFGVPAGKLLGFLVSARGIEANPEKIRAIERMRPPSKLRDVQCVTGCMAALSRFISRLGEKALPLFKLLKRSGPFTWTEEAENALAQLKAYLSSPPVLVAPEPNEPLLLYLAATPQVVSAALVVERDEDNPHSAHPHPVPTWPGSKQGGEAPESNGGLRPLTTGVGPLPACQTVLGAPDPQEGPEATEGRPHLSPFGPEANPVLTRPGREQGEEAPEPNGGLRPLTPGVGPLPACPTTPGAPDPQDGPEATVGRPLLSSSDPEVIGTEDECAPRGHLDEERPGGTAPSEEDRPRRKVQRPVYFVSEALRDAKTRYPQAQKMLYAILMASRKLRHYFQAHRVTVVTSYPLGQILRNREGTGRVVKWAIELFEFDLHFEPRHAIKNQALADFVAKWTPAPETVSIPEASTDPSQLPHTSHWVMQFDGSLSLQGAGAGVTLTSPKGDVLRYLVRLDFRATNNMAEYEGLLAGLRVAVGLGIRRLLVLGDSQLVVNQTPPGAFEERLTQPSARPDPLGETDAPDRPPRPVGVQASGPEGSAPSSLRLIAWISEIQAYLTDKTLPEDREGSERVQRISKRYVLVEGTLYRRAANGILLKCIPQEQGVELLADIHEGECGAHSASRTLVGKAFRQGFYWPTALNDAVDLVRRCRACQFHAKQIHQPAQALQIIPLSWPFAVWGLDILGPFKRAPGGFEYLYVAIDKFTKWPEAYPVVKIDKHSALKFIKGITARFGVPNRIITDNGTQFTSELFGDYCEDMGIKLCFASPAHPRSNGQVERANAEILKGLKTKTFNILKKHGDSWIEELPAVLWANRTTPSRATGETPFFLVYGAEAVLPSELTLRSPRATMYCEADQDQLRRDDLDYLEERRRRAALRAACYQQSLRRYHQRHVRARSLCVDDLVLRRVQTRAGLSKLSPMWEGPYRVIGVPRPGSIRLATGDGTELPNPWNIEHLRRF

SEQ ID NO: 194979 - protein, 204 aa, Oryza sativa
  Clone ID: PAT_MRT4530_90972C.1.pep
MALLPRAARLAALRGRAQPRRGYAGAPPPAGSASPAPYGGAPPPAANSKAAECVISKVDDLMNWARRGSIWPMTFGLACCAVEMMHTGASRYDFDRFGVIFRPSPRQSDCMIVAGTLTNKMAPALRKVYDQMPEPRWVISMGSCANGGGYYHYSYSVVRGCDRIVPVDIYVPGCPPTAEALLYGVLQLQKKINRRRDFLHWWNK

SEQ ID NO: 194980 - protein, 1590 aa, Oryza sativa
  unsure (1)..(1590): unsure at all Xaa locations
  Clone ID: PAT_MRT4530_90973C.1.pep
MAEQGKTHDLSPSVSGDDGEPNPRRRARTPPPPPRQSPKQGEALERVDKSAASPAAGDAGERRDGERRLLVYGDGSTPQGALQAAGALLRHPPVVHDPESPAQRWLEDVANLVMTAQQRLGAGGRSATTKTSGAATTGSVSSRRRARRAAAAARHSAATPSSTPSTREDQHGEPDARLNIGRRRNSRRTPRATEGASSSRVSPRHGREDQPSVPPAGGVGCRAFVASLRNVRWPPRFRPTITEKYDGSVNPTEFLQVYTTGIEAAGGDDRVMANFFPMALKGQARGWLMNLPPASVHSWEDLCQQFTMNFQGTYPRPGEEADLHAVQRGDDESLRSYIQRFCQVRNTIPCIPAHAVIYAFRGGVRHNRMLEKIASKEPQTTAELFQLADRVARKEEAWTWNSSGSGVAASAAPGSAAQTGRCDRRRKKRSDRSGDEGHVLAVEGAPRATRKGRPASDKKKEAGTPSRERPAGRWCSVHNTSLHDLADCRAVKNLAERTRKWEEDRRQERREGKSPAVPSGKRRSEAKQKAPAVDIDDGDDDLGFQEPGATIATVDGGACAQVSRRSFKAMKRELLAMAPTHEAMRRARWSEVALTFDQTDHPPCIARGGQVAMVVSPTICNVKLGRVLIDGGAALNILSPAAFDAIKAPGMVLQPSQPIIGVTPGHTWPLGHIDLPVTFGGPANFRTERVSFDVADLSLPYNAVLGRPALVKFMAAVHYAYLQMKMPGPGGPISVRGDLKVALACMEQRADRLAAASKPEGGDERLGPSAPTAPRQRMATGDEVPEDALVSFLRANADVFAWRPADMPGVPREVIEHRLAVRPGARPVRQKVRRQAPERQAFIREEVARLLEAGFIREVIHPEWLANPVVVPKANGKLRMCIDYTDLNKACPKDPYPLPRIDQIVDSTAGPGSRQGGETPESNGGLRPPTTGVGPPPACQKVPGAPDPQEGPEATVGRPHLTPFDPEANPVLTRPGKEQGEEAPESNGGQRPLTTGVGPLPACPTMPGAPDPQDGPEATEGRPPLSSSDPEVIGTEDKCAPKGHLNEERPGDTAPSREDRPHRRVQRPVYFVSEALRDAKTRYPQAQKMLYAILMASRKLRHYFQAHRVTVVTSYPLGQILHNREGTGRVVKWAIELSEFDLHFEPRHAIKSQALADFVAEWTPAPETVSIPEANTDPTQLPHAAHWVMQFDGSLSLQGAGAGVTLTSPNGDVLRYLVRLDFRATNNMAEYEGLLAGLRVAVGLGIRRLLVLGDSQLVVNXDKTLPEDREGSERVQRISKRYXCQFHAKQIHQPAQALQIIPLSWPFAVWGLDILGPFKRAPGGFEYLYVAIDKFTKWPEAYPVVKIDKHSALKFIKGITARFGVPNRIITDNGTQFTSELFGDYCEDMGIKLCFASPAHPRSNGQVERANAEILKGLKTKTFNILKKHGDSWIEELPAVLWANRTAPSRATGETPFFLVYGAEAVLPSELTLRSPRATMYCEADQDQLRRDDLDYLEERRRRAALRAARYQQSLRRYHQRHVRARSLCVDDLVLRRVQTRAGLSKLSPMWEGPYRVIGVPRPGSVRLATGDGTELPNPWNIEHLRRFYP

SEQ ID NO: 194981 - protein, 1727 aa, Oryza sativa
  unsure (1)..(1727): unsure at all Xaa locations
  Clone ID: PAT_MRT4530_90974C.1.pep
MAEQGKTHDLSPSVSGDDGEPNPRRRARTPPPPPRQSPKQGEALERVDKSAASPAAGDAGERRDGERRLLVYGDGSTPQGALQAAGALLRHPPVVHDPESPAQRWLEDVANLVMTAQQRLGAGGRSATTTKTSGAATTGSVSSRRRARRAAAAARHSAATPSSTPSTREDQHGEPDARLNIGRRCNSRRTPRATEGASSSRVSPRHGREDQPSVPPAGGVGCRAFVASLRNVRWPPRFRPTITEKYDGSVNPTEFLQVYTTGIEAAGGDDRVMANFFPMALKGQARGWLMNLPPASVHSWEDLCQQFTMNFQGTYPRPGEEADLHAVQRGDDESLRSYIQRFCQVRNTIPCIPAHAVIYAFRGGVRHNRMLEKIASKEPQTTAELFQLADRVARKEEAWTWNSSGSGVAASAAPGSAAQTGRRDRRRKKRSDRSGDEGHVLAVEGAPRATRKGRPASDKKKEAGTPGRERPAGRWCSVHNTSLHDLADCRAVKNLAERTRKWEEDRRQERRDGKSPAVPSDKRRSEAKKKAPAVDIDDGDDDLGFQEPGATIATVDGGACAHVSRRSFKAMKRELLTMAPTHEAMRRARWSEVALTFDQTDHPPCIARGGQVAMVVSPTICNVKLGRVLIDGGAALNILSPAAFDAIKAPGMVLQPSQPIIGVTPGHTWPLGHIDLPVTFGGPANFRTERVSFDVVDLSLPYNAVLGRPALVKFMAAVHYAYLQMKMPGPGGPISVRGDLKVALACMEQRADRLAAASKPEGGDERLGPSAPTAPRQRMATCDEVPEDALVSFLRANADVFAWRPADMPGVPREVIEHRLAVRPGARPVRQKVRRQAPERQAFIREEVARLLEAGFIREVIHPEWLANPVVVPKANGKLRMCIDYTDLNKACPKDPYPLPRIDQIVDSTAECDLLCFLDAYSGIEANPEKIRAIERMRPPSKLRDVQCVTGCMAALSRFISRLGEKALPLFKLLKRSGPFTWTEEAENALAQLKAYLSSPPVLVAPEPNESLLLYLAATPQVVSAALVVERDEDNPHSAHPRSVPTWPGSRQGGEAPESNGGLRPPTTGVGPPPACQTVLGAPDPQEGPKATEGRLHLKPFGPEANPVLTRPRKEQGEEAPEPNGGQRPLTTGVGPLPACPTMPGVPDPQDGPEATVGGPLLSSSDPEVISAEDEFAPRGHLDEERPGGTAPNEEDRPRRKVQRPVYFVSEALRDAKTRYPQAQKMLYAILMASRKLRHYFQAHRVTVVTSYPLGQILHNREGTGRVVKWAIELSEFDLHFEPRHAIKSQALADFVAEWTPAPETVSMPEASTNPSQLPHAAHWVMQFDGSLSLQGAGAGVTLTSPNGDVLRYLVRLDFRATNNMAEYEGLLAGLRVAAGLGIRRLLVLGDSQLVVNXDKTLPEDREGSERVQRISKRYXCQFHAKQIHQPAQALQIIPLSWPFAVWGLDILGPFKRAPGGFEYLYVAIDKFTKWPEAYPVVKIDKHSALKFIKGITARFGVPNRIITDNGTQFTSELFGDYCEDMGIKLCFASPAHPRSNGQVERANAEILKGLKTKTFNILKKHGDSWIEELPAVLWANRTTPSRATGETPFFLVYGAEAVLPSELTLRSPRATMYCEADQDQLRRDDLDYLEERRRRAALRAARYQQSLRRYHQRHVRARSLCVDDLVLRRVQTRAGLSKLSPMWEGPYRVIGVPRPGSVRLATGDGTELPNPWNIEHLRRFYP

SEQ ID NO: 194982 - protein, 59 aa, Oryza sativa
  Clone ID: PAT_MRT4530_90975C.1.pep
FFFFFFFFFFFFFFFFSMQLWEKFDREMVVICNNKTSVPKISTLSGLVAKGCLLFSLNS

SEQ ID NO: 194983 - protein, 1843 aa, Oryza sativa
  unsure (1)..(1843): unsure at all Xaa locations
  Clone ID: PAT_MRT4530_90976C.1.pep
MAEQGKTHDLSPSVSGDDGEPNPRRRARTPPPPPRQSPKQGEALERVDKSAASPAAGDAGERRDGERRLLVYGDGSTPQGALQAAGALLRHPPVVHDPESPAQRWLEDVANLVMTAQQRLGAGGRSATTTKTSGAATTGSVSSRRRARRAAAAARHSAATPSSTPSTREDQHGEPDARLNIGRRRNSRRTPRATEGASSSRVSPRHGREDQPSVPPAGGVGCRAFVASLRNVRWPPRFRPTITEKYDGSVNPTEFLQVYTTGIEAAGGDDRVMANFFPMALKGQARGWLMNLPPASVHSWEDLCQQFTMNFQGTYPRPGEEADLHAVQRGDDESLRSYIQRFCQVRNTIPCIPAHAVIYAFRGGVRHNRMLEKIASKEPQTTAELFQLADRVARKEEAWTWNSSGSGVAASAAPGSAAQTGRRDRRRKKRPDRSGDEGHVLAVEGAPRATRKGRPASDKKNGAGTPSRERPAGRWCSVHNTSLHDLADCRAVKNLAERTRKWEEDRRQERREGKSPAVPSGKRRSEAKQKAPAVDIDDGDDDLGFQEPGATIATVDGGACAHVSRRSFKAMKRELLAMAPTHEVMRRARWSEVALTFDQTDHPPCIARGGQVAMVVSPTICNVKLGRVLIDGGAALNILSPAAFDAIKAPGMVLQPSQPIIGVTPGHTWPLGHIDLPVTFGGPANFRTERVSFDVADLSLPYNAVLGRPALVKFMAAVHYAYLRMKMPGPGGPISVRGDLKVALACMEQRADRLAAASKPEGGDERLGPSAPTAPRQRMATCDEVPVKEEDALVSFLRANADVFAWRPADMPGVPREVIEHRLAVRPGARPVRQKVRRQAPERQAFIREEVARLLEAGFIREVIHPEWLANPVVVPKANGKLRMCIDYTDLNKACPKDPYPLPRIDQIVDSTAGCDLLCFLDAYSGYHQIRMAREDEEKTAFITPVGTYCYTSMPFGLKNAGPTFQRTTRISLGSQIGRNVEAYVDDLVVKTCNQETLLSDLAETFENLRSARIKLNPDKCVFGVPAGKLLGFLVSARGIEANPEKIRAIERMRPPSKLRDVQCVTGCMAALSRFISRLGEKALPLFKLLKRSGPFTWTEEAEHALTQLKAYLSSPPVLVAPEPNEPLLLYLAATPQVVSAALVVERDEDNPHSAHPHSVPTWPGSRQGGEAPESNGGLRPPTTGVGPPPACQTVSGAPDPQEGPEATAGRPHLSPSDPEANPVPIRPGREQGEEAPEPNGGLRPLTTGVGPLPACPMTPGAPNPQDGPEATVGRPLLSSSDPEVIGTEDGCAPRGHSDEERPGGAAPSEEDRPRRKVQRPVYFVSEALRDAKTRYPQAQKMLYAILMASRKLRHYFQAHRVAVVTSYPLGQILHNREGTGRVVKWAIELSEFDLHFEPRHAIKSQALADFVAEWTPAPETVSIPEASTNPSQLPQTAHWVMQFDGSLSLQGAGAGVTLTSPNGDVLRYLVRLNFRATNNMAEYEGLLAGLRVAAGLGIRRLLVLGDSQLVVNXDKTLPEDREGSERVQRISKRYXCQFHAKQIHQPAQALQIIPLSWPFAVWGLDILGPFKRAPGGFEYLYVAIDKFTKWPEAYPVVKIDKHSALKFIKGITARFGVPNRIITDNGTQFTSELFGDYCEDMGIKLCFASPAHPRSNGQVERANAEILKGLKTKTFNILKKHGDSWIEELPAVLWANRTTPSRATGETPFFLVYGAEAVLPSELTLRSPRATMYCEADQDQLRRDDLDYLEERRRRAALRAARYQQSLRRYHQRHVRARSLCVDDLVLRRVQTRAGLSKLSPMWEGPYRVIGVPRPGSVRLATGDGTELPNPWNIEHLRRFYP

SEQ ID NO: 194984 - protein, 894 aa, Oryza sativa
  Clone ID: PAT_MRT4530_90977C.1.pep
MQKLGLSGLRGLEGFRSLAGSTSTAAKAPNPKPSSDIGGSTYGSFANLKITAEKLVKEQASVKTDLEMTHTKLRRATEQINLLEAKLQQAVNENAKLKVKQTEDSKLWQGLDSKVSSTKTLCNQLTETLQQLASQTERAEEDKKFFEEILGKNSKAFEEFNCLLHDSSIKLECAEQMIISGKQEMLRIKQEKEEMDQSYKEQLYASDTTIREKNSLIKQLEDSIEQNKARLLYVDSRLECMEQELKLKEDVCICLKENLASTESEKNDLKLRNEGYTLEVQKLSKDNKELNELLSGFTVKVTELDKEHTSISSHVTQLISSFERYDGKVHEEKMLMIKSAKDKFEHLQNQYVNLISENNALQTEIEELKSRIIELQKTQEIVMVQHVEECQVAEDKIRRLESEAEISASNISQLEKVASDLEGRVQKLLEDSRSAENHKQELLQKILKLESDNQELLGRVQSVLNEKSNDTESLQGEIAKRDQQVETLENQVNQLCSIIDEKEQLHTCAVEREKNLEEQKLQVQASLAATESQLTEAKKQYDIMLEGKKIELSKHLKELSLKNDQAINEIRRKYELEKVEIINIEKEKAEKLIKEMENKCNEKISENRQDSESSFEMVARIQQDNEHKESTLRAYHKEELQRIQSQAENELRERLSSLRKDHEIQMKSLTKKHEENCQKLQDELELQKSKEEKQRALLQLQWKVMGETQQVDQEVNSKKVKTIGFFSRCSYISFLLDFPKELLKHILQIQEYSVSSIKRRDPYIRKEHQLQLVSPETKRKDVNLSGIIQSPITNMLRKVEKGTQDIPKHRKVTHHEYEVETANGRITKRRKTKSTVMFGVQEPNTQKSLHDTADKDPTKMKKVVAGSHPHPANIGELFSEGSLNPYAEDPYAFG

SEQ ID NO: 194985 - protein, 178 aa, Oryza sativa
  Clone ID: PAT_MRT4530_90978C.1.pep
DDGYQDIVNIDISSVVIDQMKKKYRDKPHLKYMKMDVRNMAEFESGSFDAVIDKGTLDSIMCGQNSQENASQMLEEVNRILKDKGVYILITYGDPSYRLRLLKDLQLWTVKLHVIDRWERSREPSWELTKPLPLDGDSTSIVSLLGPKPDVHYIYVCIKGSDDGKSHLDSRAEVNGEA

SEQ ID NO: 194986 - protein, 2094 aa, Oryza sativa
  Clone ID: PAT_MRT4530_90979C.1.pep
MAEQGKTHDLSPSVSGDDGEPNPRRRARTPPPPPRQSPKQGEALERVDKSAASPAAGDAGERRDGERRLLVYGDGSTPQGALQAAGALLRHPPVVHDPESPAQRWLEDVANLVMTAQQRLGAGGRSATTTKTSGAATTGSVSSRRRARRAAAAARHSAATPSSTPSTREDQHGEPDARLNIGRRRNSRRTPRATEGASSSRVSPRHGREDQPSVPPAGGVGCRAFVASLRNVRWPPRFRPTITEKYDGSVNPTEFLQVYTTGIEAAGGDDRVMANFFPMALKGQARGWLMNLPPASVHSWEDLCQQFTMNFQGTYPRPGEEADLHAVQRGDDESLRSYIQRFCQVRNTIPCIPAHAVIYAFRGGVRHNRMLEKIASKEPQTTAELFQLADRVARKEEAWTWNSSGSGVAASAAPGSAAQTGRRDRRRKKRPDRSGDEGHVLAVEGAPRATRKGRPASDKKNGAGTPSRERPAGRWCSVHNTSLHDLADCRAVKNLAERTRKWEEDRRQERREDKSPAVPSGKRRSEAKQKAPAVDIDDGDDDLGFQEPGATIATVDGGACAHVSRRSFKAMKRELLAMAPTHEAMRRAWWSEVALTFDQTDHPPCIARGGQVAMVVSPTICNVKLGRVLIDGGAALNILSPAAFDAIKAPGMVLQPSQPIIGVTPGHTWPLGHIDLPVTFGGPANFRTERVSFDVADLSLPYNAVLGRPALVKFMAAVHYAYLRMKMPGPGGPISVRGDLKVALACMEQRADRLAAASKPEGGDERLGPSAPTAPRQRMATCDEVPEDALVSFLRANADVFAWRPADMPGVPREVIEHRLAVRPGARPVWQKVRRQAPERQAFIREEVARLLEAGFIREVIHPEWLANPVVVPKANGKLRMCIDYTDLNKACPKDPYPLPRIDQIVDSTAGCDLLCFLDAYSGYHQIRMAREDEEKTAFITPVGTYCYTSMPFGLKNAGPTFQRTTRISLGSQIGRNVEAYVDDLVVKTCNQETLLSDLAETFENLRSARIKLNPDKCVFGVPAGKLLGFLVSARGIEANPEKIRAIERMRPPSKLRDVQCVTDLAETFENLRSARIKLNPDKCVFGVPAGKLLGFLVSARGIEANPEKIRAIERMRPPSKLRDVQCVTGCMAALSRFISRLGEKALPLFKLLKRSGPFTWTEEAEHALTQLKAYLSSPPVLVAPEPNEPLLLYLAATPQVVSAALVVERDEDNPHSAHPHSVPTWPGSRQGGEAPESNGGLRPPTTGVGPPPACQTVSGAPDPQEGPEATAGRPHLSPSDPEANPVPIRPGREQGEEAPEPNGGLRPLTTGVGPLPACPMTPGAPNPQDGPEATVGRPLLSSSDPEVIGTEDGCAPRGHSDEERPGGAAPSEEDRPRRKVQRPVYFVSEALRDAKTRYPQAQKMLYAILMASRKLRHYFQAHRVAVVTSYPLGQILHNREGTGRVVKWAIELSEFDLHFEPRHAIKSQALADFVAEWTPAPETVSIPEASTNPSQLPQTAHWVMQFDGSLSLQGAGAGVTLTSPNGDVLRYLVRLDFRATNNMAEYEGLLAGLRVAAGLGIRRLLVLGDSQLVVNQVCKEYRCSDPQMDAYVRQVRRMERHFDGIELRHVPRRDNMIADELSRLASSRAQTPPGAFEERLTQPSARPDPSGETDAPDRHPRPVGVQASGPEESVPSSLRLIAWISEIQTYLTDKTLPEDREGSERVQRISKRYVLIEGTLYRRAANGILLKCIPQEQGVELLVDIHEGECGAHSASRTLVGKAFRQGFYWPTALNDAVDLVRRCRACQFHAKQIHQPAQALQIIPLSWPFAVWGLDILGPFKRAPGGFEYLYVAIDKFTKWPEAYPVVKIDKHSALKFIKGITARFGVPNRIITDNGTQFTSELFGDYCEDMGIKLCFASPAHPRSNGQVERANAEILKGLKTKTFNILKKHGDSWIEELPAVLWANRTTPSRATGETPFFLVYGAEAVLPSELTLRSPRATMYCEADQDQLRRDDLDYLEERRRRAALRAARYQQSLRRYHQRHVRARSLCVDDLVLRRVQTRAGLSKLSPMWEGPYRVIGVPRPGSVRLATGDGTELPNPWNIEHLRRFYP

SEQ ID NO: 194987 - protein, 937 aa, Oryza sativa
  Clone ID: PAT_MRT4530_9097C.1.pep
MALYRRLLLLRRLSTLHPHPSLSSSSSSTASPAAAASATHHLLPPHAPLAPHARGFAFSSAEEAAAERRRRKRRLRIEPPLHALRRDPSAPPPPRDPNAPRLPDTTSALVGPRLSLHNRVQSLIRSGDLDGASVAARAAVTSRVRPTVFTCNAVAASMVRAGRHDDAVSLFDFFFRRSNIVPNVVSYNTLILAHCEAARVDSALQVYREMLDKAPFSPSAVTYRHLTKGLVAAGRIQDALDLLREMLNRGQGADSLVYNNLIAGYIEEDNWDKAFELFEELQGRCLVYDGVVHTSFMEGYWKKGMDKEAMENYQSLLDKKFRMTPATCNVLLETLFKHDKDKEANDLWETMIDNHTPPSFIGINSESYNVMVNQCFKKCKFHEAIEVFHRQPRKNVQMDVGCFNNIIGKLCENGMLEEAEKLFEEMETKSVLPDVYTYTYLVDSCFKVGRVDDTIQYFYKMADGREHGPKFNIGFFNRMFEGLTEAGRMDDALKVYGRMPDKEIKPNTTTFETLVNALCKEGDLDKARELVSDMAKGGVTPPPEFRDSVIDIFKNAGRQEEIEKAFEEKPVPLPPQPRPEYRPRNSPQGLPGFASNQTRGSYMPHQGQPTYGSQPLHPGVGGSQAIQPQGMPLRPQQPVFGGPQVDKSEFGGRPLQHGPSAPDPRQPGVVSMTQPPNVSTPNTWQHSGVHATQGTHHGMGSPRPWQQSVGIGQVQQTDYSSGPPMQPGFGHPQPPQPMHSAPQTQQPGYGTSHPWHTGFNAPQVQQPSYGGPQSSQHAVGSTQPPQAQFGAPQAPPPLPGFHYQNRPEYGQAVDQHNRFGSPQGEPRFHTQPRQQGFDAQAPGNHALQGQNSFNARRGQVGFGNQGAPPEYGASPSQPSHGAAWNQRGYGLSEDQEDVNQQVVPHAYARVPQASASSIAFGLGLFFGNEIFWTREKY

SEQ ID NO: 194988 - protein, 546 aa, Oryza sativa
  Clone ID: PAT_MRT4530_90980C.1.pep
MALPVSLLRIAAVLLAILPFCATHPSPGFHAPREFHKALVPDRYGFVARRSIAEAPVDVNVTTNSSFVLAQERTYRKDPLNGFRKYTGGWNISEVHYMASVGYTAFPLFIIALVWFVLFFLVMLGICCKHCCCPHRSYTYSRVAYALSLILLILFTCAAIVGCVMLYDGQGKFHKSTTTTLNFVVSQANFTVENLNNLSDSLSAAKKVDIGRSFLPNDVQNQINEIQGKLNSSATELATRTTDNSEKIQKLLNQVRIALIIIAAVMLLLAFIGFLLSIFGLEFIVSILVIIGWILVTGTFILCGVFLLLHNVVADTCVSMEEWVAHPTEHTALDDIIPCVEPATANESLYRSRQVTYQLVNLVNQVITNVSNGNFPPQTPFFYFNQSGPLMPTLCNPFTADLNNRTCTRGEVTLDNATRVWKNFECQTTTVSGTEICTTVGRVTPTILGQMAAGVNVSQGLYQYGPFLIQLEDCTFVRDTFTNINQNHCPGLERYSKWVYVGLVMVSSAVMLSLVFWVIYARERRHRAYSKQHNYADKPHPTGPDA

SEQ ID NO: 194989 - protein, 68 aa, Oryza sativa
  Clone ID: PAT_MRT4530_90981C.1.pep
HVEVFSCNHPPTNQFFRACTQHDTVLLNCKKLFSIVECSLIFFRFVSIEVHLVMLVKIVGWVSLQSLL

SEQ ID NO: 194990 - protein, 144 aa, Oryza sativa
  Clone ID: PAT_MRT4530_90982C.1.pep
MGLLDQLWDETVAGPRPDSGLGKLRKYSSFSPSSPSAAAAAPGTAPPDAPAATVTRSITIVRPPSLSVPSPRGGGGEYSSSVPSSPASAPDSPFASATTPKGDSWRRLRRKPKTATDAAPEAAAAVGPRSPTVYDWVVISSLDR

SEQ ID NO: 194991 - protein, 51 aa, Oryza sativa
  Clone ID: PAT_MRT4530_90983C.1.pep
SSPGGLAKRPRQRIQIDPVLGSGSVLGQGSNGGTRVLVLLRARHPQEPVLQ

SEQ ID NO: 194992 - protein, 341 aa, Oryza sativa
  Clone ID: PAT_MRT4530_90984C.1.pep
MRVLAVALLAAAVLAAEAAAELPEFREAPAFRNGAGCAGAPTIHIAMTLDTTYLRGSLAGVLSVLRHAACPESIAFHFVASSASPARRLAALRRALAAAFPTLPATVHRFDARLVRGKISTSVRRALDQPLNYARIYLADLLPRSVSRVLYLDSDLLVVDDVARLWATDLGPDAALAAPEYCHANFTSYFTDAFWSHPEYSSIFTNRGRAPCYFNTGVMVIDLDRWRAGGYTVKLEYWMEVQKQEARIYELGSLPPFLLVFAGEVKAVEHRWNQHGLGGDNVAGQCRELHPGPVSLLHWSGKGKPWLRLDAGRPCPLDALWAPYDLLRRRGARDDLLAAVA

SEQ ID NO: 194993 - protein, 97 aa, Oryza sativa
  unsure (1)..(97): unsure at all Xaa locations
  Clone ID: PAT_MRT4530_90985C.1.pep
IEAKYKVAFYDNXKYMINILGSILVQLRDQIIKEKKKQISSVRVFPKNVYSSLVLREENQNSSLPKSIAQMFELQSKFAIERPTSAPQLGNQGQQQQ

SEQ ID NO: 194994 - protein, 495 aa, Oryza sativa
  Clone ID: PAT_MRT4530_90986C.1.pep
MAPATQMAAPPPRGGSFRVLRTARVAPSSPDGVPSLRQRAVPLTFLDAMWLPTPPVDRVFLYRLGAADDDVDAVLSRLADSLSRVLHVFYPLAGRLRLTPGKTNRYELFYQPGDAVAFTVAEHDDGVGVDELAADDPREVAKIAPLAPELPDGGAVLAVQATVLPPARRGLALGVTVHHAACDGSSSTHFLHTWAAACAGAVVLPKPPVIDRTFIREREDLYDIMVNRTKEESDKFSSPDVADNKLLATFTLSGEILQNIKDIVAAPSVHCHIHAALASDVEAENNPRNHGRAHFVFPTDHRARMEPRVPDKYLGNCVGPCFASAPKKEIAAADAEDGLFTTCAAIAAAIDEGTRYDPGYWERCREHVRGMSTSDGPPLAVAGSPRFRVYDVDFGFGRPTKVDVVSVAKTGAISVAEGRGGGIEQHQGKLGVDQGKRPAPEKPRQHWPHVDQLAPLADGSRSTPESRVADPVPITETSPRHSRRASLSLKWTTPW

SEQ ID NO: 194995 - protein, 488 aa, Oryza sativa
  Clone ID: PAT_MRT4530_90987C.1.pep
MAPATQMAAPPPRARGGSFRVLRTARVAPSSPDGVPMLVERAVPLTFLDAIWLPTPPVDRVFFYRLGADDDGVDAVLSRLADSLSRALHVVYPLAGRLRLTPGKTNRYELFYQPGDAVAFTFAEHDDGVGVDELAADDPREVAKIAPLVPELPDGGAVLAVQATVLPPARRGLALGVTVHHAACDGSSSTHFLHTWAAACAGAAVLPKPPVIDRTFIREREDLYDYMVSRTEESDKFRSPDVADSKLLATFTLSGEILQSIKDRVAGVAARRGKSPPPRCTSVVATFAIVWQCHIRAALGDVEADNKHHGRAHFIFPTDHRARMEPRVPDKYLGNCVGPCFASAPKEEIAAADAEDGLYTTCAAIAAAVDEGTRYDPDYWKRCMEHVGGMSASDGPPLAVAGSPRFRVYDVDFGFGRPAKVDVVSVAKTGAISVAEGRRGGIEVGVGLPPERMERFRRCFADAVAWLSSPSRPVTRDMDRSAPGHSPA

SEQ ID NO: 194996 - protein, 86 aa, Oryza sativa
  Clone ID: PAT_MRT4530_90988C.1.pep
MSTSDGPPLAVAGSPRFRVYDVDFGFGRPTKVDVVSVAKTGAISVAEGRGGGIEVGVGLPPERMERFRRCFTDAVTWLSSPSSSDT

SEQ ID NO: 194997 - protein, 280 aa, Oryza sativa
  Clone ID: PAT_MRT4530_90989C.1.pep
MLKRRRAKLDTSGRRARRPAPSRSKVGASSVGATLSSYTRVTNMVTVREEMRKGPWTEQEDLQLVCTVRLFGDRRWDFVAKVSGLNRTGKSCRLRWVNYLHPGLKHGRMSPKEEHLIIELHARWGNRWSRIARRLPGRTDNEIKNYWRTHMRKKAQERRGDMSPSSSSSSLVYQSCLLDTVPIISMDGGDIHDDRSCMARVLKSTQSVMDGYTMDQIWKEIEAPGAPSLLGIDEGKDKACSNLPCPLLTSTMSDYSCPEVFWKIDNEETRMLATQSGYGK

SEQ ID NO: 194998 - protein, 187 aa, Oryza sativa
  Clone ID: PAT_MRT4530_9098C.1.pep
MQPGFGHPHPPQPMHSAPQTQQPGYGTSHPWHTGFNAPQVQQPSYGGPQSSQHAVGSTQPPQAQFGAPQAPPPLPGFHYQNRPEYGQAVDQHNRFGSPQGEPRFHTQPRQQGFDAQAPGNHALQGQNSFNARRGQVGFGNQGAPPEYGASPSQPSHGAAWNQRGYGLSEDQEDVNQQVVPHAYARVR

SEQ ID NO: 194999 - protein, 190 aa, Oryza sativa
  Clone ID: PAT_MRT4530_90990C.1.pep
MVTVREEMRKGPWTEQEDLQLVCTVRLFGDRRWDFVAKVSGLNRTGKSCRLRWVNYLHPGLKHGRMSPHEEHLILELHARRGNRWSRIARRLPGRTDNEIKNYWRTHMRKKAQERKSNMSPSSSSSSLTYQSCHPETPSMIIGIEEQELHGGSGCITSIMKSTPVDMDGYPMDQIWMEIEAPNVLPGPLF

SEQ ID NO: 195000 - protein, 143 aa, Oryza sativa
  Clone ID: PAT_MRT4530_90991C.1.pep
MVAGVAAIRRKILAFLSHQSSQAIRIIRDFRDLMGLRGVCSIQDDPEPGKDISGKDLESDEAIWALYERWCEAYEKERDHAEMTRWFEMFKNNAEYIYSLNSEITSEAEQLILGPYCDGFNEKDKAEFLNDFGHFNGVHEFVE

SEQ ID NO: 195001 - protein, 377 aa, Oryza sativa
  Clone ID: PAT_MRT4530_90992C.1.pep
MAPPTAVSASTAGLIWSLSPSLSLVVTTSVALLLVLGGVSGIRVNVIRLPSASPFPAFREAPAFRNGDGCPPARGSAAAEGGRVDVAMTLDANYLRGTMAAVFSILQHTACPESVAFHFLAARSDPDAGDLAAAIRATFPYLGAAVSVYRFDPSRVRGRISRSVRRALDQPLNYARVYLADTLPAGVRRVLYLDSDVVVVDDVRKLWSVDLAGHVVAAPEYCHANFTKYFTDAFWSDGELSGAAFRRGRRRPPCYFNTGVMVMDMGRWRDGGYTRRVEEWMAVQKRRRIYHLGSLPPFLLVLAGDIKAVDHRWNQHGLGGDNAEGKCRSLHPGPVSLLHWSGKGKPWLRLDSRKPCAVDYLWAPYDLYKAAVPALEE

SEQ ID NO: 195002 - protein, 73 aa, Oryza sativa
  Clone ID: PAT_MRT4530_90993C.1.pep
MSCTGAGFAAGRPRGTRLTRAHAARAANVQKTPFNRCARPRDGQAYDTHTLVTARDIIISSGRTAKIPYSNTR

SEQ ID NO: 195003 - protein, 102 aa, Oryza sativa
  Clone ID: PAT_MRT4530_90994C.1.pep
MSATSRLVKPAVDWMRGTELLIIMTRQGIPALMPPDMSSGRGGLAAIPSIHHPVADRSQAFEIGLAHLLIDTNANGYNIGLKTMSKVLHLKWTMPKSNWVNP

SEQ ID NO: 195004 - protein, 103 aa, Oryza sativa
  Clone ID: PAT_MRT4530_90995C.1.pep
PTRPVRSSGYIVPLCSLTVGQQQYAQLFSHDHLTSEFVLMRVQRRDTNFQVHPTKVCCMKIIRYCKYENHVRSLAAANQFSSSQSMPSEKAGTSEQLQSVYGR

SEQ ID NO: 195005 - protein, 114 aa, Oryza sativa
  unsure (1)..(114): unsure at all Xaa locations
  Clone ID: PAT_MRT4530_90996C.1.pep
SSIHHGCLLMYLQALXLPVHAYRLHLTLIRRILXYFLFXXXTVCXLXXFSXQLXITTAHFKAKEHSFAXCSNDTEHNKNTXXKIXXRISPNSNDKXEEIXRTKSRXPRXNCKST

SEQ ID NO: 195006 - protein, 32 aa, Oryza sativa
  Clone ID: PAT_MRT4530_90997C.1.pep
CPSTPPRRVAAAAQALVTPSSPTNRRHATSRF

SEQ ID NO: 195007 - protein, 297 aa, Oryza sativa
  Clone ID: PAT_MRT4530_90998C.1.pep
MAAAGSLGLLQAPSSFTAAAASRPASRRAPRALFAVRASAAADATKDAVLKAFREKRALKIISGLQNFDRSSVASVVSAADKGGATHVDIACDQDLVKLALELTSLPICVSSVDPSAFRSAVEAGAKMIEIGNYDSFYDTGIEFSSEKILKLTKETREMLPDITLSVTVPHTLSLLDQVRLAELLEEEGADIIQTEGGKCSSPTKPGVLGLIEKATPTLAAAYSISRAVTIPVMCASGLSSVTAPMAVTAGAAGVGVGSAVNKLNDIVAMVAEVKSIAEALGLPSRNVSSNLRTVHH

SEQ ID NO: 195008 - protein, 526 aa, Oryza sativa
  Clone ID: PAT_MRT4530_90999C.1.pep
MSSVRYCLGRDFQPAAAAAAYFGELEEALIHGANAGGVVDPGMIRADVHSKSAAAAATAGYLAARPPTLEIFPSWPMRQQQQLHSGNSQSVGSTTDSSSAQNTMPQMELVSPASIRASSEHQHQQQQPGQEVMMVTTDDYSYKPGLAAASPSFQQQHQLQHHQQQQLHGGGDHDKRKHGSTRKDGKSVDAKAYVQNLETSRVRLQQIEQELQRARSQQQLQPASLQLADEGVPRSSHHGAVKSFAGAAMFDMEYARWLDDDSKRLTDLRGGLQAHLLDTNLGLIVEECMQHYDELFQLKAALARSDVFHLLTGTWATPAERCFLWMGGFRPSDLLKILIQQLDPLTEQQMLGIYSLQQSSEQAEEALAQGLQQLHQSLADTVAAGTLNDGPGVPNYMSLMAIALDKLASLESFYQQVQDCSDHSAKTSPLRCMVNRSGCVRYTCMRKKADNLRQQTLHQLRRILTTRQAARCFLSIGEYYRRLRALSNLWSSRPRENFIGTESVSPTGTELQPMHNQPQQNQYSGF

SEQ ID NO: 195009 - protein, 59 aa, Oryza sativa
  Clone ID: PAT_MRT4530_9099C.1.pep
MEVVVREEKRGVVGHDNKVERGAVGDDSRSATNIARLKADGCDIGMEEVIDIDFMPWHR

SEQ ID NO: 195010 - protein, 418 aa, Oryza sativa
  unsure (1)..(418): unsure at all Xaa locations
  Clone ID: PAT_MRT4530_909C.1.pep
MGETNALRGRISSFQQTRDQSISEAWERLQEYMAACPHHGMDDWLILQNFYNGLTPMSRDHLDTASGGAFFSKTVRGAINLIEKIVSNMSWSEEGVQTRQRGMHTVKETEMLVAKLDLLMKRLDDHEKRPQGIVKAMDSHFMCEICGKMGHSGNDCPETREEAMYMGNNNNNGFRPQGDGFASVFRNQLSFNKMIETQLAQLVVLVPANESGRILGQPEPSVENVKAITTRGGNPEDPHQRAIIGRNASAHLRTLSKGHPCNKRPLPTTKLVKLTEECSNVILHKLLEKKKDPGCPTITCSIGTQKFNQALSDLGASVSVMPKDVFDKLNITVLTPTPMRMQLANSSVCYLARIAEGVPDKIRDFFISVDFVVLDMDSEKKTSLILGRPFLSTRDANIDVGTDXKFEFQPRMEQCSMV

SEQ ID NO: 195011 - protein, 82 aa, Oryza sativa
  Clone ID: PAT_MRT4530_90C.1.pep
ASGGPSPFLIINRRKPSWARWGHGWPSPPGPRDGIVRTQQVTLKLEGGQKAPQPWAPFGLDHWRQSGDNYRVDLLRRQRKGK

SEQ ID NO: 195012 - protein, 126 aa, Oryza sativa
  Clone ID: PAT_MRT4530_91000C.1.pep
MFKVSRTQQIVHGGEEKSGRAQDLKKRKIHVGRTPPCPGQPFPPATPPPSPDPAVVRRPSPRPRQTPPPLLTPPPPPPAGTVVGSPTSLPLDLAEGRVQLTLPPSPEAARPPHPAGTLPPLPTLPE

SEQ ID NO: 195013 - protein, 544 aa, Oryza sativa
  Clone ID: PAT_MRT4530_91001C.1.pep
MVQGEESSWRMAASTHHERAIPLNQALAYGVQAHASPSVAAAPPASFLDFQPAAAAAAYFGELEEALIHGANAGGVVDPGMIRADVHSKSAAAAATAGYLAARPPTLEIFPSWPMRQQQQLHSGNSQSVGSTTDSSSAQNTMPQMELVSPASIRASSEHQHQQQQPGQEVMMVTTDDYSYKPGLAAASPSFQQQHQLQHHQQQQLHGGGDHDKRKHGSTRKDGKSVDAKTERRLAQNREAARKSRLRKKAYVQNLETSRVRLQQIEQELQRARSQGLFLGGCRAAGDMSSVKSFAGAAMFDMEYARWLDDDSKRLTDLRGGLQAHLLDTNLGLIVEECMQHYDELFQLKAALARSDVFHLLTGTWATPAERCFLWMGGFRPSDLLKILIQQLDPLTEQQMLGIYSLQQSSEQAEEALAQGLQQLHQSLADTVAAGTLNDGPGVPNYMSLMAIALDKLASLESFYQQADNLRQQTLHQLRRILTTRQAARCFLSIGEYYRRLRALSNLWSSRPRENFIGTESVSPTGTELQPMHNQPQQNQYSGF

SEQ ID NO: 195014 - protein, 121 aa, Oryza sativa
  Clone ID: PAT_MRT4530_91002C.1.pep
MTSNVSIQDGPTATNRGLGPFVGRTRMQNLVEPNRLRPVRTDPNPKSAGGMPQTHPRLVGGNGAPPTSLLLNTLRTRGLRLRSAMKALPLLPLVVFLFETDISFAAVLEDFVAKPENFWEN

SEQ ID NO: 195015 - protein, 134 aa, Oryza sativa
  unsure (1)..(134): unsure at all Xaa locations
  Clone ID: PAT_MRT4530_91003C.1.pep
RTRGRTRGRTRGRTRGLETSRVRLQQIEQELQRARSQGLFLGGCRAAGDMSSVKSFAGAAMFDMEYARWLDDDSKRLTDLRGGLQAHLLDTNLGLIVEECMQHYDELFQLXKAALARXRVFHXLTGTWATPAER

SEQ ID NO: 195016 - protein, 80 aa, Oryza sativa
  Clone ID: PAT_MRT4530_91004C.1.pep
HIFSINHSPSSFQSSGHRSQCGQIIFPPPISIMWMFHMHSGGTHTVGHHRGTNHNCGGTHGTYNRSDTISVVIIKHVFLH

SEQ ID NO: 195017 - protein, 44 aa, Oryza sativa
  Clone ID: PAT_MRT4530_91005C.1.pep
PTWHSLPDEVWEHALSFLPADADRGAAAGACTSWLRAERLSRTH

SEQ ID NO: 195018 - protein, 113 aa, Oryza sativa
  unsure (1)..(113): unsure at all Xaa locations
  Clone ID: PAT_MRT4530_91006C.1.pep
VMLHLGVRTIPQXILMMRWTKKARDSIPAHLGTFPDDVGMAQARVFRHNVLQSTANEIVRLGDQDNQSFEILLRYLGEAKEEIAKAASKMSGAAGQFSFHFISDVFISDVSVS

SEQ ID NO: 195019 - protein, 364 aa, Oryza sativa
  Clone ID: PAT_MRT4530_91007C.1.pep
MAAAAATALAAVILLLVLATTAEAACSVSAIYSFGDSIADTGNLLREGPAVGAFASIGTYPYGQTLRRPTGRCSDGLLIIDYFAMALNLSLVSPYLEKGARFESGVNFAVAGATALDRSYLLQSGVVMPPASVPLSSQLDWFRSHLNSTCSSHQDCAKKLSGALFLVGEIGGNDYNYAFFQGRSIESMKTYVPQVEVIELGATKIVIPGNFPIGCSPSYLSLFSTAISGDYDDRGCLKSYNSFAMYHNDQLRAAIDDLRKVNSDVAIVYADYYGAFMHLLQKADLLGFEEDSLFKACCGAGGKYNFDMNLMCGAVGTNVCADPAQHISWDGIHLTQQAYKAMALSLIMEGFAQPADIVQKIWSC

SEQ ID NO: 195020 - protein, 72 aa, Oryza sativa
  Clone ID: PAT_MRT4530_91008C.1.pep
MAMITITETDRIVVVTRMTTSRTDEIKATTDKVNDITTSHGDDETRDPQTSRGPEDEVVGPGDKPPTTIVPH

SEQ ID NO: 195021 - protein, 324 aa, Oryza sativa
  Clone ID: PAT_MRT4530_91009C.1.pep
MSSSSTPTGAAADDLAAANANAKECVFCEMTRQHHPQCARRLPKRIILVRHGESQGNLDMSAYTTTPDYRIPLTPLGVDQARAAGKGILDVVSSAANWKVYFYVSPYERTRATLREIGAAFPRHRVIGAREECRVREQDFGNFQVEERMRAVKETRDRFGRFFFRFPEGESAADVFDRVASFLESLWRDIDMGRLEQDASCETNLVIVSHGLTSRVFLMKWFKWTVDQFERLNNFDNCEFRVMQLGPAGEYSLLIHHTKEELQRWGLSPEMIADQQWRASANRRSWADECSSFLATFFDHWNEDDNDDDDDGKEENGKTNKLLE

SEQ ID NO: 195022 - protein, 449 aa, Oryza sativa
  Clone ID: PAT_MRT4530_9100C.1.pep
MAASSSLAFTARRGDPELVAPAGPTPRGLRRLSDIDDQRSFRFYRSIIYFYRSGGGDPARVIRGALAAALVHYYPIAGRIRELPGGKLVVDCTGEGVSFVEADADVSLEEFGDSLCPPIPCAGELLTLPESNSAVVTDRPLLYVQVTRLRCGGFVFGTQICHNLVDAAGITQFWQAVGELAQGAAAPSVRPVWARELLDARHPPRPAYDHPEYEPASDEASDKLRPGDELVHRRFLFGPDDVAALRGQLPARLGPRCSRFLLLSAFTWRCRTAALGYAPGDEVRFMFVVNGRGRGHGGRPLPEGFYGNALTFGVARTTAGELCSGPLSRAVELIAAARARTMADGYAQSAADAVVLRGRRRFTTARTYLVTDLTKSPLHEVDLGWGRPLFGGPATTTLATFHMPARGGGIAVPMCLPPRAMERFAGAVRAGLAAGVPRAAEEAAALSKM

SEQ ID NO: 195023 - protein, 166 aa, Oryza sativa
  unsure (1)..(166): unsure at all Xaa locations
  Clone ID: PAT_MRT4530_91010C.1.pep
GVAHWGGGAEARKRRHDSTRAAARRHGGGGAWRRGEGXRRREWSGXNDGGAGREAVRRRARGDGTGDAMARGSGRRRDGRATRRAATRRAVTGRVGARCDWMAARXGSGQVXARSGSGLEARGHDATVMTMARGAQGGDGDGGGARRWATARGGRRRWRVGAGSGG

SEQ ID NO: 195024 - protein, 48 aa, Oryza sativa
  Clone ID: PAT_MRT4530_91011C.1.pep
MARYMLPCRWKTDGNGHKTGENGEPVPRYGSHRSDSLDVGSLTVYLMP

SEQ ID NO: 195025 - protein, 392 aa, Oryza sativa
  Clone ID: PAT_MRT4530_91012C.1.pep
MTTATAIVAGHGLALRRSLHLSKPSCATFSARALPPAAHCCRTVVAAAAPSSRTCRCRSVSSESSTAAAADTADDEEEVTKSDSEEEERDTLGEVCYLDPEADAEGIREWELDFCSRPILDARGKKVWELVVCDATLSLQFTRFFPNTSINSVTLRDALASVATSLGVPLPDRARFFRSQMQTIISRACNELGVKAVPSRRCVSLLLWLEERYETVYSRHPGFQSGTKPLLTLDNPFPTSLPENLFGDKWAFVQLPFSAVREEVESLERRYAFGAGLDLDLLGFELDENTLIPGVAVESSRAKPLAAWMNGLEICSMEVDTGRANLILSAGVSTRYVYAGYQKSAATTQEAEAWEAAKKACGGLHFLAIQENLNSDGCVGFWLLLDLPPPPV

SEQ ID NO: 195026 - protein, 226 aa, Oryza sativa
  Clone ID: PAT_MRT4530_91013C.1.pep
MSRGGGSYGEVGQKIDYVFKVVLIGDSAVGKSQLLAGFARNEFNLDSKATIGVEFQTRTLHIDARTVKAQTRDTAGQERYRAVTSAYYRGAVGAMLVYDITKRQSFDHVARWLEELRGHADKNIVIMLIGNKSDLGTLRVVPTEDAKEFAERENLFFMETSALESTNVENAFMTVLTEIYRIVSKKNLVANEEVDSSGNSSLLKGTKIVVPGQEPAPPTKASCCMS

SEQ ID NO: 195027 - protein, 70 aa, Oryza sativa
  Clone ID: PAT_MRT4530_91014C.1.pep
MGMGEEQKAYRVCTFNSGFSSLSGPEPFRYRRDEAMRTGAIIARLGDDQGKEHEEEDDDDDNDRAHDNLT

SEQ ID NO: 195028 - protein, 681 aa, Oryza sativa
  Clone ID: PAT_MRT4530_91015C.1.pep
MAARPCRAATALGNGLGRGTSEQPNGSGLIRDDANGKNLGEELTGERGATLATRRESWRGEEERSVWRRETDIGGQGSSAGVHGRQRLFRGQCESGDGVDALGGEGAHGVGGDRPVGHLARRAREWAKAVEVLGGDGGKRGHDLRLLHPVTINERFFTPYLDLDQRFSPRCDKLVAGLISSVFPTGDGTGVRLRPPELARAEQSGQRRCRARLPLALLPPWRVDRTVRRCDLELVSLSVASLSLLLPPRHRGDVAGRRGGVTGATLGSSPSLSPDIPPFFYRGGVAQRRGGATSSFASGNGGAARELNRGAARPAQIGGRRGRSSRSSLPVGSALLSPAKLASSVLPSSQATPARYRSPQRGIAPFSLRQSEESRARADLALSPEQGNAAKVRSCISSAFLPRGDDDGTHHRPKSSSILLTNTKTTTTSSPSPPPTDHGLRRRFFLQTSRRDASEAEEIDVESLLESLEKKEVLSSSMPKCIASKVYALACRLRRCCLLQLKWNYCNLLQQSPDVVHQFYNDASSMVGVDDLAETNTTASTMMGIGGVFVPRNSSSLARRTSSSVSLPGARALPTWSSSVSGDSHSLALSSWAARPRSARPLRAPARMGNVNEGKGIFAPVVVVVRNIVGRKRFNQLRGKAIALHSQVITEFCKTIGADAKQRQGLIRLAKKNGEKLGFLA

SEQ ID NO: 195029 - protein, 52 aa, Oryza sativa
  unsure (1)..(52): unsure at all Xaa locations
  Clone ID: PAT_MRT4530_91016C.1.pep
KPSTARWHHRLGHPSXLVERLLERKIKVVQTDWGGEYQRLNTFFQRIGIEHH

SEQ ID NO: 195030 - protein, 121 aa, Oryza sativa
  Clone ID: PAT_MRT4530_91017C.1.pep
TYKTPGTDELQQGFFAKNSDCLNMKHRGHHSEMSAAYIRSGRQWLSGLREGVEGGPVMPVVELKSFRTDAWTQSKSVPAFYDRHHADDVTLTDYSMTLRGGGHLTGDGVVAYRSEEFYDVE

SEQ ID NO: 195031 - protein, 77 aa, Oryza sativa
  Clone ID: PAT_MRT4530_91018C.1.pep
LVPLMVSSTPGNGVNGPSGPVESGMADSKPGHANLQVYGFSFSAIPSQPSVWGEKHVTPPSKLPRECRSRNSPPPSQ

SEQ ID NO: 195032 - protein, 108 aa, Oryza sativa
  Clone ID: PAT_MRT4530_91019C.1.pep
MDRVLPRQCSDRCVPEAQKWWICTPKTQQTVVPSARGPTATDQVLPRQRSDRSACPRPKNGGSACPRPDGRIPLTSPSSRPSSLLLLSLSLRSMSLWPSPTTASRQAY

SEQ ID NO: 195033 - protein, 77 aa, Oryza sativa
  Clone ID: PAT_MRT4530_9101C.1.pep
DRVFEPVGTGVMVKKGEEIAGFKMGSTVVMVFKAPVVSKARWREDGSGTVTSDFDFCIKAGDRIRVGEAIGRWTSRE

SEQ ID NO: 195034 - protein, 132 aa, Oryza sativa
  unsure (1)..(132): unsure at all Xaa locations
  Clone ID: PAT_MRT4530_91020C.1.pep
IIVDYLNNHACKWGTIGSGTESHSKPRTLISQICQLELVTWCIRIPTTSYIVLSVGDRFWQVNALKLFSRSSKADFNQFKILVLVNCIKISHVKTFTVQFYMSFLLQQQQKTILXCVCHIYKDYAINEEVKI

SEQ ID NO: 195035 - protein, 269 aa, Oryza sativa
  Clone ID: PAT_MRT4530_91021C.1.pep
MAAQALLSGRQLLGRPLQSSVSRSSSSRKAPFMVRAEATPPAKQGADRQLWFASKQSLSYLDGTLPGDFGFDPLGLSDPEGTGGFIEPRWLAYGEVFNGRTAMMGVVGMVAPELLGKLGLVPAETAIPWFQTGVIPPAGTYTYWADPYTLFVFELALVGFAEHRRFQDWYTPGSMGKQYFLGLEKYLAGSGEPAYPGGPLFNPLGFGTKSEAEMKELKLKEIKNGRLAMLAFLGFSVQALFTGVGPVQNLLDHLADPVHNNILTSLKFH

SEQ ID NO: 195036 - protein, 31 aa, Oryza sativa
  Clone ID: PAT_MRT4530_91022C.1.pep
LLTYLTMSDTICDRCCACNCADMSQGTKYGT

SEQ ID NO: 195037 - protein, 272 aa, Oryza sativa
  Clone ID: PAT_MRT4530_91023C.1.pep
MDRFAKKKKKKKKNNNDQGQLGRGHHAPRNTWSKPEKVRGLENVQVRAVSACGVVSAAIGCDGSLWVWGRSKRGQLGLGKDIVEAAVPSRVEALANYDIVKASSAKELLGKTVDKYSSSMLEAVEKMVEEKIRSEDNMPIIWEPSLVHEVCHVEVSDVSSDGIVLSGGDNTYGQLGRKSAWSKFLPVDISHSPFSVSASVGHSLATCIISTEGDDHAETGVLSWGWNCSSQLGRPGKEDVPALVDGLNGERPVSASAGRVHSVALTSKGEVW

SEQ ID NO: 195038 - protein, 105 aa, Oryza sativa
  unsure (1)..(105): unsure at all Xaa locations
  Clone ID: PAT_MRT4530_91024C.1.pep
SILILGRRQYMHVRVRTSKDKVCRKDLCWSVRAVYDLXKLPDVSGPGFSQFHGRVCRSCAGMVRMAGVDPEWSHSTAWHMRXTLDTWTWPRGDVPGLGLINGAVD

SEQ ID NO: 195039 - protein, 80 aa, Oryza sativa
  unsure (1)..(80): unsure at all Xaa locations
  Clone ID: PAT_MRT4530_91025C.1.pep
LSESSSRSSSSSSAAADGSTIMAPTSRVLAAKTPFLGHPRPSNAHVRXIVXXVTXRIXXSMELXYXXNXVEYXGALSKGY

SEQ ID NO: 195040 - protein, 67 aa, Oryza sativa
  Clone ID: PAT_MRT4530_91026C.1.pep
MSQKSSWPELVGVLATLAATQIGKDRPDVAVEVLPPGAPLTPDFNDKRVRVFMDDNGIVFKIPVIAK

SEQ ID NO: 195041 - protein, 183 aa, Oryza sativa
  Clone ID: PAT_MRT4530_91027C.1.pep
MRPSLRTIYFLLLLLPHAVVSRPLFPLPSKSNGIEKRPLQTFRPYNIAHRGSNGEIPEETAAAYLRAIEEGADFIETDILASKDGALICFHDVTLDATTDVASRKEFSNRRRTYEVEWFNATGWFVVDFTLEELKTLKVNQRYPFRDQQYNGKVSIITFEGIISIGLDASRTVGIYPEMEGPV

SEQ ID NO: 195042 - protein, 79 aa, Oryza sativa
  Clone ID: PAT_MRT4530_91028C.1.pep
MGEIFSVHRGRIPVLVGEGEEMKRVVIHMEELHHPYFFVLLELAAMEFGHEQEGVLRIPCSIEQFQAIVELIRSSMLKG

SEQ ID NO: 195043 - protein, 764 aa, Oryza sativa
  Clone ID: PAT_MRT4530_91029C.1.pep
MPGWNLLSTRVVVIISSVAHLGLVLCAEVRRNSATGFRIVILWVANQMSRWAPTTALAMLAAGRTPQEEQLVTLWVAFMLLHAGMPDNITAYALEDGVLSFRQSVNVFLQLVGPVSPAYILHQNMFAMPGDSMLWVSSIICCMAICKYLEGAFFALQRGNLENMRSESKKEVPSRRVTSLQSLRRGGKPDNDQIMLVAHGNLHITKGAFIDNLQYEHDAQQQEILPKTWDENKTLYKVVEMELSLMYDILYTKAAMVHTWGGYAIRVAFPFAGATAFLLFWFHSKEGQPTADVFITYILLAGTVILDIIWLLKAVASTWTYSFLNDRPRIWLHHALLCSGKWRLLRRLIVSLNLFRFLLSKEPTSYRMWSGTMGQYNILHECTSNDQDQTKTFLLTRIFISILVKIVPEDNCMEFQYHYLKGFRMSSDFCKHLFESIWEYLKSAYPPTVPIEKADEAKPAAPPEPYPDKKKEAPAPTPPLPPKEAHLHQRELEDALNFSPAFQESILIWHIATDVFLLCSHQYSSSSKEVQAIKVLSDYMVFLVAVRPNMLPGLKLRSLYEAVGYALTNDDEILPKEEYHEHGCVFWCMHPCDAQGIPMPSSSPVVVSSQQSSGFLMNTLATGNDDDDVSGDVTTGGGSGVHACRRTTARRHEQRTPTRRGRRGELTGDQNNGGRSTDGDGGEEKAAEMIGLTTATVFRWPTATTEGRTRSAMAWRSRRRPSRATTTTGAAAAHGWTNGGDGGARLHGARALPTAAGKGKGGGR

SEQ ID NO: 195044 - protein, 413 aa, Oryza sativa
  Clone ID: PAT_MRT4530_9102C.1.pep
MARFLLLLVAVAAAAAVLSQLGDAAPSTAEVFWRAVLPESPLPDAFLRLLRPDTSFVVGKAEAAGGAARTGFPFDYTDYRGSDSPTTASGLDLAGDFGEPAPFGYDYSAQGEGGGGGAAAAAGEQVLAVDAGFNYDKYVGARKLRGGSSTAGGENDDEPFGYDYKAPSSGSGTAASTTARGVGTGATTTVFFHEEAVRVGERLPFYFPAATTSALGFLPRRVADSIPFTAAALPAVLALFGVAPDTAEAAGMRETLRTCEWPTLAGESKFCATSLEALVEGAMAALGTRDIAALASTLPRGGAPLQAYAVRAVLPVEGAGFVACHDQAYPYTVYRCHTTGPARAYMVEMEGDGGGDGGEAVTVATVCHTNTSRWNPEHVSFKLLGTKPGGSPVCHLMPYGHIVWAKNVKSSTA

SEQ ID NO: 195045 - protein, 380 aa, Oryza sativa
  Clone ID: PAT_MRT4530_91030C.1.pep
MPWKTALSFRQRVNVLLLQPIGKPDNDQILLVAHGNLHVTKGAFIDNLQYEHDAEEQEILPKTWDENRTLYKVVEMELSLMYDILYTKAAMVHTWGGYAIRVAFPFTGATAFLLFWFHSEDDVSKHLFESIWKSLKLAYPPTVPIDKAKATLPPAPFPPQHPGRADPAEMMPPTKQIVRQRELEDADLNFSPACQESILIWHIATDVFLLCSHQYSSLSKEVQAIKLLSDYMVFLVAVRPNMVPGLKLRSLYVAVGYALTNDDEILPKEGYHCNLTEKKEKLANRLVEMEQKPSSKNAPRSKWRPGVSGHVLVQARKGKAWVRFLVYTSVRCTRDSHAKQLACGGELTTIIWILNEYAGIFRIDGDQGDDDKDKLTSSYL

SEQ ID NO: 195046 - protein, 156 aa, Oryza sativa
  unsure (1)..(156): unsure at all Xaa locations
  Clone ID: PAT_MRT4530_91031C.1.pep
MVGCEHMVLRVVLMAIKDRFASYCCETLTVPTTSQRRQRLYLLYNMIHCEAPDXEVAEISPRGSLGSPCLVXYKGVIMIQEWCTVVSCVVQRVLSQPLFGYFPVSRRNFFQIIGRRKTLSLLVIEIIYCAAPRRRRSSAPPLHRRCSSSLPLPRRR

SEQ ID NO: 195047 - protein, 69 aa, Oryza sativa
  Clone ID: PAT_MRT4530_91032C.1.pep
SADSTSGPFASLHLVRSVGPPLCDRHGTCGSYLKQACQLVPSLGPALYNGYARISGPVSLCYMGVRDNM

SEQ ID NO: 195048 - protein, 135 aa, Oryza sativa
  Clone ID: PAT_MRT4530_91033C.1.pep
GRCVAIVASASLREMIRPGALAIISPMAVGIIFRMLGHATGRPLFGAKVVAAMLMFATVSGILMALFLNTAGGAWDNAKKYIETGALGGKGSESHKAAVTGDTVGDPFKDTAGPSIHVLIKMLATITLVMAPIFL

SEQ ID NO: 195049 - protein, 103 aa, Oryza sativa
  unsure (1)..(103): unsure at all Xaa locations
  Clone ID: PAT_MRT4530_91034C.1.pep
KVGCEHMVLMVVLMTIKDRFTSFGCETFIMPTTSQRGQRLYLLYSVIHYSAPDXEVARSPRGSLGSPCLVYKGVIMIQERCAAVDCVMRGVLSQLLSEIPWWY

SEQ ID NO: 195050 - protein, 173 aa, Oryza sativa
  Clone ID: PAT_MRT4530_91035C.1.pep
PTRSAAFLLLADAALVALIVVFVPYTKIDWDAYMAQVDAFVEGERDYTKIEGDTGPLVYPAGFLYVYSAIKLLTAGQVFPAQILFGVLYIVNLSLVLLMYVKTEVLPWWALGLLCLSKRVHSIFVLRLFNDSFAMTFLHAAMVLIMYHKWYLGLVIFSAAVSIKMNVLLFAPS

SEQ ID NO: 195051 - protein, 798 aa, Oryza sativa
  unsure (1)..(798): unsure at all Xaa locations
  Clone ID: PAT_MRT4530_91036C.1.pep
MENGRLYPERPRTFSTVRTKSSLPPIFRVLMRINPRAFIVLLLLVFSGVLYVGASTSPIVLFVFCICTLSLFFSLYLTKWVLAKDEGPPEMSEIYAVFFIGCLLDVQISDAIRDGAEGFFRTQYGTISKMACILALVILGIYLFRSTTPQQEASGVGRTTSAYITVASFLLGALCSGIAGFVGMWVSVRANVRVSSAARRSAREALQIAVRAGGFSAIVVVGMAVFGVAILYATFYVWLEVDSPGSMKVTDLPLLLVGYGFGASFVALFAQLGGGIYTKAADVGADLVGKVEQGIPEDDPRNPAVIADLASLFCLSCNIIDKNAKLSSDNSYPSGFILFPLVVHSFDLVISSVGILSIRGTRDSGLISPIEDPMAIMQKGYSITILLAVVTFGVSTRWLLYTEQAPSAWLNFALCGLVGIITAYAFVWISKYYTDYKHEPVRLLALSSSTGHGTNIIAGVSLGLESTALPVLVISVAIISAFWLGHTSGLVDESGNPTGGLFGTAVATMGMLSTAAYVLTMDMFGPIADNAGGIVEMSQQPESVREITDILDAVGNTTKATTKGFAIGSAALASFLLFSAYMDEVAAFAQLPFKEVDIAIPEVFVGGLLGSMLIFLFSAWACSAVGRTAQEVVNEVRRQFIERPGIMDYNEKPDYGRCVAIVASASLREMIRPGALAIISPMAVGIIFRMLGHATGRPLLGAKVVAAMLMFATVSGILMALFLNTAGGAWDNAKKYIETGALGGKGSESHKAAVTGDTGKQVRKYXLGNRFKDTAXPSIHVLIKMLATITLVMAPIFW

SEQ ID NO: 195052 - protein, 215 aa, Oryza sativa
  unsure (1)..(215): unsure at all Xaa locations
  Clone ID: PAT_MRT4530_91037C.1.pep
MDSPATPVGLSLPLHSLVLYYEPCYTKGKRGLLRQRVGXTVDRVHGGGSRKQTAVIDLSKTDGQDLTVYDRSTTDGVDDVSDDVITDGGSASHARRRTTARRRERRTPTGCGRRGKLTGDQNSGGRSTDGDGDEEEAAATFSLTTTAGLRRSTATTEGWTRSATTXRSRRRLSRATTTTRATVAHGWTNGGDGGTRLHGARAELLIWGSEEQADG

SEQ ID NO: 195053 - protein, 169 aa, Oryza sativa
  unsure (1)..(169): unsure at all Xaa locations
  Clone ID: PAT_MRT4530_91038C.1.pep
MVGCEHMVLMVVLMTIKHRFTSFGCKTLIVPTTSQHGQRLYLLYSMVHCRAPDXEVAEISPRGSLGAHALFYKGVIMIKERCAVVDCVMRGVVSQLLSEVPPIPKPSKLYAASGCRDTHIVLINXGIDLSPEFHQLAXDPDEEEXAVPVAAATESAELPTLQLLYVAAS

SEQ ID NO: 195054 - protein, 103 aa, Oryza sativa
  unsure (1)..(103): unsure at all Xaa locations
  Clone ID: PAT_MRT4530_91039C.1.pep
KVGCEHMVLMAVLMIIKDRFASYCCETFIMPTTSQRGQRLYLLYSMIHYSTPDFEVARSPRGSLGIPCLVYKGVIMIQERCAVMGYVVQGVLSXLLSEVPWWY

SEQ ID NO: 195055 - protein, 132 aa, Oryza sativa
  unsure (1)..(132): unsure at all Xaa locations
  Clone ID: PAT_MRT4530_9103C.1.pep
MAVQAEVAGASGRRRRAERRRRWGLAPCLPSSSSGGGESSGAPRAEDCSGVERRGGRRRRXMRCSTLPEAGRAVEAPEAGRAAPSSSLLLRRAAAGSGAARSGLLRLPRRRIGRRGPASSFSGSDDRQLPSP

SEQ ID NO: 195056 - protein, 291 aa, Oryza sativa
  unsure (1)..(291): unsure at all Xaa locations
  Clone ID: PAT_MRT4530_91040C.1.pep
LFFKRKRRLLRQRARLTVDRVHSGGSRKRMAEIDLSKTDGQDLTVYDRSTADGVDDVSGDVITDGGSASRARRRTTARRRERRTPTGCGRRGELTGDQRRNGGDLRLDDDGGAPAIYSDDGGADEDGDEMTIRTTXSRATTMTGATVAHGWTNSGDGGARLHGARALPTMRDESEGGGGGXGAAAKAHGGRRRKGKVRVQRXETNPIRDRIHGFPNDFSQXFQKRKGRGDLGDHFPSINFTGSRKGVDDGPLSGRXARARASGARLRAGLGRGERERGLGRLSAQSQKRTF

SEQ ID NO: 195057 - protein, 170 aa, Oryza sativa
  unsure (1)..(170): unsure at all Xaa locations
  Clone ID: PAT_MRT4530_91042C.1.pep
MLYKSGSRKRTAEIDPSKNERPRSIGPRTDGNDDVGDDVITGGGSGAQACRRTTARRHERRAPARRERRGELTSDQNGGRRSTDGDGDEEEAAATFGLTTTAALRRSTATMEGRTRSAMTXRSRRRLSRATTTTGAAAAHGWTNGGDGGARLHGARTLPVARGEDEGSGG

SEQ ID NO: 195058 - protein, 119 aa, Oryza sativa
  unsure (1)..(119): unsure at all Xaa locations
  Clone ID: PAT_MRT4530_91043C.1.pep
PRIPSCHLSYFIMLDHNNPHNSPGGSSSGIDQGTLILRYTSTQIYRTKNKNLFXNVPIYMGGATKWEDPRMKLLYMGPDGVHGYTTIYTILLLYXWQLLXTSLNVLHXTDTATHHAALD

SEQ ID NO: 195059 - protein, 101 aa, Oryza sativa
  Clone ID: PAT_MRT4530_91044C.1.pep
MVVARGAGAGDLAAVGRRAGEEGLVERGGEVLEVEDGDEGDEGERERQWEKEKMDVFLALQSAMRGEEWLLVMGPPPFLHFGGVGLKMVEWRGRLLVTGSG

SEQ ID NO: 195060 - protein, 354 aa, Oryza sativa
  Clone ID: PAT_MRT4530_91045C.1.pep
METVRGTHRFTFHGYSLCKGGGAGRCIRSGTFTVGGYDWCICFYPEGQGGGGGDREHVSVKLRLVTRCATATAFYELRLLDQDTGRAAAVARASGAPRVFASSNPGTACFGRRAFMERSKLEASPACLRGDSVVIDCAVRVVVHDPVVAAVRRREAPDDVPPSNILRQLVAQVESEGADVTFAVQGETFTAHRLMLAARSPVFKAELYGAMKEKDADHVIAIVDVQPAVFKALLHFIYTDDMPPDLGLAAADDDDTDRIDMARHLLVAADRYAVERLRVICERVLRRSLGVETVIDTMALAEQHSCGELKEACLEFIDSHSKRIVESDGYKNLKRACPLLVADMWERIVLSRLE

SEQ ID NO: 195061 - protein, 173 aa, Oryza sativa
  unsure (1)..(173): unsure at all Xaa locations
  Clone ID: PAT_MRT4530_91046C.1.pep
MGDHVVDVGGLMASPGAGEEXXGALIGXVECPXCHXEXLAKNLXSPCACCGSLHXSXXXCXXXWCXXKXDXICEICXVIXNFSSLLXQSYXPGYSAPPPXXPDXTTIXINXGDWSISGNPLDLXDPXILAMAARPXTXYLXMNYDEYXAXNNQXAAFCRSLFLIPNGSSYSGM

SEQ ID NO: 195062 - protein, 525 aa, Oryza sativa
  unsure (1)..(525): unsure at all Xaa locations
  Clone ID: PAT_MRT4530_91047C.1.pep
MGLDLGALVLKSGGLLVSDYDSIVAINIFVALLCSCIVIGHLLEGNRWVNESITALVMGLITGGVILLVSGGKNSHILVFSEDLFFIYLLPPIIFNAGFQVKKKQFFRNFMTIILFGAVGTLISFVIISLAIGAIFSATDSVCTLQVLNQDETPLLYSLVFGEGVVNDATSVVLFNAIEDIDIANFDSLVLLAFIGNFLYLFFTSTLLGVVAGLLSAYIIKKLCFARHSTDREVAIMILMAYLSYMLSMLLDLSGILTVFFSGIVMSHYTWHNVTESSRITTKHTFATLSFIAEIFLFLYVGMDALDIEKWKLASSSPKKPIALSATILGLVMVGRAAFVFPLSFLSNLSKKETRPKISFKQQVIIWWAGLMRGAVSIALAYHKFTASGHTELRINAIMITSTVIVVLFXTSLVFGFFTKPLLNLLIPPRPDIAADLSSQSIIDPLLGSLLGSDFDVGQPSPQNNLQLLLTIQTRSVHRVWRKFDDRFMRPMFGGRGFVPFVPGSPVERSIHGSQLGTVTEAEHS

SEQ ID NO: 195063 - protein, 184 aa, Oryza sativa
  Clone ID: PAT_MRT4530_91048C.1.pep
PLEFIQLINKLWVDTQRKRDEVSEARHWTVNSGGGKDWIFDLHSPRKPSRSLLHLRRRRRRRRRVMGVYTFVCRSSGEEWTAKQLKGELEASAATPYELQRRLVAAASAADSAAGVQSSFAMVSPSSAVFQVIIGAVGGGAAIGGAAAGGAAAGGAAAEAPKAEEKKEEEKEESEDDLGFSLFD

SEQ ID NO: 195064 - protein, 52 aa, Oryza sativa
  Clone ID: PAT_MRT4530_91049C.1.pep
MAAAGAGNMHRQEPMSWAKIPNPDEMTQQAQAPAAEEEEEAAAGLNGSSGNA

SEQ ID NO: 195065 - protein, 173 aa, Oryza sativa
  unsure (1)..(173): unsure at all Xaa locations
  Clone ID: PAT_MRT4530_9104C.1.pep
MTIGWLAGGVRDALVCVLALSLRTPGSARSAARSGAVGYCPPVSGARRHAATPGDVYXFGIMLLEIFTGKSPPDPMFTDGLDLVSFVDRNFPDQIFQVIDVRLKEECNNLSRDNMVSEDTIYXLLVSLLQVALSCTRPSPSERLNMKQAATQIHAINASLHGWNEKKYASVDE

SEQ ID NO: 195066 - protein, 93 aa, Oryza sativa
  Clone ID: PAT_MRT4530_91050C.1.pep
FCFLIFLFFYFFFFFFFFFFFFFFFFRPRGLPLKFGRFRIIFTPLLKTRTLVGLCFTPKLGGWAPHWAHRGKETPTGGVLAKGGWPKNTCGNG

SEQ ID NO: 195067 - protein, 170 aa, Oryza sativa
  Clone ID: PAT_MRT4530_91051C.1.pep
MEKLIIIKSSGSGSGDARHDDGGGEVETVRCACCGVAEECTAAYIGGVRAAFCGDWLCGLCSEAVKETARRDPAPGGGVAAALASHAAECRDFNATTRLNPTLSLAGSMRRIARRSFDKRTSASCQERRLGAAASKAVALARSASCDPRFCSLLAADVINGGAPPGDRCR

SEQ ID NO: 195068 - protein, 96 aa, Oryza sativa
  Clone ID: PAT_MRT4530_91052C.1.pep
MQSLPVPLQWPSLTHGGSASAPPVAPAGDFHEFSTAASGDVRNLAADTGGSDDVRPDFGLDVLHDSYSSCFFSNSGELLSFSGVGNNPNSDGGPMS

SEQ ID NO: 195069 - protein, 237 aa, Oryza sativa
  unsure (1)..(237): unsure at all Xaa locations
  Clone ID: PAT_MRT4530_91053C.1.pep
MAAEDNPGYALRATLAGHRRAVSAVKFSPDGRLLASASADKLLRVWSTSDLASPVAELAGHGEGVSDLAFSPDGRLIASASDDRTVRIWDLGDGGGGGGGGEPRLMKTLSGHTNYAFCLAFSPHGNMLASGSFDETVRVWEVRSGRCLRVLPAHSEPVTSVDFNRDGAMIVSGSYDGLCRIWDSATGHCIKTLIDDESPPVSFAKFSPNGKFVLAXTLDSKLRLWNFSAGKFSKTYT

SEQ ID NO: 195070 - protein, 170 aa, Oryza sativa
  Clone ID: PAT_MRT4530_91054C.1.pep
FRQVPPAARAGGFALPGDNPLPRYEGGGPIYVVPPPPDRGGEFRMVPFTPLCLGPPLFPRDYWPRFVAFVPRMSEFGSPREASESPAHGFAQSTGSLVQEAAVALGSLPGQTLIYPVSLGWVSDVGSFYFPFFFFLFALLDSLLGSFGFGLFFSVGNPLWRFNRASFSYR

SEQ ID NO: 195071 - protein, 97 aa, Oryza sativa
  Clone ID: PAT_MRT4530_91055C.1.pep
MADRSSVADVGSARIRRVVVGVVVTVVAVASGGVGLMEGKKYGSADPASPWPGGGGSGLPARARAPPPARSGTSAAASLCRHRPADAAAAPPPPPSG

SEQ ID NO: 195072 - protein, 75 aa, Oryza sativa
  Clone ID: PAT_MRT4530_91056C.1.pep
LNLLAGQNFWKEYHQLIWVYKPGVILFATQTPLQIPNFHLTCLPGLKDFIKPNIWPSHATRPKTLFSIGGKEGKL

SEQ ID NO: 195073 - protein, 40 aa, Oryza sativa
  Clone ID: PAT_MRT4530_91057C.1.pep
RGMLRLRCQPPRRALPQPPPSPEQAPSPQRHCGCHGDAAP

SEQ ID NO: 195074 - protein, 64 aa, Oryza sativa
  Clone ID: PAT_MRT4530_91058C.1.pep
CKIRGEPQVHFFGQKQKGASGTSPVTQVSGFNLKPFSKCRKLQSYLWITGRNKVEHMVYSCCLG

SEQ ID NO: 195075 - protein, 141 aa, Oryza sativa
  Clone ID: PAT_MRT4530_91059C.1.pep
MAPMGVAHLDPHSMEAIDSSSSVVIKEDEDDTVEHDDGFKRRAVCGGSSSAAGGGGWKVWRGEEQHDLWQIKDRRRGATSISTGIVVRPPSPEVKHALHLDTTLTHNTERRHTLINLNLMSSNLRAADDEFLMQGQQERIV

SEQ ID NO: 195076 - protein, 1915 aa, Oryza sativa
  Clone ID: PAT_MRT4530_9105C.1.pep
MAEQGKTHDLSPSVSGDDGEPNPRRRARTPPPPPRQSPKQGEALERVDKSAASPAAGDAGERRDGERRLLVYGDGSTPQGALQAAGALLRHPPVVHDPESPAQRWLEDVANLVMTAQQRLGAGGRSATTTKTSGAATTGSVSSRRRARRAAAAARHSAATPSSTPSTREDQHGEPDARLNIGRRCNSRRTPRATEGASSSRVSPRHGREDQPSVPPAGGVGCRAFVASLRNVRWPPRFRPTITEKYDGSVNPTEFLQVYTTGIEAAGGDDRVMANFFPMALKGQARGWLMNLPPASVHSWEDLCQQFTMNFQGTYPRPGEEADLHAVQRGDDESLRSYIQRFCQVRNTIPCIPAHAVIYAFRGGVRHNRMLEKIASKEPQTTAELFQLADRVARKEEAWTWNSSGSGVAASAAPGSAAQTGRRDRRRKKRSDRSGDEGHVLAVEGAPRATRKGRPASDKKKEAGTPGRERPAGRWCSVHNTSLHDLADCRAVKNLAERTRKWEEDRRQERRDGKSPAVPSDKRRSEAKKKAPAVDIDDGDDDLGFQEPGATIATVDGGACAHVSRRSFKAMKRELLTMAPTHEAMRRARWSEVALTFDQTDHPPCIARGGQVAMVVSPTICNVKLGRVLIDGGAALNILSPAAFDAIKAPGMVLQPSQPIIGVTPGHTWPLGHIDLPVTFGGPANFRTERVSFDVVDLSLPYNAVLGRPALVKFMAAVHYAYLQMKMPGPGGPISVRGDLKVALACMEQRADRLAAASKPEGGDERLGPSAPTAPRQRMATCDEVPEDALVSFLRANADVFAWRPADMPGVPREVIEHRLAVRPGARPVRQKVRRQAPERQAFIREEVARLLEAGFIREVIHPEWLANPVVVPKANGKLRMCIDYTDLNKACPKDPYPLPRIDQIVDSTAECDLLCFLDAYSGIEANPEKIRAIERMRPPSKLRDVQCVTGCMAALSRFISRLGEKALPLFKLLKRSGPFTWTEEAENALAQLKAYLSSPPVLVAPEPNESLLLYLAATPQVVSAALVVERDEDNPHSAHPRSVPTWPGSRQGGEAPESNGGLRPPTTGVGPPPACQTVLGAPDPQEGPKATEGRLHLKPFGPEANPVLTRPRKEQGEEAPEPNGGQRPLTTGVGPLPACPTMPGVPDPQDGPEATVGGPLLSSSDPEVISAEDEFAPRGHLDEERPGGTAPNEEDRPRRKVQRPVYFVSEALRDAKTRYPQAQKMLYAVLMASRKLRHYFQAHRVTVVTSYPLGQILHNREGTGRVVKWAIKLSEFDLHFEPRHAIKSQALADFVAEWTPAPELVSVPEAGSGPSQLPHTAHWVMQFDGSLSLQGAGAGVTLTSPSGDVLKYLVRLDFRATNNMAEYEGLLAGLRVAAGLGIRRLLVLGDSQLVVNQVCKEYRCSDPQMDAYVRQVRRMERHFDGIELRHVPRRDNMMADELSRLASSRAQTPPGAFEERLAQPSARPDPLGETDAPDRPPRPVGVQASGPKGSAPSSLRLITWIAEIQAYLTDKTLPEDREGSERVRRISKRYVLVEGTLYRRAANGILLKCIPREQGVVLLADIHEGECGAHSASRTLVGKAFRQGFYWPTALNDAVDLVRRCRACQFHAKQIHQPAQALQTIPLSWPFAVWGLDILGPFRRAPGGFEYLYVAIDKFTKWPEAYPVVKIDKHSALKFIKGITARFGVPNRIITDNGTQFTSELFGDYCEDMGIKLCFASPAHPESNGQVERANAEILKGLKTKTFNILKKHGDSWIEELPAVLWANRTTPSRATGETPFFLVYGAEAVLPSELTLKSPRATMYCEADQDQLRRDDLDYLEERRRRAALRAARYQQSLRRYHQRHVRARSLCVDDLVLRRVQTRAGLSKLSPMWEGPYRVVGVPRPGSIRLDTGDGTELPNPWNIEHLRRFYP

SEQ ID NO: 195077 - protein, 172 aa, Oryza sativa
  unsure (1)..(172): unsure at all Xaa locations
  Clone ID: PAT_MRT4530_91060C.1.pep
MGSIGGVAVVLVGMAAMLVGMASAATYNVGEPGGAWDLTTNYTNWVAQKRFHPGDQIVFKYSAQRHDVVEVNKAGYDSCSTSTSIATHTTGNDVIPLXATGTRYFICGFPGHCTTTGTGNMKIQIDVVQADSSSAPAPVATTTPPSPPSSAATSLKATAAAAVLLAALLIMA

SEQ ID NO: 195078 - protein, 75 aa, Oryza sativa
  Clone ID: PAT_MRT4530_91061C.1.pep
PCIYIQILPGTPSLITFSFPFPFLKYFIATNKPSPNVSFTTLNIFTPGTYTLVLQIFPSFILTYTHQNRFLLGGP

SEQ ID NO: 195079 - protein, 366 aa, Oryza sativa
  Clone ID: PAT_MRT4530_91062C.1.pep
MRVIVGAAPRGVEGARPGGDLLCVVRALLKKIRRRVLVGDRVLIGAVDWAGGRGVIEGVFERRAEVADPPVANVDRLVLLFALDQPQPEPATLTRFLVDAESTGIPFVLVFNKVELVDDKTISYWRDRMKSWGYDPLFLSVDQKSGLSALEETLEGQTTVIVGPSGVGKSSLINALRSNQNISEEDPIHKLVEQNSKWFGEQRVGTVSKKSGKGKHTTRHVSLLPIAGGGFLADTPGFNQPSLMKVTKKGLAETFPEIRKMLAENEPSKCLFNDCVHLGERGCVVKGDWERYPYYLQLLDEIKIRESFQLRTFGTKREGDVRYKTGVMGVKQAEPRLQLKKHRRVSRKKINQSILDDIDDELDEDN

SEQ ID NO: 195080 - protein, 163 aa, Oryza sativa
  Clone ID: PAT_MRT4530_91063C.1.pep
FILSAVKPMSERNMKDSSAQRNKTFEATNMIAAEKAASRPADQSEHIVKCGPSHNPMCRPKDLLSTSFGHVKKPSQLYGQTNEQDMRNTSSNKASTDGSKLKPNECQTVSVKTGRLVDGSLTMPDALMDKSSTVPELDFIWQGGFELQRTGRSPELCDGFQAH

SEQ ID NO: 195081 - protein, 60 aa, Oryza sativa
  unsure (1)..(60): unsure at all Xaa locations
  Clone ID: PAT_MRT4530_91064C.1.pep
SDGKSSLLKALLDFHFNVREVKMGTYRPFVLXMVHSFTVLDPWCLFPVRVPLLPMKDNTP

SEQ ID NO: 195082 - protein, 147 aa, Oryza sativa
  Clone ID: PAT_MRT4530_91065C.1.pep
MVELQGHREGFSIGFDEQGNSLVRWWGIDLKSAAAAAAVASQDLHRRRRRRWQRHGSPTVLQQPDDSTGVTGGVPFSHYFYFKWLSYDYYLVLNQRPLRNLRELRLRTPRADKALLDHVETNDHARENSIRHCGRLHVSMVLHQDRL

SEQ ID NO: 195083 - protein, 38 aa, Oryza sativa
  Clone ID: PAT_MRT4530_91066C.1.pep
SVGPTCQHATSSLRFGPLNCQVITLHPVGRSRCCLLST

SEQ ID NO: 195084 - protein, 337 aa, Oryza sativa
  unsure (1)..(337): unsure at all Xaa locations
  Clone ID: PAT_MRT4530_91067C.1.pep
HLGHIRTGLRASVAKHYRXFHMSSGANEGYTSCGPVVEMSWQRVGALLLGAQSCLPVPEVPAVGGIGSMAGSVTRRGLDMTGFVLELRGMCVVLGYPHGVDYQARPLPEQEGDDAEPHAGWEVTAVILSGSPERTSLAVTAGGDSFPTACQNAALLAIGTLHQRYPDELQHSPYRYHPRRGGARDYATFRDASSEDDATIVHLARMVEAYNAARIDFHQMVRRGMVENNMKILELRQENLQLKKDLDAVEAQLHQLKIAQGKVCRPKRRRVCRSQKITARKSTSRPELVRQSLAWTCFIETPRAEPAPVVPQEGEASGVGSTEDALLLTFRPGPSQQ

SEQ ID NO: 195085 - protein, 85 aa, Oryza sativa
  unsure (1)..(85): unsure at all Xaa locations
  Clone ID: PAT_MRT4530_91068C.1.pep
LGQXFNKLLELXLSQLQXCKPPFEXGSLFXGGSLVTLAPVGPFSHVXMTQQHRLXXVRTKNXQWXTREFXNHGFVGLFXQXFLXF

SEQ ID NO: 195086 - protein, 153 aa, Oryza sativa
  unsure (1)..(153): unsure at all Xaa locations
  Clone ID: PAT_MRT4530_91069C.1.pep
IPGSFTCPTLDTILXRRPLLLLRPPPGATVLPLPFPAEAIDRSTRPRATAADHNKHQQPPFSARAVSSRLAMAPKTTTDPSTSTPPPPGAFRRCSGRVRGAGISCAGCFGDAESKRRRRVAVYKAYAVEGKVKASLRRGIRWFKRKCSAIFRA

SEQ ID NO: 195087 - protein, 74 aa, Oryza sativa
  Clone ID: PAT_MRT4530_9106C.1.pep
PSEQFVLVSRSAAANGSVPNQSMMSVGIWAYTCIDQSINLGPLSIMCSIHGKTSLRHSSPPRVSDPIYSILYTR

SEQ ID NO: 195088 - protein, 618 aa, Oryza sativa
  unsure (1)..(618): unsure at all Xaa locations
  Clone ID: PAT_MRT4530_91070C.1.pep
ARASVAKHYRXFHMSSGTNEGYTGCGSVVEMSWHRAGVLLLGAQSCLPVPGVPAVGGIGSMYTSDQSIIYSNSRALGYGQAEQCTQMAGSVSRRGLDMTGFVLELRGMCVGLGYPHGVDYQGRPLPEQEGDDAEPHAAWEVTAVILTGSPERTSLAVTAGGDSFPAACQNAALLAIGTLHQRYPDELQHSPYRYHPRRGGARDYAIFRDASSEDDATIMHLARMVEAYDAARIDFHQMVRRGMVGNNMKILELRQENLQLKKDLDAVEAQLHQLKIAQGEVCHPKRRRVCRSQKITARKSTSRPELVRQSLAWTCFVETPRAEPAPVVPQEGEASGVGSTEDALLLTFHGXTRRNANTGDGNQPEGSNHHHQGSPPPPPPPPPPPPPDTNAILTQILAQQANMMTAFLHHIQNPPQHNAPPPPPQHSKLAEFLRIRPPTFSSSNNPMDALDWLHAVGKKLDTVQCSDEEKVIFAAHQLQGPASLWWDHFQATQPEGQPITWARFTAAFRRTHVPAGVMALKKREFRELKQGNRSVMEYLHEFNNLARYAPEDVREDEEKQEKFLAGMDPELSVRLVSGDYPDFQRLVDKSIRLEAKHKELESHKRRLANFRNQQMLTK

SEQ ID NO: 195089 - protein, 78 aa, Oryza sativa
  Clone ID: PAT_MRT4530_91071C.1.pep
MAAQLFVEIRRLDRVTGPTRAWRDEARRMVMLGAAHGLGRRARGSVAIGEEQRWVGKTTMVTLLVSKRRAIGAPQALV

SEQ ID NO: 195090 - protein, 215 aa, Oryza sativa
  Clone ID: PAT_MRT4530_91072C.1.pep
HSDSDDARRHPSTRVPLFLFFSFPLSPDARRRGALPGRARAQPSSFAPARKTDSRCTVASAGAESTTPCKSLTSSTWSVSDGCVLLRRERWNSPSISATSLSDDGSSADLTAATRSSSTRRATGWETTPATTSCFLSQSCGSRCRNTSASAAWAERTNASWREKSSLPRWMRPDGEVDGSGGAPERAPAGGEEAGGRGLFRRREKKRDTHRHTSF

SEQ ID NO: 195091 - protein, 1627 aa, Oryza sativa
  unsure (1)..(1627): unsure at all Xaa locations
  Clone ID: PAT_MRT4530_91073C.1.pep
MSWHRAGVLLLGAQSCLPVPGVPAMAGSVTRRGLDMTGFVLELRGICVVLGYPHGVDYQARPLPEQEGDDAEPHAGWEVTAVILSGYPERTSLAVTAGGDSFPAACQNDALLAIVTLHQRYPDELQHSPYRYHPRRGGARDYATFRDASSEDDATIVHLARMVEAYDAARIDFHQMVHRGMVENNMKILELRQENLQLKKDLDVVEAQLHQLKIAQGEVCRPKRRRVCRSQKITARKSTSRPELVRQSLAWTCFVETPRAEPAPVVPQKGEASGVGSTEDALLLTFRPGPSQRRNAATGDGNQPEGSNHNHQGNPPPPPPPPPPPPPDTNAILTQILAQQANMMTAFLHHLQNPPQHNAPPPPPQHSKLAEFLRIRPPTFSSSNNPVDALDWLHAVGKKLDTVQCSDEEKVIFAAHQLQGPASLWWDHFQATQPEGQPITWARFTAAFRRTHVPAGVMALKKREFRELKQGNRFVMEYLHEFNNLARYAPEDVREDEEKQEKFLAGMDPELSVRLVSGDYPDFQRLVDKSIRLEAKHKELESHKRRLANFRNQQGANQRVRYTNPYPGGSSSQQQQQQQQPRSAPRPQFVVRVPQPQQQQNQQGTRAPRPPTPTVQPGQGRRDAQGQQRLCFNCFEPGHFVDKCPKPRRQQGQAPPRSNNGGKDVIRGRVNHVTAKDVLTTPDVIVGXFGDVFPEELPGMPPKREIEFRIDLAPGITPLHKRPYRMAANELAEVKKQLEELKEKGYIRPSTSPWGAPVIFVEKKDKTKRMCVDYRALNEVTIKNKYPLPRIDDLFDQLKGATVFSKIDLRSGYHQLRIREEDIPKTAFTTRYGLYEFTVMSFGLTNAPAFFMNLMNKVFMEYLDKFVVVFIDDILIYSQSEEDHQHHLRLVLGKLREHQLYAKLSKCEFWLSEVKFLGHMISAKGVAVDPETATAVTDWKQPKTVTQIRSFLGLAGYYRRFIENFSKIARPMTQLLKKEEKFVWSPQCEKAFQTLKEKLVSSPDGHVVAYASRQLRPHEGNYPTHDLELAAVVHALKIWRHYLIGNLCEIYTDHKSLKYIFTQSDLNLRQRRWLELIKDYDVGIHYHPGKANVVADALSRKSHCHTLNVRGIPPELNQQMEALNLSIVSRGFLATLEAKPTLLDQIREAQKNDPDMHGLLKIMKQGKAAGFTEDEHGTLWNENRVCVPDNRELKQLILQEAHESPYSIHSGSTKMYLNLKEKYWWVSMKREIAEFVALCDVCQRVKAEHQRPAGLLQPLQVPEWKWDEIGMDFITGLPKTQGGYDSIWVVVDRLTKVARFIPVKTTYGGNKLAELYFARIVSLHGVPKKIVSDRGSQFTSHFWKKLQEELGTRLNFSTAYHPQTDGQTERLYQILEDMLRACVLDFGKTWDKSLPYAEFSYNNSYQASIQMAPYEALYGRKCRTPLLWDQVGESQVFGTDILRETEAKVRTIRDNLKVAQSRQKSYADNRRRDMEFAVDDFVYLRVTPLRGVHRFQTKGKLAPRYVGPFRIIARRGEVAYQLELPASLGNVHDVFHVSQLKKCLRVPSEQADSEQIEVREDLTYVERPVKILDTMERRTRNRVIRFCKVQWSNHAEEEATWEREDELKAAHPDLFASSSESRGRDSV

SEQ ID NO: 195092 - protein, 1420 aa, Oryza sativa
  unsure (1)..(1420): unsure at all Xaa locations
  Clone ID: PAT_MRT4530_91074C.1.pep
MSWHRAGVLLLGAQSCLPVPGVPAVGGVGSVLLSMARMGWKLCHVFHPYTVVMAGSINRRGLDLTGFVLELRGMCVVLGYPHGVDYQGKQLPEQEGDDAEPHAAWEVTAVILTGSPERTSLAITAGGDSFSAACQNAALLAIGTLHQRYPDELQHSPYRYHPRRGGARDYATFRDASPEDDATIMHLARMVEAYDAARIDFHQMLKKDLDAVEAQLRQLKITKGEMVTTRRSAATGEGSHPEGSNHNNHGSPPPPPPPPPPPPPDTNAILTQILAQQANMMAAFLHHLQNPPQHNAPPPPPQHSKLAEFLRIRPPTFPSSNNPVDALDWLHAVEKKLDTVQCSDEEKVIFAAHQLQGXTQPEGQPITWARFTAAFRRTHVPAGVMALKKRXEEKQEKFLAGMDPELSVRLVSGDYPDFQRLVDKSIRLEAKHKELESHKRRLANFRNQQGANQRVRYTDPYPGGSSSQQQQQQQPRSAPRPQFVVRVPQPQQQQSQQGTRAPHPPTLAVQPGQGRRDAQGQQRLCFNCFEPGLFADKCPKPRRQQGQAPPRSNNGGKDVIRGRVNHVTAEDVLATQDVIVGTFLIHSIPATILFDSGASHSFISVPFVGRNQLGVERLRNPQLITTPGGVMTAKYYSPAVPIEIQGIPFPSDLILLDTKNLDVILGMNWLAQFQGVVDCARCTVTLYRGPEQPIVFFAPPTSVGSAELHQIGLSETPIVSEFGDVFPEELPGMPPKREIEFQIDLALGTTPLYKRPYRMAANELAVVKKQLEELKEKGYIRPSTSPWGAPVIFVEKKDKTKRMCVDYRALNEVTIKNKYPLPRIDDLFDQLKGATVFSKIDLRSGYHQLRIRKEDIPKTAFTTRYGLYEFTVMSFGLTNAPAFFMNLMNKVFMEYLDKFVVVFIDDILVYSQSEEDHQHHLRLVLGKLREHQLYAKLSKCEFWLSEVKFLGHMISAKGVAVYPETVTAVTDWKQPKTVTQIRSFLGLAGYYRRFIENFSKIARPMTQLLKKEEKFVWSPQCEKAFQTLKERLVSSPVLILPDTRKDFLVYCDASRQGLGCVLMQEGHVVAYASRQLRPHEGNYPTHDLELAAVVHALKIWRHYLIGNRCEIYTDHKSLKYIFTQSDLNLRQRRWLELIKDYDVGIHYHPGKANVVADALSRKSHCNTLNVRGIPPELNQQMEALNLSIVGRGFLATLEAKPTLLDQIREAQKNNPDMRGLPKNMKQGKAAGFTEDEHGTLWNGNQVCVPDDKELKQLILQEAHESPYSIHPGSTKMYLDLKGKYWWVSMKREIAEFVALYDVCQRVKAEHQRPAGLLQPLQVPEWKWDEIGMDFITGLPKTQGGYDSIWVVVDQLTKVARFIPVKTTMERRTRNRVIRFCKVQWSNHAEEEATREREDELKAAHPNLFDSYSESRGRDSV

SEQ ID NO: 195093 - protein, 49 aa, Oryza sativa
  unsure (1)..(49): unsure at all Xaa locations
  Clone ID: PAT_MRT4530_91075C.1.pep
HFLXXKVCCSHKVTRETGRSFIPAHVSISLMLIAPTIICTFGAQCPFRV

SEQ ID NO: 195094 - protein, 72 aa, Oryza sativa
  Clone ID: PAT_MRT4530_91076C.1.pep
MGLTKVEAWLRCGDGESLSSPLSVTKPSMPRSATNEIIGSRDAVQKGSHSVLGFVLQIPGRIGDKNKDAWEK

SEQ ID NO: 195095 - protein, 40 aa, Oryza sativa
  Clone ID: PAT_MRT4530_91077C.1.pep
MSTGHSPSHALYNASPSSVSQQKAGEEHDPSEVPLGRRDG

SEQ ID NO: 195096 - protein, 656 aa, Oryza sativa
  unsure (1)..(656): unsure at all Xaa locations
  Clone ID: PAT_MRT4530_91078C.1.pep
QGVWFFSVNLIHYTSPLTSADSTSANHGLNQVNANHFGALKHQGDQTQSLLASDVDSQSDQFISSSVKSPMDGNTSIPNEVPARQNSLFHRASXPVTNERLLEINEISPEWAYSTETTKVVVIGNFYEQYKHLAGSAMFGVFGEQCVAGDIVQTGVYRFMVGPHTPGKVDFYLTLDGKTPISEICSFTYHVMHGSSLEARLPPSEDDYKRTNLKMQMRLARLLFATNKKKIAPKLLVEGTKVANLMSALPEKEWMDLWNILSDPEGTYVPVTESLLELVLRNRLQEWLVEMVMEGHKSTGRDDLGQGAIHLCSFLGYTWAIRLFSLSGFSLDFRDSSGWTALHWAAYHGRERMVATLLSAGANPSLVTDPTPESPAGLTAADLAARQGYDGLAAYLAEKGLTAHFEAMSLSKDTEQSPSKTRLTKLQSEKFEHLSEQELCLKESLAAYRNAADAASNIQAALRERTLKLQTKAIQLANPEIEASEIVAAMKIQHAFRNYNRKKAMRAAARIQSHFRTWKMRRNFINMRRQVIRIQAAYRGHQVRRQYRKVIWSVGIVEKAILRWRKKRKGLRGIASGMPVVMTVDAEAEPASTAEEDFFQAGRQQAEDRFNRSVVRVQALFRSYKAQQEYRRMKIAHEEAKVIFFKTFSNNCWHVP

SEQ ID NO: 195097 - protein, 79 aa, Oryza sativa
  Clone ID: PAT_MRT4530_91079C.1.pep
MPKQIHEIKGLPPDGEEEGREVGADQEDQGRRQVQGALLQVPLHPLRLRRRQGQQAQAVAPPRFDCPGGLSIKARPCCL

SEQ ID NO: 195098 - protein, 2031 aa, Oryza sativa
  Clone ID: PAT_MRT4530_9107C.1.pep
MAEQGKTHDLSPSVSGDDGEPNPRRRARTPPPPPRQSPKQGEALERVDKSAASPAAGDAGERRDGERRLLVYGDGSTPQGALQAAGALLRHPPVVHDPESPAQRWLEDVANLVMTAQQRLGAGGRSATTTKTSGAATTGSVSSRRRARRAAAAARHSAATPSSTPSTREDQHGEPDARLNIGRRCNSRRTPRATEGASSSRVSPRHGREDQPSVPPAGGVGCRAFVASLRNVRWPPRFRPTITEKYDGSVNPTEFLQVYTTGIEAAGGDDRVMANFFPMALKGQARGWLMNLPPASVHSWEDLCQQFTMNFQGTYPRPGEEADLHAVQRGDDESLRSYIQRFCQVRNTIPCIPAHAVIYAFRGGVRHNRMLEKIASKEPQTTAELFQLADRVARKEEAWTWNSSGSGVAASAAPGSAAQTGRRDRRRKKRSDRSGDEGHVLAVEGAPRATRKGRPASDKKKEAGTPGRERPAGRWCSVHNTSLHDLADCRAVKNLAERTRKWEEDRRQERREGKSPVVPSGKRRGEAKQKAPVVDIDDGDDDLGFQEPGATIATVDGGACAHVSRRSFKAMKRELLAMAPTHEAMRRARWSEVALTFDQTDHPPCIARGGQVAMVVSPTICNVKLGRVLIDGGAALNILSPAAFDAIKAPGMVLQPSQPIIGVTPGHTWPLGHIDLPVTFGGPANFRTERVSFDVADLSLPYNAVLGRPALVKFMAAVHYAYLQMKMPGPGGPISVRGDLKVALACIEQRADRLAAASKPEGGDERLGPSAPTAPRQRMATCDEVPVKEEDALVSFLRANADVFAWRPADMPGVPREVIEHRLAVRPGARPVRQKVRRQAPERQAFIREEVARLLEAGFIREVIHPEWLANPVVVPKANGKLRMCIDYTDLNKACPKDPYPLPRIDQIVDSTAGCDLLCFLDAYSGYHQIRMAREDEEKTAFITPVGTYCYTSMPFGLKNAGPTFQRTTRISLGSQIGRNVEAYVDDLVVKTRNQETLLSDLAETFENLRSARIKLNPDKCVFGVPAGKLLGFLVSARGIEANPEKIRAIERMRPPSKLRDVQCVTGCMAALSRFISRLGEKALPLFKLLKRSGPFTWTEEAENALAQLKAYLSSPPVLVAPEPNESLLLYLAATPQVVSAALVVERDEDNPHSAHPRSVPTWPGSRQGGEAPESNGGPRPPTTGVGPPPACQTALGAPDPQEGPEATEGRLHLKPFGPEANPVLTRPGKEQGEEAPEPNGGQRPLTTGVGPLPACPTMPGVPDPQDGPEATVGGPLLSSSDPEVISAEDECAPRGHLDEERPGGTAPNEEDRPRRKVQRPVYFVSEALRDAKTRYPQAQKMLYAILMASRKLRHYFQAHRVTVVTSYPLGQILHNREGTGRVVKWAIELSEFDLHFEPRHAIKSQALADFVAEWTPAPETVSMPEASANPSQLPHAAHWVMQFDGSLSLQGAGAGVTLTSPNGDVLRYLVRLDFRATNNMAEYEGLLAGLRVAAGLGIRRLLVLGDSQLVVNQVCKEYRCSDPQMDAYVRQVRRMERHFDGIELRHVPRRDNMIADELSRLASSRAQTPPGAFEERLTQPSARPDPLGETDAPDRHPRPVGVQASGPEESVPSSLRLIAWISEIQTYLTDKTLPEDREGSERVQRISKRYVLVEGTLYRRAANGILLKCIPQEQGVELLADIHEGECGAHSASRTLVGKAFRQGFYWPTALNDAVDLVRRCRACQFHAKQIHQPAQALQIIPLSWPFAVWGLDILGPFKRAPGGFEYLYVAIDKFTKWPEAYPVVKIDKHSALKFIKGITARFGVPNRIITDNGTQFTSELFGDYCEDMGIKLCFASPAHPRSNGQVERANAEILKGLKTKTFNILKKHGDSWIEELPAVLWANRTTPSRATGETPFFLVYGAEAVLPSELTLRSPRATMYCEADQDQLRRDDLDYLEERRRRAALRAARYQQSLRRYHQRHVRARSLCVDDLVLRRVQTRAGLSKLSPMWEGPYRVIGVPRPGSVRLATGDGTELPNPWNIEHLRRFYP

SEQ ID NO: 195099 - protein, 1829 aa, Oryza sativa
  Clone ID: PAT_MRT4530_91080C.1.pep
MAAGSSAPFPPRPAALSPSRPYINPPRASLHRFRHSPLSLPAGIELAPSPSLSVVAAELRSAAVVAPDHLSPRRRLLRLRRIPGDLVHPSVSLADRRSTVDPIHPSRATAFLRTGRRFRRCRRPGVSRGPPLLFPLPFPSLGRRSAVPMAAAGDHRGAGVPPPAAAPAWPPSGAPCGYRVGPGYQPPAPSAPRPYKDRSSGLCCKALPYFHMSSGTNEGYTSCGPVVEMSWHRAGVLLLGAQSCLPVPEVPAVGGIGSMAGSVSRRGLDMTGFVLELRGMCVVLGYPHGLDYQGRPLPEQEVTAGGDSFSAACQSAALLAISTLHQRYPDELQHSPYRYHPRRGGARDYATFRDASSEDDATIMHLARMVEAYDAARIDFHQMVRRGMVENNLKILELRQENLQLKKDLDAVEAQLHQLKIAQGEVCHPKRRRVCRSQKITARKSTSRPELVRQSLAWTCFVETPRAEPAPVVPQEGEASGVGSTEDALLLTFRPGPSQRSNNPVDVLDWLHAVGKKLDTVQCSDEEKVVFAAHQLQGPASLWWDHFQATQPEGQPITWARFTAAFRRTHVPAGVMALKKREFRELKQGNRSVMEYLHEFNNLARYAPEDVREDEEKQEKFLAGMDPELSVRLVSGDYPDFQRLVDKSIRLEAKHKELESHKRRLANFRNQQGANQRIRYTNPYPGGSSSQQQQPRSAPRPQFVVRVPQPQQQQSQQGTHAPRPPTPAAQSGQGRRDVQGPQRLCFNCFEPGHFADKCPKSRRQQGQAPPDVIVGTFLIHSIPATILFDSGASHSFISVPFVGRNQLGVERLRNPLLITTPGGVMTAKYYSPAVPIEIQGIPFPSDLILLDTKNLDIGLSEIPIVREFGDVFPEELPGMPPKREIEFRIDLAPGTTPLYKRPYRMAANELAEVKKQLEELKEKGYIRPSTSPWGAPVIFVEKKDKTKRMCVDYRALNEVTIKNKYPLPRIDDLFDQLKGATVFSKIDLRSGYHQLRIREEDIPKTAFTTRYGLYEFTVMSFGLTNAPAFFMNLMNKVFMKYLDKFVVVFIDDILVYSQSEEDHQHHLRLVLGKLRKHQLYAKLSKYEFWLSEVKFLGHVISAKGVAVDPETVTAVTDWKQPKTVTQIRSFLGLAGYYRRFIENFSKIARPMTQLLKKEEKFVWSPQCEKAFKTLKEKLVSSPVLILPDTRKDFMVYCDASRQGLGCVLMQDGHVVAYASRQLQPHEGNYPTHDLELAAVVHALKIWRHYLIGNRCEIYTDHKSLKYIFTQSDLNLRQRRWLELIKDYDVGIHYHPGKANVVADAQSRKSHCNTLNVRGIPPELNQQMEALNLSIVGRGFLAALEAKPTLLDQIREAQKNDPDMHGLLKNMKQGKAAGFTEDEHGTLWNGNRSSWPFVMCASVSRQSTNDRPDFSNLSKYQNGNGMKLGWISSPDFQKPKVDMILYGTAYHPQTDGQTERLNQILEDMLRACVLDFGKTWDKSLPYAEFSYNNSYQASIQMAPYEALYGRKCRTPLLWDQVGESQVFGTDILREAEAKVRTIRDNLKVAQSRQKSYADNRRRDLEFAVDDFVYLRVTPLRGVHRFQTKGKLAPRFVGPFRMIARRGEVAYQLELPASLGNVHDVFHVSQLKKCLRVPSQQADSEQIEVREDLTYVERPVKILDTMERRTRNRSAAVVAPDLLPLRRRLLWFRRNLADLVHPSVSPADRRNAAVPVYPSRAAAFLRSGRRSRRRRRPGVSCGPPIRFPLPSPLSGAAPPRRWSPAATIGARVRRLPSAVPAWPPSGAPRGCHVGPGRQPPAPSDAAASEDPLFVEVEADVWESEQGKSHHL

SEQ ID NO: 195100 - protein, 212 aa, Oryza sativa
  unsure (1)..(212): unsure at all Xaa locations
  Clone ID: PAT_MRT4530_91081C.1.pep
MCICIGGFFYVSIQAIPALNVVSETYATNHGLNQVNANHFGALKHQGDQTQSLLASDVDSQSDQFISSSVKSPMDGNTSIPNEVPARQNSLGLWKYLDDDSPGLGDNPSSVPQSFCPVTNERLLEINEISPEWAYSTETTKVVVIGNFYEQYKHLAGSAMFGVFGDQCVAGDIVQTGVYRFMVGPHTPGKVDFYLTLDGKTPISEIXXXTYH

SEQ ID NO: 195101 - protein, 99 aa, Oryza sativa
  Clone ID: PAT_MRT4530_91082C.1.pep
GRGLLHLRRRSLLNSTLFGSEQQRLPRDQGLPPDGEEEGREVGADQEDQGRRQVQGALLQVPLHPLRLRRRQGQQAQAVASPGFDCPGGLSIKARPCCL

SEQ ID NO: 195102 - protein, 1095 aa, Oryza sativa
  Clone ID: PAT_MRT4530_91083C.1.pep
MVMAGSVTRRGLDMTGFVLELRGMCVVLGYPHGVDYQARPLPDQEGDDAEPHAGWEVTAVILSGSPERTSLAVTAGGDSFPAACQNAALLAIGTLHQRYPDELQHSPYRYHPRRGGACDYATFRDASSEDDATIVHLARMVEAYDAARIDFHQMVRRGMVKSNLMILELRQENLQLKKNLDAVEAQLHQLKITQGEICRPKRRRVCRSQKITARKSTSRPELVRQSLAWTCFVETPRAEPAPVVPQEGEAFGVGSTEAPSLFAGSVWGFQMVTTRRNAATGDGNQPEGSNHNHQGNPPPPPPPPPPPPPDTNAILTQILAQQANMMNAFLHHLQNPPQQNAPPPPPQHSKLAEFLRIRPPTFSSSNNPVDALDWLHAVGKKLDTVQCSDEEKVVFAAHQLQGPASLWWDHFQATQPEGQPITWARFTAAFRRTHVPAGVVALKKREFRELKQGNRSVMEYLHEFNNLARYAPEDVREDEEKQEKFLAGMDPELSVRLVSGDYPDFQRLVDKSIRLEAKHKELESHKRRLANFRNQQGANQRVRYTNPYPGGSSSQQQQQQQQPRSAPRPQFVSGQGRRDASGPQRLCFNCFEPGHFADKCPKPRRQQGQAPPRSNNGGKDVIRGRVNHVTAEDVLTTPDVIVGTFLVHSIPATILFDSGASHSFISVPFVGRNQLGVERLRNPLLITTPGGVMTAKYYSPAVPIEIQGIPFPSDLILLDTKNLDVILGMNWLAQFQGVVDCARRTVTLYRGPEQPVVFFAPPTKVARFIPVKTTYGGNKLAELYFARIVSLHGVPKKIVSDRGSQFTSHFWKKLQEELGTRLNFSTAYHPQTDGQTERLNQILEDMLRACVLDFGKTWDKSLPYAEFSYNNSYQASIQMAPYEALYGRKWRTPLLWDQVGESQVFGTDILREAEAKVRIIRDNLKVAQSRQKSYADNRRRDLEFAVDDFVYLRVTPLRGVHRFQTKGKLAPRYVGPFRIVARRGEVAYQLELPASLGNVHDVFHVSQLKKCLRVPSEQADSEQIEVREDLTYVERPVKILDTMERRTRNRVIRFCKVQWSNHAEEEATWEREDELKAAHPGLFASSSESRGRDSV

SEQ ID NO: 195103 - protein, 30 aa, Oryza sativa
  Clone ID: PAT_MRT4530_91084C.1.pep
TGLNGLYDNGVSQRHFLFLQKLKAYESTCI

SEQ ID NO: 195104 - protein, 213 aa, Oryza sativa
  unsure (1)..(213): unsure at all Xaa locations
  Clone ID: PAT_MRT4530_91085C.1.pep
WGGGKGGASPGFTPTATTHGGIPAHEFLSFSSFLFLYLPTHADVVHCPGGRGRSHLLSARRGRRTRGARWRAPARSRRRXCRSLTCTTHSRSRSRSVVSRGSAMPAEREKLPHPVRSSTRSVSDGWVLPRRERWNSPSISATSLSDDGPSADXRRRRGAPRRGAPPGGRRRRRPHRASSPSPAGRGAGTRRRARRGRSGRTRRGGRRRRRPGG

SEQ ID NO: 195105 - protein, 1858 aa, Oryza sativa
  Clone ID: PAT_MRT4530_91086C.1.pep
MANLNPNPLRFLMHGLVVHAGGDFRIPRVDLTVPQRPARRHEDFYVAIVEPIPLEQDWDHHRALIANFVQDELHYEVCNSFWYPSVVGFFQMRSAMNRDALVLSPPEFYDGVHSVIFVNHDQCPNWRAANYHREGWFMFLDFPLDFIDRHHVHQAVTSFGAQSCLPVPGVPAVGGIGSVLLSMARMGWKLCHVFRLYTVVMAGSVTRRGLDMTGFVLELRGMCVVLGYPHGVGYQARPLPEQEGEDAEPHAGWEVTAVILAGSSERTSLTVTAGGDSFPAACQNAALLAIGTLHQRYPDELQHSPYRYHPRRGGARDYATFRDASSEDDATVVHLARMVEAYDAARIDFHQMVRRGMVENNLKILELRQENLQLRKDLDAVEAQLHQLKIAQGEICRPKRRRVCRSQKITARKSTSRPELVRQSLAWTCFVETPRAEPAPVMVTTRRNTVTGDGNQPEGSNHNHQGNPPPPPPSSPPPPPDTNAILTQILAQQANMMNAFLHHLQNPPQQNVSPPPSQHSKLAEFLRIRPPTFSSSNNPVDALDWLHAVGKKLDTDVRGDEEKQEKFLAGMDLELSVRLVSGDYPDFHRLVDKSIRLEAKHKELESHKRRLANFRNQQGANQRVRYTNPYPGGSSSQQQQQQQQPRPAPRPQFVVRVPQPQQQQNQQGTRAPRPPTPTVPPGQGRRDAQGQQRLCFNCFEPGHFADKCPKPRRQQGQAPPRSNNGGKDVIRGRVNHVTAEDVLTTPDVIVGTFLVHSIPATILFDSGASHSFISVPFVGRNQLGVERLRNPLLITTPGGVMTAKYYSPAVPIEIQGIPFPSDLILLDTKNLDVILGMNWLAQFQGVVDCARRTVTLYRGPEQPVVFFAPPTSVRSSELHQIGLSEIPIVREFGDVFPEELPGMPPKREIEFRIDLAPGTTPLYKRPYRMAANELAEVKKQLEELKEKGYIRPSTSPWGAPVIFVEKKDKTKRMCVDYRALNEVTIKNKYPLPRIDDLFDQLKGATVFSKIDLRSGYHQLRIREEDIAKTAFTTRYGLYEFTVMSFGLTNAPAFFMNLMNKVFMEYLDKFVVVFIDDILIYSQSEEDHQHHLRLVLGKLREHQLYAKLSKCEFWLSEVKFLGHVISAKGVAVDPEIVTAVTDWKQPKTVTQVRSFLGLAGYYRRFIENFSKIARPMTQLLKKEEKFVWSPQCEKAFQTLKEKLVSSPVLILPDTRKDFMVYCDASRQGLGCVLMQDGHVVAYASRQLRTHEGNYPTHDLELAAVVHALKIWRHYLIGNRCEIYTDHKSLKYIFTQSDLNLRQRRWLELIKDYDVGIHYHPGKANVVADALSRKSHCNTLNVRGIPPELNQQMEALNLSIVGRGFLATLEAKPTLLDQIREAQKNDPDMHGLLKNMKQGKAAGFTEDEHGTLWNGNRVCVPDNRELKQLVLQVAHESPYSIHPGSTKMYLDLKEKYWWVSMKREIAEFVALCDVCQRVKAEHQRPAGLLQPLQVPEWKWDEIGMDFITGLPKTQGGYDSIWVVVDRLTKVARFIPVKTTYGGNKLAELYFARIVSLHGVPKKIVSDRGSQFTSHFWKKLQEELGTRLNFSTAYHPQTDGQTERLNQILEDMLRACVLDFGKTWDKSLPYAEFSYNNSYQSSIQMAPYEALYGRKCRTPLLWDQVGESQVFGTDILREAEAKVRIIRDNLKVAQSRQKSYADNRRRDLEFAVDDFVYLRVTPLRGVHRFQTKGKLAPRYVGPFRIVARRGEVAYQLELPASLGNVHDVFHVSQLKKCLRVPSEQADSEQIEVREDLTYVERPVKILDTMERRTRNRVIRFCKVQWSNHAEEEATWEREDELKAAHPDLFASSSESRGRDSV

SEQ ID NO: 195106 - protein, 606 aa, Oryza sativa
  unsure (1)..(606): unsure at all Xaa locations
  Clone ID: PAT_MRT4530_91087C.1.pep
IVARRADLAANVGAGEVRKGAAAATARGVEASSSASPPPLASPPPPASLASPLPLVSPASSAPPTPCPPVRRRSPPLPCPPXPPPPASSPPXPRPPRPPVRRRPPASPSCRCRRSRHGTRGVVCGEAPRRPPPCALPRRRRPPPAPRAPCPQPPPLTSPRRRRPPPCAAFRRSPPAPPCLPPPRGNPPTPPVSAKPAPHPGNPTSSPTLSPAAEPPPLPPKVPPXPTPVPVPPPLPRXISSSSSPTPPSAPLSSPLPCPPPPIYCPHKLYRFPARPLAPPSLVLPFPPPPPHSSSPFHGNLPLSPPAXAPPGNPXPPPPVIPRPPLPGSPXPPPPVSPRLPPVDXPPRXPPPISLRAGPQPXTPPPSPAALAIACRPPPRSRPAATTAARRRPPSLPTAADATRPPPPPPPPPHSXPSSPLPEPEKTPPPPPPPPSPPPLRHRACPPTPPHPXPPPYPSPVSPPPXSPPPHRRPAIGPPPPPPPLPPPHPPIHPLPLSSISFSPPTXPMPSPPRPPSLSPPPXPAPXPPPPAGLPLINQVDQVCDSCLAGKQRRLPFSSKAKYRAKEKLELVHGDICWPVTPAMPSGNKLFLLLVDNPLASHCSSI

SEQ ID NO: 195107 - protein, 128 aa, Oryza sativa
  unsure (1)..(128): unsure at all Xaa locations
  Clone ID: PAT_MRT4530_91088C.1.pep
MGDWVHQGRPGSSSPPLAAAAAAASVVFCRRAAAAVPSTMPKQIHEIXGLPPDGEEEGRAVGADQEDQGRRQVQGAVLQVPLHPLRLRRRQGQQAQAVAPPRFDCPGGLSIKTDYAVGSTRNVCSSSL

SEQ ID NO: 195108 - protein, 421 aa, Oryza sativa
  Clone ID: PAT_MRT4530_91089C.1.pep
GIPFPSDLILLDTKNLNVILGMNWLAQFQGVVDCARRTVTLYRGPEQPVVFFAPPTSVSSSELHQIGLSEIPIVREFGDVFPEELPGMPPKREIEFRIDHAPGTTPLHKRPYRMAANELAEVKKQLEELKEKGYIRPSTSPWGAPVIFVEKKDKTKRMCVDYRALNEVTIKNKYPLPRIDDLFDQLKGATVFSKIDLRSGYHQLRIREEDIPKTAFTTRYGLYEFTVMSFGLTNAPAFFMNLMNKVFMEYLDKFVVVFIDDILIYSQSEGDHQHHLRLVLGKLREHQLYTFGSRHCEVYTGFRQKGSSHLEVAYQLELPASLGNVHDVFHVSQLKKCLRVPSEQADSEQIEVREDLTYVERPVKILDTMERRTRNRVIRFCKVQWSNHAEEEATWEREDELKAAHPDLFVSSSESRGRDSV

SEQ ID NO: 195109 - protein, 3119 aa, Oryza sativa
  Clone ID: PAT_MRT4530_9108C.1.pep
MAFRMPVRISVVLLIIALSAVTCASAVPSKSNGSDTDYAALLAFKAQLADPLGILASNWTVNTPFCRWVGIRCGRRHQRVTGLVLPGIPLQGELSSHLGNLSFLSVLNLTNASLTGSVPEDIGRLHRLEILELGYNSLSGGIPATIGNLTRLRVLYLEFNQLSGSIPAELQGLGSIGLMSLRRNYLTGSIPNNLFNNTPLLAYFNIGNNSLSGSIPASIGSLSMLEHLNMQVNLLAGPVPPGIFNMSTLRVIALGLNTFLTGPIAGNTSFNLPALQWLSIDGNNFTGQIPLGLASCQYLQVLSLSENYFEGVVTASAAWLSKLTNLTILVLGMNHFDAGPIPASLSNLTMLSVLDLSWSNLTGAIPPDGNSLAGSVPSNAGMLKSVEKIFLQSNKFSGSLPEDMGNLSNLYVVIRMKVKKHQMISSGMVDMISNRLLSYHELVRATDNFSYDNMLGAGSFGKVYKEYMPNGSLEALLHSEGRMQLGFLERVDIMLDVSMAMEYLHHEHHEVVLHCDLKPSNVLLDDDMTAHVSDFGIARLLLGDDSSMISASMPGTVGYMAPEYGALGKASRKSDVFSYGIMLLEVFTGKRPTDAMFVGELNIRQWVYQAFPVELVHVLDTRLLQDCSSPSSLHGFLVPVFELGLLCSADSPEQRMAMSDVVVTLKKIRKDYHTRRVRRHSANSGARGSVEVVLDLGGDLQLAGAKRYWRLGRHEQLVEELEMDEEMGAVAESWSRSNSSDTDLSALLALKAQLSDPNNILHLTGNWTVGTPFCQWVVFELGLLCSADSPEQRTAMSDVVVTLKKIRKDYVKLMATTRPGKKLMATTTQSPTWPGTFGDVGPEAQCSALFYPVCDQSQTGQINDSSVGAKFFLFSLMAEQGKAHDLSPSVSGDDGEPNPRRRARTPPPPPRQSPKQGEALERVDKSVASPVAGDVGERRDGERRLLVYGDGSTPQGALQAASALLRHPPVVHDPESPAQRWLDDVANLVVTAQQRLGAGGRSATTKTSGAATTGSVSSRRRARRAAAAARHSAATPSSTPSTREDQHGEPDARLNIERRRNSRRTPRATEGASSSRVSPRHGREDQPSVPPAGGVGCRAFVASLRNVRWPPRFRPTITEKYDGSVNPTEFLQVYTTGIEAAGGDDRVMANFFPMALKGQARGWLMNLPPASRFCQVRNTIPCIPAHAVIYAFRGGVRHNRMLEKIASKEPQTTAELFQLADRVARKEEAWTWNSSGSGVAASAAPGSAAQTGRRDRRRKKRSVHSGDEGHVLAIEGAPRATRKGRPASDKKKEAGTPSRERPASKWCSVHNTSLHDLADCRAVKNLAERTRKWEEDRRQERREGKSPAVPSSKRRSEAKQKAPAVDIDDGDDDLGFQEPGATIATVDGGACAHVSRRSFKAMKRELLAMAPTHEAMRRARWSEVALTFDQTDHPPCIARGGQVAMVVSPTICNVKLGRVLIDGGAALNILSPAAFDAIKAPGMVLRPSQPIIGVTPGHTWPLGHIDLPVTFGGPANFRTERVSFDVADLSLPYNAVLGRPALVKFMAAVHYAYLQMKMPGAGGPISVRGDLKVALACMEQRADHLAAATKPEGGDERLGTSAPTAPRQRIATCDEVPEDALVSFLRANADVFAWRPADMPGVPREVIEHRLAVRPGARPVRQKVRRQAPERQAFIREEVARLLEAGFIREVIHPEWLANPVVVPKANGKLRMCIDYTDLNKACPKDPYPLPRIDQIVDSTAGCDLLCFLDAYSGYHQIRMAREDEEKTAFITPVGTYCYTSMPFGLKNAGPTFQRTTRISLGSQIGRNVEAYIDDLVVKTRNQETLLSDLAETFENLRSARIKLNPDKRARPPLSLTGGAHLSSSSSCRARRRARALAPPPPRIAPHPAVPARIKERGIIPRDSLSRFPRFPLSLSLGFVRIVAAFVAGAINGGRDLRGRFPSSPAALSPSRCYIFVARAPLFRFRRSPLALAVGIVLAPCSSLSAVAVDLRFAAAAAPDFLLTRRPLRPLRRVVADPVRRSASPADRRSTVALVIPSRAAVFLRSVRRFTAFAVSGANEDYTSCGPMAGSITRRGLSMTGFVLELRGMCVVLGYPHGVDYQARPLPEQEGEDAEPHAGWEVTAVILSGSPERTSLAVTAGGDSFPAACQNAALLAIGTLHQRYPDELQHSPYRYHPRRGGARDYATFRDASSEDDATVVHLARMVEAYDAARIDFHQMVRRGMVENNMKILELRQENLQLKKDLDALEAQLHQLKIAQGEDSRPKRRRVCRSQKITARKSTSRPELVRQSLAWTCFVETPRAEPAPVVPQEGEASGVGSSEGALLLTFRPGPSQRSPSLFAGSVWGFQMVTTRRNVSTGEGNQPEGSNPNPQGNPPPPPPPDTNAILTQILAQQANMMNAFLHHLQNPPQQNAPPPPPQHSKLAEFLRIRPPTFSSSNNPVDALDWLHAVGKKLDTVQCSDEEKVIFAAHQLQGPASLWWDHFQATQPEGQPITWTRFTAAFRKTHVPAGVVALKKREFRELKQGNRSVMEYLHEFNNLARYAPEDVREDEEKQEKFLAGMDPELSVRLVSGDYPDFQRLVDKSIRLEAKHKELESHKRRLANFRNQQGANQRVRYTNPYPGGSSSQQQQQQQQPRPAPRPQFVVRVPQPQQQQNQQGTRAPRPPTPAVQPVQGRRDAQGQQRLCFNCFEPGHFADKCPKPRRQQGQAPPRSNNGGKDVIRGRVNHVTAEDVLTTPDVIVGTFLVHSIPATILFDSGASHSFISVPFVGRNQLGVERLRNPLLITTPGGVMTAKYYSPAVPIEIQGIPFPSDLILLDTKNLDIGLSEIPIVREFGDVFPEELPGMPPKREIEFRIDLAPGTTPLYKRPYRMAANELAEVKKQLEELKEKGYIRPSTSPWGAPVIFVEKKDKTKRMCVDYRALNEVTIKNKYPLPRIDDLFDQLKDATVFSKIDLRSGYHQLRIREEDIPKTAFTTRYGLYEFTVMSFGLTNAPAFFMNLMNKVFMEYLDKFVVVFIDDILIYSQSEEDHQHHLRLVLGKLREHQLYAKLSKCEFWLSEVKFLGHVISAKGVAVDPETVTAVTDWKQPKTAGPPATLADGWDPPVIPLLSPRPPPTPVP

SEQ ID NO: 195110 - protein, 676 aa, Oryza sativa
  Clone ID: PAT_MRT4530_91090C.1.pep
HVISAKGVAVDPETVTAVTDWKPPKTVTQVRSFLGLAGYYRRFIENFSKIARPMTQLLKKEEKFVWSPQCEKAFRTLKEKLVASPVLILSDTRKDFIVYCDASRQGLGCVLMQDGHVVAYASRQLRPHEGNYPTHDLELAAVVHALKIWRHYLIGNRCEIYTDHKSLKYIFTQSDLNLRQRRWLELIKDYDVGIHYHPGKANVVADALSRKSHCNTLNVRGIPPELNQQMEALNLSIVSRGFLAALEAKPTLLDQIREAQKNDPDMHGLLRNMKQGKAAGFTEDEHGTLWNGNRVCVPDNRELKQLILQEAHESPYSIHPGSTKMYLDLKEKYWWVSMKREIAEFVALCDVCQRVKAEHQRPAGLLQPLQVPEWKWDEIGMDFITGLPKTQGGYDSIWVVVDRLTKVARFIPVKTTYGGNKLAELYFARIVSLHGVPKKIVSDRGSQFTSHFWKKLQEELGTRLNFSTAYHPQTDGQTERQNQILEDMLRACVLDFGKTWDKSLPYAEFSYNNSYQASIQMAPYEALYGRKCRTPLLWDLVGENQVFGTDILREAEAKVIIARRGEVAYQLDLPASLGNVHDVFDVSQLKKCLRVPSEQADSEQIEVREDLTYVERPVKILDTMERRTRNRVIRFCKVQWSNHAEEEATWEREDELKAAYPDLFASSSESRGRDSV

SEQ ID NO: 195111 - protein, 818 aa, Oryza sativa
  unsure (1)..(818): unsure at all Xaa locations
  Clone ID: PAT_MRT4530_91091C.1.pep
MGETTGERALTRLHSMRERIGDSLSAHTNELVAVFSRLVNQGKGMLQPHQIIAEYNAAIPEGEREKLKDSALEDVLRGAQEAIVIPPWIALAIRPRPGVWEYLRINVSQLGVEELSVPEYLQFKEQLVDGSTQNNFVLELDFEPFNASFPRPSLSKSIGNEVQSLNRHLXSSKLFHDKESMYPLLNFLRAHNYKGMTMMLNDRIRSLDALQGALRKAEKHLAGITADTPYSEFHHRFQELGLEKGWGDCAQRVRETIHLLLDLLEAPEPSALEKFLGTIPMVFNVVILSPHGYFAQANVLGYPDTGGQVVYILDQVRAMENEMLLRIKQQGLNITPRILIVTRLLPDAHGTTCGQRLEKVLGTEHTHILRVPFRTEXNGTVRKWISRFEVWPYLETYTDDVAHEISGELQATPDLIIGNYSDGNLVACLLAHKLGVTHCTIAHALEKTKYPNSDLYWKKFEDHYHFSCQFTADLIAMNHADFIITSTFQEIAGNKETVGQYESHMAFTMPGLYRVVHGIDVFDPKFNIVSPGADMSIYFPFTESQKRLTSLHLEIEELLFSDVENTEHKFVLKDKKKPIIFSMARLDHVKNLTGLVELYGRNPRLQELVNLVVVCGDHGKESKDKEEQAEFKKMFNLIEQYNLNGHIRWISAQMNRVRNGELYRYICDMRGAFVQPALYEAFGLTVIEAMTCGLPTFATAYGGPAEIIVHGVSGYHIDPYQNDKASALLVEFFEKCQEDPNHWIKISQGGLQRIEEKYTWKLYSERLMTLSGVYGFWKYVTNLDRRETRRYLEMLYALKYRKMATTVPLAIEGEASTK

SEQ ID NO: 195112 - protein, 161 aa, Oryza sativa
  Clone ID: PAT_MRT4530_91092C.1.pep
FIRWPWTPVNKLRRKEKEKKRRRRGRTPRILQEINQTKKPGGHGKLYWPDRGGITTPGSASSAAVTGTRRRGLAGRRRTPPATTSSSPPPQPPAAAAAAAFAAPAGTPPAASACSPPTSASTALPPPHPPPPPPPPSAAKAKLRPPPPRSSAAATGSTKRS

SEQ ID NO: 195113 - protein, 81 aa, Oryza sativa
  unsure (1)..(81): unsure at all Xaa locations
  Clone ID: PAT_MRT4530_91093C.1.pep
INLEIIEETKISRTLPXRPPTNVFRVKEDVRPIFWANRPKSYISRTLGWDQYPHWRWCDSRNPSYGALXTDYQFTRPPGKG

SEQ ID NO: 195114 - protein, 39 aa, Oryza sativa
  Clone ID: PAT_MRT4530_91094C.1.pep
LFSAGLNNSLGTGCFLYWSEVLEHQGHDRLSVRILIPRW

SEQ ID NO: 195115 - protein, 417 aa, Oryza sativa
  Clone ID: PAT_MRT4530_91095C.1.pep
MYYRRGRTRWLALCLRGRWVESGAASTLPGLGPDLLPMLVAVPDCSLFQRSLLRVKAGSFLGRSSRPSERFKFQTVSRSPGATAPVRSVPEHVSGIQGRCGGGNSVITGFPFPFRFRDRRFPVAAVREVCENDRTRPAPASQPNGQIRRGAHAAQMGKYMRKFRGATGEELAAMEVTQVVGVRTRSRSAAAAGATTTKVKAASAASTRRRKALLPTAVVGTTRRDGGSCYLQLRSRMLFMAPPRPAPAARAPVVAEAAGSGNGAAAHAAAGLSRCSSTASSVDAAAQDRSLACRSDVAEAGSEHVPEGSASDSASGRDRERRETTPSSFLPGEVSDLESDLAGGQKRSRPLPSAATASAQQATRPKIPPAAEIEAFFAAAEEAEAKRFAAKYNFDVVRGVPLDAGRFEWTPVVSSRS

SEQ ID NO: 195116 - protein, 144 aa, Oryza sativa
  Clone ID: PAT_MRT4530_91096C.1.pep
SHNRTYMDTSYMQSSVRNKCITHGLQACYVYTYRTWVELGKLHLARSWLSLFAPNVMATPRHVPRAAPAVVLRPRYRVVVVDGRPLRRRRLHHAVRQQRLLPRRRARSDGAEGVGHDHCEDEKREKLHGEREKLGDLGRRMKSM

SEQ ID NO: 195117 - protein, 146 aa, Oryza sativa
  unsure (1)..(146): unsure at all Xaa locations
  Clone ID: PAT_MRT4530_91097C.1.pep
GGRGGSASSARRPTTTMAAVGAATAGGGSGYGGGGGSAADNDDGRGGGDGSDAAADGSGTGDDDXVAGAMDPPPTTAAVGATTAGGGSGYGGGGLAAGSRRRLGNLGSAADNDDGRGRGDGSDAAADGSGIGDDDGWRGRWIRRRR

SEQ ID NO: 195118 - protein, 218 aa, Oryza sativa
  unsure (1)..(218): unsure at all Xaa locations
  Clone ID: PAT_MRT4530_91098C.1.pep
SFGHGALDQRDFQVVEPVDLLLERPTARRRRRRRIRRPSRPASSSAADPSPPPPXSSPVPDPSAAASDPSPPPRPSSLSAAEPRLPSRRRDPATSPPPPXRSRRPPSLLPPRPSSSAADPSPPPPXSSPAADPSPPPPXSSSPVPDPSPPPRPSSLSAAEPPPPPXRSRCPPSPLPPRPSSLSVAEPRKPSRRRPPPAARRRLPPACWRCGRRMSAGA

SEQ ID NO: 195119 - protein, 466 aa, Oryza sativa
  unsure (1)..(466): unsure at all Xaa locations
  Clone ID: PAT_MRT4530_91099C.1.pep
MHSPPALRTASYASGRYPGDSSTIPPTPCIASDMKPATCPVVPGAPPLLPPPPLLPPPISPPPPPPPSPPXAAAPHTPLRLRQHCIAPAPPPAGDARPPPPPSSRTVAKSTPDPPLSRAPRPASXPSAVRPKFSPTAAPPPTISRIPPPLALPGPXSPPPPXDKPSLPIPPDPXPPPPPDPXPPPPVSPPRPPSPSPFSLSPPSLICKSPLTQSVTPPPPKPNPSPPPXPYPRRTPSPAADPSLPPPPXPSPAPDPSAAAPDPSPPPLGVVVGGGSVAPXPASSPAADPSPPPPXSSPVPDPSAAASDPSPPPRPSSLSATEPRLPSRRRDPAASPPPPXRSRRPPSLLPPRPSSAAADPSPPPPXSSPAADPSPPPPXSSPVPDPSAAASDPSPPPRPSSLSAAEPPPPPXRSRRPPSPLPPRPSSLSAAEPLPPTARCSTPPTARCSAPPPSSRPRPPAPTPSA

SEQ ID NO: 195120 - protein, 272 aa, Oryza sativa
  Clone ID: PAT_MRT4530_9109C.1.pep
RPAALGSRGPASLVLPSSGFCCKIPSSLGVADRSSIAARSFNAGYVNENGASEANNIGNKNNTMVYQTSLAMRPVSPCDLQLGFSGQKQQILPGYGELRPAASGSPQLGGMAANSSIPTRPSQPQFGSMARTDALPTGPSQPGSLARPNFVPTGFSQFASRPPTSVPPADSSQFAGGMARQNIPTTSEPTLVLGYTPQMVNGPPAQLGWDLSLSRMVSEGMLPVLCIWCNSQFHHFGPIDAQQSGSFGFICPACKEKMSGNPNAPNNGPWQP

SEQ ID NO: 195121 - protein, 98 aa, Oryza sativa
  Clone ID: PAT_MRT4530_910C.1.pep
TTNTGSDASTSSRVLFLHPTPPVRRIVIAALGIYFFQHLTGIEVVVLYGPSIFKAASIASRNSVLAATIGVGVTKTAFIIASLLVNERSRNLPLSILS

SEQ ID NO: 195122 - protein, 138 aa, Oryza sativa
  unsure (1)..(138): unsure at all Xaa locations
  Clone ID: PAT_MRT4530_91100C.1.pep
AQRPRSPVHVKSVTSVPPAATLPSRGGAPPTPALPSRAPPAATLSSRGGAPSAPXPPVCGRRRPPPXPSRGGVPPAPXPPMCDGAPPAPAIPSRGGALPTPALPSRGGAPPASCRRHRRPPSSCRAAKVRYPLVTAPP

SEQ ID NO: 195123 - protein, 121 aa, Oryza sativa
  Clone ID: PAT_MRT4530_91101C.1.pep
MRSSPRRPTSSRWSRSPSSTQPTSPPTATPRSLPASSPASASSSPSPPRRCLRRRPPSPWAAAPPRRPTTPTRRHRRRRTLLRLRPLHRRHKNADQKTPPRKPRRRRTPRRRRRRLILHRP

SEQ ID NO: 195124 - protein, 179 aa, Oryza sativa
  Clone ID: PAT_MRT4530_91102C.1.pep
RAAGRVAGAGAMLRPVSTGTQVVMRRARSVAQAAWTRPALQLSSWTCIGPRRRTNTVSTSTVTSEEIRATTNDGSESTSLLTETTEIVKTETMQFASSEEVQSSSEVSDAVGMMDEKVDSDGEDIIDHHVDEDRMTDVELWQQLENELYRRSEDDEIVEDMTESAITEEVGGTAEDVLS

SEQ ID NO: 195125 - protein, 317 aa, Oryza sativa
  Clone ID: PAT_MRT4530_91103C.1.pep
MMVFYPMDNTSRVSVPCLSLEQRDDSADKPALFSISDKKAIDGGIPGLTNTNAWRLVDHMLMPSLQQAISPRLCVLLIEPIATVIWYCRIGDDEWMRYEYDIGIQPLDPPFEGKDHEKVPICQIAACRGKFYFNSNFEKIEVLELTPTPTFSSIEIADSIAGGLGVIGGAYVYLVESEDELYMVCLRLDHDFTIYDMTVHRMDFFSHQWRRVYEIGGRAFFLAPFYFGASCSADEYGLEKDSVYASYALDKCFEVSKQQQQHGLESVKTTLFNIFEGQDIACDIDALTNNNSIPVSCLFYLTTKIGLLPPIPITSDV

SEQ ID NO: 195126 - protein, 113 aa, Oryza sativa
  Clone ID: PAT_MRT4530_91104C.1.pep
MLISRGIRGVVREVVNDEPVDSEVVNGIKPEPLVGESVDAEVVNGVVPEPFVGESGGSDGGGMHVEDELEMEGGKSDNGIAELPPVVSALEKQDTDLELRNDYSGAKNGADNH

SEQ ID NO: 195127 - protein, 607 aa, Oryza sativa
  Clone ID: PAT_MRT4530_91105C.1.pep
MRELRVAVLIIAVSLPSFSASDRQGDALYDMKQKLNVTGNQLSDWNQNQVNPCTWNSVICDNNNNVIQVTLAARGFAGVLSPRIGELKYLTVLSLAGNRISGGIPEQFGNLSSLTSLDLEDNLLVGEIPASLGQLSKLQLLILSDNNFNGSIPDSLAKISSLTDIRLAYNNLSGQIPGPLFQVARYNFSGNHLNCGTNFPHSCSTNMSYQSGSHSSKIGIVLGTVGGVIGLLIVAALFLFCKGRRKSHLREVFVDVAGEDDRRIAFGQLKRFAWRELQIATDNFSERNVLGQGGFGKVYKGVLPDGTKIAVKRLTDYESPGGEAAFLREVELISVAVHRNLLKLIGFCTTQTERLLVYPFMQNLSVAYRLRDFKPGEPVLNWPERKRVAIGTARGLEYLHEHCNPKIIHRDVKAANVLLDEDFEPVVGDFGLAKLVDVQKTSVTTQVRGTMGHIAPEYLSTGKSSERTDVFGYGIMLLELVTGQRAIDFSRLEEEDDVLLLDHVKKLQREGQLGSIVDRNLNQNYDDEEVEMMIQIALLCTQSSPEDRPSMSEVVRMLEGEGLAERWEEWQQVEVTRRQEYERMQRRFDWGEDSVYNQEAIELSGGR

SEQ ID NO: 195128 - protein, 50 aa, Oryza sativa
  Clone ID: PAT_MRT4530_91106C.1.pep
MSELHRNRHWENIWSIHAKPQDERLYEDVGGMGLSFNNRQQWGMASGPRD

SEQ ID NO: 195129 - protein, 83 aa, Oryza sativa
  Clone ID: PAT_MRT4530_91107C.1.pep
MAAVAGSAAVEPARGSSSSAAPVRTRLVVPVRESGVSVVVAASVVEPVAAAAAELDYMKEYRRELCKRLLYHCFNDLHPKRRF

SEQ ID NO: 195130 - protein, 363 aa, Oryza sativa
  unsure (1)..(363): unsure at all Xaa locations
  Clone ID: PAT_MRT4530_91108C.1.pep
MRNEKGDFMAAAAHVYSGIGDATEQRALMLEAEFRTFHQGDLSITDYLPQDEGHGGHSLSTGDKINWHAHEPKGKSSDPQTKIPKPTGSDVNEGNIVPVTIDKLSPEQKKDFELMMKSAQEQFMKSFVETRGKVYQKYKVKVVVADKVGSSSSQGDKGIADGSGNKGDGLQDEVVEDLDEDNNEVQPQFNNFQDRIDYAVQHALINQSGVLGLITSIKEKFSSQEFESLSHLAQKEKQIQLPAGHVIPSTEELGKRRYCKWHNSGSHNTNDCKVFKQQIQVAIEGGKIKFDDSKKPMKVDXIINKYQRRYDKQQERYCEEDDGGTSSFFFNLQAARLAEARWLGKCSPATSSDGDGSAEGRGS

SEQ ID NO: 195131 - protein, 60 aa, Oryza sativa
  Clone ID: PAT_MRT4530_91109C.1.pep
HEDDESLVCNSVFIKMHVIVKFMYRFAHFTSFYTKSHPPAKFLYNWRNLLYFYICGYARP

SEQ ID NO: 195132 - protein, 96 aa, Oryza sativa
  Clone ID: PAT_MRT4530_9110C.1.pep
MLQFPALMRQWPSPPLIPASTLLPVPATTQEDELLLAMAESDLEDKLNEIRKTNSNLVIIGKPTGDVKEEYDAEAEDDDADNVEESDGDDFDQETG

SEQ ID NO: 195133 - protein, 60 aa, Oryza sativa
  Clone ID: PAT_MRT4530_91110C.1.pep
KISQHFTCHSQPSLHHCFQHSMAHHTRFHGHHHSTLHPSSSSISSIAIQCSHHSTFPQEL

SEQ ID NO: 195134 - protein, 173 aa, Oryza sativa
  Clone ID: PAT_MRT4530_91111C.1.pep
MARGVSYVSAAQLVPMLRDPRIAVVDVRDEERIYDAHIAGSHHYASDSFGERLPELAQATKGKETLVFHCALSKVRGPSCAQMYLDYLSEADEDSDVKNIMVLERGFNGWELSGRPVCRCKDAPCKDFRVAIYALWSLQHIKNRVSHFGGSAIVLLCGSINSVAVNVTSRHVN

SEQ ID NO: 195135 - protein, 246 aa, Oryza sativa
  unsure (1)..(246): unsure at all Xaa locations
  Clone ID: PAT_MRT4530_91112C.1.pep
MVGPFATGYVVYDNQIAYILVSRTYVDESYLVQDHIHKHGVDGSLIFFXPGCTNEIPLPNPGYHLYNCLELTIPLQTIEEFRAGTIHREPCYMAXDEHEGSTSSPSVQMYEADWEPTXGDAPGWTQVSDYAGGSAWQSASEHRWQVPQDTSYGNSHSSSTSGMPPISKMWRSSSSRGDLWELTRRMDTRELQAGEIQHNLEGHMAQMXVWPTSDAQYANLNNLMQQQQADLQAYFRFQQFNPIRGP

SEQ ID NO: 195136 - protein, 130 aa, Oryza sativa
  Clone ID: PAT_MRT4530_91113C.1.pep
MARGVSYVSAAQLVPMLRDPRIAVVDVRDEERIYDAHIAGSHHYASDSFGERLPELAQATKGKETLVFHCALSKVRGPSCAQMYLDYLSEADEDSDVKNIMVLERGFNGWELSGRPVCRCKDAPCKGVCS

SEQ ID NO: 195137 - protein, 651 aa, Oryza sativa
  Clone ID: PAT_MRT4530_91114C.1.pep
MAALLLWLSWLLLSLLSIYLLDLLAHSRRCLPPGPRPLPLIGSLHLLGDLPHRSLAGLAKTYGPLMSLRLGAVTTVVASSPEVAREFLQKHDAVFATRSTPDATGDHARNSVAWLPPGPRWRELRKIMATELFSTRRLDALHELRQEKVAELVDHVAGLARDGTAVDIGRVAFTTSLNLVARTIFSHDLTSLDDHGASKEFQRLITDVMEAVGSPNLSDFFPALAAVDLQGWRRRLSGLFARLHRLFDAEMDHRRLHGMKEKDGDFLEVLLRLAARDDDTARLDGDTLRSLFTDLFTAGSDTSSSTVEWAMAELLQNPISMAKLCDELRRVVGSRRRIEESEIGQLPYLQAVIKETFRLHSPAPLLLPRQATRTIQIMGYTIPKGTRVLINVWAMGRDEDIWPEAGKFIPERFLERTIDYKGGDLELIPFGAGRRICPGMPLAVRMVHVLLASLLIHFKWRLPAEVEGNRIDMTEKFGVTLAKANHLCAMAAPTTSNSGGVSGKGEEEDEAYWDEWLAKPIHERVAWQMPSATELQDAGVTFHAKGLPCSLVDVTFSQRDGVMEIPTVENYANHAMLANLVAYEQSRGRLEMQRVYSRRCSTVRWRAAASGVRDERAVGWQRHHLHDWRLAVHGSRSRGEDGGEEKGIGSV

SEQ ID NO: 195138 - protein, 59 aa, Oryza sativa
  Clone ID: PAT_MRT4530_91115C.1.pep
IAPSLSLVFSFAGIARSGVRLARSAQEDACACSDLQIRDQIEPLTGCSCLLAACSSSQA

SEQ ID NO: 195139 - protein, 60 aa, Oryza sativa
  Clone ID: PAT_MRT4530_91116C.1.pep
MDLSDDGHEGGAIAKPPKQEAKASLTTDTIELEAKATRSLPITLPMVKPWSPLIVLLLLP

SEQ ID NO: 195140 - protein, 65 aa, Oryza sativa
  Clone ID: PAT_MRT4530_91117C.1.pep
MPKPTPPPAAVDVDPLLQGISDAMRVDHHFLKEGIMFNDITPLVLGPADVKDTVDMFVERYRRMV

SEQ ID NO: 195141 - protein, 47 aa, Oryza sativa
  Clone ID: PAT_MRT4530_91118C.1.pep
MAKLPLAPSSSHGSPIHDRFPTAPPPAESRCPHHRGAGACATSSASA

SEQ ID NO: 195142 - protein, 311 aa, Oryza sativa
  Clone ID: PAT_MRT4530_91119C.1.pep
MAPGAILRVTALLRFILLVAGAATATATAARFSRLFSFGDSLTDTGNLVLLPAGRDVPERRLPYGQTFFHRATGRASDGRIAIDFIAEALELPRLKPYLAGEGADGFRHGANFAVGGATARDAGFFQRRGLRSVPVSLATEMGWFKELLPLLASSCPQEQRKITASSLFFVGEMGGNDYLNAIFQNRTLDEAKTFVPGIIDAIRSSLAELIGVGAKTVLVQGMLPIGCEPRVLELFKLKHGRSTAGDDSDYDAATGCLKSFNELAEQHNRALTAALDELRRAHPGTAIVYADLYRAVTDIAVSPRRYGNVH

SEQ ID NO: 195143 - protein, 126 aa, Oryza sativa
  unsure (1)..(126): unsure at all Xaa locations
  Clone ID: PAT_MRT4530_9111C.1.pep
RGERSSRPPPRWWRHRDVRRQPPSPMPDSPHRRRIHACGXAERRPDPLGKKAVEPPPLAPTRLASRXTSSLAAAPPEAVEPAKPPAAAAAPRPRPHPQRAPQPRRPHDMRGERRKKMEKEGDGWKT

SEQ ID NO: 195144 - protein, 640 aa, Oryza sativa
  unsure (1)..(640): unsure at all Xaa locations
  Clone ID: PAT_MRT4530_91120C.1.pep
QSIEVILFGSRMGDKAEWGDGFVRXLFDVCKXEIEAGNRPMGIFTTTGWKNIVSKFAXKSGDKRTKKQLKNKLDVLKKEYSMFMEFKNCATSLGWDEAKQTIVCSAEWWDEHLARCNNREKGIKCNHVKFRKQGPKFLDDLRIIFGKSHVNGASASCPRDVSSDEASDEDMAEVPKPAEKAEKTVNXGKNKRKGSSTVVRDKDEKIPFARMYKNTCLKIETATEKISTSIEASLASPCNVVPIIKEAMNMVKDCGVEEKTALMHTSTTLIMKPEFREVFSYLETNKGRLDLIEREHEKEMTKMDGKLVDVVKEGQKGLLMLTELAQHAAVMGEMGNLYFYKMFRMSPEIFHXFHDLLVSTYGLSSSNNVSSIESLAMFLWIVGGPQSFSQAESCFTRSLWTVHTKFHEVLKCLRKLAKDNITPRDPNFSMEHERLREDRFWPYFKDAIGAIDGSHILVVVPVDETISHTCRHGYTSQNVLAICVFDMRFTFAVAGWPGFAHDSRILSHALANFPSFPMPPTGKYYLVDLGYPNRIGYLAPFKGATYHIPEFRHHSGSPQGNNLRYKEFERCDADEDYLLQDTSDTPDDESEDAKNDDTMNTIRARIADALISSRSREEQQAKSWPCWARPGFGRTTLVAV

SEQ ID NO: 195145 - protein, 147 aa, Oryza sativa
  unsure (1)..(147): unsure at all Xaa locations
  Clone ID: PAT_MRT4530_91121C.1.pep
MYETDRHIKEYRSGVSNFINVAEEERKRRNDCMTCPCTNCINGKEFDSXLDIHSHMIRXEFMKGYTCCMKHGEQEYXDTASSGAQNQEKDEADLFVTSPLSSEMVDVDQDVLXAMLRDVEELDYNERDYMTFTSNQSNIPKHSHHKS

SEQ ID NO: 195146 - protein, 67 aa, Oryza sativa
  Clone ID: PAT_MRT4530_91122C.1.pep
MAREVDSRKRRGHSLIGIGKTDKSSSSLFSFDLAAACVKVGRMVALNLKTDLGDYYDSIFDVEGVKM

SEQ ID NO: 195147 - protein, 77 aa, Oryza sativa
  Clone ID: PAT_MRT4530_91123C.1.pep
FRLTHLKSSHVVVPRPLMILTTVVNISFTSIHWLPEPGFSYATSRNPSIDRLTSILDVIWSPVTPKLSVAHDMYMMY

SEQ ID NO: 195148 - protein, 738 aa, Oryza sativa
  Clone ID: PAT_MRT4530_91124C.1.pep
MAALSRFISRLGEKALPLFKLLKRSGPFTWTEEAERALTQLKVYLSSPPVLVAPEPDEPLLLYLAATPQVVSAALVVERDEDNPHSAHPHPMSTRPEREQGGEAPEPNGGPRPPTTGVGPPPACQTVSGAPDPQDGPGATARRPHLSPSDPEVNPVSTRPGREQGGEAPEPNGGPRPLTAGAGPPPVCPMVPGAPDPQEGLGATAGRPRLTPSDPEVIGTEAECALRSLSDEERPGDVAPSEEGRPRRKVQQPVYFVSEALRDAKTRYPQAQKMLYAILMASRKLRHYFQAHRVTVVTSYPLGQILHNREGTGRMVKWAIELSEFDLHFEPRHAIKSQALADFVAEWTPAPEPVSAPEDSSGPSQLPHTAYWVMQFNGSLSLQGAGAGVTLTSPSGDVLRYLVRLYFRATNNMAEYEGLLAGLRVAAGLGIRRLLVLGDSQLVVNQASGPEGSAPSSPRLIAWIAEIQAYIADKTLPEDYEGSERVQRISKRYVLVEGTLYRRAANGVLLKCIPRERGVELLADIHEGECGAHSASRTLVGKAFRQGFYWPTALNDAVDLVRRCRVCQFHAKQTHQPAQALQTIPLSWPFAVWGLDILGPFRRAPGGFEYLYVAIDKFTKWPEAYPVIKIDKHSALKFIRGITARFGVPNRIITDNGTQFTSELFGDYCEDMGIKLCFASPAHPRSNGQVERANAEILKGLKTKTFNILKKHGDYATSGPDHSASTTSSYAASKHVLD

SEQ ID NO: 195149 - protein, 117 aa, Oryza sativa
  Clone ID: PAT_MRT4530_91125C.1.pep
MADGCLPVARPVAVSPSPTRRRPTPRRSHLCSTLLEDTPARRRPTLLRCLCHCSSRFERMGDKADWGDDFIRHLFDVCKEEIEAGNIPMGIFTTTGWKNVVFKFAEKSGDKRTKKNN

SEQ ID NO: 195150 - protein, 565 aa, Oryza sativa
  unsure (1)..(565): unsure at all Xaa locations
  Clone ID: PAT_MRT4530_91126C.1.pep
LKKNLFGSRMGDKADWGDDFIRHLFDVCKEEIEAGNIPMGIFTTTGWKNVVFKFAEKSGDKRTKXKQLKNKLDVLKKEYTMFMEFKNCATGLGWDEAKQTIVCSLEWWEEHLARCNNREKGIKCNHVKFRKQGPKFLDDLHIIFGKSHVSGASASCPGDVSSDEASDDDVAEMDGKLVDVAKEGQKGLLMLADLAQHASIMGEMANLYTERYLQKGAYRQTPETGIQWVMRLMDRPRYFYKMFRMSPEIFHALHDLLVSTYGLSSSNNVSSIESLAMFLWIVGGPQSFSQVESHFTRSLWTVHTKFHEVLKCLRKLAKDNITPRDPTFSMEHGRLREDRFWPYFKDAIGAIDGSHISVVVLLDETISHTCHHGYTSQNVLAIYNFDMRFIFAVAGWPGSAHDSRILSHALANFPSFPMPPTGYPNRIGYLAPFKGTTYHIPEFRHRSGPPQGKYEVFNFLHSSLRNVIERSFGVLKQKWRILKGIPSFSHTTQKHIIMACLALHNFVRDSNLRDKEFERCDADEDYLLEDTSDTSDDESEDAENDDTMNTIRTRIADALISARGG

SEQ ID NO: 195151 - protein, 905 aa, Oryza sativa
  Clone ID: PAT_MRT4530_91127C.1.pep
MELTGLTRAAAAATVTPPAPRRGWGELRFAPLLPGERHGRRKVVVAAISEEVPRLAASPSSGIKGGGAGERRPAPEKVALRAALTVRRKQKEDIKEAVAGHLDALWDMVGRNVVLELISTKIHPRTKKPMQSGRVSIKDWCQKRGAKGDHVVYTAEFTVDADFGEPGAIAVANRHNREFFLESIVVEGGGLPCGPVHFACNSWVQSTRELPTKRVFFSNKPYLPSETPPGLRELREKELKDLRGDGTGVRKLSDRIYDYATYNDLGNPDKGKEFIRPILGGEKIPYPRRCRTGRPPTDTNMLAESRVEKPHPIYVPRDEAFEELKQGAFSSGRLRAVLHTLIPSLIASISAETHNFQGFHHIDNLYKEGLRLKLGLQEHLFQKIPLVQKIQESSEGMLRYDTPSILSKDKFAWLRDDEFARQAVAGINPVNIERLQVFPPVSKLDPAIYGPPESSITETHIAGHLNGLTVQQAMDEAKLFIVDYHDAYLPFLDRINAIDGRKAYATRTIFFLTEAGTLKPIAIELSLPPAKPGEPRPSKVLTPPYDATSNWLWMLAKAHVSSNDAGVHQLVNHWLRTHATMEPFILAAHRHMSAMHPIFKLLHPHMRYTLEINALARQSLINADGVIESCFTPGPVSGEISAAYYRNHWRGVAVEDATQPHGVRLLIEDYPYANDGLLLWSAIRSWVESYVQLYYPDAGTVQCDLELQGWYHESIHVGHGDLRHAPWWPPLSTPVDLASILTTLVWLASAQHAALNFGQYPLGGYVPNRPPLIRRLLPDLERDAAEYAAFLADPHRFFLNAMPGVLEATKFMAVVDTLSTHSPDEEYLGEGRDEGGVPWTADEAAVAAHGMFAADVRRAEETIERRNADHGRKNRCGAGVLPYELLAPSSPPGVTCRGVPNSISI

SEQ ID NO: 195152 - protein, 101 aa, Oryza sativa
  unsure (1)..(101): unsure at all Xaa locations
  Clone ID: PAT_MRT4530_91128C.1.pep
QIYMKKKPPNSNEFCRNRILSGLKIITTSSIQNLSQNITSLLTITFHSITTFHRLIPTYLCFSTHHNFXLLILPTVLVIVCKIKNPYILERRYANTVALCH

SEQ ID NO: 195153 - protein, 34 aa, Oryza sativa
  Clone ID: PAT_MRT4530_91129C.1.pep
IAMQQVSAIQDTLKVSFKQKYANCQGSSLYTVTQ

SEQ ID NO: 195154 - protein, 245 aa, Oryza sativa
  Clone ID: PAT_MRT4530_9112C.1.pep
MPASYLQPRRGTNGRRIMEHGAGEEMVAFYEAWVGREERIVADLTDALLPARRRRDVLAPLVDAAVGHVSEYYERKARLADRDVVAALDPRWLNPLERTFLWAWGWKPALVFRFADGAVAGGSSHQQQRRALERVRAATAEAEREVDREVAVVQESLAGPRVLAALRRQHPRNGEADEAVAAVGRSLRVLLAAADALRERTVRDVVGTLAPDQAGAFLAAMLRFHLGVHRAGRNWGSGNGGRRGL

SEQ ID NO: 195155 - protein, 135 aa, Oryza sativa
  unsure (1)..(135): unsure at all Xaa locations
  Clone ID: PAT_MRT4530_91130C.1.pep
TDTTFTXHQIASIYFTMPPPSQLAIATGSVNRLLKEEASYHKELEQEEASIEALKKKIDSGAGDSDENAPYILKQQQTALEQTKGVFGPLREKIALAIEKLEEQLAVSDQLNVPEEQVQQAKETLAKAKATQTDA

SEQ ID NO: 195156 - protein, 253 aa, Oryza sativa
  Clone ID: PAT_MRT4530_91131C.1.pep
MKILVAVKRVVDYAVKVRVRPDRTGVETASVKMSMNPFCEIAVEEALRLRESGAATEVVAATVGPSQSVDTLRTALAMGADRAVHVLHDPDPSRPLLPLAVAKILRALALQENPGLVILGKQAIDDDCNQTGQMLAGLLNWPQGTFASKVILNKEKATVEREVDGGIETISLDLPAVITTDLRLNQPRYATLPNIMKAKSKVIKKVTPEDLDVDIRSDMEVVEVTEPPKRKAGVILSSVDELVDRLKNEARVL

SEQ ID NO: 195157 - protein, 97 aa, Oryza sativa
  Clone ID: PAT_MRT4530_91132C.1.pep
WNLLEGSPPLPFLGRPRHPVQVPPLRLPAQTPGVLPDPSPGAPSTFSSAPPTTDHPIKLTIDRRSIDSSSSCRRGSNCKPKTQSVIDDDELGMQCAS

SEQ ID NO: 195158 - protein, 449 aa, Oryza sativa
  Clone ID: PAT_MRT4530_91133C.1.pep
MATAAAAARALLLLIAVAGALLRPAAAEIKQESFKDDSRASILFEKFGFSRRGFVSIAITGARTSSKLAKAEPDQFGFFLLSDEALFEAIYEQPPPTDLNPNPEPNPGCVLSSPYVKPLFSFADLDGNGNYKKTFPVTQPDEYSLFFANCAPETAVTMEVRTDMYNTNLDGSKDYLSVGQAPVPAIYAFFTVCYLVFLAVWLYVTLYRNRLSAHRIHHLMSGLLAARMLYCISAAEDQHYIRIAGTPHGWDVMFYLFQLVKGVILFAVIALIGTGWSFLKPFLQDKEKKVLMVVIPLQVAANIAAAVVGETGPFLQGWVTWNQIFLFVDVACCCAVLFPVVWSMRSLRESSKTDGKAARTLAKLTLFRQFYVVVIGYLYFTRIIVYALKTITNYKYRWVSVAAEEVATVAFYLFMFYMFRPAERNQYFALDEDEEEAAELALREEEFEL

SEQ ID NO: 195159 - protein, 101 aa, Oryza sativa
  Clone ID: PAT_MRT4530_91134C.1.pep
QPSLTCRPCLPSLFSHGRFFSFSSRPRRAPTSPASHATPSSPPRAPTLPEPACPTSTRRPLMALPPPRAPTLKHRALSRFSPPSQHVGSSGTSFDMWLQAE

SEQ ID NO: 195160 - protein, 110 aa, Oryza sativa
  Clone ID: PAT_MRT4530_91135C.1.pep
MQYETPSIDSRSLSRALARPLLSPNSTKPVAIFFLFHTDRAPPQTRPPRFVPVSFPPPRRCIVHFGRYRRAKSVVSKLGGQICTLHKEKEKRFTMRPATPRLLVLSYSAE

SEQ ID NO: 195161 - protein, 89 aa, Oryza sativa
  Clone ID: PAT_MRT4530_91136C.1.pep
MDWSSSLSIVRHLDLDDIADSGPVLLPDHLPLVVLLELRHWIVAMMRAQPLSSRKQPCDVDLEHYRSQCSGATSDACVASTYDAVAAAR

SEQ ID NO: 195162 - protein, 1167 aa, Oryza sativa
  Clone ID: PAT_MRT4530_91137C.1.pep
MDPAALTSEERWVFIPTAQICPLECNKRFKVVLGIKNSNNVESVYQLLRRSTPVVVEVGPPTSCPPPNRSLSSSHRKIRNPRCCIKCCTLTLLAVTYSSTNFYVLHHKIMLVVGSGGSGEHPQHSPRTRGIIQHFERQVREHAEGLDEDVRVANGRLGQLEAAQIDTNSKLSLLDRSLVAVNTSPVGILNTLERMGQDGHDGPARHNHIGHDANSNIAAREEVDYAADTEHDEAIHDNDDSLGKIKFTIPCFDGKYDPDAYLTWELAIDQKFDCHDFPENKRVRAATTEREVQGRRASFRTNISAYRASSSTPSNAAAPPTRAAAPSSSSNKLRPSTTNSTPSPSEPTRGVAGTPSKSSSSVALLARIRDIQCLCCKGFGHVRKDFPSTRIMIVRADGGYSSASDLDEETYALLATNNAGEGRLWQFDKDSLHFGKSNQYSFVHNGKKLVLHPMSPEVILKDELARASKQKNQEHTRSEHHIVANELEKHKKKSTNSVQNNKNEIKLKGSCFIATKSDLDEVDPDTSVCYALEYADVFPKKVPLGLPPIRGIEHQIDLIPGASLPNLSKKDGSWHMCLDCRAINNITIRYRHPIPRLDDMLDELSGSQVFSKIGLHSGYHQIRMKLGDEWKTTFKTKFGLYEWLVMPFGLTNAPSTFMRLMNEVLRAFIGRFVVVYFDDILIYSRSTEDHHDHLRAVFDALHDARLFGNLEKCTICTDRVSFLSYVVTPQGIEVDQAKVKAIYSWSTTVRQEKSFVGLARFYRRFVRDFSTIAAPLHELTKRNVTFTWAAAQRNALDTLKDKLIHTPLLQLPDFNKTFELECDASVIGLGGVLLQEGKPVAYFSEKLSGPSLNYSTYDKELFALEAHGGGLMRHFGVKKTEDNLTDHFFWPTMRRDVERAVLKNNIKMWEECLPHIEFAYNHSQHSTTKKCPFEFLYGLLPRAPIDLLPLPTLERVNIDAKQRTELMLKLHETTKENMERMNTKYKLAGSKGKKHVTFEPGDLVWLHLRKDRFPNLRKSKLLARADGPFKVLQKINDNAYKLELPVDFGVSPTFNIADLKPYLGEEDELESRTTQMREGEDDEDIPSNDTTMPIAQQGLMTRARARELNYQLCVASQPDLTQATQNDENSFSHQKLSCRKPSSATLHREEDGKNKKKMENEGGGWKM

SEQ ID NO: 195163 - protein, 782 aa, Oryza sativa
  unsure (1)..(782): unsure at all Xaa locations
  Clone ID: PAT_MRT4530_91138C.1.pep
MALEMPGNTTNTMTTRERLDLAIKTPNKQAPKGAEGLTANALPLPDLSADALPLPAPVAAGLGEAGHGWERHGGRQWRGVEGNDGCGRIRWWGGYSVVAGELRIHRVGSGDSNNNDGRGRVWWQCDEDIPSNDTTTPIAQQGPMTRARARELNYQVQGCSWHGKNSNNVESVYRLLRRSTPVPKRKTTKIGGSGEHPQHSPRTRGIIQHFERQVREHAEGLDEDVRVANDRLGQLEAAQIDTNSKLSSLERSLVAXREELEYAADTEHDEEVLGRPQRQLRRQRHGMGAPPRREXAPSSSSNKLRPSTTNSTPCPRXRDIQCLRCKGYGHVRKDCPSTRVMIVRADGGYSSASDLDEETYALLATNNAGEGDAPHQDEEHIGAEAAEHYESLVVQRVLSAQMERAEQNQRHTLFQTKCVIKERSCRVIIDGGSCNNLASAEMVEKLALSTQPHPQPYYIQWLNSSGKEYADIFPKEVPPGLPPIRGIEHQIDLIPGASLPNRAPYRTNPEETKEIQRQVQELLDKGYEAHGGGLMGHFGVKKTEDILADHFFWQRVNFDAKYRAELMLKLHETTKENIEHMNIKYKLAGSKGKKHVAFEPGDLVWLHLRKDRFPNLRKSKLLPRADGPFKVLQKINDNAYKLELPADFGVQGCSWHGKNSNNVESVYRLLRRSTPVSDNLRDRITAASTANTRQLIIVFSASDVWDAHHHQCQYSFSQEHELMPPASTPRQCCSRLPTADLISGHIVHADLLTPSITIGHAVLPRRAGSMRMTWTDQKVRDG

SEQ ID NO: 195164 - protein, 1393 aa, Oryza sativa
  Clone ID: PAT_MRT4530_91139C.1.pep
MTGGSGEHPQHSPRTRGIIQHFERQVREHAEGLDEDVRVANDRLGQLEAAQIDTNSKLSSLERSLVAVNTSLAGILNTLERMGQDGHDGSARRNHNGHDANSSIAAREELEYAADTEHDEEVLGRPQRQQRRQRHGMGAPPRREVRDNDDSLGKIKFTIPCFDGKYDPDAYLTWELAIDQKFACHDFPENKRVRAATSEFTDFASIWWSEFVRSNPNNTPQTWDAMKRVMRARFVPSYHARDLLHKLQQLRQGNKSVEEYYQALQIGMLRCGLVENDDAGMARFMGELNREIQDILAYKEYNSINRLFHLACKAEREVQGRRASFRTNISAAAPSSSSNKLRPSTTNSTPCPSEPTRGVAATPSKSSSSVASLGRTRDIQCLRCKGYGHVRKDCPSTRVMIVRADGGYSSASDLDEETYALLATNNAGEGDAPHQDEEHIKAEAAEHYESLVVQRVLSAQMERAEQNQRHTLFQTKCVIKERSCRVIIDGGSCNNLASAEMVEKLALSTQPHPQPYYIQWLNSSGKEHTRSEHLIAANELEKHKKKPTNSVQNNKNEIKLKGSCFIATKSDLDEVDTDTVVCYALVCKETLFPIEDTPISLPPPVTNLLQEYADIFPKEVPPGLPPIRGIEHQIDLIPGASLPNRAPYRTNPEETKEIQRQVQELLDKGYVRESLSPCSVPVLLVPKKDGSWRMCVDCRAINNITIRYRHPIPRLDDMLDELSGSLVFSKIDLCSGYHQIRMKLGDEWKTAFKTKFGLYEWLVMPFGLTNAPSTFMRLMNEVLRAFIGRFVVVYFDDILIYSRSIEDHHGHLRAVFDALRDARLFGNLEKCTFCTDRVSFLGYVVTPQGIEVDQAKVEAIHSWPVPTTITQVRSFLGLAGFYRLFVKDFSTIAAPLHELTKRNVTFTWAAAQRNAFDTLKDKLTHAPLLQLPDFNKTFELECDASGIGLGGVLLQEGKPVAYFSEKLSGPSLNYSTYDKQLFALVRTLETWQHYLWPKEFVIHSDHESLKHIRSQAKLNRRHAKWVEFIESFPYVIKHKKGKENVIVDALSRRYAMLSQLDFKIFGLETIKEQYAHDDDFKDEAHGGGLMGHFGVKKTEDILADHLFWPKMRRDVERFVARCTTCQKAKSRLNPHGLYMPLPVPSVPWEDISMDFVLGLPRTKKGRDSIFVVVDRFSKMAHFIPCHKSDDATHVADLFFREIVRLHGVPNTIVSDRDTKFLSHFWRTLWAKLGTKLLFSTTCHPQTDGQTEVVNRTVSTMLRAVLKKNIKMWEECLPHVEFAYNRSQHSTTKKCPFEIVYGLLPRAPIDLLPLPTLERVNFDAKYRAELMLKLHETTKENIERMNIKYKLAGSKGKKHVAFEPGDLVWLHLRKDRFPNLRKSKLPPRADGPFQ

SEQ ID NO: 195165 - protein, 131 aa, Oryza sativa
  Clone ID: PAT_MRT4530_9113C.1.pep
YSRLSAKSGEKIAYLLARMASLLTGIRCNAIRRRRRLLLLLPISPLIFSSLCTLACISLTLYKLSYKGKQKLWGNLTICHWIHAIVTGVFATLRHFGAASTMRLVAWMLIHGRAAALGAGNRRLVLPGVAS

SEQ ID NO: 195166 - protein, 251 aa, Oryza sativa
  Clone ID: PAT_MRT4530_91140C.1.pep
MPRHLSPFLSLSVFSAAGEEEGSTATAAGGGGGCSGKHGGSEAYGRGQRASETRGGGIGGHAGRSTSSSQVQILHCRRAPLRGKGGGGVAAIVGEELEGRGAKEAVARWLPPSPSSSPWPQTAAVPFHQPPHARPPTATALCHTLTCRRSTPPAVVPSHAASVGRRSTLLAAARCYSPASKRRKKRRGKRKGKDRMLRIATAAAALPAIGPPLPIHPVGLLPTRRPAYERRVIEREEEGREEGKQRDDVTS

SEQ ID NO: 195167 - protein, 1392 aa, Oryza sativa
  Clone ID: PAT_MRT4530_91141C.1.pep
MPIAQQGPMTRARARELNYQVQGCSWHGGSREHTQLSPRTRDIIQHFERQVREHAEGLDEDVRVANDRLGQLEAAQIDTNSKLSSLERSLVALNTSLAGILNTLERMGQDGHDGSARRNHNGHDANSNIAAREELEYATDTEHDEEILGRPQRQQCRQRHGMGAPPRREVRDNDDSLGTIKFTIPYFDGKYDPDAYLTWELAIDQKFACHDFPENKRVRAANSEFTDFASIWWSEFVRSNPNNNTPQTWDAIKRVMRARFVPSYHARDLLHKLQQLRQGNKYVEEYYQALQTGMLRCGLVENDDAGRASSWTPSNAAAPSNRAAAPSSSSNKLRPSTTNSIPCPSEPTRGVVATPSKSSSSVASSERTRDIQCLRCMGYGHVCKDCPSTRVMIVRADGRYSSASDLDEETYALLATNNAGEVCDQGTLLPRDHRWNVIIDGGSCNNLASAEIVEKLALSTQPHPQPYYIQWLNSSGKIKEHTRSEHLIAANELEKHKKKPTNSVQNNKKEIKLKGSCFIATKSDLDEVDTDTVVCYALVCKETLFPIEDTPISLPPPVTNLLQEYADIFPKEVPLGLPPIRGIEHQIDLIPGASLPNRAPYRTNPEETKEIQRQVQELLDKGYVRESLSPCAVPVLLVPKKDGSWRMCVDCRAIDNIIIRYRHPIPRLDDMLDELSGSLVFSKIDLRSGYHQIRMKLGDEWKAAFKTKFGLYEWLVMPFGLTNAPSTFMRLMNEVLCAFIGRFVVVYFDDILTYSRSIEDHHGHLRAVFDALRDARLFGNLEKCTFCIDRVSFLGYVVTPQGIEVDQAKVEAIHSWPVPTTITQVRSFLGVAGFYRRFVKDFSTIAAPLHELTKRNVTFTWAVAQRNTFDTLKDKLTHAPLFQLPDFNKTFELECDASGIGLGGVLLQEGKPVAYFSEKLSGPSLNYSTYDKKLFALVQTLETWQHYLWPKEFVIRSDHESLKHIRSQAKLNHRHAKWVEFIESFPYVIKHKKGKENVIADALSRRYTMLSQLDFKIFGLETIKEQYAHDDDFKDVLLNCKEGRTWNKFVLTNGFVFRANKLCIPASSVRMLLLQEAHGGGLMGHFGVKKTEDILADNFFWPKMRRDVERILKMWEECLPHVEFAYNRSQHSTTKKCPFEIVYGLLPRAPIDLLPHPTSERVNFDAKQRADLMLKRHETTKENIERMNIKYKLAGSKGKKHVTFEPGDLVWLHLRKNRFPNLRKSKLLPRADGPFKVIQKINDNAYKLELPADFGVSPTFNIADLKPYLGEEDELELRTTQMQEGEDDEDIRSNDTTMPIAQQGPMTRARARELNYQVQGCSWHGKNSNNVESVYRLLRHSTPVVVVVGPPTSCPPLNRSLSSSHRKIGIPRCCIKHDHNGSGDEDDEFVRW

SEQ ID NO: 195168 - protein, 1189 aa, Oryza sativa
  unsure (1)..(1189): unsure at all Xaa locations
  Clone ID: PAT_MRT4530_91142C.1.pep
MLYMGGRGCIDGVDVLIIIDGGSCNNLASAEMVEKLALSTQPHPQPYYIQWLNSSDKVKVTRLVRVHFAIGSYHDSINCDVVPMQACSMLLGRPWQFDKDSLHFGKSNQYSFVHNGKKLVLHPMSPEVILKDELARASKQKNQERTRSEHLIAANELEKHKKKPTNSVQNNKNEIKLKGSCFIATKSDLDEVDTDTVVCYALVCKETLFPIEDTPISLPPPVTNLLQEYADIFPKEVPPGLPPIRGIEHQIDLIPGASLPNRAPYRTNPEETKEIQRQVQELLDKGYVRESLSPCSVPVLLVPKKDGSWRMCVDCRAINNITIRYRHPIPRLDDMLDELSGSLVFSKIDLRSGYHQIRMKLGDEWKTAFKTKFGLYEWLVMPFGLTNAPSTFMRLMNEVLRAFIGRFVVVYFDDILIYSRSIEDHHGHLRAVFDALRDARLFGNLEKCTFCTDRVSFLGYVVTPQGIEVDQAKVEAIHSWPVPTTITQVRSFLGLAGFYRRFVKDFSTIAAPLHELTKRNVTFTWAAAQRNAFDTLKDKLTHAPLLQLPDFNKTFELECDASGIGLGGVLLQEGKPVAYFSEKLSGPSLNYSTYDKELFALVRTLETWQHYLWPKEFVIHSDHESLKHIRSQAKLNRRHAKWVEFIESFPYVIKHKKGKENVIADALSKRYAMLSQLDFKIFGLETIKEQYAHDDDFKDVLLNCKEGRTWNKFVLTNGFVFRANKLCIPASSVRMLLLQEAHGGGLMGHFGVKKTEDILADHFFWPKMRRDVERFVARCTTCQKAKSRLNPHGLYMPLPVPSVPWEDISMDFVLGLPRTKKGRDSIFVVVDRFSKMAHFIPCHKSDDATHVADLFFREIVRDTKFLSHFWRTLWAKLGTKLLFSTTCHPQTDGQTEVVNRTLSTMLRAVLKKNIKMWEECLPHVEFAYNRSQHSTTKKCPFEIVYGLLPRAPIDLLPLPTSERVNFDAKYRAELMLKLHETTKENIEHMNIKYKLAGSKGKKHVAFEPGDLVWLHLRKDRFPNLRKSKLLPRADGPFKVLQKINDNAYKLELPADFGVSPTFNIADSKPYLGEEDELESRTTQMQEGEDDEDIPSNDTTTPIAQQGPMTRARAXVQGCSWHGKNSNNVESVYRLLRRSTLVVVVVGPPTSYPSPNQSLSSSHRKIGNPRCCINQESKTSHPCGPILALI

SEQ ID NO: 195169 - protein, 790 aa, Oryza sativa
  unsure (1)..(790): unsure at all Xaa locations
  Clone ID: PAT_MRT4530_91143C.1.pep
GTRRAGRWPLGPGGPERQQGGSRLFLARQEQQQRGVGAPVAKAXHPRVTYSSTIFYLLPSQDRXVVGSGGSGEHPQHSPRTRGIIQHFEHQVREHAEGLDEDVRVANDRLGQLEATQIDTNSKLSSLETPLVAVNTSLAGILNTLKRMSQDGHDGPARRNHIGHEANSSVAAREEVDYAADTELDEEVLGRPQRQQRQQRHGMGAPPRQEVHDNDDSLGKIKFTIPCFDGKYDPDAYLTWELAIDQKFACYDFPENKCVRAATRRTSDIQCLHYKGFGHMCKDCPSTRVMIVRADGGYSSAGDLDEETYALLATNNAGEGDTPHQDEEHIGAEAAEHYESLVVQRVLSAQMERAEENQRHTLFQTKCVINKRSCRVIIDGGSCNNLASVEMVEKLALSTQPHPQPYYIQWFNSSGKEYADVFPKEVPPGLPPIRGIEHQIDLIPGASLPNCVPYRTNPKETKEIQHQVQELLDKGYARESLSPCVVPMLLVHGSWRIAILKKNIKMWEECLSHVEFAYNRSQHSTTKKCHFEIIYGLLPRAPIDLLPLPTSERVNFDAKQCDELMLKLHETTKENIEHMNTRCKLAGSKGKKHVPFESGDLVWLAVVALGLKVGRQVVSLGHARGSYVDSLVQSTESSSRATAAQGGAVVSGPARPPRSPPRSPTERFTQGRAREQPGGGGRGIDGLSAAAALVDRKGKRKIGEGSFTVSDDREQARRKEERTSDSPKVKLLRSSIRAYHGDAEEKAFERLIEKIKGWKRMQEHPISIIRGKILEFFSSYDTTDDSEKTP

SEQ ID NO: 195170 - protein, 873 aa, Oryza sativa
  Clone ID: PAT_MRT4530_91144C.1.pep
MSKNHVLAFFELFDSAKGCCWPDLSVSCDNYDLGETLTIRLQPYETLCCALAIDTPLRGLLILPVQINPIPASKSKKQDEQFARFVIQKIHIKVPLLDAMQVPTYARYLKDILNNKRPLPTTEVVKLTEQCSNLILHKLPEKKKDPGCPTITCSIGAQQFDQTWCDLGASVSVMPKDVFDKLNFTVLEPTPMRLQLADSSVRYPAGIAENVPVKIRDFFIPVDFVVLDMDMGKEMPLILGRPFLSTAGANIDVGTGSIRFHINGKEEKFEFQPRTEQCSMNFLEKETTMPRNRYWKTPVKSPVPAKKSDQPAQKKPPSAPKSKKGWENDHNDEDIPSNDTTTPIAQQGPMTRARARELNYQDILAYKEYNSINRLFHLACKAEREVQGRRASFRTNISAGCASSWTSPNAAAPSTRAAAPSSSSNKLRPSTTNSTPCPSEPTRGVAATPSKSSSSVASSGRTRDIQCLRCKGYGHVRKDCPSTRVMIVRADGGYSSASDLDEETYALLATNNAGEGDAPHQDEEHIRAEAAEHYESLVVQRVLSAQMERAEQNQRHTLFQTKCVIKERSCRVIIDGGSCNNLASAEMVEKLSLSTQPHPQPYYIQWLNSSGKEHTRSEHLIAANELEKHKKKPTNSVQNNKNEIKLKGSCFIATKSDLDEVDTDTVVCYALVCKETLFPIEDTPISLPPPVTNLLQEYADIFPKEVPPGLPPIRGIEHQIDLIPGASLPNRAPYRTNPEETKENQRQVDEDIPSNDTTTPIAQQGPMTRAQARELNYQVQGCSWHGKNSNNVESVYRLLRRNTPVVVVVGPPTSYPSPNRSLSSSHRKIGNPRCCITSARVTRQGSCSTRLGRTPHGPHLGRGPKRSYKPKGP

SEQ ID NO: 195171 - protein, 173 aa, Oryza sativa
  unsure (1)..(173): unsure at all Xaa locations
  Clone ID: PAT_MRT4530_91145C.1.pep
KVQGCSWHQEQQQRGVGVPIAKAQHPCGSXSRTANVVSSPKSKFILLSSKDQEPPLLHQVVSELKLLXRQVREHAEGLDEDVRVANGRLGQLEAAQIDTNSKLSLLDRSLVAVNTSPVGILNTLERMGQDGHDGPARHNHIGHDANSNIAAREEVDYAADTEHDEAVVGRPQR

SEQ ID NO: 195172 - protein, 1315 aa, Oryza sativa
  Clone ID: PAT_MRT4530_91146C.1.pep
MTGGSGEHPQHSPRTRGIIQHFERQVREHAEGLDEDVRVANDRLGQLEAAQIDTNSKLSSLERSLVAVNTSLAGILNTLERMGQDGHDGSARHNHNGHDTNSSIAAREELEYAADTEHDEELLGRPQRQQRRQRHGMGAPPRREVRDNDDSLGKIKFTIPCFDGKYDPDAYLTWELAIDQKFACHDFPENKRVRAATSEFTDFASIWWSEFVRSNPNNTPQTWDAMKRVMRARFVPSYHARDLLHKLQQLRQGNKSVEEYYQALQTGMLRCGLVENDDAGRASSWTPSNTAAPSTRAAAPSSSSNKLRPSTTNSTPCPSEPTRGVAATPSKSSSSVASLGRTRDIQCLRCKGYGHVRKDCPSTRVMIVRADGGYSSASDLDEETYALLATNNTGEGDAPHQDEEHIGAEAAEHYESLVVQRVLSAQMERAEQNQRHTLFQTKCVIKERSCRVIIYGGSCNNLASAEMVEKLALSTQPHPQPYYIQWLNSSGKEYADIFSKEVPPGLPPIRGIEHQIDLIPGASLPNRAPYRTNPEETKEIQRQVQELLDKGYVRESLSPCAVPVLLVPKKDGSWRMCVDCRAINNITIRYRHPIPRLDDMLDELSGSLVFSKIDLRSGYHQIRMKLGDEWKTAFKTKFSLYEWLVMPFGLTNAPSTFMRLMNEVLRAFIGRFVVVYFDGILIYSRSIEDHHGHLRAVFDALRDARLFGNLEKCTFCTDRVSFLGYVVTPQGIEVDQAKVEAIHSWPVPTTITQVRSFLGLAGFYRRFVKDFSTIAAPLHELTKRNVTFTWAAAQRNAFDTLKDKLTHAPLLQLPDFNKTFELECDASGIGLGGVLLQEDKPVAYFSEKLSGPSLNYSTYDKELFALVRTLETWQHYLWPKEFVIHSDHESLKHIRSQAKLNRRHAKWVEFIESFPYVIKHKKGKENVIANALSRRYTMLSQLDFKIFGLETIKEQYAHDDDFKDVLLNCKEGRTWNKFVLTNGFVFRANKLCIPASSVRMLLLQEAHGGGLMGHFGVKKTEDILANHFFWPKMRRDVERAVLKKNIKMWEECLPHVEFSYNRSQHSTTKKCPFEIVYGLLPRAPIDLLPLPTSERVNFDAKHRAELMLKLHETTKENIERMNIKYKLAGSKGKKHVAFEPGNLVWLHLRKDRFPNLRKSKLLPRADGPFKVLQKINDNAYKLELPADFGVSPTFNIADLKPYLGEEDELESRTTQMQEGEDDEDIPSNDTTTPIAQQGPMTRARARELNYQVQGYSWHGKNNNNVESVYRLLRRSTPVVVVVGPPTSYPSPNRSLSSSHRKIGNPRCCITARITK

SEQ ID NO: 195173 - protein, 77 aa, Oryza sativa
  Clone ID: PAT_MRT4530_91147C.1.pep
ATLQAAVPKPVTVSMVVPAGAYDNDLVKTAKSIASPGRGILAMDESNATLGNRLASIGLYNTDAKRHALPDPACHLT

SEQ ID NO: 195174 - protein, 201 aa, Oryza sativa
  unsure (1)..(201): unsure at all Xaa locations
  Clone ID: PAT_MRT4530_91148C.1.pep
ESIFSIGFLKVFFFFFFQGPGGQPENPGPAPEGKPLSPKGSPIKPGGKQEKTGPRGKNDTPPKNHTKPAPEPKRKNPGGPKEGPTPQXGGAPPPPFQEEKPGFPVKKKKRPPPEKRRFPYGAPGGFFFPPGKRPTGNGPPPPAPKKTPPGPPPWFPPHRKNFVRGGKTGXKTETGLRNPNPPPPKYPTNPPTRPHKGPPCP

SEQ ID NO: 195175 - protein, 116 aa, Oryza sativa
  Clone ID: PAT_MRT4530_91149C.1.pep
MWGPQLPSLPFPFLSLSVVFYLAHAAEQRSSARRCDGPSQNGSARGSGSVYRRGMIAYAVVCRRGLASWRKGRRITQRSQPGVTRWRRDGDAMATRATAMGSGNGLDRGAQGYALG

SEQ ID NO: 195176 - protein, 195 aa, Oryza sativa
  Clone ID: PAT_MRT4530_9114C.1.pep
MAAANRSALLVEAMAAAVLTTTATGATTYTVGAPAGSWDTRTNYAQWVSAVTFRVGDQLVFKYSPAAHDVVEVTKAGYDSCSSSGPVATFNSGDDTVPLTATGTRYFMCGFPGHCAAGMKIAVKVEAATATGGSGTALSPMAPRPRTPTAMAPNAMPPMAGGRPVSPSSSASKSTGVASLVGLSLGAIVAGLMSF

SEQ ID NO: 195177 - protein, 87 aa, Oryza sativa
  Clone ID: PAT_MRT4530_91150C.1.pep
RRPNISLNNPEVCFITKLGGSTNKIPGGLVKHDQTRIPTHSQFQDTFAQNYFYFFHPNKFNFPFPNYTLREDQTSQKTLPPLTKNSI

SEQ ID NO: 195178 - protein, 40 aa, Oryza sativa
  Clone ID: PAT_MRT4530_91151C.1.pep
WTLIVQHFLLKCSESYGYDSSFLLKEEYNLCIFFMIRVAV

SEQ ID NO: 195179 - protein, 485 aa, Oryza sativa
  Clone ID: PAT_MRT4530_91152C.1.pep
MASGGDDAAAPLLASKHGGEPRRNTFAFACATLASMTTILMGYNLALMSGAQLFVREDVGLSDAQIEVLAGSMNVFMLVSILAAGWAADVLGRRGTLVLANAYLMAGALAMSLGATYAALMAARFVTSVGVGFSLVVAPVYNAEISPASARGVLSSLLDMFVNVGILLSYVSNYALAGLPVHVGWRVMYGIGVLPPVFLAAGVLAMPESPRWLAMRGRHADARAVLVRTSDSVEEAELRLEEIKRAVEAPQESAGVGVWRELLLRPSAMVRRIVTCVVGLHFFQQASGIDAIVLYSPLVFKKAGMASNTSVLGATVAVGVVKTCFILVATLLSDRLGRRPLLLASTGGVAVTLTSLALALRVASPSTASAAACVASVMAFVAAFSVGFGPMTATYTAEIMPLRLRAQGASLGMAVNRLTCGVVSMTFISLAGGITMAGCFFLYAGVAAVACVFVYVRLPETRGRSLEDMDVLFANLDLRVKTTPG

SEQ ID NO: 195180 - protein, 476 aa, Oryza sativa
  Clone ID: PAT_MRT4530_91153C.1.pep
MNEKASVSKELNAKHKKILEGLLRLPENRECADCKSKGPRWASVNLGIFICMQCSGIHRSLGVHISKVRSATLDTWLPEQVAFIQSMGNEKSNSYWEAELPPNYDRVGIENFIRAKYEDKRWIPRNGSSRPSSGARDEKSSESQTSVNRGGHNQRSSFEQHRTSPAAVSKIAPVVSRTPTQAPHQPKAQPSVPKVSPPQPEKSPPNATPPKVERPSVAPPPKVDYATDLFNMLSMDGTTEKEAESSSNDDSAWEGFQSAEPVPSSDKKDSAKPVESKPQSTSGIEDLFKDSPAVTVSSAPAAPQVNVKNDIMSLFEKSSMVSPYAVQQQQLAFMTPQQLALLSQQQALLMAALKAGNAPQMIPGNASLLNGNGSNPANGGLPSQSWTNLAYQNPGLAPVAAQNGATKVANNNQEFSFGNFNFSTPGAYNTSSSVPANGAASAAANKSTSPTSSSLPSQSGKEYDFSSLTQGLFSKR

SEQ ID NO: 195181 - protein, 188 aa, Oryza sativa
  Clone ID: PAT_MRT4530_91154C.1.pep
APHQPKAQPSVPKVSPPQPEKSPPNATPPKVERPSVAPPPKVDYATDLFNMLSMDGTTEKEAESSSNDDSAWEGFQSAEPVPSSDKKDSAKPVESKPQSTSGIEDLFKDSPAVTVSSAPAAPQVNVKNDIMSLFEKVSASITFTNAFVKWLCHLKERAHLWGSSRVDLQACKPVWFRHMLSSSSNLLL

SEQ ID NO: 195182 - protein, 392 aa, Oryza sativa
  Clone ID: PAT_MRT4530_91155C.1.pep
NSSSGLDVVQWTKRISALARSGRAAEAVAAFARMDAAPNALTLASVLPACARLGDLALGRAIHGLWLRRGGGHGANPIVDNAVLDVYAKCGALASARRLFDEMPERDVFAWTTMVWGLARNGSPQDAVAMFRGMLSDGDAAPNDATVVSALHAVATSGSLVSCKLLHSYAVKQGLGGELVVGNALIDAYAKCGDAWLAFKVFVELPETDMVSWGTITRAMAVHGRCREALQLFSLMLRRGVRPDGAVFLALLTACCHAGRVDQALLFLGAMARVYGISPRREHYTCVLDACGRAGQLDRAGEIFRQMPAEYDAEKALGVYCSYAVSNGVAGVAGERLPELFLDGEVDAGGGTYAVVSKSLADAGRWEDACAVRERMAERRIEKEAACTWIEV

SEQ ID NO: 195183 - protein, 689 aa, Oryza sativa
  Clone ID: PAT_MRT4530_91156C.1.pep
MEKSYASASSGELGVVAGGGGRSVRVIPLRHPQEAVAGSSPSWWSVVMVKARGMGPRDWAEAALPCLSWMRTYRLKEDLQADLAAGITVGVMLVPQAMSYAKLAGLHPIYGLYTGFVPLFVYAIFGSSRQLAVGPVALVSLLVSNVLGGIVDSSSELYTELAILLAFMVGVLECLMGLLRLGWLIRFISHSVISGFTTASAIVIGLSQIKYFLGYSVTRSSKIIPLIESIIGGIDQFSWPPFVMGSSFFVILLIMKNLGKSNKRLRFLRASGPLTAVVFGTIFVKIFHPSSISVIGEIPQGLPKFSIPRGFEHLMSLMPTAVLITGVAILESVGIAKALAAKNGYELDPNKELFGLGIANICGSFFSSYPATGSFSRSAVNHESGAKTGLSGIIMGIIIGGALLFMTPLFTDIPQCALAAIVISAVTSLVDYEEAIFLWSIDKKDFFLWAITFITTLIFGIEIGVLVGVGFSLAFVIHESANPHIAVLGRLPGTTVYRNRLQYPEAYTYNGIVVVRIDAPIYFANISYIKDRLREYELNLPNSNRGPDVGRVYFVILEMSPVTYIDSSAVQALKDLYQEYRDRHIQIAIANPNRQVHLLLSRSGIIDMIGTGWCFVRVHDAVQVCLQKVQSSSSSSIKLSPQASGDLADSVTTPKVQQRYSFLKNLWKSQVGDGCTGSEVQPLLRQNLV

SEQ ID NO: 195184 - protein, 423 aa, Oryza sativa
  Clone ID: PAT_MRT4530_91157C.1.pep
MARKKIREYDSKRLLREHLKRLAAIDLHILSAQVTESTDFTELVNQEPWLSSMKLVVKPDMLFGKRGKSGLVALNLDLAQVRQFVKERLGVEVEMGGCKAPITTFIVEPFVPHDQEYYLSIVSERLGSTISFSECGGIEIEENWDKVKTVFLPTEKAMTPDACAPLIATLPLEVRTKIGDFIRGVYSVFQDLDFSFLEMNPFTMVNGEPYPLDMRGELDDTAAFKNFKKWGNIQFPLPFGRVLSPSESFIHELDEKTSSSLKFTVLNPKGRIWTMVAGGGASVIYADTVGDLGYASELGNYAEYSGAPNEEEVLQYARVVLDCATADPDGRKRALLIGGGIANFTDVAATFSGIIRALREKESKLKAARMNIYVRRGGPNYQTGLAKMRTLGAELGVPIEVYGPEATMTGICKQAIDCIMAEA

SEQ ID NO: 195185 - protein, 90 aa, Oryza sativa
  Clone ID: PAT_MRT4530_91158C.1.pep
MRAQILQEPKSAWDGEGDGNDSQEVDGKTATMTMMKIGGRWLPIGKMVAAELRRPPDLIIGTSGGGSATNGLYQHVFSKDGPKQLMMIIF

SEQ ID NO: 195186 - protein, 594 aa, Oryza sativa
  Clone ID: PAT_MRT4530_91159C.1.pep
MPNVLHISQEPTRGSRWNRWSNWYLRIVNNRLQLLCQGTRTVDEYYKEMELLLIRAHIKEDESKMTRFLHGLNDEISDFLEMFIQHFCKIFLIKPNIWKVLWHRTQQTITFVGARSQRASTRASPLAAIAKLQPSSASSPATRNESRRLVTPIAKSSSRSRDIEAASDLMEKSYASASSGELGVVAGGGGRSVRVIPLRHPQEAVAGSSPSWWSVVMVKARGMGPRDWAEAALPCLSWMRTYRLKEDLQADLAAGITVGVMLVPQAMSYAKLAGLHPIYGLYTGFVPLFVYAIFGSSRQLAVGPVALVSLLVSNVLGGIVDSSSELYTELAILLAFMVGVLECLMGLLRLGWLIRFISHSVISGFTTASAIVIGLSQIKYFLGYSVTRSSKIIPLIESIIGGIDQCMFQCNPILQFSWPPFVMGSSFFVILLIMKNLESVGIAKALAAKNGYELDPNKELFGLGIANICGSFFSSYPATGSFSRSAVNHESGAKTGLSGIIMGIIIGGALLFMTPLFTDIPQCALAAIVISAVTSLVDYEEAIFLWSIDKKDFFLWAITFITTLIFGIEIGVLVGVGFSLAFVIHESANPHIGE

SEQ ID NO: 195187 - protein, 61 aa, Oryza sativa
  Clone ID: PAT_MRT4530_9115C.1.pep
TFHYYYALMTPENTSHGRVNHITKFYLNKTPYVHSHIVQITKYDLLSLTQRDGSIPSFTRN

SEQ ID NO: 195188 - protein, 280 aa, Oryza sativa
  Clone ID: PAT_MRT4530_91160C.1.pep
MPWVQEHVYACFSSLPDPLMCSTSIHIALCALLRPCLNQDILPSTWDGNQDCTLQSNPHGQKAVLGRLPGTTVYRNRLQYPEAYTYNGIVVVRIDAPIYFANISYIKDRLREYELNLPNSNRGPDVGRVYFVILEMSPVTYIDSSAVQALKDLYQEYRDRHIQIAIANPNRQVHLLLSRSGIIDMIGTGWCFVRVHDAVQVCLQKVQSSSSSSIKLSPQASGDLADSVTTPKVQQRYSFLKNLWKSQLDNSKMRTTKFVRSAFRSKQYLCNAIQLNIHWL

SEQ ID NO: 195189 - protein, 967 aa, Oryza sativa
  Clone ID: PAT_MRT4530_91161C.1.pep
MEGSKLIINRDIITEAAAMAFADPNLQIPDRYDRSGEVPAGEVVVADDDESYDLPVVDMARLLDPEHREAEVAWLCSACRSWGFFQGPCNHPEKVIGIAPHSDGFGLTLLLQVNDTPGLQISKDGRWHPVRPQTSAFVINVGEILEVLTNGHYKSVFHRVVVDTERGRDTIVVFQDACINGVVKPLLELGEARYHAIDRLEYSKGHATEIFSRGERFVDILKKYQEPSTKASSPVVPPSTSHAGARRRQPHPQPSAPHRSSSPAASSSVIHAPRRSSSPTAASSTVHATSGLVTGGCVLRHPRPTMELVTGGCFLRHLDELAKYVLIMLRADDGGKGSTFALYFLMYRHVCVGLLLPGAGAAGEELVVAGQCVDGAGVAAWAPQSAPPARSSWSRGSASMVRAWVSQPAPPVRSSWSRGSASTVRAWAPQRRCPCQPCVRAGVAQCPAEAAAAAAARDVHGQALALTATNMARDEPMMSAATYFWSTTMNAFLFSQGPMTPTLLDIVMITGLDITSSANLSSLNTQLTHEFKTRSIDGWGGYVAKNMGTGPVTPREHTAFLMMWLEKFLFCGPSYGPTANWQRVAENLVEKKHFPLGKYLLGYLYLTLNTAVDKMASGKTIGTGGPWWLLQTWLNLHTRKVANRPALADVEFPRFKPIIRDDGETSTTRRCMSFGEAASVSTVCKLSAEPFRERFNNFYDGFPRNDRVWFAYEGSASFELLDDFRFDEINSDMYEKSREVFTTAISPCIIPIGIHQGKNIKMTYEFYHPTSAARQFGMGLLPNGGGLTPPVIGYNASKTSTLLHGLPHVPIAPVAGRKRAKSTAAPSAVKKKPKNQKTTTDDLPAIDPDVADFLEDEALSEEVNEAAEHISETREQTPPADPPGPQITPSPPVRPTYQPRVLADMFSFDIRPFLDEEEETTSQALVPLADDIKTTLMDISKRLEGSLETLVTSCGSIRDRLNEIHPR

SEQ ID NO: 195190 - protein, 439 aa, Oryza sativa
  unsure (1)..(439): unsure at all Xaa locations
  Clone ID: PAT_MRT4530_91162C.1.pep
NSILIHSGLPLFPGASEYDVLQRMXQPPDYMLREAKNSAKFFKHVGSIYRGNEVHDGIGSSYRLLTEEEIEVRESEKPKVVKWYFPQLRLDQLICSYPWKNSELTETEKAERVILVDFLKGLLKFDPNERWSPLQASCHPFITGEPFTGPYEPIPETPKIPIGRAAAVEHNPGGGHWLAAGLSPQVGSVNRSLPPNNPYPPKIPYSYGSSYGSFGSHGSYVGNAGHASSYGSFGDGNAVNMYYSPLGPGFKQIESSPDVRLRPRFSHDRGIRLSPGSTGPMSLGASPSQFTPPNYQMQIPSNSTGMHGSGSPASGGIHGSPLGKTPSSYSKRRGLPMPPHEYPSQHGQGRHGDGVGFSHSDANVRGHPVYSQNSIPSSGYSSWRPQIGSGSFSLEASSSHGPSQTFHSHFAPRLQTLDNLSDSSAASTLDNAYWDPYFR

SEQ ID NO: 195191 - protein, 68 aa, Oryza sativa
  unsure (1)..(68): unsure at all Xaa locations
  Clone ID: PAT_MRT4530_91163C.1.pep
LNIAICPTTQICYVEHGYVCXARDQDVKWLKYDTTTVKAVDTWXXLLELYRVVNIQPEXLVYXGHQVA

SEQ ID NO: 195192 - protein, 332 aa, Oryza sativa
  Clone ID: PAT_MRT4530_91164C.1.pep
MVVVVAMPPALSLLVLLVLALHGGAGDATPPPPLRLVRGARRVAFDEGYTRMFGDGNLAVLRDGRRVRLTLDESTGAGFASQDVFLHGFFSAAVKLPAYYAAGVVVAFYLSNGDTYEKTHDEVDFEFLGNVRGREWRVQTNVYGNGSTAAGREERYDLPFDPTDELHHYSILWTRRRIIFYVDETPIREVVRTAAMGAAFPAKPMSVYATIWDGSAWATLGGRYRVNYRYAPFVAEFADLVLHGCAVDPLAVEHSASCGDEEEEAAEAVVSSAAMAAFRRGHMSYSYCHDRRRYPVALSECALTGGAASLGRLFGPDGMKRRRARRARDASS

SEQ ID NO: 195193 - protein, 53 aa, Oryza sativa
  Clone ID: PAT_MRT4530_91165C.1.pep
IKHKIHSLMSRTSQTSVSSTYLPLHTNLHLQTYKLTQPITFYISSHFYSSNLT

SEQ ID NO: 195194 - protein, 1236 aa, Oryza sativa
  Clone ID: PAT_MRT4530_91166C.1.pep
MAEASKEGGINALPDELLQHVLSLLSADEAVKTCVLSRRWRHLWRSTDVLRLDADKERWKSSKRFKKFVNHLVLFRGCSPLREFDLEFSSCREKDEKGEDSDEDESDDDRGEDESDEDSDGDESDEHSDDGESDDDSDEDEDSNPFQCVMMWVMYALICQVQVLKIHNFNERYIEIDGGMPLVSQHLTKIELSGIVLKDCFLNFSSCPALKELYFTKNCCFDSVKKIFSQSMQCLRIFCCQFSEYHRTLIYAPSLIRLFLEGFWGRTPFLERMPSLVEASVRPHQDCDDWCSNTYTGNCEDEDCDGCHGMIDKIGNSSNCVLLGGLSEAKSLKLIAGPEIIIFGSDLRWCPMFSKLKNLLLNEWCLLSNFWALACILEHSPVLRKLTLQISKEAKSMMQTEENDNPLRKPAAISEHLKVVKVHCKEVDEVVYKIGKWLSTLDIKVLIKRRNQSPKHESVYGVFRRLNRKNMLNFSFRVVLNNKLYRVQELSCTGSHTGCFLHRGPDARRLFDGMRPQGKTLEMGKRALPRSSDGDEDRTGDLPDGILHHILGSLPARDAARTCVLARRWRHLWKFATGLRITDREMREPAPMEKLQDFVDHLLLLRGRAPLETCWLNLTRLSSDGDARRVNLWFRHAVLCEVQVLRLDLILNGFQLKLDDLPLASRCLAKLNLSGVHLMHSFPDFSCCPVLEHLDIFFCDLSDAKKITSQSMKCLNIRHCTFSQISRTRISAPNLISLRLENYWHRTPVFEVMPLIVDAFVRVHDRSGDWYSCTSGNADFEECLCEDCDFCHSNTNCVIMQALSQAKNLVLSAHEQEFIFKKELMRCPTFSNLKTLLLINCFCVAFDLHGITSILRHTPVIEKLILEFFFEVTEHDDEVEMKGSCSQMERSSAISKHLKLVIVKSALPSVPLAHSSTLPPSGQPNSLSVVAVELDPPPMPPFDRDPSGFPGCLLVGRAVSLLFPDAFAPESIESELCPLYMSTGSAVPSPRRALEMAVAAMGMGLSSPGSSFTPPLSPSAGGGGSGMGGGAWSHQPSMPALCLPGSAGNLHLSRLRTLLSARDMAVDELLAAAAAAEADYDGLVGSPASIRSARGKALVPSNLDELFSAEPELAAAASRSPRYADQGGAAFSPTRKAAVLNQFQQQQQSLLSPRAAALTPEPVSPMNSRLLAALAQQEKMQQQTLRSMSSRDLGAAASLLVGSPVSSSMSKWGFPSGNPDGVPTTRSSAVSSVAPS

SEQ ID NO: 195195 - protein, 111 aa, Oryza sativa
  Clone ID: PAT_MRT4530_91167C.1.pep
LLEKKRRIQVPDKMRFSIYTLTAILSAGITVSAEPCVEGFDYCGYTLLQADPSYKTEITAQIRSSGRPISDMQISQTLFSCGASGAIEYKKYCINGCGRIMDEVNEVCFKK

SEQ ID NO: 195196 - protein, 45 aa, Oryza sativa
  Clone ID: PAT_MRT4530_91168C.1.pep
SRVRKFSAYSQARSELRLTDGTRNGGHDRAVRWRSPTRRSHARQR

SEQ ID NO: 195197 - protein, 580 aa, Oryza sativa
  Clone ID: PAT_MRT4530_91169C.1.pep
MVASLLCTVAVAVLAVAAVGGEAGVVEHTFVVHEMNVTHLCNTTKIFVVNGQLPGPTVDVTEGDTVVIHVVNKIPHGLTIHWHGVRQLRSCWADGAGFITECPIPPGSERTYRFNVTDQVGTLWWHAHVTCLRSTINGAFIIRPRDGKYPFPTPVKDVPIIIGEWWELDLVELDRRMRDGNFDDNPLSATINGKLGDLSNCSGIVEESFVLNVKHGESYLLRVINTAFFSEYYFKVAGHTFTVVGADGNYLTPFKTDMVTVAPGEAIDVLMVADAPPAHYHMIALANQPPEPDPQIPKYISRGLVRYTGVDANNNGLPVPMPIMPNQHNTMPSYYFHANLTGLMHPKHRRVPMHVDERIFIILGLGTICRGRNTTCKRQRSLETIEVATMNNVSFTHPNTTALLERYYDGTPEGVYTEDFPVRPPRPYNYTNPALIPPGPLEEVLEPTFKATKLKRFKYNTSVEIIFQSSTLLMSDSNPMHLHGYDVFLLAQGLGSFNAKRDIRKFNYHNPQLRNTILVPRGGWAAVRFITDNPGMWYLHCHFEFHIIMGMATAFIVEDGPTPETSLPPPPPEFKRCDAS

SEQ ID NO: 195198 - protein, 120 aa, Oryza sativa
  Clone ID: PAT_MRT4530_9116C.1.pep
LLEFYAPWCGHCRKFALILEEIAVSLQDDQDIVIAKMDGTVNDIPTDFTVEGYPTIYFYSSSGNLLSYDGARTAEEIISFINENRGPKAGASAAVDEKTHIDAVEEEDTDGLYTAYNRDY

SEQ ID NO: 195199 - protein, 157 aa, Oryza sativa
  Clone ID: PAT_MRT4530_91170C.1.pep
MCSEVLGFESGGSHVTMDILPHEVSEPESNLLDINEKRRLAKESRPPLPPAMPWRGKRIVLDRYDGRLIMSQVPTKLPFTLHASRVDGRLRLSCMHPSDSVDELKVASNGKKDVEDHAKGNHGEKNVEYISSKAKVGEGNNLTGCGRSSGNGVAWRI

SEQ ID NO: 195200 - protein, 100 aa, Oryza sativa
  unsure (1)..(100): unsure at all Xaa locations
  Clone ID: PAT_MRT4530_91171C.1.pep
EPXGRPRISPSIHSSFPMHQLWAAQLSHTSPRPTIIVHAPTNKPPIVNTQSTWHNSTSSQPTQTQYNHTCMATQAQGHCPHPFPRHTQFIYQQPXCHIAA

SEQ ID NO: 195201 - protein, 155 aa, Oryza sativa
  Clone ID: PAT_MRT4530_91172C.1.pep
MDILPHEVSEPESNLLDIHKKRRLAKESRPPLPPAMPWRGKHIVLDRYDGRLIMSQVPTKLPFTLHASRVDGRLRLSCLHPSDSVDELKGGKKDVEDHAKGNHGTLHTALNCNYPKSINFERKYESFFTHWILTNLVKRIVGYYINSTTCTFLYN

SEQ ID NO: 195202 - protein, 93 aa, Oryza sativa
  Clone ID: PAT_MRT4530_91173C.1.pep
TRLSASRGQRHRFSSPPHPSIHPRHTIPSSTTAIQSRINTVTIKASERERGRRPPCQTSTTMAEGAKKRPDLGRSRLLLPQTVPVAPALDRED

SEQ ID NO: 195203 - protein, 146 aa, Oryza sativa
  Clone ID: PAT_MRT4530_91174C.1.pep
YYSLSPADKLGNLTLALDIGAKYCNVEKYLEADDIHKLDEVSMIVYLSDWYYGVALLQKQDISAKRIGKLVLMTELHDQMRAQYTAGANAFISWVNAKIAELNVRDFDNTLAGVKKKLEQFYAYKAGEKSKQLTSVLDLESLFDNL

SEQ ID NO: 195204 - protein, 243 aa, Oryza sativa
  Clone ID: PAT_MRT4530_91175C.1.pep
RWRKRRQRLSSRRHLRWRGRVLAVTVRGRFNADGRLCAYGRELVDVCIVDVSSVPILCMSGLACWPIVPGWPDRAQCAGGEAQAQPSGRAGPKSHVVGRAFGPRALWPSIVSTTTTTAHRGVALLVGSSDRFVRRRLFVPDWVNHPTNCSFALGRTVSTGGDQYKLLCIRMDRVLQVCSVLTLGGNGINSGSFARWRKVPSPPQNVFTGRRSVAIVDGVAYFVLSMAFIHRGTPGHYTGQGLL

SEQ ID NO: 195205 - protein, 175 aa, Oryza sativa
  unsure (1)..(175): unsure at all Xaa locations
  Clone ID: PAT_MRT4530_91176C.1.pep
NRSTRRQKNAREAKAPRKTDRRTPSSSTSIATLNDPCMVHTPEMLHILKHEPYHVTACDLGGSELRNISXTTNMMTSTDYQYCXTDNGLXAHKNGGTLETYIVIKCLXDDHSKKFINFTLNYITDLYIRMNXCTFIEFRTDMLNVTSITRNCFLEHRHRVVRCGHVPNIRPKMVS

SEQ ID NO: 195206 - protein, 64 aa, Oryza sativa
  Clone ID: PAT_MRT4530_91177C.1.pep
APIYKVWGLRGPVPLAMKGTKQVAASSLSSPNDQRERKRNFPAFNLSLTLKAFGMGPHYTGWGH

SEQ ID NO: 195207 - protein, 117 aa, Oryza sativa
  unsure (1)..(117): unsure at all Xaa locations
  Clone ID: PAT_MRT4530_91178C.1.pep
SCENLISVCCLCINFHCKCVLTSDRSAGEIALIADGMNMITETAVGGHAVGAVRSQSFLGTSTNQMSRHSTFYWHLSDXLVDLLGSIXESMSELGAGRNSYFPVFTSLYCGTRQTSE

SEQ ID NO: 195208 - protein, 158 aa, Oryza sativa
  unsure (1)..(158): unsure at all Xaa locations
  Clone ID: PAT_MRT4530_91179C.1.pep
KLRKAGTVAFFSWKTPGLSFGYCRLLDERSGNFVAVWRGHDGPLPNLPAPGVLLVVSGSLAKPFRVWALRXFFPPRPPFPXGPSDGVLSFFGWGRAMVPVSNPSIAFPSPSSPPFGFGLPPLPFLFLFFFVRGFYFLFFFFLFFFFVFPLSSFFVVGT

SEQ ID NO: 195209 - protein, 195 aa, Oryza sativa
  Clone ID: PAT_MRT4530_9117C.1.pep
MAEAAPIGLSWAPKLPSLPTTSGGKKDTGASSSRAQGSLWKPASELVDGLFVPPRDPRKANKLARKNVKDTSGKGWFDMPAPTITPELKKDLEILQLRHVMDPKRHFKRAGKSKALPKYFQVGTVIEPASEFFSSRLTKRERKTTLVDELLSDQHLKNYRMRKVREIQESRTPGGSQKWRNKGKKTLKRAKDRRK

SEQ ID NO: 195210 - protein, 94 aa, Oryza sativa
  Clone ID: PAT_MRT4530_91180C.1.pep
WFLSVFWCGTLGRWLPGVLHRRPRRRCRLATAAPVVVAVIALPPLSSSSPRSRSWSPSSLSSPSLRRRCSRRHRRRCAADRGCRRPRRHHCFHL

SEQ ID NO: 195211 - protein, 147 aa, Oryza sativa
  Clone ID: PAT_MRT4530_91181C.1.pep
MVGWSALRPSRARRLLPAPSDRLEADPGSRPVDRRWTTRVVPATYPGKGERDGVGSAGAGGGEEVARTRRSDGSRRCGGGDTGEGGGGDGGSTGEIKEDKLKHGGGRSGATARRSGVGRWRTTTMAARARNSSPAARRPAREELTRR

SEQ ID NO: 195212 - protein, 150 aa, Oryza sativa
  Clone ID: PAT_MRT4530_91182C.1.pep
MAKPSAAPVTGVPVGSAAWSTGLCDCFDDCGLCCLTCWCPCITFGRVAEMVDRGSTSCGTGGALYGLLCAFTGCQWIYSCTYRGKMRTQYGLAEAGCADCCVHFCCEPCALCQEYRELVARGYDPKLGWHLNADRAAAAGAAPAVQYMGR

SEQ ID NO: 195213 - protein, 153 aa, Oryza sativa
  unsure (1)..(153): unsure at all Xaa locations
  Clone ID: PAT_MRT4530_91183C.1.pep
KSPEREPKGRGIKGRTGPQGPGEGNGHPAGKHPXPQGVTPPPKGRPKRQEGGPAGAKGDRNRPPQKGPTARKGDXGPNRVNSGTPRENHPPGSKKRGKKKKIRAPKANATEPQAPVRHPAIFYNGFSFFFFFFFFFFFFFFFFFFFFFFFFFF

SEQ ID NO: 195214 - protein, 119 aa, Oryza sativa
  Clone ID: PAT_MRT4530_91184C.1.pep
MTWEELLADSLDMSDEAHCFREEDKPAFRESKAHMARRLASGPALGLFGQLLGDRRAAPIKGAAPIPEGACYYSGKGVLWVIAALQALASSGALEQLRRAWKALESLDGSGAHEQLWWP

SEQ ID NO: 195215 - protein, 102 aa, Oryza sativa
  Clone ID: PAT_MRT4530_91185C.1.pep
HHERSIVRRRQRTGNPREHLHARALRRRVVARLRLVVLGLRHIGANVSPPQCPRRPRPCPSWRRRRCSTRCCLRPPLHTPSRRPHYRCRGCRRSRWSAMWRP

SEQ ID NO: 195216 - protein, 129 aa, Oryza sativa
  Clone ID: PAT_MRT4530_91186C.1.pep
WPPLPSQALAPPRSFFPGDRLPGARSACRRRPPLPSQASASPRSFFTPGCLPRLPLRPPPAASTFSSAGAAARSPAAAPAPPAAAPSSPPAASPFSSIAAAPVSLAPSSPPPPTPSLLPCRCPRCRGGR

SEQ ID NO: 195217 - protein, 680 aa, Oryza sativa
  Clone ID: PAT_MRT4530_91187C.1.pep
MVGGDLTGAFPLRPCLQGHHGSCGRGALPHYDPQVRRLEVDSAGFLLHLLSLCYFQRPNKTWVGKRRGERGKFGSPRFRQVGYSEGEWMYWRADLVGARGWVGRIKLPHKRHVNVTWDKDLVKGATFRRTRGIAAIMQPSPSSPRAPPPTAAQASGYKHFCRVCNKGFTCGSALGGHMRAHGVGDGDGLGADDDDDDDDDSLGDEAVRRARGGADDPWNAGGPSSSGAATHVYELRTNPNRVTRSRQVCKNCGKEFTSWEHFLEHGKCSSGEDDDDEDDVDHSLQPWSPSPEADGEEDSAPAAGWLKGKRSRRCKGTGVDLSPTPSACAAGEEEDLANCLVMLSSSKVDQAGVTEAEQRSSSSASKEHKRLITFMEPTTYVLDTVMALPPPAPAPQYVSTVPRGMFECKACKKPQEGEGLLRCQAGEQPPEVAEPSHHAEVADRSEDNPAKATSDARRNVHASIDGDGNAGTSDAAAELSMAIVPIEPPVAALAAAPLKKKGKMHECSVCHRLFTSGQALGGHKRCHWLTSSSADHTASVPPLADDLVPLSFRPMLDAPEPALDLSIAANPPLLASAATVRPKVGGSSFHLDAPPPVYIPSSPAIPSQRNKATATTGSQNANDAVGLSTAAAEDEADSTTVKRARLSDLKDVSMAGETTPWLQVGIGSSSRGGADDNDKE

SEQ ID NO: 195218 - protein, 558 aa, Oryza sativa
  Clone ID: PAT_MRT4530_91188C.1.pep
MQPSPSSPRAPPPTAAQASGYKHFCRVCNKGFTCGSALGGHMRAHGVGDGDGLGADDDDDDDDDSLGDEAVRRARGGADDPWNAGGPSSSGAATHVYELRTNPNRVTRSRQVCKNCGKEFTSWEHFLEHGKCSSGEDDDDEDDVDHSLQPWSPSPEADGEEDSAPAAGWLKGKRSRRCKGTGVDLSPTPSACAAGEEEDLANCLVMLSSSKVDQAGVTEAEQRSSSSASKEHKRLITFMEPTTYVLDTVMALPPPAPAPQYVSTVPRGMFECKACKKVFSSHQALGGHRASHKKVKGCFAAKLESNAAEVAEPSHHAEVADRSEDNPAKATSDARRNVHASIDGDGNAGTSDAAAELSMAIVPIEPPVAALAAAPLKKKGKMHECSVCHRLFTSGQALGGHKRCHWLTSSSADHTASVPPLADDLVPLSFRPMLDAPEPALDLSIAANPPLLASAATVRPKVGGSSFHLDAPPPVYIPSSPAIPSQRNKATATTGSQNANDAVGLSTAAAEDEADSTTVKRARLSDLKDVSMAGETTPWLQVGIGSSSRGGADDNDKE

SEQ ID NO: 195219 - protein, 114 aa, Oryza sativa
  unsure (1)..(114): unsure at all Xaa locations
  Clone ID: PAT_MRT4530_91189C.1.pep
LSDSFLSERLRRRRNPVPHGGACSRWWRPRDEVGEVSPRLRRRRRRRRPCSSFIAGDGTDPFQRSVRLGLPPVXGAFHWGQAWPQFNLGGPFRPRFPAPSGCGGKPRWEPFPAK

SEQ ID NO: 195220 - protein, 63 aa, Oryza sativa
  Clone ID: PAT_MRT4530_9118C.1.pep
WEQRSAFVHINVISCVFFFESFSLSELMGHGRADYYYIYLRFVPLAIVLHMPLLSSTTLWILP

SEQ ID NO: 195221 - protein, 53 aa, Oryza sativa
  unsure (1)..(53): unsure at all Xaa locations
  Clone ID: PAT_MRT4530_91190C.1.pep
KRIIKKKKKKKKKLINLXNNLKKNKKKKKKKKKKKYXKKKLKKKKKKKKKKKK

SEQ ID NO: 195222 - protein, 60 aa, Oryza sativa
  Clone ID: PAT_MRT4530_91191C.1.pep
SISLFFCPMFCNGNLGWFTVFLRMILFLCPHGIFFFLLNKNVFLDLTHVNNTKNPPQTKK

SEQ ID NO: 195223 - protein, 469 aa, Oryza sativa
  Clone ID: PAT_MRT4530_91192C.1.pep
MEDIISDIIRNRFGIETRNRARTYKKPYPDYYDNVPFPRNYRVPEFAKFSGEDGKTTWEHVGQFLAQCGEANSDTFKLRLFSLSLSGNAFTWFTSLPANSIHTWAQLEEQFHDYFYTGETELRERLDGQQFFDVSQLMQRALAQESRVKDNRKLARPFDKKPNVNVVDYPEASDSEEEGDHDIYVAEWSWTNKNKPFVCSNLMPIPRKDRQIEVQSAIDEGQLKFTDGSKMKLDHDPFPVNTINFNDKKVLIRSEQARSTKGKEVVIGEPRSKMIVPKKPEVAVWKENRSGASTSKAPRKTKVTFDMLLEKYEKQGGEKIRNKGKRPRSPPRERFGHSPSRSHSPSYHYPQDMSWGSYPMPPPDYPYPCFMPWGATTPMFNRMPPMQFNQGWGGPRRPIHERLSLLNNSRFYGKNRANEEKREGKRVKVEERTSEVITIKVGSHDVPIPTGDGVEVSPNRKSEAGTSSS

SEQ ID NO: 195224 - protein, 117 aa, Oryza sativa
  unsure (1)..(117): unsure at all Xaa locations
  Clone ID: PAT_MRT4530_91193C.1.pep
RXPPPRRQXXAXXXXPVHGEEHXRVXGDGAGGRREISRGKGRQSRQWQHGGVLHGYISLLIVRNSFHDSSYNFFFVIFVLAENRVEIFLFCLVIFVVAENCVELNDHGRIKLHFLRK

SEQ ID NO: 195225 - protein, 808 aa, Oryza sativa
  Clone ID: PAT_MRT4530_91194C.1.pep
MTKPPSKTEVEPSNMIPVTLDDFEGEDRKAMEEYINELTREALMRASTRTHKLDATFEGKFDEFLRVKFGPLMADYMSKDKASTTANQPPIDQTGSRTDGAAHTVGPTGPDDRSDRDLAVGPTDQTAGQTGYYPRGQTRTQAGLTAPLDASQTGPWAGQTDAIIPIQGIDLMTNASYLYHLRTFDPSVSTAANNPQVPPHVPNAYNDVARGYPPDTRQGQYNHIAPQTQPIRPPNPPPNQHGPNNMEDIISEIIRNRFGIETRNRARVYKKPYPDYYDNVSFPRNYRVPEFTKFSGEDETELRLCDLISVKQKYNEPVIDYIKRFRDVRNRCYSLNITDRDLAGLAFNGLIAPLRERLDGQQFLDVSQLMQRALAQESRVKDNKKLLRSYDKKPNVMIDYPEASDSEEEGDHDIYVAEWSWTNKNKPFVCSNLMLTPRKDRQSEVKYSFDVAKCDKIFDYLLQEKQIRLPKGHVIPSQEELKRRAYCKWHDSHSHSTNDCNVFRRQVQSAIDEGRLKFTDGSKMKLDHDPFPVNTINFNDKKVLIRPEQAESTKGKGVVIGEPRPKMIVPKKPEIGVWKENKSEASTSKAPRKTKVTFDMLLEKYEKQGDMSWGSYSMPPPGYPYPYYIPWGATPPMFNHMPPMQFNQGWGGPRRPIHERLSSPHNGRFYGRNRANEEKREGKRIKVEARTSEVITIKVGFHDVPIPSRDDVGESSSKRSEAGTSSSQSAGLTRPSGRSDRSHTAGLTGPSGRSDHRPDSGPTDASGRSNRAPNVGLTGASGQFDRWYTSGLTGLQRRFDRRFAKGDI

SEQ ID NO: 195226 - protein, 302 aa, Oryza sativa
  Clone ID: PAT_MRT4530_91195C.1.pep
MGAAEGCCGGAAIAAAAGVIEEAETVVPPPATAIASSKGIRIMTRTQKSHPLDPLSAAEISVAVATVRASGRTPEDAMEYAECEATVKSHPPFIEAMKKRGVDDMDLVMVDPWCAGYYSDADAPNRRIAKPLIFCRTESDSPMENGYARPVEGIHIVIDVQNNTVIEFEDRKFVPLPPPDHLRNYTPGETRGGVDRSDLKTLIINQPDGPSFRVNGYFVEWQKWNFRIGFTPKEGLVIHSVAYVDGNRGRRPIAHRLSFVEMVVPYGDPNEPHYRKNAFDAGEDGLGKNAHSLKKVIFVVPC

SEQ ID NO: 195227 - protein, 297 aa, Oryza sativa
  Clone ID: PAT_MRT4530_91196C.1.pep
MEEYINELTREALMRASTRTRQGVTIKPGPRPKLAPDLVQSAIDEGRLKFTDGSKMKLDHDPFSVNTINFNDKKVLIRLEQAESTKGKGVVIGEPRPKMIVPKKPEVGVWKENKNEASTSKAPRKTKVTFDMLLEKYEKQGGERARNKGKRPRSPPRERFGYSPRRSHSPPYHHPQDMSWGSYPMPPLGYPYPYYMPWGATPPMFNHMPLMQFNLGWGGPRRPIHEHLSSPNNGRFYGKNRANEERREGKRIKVEGRTSEVITIKEGSHDVPIPSGDGVGVSPNKKSEADTSSSQSA

SEQ ID NO: 195228 - protein, 86 aa, Oryza sativa
  Clone ID: PAT_MRT4530_91197C.1.pep
EPTFSQKRSKVLPSDMFCPPLGMAAHAIDDLNEAIELEDRHESIDALLENDADDKTRSPAIPLQPPPVVQNAYEQYEGDDEEVDVE

SEQ ID NO: 195229 - protein, 553 aa, Oryza sativa
  Clone ID: PAT_MRT4530_91198C.1.pep
MTNASYLYHLRTFDPPISTATTNPQVPPHVPNAYNDVARGYRPDTRQGQYNHIVPQTQPIRPPNPPLNQHGPNNMEDIISDIIMDRFGIETRNRARVYKKPYPDYYDNVPFPRNYRVPEFAKFSGEDEEKFHDYFYTGETELRLCDLTSVKQKYNESVIDYIKRFRDVRNRCYSLNITDRDLAGLAFNGLIAPLRERLDSQQFLDVSQLMQRALAQESQVKDNKKLVRPYDKRPNVNVVDYPEASDSEEEGDHDIYVAEWSWTNKNKPFVCSNLMPTPRKDRQSEVQSAIDEGQLKFTDGSKMKLDHDPFPVNTINFNDKKVLIRPEQAESTKGKGVIIGEPRPKMIVPKKPEVGVWKENKSGASTSNAPRKTKVTFDMLLEKYEKQGGEKIRNKGKRPRSPPRERFGHSPRRSHSPPYHHPQDMSWGSYPMPPPSYPYPYYMPWGATLPMFNHMPLMQFNQGWGGPRRPIHERLSSPNNGRFYGKNRANEERREGKRVKVEARTSEVITIKVGSHDVPIPSGDKVGESPIKKSEAGTSSSQSAGLTAAIRPV

SEQ ID NO: 195230 - protein, 84 aa, Oryza sativa
  Clone ID: PAT_MRT4530_91199C.1.pep
EDLPTHIPLDSIPLEYSRSIPIKLFWIMEQPFFELPAPRGEFYEPSPSSEPIYKTGYEICPELINMVRENPFFGFDPKKYLPSS

SEQ ID NO: 195231 - protein, 59 aa, Oryza sativa
  Clone ID: PAT_MRT4530_9119C.1.pep
EEQKIVGIFLPNAGEQKRAREQSSHFYIMGALFNPLFFTRKYTFLLDYGWNLNKAYQEQ

SEQ ID NO: 195232 - protein, 67 aa, Oryza sativa
  Clone ID: PAT_MRT4530_911C.1.pep
LHYEQPEIVKSIPDTEFLGYDSVSATAVVKGLLVNGNSVNVVSEGSDVENILDWTPFLVLSGVQVVR

SEQ ID NO: 195233 - protein, 690 aa, Oryza sativa
  Clone ID: PAT_MRT4530_91200C.1.pep
MTKPPSKTEVEPSNVILVTLEDFEGEDHKAMEEYINELTREALMRASTRTRQGVIIKPGPRPKLAPDLVSNDEVTQSIQQQVASTIDSSMISFKDKLDATFEGKFDEFLRVKFGPLMADYMSKDKAFTTANQPPIDQTGRKTDGAAHTAGLTGPDGRSYRDLAVGPTGQTAGPTGYYPGGQTGTQAGPTAPLDAGQTRPWAGQTGTIIPIQGIDPMTNASYLYHLRTFDPPISTATSSPQVPPHVPNAYNDVARGYPPDPRQGQHNHIAPQTQPIRPPNPPPNQHGPNNMEDIISEIIRNRFGIETRNRARIYKKPYPDYYDNVPFPRNYRVSEFTKFSGEDGKTTWEHVGQFLAQCGEANSDTFKLRLFSLSLSGNAFTWFTSLPANSIHTWAQLEEKFHDYFYTGETELRLCDLTSVKQKYNEPVIDYIKRFRDVRNRCYSLNITDRDLAGLAFNGLIAPLRERLDGQQFLDVSQLMQMALAQESRVKDNKKLVRTYDKKPNVNVIDYPEASDSEEEGDHDIYVAEWSWTNKNKPFVCSNLMPTPRKDWQSEVKYSFDVAKCDKIFDYLLQEKQIRLPKGHVIPSQEELKRRAYCKWHDSHSHSTNDCNVFRRQVQSAIDEGRLKFTDGSKMKLDHDPFPVNTINFNDKELIRPEQAKCAKEKGVVIGEARPNMIVPKKPEVDVWKRE

SEQ ID NO: 195234 - protein, 71 aa, Oryza sativa
  unsure (1)..(71): unsure at all Xaa locations
  Clone ID: PAT_MRT4530_91201C.1.pep
PPWCARXAPXSGARALAAPRPASPGPXXSAXSGSPXAXXXGPPXLPLPLLLISSLLLPRSRWVVAXGCCLC

SEQ ID NO: 195235 - protein, 467 aa, Oryza sativa
  Clone ID: PAT_MRT4530_91202C.1.pep
MAFETGGVLRLLALILLAPLAGVLYYLVSESAGIQVLIFASMAGARVADVEAVARAVLPKFYCSDIHPESWRVFSACGRRCVLTANPRMMVEAFLKEYLGADIVVGTELVVWRGRATGLVRSPGVLVGENKAAALREAFGDASPEIGIGDRRTDYPFMRLCKEGYVVPVSPTPRPVPREELPKPVVFHDGRLVQKPSPALALLTVLWIPIGFVLACLRIAAGALLPMRVVYHAFRALGVRVTVKGTPPPPASRETGQSGVLFICSHRTLLDPIFLSTALGRPITAVTYSVSRLSEILSPIRTVRLTRDRAADAAMIRRLLAEGDLVICPEGTTCREPFLLRFSALFAELTDEIVPVAMENQMSMFHGTTARGWKALDPFYFFMNPSPGYVVTFLSKLPGELTCNGGGGGGGGRSSHEVANYIQRLIASTLSYECTSFTRKDKYRALAGNDGTVVSKPNIDEKKAMGC

SEQ ID NO: 195236 - protein, 63 aa, Oryza sativa
  Clone ID: PAT_MRT4530_91203C.1.pep
PTRPPTRPPTRAVTNFLKKKMHPQIYSKTLYFAEWKYRPKTPGTKRGASSEEMLPNERKSWFI

SEQ ID NO: 195237 - protein, 64 aa, Oryza sativa
  Clone ID: PAT_MRT4530_91204C.1.pep
STYVCFILWSTLYSVEICSSHVTILTFLLRLVFEVHICQSLVVNVVFTIVRLIGHIPKIQGELS

SEQ ID NO: 195238 - protein, 78 aa, Oryza sativa
  unsure (1)..(78): unsure at all Xaa locations
  Clone ID: PAT_MRT4530_91205C.1.pep
THPASKLIELTSYSIYIVDHIRYTTPFHHANXDAXRGVNGRRWFLRWVGHAAGGAGAPHPARQLXSPWTQSAAQVGAS

SEQ ID NO: 195239 - protein, 71 aa, Oryza sativa
  Clone ID: PAT_MRT4530_91206C.1.pep
RTGGPLPPSLLSSLPPPRRDSPPSLLPPAPTSPPPREEGADTSGEVAYAQRRQPAGLRTFRQRPSRGLNDA

SEQ ID NO: 195240 - protein, 107 aa, Oryza sativa
  unsure (1)..(107): unsure at all Xaa locations
  Clone ID: PAT_MRT4530_91207C.1.pep
AVKVNLYQXALLSPFGNINXHSVVYITQXRARVQVVNXHGKTVFNGELRRGQLLIIPTHYAVVKKAQREGCALPLPIPSPSLTSYWLKPTIAKEKKSPFLPRCFFPK

SEQ ID NO: 195241 - protein, 229 aa, Oryza sativa
  Clone ID: PAT_MRT4530_91208C.1.pep
MLQRGADNCVLQWSMARTLTHTHTDREERIIKLGATEVIKTEITTLMVLVINHQRPSDRRAHPTPTSRGVGSRRAEPDLRLAPRGAPGAHHVRHGDRDADHRHRRDGARHAGGHGHGSARRRRRRRRGDGGGGSGDRRRGLRLGGGGGGIGGVERLRELGGLGLAAEEGSHRRRRLGVPLAEVLEAVGLRSDGEERHDAERDQQRAAEISPAGRHLLQPPSFAMQPRIA

SEQ ID NO: 195242 - protein, 157 aa, Oryza sativa
  Clone ID: PAT_MRT4530_91209C.1.pep
MELYIEIAQPKLPVERPMAKYLCQRVCPVDNSLVRIGDRVLSTLALLGNYYKASDYITNLKRYGFMEAFVGDMSSAEAEELENFYRPLSICRLKDDQIESLVRNKDWKVIEQRIEKKLSSWKGNLQGNILAPVLGPATKVRVLNVWLNYTLFLSATL

SEQ ID NO: 195243 - protein, 45 aa, Oryza sativa
  Clone ID: PAT_MRT4530_9120C.1.pep
QAIAPTQVLEIYIFIYLVIPYPHRQRKRIPPHYKRLGSFGMGGEG

SEQ ID NO: 195244 - protein, 48 aa, Oryza sativa
  Clone ID: PAT_MRT4530_91210C.1.pep
ILGAPFRHFHSLSIRQVTYDMLVDALLEVCTIISSYYSNFPEDILLDL

SEQ ID NO: 195245 - protein, 62 aa, Oryza sativa
  Clone ID: PAT_MRT4530_91211C.1.pep
MGDCGQEAWQLHLYRRLAAGAISADPAWHGCGGGGDWRLLTEGEEAAHPDTAQRPTRADLSH

SEQ ID NO: 195246 - protein, 29 aa, Oryza sativa
  Clone ID: PAT_MRT4530_91212C.1.pep
LNKSPPGYRLVVMLCPVSTQLRIQPFFIL

SEQ ID NO: 195247 - protein, 125 aa, Oryza sativa
  Clone ID: PAT_MRT4530_91213C.1.pep
EIDEEKSSALRKTKSMILTNSSACKLKLGDLKGALLDADFALREGEGNPKAFFRQGQARIALNDIDAAVESFKHALQLEPNDGGIKRELAAAKKKIADRRDQERKAFSRMFQPSGGSEKIDEENN

SEQ ID NO: 195248 - protein, 72 aa, Oryza sativa
  unsure (1)..(72): unsure at all Xaa locations
  Clone ID: PAT_MRT4530_91214C.1.pep
GTXSXSRNIGPXVXMAVAXVXGLXVXKLSXXXSVCVCDADXXWSVRTPXLEGXERRSRXYIPXKKKKKKKKK

SEQ ID NO: 195249 - protein, 107 aa, Oryza sativa
  Clone ID: PAT_MRT4530_91215C.1.pep
YARDGEFGVGRHCVLQYQVDKCVCTCVNMFYMNKKVGNFVMLKKKKKKKKKKKKPRDQKKKRANIKKKVFKKKKREKKKKKGAPVFKGPKFTSPGVGGNSFFMGPPK

SEQ ID NO: 195250 - protein, 74 aa, Oryza sativa
  unsure (1)..(74): unsure at all Xaa locations
  Clone ID: PAT_MRT4530_91216C.1.pep
TLTGKTITLEVESSDTIXTNVKAKIQDKEGIPPDQQRLIFXXXXRLXVRRGMXPXXXWXDYLTSXKESTLHLVL

SEQ ID NO: 195251 - protein, 383 aa, Oryza sativa
  Clone ID: PAT_MRT4530_91217C.1.pep
MGPISPVASPKPEIRRPPTPPPPPPPPPPSPAMVVGLAFAPGVPRVVPRRLAAGGHAMACSSSSARFMARRPRLVVVARYNASSSSSYESDEEEEEGFGGGGGWGRRDRGPDPDYDPALDIERIEYGHSPSSLASGFWDLCFSFSAFDVGVVSVSEAVQIADENDLILAILSLDGDPPVLRLFQEKDYKYNIDIHDYSVRLKAARKFLKAGDKDELNKKDTAIEDSDQSDDQPEESEPVPAQPEESKETETEVSANKVENHRQDANVPPCVEGLFLDGLGILLGVKDDIDEAFVGDGEDNVLANRFGGADFSESFEVRSMLLDMALAPSGPSILLAETTCDGAIEEIVALISSERVLGPLETVLLGDCSCDVIDIEGADVPMS

SEQ ID NO: 195252 - protein, 63 aa, Oryza sativa
  Clone ID: PAT_MRT4530_91218C.1.pep
FTRNRPRVLRLLVRPTNNGPIPARIPNLHLESHVRASLYHGYSWQLHESAIGSQPYTQYYRSA

SEQ ID NO: 195253 - protein, 269 aa, Oryza sativa
  unsure (1)..(269): unsure at all Xaa locations
  Clone ID: PAT_MRT4530_91219C.1.pep
MSGRSSDGVCKINRIKMCMPTCHGAXGVKFEKKIMWALRLRWLWYERKEPGNKXETQCDEVNKLLFTTSTKIIVGDSNTTRFXDSTYIEGRRPKDLMPLAYAISKKKGKSLRQGKENDTWVDDLDLEPNPPNSMVLIEQLATLWTVVRSISLDEEEADQIVWKFTNHDQYSASSAYQSXCLGASSAMFDSLIWRAWEPXKCKSHTWLIIQNRVWTSDRLTTXGWKNNGHCPLCHREGEMALHILAQFRYTKVVAWVAYQQLDPSQWEAI

SEQ ID NO: 195254 - protein, 381 aa, Oryza sativa
  unsure (1)..(381): unsure at all Xaa locations
  Clone ID: PAT_MRT4530_9121C.1.pep
EVVCEEVEGDITKADXQMLDKLXPVRYCYTSVPVIDRELPQHITVKLHLRPGHIYNNGAGKQALKNIDSLGLFSTIEVQPRPDETNQGGVIVAIKLKEHDPKSAQASIQPGGTVSFEHRNICGLKRSLIGSVTSSNLLNPEDDLSFKLEYAHPYLDGIDNLSRNRTFKISCFNSRKLSPIFVADRMAFLQANITRDNTEFVNGATIGDRCIFQMDQGLGIGSKNPFFNRHQLTVTKFINLNKQEKGSRKPPPAVLALHGRYAGCVGDLPSYDAFALGGPHSVRGYGMGELGASRNLLEVATELSVPITVKNRHTQVYAFAEHGTDLGSSKDVEGNPTEFFRRVGHGSSYGVGVKLGAVRAEYAVDHNAGTGAFFLRFGERF

SEQ ID NO: 195255 - protein, 59 aa, Oryza sativa
  Clone ID: PAT_MRT4530_91220C.1.pep
MGEFQGEGLPGVQRGARGRGSPGRAGARGKELTGLMKDMWALHAKTTFQTIEGVYLHRF

SEQ ID NO: 195256 - protein, 31 aa, Oryza sativa
  Clone ID: PAT_MRT4530_91221C.1.pep
HHRTSHETDHFCYIKVENEILRRAGPSFIIK

SEQ ID NO: 195257 - protein, 49 aa, Oryza sativa
  Clone ID: PAT_MRT4530_91222C.1.pep
GRTLLKHRVWARTNKQPTLVRGLQSRIIFIKREKERNLMHRNLTRKVLY

SEQ ID NO: 195258 - protein, 424 aa, Oryza sativa
  Clone ID: PAT_MRT4530_91223C.1.pep
MASSRILVIGGTGRLGRHLVTASLDAGHPTAVLVRRPATAGARADSPVKAKLTEELCDNGARLVYGDVNDHDILVAAIKNADVVICAVGHTTPHKLVENQIKIMEAIRDAGNVKMLEPARSILGAKLRVREALRASGIPHTIVCGYLVHGFLLPKAGNPEADGPPREAAEATPTASGERRAGVEAASSGARGRRQLGAAGAEAAAGWRAGKAEGGWGRRQLRAASEARRLAAGGGRQAGAEAARGGARGRRRLGAVGAEARPAAGVEAVARGRGGETGGGRGRRRLRAAGEERRPAVGGGGGADDLRHPGGLAVASRPPRLEHDRSNCLGSGHGWVTVGEVGMLVSVLEKKIGRDLEKCYVPEEELAIKIEASPFPLNFQLAIVHSALLPGVASCGQTAVRVEATELYPDMEYVTVEEYFDSLI

SEQ ID NO: 195259 - protein, 101 aa, Oryza sativa
  unsure (1)..(101): unsure at all Xaa locations
  Clone ID: PAT_MRT4530_91224C.1.pep
HCSCMLQGSRQASEHSTTATTAGIILGDKGSSTPRHTMRQGQKSSSAWIRTTTDEAGRMIKRGEYPXRRENNPRIVGALSHVMPYACRRVLMFESTRSVER

SEQ ID NO: 195260 - protein, 621 aa, Oryza sativa
  Clone ID: PAT_MRT4530_91225C.1.pep
MLADLNVDPPESDGEDQPPTPNPNVNPATAAVTAATVVAIDSSTRSSNDEGSLAKSVITTKEPDTVECEDADQHCQGASVAREEKVSNLKAALVHVARKMPKNAHAHFMLGLMYQRLGQPQKAIAAYEKSSEILLQDEEEVRRPDLLSSVRIHHAQCILQTSMGDTFDEELESGELDEILVKMKSSVESDPRQAAVWNILGLVLLRSGQLQSAISVLSSLTVVAPDYLDSLANLGVAYIQRFERGNLELATKCFQELVIKDQNHPAALVNYAALLLCKYGSFAAGSGGNVSAGSCLHQKEGLAVAKECLLAAVKADPKAASVWVNLANAYYMAGEHRNSKRCLEQAAKHEPSHMPARYAIAVHRIRDAVRSQCSDDQLLWASNEMATVLKEGDPSAVDAPIAWAGLAMAHRAQHEIAAAYDTEQINLSDVEERALYTLKQAIQEDPDDAVQWHQLGLYNICTTQFSRSVNFLKAAVARSPDCSYVWSNLGTEPCSFCGTYELMSPSPKCIALQLSDDSSCETVYKRALILSSSQQSYAILSNLGILYRQHGRYELARRMLLRSLELCPGHAPANNNLGLVSIAEGRYEEAISCFEKSLQSDPLLDAAKSNLAKVLALSKKQ

SEQ ID NO: 195261 - protein, 82 aa, Oryza sativa
  Clone ID: PAT_MRT4530_91226C.1.pep
TKDKRCPLTRALNMNSIHNVERRNGANSEADSTWWLWTSHRFTGHSIRNCSFIWFPWNLTKLLPFVQRTIRALELVRQLYKL

SEQ ID NO: 195262 - protein, 175 aa, Oryza sativa
  Clone ID: PAT_MRT4530_91227C.1.pep
MEMWFSSLAIFATGPSEPGRKQGERSKPSNSRCLGHWLWRPRQGADGIAPLLVDAAPTALHWRRRPRRLRLHRCAQAAARAARVRAESVTWHSGHDVSVRDAIDALPTFAYEPASVMEKDGVSGAALRVVCLIRTNYHAIDALPTFAYEPAGVMEKDGVSGAVLRVVCLIRSKRT

SEQ ID NO: 195263 - protein, 106 aa, Oryza sativa
  unsure (1)..(106): unsure at all Xaa locations
  Clone ID: PAT_MRT4530_91228C.1.pep
VVFGWLLLMNRLNTKYMLDHKHYTTPNCDLPCVLCSSQSVEDLLHMFFLCSFSASYXNSLGIIWDTSLSFDHMLLQTKCTFQNRCFMEIFLLGAWNIWKQRNDYIF

SEQ ID NO: 195264 - protein, 545 aa, Oryza sativa
  unsure (1)..(545): unsure at all Xaa locations
  Clone ID: PAT_MRT4530_91229C.1.pep
MKNEPQLMASGREESPRERREAHEMKRKLKERILELEKEEVPLPDDASAFVHHLSRLPKRYLFDLGVDRVDDVLLHWRILTHCAHPQNRPVFHARFQKSIPLPDSDFDPCQRLMEDLSLERRRRNDTGDNTGSXTLEDNKAYKFLSKTSQDRAMFKDIFVSYRYPKTKLIHEIIFSSLDKPKLLSRLTLLLSEVGLNIREAHVYSTTDGFCLDVFVVDGWDTEVTXTMPVSTSIYKLSVITSSHFTHTDNILQQQVGDSEIDWNLLTTGEKIATGSSADLYRGTYNGLDVAVKILRDSHFNNPSEVEFLQEILILRQVNHENVLQFYGACTRPQKYCIVTEYMPGGNLYDFLHKQNNQNNVLDLLTILRIAFSISKGMNYLHQNNIIHRDLKTANLLMGYHQVVKIADFGVARQGNQEGQMTAETGTYRWMAPEIINHKPYDNKADVFSFAIVLWELVTLKVPYDNMTPLQAALGVRQGFRLEIPSSVNPRLSKLIQRCWDEDPDVRPVFAEIVIELEDILQHAQANSRGASRRSRAKIQKKSPR

SEQ ID NO: 195265 - protein, 815 aa, Oryza sativa
  Clone ID: PAT_MRT4530_9122C.1.pep
MRKEKIPHQAPFAIQAAQLLGRAIGAGLFAITPAGERGMCCKAIKLDIDECKERTACQCKECKCKNTWGSYECGCSGGLLYMKEHDTCISKNAATEVGWNFLWVIFFGLVVAGIAGYAVYKYRIRFCLVLAEKEKSGIPNINWLRDRLFRSIRRRRRRGALAPLAPTLTTAIAMPSCFTLDSASDDGRSTAQGQGWPAGVGGFLSGFFSAGAARADGGKPSPDWDAHGLAASALPVPLSRLDGKKRYKVSDLTFLNCRTRAAAAAAAEAPLFDALRPGGVYTRAQLRDELDALATSGMFDHVTLQTKPKPDGTLGLTVSYAETEWPAVEHFKCINVGGPMARPDGDELELDDDMTARERMEHLRRQEREYQQLVRRAKPCVLPEKLQRELQGMVKRQRKVSSGLLKRMAGRIERWYHDEGFHCAQVVSYHGNLDAGEVVCEVVEGDITKVEYQFLDKLGNVVDGNTSIPLIDRELPQQLRPGHIYNNGAGKQALKNIDSLGLFSTIEVQPRPDETNQGGVIVAIKLKEHDPKSAQVITDWSIVPGSQGRPTLASIQPGGTVSFEHRNICGLKRSLIGSVTSSNLLNPEDDLSFKLEYAHPYLDGIDNLSRNRTFKISCFNSRKLSPIFVAGPNMYEAPPIWVDRIGFKANITESFTKQSKFTYGLIVEEITTRDENNNICTHRSRQLPSGALSMIGPPTTLSGTGVDRMAFLQANITRDNTEFVNGATIGDRCIFQMDQGLGIGSKNPFFNRHQLTVTKFINLNKQEKGSRKPPPAVLALHGRYAGWIILWPHSFQSDLAALLPYSAGEIWRLPN

SEQ ID NO: 195266 - protein, 144 aa, Oryza sativa
  unsure (1)..(144): unsure at all Xaa locations
  Clone ID: PAT_MRT4530_91230C.1.pep
WSAFSSPGSTLLPPLRWLVCGFAPPSPVWAARPAWFFSVSSTRVGVGRRCLAAFHPAWPGVPLLCLDGARLPATAASIPVGLADLPPTPESVASCAXLYSLAATRPRLSGFHLGVLPLVPGIGFLRSGLPSVRLLAPLRPIPGF

SEQ ID NO: 195267 - protein, 132 aa, Oryza sativa
  Clone ID: PAT_MRT4530_91231C.1.pep
PSLPGLHLEPPTTTSLPFLLSRRLLSDDAGPPPAADVPNKEFFLRLETYYGGDEEAELPSATEAVLERKLAEGHRETAEELIEELGSKPLPEVRDRNLESDFEERPDPEEERDTWTTARRLGGKRTREDKSL

SEQ ID NO: 195268 - protein, 323 aa, Oryza sativa
  Clone ID: PAT_MRT4530_91232C.1.pep
MCSAARGVRRHGSPVIIAWAILFFSIASLSLSEAQLQVGYYNYTCPRAEDLVRNVVRAAILRDPGNGPGLVRLFFHDCFVRKKNIRYEQEPCNCSLRFKVRGPLIFASRGAAAADERIAFFSGGGGDNTSTEGWAERRGGADEAEAGTEPNEDASMIGNGYVEEDTKDGKRAPELPRVVMGSSITTPSPRTSRSASWSSTPSSRLVPERSLVAISSTPPTLPPKVHPRQASFVGAALHDYDRCSGAAPAPRTTSGRDERRRARLRVLKNVRDFMSAAPRREPKRAAGSLAKRQAMRSRASASAGPHDLTVTGSATNRRGTTAT

SEQ ID NO: 195269 - protein, 67 aa, Oryza sativa
  Clone ID: PAT_MRT4530_91233C.1.pep
VCHEFCNGFLVRRFCCYGEPITVRRIIFAYTPKKRGKFVGPPTNAVMQLLLKKYGGVMGIFWKINSL

SEQ ID NO: 195270 - protein, 58 aa, Oryza sativa
  Clone ID: PAT_MRT4530_91234C.1.pep
IFNSLPKKPFTRFYLNFKTLKSLTQFQLSSRSINQKPEACLALISNSFQLKPHKAQLD

SEQ ID NO: 195271 - protein, 149 aa, Oryza sativa
  unsure (1)..(149): unsure at all Xaa locations
  Clone ID: PAT_MRT4530_91235C.1.pep
SVRPSWQPCCFWALWPVPAPTPSAFPPEKSTPSRTTWPTAPDSSSAPWTRTVTRXSMLRMPAPPPSSWSSTCPASPPRTSSSSSSSPTRTPTASSPAASSSRASLTACPRTRRLRSRSPPPSPSSSPRLRSTLRLMPRRRVSSEPSAVV

SEQ ID NO: 195272 - protein, 108 aa, Oryza sativa
  Clone ID: PAT_MRT4530_91236C.1.pep
FSHACNTSCSEAFPCCCLICHLYTNYFTTVINNSIHQTFIMGKTFISVDLSDEFFRALQCARANEQTERCYSHLSFFFFLTNSSNCRKLYLDVDMNRDASGHKPKKKK

SEQ ID NO: 195273 - protein, 241 aa, Oryza sativa
  unsure (1)..(241): unsure at all Xaa locations
  Clone ID: PAT_MRT4530_91237C.1.pep
GRGQPGPAPSSSPSSLHSSXPPAASPSPPAXRSSCPTSPSPRSRISTSSPCSMSRASSTSSPFPPSAAQPSSRSPSRRRWTTMGGSATSSRISGASGASTTSSPTSRRGSSPCSATTPTTRRPSAISVHAGTQSTTCHHLRPCPPSSSARSSMSTACASPSTRTASSSAPSTPSASPRSTSTSSSRRWSRRDGSARRSPLCATSLASPTSSPISRIASSPGSSTTTPTQPSYASSAPAGVG

SEQ ID NO: 195274 - protein, 115 aa, Oryza sativa
  Clone ID: PAT_MRT4530_91238C.1.pep
MATLKMGRREYLMLQTRHSRTLKINEILLGCLQYKAYKSRKFGLSSVTLFKKKDYCNEIPNKWPLLTREVKGFTTSEQGLQNRQQPCGYRAYDGFATVTMVTVLTVGACNPGPDG

SEQ ID NO: 195275 - protein, 217 aa, Oryza sativa
  Clone ID: PAT_MRT4530_91239C.1.pep
MTKTGGWRRRRRGGARQQWRPPPARIQRRRTSAAQIWQRRWERVTVRTADPATVTATRGRRRRQRLGVVIQIHPLLCPTPTAAELYESELKFLAAGFQLSGAAGAAQPPPLPPPPPQPPPPPPPPPPPQPPPPPPPPPPPPVRLLRPPEPSAQLNTTNATIATAATKTSAMPTTLLLTSGTEPPAAAVKPRPRPASTASLPMVIYRSSCRLLVRSGG

SEQ ID NO: 195276 - protein, 629 aa, Oryza sativa
  Clone ID: PAT_MRT4530_9123C.1.pep
MALRSPNSMLWLALLVWAALLCGSCHGRFVVEKNSLKVTSPSDMKGTYECAIGNFGVPQYGGTMVGVVAYPKANKKACKSFDDFDISYKAKPGSLPTFLLVDRGDCFFTKKAWNAQNAGAGAILVADDKTEPLITMDTPEESGNTDYLENITIPSALITKSFGDKLKKAIDNGDMVNVNLDWRESLPHPDERVEYEFWTNSNDECGPKCDSQIEFVKSFKGAAQVLEKKGYTQFTPHYITWYCPDSFILSKQCKSQCINHGRYCAPDPEQDFSKGYDGKDVVVQNLRQVCVYKVAKEHGKPWLWWDYVTDFAIRCPMKEKKYTKECADGVIKSLGLDHKAIDKCIGDPDADKENPVLKAEQDAQIGKGSRGDVTILPTLVINNRQYRGKLDKGAVLKAICAGFRETTEPAVCLSEDIQTNECLENNGGCWQDKAANISACKDTFRGRVCECPVVKGVKFVGDGYTHCEASGSGRCEINNGGCWKDSRHGRTYSACTNDGCKCPDGFKGDGVHKCEDIDECKERTACQCKECKCKNTWGSYECGCSGGLLYMKEHDTCISKNAATEVGWNFLWVIFFGLVVAGIAGYAVYKYRIRRYMDSEIRAIMAQYMPLENQGDFPKNFHHIRRCEE

SEQ ID NO: 195277 - protein, 42 aa, Oryza sativa
  Clone ID: PAT_MRT4530_91240C.1.pep
FFFFFFKQTFGEPLLSHWVIRNQTSTHPSGPSLGGGDYISHY

SEQ ID NO: 195278 - protein, 518 aa, Oryza sativa
  Clone ID: PAT_MRT4530_91241C.1.pep
MATAWPRWRPSSPPMPSSSSSSPSSSFTADPPAEFLCPISGTLMADPVVVPPGQTFERACIQACAALAFSPPAVAADLSSLPPSASSPLVLVPNVALRTAILNWCDRLSLPYPAPLSPDTARDVVRRLMPSPPPPPPRSQAPPPPPPASSVRTRSYYSDDLVQQQQEARREGGSTEERIMAMLGAGPAEQEAAMALLRKMARENREMRRELCTPRLLAALRPMLLSGDAGVQVNAAAALVNLSLEAENKVRIVRSGAVSPLVEVLRSGHPEARDHAAGAVYSLAVEDENRAAIGVLGAIPPLLELFACAGAAHLARREAGMALYHVSLSGMNRSKIARTPGVVRTLLAAAEAARDDRANEADAAALRRIAVMILANLAGCPDGRTALMDGGAVAAVVRLMSSGSAAPGSAEEEYCISSLYGMSRGSLRFRGLARAAGVEAALTPVAEGAGGVGRDMARRTLRAMRGEDDEAAVTATGLLGRQWDDGSVVSEGLVSIRRPPPRRSSYGAGASGSNTTQF

SEQ ID NO: 195279 - protein, 86 aa, Oryza sativa
  unsure (1)..(86): unsure at all Xaa locations
  Clone ID: PAT_MRT4530_91242C.1.pep
PLFSLLLFDPTIFNFPNMTTIFNLLKIITCPXVCRSKSPHQIRPNLSWSTKIGRGFXIHSIYSFRIPQNQSVKLGIKMTGEHYRHH

SEQ ID NO: 195280 - protein, 101 aa, Oryza sativa
  unsure (1)..(101): unsure at all Xaa locations
  Clone ID: PAT_MRT4530_91243C.1.pep
MGDGAVGRPPSGRTGEXSDIKWTTVNXLKFGGLIPRGGIPVGRDLTSRFGRDHTRCKNSPGEVSTVVSMLLPRVPMARFKKEMPVLLNKDDKKSLTIMSSL

SEQ ID NO: 195281 - protein, 78 aa, Oryza sativa
  unsure (1)..(78): unsure at all Xaa locations
  Clone ID: PAT_MRT4530_91244C.1.pep
TSHGTCPCKRGQSHYQAFVIVQSIVHQVHXNSSGDLSFGRNLVQVQALLAFIAPSRYGFYPRFYGAPSTISPLGGVFH

SEQ ID NO: 195282 - protein, 196 aa, Oryza sativa
  Clone ID: PAT_MRT4530_91245C.1.pep
MSSSLLYLFHPPPLFLFTRVGRGPAAAAVKDGRARAGAGAKSSAAAADGGRSGGGRRTHGALERVPKRRLHDIISLPVNLDHAKPSHCVVDFASSSSPFPHKNPGEWRTEEGDRLRLLQLRPLASVDQAVAVHPGGSCRRRARFRRRDGDGAMETDPPPPPTRPPSVAAANPTPVRRRRQCLCGPCSCEDKRGRKR

SEQ ID NO: 195283 - protein, 107 aa, Oryza sativa
  Clone ID: PAT_MRT4530_91246C.1.pep
SDTALFGLGKPRTLAEFIDDASNLHLIFHSQIPEDLTVWDVVKGDVAIVASKMKSMTERLLEELKIALRLLMEDIDDQSHVEQLVRLQKHVEIRPDLTSATLLTAHH

SEQ ID NO: 195284 - protein, 613 aa, Oryza sativa
  Clone ID: PAT_MRT4530_91247C.1.pep
MEGGGEALFLDGVGEVTVAVGDDGLSFQPLHQDGVRKFVASGLRVLESKKRKEVSSSCWSSIIMQPKLESKLKFSDVYAVELLEVGPVCEPWNARATVQGKINTEMNRFVIHTVTRPRKRPSPWVPCEYIFGHKDQQTCKTWVEHIKTCINKEQDRPKSLMVFVHPLCGKGRGCKNWETVAPLFERAKVKTKVIVTQRAGHAYDTLASLSDKDLKKFDGVIAVGGDGLFNEILNGLLSTRHTNSYPPTPEGFGYFRNNMKCQEHRNNDLSNSELTGDDANAISGSSNTPDDHEPLLSTTRSTGLDISSSDSSDEPCNGDQVPLVSFPNNWFRLGIIPSGSTDAIVLRRISLDIAQVVRWKSSPSAEVSPTVRYAASFAGSYEAKVAFLENGNTHSLTASAENNANGVQTLQYHQNRHRKTICRTNCLICKGTSTSEQNSEDENPDSSRTACETPKWVWSKGRFLSVGAAVISCRNERAPDGLVADAHLSDGFLHLLLIRDCPLPFYLWHLTQFTKKGSDPLSFKFVEHHKTQAFTFISSHDESVWNLDGELLQACEVSVQAFRGLVNLFASGPEVPKCRSSFGLKQTIAKGPGVLYLYAVQKFLFDTLLLFFL

SEQ ID NO: 195285 - protein, 432 aa, Oryza sativa
  Clone ID: PAT_MRT4530_91248C.1.pep
MGLAGGIVRRVFSKSPCSSAGGGGRGCHNERGSADHKRRWSSLRLYLCGDEISAAAEDENDDDDDGTVSVKSFETCAMPQEPQAAALTVARPANGVDGVADAGGHPEEHGSMSIPIKDIAPPTAAEPATDSQVEAATMIQSVFRGFMARRQLQKLKCSENGCCTTDEPRSPTTASIAASVEVQVGESLSNLRLSDDSAAAAATSAQHRSSQRSRPQAFRVKEEWDDSTVSSNVSRMRMQSRIEATTRRERALAYAFSQQLRSCGGGGGGTTKKRAARSDQAEYNVGWSWLERWMATRQASSEASADDCMSKNAADAGSTAAAAGGRRVIVVRRRHDLGAGAGEEKESCGSNDVSVVSFDGSSGSLSCYKPGSKSRLRGGGRSLPRRKVASSDHRLHARSHKVSKKVHRRDQEQEREEAAAEAYDGNQPPTDY

SEQ ID NO: 195286 - protein, 133 aa, Oryza sativa
  unsure (1)..(133): unsure at all Xaa locations
  Clone ID: PAT_MRT4530_91249C.1.pep
MEGGGEALFLDGVGEVTVAVGDDGLSFQPLHQVYAQPHPPLPFCXDGVRKFVASGLRVLESKKRKEVSSSCWSSIIMQPKLESKLKFSDVYAVELLEVGPVCEPWNARATVQGKINTEMNRFVIHTVTRPRKR

SEQ ID NO: 195287 - protein, 92 aa, Oryza sativa
  Clone ID: PAT_MRT4530_9124C.1.pep
FKKNQIWQKLALGGQQFPYQDINIVWGKGQQVKIQQVGEFYFERKLGQSQALLAFNGPSKNGISPRGKGGPRTITPPGGVLKKVLTEKGVGS

SEQ ID NO: 195288 - protein, 202 aa, Oryza sativa
  Clone ID: PAT_MRT4530_91250C.1.pep
MAAASHAPRSVVVSSSSPAAAIATAGCVVDTNTTFVQADPATFRALVQKLTGAPGSGGSKPAPAAPVMRRPKLQERRRAAPARLELARPQPLYYSHHHHRLMHSPVSPMDYAYVMASSSSSSSSSLPSSSSSLSPSPPASSSSCGVVVITKEEEEREEKAIASKGFYLHSSPRSGGAGDGERPKLLPLFPVHSPRSSSFARS

SEQ ID NO: 195289 - protein, 134 aa, Oryza sativa
  Clone ID: PAT_MRT4530_91251C.1.pep
MDTLDMQTGQIQHNLEEHIVQTQGWQQNADAQFTNINNLMQQQHNVLQAYFRFEGHRRLLLLYTLQEQLANSECYEEVMLKEMANMRETGTRPFGDGDGAAFRPVGWAGTGPHIYAGPGPGEGFHPRVPMEPRN

SEQ ID NO: 195290 - protein, 221 aa, Oryza sativa
  unsure (1)..(221): unsure at all Xaa locations
  Clone ID: PAT_MRT4530_91252C.1.pep
PASPHTSPPPPAHSHARARARTHHARTRTHARPRTHATHARHARTHARTHAPPPPPPAPPTSAPXRPASPTARHHAPTDSKAPPPPHPPPRTRTPAPPPXQPSHPPPTHPPPTPPTRPHRARRTDPPPRPAPTPPRPXXPPAAPTPPRAPPRPPTTPTAPRRRRAQPRTPAPQPPPPSRPASPSPGPGAPXPRPPPPRGEPNGPNQLMPCLTMEYPAPAQI

SEQ ID NO: 195291 - protein, 52 aa, Oryza sativa
  unsure (1)..(52): unsure at all Xaa locations
  Clone ID: PAT_MRT4530_91253C.1.pep
PTSWSVSRHGVGHPCARPQRNTNSRCVVSXYRVVRQVKFCGIVDGPKKKKKK

SEQ ID NO: 195292 - protein, 107 aa, Oryza sativa
  Clone ID: PAT_MRT4530_91254C.1.pep
METPNIHKSASKNTQIWKEENDTDGDDAQIWQPMNHRWEVVRRAIVEAAHYLLGPVERRPPATVEATGCRRDRPPRPHSWEAACDIREPTYRSLLWRLRPRRFVYRF

SEQ ID NO: 195293 - protein, 36 aa, Oryza sativa
  Clone ID: PAT_MRT4530_91255C.1.pep
SEDASESLAVPLAGSTTTALVVVVSLLGGVVMAFFH

SEQ ID NO: 195294 - protein, 361 aa, Oryza sativa
  Clone ID: PAT_MRT4530_91256C.1.pep
MAGGDQAAAKPPTTLTSAPLPPFAAARCSPAVMAAWPSPWLPLLLVGALLAFEDWLATPTCSGGSTAPAPAPAPAPGDLRVMMVSDLMLLGSDATYADRFFRNHVMSKLFAKSIETLRPDMIVVLGDISAMGFQLKESKWIDVIDQFKGILGQYSDLPLHIALGDKDVGGCANLDDSFVHHMAKHLPGLDSSGCGTFEIGNVSFVSLNSVALLCGNNPLRISVEKVIEKENNHFQQKMVNEAGHFSLGSIEREGFNWRQNSMESGSGPVVLLHFPLYKFSEGTISEPPVSSSLKERGADGRRSDQLHALPANSTQYVLQALKPRNTPVVLNPDHISVSTGLYLVPMIAVSQIILTMMGHGR

SEQ ID NO: 195295 - protein, 83 aa, Oryza sativa
  Clone ID: PAT_MRT4530_91257C.1.pep
TKEFFLSRLEFKNPKEKKNKKKKKKKKKAEARPKKKATKGKPMKGKGPKPASFELYQPRGVLPLPIQATPPAIRASFSSLKSL

SEQ ID NO: 195296 - protein, 62 aa, Oryza sativa
  Clone ID: PAT_MRT4530_91258C.1.pep
SSGVALYSKFLKRLCVHSLYFVVFKGKTPSYFSDCYVVFNCYVSMCSLKDIINTLVAVDSFY

SEQ ID NO: 195297 - protein, 153 aa, Oryza sativa
  Clone ID: PAT_MRT4530_9125C.1.pep
HCEINNGGCWKDSRHGRTYSACTNDGCKCPDGFKGDGVHKCEDIDECKERTACQCKECKCKNTWGSYECGCSGGLLYMKEHDTCISKNAATEVGWNFLWVIFFGLVVAGIAGYAVYKYRIRRYMDSEIRAIMAQYMPLDNQGDVPNHSHHIEL

SEQ ID NO: 195298 - protein, 63 aa, Oryza sativa
  unsure (1)..(63): unsure at all Xaa locations
  Clone ID: PAT_MRT4530_91260C.1.pep
PAQKEKRKGPFFPPSKAPPPNPGGGRENKQIKPRARKKPPKXKGISGKGGKPNPGPPPNPGPP

SEQ ID NO: 195299 - protein, 134 aa, Oryza sativa
  unsure (1)..(134): unsure at all Xaa locations
  Clone ID: PAT_MRT4530_91261C.1.pep
SSCHLPSASPPPPSGQPGAASPXVNPPWHRLPPPSPGEPAASPPARSGGREASPAAAASRRRNGPMPSPPPFLPPDLAEGGASGPPPLLHECAWPPSSSSRDHPPRASQLHSSLVSFMNSMAAAHSRGFRMTAA

SEQ ID NO: 195300 - protein, 59 aa, Oryza sativa
  Clone ID: PAT_MRT4530_91262C.1.pep
RRLVSSCECAAAAATSRLQLANVCPSGSGEGRSSCGAPQRIAPPLPTKFASCRIPAARG

SEQ ID NO: 195301 - protein, 76 aa, Oryza sativa
  Clone ID: PAT_MRT4530_91263C.1.pep
PIQGQDVIYSIICLCGLHIMPMASQDGVSVRLGMIALQRKVLSPIRTGSVSAKKSVAILPKVTVPACFDPEPVHPI

SEQ ID NO: 195302 - protein, 480 aa, Oryza sativa
  Clone ID: PAT_MRT4530_91264C.1.pep
MAGRAPAVAIAFLVLVVMPGMASAGKIPRFLPQQQPGRDGADHGSSNAPSPPTPRRARHAPATTAVTYSVAFAVGSQQDFSGALDVTSEFVWVPCCATGNSSCGTNNNMPGVTVYDARPEELYKCESDTCQRIIKPTCNTTGDLCEYTYTYGYGGDDGRETTGNLAVQNFTFGDDSEDTAVKGVVTFGCSSSTEGDFGASGVLGLNKGNLSLVSQLNLGRFSYYFAPEVNTTDNNAADDFIVFGDDDGITVPGNSGGSRPRYTPFFTTGAVRSANLDLYFVELTGIRVGGKDLQLGGGGGGSAGGSLEAVLSTSVPVTYLEKNAYGLLKKELVSALGSNNTEDGSALGLDLCYRSQHMDRAKIPDIAFVFGGNAVMKLQQWNYLYQDEDTGLECLTIPPSPDDSDGLSLIGSMIQTGTYMIYDLHKSRLGFQTSDPPPSQSSDLPSNPTSSATAQPKPRGVAVAVVTMACFVWCLVVLNA

SEQ ID NO: 195303 - protein, 34 aa, Oryza sativa
  Clone ID: PAT_MRT4530_91265C.1.pep
VIIPVPFSRVLINSHSICGDVLIQHKHCTGQCFI

SEQ ID NO: 195304 - protein, 101 aa, Oryza sativa
  unsure (1)..(101): unsure at all Xaa locations
  Clone ID: PAT_MRT4530_91266C.1.pep
QAXXGAKIRYIEMEKLAYALVMASCKLKHYFQAHKVTMPSQYPLGEVLRGKEITGRLSKWAAELSPFNLHFTQIPQSKSEMVLFGAPEWLAPLSNWTAPAS

SEQ ID NO: 195305 - protein, 165 aa, Oryza sativa
  Clone ID: PAT_MRT4530_91267C.1.pep
MGDVTTKEKNVIVTAYEEVPPAPRRRRPGSGRAGATSSSSSTTTAEVTTWQQAKAAPAAYQAGVAAGARYRGSNRRALLLAYAQHLRRRDQRGASGERPRVLMEWGKWKTQGHPGAGAGGDAVRRRRSLYCRFRLWTRAFLRRVRRIGENALCKNKEISQPANVG

SEQ ID NO: 195306 - protein, 128 aa, Oryza sativa
  unsure (1)..(128): unsure at all Xaa locations
  Clone ID: PAT_MRT4530_91268C.1.pep
IQADVAIATTDTTVTHIMDEQDXIKIKSSKCCNSIRLTLLNSIGRRICIQPPFLTREYLMERSRSPLSNGSGLISKFHPSHPQMKKXGAASPVMGLWACNFVWDPGPCGAHVGCTPTRWSTTLGTIKF

SEQ ID NO: 195307 - protein, 93 aa, Oryza sativa
  unsure (1)..(93): unsure at all Xaa locations
  Clone ID: PAT_MRT4530_91269C.1.pep
AGSSYRPPFLLFFTXFYPFILSILHLQPAHFILTREGHXXXSINELPHYSSLIXXATLSPGYAFPFYTFILFCSVVFLXXXSTSTTTPPTLPL

SEQ ID NO: 195308 - protein, 471 aa, Oryza sativa
  unsure (1)..(471): unsure at all Xaa locations
  Clone ID: PAT_MRT4530_9126C.1.pep
MAAEAGLAREARAAEREAGLAREARQMEEGRIGGVLGFGEGRRGACARFAEDALDPVAAEVARTWRLRGCHAGRWEVDDDVGWNGRRTAVASGGANHGDTGESEHTGRLHRTRGDEPTARIRRGMLDGGGLRRRQPAAREGGNGNGAMGDRFGRARASTRLRESVASVGLGGATPSEASDERALRSTGGDGGEHTASGSNGRGGASLLRGGYSSYYPSLRGGDGTRRENGGRHYRAGRAPAPPAHATAAVTAGAGQRXDGNGAGEKRGRLGGKKGREGAWVYXATKSVWEXEPTLDGQASDRALGASGQIVHREEGNDAGEGREKGKRKEERKEGTVATRQRXGGALPPSLGXSARSGEGRVNDDGDDGGGGLERSDDTGGRRGXQARQALTAAASGRSATMAXARAGSNGRRRDFAGGELAGMEAGRGRARGRRSARLTGRAGREGERERERDXEMGREEFGPSNLREAK

SEQ ID NO: 195309 - protein, 71 aa, Oryza sativa
  Clone ID: PAT_MRT4530_91270C.1.pep
LSGQPFHRAGRDLLSVWLSLSLSLKMQEHQNIPRFEASIDRCLYLCTYQSVYPPRPPLAKSPVGDKFRPMR

SEQ ID NO: 195310 - protein, 117 aa, Oryza sativa
  Clone ID: PAT_MRT4530_91271C.1.pep
MKLSSLSPTSSSTRSNEPEACCHYPKLNRGKRGTGRGDGGHHSCAADGGSVTPEAIGGGSTALEASDIVQSARGSGSSLSKSRSHKRYCRHSPHTSAMARRRHPSPATKPLPATCSP

SEQ ID NO: 195311 - protein, 640 aa, Oryza sativa
  Clone ID: PAT_MRT4530_91272C.1.pep
MEELMAPKKRELLLLERRGSEKRLRVTVPVAAAAAVAAVGVGTAALASPATRMLRKIVLVLLFLLRMSERVTVVESISQIGRMVQRLHNAQGVIIKKLENIQENMLERMENMQERMEDISHEVKQLKHLHSNRHADQHPGLEPNTNVQLRFLDNLKTPVYTEKNITAESNEAIRIGIFEGDNMITDGPLSKVKVEIVVLRGDFSNDGRVSWTEEQFNNHIVQGRNGQGFVLGGDCGVWLKKGENRLGKIRFKEGSSRTRSRMFILGARVCKSENTGVRVQEAVMKPVTVLDRRNEANEKRHPPMLDDEVFRLEEICKDGTYHKRLQKAKIFTVHDFLKALNTNAKKLREEVLQMKKKTNSWDKMVGHARECCLRDQHELKAYQSEEENATLFFNGVHQIVGAKFGGDYVIYENFDPAQKTKVNKLKDRAHAKLDDIPSDFVMKNNIPEPISPTSAAAAGPSNRSDHQMPNQGTIGAENLCNGVAFYSNAICDCSTSNPNDVSTHDYPDQAPTPFPDWQQDLQRLMSSSDTIDWPSFERIVLGGTSEESSSAQHQVHQLHESMPPATSPWVAAPQSRAQHGEEPSRSLVIYGVFVMCNCKSVTMQVGAHLYMETWSRFFTFIGSSRYNATSRVHVFWVIIL

SEQ ID NO: 195312 - protein, 101 aa, Oryza sativa
  Clone ID: PAT_MRT4530_91273C.1.pep
KVPGWGGVGWGGVGRGGGGREGSSPALEGWPWEAAAQRWAADRAGGEAAAPPPKPRGWRTAAGRCRRRGQSGKSGRRRRPVVAPRRRRRGRRRTARRRRLS

SEQ ID NO: 195313 - protein, 178 aa, Oryza sativa
  Clone ID: PAT_MRT4530_91274C.1.pep
MSASSPVAYDANVLLAAVTALSAAIAFVAALHLYARCLLRRRVAGAGAGAAGNPHALRRPVTPGGNYELEVISVAACALEGGGLDAKQLGALPVFTWGSSSPATAAADAAVQCAVCLGEMEDGELGRLLPACRHVFHAECIDTWLAVSSTCPVCRAAVGAAEDDEPAAAPVAGVSPAS

SEQ ID NO: 195314 - protein, 387 aa, Oryza sativa
  unsure (1)..(387): unsure at all Xaa locations
  Clone ID: PAT_MRT4530_91275C.1.pep
KNILLESPSHHILPQMLNSPLLQQTADLVKDYLKFMDDHLKESADLTCLAYRPRXYSKVIEFVQFKERLQHSMQYLSVRSDSIILSLKQKAESLDEVESILENVNHGARLVELSNEDNVKRFTFNEDLQARPWWTPTTSVNFLSEPFDEGSTPACFRAKACEHKSTEKDDSKIKYAERKALLPRLVYLSMHGCASSLRETQLNGSGLDTDATEMKPLLLKYARSIGYSIDDALSVILGMSSGKKSVKDFTPDIVSWMSFAVFINAWNLWSNESVVPRADESSPSSWQIVDSLVKICVEEQLIDANRILTSPGNNIPVLVQMITEPISWHLVVIQSCVRSMAPQGKKKKKVGPSVRPKGPAGAGDSHGPGTGLLAPRHHRSNPGYLTR

SEQ ID NO: 195315 - protein, 62 aa, Oryza sativa
  Clone ID: PAT_MRT4530_91276C.1.pep
PCSIIAGKDKHGGDSRIHARGGAWRNITHLANPLLNCATYLWNGLHHTFRGYVSGWIAWECS

SEQ ID NO: 195316 - protein, 78 aa, Oryza sativa
  unsure (1)..(78): unsure at all Xaa locations
  Clone ID: PAT_MRT4530_91277C.1.pep
RINLTXXLIYLHIQNYINQXIITLHNFNLYKLPSINIIYTNTQHLYLKKINISPPIPFIFYTTQHLNIYSKITQHLTF

SEQ ID NO: 195317 - protein, 185 aa, Oryza sativa
  Clone ID: PAT_MRT4530_91278C.1.pep
MADGPGSPGGGGGSHESGSPRGGGGGGGGGGGGGPRVRQDRFLPIANISRIMKKAIPANGKIAKDAKETVQECVSEFISFITSEASDKCQREKRKTINGDDLLWAMATLGFEDYIEPLKVYLQKYREMEGDSKLTAKAGDGSVKKDVLGSHGGSSSSAQGMGQQAAYNQGMGYMQPQYHNGDVSN

SEQ ID NO: 195318 - protein, 422 aa, Oryza sativa
  Clone ID: PAT_MRT4530_91279C.1.pep
MSSHHRYAHLLDDPFFPFPPPSSSSCPFLSPPAASSTCPFFALDSPFAADPFHLHPFLPTPPTSSLLDPFLLHTLTDRVSQLELALAARAPHPRPTSRKCTYVTESTGRKVKWTTEDKPRAGERVLKWEAELDSPYDDGFDRKWKWEAKAKTASAAATKLKWATHLKGKGCLEPWSHSYTWEEDFSATDDDDDEEIEDQLHHKALQDHSKLKTKAKDDKKKKKKDNNTVVVNKEQKKCPFSVKIEEIPPEEDNTAGCVAIRKAFALGNGKAKKKELSPQDAALLIQLNYRAHLAHRSQVLRCLRDLAVAKAKLKEIRSLFYNISYRHRMAHDHEERQRFTEKIIVLLLTVDALEGPDYMVRTAKKSMLDELEGMLEIVDPQPPGKQRSLTRRKFDLPEGGPITDEKMAGVNNAVKVIQKGKK

SEQ ID NO: 195319 - protein, 89 aa, Oryza sativa
  unsure (1)..(89): unsure at all Xaa locations
  Clone ID: PAT_MRT4530_9127C.1.pep
CRQRSHSAPKHQQRKTRDSLLPLTPLPPGTRYPTPPHPPPKPPIFPTPPPPQPXPPYPTPRSPSTPSMPMPQPSPRHPTTTGPTRWAAP

SEQ ID NO: 195320 - protein, 38 aa, Oryza sativa
  Clone ID: PAT_MRT4530_91280C.1.pep
MAYSPIQREDLGKQKDGRVTTRLTQAWCGLARNNEAVA

SEQ ID NO: 195321 - protein, 57 aa, Oryza sativa
  unsure (1)..(57): unsure at all Xaa locations
  Clone ID: PAT_MRT4530_91281C.1.pep
CLLVSTSHCGIICSQLLILYYYYYYYYYYYYYYYYYYYYYYYYXLFAKKKTSLAIHQ

SEQ ID NO: 195322 - protein, 131 aa, Oryza sativa
  unsure (1)..(131): unsure at all Xaa locations
  Clone ID: PAT_MRT4530_91282C.1.pep
XXXXXXXXXXXXXXXXXXXXXXXXXXXXXXXXXXXXXXXXXXXXXXXXXXXXXXXXELTHWSDSFSHRVEKGSIILHLPSYMSSPKERKEEEEEEEEEEEEEEEEEEREQARHRLTRRVPRLTTKINRPYT

SEQ ID NO: 195323 - protein, 52 aa, Oryza sativa
  Clone ID: PAT_MRT4530_91283C.1.pep
WCRRLSRASAVAGVQLHTKTIRGQVWHIRCRHCKRRKRAGITTVSHQWITCA

SEQ ID NO: 195324 - protein, 578 aa, Oryza sativa
  Clone ID: PAT_MRT4530_91284C.1.pep
MSWLARSLATSLNIPEDDPGADDDPDSYAAAAAPSPSARNPHPPQSVHPHPPHSAAAEGVKEDLTELSKTLTRQFWGVANFLAPPPGETSPSPSPPSAEARYGGGTAQTPPEISGIRSDFAEIGGRFKSGISRISNHKAMSGFSRIASNFFADEDEEEEELVDAVRGYGVEEQREELRFRAEEVATDRVRHEADDYEVRHGWEESVRHRVDDDEARHEVDDDEGRHDEWEERLKHEADGGEVMHKELDDHELELETVRHEEEEEEVEEEWDVIGITEEVLAFATNIARHPETWLDFPLLPDDDDSDGPFSFRHMYLFDHEKLRFSAINFSGMTLMPWITVETRRDLGETAFLVPVFDTKKSSPNFCGPELQIDLWDFDMSNAQQEHALAIEQLAPRLAALRIELCPIHMSEECFWKIYFVLLHPRLNKHDAELLSTPQIVEARAMLMQCLQHQSKFETEQLFHRKDDFGMHSEEDTSKDIPEVFPSMLQQTASVIPITDFETEKHPIQVTEVAVVDKSVIKEQLTKDGSKTPNVLQESFDDDIDDWFDEEAELSGHTTIPIGDEEDVSFSDLEDDDGK

SEQ ID NO: 195325 - protein, 329 aa, Oryza sativa
  Clone ID: PAT_MRT4530_91285C.1.pep
MAEACTVSQDNGRRCLPAWMLKPCSNDEVSKTRYRSEPVLESNKQPADLDQIKPAKRKRGEQVKIVDEEDADELGALQPCQGWKKVRRKRLDAVKDDNNGENAKITNKNARKVSRRSAPKNSGKRKLDNVEPEVSSSESIDDDIELTVEDLLSIAEEYVKADRLKQHEVKTTKTARYNENRCSPSISTEADIGGSIINARSMMGLPDTTRNARSMKGLPDTTMNAQSMKGLPDTAETNTAPSEPSRYEINKQQVQQCTPSFTATCDVAQDMLNIFFGPLLSKCSGYEKKPEVVQDANHATEKKDLSCDVQRQGEHATEKKHLSCDVQRQ

SEQ ID NO: 195326 - protein, 136 aa, Oryza sativa
  Clone ID: PAT_MRT4530_91286C.1.pep
SPNPVSSLPLPLPPSPPRAAASASPSRRRGRAHHRCGGRPLLRFVSPSPSPAVADLEPSFALNLFLGGYSISDPGKGMLLFLIGDDPQKRPYSKASQALFSDIEHGCLPQVVLGDVPCKFRNGTIVCETFSSLLSC

SEQ ID NO: 195327 - protein, 74 aa, Oryza sativa
  Clone ID: PAT_MRT4530_91287C.1.pep
KFDDKLSNMRIGRRPGRPQGVRVGRFINAGVTTDLSFVADQAQKDQFIFAAGLDGKLLPLDDLMYSPYGSAGTN

SEQ ID NO: 195328 - protein, 230 aa, Oryza sativa
  unsure (1)..(230): unsure at all Xaa locations
  Clone ID: PAT_MRT4530_91288C.1.pep
TRALSTSAAAAAAARALAARVTTTTTRGYAASAASSAMRRAAAAVEGKGAAGMTHAKDGSSSPAXREVSWVPDPVTGHFRSFNFLGDAVLVLLCVVHFISYFVRSCCALPYSLSSLLLLYSFIFFCFFLLLIFFFLFSFSRPTFFFFIFSFFSIFFLFFFVSFSCFLFVYFSSLFSFYFVFLFSLFLLFLCSLFLFLSSPSFSFFFLFSFLLYLLPLLSFYCLYSFILLL

SEQ ID NO: 195329 - protein, 54 aa, Oryza sativa
  Clone ID: PAT_MRT4530_91289C.1.pep
HELKSEPRYCLLVMYLSCDDCFNGMNSLDLDHSMSPLQELKQVLNIYFHNVQPY

SEQ ID NO: 195330 - protein, 73 aa, Oryza sativa
  Clone ID: PAT_MRT4530_9128C.1.pep
NTKKFLVYFPSGSSGGGTGFNLDRVSGKPGKAFQKTRWGNFLIYQNDWFAGGARSGQQAGTRDTRGIPPQNLP

SEQ ID NO: 195331 - protein, 70 aa, Oryza sativa
  Clone ID: PAT_MRT4530_91290C.1.pep
MRAVMLIIDSTTGGGEALSRRKVRPESTSLLAVTLGVTTNDQVLEGRWMPTLPRTSMLATKRSLQKSHDT

SEQ ID NO: 195332 - protein, 80 aa, Oryza sativa
  Clone ID: PAT_MRT4530_91291C.1.pep
MTLYRMCPFGGQKFRAKGFPRTPFQKSLPLWQTTILRGWERAYVVRDADWHQELEEGYLNPSAEAYFQEQAKYDFSWFQA

SEQ ID NO: 195333 - protein, 233 aa, Oryza sativa
  unsure (1)..(233): unsure at all Xaa locations
  Clone ID: PAT_MRT4530_91292C.1.pep
MYSIYLLVNQLPVQRPKEQVADGEALLELVNSLAITAKSKKKDGPTPSEFVTSLLTKFGVRASLLDASIESFSCSDLGAMASPLFMTATGCQTMNGALNLAIEERRKRVARRLFDRFPSKPAGLYETTPDLDERNDTDKNMAVMFKLLRKNKCVKLENLILNRQSFAQTVENIFALSFLVKDGRVEIDVDDKGNHFVVPRNAPAAELITSREXDQXXQYVFRFDTKDWKMDKS

SEQ ID NO: 195334 - protein, 1993 aa, Oryza sativa
  Clone ID: PAT_MRT4530_91293C.1.pep
MEGTSTGECVLANSKRKRTLLDIPRNAAAANRERRCLKRSGDRANCLVPDIRSGPKPTADDVLPLPKDYIASLKALYPERSYYGGPSHECPYCGAIFWYQERVKKGSVLSQRKIIYNLCCRSGKINLPELKDPPTYLAKLLKYDGDARSKRFLRQIRSYNSLFAFTSLGASVDKSINNGSAPCVFKINGVVHHRIGGLLPQRGAPPKFAQLYIYDTENEIKNRMDIFEKDKPSDEPDPKIVAGLTSMLDEHNELVKAFRFARDRLQAHGDHKVALRLLGCDSRDEIQYNLPTSGEIAGIVYPLLFPYGEHGFHLGIKYTDFPSIVGNSRRYVTMLEYYRYQLHYRLNKPNPFTCCGRLSDSLCVDSYSTVEASRLKYIADNQPDLRTESVQGISDAIDHGLASGDSVGQKYVLPTSFTGGRRYMVQNYQDAMAICHIKEGKTFGPVLAVLYTVEFQKRGLPHIHCLIWLAAANAEFSVPIIDGFISAEIPDVLTDPLGYALVDESMIHGPCGKQNKSCPCMKKDECSKHFPKCFQDETTMDEFGFTVYRRKNNGRYVIKNGVKLDNQWVVPCNMDLLKKYQAHINVEWCNKSNMIKYLFKYVTKGADRTKAYFEVSSDASSKPSENNTAPKNEIQEYIDARFLSTCEALWRSFEFDIHYRMPSVERLTVHLPNMNFVRYKKGSDLKSLLSSPAAKKTMLTEWFEANKKHSSARTLTYCDFPKEWSWDTSSRRWRPKTPSQKVGRMYYVSPVSGELYYLRMLLMIVKGAMCYADVRTYDGVVYPTFRQACEARGLLESDNEWHLLFDEAVISASSAQLRQLFATVVMFCSVGNVRALFEKYWVYFTDDIQRRLQIALSNPSYIVPADRLLSLLMKEMQIVFSNSGGSIDDYDLPQPAIYSNDVIGNRMVEEELGLDSVLLTAEAPSMIPKLNIDQRNVFDTIMQRVNDSKPGFFFVYGHGGTGKTFLWNALISKIRSEKKIVLAVASSGVASLLLPRGRTAHSRFKIPIDITENSICTIKRGTMLAELIQKTSLIIWDEAPMTHRRCFEALDRTLRDLLSEHTPSNSIVPFGGKVVVLGGDFRQILPVIRKGSRASIVDASITNSPLWHHVILLRLTINMRLLQDNLSEQNRESLEKFSDWILALGDGRLPAVKMDDETEATWVDIPDDMLIKTAGDKIKAIIEEILPGMPSTSRAGLRILIEDEDEMAEVLIPDLEQGDGNPTIIVRVSRLWEYRDQNDETIVHNISLVLLDKKVPSRNSSANCYPYINVFSLSNSKSKQGASIAAYIYPPLDVVFGPIITEGKVYRLTFYRVRPCSRNYRPVNNRMSINFTKWTTLEEHLDVPADFPCYAYSPTPYNELRSHVDRKDSFTDVIGVITEVSSVTTIQTRIKDGDSLKRSVCIRNADNVIINIALWGERATSFPEDAIISAGEKEPQVAIFVGTLVRGYVRNASLGNVSLSGNSACKWYINIDTPEVNSFKDSIKGNYEPIQFIDIPVPNVIVGAEQKTVAQLKELHPFKFKKHEFQVTVVIKKFCMQASWWYTACDICKKTAKPYGRAYRCGDPTCPPIVSASPRFKLNIIAGDETAETTFILFGRLAQRLIGRSVDTLLHENPSDKDYIPSAITDLLEKQFVWNVSITENTVATGVLSFQVNRIVGGVVNNTLALLQSPSGSQAYALGPTMALSPAASHDQSIAQSSAPATPSVDISDTNVGATSLRITGSQDQNIDLECASKTPAQTAEEDEYDQGLRRSSSRTQMMRVLVAVIQLGFGIIMTYHDNPEYWQVDDFALLPFKRRMYIALFLDADQQHELSQKAFDQGSYTFKTTKLEFQPFKMNLHSTPNPLRQRVILAMEGVPPESWNKPAITELLDNCCIVEELYGEHHINDLSIFKLAAWTRDCDLIPKIIDWSIETDEEEHQASDPGCGQNTALSVILIHIEKLFDYNIENGGSQNDKENPRLLVIKTFQWVSYHIDSDNGPIEGGSPSEAANNLHI

SEQ ID NO: 195335 - protein, 310 aa, Oryza sativa
  Clone ID: PAT_MRT4530_91294C.1.pep
SSSRRRGRDVTMTLVLPILMHRTTIAADATDGSLAPMPAGRRRAHANREEVGRDNQHTERGRMRRKSRPGLQVRRVHLHGTRPCLRLCAQCRGACPHGAEATQRRQCHSRPSATLTFSRVAAAVASSSCASPWRPPPQPLAGWRECLRLLLVNCHIADCQLFVIVVTLPNDCPETLVKKLLFGRLDCFHLLSTTEIWEGRGADDGREGRGADVHGDNSDYDGSGDDDDHEGSGGAAPSHPLLYPLLDLSEGRRLPPGRTDPPRRRRGAHGRGASGGGARPSALTSSRSTLRRGEREADAARSRAVVLRFL

SEQ ID NO: 195336 - protein, 98 aa, Oryza sativa
  Clone ID: PAT_MRT4530_91295C.1.pep
RRRRTPRRCGGAGRRTASVAGSASPAGRRRRAARRRAPRRTPRRPRTRGGTARRRSPPGPGTPPPPATRCRTASGWRGSSPRSPSCRAPKRPARAPAR

SEQ ID NO: 195337 - protein, 58 aa, Oryza sativa
  Clone ID: PAT_MRT4530_91296C.1.pep
PIPKFLTQKFPFKFIQTNNFKKPFFSHFPLKLSQNTTIPPNSPFFFTKNNFFNPLTYN

SEQ ID NO: 195338 - protein, 77 aa, Oryza sativa
  Clone ID: PAT_MRT4530_91297C.1.pep
QKRPRPNELLLSKKTTPYQYSGYDLMGWRSIIWLEFSFSHILTIHRNICLNLTQVQAYMCMLRSHQYSVRALWHMSY

SEQ ID NO: 195339 - protein, 100 aa, Oryza sativa
  Clone ID: PAT_MRT4530_91298C.1.pep
SSQRPFFPAAASSPRTDLEEGREGDGRARSRHFLRGHRRRRFCRGRRRRSHQSPLSPCTSAPPLGRFCPRRSGPPRQRGYRHPWSPSLAPRPTRRRMRPG

SEQ ID NO: 195340 - protein, 77 aa, Oryza sativa
  Clone ID: PAT_MRT4530_91299C.1.pep
MQDCNAGIRSPGQRMGHAPIAVAGRAARWRAPLHALFFPDARQDPFFANGVPRAHNQHDQKASDAARDGNRVRRVRV

SEQ ID NO: 195341 - protein, 210 aa, Oryza sativa
  Clone ID: PAT_MRT4530_9129C.1.pep
SSVYHDELDCHIGALSENSIFKSLHCYMRPKKCALTPMEACAVNIDGALREWFNHGETIYERRREEMMKVAVENQLAERCVMLSRSYMDCVSLWKLNALESSPMNAEVDFNVQSGFEFEDLYLRAQEEIPMALLSVNQVILHQDFGEVDLVFKRSFDGVPHYLIIEVKHSYCPNVRRRGRIQLRRVAQALNFLQPRAPLLAVLYTPYGYE

SEQ ID NO: 195342 - protein, 84 aa, Oryza sativa
  Clone ID: PAT_MRT4530_912C.1.pep
ALARCVGWYISKQVVAVTQENTLLDNTARIEGWFARYTMFDWVGGRTSDMSGVGLLTAALQVMDMKEMFGQATLMGEVTRTTGA

SEQ ID NO: 195343 - protein, 233 aa, Oryza sativa
  Clone ID: PAT_MRT4530_91300C.1.pep
MPLWGTGSSAASAAAEGSAAGGDGAARSSSGGAAVIRSLLPTRRRLRLDPPSKLFFPYEPGKQVRSAVKIKNISKSHVAFKFQTTAPKSCFMRPPGGILAPGESIIATVFKFVEHPENNEKPLDQKCKVKFKIVSLKVKGPMEYVPELFDEQKNQVAVEQILRVVFLDAERQTPQMDKLKRQLAEAEAALEARKKPPEDTGPRIVGEGLVIDEWKERRERYLARQQIEGVDSA

SEQ ID NO: 195344 - protein, 46 aa, Oryza sativa
  Clone ID: PAT_MRT4530_91301C.1.pep
GTRQLPLAVNGTTSTNASRREMGIVRMDWMMNLRSDVDSMPTIRSQ

SEQ ID NO: 195345 - protein, 399 aa, Oryza sativa
  unsure (1)..(399): unsure at all Xaa locations
  Clone ID: PAT_MRT4530_91302C.1.pep
MTIGYTPAHLSVYDFTAGLPPSPPTGVLAYTAGSALADSRCVGAITSRAECLNLVXRRRRLVSSPIRVVXTPPLLGVYVFTDWLVFXAADWCPRLHXWLVIPPLLGVYVFTDRLPHPPPTDVSAYTVGWSHHHCWASTSSPXPACLRXRRLVSSPSRLVGYTTVDGRLRLHPPAALPAANWCLCLHGWPIMPPLLGVYVFTDQLVXRLPPTGVSAYTVGWSHHCCXASTSSPTGXPRRRRLVFSPSRLVXTPSLMGVYVFTDXAASSVADWCFRQYGWLVTPPSVGVIIFTAGXPRPPPIGVSTYTVGWSHRRCWVSTSSPTGHLVRHRLVSPPIRLVGHTVVVGRLRLHXTGFLVAARWYLRCHGWFIMPWLLGDYIFTTGLPPSPPMGAIVFTSMAA

SEQ ID NO: 195346 - protein, 76 aa, Oryza sativa
  Clone ID: PAT_MRT4530_91303C.1.pep
MAGDGGARLGRPAVMTAGQRRAGVGGGYPTEEVQAASGRPAAVEGGTDCVGEDGSGGSSDRSRCGSSGGRHNAKWE

SEQ ID NO: 195347 - protein, 154 aa, Oryza sativa
  unsure (1)..(154): unsure at all Xaa locations
  Clone ID: PAT_MRT4530_91304C.1.pep
SPPPQPLLPNAQPPXPSPSSNTRPPPPLPPIHHRAVAADQPPLPPSPRAPXPLPPSPSRPCRRRRKLRSASXPRGRPAPDPPSGGLDPPPARPGPARRLPPRRPLPSPPPSPSPPPLACTPPPPPPFATATAPQPRPPSPRPPLPPVPQPPPRA

SEQ ID NO: 195348 - protein, 345 aa, Oryza sativa
  Clone ID: PAT_MRT4530_91305C.1.pep
MGSRAAGSVLLRHLCPRVSSSTSAAAHAHAQRPPLAGAGGGGVALWARLLSTSAAAAKEETAASKENTGSTAAAKAEATKAAKEGPASATASPVASSYWGIEASKLASKDGVEWKWSCFRPWETYSPDTTIDLKKHHEPKVLLDKVAYWTVKALRVPTDIFFQRRYGCRAMMLETVAAVPGMVGGMLLHLRSLRRFEHSGGWIRALLEEAENERMHLMTFMEVAKPRWYERALVLAVQGVFFNAYFLGYLLSPKLAHRVVGYLEEEAIHSYTEYLKDIEAGKIENVPAPPIAIDYWRLPAGATLKDVVVVVRADEAHHRDVNHFASDVHFQGMDLKDIPAPLDYH

SEQ ID NO: 195349 - protein, 204 aa, Oryza sativa
  Clone ID: PAT_MRT4530_91306C.1.pep
MEKAACNEHVIGIPVSNRAFGIEEPDFPSEGAAAYHAEAKSSATARTSSRFGRTAHRLGQGIKEHAVTLGPKLSETVKAKLRLGAKILAVGGVGRVFRKAFSAAKAERLVPALHFYLYTTGGPAFRSDRSLALTTPSGDTVRVPYKVAIPLRRVKTAKPSENKHRPEQKYVQVVTDDGFEFWFMGFVSFQVTLKNLELAVAQAQ

SEQ ID NO: 195350 - protein, 79 aa, Oryza sativa
  Clone ID: PAT_MRT4530_91307C.1.pep
APSGSQASTVGACMWWRTCEAGCLVLPHGHHVAPGPCGAWPGSLWMEECAQGVCFACLVQRRPYCAKLMFFKREHYLLA

SEQ ID NO: 195351 - protein, 98 aa, Oryza sativa
  Clone ID: PAT_MRT4530_91308C.1.pep
PPGYFGKVGMGYFPKLSTRFPCPPVNVERLWSMGPPPKAPQAGPAKAPFFDVPQFGSPKVLGKGMLPPQRPLFVKAKFFSKVPQKKIKAPGGPVLLPP

SEQ ID NO: 195352 - protein, 827 aa, Oryza sativa
  Clone ID: PAT_MRT4530_91309C.1.pep
MGMPRWFPRWAQPSMRYVVTFTTQVPMRRILSKKIMAINTRLEEIIQNKDRYKMDDVNKGIEVTWKASTSISESNSELDDLQQGNLTLYEEHQEELEKALTPTDQELQKNDNRPIVVSVSGKSGVGKTTLVRNVYNIMKKKNCFDVHAMESFAPHLTAPNILHQIVQQLTEDNKNCPRSMVHEMLATALRDKKYLLVIDGEVSRTEWKNIITMLTTLAVGSTGNRIVHIRFDRPEQSSLYYHHHIRLEPLENNVVMKLFHKRLRNQDKQGDAGGPMVLKLKKLLQFDAQYQKLEEYREDICKITEGLPLAVVLLSGLVQTKEFPHEWTEVFKYLSSKKSKRLDNLLSLCFDDLPHELKCCYLYFAAFPPNVVVEARNLVCMWMAEGFLTPRVGKTLEKVGYIFLNELISRNLVNLVLVDDNSTTGTMFISIQNKVHEFLQSEAHEASFLEVHSGDDIPTLTSARRLSLQNYTDKYAALANPLPKLRSIFSQFEQEPKEQEPKGDQTRQCCTPPQQWITNKKQKDIRSHIKGLLQGSEFLRVIDLQGIEIGDELPHAIGSVVHLQYLGITSCSLTVIPPSIGSLSGLQTLDVRETNVRKLPLNFWLMIKTLRHVFGFTLKLPKQIGSMKHMQTLDSIELDNCEKDLIGTVGKMVHLENLFVWNITTGNMEALFAALSKLENLRNLALHGHIIPSTVFITISLRRLKSMKLQGKLKFLYEITGMDVCLPNLSMLSLEKTKVSQGFISKLAELPSLETLALYSESYKDEHLLFSSIGFVSLKKIKLDVPTTLKTIEIEQGALHILKEFDILSQRPHVKIIAERRIKKLIV

SEQ ID NO: 195353 - protein, 39 aa, Oryza sativa
  Clone ID: PAT_MRT4530_9130C.1.pep
ASTVMLAWPAIVLLWKHIFNRCCIITYITLEEKDLSDHI

SEQ ID NO: 195354 - protein, 83 aa, Oryza sativa
  unsure (1)..(83): unsure at all Xaa locations
  Clone ID: PAT_MRT4530_91310C.1.pep
MPHSQCPCTRKTYGTGRITYTESLTRAXENLNLRTGMTITNLGLKISGTXHCMTKTAYGKWGRDYRDISCEAKKSLKGEKALA

SEQ ID NO: 195355 - protein, 688 aa, Oryza sativa
  Clone ID: PAT_MRT4530_91311C.1.pep
MEEKRIARISVTWRGRQLDVDADPSCTVKEFGQLLQDLTSVNPETLKLIVPQSTNKGSKLITPFSDPHSVLTLKEAAISDGKPIRMMGVFNDEIEEVSDNGKRTDLRIIGFEEEEQRLRQRTSGRPQVPLKLPQGQYIFCDFRTLHLPGIELNPPPSEALKRMHMLACDPGIIAIMNKHRWRVGIMTEMAPVGYVGVSPKCILGFNKNMGEEISLRLRTDDLKGFRKYESIKRTLLHELAHMVHSEHDANFFALNKQLNDEAASLDWTKSRGHVLSGRKIFDSYEDEFVLEPDSVVVGHKLGGGSSSLASARVLSGSAAYKRFLNASADLESSKDSVTIPGNEILVPNTKFEPDPDDVGQDFSQDNTKVEPDPDDNDDMNVDVGTGASWSSVSRSFTEQDTISHSEPDPDDIHQQSTAGCLEPDPDDSSNVDILSQELTIDGKQNGEPDPDDNGTSKFIPEPVNKMEVETELGSNFAVQNSEPDPDDSSNAILNKKLGTDRSDETTCEAVVEECVNKMEVETEQSRNSTMSKSEPDPDDHAANSNISELQRIEEPVAALCARLQKAIEMLRSQATPTEATSALQTLFKIIKNVIEHPHDIKYRRLRKSNPQFQRSVANYKGLQKSTVTNFLIFFASLKTAAMEVLELIGFCEDVVSDEIGRAETYLVLKRNDPGLLWLAKASLEVSMA

SEQ ID NO: 195356 - protein, 46 aa, Oryza sativa
  Clone ID: PAT_MRT4530_91312C.1.pep
NTHIAGGLRPDDQAIDHAGRLMQDRDHNLRYLNNFIPGREAYKTFS

SEQ ID NO: 195357 - protein, 57 aa, Oryza sativa
  Clone ID: PAT_MRT4530_91313C.1.pep
RTLFMKQEHYRRGAKPQGLTGPRFPTSKYYCKHRDKCTIVLVPLNCVFCIHLNTAYG

SEQ ID NO: 195358 - protein, 107 aa, Oryza sativa
  unsure (1)..(107): unsure at all Xaa locations
  Clone ID: PAT_MRT4530_91314C.1.pep
ERARAAVRGSAHAPLFFXFDDTGPVTLRKEWVHFGYIGLWTGQSFTKMNDRFLDDVRGDVKEGKDAKLLVSWGEGLRSTIAVRTLLDDGYKNLAWLAGGFSMCVDGD

SEQ ID NO: 195359 - protein, 49 aa, Oryza sativa
  unsure (1)..(49): unsure at all Xaa locations
  Clone ID: PAT_MRT4530_91315C.1.pep
ISHGXRRRXLFFCDGXFNTHVWTXFLTCNFILFXXQKKKKKKKKKKKKK

SEQ ID NO: 195360 - protein, 47 aa, Oryza sativa
  unsure (1)..(47): unsure at all Xaa locations
  Clone ID: PAT_MRT4530_91316C.1.pep
XTPRLXTFMLXGHRNVVWKXLXGXXXFXTGKQLLTIXLPPSGXINPX

SEQ ID NO: 195361 - protein, 88 aa, Oryza sativa
  Clone ID: PAT_MRT4530_91317C.1.pep
TPSWRSNWFLLYEILFFSLFLYLAKCGVRVRHLLGFPGAMSICDRSEAMDHAHALQKYGSKFDFFYEQSPPPMNNVVKSSFYFVERQD

SEQ ID NO: 195362 - protein, 54 aa, Oryza sativa
  unsure (1)..(54): unsure at all Xaa locations
  Clone ID: PAT_MRT4530_91318C.1.pep
XFXXFFXXFFFXFFXRXQILQVEXLEPKCSWHQKLHLGSNSRRRLDXNRVLYPS

SEQ ID NO: 195363 - protein, 183 aa, Oryza sativa
  Clone ID: PAT_MRT4530_91319C.1.pep
MRMPHRRAIVRPTAAAAAVVVLRHRPPPRLSRRCRCHHHRPSATTIVVIVVVIIIVRPPPPSSSSSSCGAHDPPAELRLECARSGGRVCPQLWQRTTMMMAAAADDARQVVVEAAGGRCAADAGRAVAEDDDDDDGSGGRTTMMMMTTTTTTTTTRQTWGRAVAEDNGSSRTDDGAAEDDGGG

SEQ ID NO: 195364 - protein, 115 aa, Oryza sativa
  unsure (1)..(115): unsure at all Xaa locations
  Clone ID: PAT_MRT4530_9131C.1.pep
MASTLTNVGLSTPAAXASXLVRPVAGTGXLVFPPVGRGGFXAVXANGPATPAGISDKMSENIXKAKEAVRGRTRTXNSAALGQVEDXTRRANHAARKLKELRPAQAYCKKPGTDN

SEQ ID NO: 195365 - protein, 264 aa, Oryza sativa
  unsure (1)..(264): unsure at all Xaa locations
  Clone ID: PAT_MRT4530_91320C.1.pep
MDNNIGGSTPTSLRRSCPFADINNASAGDSPKKRNNIGVFTPTSLTKSKLQEDGAKLSALELRRKRARERYASMSPKKKEARKMKARVYKQLKEDEYSGLTQTTTNYVKAPLGDITNVSVDDLRRCHVNDCSTLQQGSNHALLQPVDRTGPGSDQQHMITPRCLPFTVINNVAQYDNVDHTGSPFSCILQGATQNSHTLPANTVEKCASASGFGKDPVHHDNVHLEKTIGSWSEIHYKLSHCKALIFCXILIPVRHARSFIVLI

SEQ ID NO: 195366 - protein, 141 aa, Oryza sativa
  Clone ID: PAT_MRT4530_91321C.1.pep
AHPAHRTPPFNRPRNRKSEPEGNPLFPTACRFLYSTALTRFPLPIRAMETGPLTRRSYFFGPPRCSPYAFRFIFLWDLGRETIFPWQPVTAIFFSNGTIQTSSIGTKKRFFLVWKFFFFFFFFFFFFFFLHKERAALFPRP

SEQ ID NO: 195367 - protein, 462 aa, Oryza sativa
  Clone ID: PAT_MRT4530_91322C.1.pep
MAGGEDGADGVGDDTELRRFSDVELLEKSRRIQGELSGGIERRLKDRGAKFRRLLDAIVREIDRRKAATDDDKCARVVQSGCAESSVKQQAVTISDFRSSFGIDEEAGVDVSHLETSACIGDPKTSTDNEGILCEEEDSYAADDGKDNGYSRICKDAHTSRKRNGEFSPTFSMRLRSRKVVEEVVLLDGDTCISDSAEKTSSAWDTPNSIELSYSDMKCLEPESLLSSPILNFYIMYLMGQMPSTSRLGGKYHIFNTYFFSKLEALTSKVDNDAYFLNLRRWWKGVDIFKKAYIIIPVHAEFLKEEWNYLNKTGSLEDCHLHESVWKNLPRKIKKKAVTTASNLEQSYSCTVQVPQQDNEYDCGVFVLYYMRRFIEEAPERLNNKDSSNMFGEGWFQREEASALRKEMQALLLRLFEEAKDNNHMRDPTTPVSATAEHPVEVLSTEPAVPDHPRNAVGVATS

SEQ ID NO: 195368 - protein, 161 aa, Oryza sativa
  Clone ID: PAT_MRT4530_91323C.1.pep
LLSSPILNFYIMYLMGQMPSTSRLGGKYHIFNTYFFSKLEALTSKVDNDAYFLNLRRWWKGVDIFKKAYIIIPVHADAHWSLVIICMPAKEDQSGPTIFHLDSLKFHSSRFIFSTVERFLKEEWNYLNKTGSLEDCHLHESVWKNLPRNIKKKAVTVPQED

SEQ ID NO: 195369 - protein, 47 aa, Oryza sativa
  Clone ID: PAT_MRT4530_91324C.1.pep
PPPPPSPSVQQSSSDQTPSAVGSHHVEEEEQPTAPAVPVSFSLSQQT

SEQ ID NO: 195370 - protein, 365 aa, Oryza sativa
  Clone ID: PAT_MRT4530_91325C.1.pep
MESSSPSVPFPLLQAPVESTYRACTIPYRFASDNPRKATPVEIQWIDLFLNSVPSFRQRAENDPTVPDAPAKAEKFAQRYTAMLEELKKNPESNGGPPDCILLCRLRELVLRELGFRDIFKKVKDEENAKAMSLFEGVVQRNDEIEDDGKRAENLIRGILAGNIFDLGSAQLAEVFAKDGMSFLASCQNLVSRPWVIDDLDAFQNKWTKKSWEKAVIFVDNSGADIILGILPFARELLRHGTKVILAANDMPSINDVTYPELVEIINKLKDENGKLAGVDASDLLVANSGNDLPVIDLSSVSPELAYLANDADLVVLEGMGRAIETNLYAQMKCDSIKIGMVKHPEVAQFLGGRLYDCVFKFNEA

SEQ ID NO: 195371 - protein, 113 aa, Oryza sativa
  Clone ID: PAT_MRT4530_91326C.1.pep
MAHREREAADGDRGDLGIQLRGVRERDEVHDEWGHGPKAEVVEVLTSALRGMAASGGFQRLKARSGGQGAARSGDAGGTSGTERGRLSGGGAWPKLAGVRRKWQAAWRERKGA

SEQ ID NO: 195372 - protein, 87 aa, Oryza sativa
  Clone ID: PAT_MRT4530_91327C.1.pep
FSHEPSCLLAHASFGELHKKRSCIRSYIRRIDYRGTCSSYSFLRILPLGLELYTFYPIPNQHPSSQRVRIPVCTQLLCHQCEESRRK

SEQ ID NO: 195373 - protein, 50 aa, Oryza sativa
  Clone ID: PAT_MRT4530_91328C.1.pep
KSFTTPFIRTRLKTWICSVLLLPIGCCGSNPLQPNPKKEKGTANRIQATG

SEQ ID NO: 195374 - protein, 323 aa, Oryza sativa
  Clone ID: PAT_MRT4530_91329C.1.pep
MGGDGEFFSVGECDGQKTIDGEQVPLVLTPASSGSGERGGEALAAALRARREWVEAKVVSNSAVLLRGFGVRDAAEFDAVVGALGWPDIRYVGPAPRTHVHGRVWTANEGPLDEFIYYHHEMVLIKEFPGKVILFCEVAPPEGGETPFVPSFRVTERVMEEFPEMVEELDEKGLRYTFTALSKNDTKSMRGRGWEDAFATTDKAEAEKRARALGMEVEWLANGGARTILGPRKLTRVFPGRQGRRMWFNTVVGMHGKALSSATMADGAEIPTAFVARCGEIIEEESIQFRWEVGDVLILDNLATLHGRRPSLPPRRVLVATCK

SEQ ID NO: 195375 - protein, 84 aa, Oryza sativa
  Clone ID: PAT_MRT4530_9132C.1.pep
KLSLGPLNLGGTFKGFLDCGAKILIKWIMGAKLSPNIGGGGVKNVKKVYKNLVLLVFLSPKKKKKKKKKKKKKKKKKKKKKKKK

SEQ ID NO: 195376 - protein, 96 aa, Oryza sativa
  Clone ID: PAT_MRT4530_91330C.1.pep
RQPHIQSLLPPASRSAASPHRVTLGSVTPHPPSASTAPPPLPRRLPRLRLPPPPCRLCLSASTVPPTPPPRRRRLHLRGAASALRSPPSTLRPSAS

SEQ ID NO: 195377 - protein, 78 aa, Oryza sativa
  Clone ID: PAT_MRT4530_91331C.1.pep
LSGQSRSTGQNCIYMQGQNIEDRLADKPTTYGLAKQSMTELELLRAMEGHKGAAPCTKILGSGSQLMESHLGKDHRLL

SEQ ID NO: 195378 - protein, 99 aa, Oryza sativa
  unsure (1)..(99): unsure at all Xaa locations
  Clone ID: PAT_MRT4530_91332C.1.pep
DRIASPPQAKSPCPRQNITDRLAQGFTGLLQAQPPQFPWPAXIPFEIDLPVVPFGASWGARAGKEFFPAAAVASVIDIGRRLGQAGVEIGASVGGFLAI

SEQ ID NO: 195379 - protein, 94 aa, Oryza sativa
  Clone ID: PAT_MRT4530_91333C.1.pep
LFVGVGDGPWDEQLMHCQEDRQLFDNFQFVDFTKIIMSREMPETEKEEQFALEALKKIPSQYAAIISKRISDLAADAPSRMPLPPPPPRPVIST

SEQ ID NO: 195380 - protein, 70 aa, Oryza sativa
  Clone ID: PAT_MRT4530_91334C.1.pep
PSAIAAAACWESRTMRREGEEEWEEVVAGAEEAVHGAPVPVAEEEEEYRVVFWSPPTGDEVRAAFTSIEE

SEQ ID NO: 195381 - protein, 76 aa, Oryza sativa
  Clone ID: PAT_MRT4530_91335C.1.pep
RSKVSYGIHMECFTVYEYICVHVYHWRIRSRCNLSDESKTDFAPALEGGPTVDLRSHYSFRTWKSPANIVCPKKKK

SEQ ID NO: 195382 - protein, 71 aa, Oryza sativa
  Clone ID: PAT_MRT4530_91336C.1.pep
DPPSAAIGLKPPDRALAVRTRRVCHRDRFTASSSQLQRPPSSPSSTPSLAPKLPPPVPAAVPPPPPAPPSP

SEQ ID NO: 195383 - protein, 58 aa, Oryza sativa
  Clone ID: PAT_MRT4530_91337C.1.pep
MEGHRRAVRTVRVPNISDLAWEQKVREFFCFYGENQHVDNRCDGVATGRTVYCTLKDP

SEQ ID NO: 195384 - protein, 115 aa, Oryza sativa
  Clone ID: PAT_MRT4530_91338C.1.pep
YPSIFFLDPSFLPGGVRDIGGGDSRWPCAGGWRIPASQEVDHVLAWTRCASGIVLDSATLVLVQSKKLKADWTDWTHKCILHLQIDSKPSKQVGMVLLRKTVPNMGDNFQELFTG

SEQ ID NO: 195385 - protein, 48 aa, Oryza sativa
  Clone ID: PAT_MRT4530_91339C.1.pep
SSRVLKMYIFVKTSTAKPITLDAEPSDTIDNVKAKIRDLEGGGPGPPT

SEQ ID NO: 195386 - protein, 133 aa, Oryza sativa
  Clone ID: PAT_MRT4530_9133C.1.pep
MRRLDLPSPPPRAVVILAAALAAAVATGGVEAAGNMYASSARATTTSSSWGSYAGGAMHGAEMALAAAAAVEDEVAPEFFPVGLVVGDGHGSYFDGLKRDQPFCPPDKTCAANGGTPYTPGCLTIYQCNNGRG

SEQ ID NO: 195387 - protein, 147 aa, Oryza sativa
  Clone ID: PAT_MRT4530_91340C.1.pep
FPASIHASDQLHSRKTALMAQNKTIAVALLLATLVAVMGKEPETLEEAVRAGCKEECSEQKKKAPIDEKQCEDFCFIKTKSIFEAHKGVKDLKADRFIDFCNNECNAVYKEDPATSKKCAESCEADAKEAEVFLDKVVAYIQTTKQA

SEQ ID NO: 195388 - protein, 105 aa, Oryza sativa
  Clone ID: PAT_MRT4530_91341C.1.pep
MNLYMALNREWWCRSLRRCQGFFDSDLWVTVVNRGRWREYGSASMALETEEAAVTSRCRRGSMRHGNGDDPTSAARRKLARLTNGVMMVPRRSKRQATMATAIVI

SEQ ID NO: 195389 - protein, 94 aa, Oryza sativa
  Clone ID: PAT_MRT4530_91342C.1.pep
TLLIEPKPQEPTKHQYDWDVATTFSFLQKYGLTGEFKINVECNHATLSGHSCHHELETARINGLLGNIDANTGDPQIGWDTDQFLTDISEATLV

SEQ ID NO: 195390 - protein, 217 aa, Oryza sativa
  Clone ID: PAT_MRT4530_91343C.1.pep
MARLHVPRLGMLLLQERVFWAPLRHVQVAHGHHLHSRWFRTATDLADQHHHVGPGGRASHVAVEYYVRHPPYLIGDGEGDWHEHVENVTKSIDGERLTMARIRLLLGKSKIDAPWPPPTQVSYLASLLCDIGKTPTVRYWAEWKPWPPPQEIGTTHIRVNQWASAKLWTFLTWTSPVAEKWAAELKEKGIRLEDVEFDWKTLDPDVQEVDYITWVCS

SEQ ID NO: 195391 - protein, 656 aa, Oryza sativa
  unsure (1)..(656): unsure at all Xaa locations
  Clone ID: PAT_MRT4530_91344C.1.pep
MASSLLRASPLSLLSRLKPLYPSPTASHLRRLLLLSTASFTSSASCSPSPLRTLAATDAATPQPDEVAVPSPAAXEAKRERLQPLQWPARNAMCCDLGAGDASRRVRLGGWIALHRAXHAGLTFLTLRYRSGTVQVTTLPEYPEVYAVVNKLRVELVVAVEGVVRSRPTEAINTDMKTGVLDVAADIIYVLNYVTPSFRFPITTADTVKENFHEESCLRYWVPDLRGPHINSNFNLHLRNVERKRQAVAGKEDFFTDMITIYPCPHRIQLQSEIMEVTRCLHRYHHAWSLDDEYARSDEQLKFQKLDRVLSVIAMDLMXKLNKELMIQMFQEVADVHLPILSPMLTYTEAMNRYGTDRPDLRFDWQLKDVSDAFLGSSFKIFADTLENGGVIKALCVPGGAKEFPKDNLKKGTVCNQTSQAGAMDMPFIEIMDNGELEGIGLLVASVKTVHEEGQERTLHPSSRENTLXELCSRNKRQIDRLXRIQVDHQQFTIRIDTSAHSILWVTDFPMFEWNSDEQRYEALHHPFTAPNPEDMNDLPSARALAYDMIYNGVEIGGGSLRIYKSDVQQRIFEIIGISPEQAEEKFGYLLECFDMGAPPHGGIAYGLDRLVMLLAGENSIRDVIAFPKTTTAQCSLTKAPSPVDPQQLKDLGFRT

SEQ ID NO: 195392 - protein, 765 aa, Oryza sativa
  Clone ID: PAT_MRT4530_91345C.1.pep
MVAVLALLSTGLSLSLSRADLAAVVVAEPRLLCAKADRASSRFSSRPTAMVGPTTQPPPPSSRHAAPRRVPRCAPKMLVASRHGAHPRRRRAGGNGVADELALPLAGGLALLLAFVTAAAVLSGGDRREEGDRRRPDLPGGAAGPRVAIFSAPLPPPDSSPARQELAVRSWLALPGNVSVVLLAAHPSAHALAGRLGGRVTVDAAIDISFTGTPFFHSIVARAQAADSDICVLVDAEIILLPETITLLKHFSRSDLDWLVFSASRNISAFPYHLVDNGTQWADEHGKQVSFKKENQSDKWAGHGSDRGLIVAWNNPSTRMVAGVMPSFLNGRGVHNWWLIHEVLSSETRLVFDASNLVLGLYPENFSEKRSTSTSRNVSNPDGSWEYDVNRHLAALYGSYCYELPRRNSPMVYKVVKQFEDYMFSKNEGPNLSNSVINKEQNVHPEGGSLCEKEISYSSAVNLPHSLEMLLELVADKNRSVVLAVAGASYRDMLMSWVCRLRRLRVTNFVVCALDQETYEFSVLQGMPVSRDTLSPNNVSFDDCHFGTQCFQQVTKVKSRIVLKILRLGYNVLLSDVDVYWFHNPVSFLHSLGPGTFAAQSDEFNQTGPINMPRRLNSGFYYARSDDATITAMEMIVKHATNSGLSEQPSFYDILCGKDGANRIGDDRCLEPSTNLTIVFLSRDMFPNGAYGGLWEKKHGVSSACRELGCVIIHNNWVNGRRKKLHRQMASGLWDYDPGSRLCLQNWSNASRFSVQTDDPVSYDS

SEQ ID NO: 195393 - protein, 81 aa, Oryza sativa
  Clone ID: PAT_MRT4530_91346C.1.pep
MATMPYQDRRGAVSRRAGRRVDGPGPTLGEQGPMARDGRRCRAPGRRRRRGADAGRAGVDGTASPVDGGWRSNGIGRERIP

SEQ ID NO: 195394 - protein, 155 aa, Oryza sativa
  unsure (1)..(155): unsure at all Xaa locations
  Clone ID: PAT_MRT4530_91347C.1.pep
SRCEIQDIVDNKEFKTVNXQLFQXAMLAEKXIAGGDQQVKNKASTHTPRAKPSXRLPEPISFWAPPPTSKRPVASGVFTAPKPPSPTLANSGKGSSQVSTKSASSVASTGRTPRIQACILPMGERDAATGVACAVFPPAISTAAAAARDRWLGLA

SEQ ID NO: 195395 - protein, 94 aa, Oryza sativa
  Clone ID: PAT_MRT4530_91348C.1.pep
FCGLRFSVMTNTDDESDLIHSIKPWGQSRHLSERIALRVALARFNFLLLLLLLYSCKNVSFASNLRVYYRSRCSKLLYFWMRFSLMNTQMTSPI

SEQ ID NO: 195396 - protein, 116 aa, Oryza sativa
  Clone ID: PAT_MRT4530_91349C.1.pep
MKIKDPAARVPSPARRVFSPAGGVLPLETDALAVAPSQGGRRLSRGASYHPPPGRRCPFPSGRRSLLGGITFFSGTMAAPSSWEPLGGGTLLMAHGGSTRAIHHDLGGSGILGSNE

SEQ ID NO: 195397 - protein, 39 aa, Oryza sativa
  Clone ID: PAT_MRT4530_9134C.1.pep
VNTVKNSDILSLSLNKMFKLVVNAKSRPIMCKKTQKSVA

SEQ ID NO: 195398 - protein, 161 aa, Oryza sativa
  unsure (1)..(161): unsure at all Xaa locations
  Clone ID: PAT_MRT4530_91350C.1.pep
KNQEPRRTNNREKEILQELARTPTHELARTLTRPRPLVAAAAADAASAGRRSRLGRVRSLLPPPRRPHPPVAAAATDATSAGRCRRRGRVRRRSRRCRQCRVCLPPPPMRXRVRSSPRPMPCPLAATAPADEAASACRRRRPRRRGGVRRHMMVEREKAEE

SEQ ID NO: 195399 - protein, 216 aa, Oryza sativa
  unsure (1)..(216): unsure at all Xaa locations
  Clone ID: PAT_MRT4530_91351C.1.pep
LTYKIILVKKVSKKGTKNLALNDQGFAELILTGXWYIWWERRQVVNGERIQMAARSAISIXALTLNYKMAKKKSTEGTGAVIRDSQGTFLAGSCRYLSHIADAAMAEAYALRDGLILAXQIGCQNIITQSDCLQVVETIQDGGFSATTAVAIFYEYQILIYDFVKVSVEHCKKEANCVAHVLANHAFKFKNYLCFFNKFLIFLLNVLVNDVIMFTD

SEQ ID NO: 195400 - protein, 105 aa, Oryza sativa
  Clone ID: PAT_MRT4530_91352C.1.pep
SGKEKNRATADTTAARMGKDARTDGGLFVVVAVVHHRLGLRAPLSRLALSSPHRSSAPSRASSRRARARRRDWVGKTRMPVCETDTQGVAGVGDRMCGAHHCPAQ

SEQ ID NO: 195401 - protein, 720 aa, Oryza sativa
  Clone ID: PAT_MRT4530_91353C.1.pep
MVYYGKFSNGVQVAVKTLHRTLDRRTEEQLYYHIKAPPPRHLFTSTSRTARLTASCSSMAAAVAWCARPVRYLHEEFQHWIMHYNIKLRKVLLIADVLRAQVSGLYWAAPWARMELMGEYCSNAPCKWLLDLGKGAAHDTDTHNLFDGMPSQSEMPKENQRISKPVPINSTVNKKEKWLDKALDRILEKAITVILKGASSPTPMAPPLPVHTNCLMECPNDSSSSTISRSIYINEGTAPTVILEHEDGEGKDHMPFIVIKDLPEFTPTMCSMICSSSDTKPDLTVAVVVTCATSVESSMEMVATGSTTDDTHIDTLDSTKVMPASCSTVGLDVKGGADHTRVTCRTMMGVPEGVLVPDASSKVFSPWLMAEMDLIPLLPTGCSMKCPKDKKLLMGNAKRNSWPPSWLGGVIRRWELQPLHWPGSKLYLEGLPLMPPWPPPAGVSFLAWEPFDIGVLVIGTVILTQEMAGLKPWPPPSLVSSLAWGMEGREVYGLAMQGHHMNSQSMELARIISKELARIMKERQLSNKELQCIFEGASPGKMCINPKALIHDGSLRSLLSKLQVHSIPNALSFTKQEHIKSLSLSQCSDIMVRFDLTWNLEVHLDSGGVLLQFLNAAALLYHRRVAQGYRRTLKLSICESISMLQVIKSIAANLIWDVEARNRLVVKKQDEDFSGNHWASFQTKMQRVLTSRLAKLCNRDNTHLTMTGVRGTRGYVALEL

SEQ ID NO: 195402 - protein, 174 aa, Oryza sativa
  Clone ID: PAT_MRT4530_91354C.1.pep
GDQTVLTMANDYQGKAQDFALVVPVPVVLQEDQVNVGERKIIERLDNFSAPRLVEYFDNNPCETYGGRQFMDAMPAAPSMTRGLQEKISNEALGVTIENQFSVGEYDILILSAKESNGLETWLNQNNYRIPPGATDVLGAYIKQGLKFFVAKVNLKEFDRQGFQALRPLMMAYE

SEQ ID NO: 195403 - protein, 144 aa, Oryza sativa
  Clone ID: PAT_MRT4530_91355C.1.pep
ITGKALMLDEIINYVQSLQRQVEFLSMKLATMNPQLDFDSHYMPSKDMSHMPVPAYPSSDPTTTTAFSYTGSPATADPFTVYNCWELDLHTAMQMGATTGLSQDGPIATMAPSPSPLPHHPPLHGFYGGQQQQGTTVNHMKAEP

SEQ ID NO: 195404 - protein, 292 aa, Oryza sativa
  Clone ID: PAT_MRT4530_91356C.1.pep
MAGRRLPAFCRGGRTVAVAAATTTTRVRKRVQRVAAAYHAASKLPPPPAVATKASLGGGCADAPCAGGWCHSYGDGAAAAAVAGAGGGGGGGKKDGGGRRVMVVADGRAEAAGALQWALSQAVRRNDAVLLLAVVRPAANASSDGGGGGGESSCVNISRTRCYQQLDAMRSMCESARPEVKVKVCVMEAAGRERAPAVVEAARRHGASLLVLGQRRRRRAAVARWLQLALWPAVAAAAAKSKYWRRRGARRSTTTVEYCIEHAPCVALGVRRRSSGGYLVSSKRHKDFWLLA

SEQ ID NO: 195405 - protein, 567 aa, Oryza sativa
  Clone ID: PAT_MRT4530_91357C.1.pep
VEEVNISLRGGKTLPDPHKSKAPNVDKPTKEASPPGEAPEAPKTKTGSKEKPAVDYNVLAHLKRIPALLSVYDALMNVPDLREALIKALQAPEVYEVDMAKHRLYDNPLFVNEITFADEDNIIEGGDHNRPLYIEGNIGSAHLRWILIDPGSAVNILPVRSLTRVGFTTKDLEPTDVVICGFDNQGKPTLGAITIKIQMSTFSFKVRFFVIEANTSYSALLGRPWIHKYRVVPSTLHQCLKFLDGNGVQQRIIGNFSPYTIQESYHADAKYYFPVEENKQQLGRTAPAADIIIEPGTETTPEHVCPIYYTNIAQSKTLYLNTDHLGGNLSRKRETAQKQRRCANYHHLTGKMDSKQGSRACTTGSGQEESCRDRGGKSGCSVHAAPSPLHFSFYPPHSDTEEACTTMKAEPRMARLLEKAGINLQRNNRLPPPPAVAAVGVEEELDVAGALKQLDDGGQPTIDELVEMNLGTKDDPHPIFVSGMLTKEEREDYRSFLMEFRDCFAWTYKEMPGLDPRVATHKLAIDPQFRPVKQPPRRLRPEFQDQVIAEVDRLINLGFIKEIQYPR

SEQ ID NO: 195406 - protein, 2771 aa, Oryza sativa
  Clone ID: PAT_MRT4530_91358C.1.pep
MEEVVGKPLCRRAPRIAGAVADCQDFYPFPCRRPRPAEVINWELLKAPVTRRPHRTRGPSIIKNTPPPFVIQFGSLPPVTFFEYGSKVYMQQAQDVTQFQEAQSKKQRKRASAKAKKERRTLMLEARTLLKESVVAEIKGDIQAAQKLRVKASNRRSITASLRAPDPVATPKLPTPTVQHTEVELLEALEAVSDNLRRHISHTRRANSPHPLRNYRRKYRKVQRLHQLVSSRIAQSSLLEEDWSLDTSVLIKKVFKFPSILEPPYDLFPDEWACEPTKIKEKVRCAIMKEYWKRRDREHLVLPGSTIFVDYNTYTPRQQSTWESCLHLSAVGGSSDYNNNRFAVLRSEAPAPRSEDLRQELRELQDRMAQLGRRLQDHEAPRSSSTQAGGRSRRYQPSYHPQHDRRTLAPRRTLPSTQVMHQRQTALPPRWNRWSRHQDYPTSSRLAQEWRVREAPSSQVPPHVPSSPRREVYTQRRRETNAPNPATRQVAPPLLPTPSIPPRRQHAPTENQRKRERRRNNRYALYRELEDLVLKHTQVRVRPDGEVHQEDERIVFRISPSLERDARYNYLIARLTPKPRRTLDVADKNREQALTQPCPVTILQRGKGPVQATLGISLSTSARQSKENQSTPMEGVEQTPVEQVDKASRQEEAIINPMVDVLPQQESSSVPPARVEQVAGSKNIEDPKESIVMCSALAAHYETKPNAAWVPPPVTHDFTYPSDEEIVPNPRANFSKTFLPQLDQEKDRYLIGAKHSDGEGYPNNFDSAPAHVTAEGDPRQHARQHAPRGENPSIGNWATMKEVFKKHFVAMKKDFSIVELSQVRQWRDEAIDDYVIRFRNSFVCLAREMHLEDAIEMCVHGMQQHWSLEVSRREPKTFSALSSAVAATKLEFEKSPQIMELYKNASAFDPTKRFNATKPSGSGNKPKVPTEANSTKVFSTAPQGQVPMIGAKNEQVGGRQRSTLQDLLKKQYIFRRELVKDMFNQLMEHRALNLPEPRRPDQVTMTDNPLYCPYHRYIGHAIEDCIAFKEWLQRAVNEKRINLDADAINPDYHAVNMVSVEPFPQKQREGRRATSWAPLAQVEDQIAKIMLTKAPATHVEASHGDNNRAWSIVRWKPQPMSFPPRRPQMKLSPHTHPTSRRWLDPSRRRPPPRFVPFSEGDESFPRRGRELPTLAQFLPKGWEQSSTSTREAKGVNNSIPTPDIAPCNVILTYNDSTSTGSDETFTGREREIFHAELDPEKTKVEEVNISLRGGKTLPDPHKSKVPNVDKPAKKASPPGEAPEAPETKTGSKEKPAVDYKVLAHLKRIPALLSVYDALMMVPDLREALIKALQAPEVYEVDMAKHRLYDNPLFVNEITFADEDNIIKGGDHNRPLYIEGNIGSAHLRRILIDLGSAGKPTLGAITIKIQMSTFSFKVRFFVIEANTSYSALLGRPWIHKYRVVPSTLHQCLKFLDGNGVQQRITSNFSPYTIQESYHADAKYYFPVEENKQQLGRTTPAADIIVEPGTETTPEHVYPIYYTNIAQSKTLYLNTDHLGGNFSRKRETAQKQRRCANYHHLTGKTESKQGSRACTTGSGQEESCRDRGGKSGCSVHAAPSPLHFSFYPAREEACTTMKAEPRMARLLEKAGINLQRNNRLPPPPAVCEDWWAQAEEFIKRRCKEQPKYGLGYINVDEPDDEDEVFEDDIFHCCTISTTTRGDALLQQHPFEVAAVGVEEELDVAGALKQLDDGGQPTIDELVEMNLGTEDDPRPIFVSGMLTEEEREDYRSFLMEFRDCFAWTYKEMPGLDSRVATHKLAIDPQFRPVKQPPRRLRPEFQDQVIAEVDRLINVGFIKEIQYPRWLANIVPVEKKNGQVRVCVDFRDLNRACPKDDFPLPITEMVVDSTTGYGALSGYNQIKMDLLDAFDTAFRTPKGNFYYTVMPFGLKNAGATYQRAMQFVLDDLIHHSVECYVDDMVVKTKDHEHHQEDLRIVFERLRRHQLKMNPLKCAFAVQSGVFLGFVIRHRGIEIEPKKIKAILNMPPPQELKDLRKLQGKLAYIRRFISNLSGRIQPFSKLMKKGTPFVWDEECQNGFDSIKRYLLNPPVLAAPVKGRPLILYIATQPASIGALLAQHNDEGKEVACYYLSRTMVGAEQNYSPIEKLCLALIFALKKLRHYMLAHQIQLIARADPIRYVLSQPVLTGRLEFLATHPMPDDSPLIANLPDEEIFTAELQEQWELYFDGASRKDINPDGTPRRRAGAGLVFKTPQGGVIYHSFSLLKEECSNNEAEYEALIFGLLLALSMEVRSLRAHGDSRLIIRQINNIYEVRKPELVPYYTVARRLMDKFEHIEVIHVPRSKNAPADALAKLAAALVFQGDNPAQIVVEERWLLPAVLELIPEEVNIIITNSAEEEDWRQPFLDYFKHGSLPEDPVERRQLQRRLPSYIYKAGVLYKRSYGQETAKTCHGCQIHDNFKHQPPAPLHPTVPSWPFDAWGIDVIGLINPPSSRGHRFILTATDYFSKWAEAVPLREVKSSDVINFLERHIIYRFGVPHRITSDNAKAFKSQKIYRFMEKYKIKWNYSTGYYPQANGMAEAFNKTLGKILKKTVDKHRRDWHDRLYEALWAYRVTVRTPTQATPYSLVYGNEAVLPLEIQLPSLRVAIHDELTKDEQIRLRFQELDAVEEERLGALQNLELYRQNMVRAYDKLVKQRVFRKGELVLVLRRPIVVTHKMKGKFEPKWEGPYVIEQAYDGGAYQLIDHQGSQPMPPINGREQSSWSFGDSRDTFFGNLI

SEQ ID NO: 195407 - protein, 1303 aa, Oryza sativa
  Clone ID: PAT_MRT4530_91359C.1.pep
MSTFSFKVRFFVIEANTSYSALLGRPWIHKYRVVPSTLHQCLKFLDGNGVQQCIIGNFSPYTIQESYHADAKYYFPVEENKQQLGRTAPAADIIIEPGTETTPKHVCPIYYTNIAQSKTLYLNTDHLGGNLSRKQETAQKQQRCANYHHLTGKTESKQGSRACTTRSGQEESCRDREGKSGCSVHAAPSPLHFSFYPVREEACTTMKAEPRMARLLEKAGINLQRNNRLPPPPAVCEDWWAQAEEFIKRRCKEQPKYGLGYINVDEPDDEDEVFEDDIFHCCTISTTTIGDALLQQHPFEVAAVGVEEELDVAGALKQLDDGGQPTIDELVEMNLGTKDDPCPIFVSGMLTKEEREDYRSFLMEFRDCFAWTYKEMPGLDPRVATHKLAIDPQFRPVKQPPRRLRPEFQDQVIAKVDRLINVGFIKEIQYPRWLANIVPVEKKNGQVRVCVDFRDLNRACPKDDFPLPITEMVVYSTTGYGALSFMDGSSGYNQIKMDPLDAFDTAFRTPKGNFYYTVMPFGLKNAGATYQRAMQFVLDDLIHHSVECYVDDMVVKTKDREHHQKDLRIVFERLRRHQLKMNPLKCAFAVQSGVFLGFVVRHRGIEIEPKKIKVILNMPPPRELKDLRKLQGKLAYIRRFISNLSGRIQPFSKLMQKGTPFVWDEECQNGFDNIKRYLLNPPVLATPVKGSPLILYIATQPASIGALLAQHNDEGKEVACYYLSRTMVGAEQNYSPIEKLCLALIFALKKLRHYMLAHQIQLIARADSIRYVLSQPVLTGRLGKLALLMMEYDITFVPQKAIKGQALAEFLAAHPVPDDSPLITNLPDEEIFTAELQEQWELYFDGASRKDVNPDGTPRRRAGAGLVFKTPQRELVPYYTVARRLMDKFEHIEVIHVPRSKNAPADALAKLAAALVFQGDNPAQVVVEERWLLPAVLELIPEEVNIITTNSAKEEDWRQPFLDYFKHGSLPEDPVERRQLQRRLPSYIYKAGVLYKRSYGQEVLLRCVDRSEANQVLQEVHHGVCGGHQSRPKMYHSIRLAGYYWPGIMADCLKTAKTCHGCQIHDNFKHQPPAPLHPTVPSWPFDAWGIDVIGLIDPPSPRGHRFILAAIDYFSKWAEAVPLREVKSSDVINFLERHIIYRFGVPHRITSDNAKSFKSQKIYRFMEKYKIKWNYSTGYYPQANGMAEAFNKTLGKILKKTELDAVEEERLGALQNLELYRQNMVRAYDKLVKQRVFRKGELVLVLRRPIVVTHKTKGKFEPKWEGPYVIEQAYDGGAYQLIDHQGSRPMPPINGRFLKKYFV

SEQ ID NO: 195408 - protein, 128 aa, Oryza sativa
  Clone ID: PAT_MRT4530_9135C.1.pep
MSMSFSPFTNIRSGTFPDQWVPALRVASCPLSGVELQKPPATNRPRELARPRVNTSRGRAGRAETQEETVPRGTVQKRTRTRRGASHKSRSHERDAGSRGSYGVLRHCVVGDSWLVGVHGMGCSTCHG

SEQ ID NO: 195409 - protein, 282 aa, Oryza sativa
  Clone ID: PAT_MRT4530_91360C.1.pep
MALNPLFTVTFNVSGSGSDNYGDFIAGIRKRVANPRHFSHNRPVLPPVEPDVPPRRWFHVVLRTQTSELTLATRADNLYLEGFRGSDGTSAWWELTRGLIAGATYLGFGGSYRELLGHTDNMVGVTLGPQQMTQAVDTLAGLAASGGGAARQRAGEALATLLLMVNEAVRFLTVAELVGGFMNPRAVRKSGTITADMKEQVNGWKVLSRALLTMDALQLEDSNSASKHNKVDTKKMEQEKKAWEAAEKLAVEAAKAVGILLFVEKVPAGMTKATALQLFHGN

SEQ ID NO: 195410 - protein, 495 aa, Oryza sativa
  Clone ID: PAT_MRT4530_91361C.1.pep
MEEVIGKPPCRSAPRITGAAADCQDFYQFSCRRLLLAGGLSIIENTLTPFVIQFGSLPPVTFFEYGSKVYMQQAQDVTQFQEAQSKKQCKRASAKTKKERRTLMLEARTLLKESVVAEIKGDIQAAQKLRVKASNRRSSTASLRAPDPAATPKRPTPTVQHTEVELLEALEAVSDNLRRHISHARRANSPHPLRNYRRKYRKVQRLHQLVSSRIAQSSVPEEDWSLDTSVLIKKVFKFPSILEPPYDLFPDEWACEPTKIKEKVRRAIMKEYWKRRDREHLVLPGSTISFDYNTYTPRQQSTWESCLHLFAVGGSSDYNNNRFAVLRSEAPAPRGEDLRQELHGEVHQEDERIVFRISPSLERDARYNYLIARLTPKPRRTQDVADKNREQTLTQSRHVTILQRGKGQVQATLGTSPSTLESSSMPPARVEQVAGSKNIEDPKESIVMCSALAAHHETKPNAAWVPPPITHDFTYPSDEEIVPNPRANFSKTFLP

SEQ ID NO: 195411 - protein, 484 aa, Oryza sativa
  Clone ID: PAT_MRT4530_91362C.1.pep
GLRGGPAMADAGELEGFRRLSGLAFDELSRRDLSSASGPPPADLPTLLRLCLLSLPLSADAELALRRCTRLLASLRGILCRDLDPSLLPALEVFLDNLVSSNQLMTCFTAANAVMPRRSRITSLGSVCSGGNLFVMELMSHHFISSVQDEEGFLSALSWSAKAKLEVPEIGLSGALSLLHKSCLLSIPPAVQAHFLLLACRCADNGDLNMNLLAFEHAMDVYLSYLPALGVFRRTSGVKRPLGCSMKRRPLSSCLQAATHQKLACDINRLVLFCNLHSNDDLPINESDIVRFIEENQQVLHEQSRQDTITAVKSIVSNVLLLAKQEEMDRLYPNVSEEIICLAAALRLMGSSFIRIMHCIRQMTVGDGCQTTHCLEPCKVFNIVSETISLLGHYEPNELQRNDLFDTIGCIFMMMMANLCATEMYHFLIDGSKASKVRCADQDGSLKASVPRKSSTVIALRFQNTQQVYIQDKLGPGFGEGCLF

SEQ ID NO: 195412 - protein, 2882 aa, Oryza sativa
  unsure (1)..(2882): unsure at all Xaa locations
  Clone ID: PAT_MRT4530_91363C.1.pep
MLHDDLQRGLSIIENTLTPFVIQFGSLPPVTFFEYGSKVYMQQAQDVTQFQEAQSKKQCKRASAKTKKERRTLMLEARTLLKESVVAEIKGDIQAAQKLRVKASNRRSSTASLRAPDPAATPKRPTPTVQHTEVELLEALEAVSDNLRRHISHARRANSPHPLRNYRRKYRKVQRLHQLVSSRIAQSSVPEEDWSLDTSVLIKKVFKFPSILEPPYDLFPDEWACEPTKIKEKVRRAIMKEYWKRRDREHLVLPGSTISFDYNTYTPRQQSTWESCLHLFAVGGSSDYNNNRFAVLRSEAPAPRGEDLRQELRKLQDRMAQLGRRLXDHEAPQSSSTQAGGRSRRYQPSYRPQHDRRTLAPRRTLPSTQVMHQRQTALPPRWNRWSRRQDYPTSSHPAQEWXVREAPSSQVPPHVPSSPRREVYTQRQHETNAPTPATRQVAPLLLPTPSIPPRRQHAPTENQRKRERRRNNRYALYRELEDLVLKHTQVRVRLDGEVHQEDERIVFRISPSLERDARYNYLIARLTPKPRRTQDVADKNREQTLTQSRHVTILQRGKGQVQATLGTSPSTLVRQSKKNQSTPMEGVEQTPVEQVDKASRQEEAIINPMVDVLPXQESSSMPPARVEQVAGSKNIEDPKESIVMCSALAAHHETKPNAAWVPPPITHDFTYPSDEEIVPNPRANFSKTFLPXLDQVASRPGANTRMKAIAIKNVETTPSQARKDLEEHVEVEDLDELESTSSSSLEVNLDLPRYNELNPSLPSDGEGYPNNFDSAPAHVTAEIDPRQHARQHAPRGENPSIGNWATMKEVFKKHFVAMKKDFSIVELSQVRQRRDEAIDDYVIRFQNSFVRLTREMHLEDAIEMCVHGMQQHWSLEVSRREPKTFSALSSAMAATKLEFEKSPQIMELYKNASTFDPTKRFNATKPSGSGNKPKVPTEANSTKVFSTAPQGQVPMIGAKNEQVGGRQRSTLQDLLKKQYIFRRELVKDIFNQLMEHRALNLPEPRRPDQVTMTDNPLYYPYHRYVGHAIEDCIAFKEWLQRAVNEKRINLDADAINPDYHAVNMVSVEPFPQKQREGRRATSWAPLAQVEDXIAKIILTKAHATHVEASHGDNNRPWSVVRRKPQPMSFPPRRPQMKLSPHTHPTPRRWLDPSRQRPPPRFVPFSEGDESFPRWGRELPTLAQFLPKGWEQSSISTREAKEVDNSTPTPNIAPCNVILTYNDSTSTGSDETFTGREREIFHAELDPEKTKVEEVNISLRGGKTLPDPHKSKAPNVDKPTKEASPPGEAPEAPKTKTGSKEKPAVDYNVLAHLKRIPALLSVYDALMNVPDLREALIKALQAPEVYEVDMAKHRLYDNPLFVNEITFADEDNIIEGGDHNRPLYIEGNIGSAHLRWILIDPGSAVNILPVRSLTRVGFTTKDLEPTDVVICGFDNQGKPTLGAITIKIQMSTFSFKVRFFVIEANTSYSALLGRPWIHKYRVVPSTLHQCLKFLDGNGVQQRIIGNFSPYTIQESYHADAKYYFPVEENKQQLGRTAPAADIIIEPGTETTPEHVCPIYYTNIAQSKTLYLNTDHLGGNLSRKRETAQKQRRCANYHHLTGKMDSKQGSRACTTGSGQEESCRDRGGKSGCSVHAAPSPLHFSFYPVREEACTTMKAEPRMARLLEKAGINLQRNNRLPPPPAVCEDWWAXAEEFIKRRCKEQPKYGLGYINVDEPDDEDEVFEDDIFHCCTISTTTIGDALLQQHPFEVAAVGVEEELDVAGALKQLDDGGQPTIDELVEMNLGTKDDPHPIFVSGMLTKEEREDYRSFLMEFRDCFAWTYKEMPGLDPRVATHKLAIDPQFRPVKQPPRRLRPEFQDQVIAEVDRLINVGFIKEIQYPRWLANIVPVEKKNGQVRVXVDFRDLNRACPKDDFPLPITEMVVDSTTGYGALSFMDGSSGYNQIKMDPLDAFDTAFRTPKGNFYYTVMLFGLKNAGATYQRAMQFVLDDLIHHSVECYVDDMVVKTKDREHHQKDLRIVFDRLRRHQLKMNPLKCAFAVQSVVFLGFIIRHRGIEIEPKKIKAILNMPPPRELKDLRKLQGKLAYIRRFISNLSGRIQPFSKLMKKGTPFVWDEECQNGFDNIKSYLLNPPVLAAPVKGRPLILYIATQPASISALLAQHNDEGKEVACYYLSRTMVGAEQNYSPIEKLCLALIFALKKLRNYMLAHQIQLIARADSIRYVLSQPVLTGRLGKWALLMMEYDITFVPQKAIKGQALAEFLAVHPVPDDSPLITNLTDEEIFTAELQEQWELYFDGASRKDVNPDGTPRRRAGAGLVFKTPQRGVIYHSFSLLKEECSNNEAEYEALIFGLLLALSMEVRSLRTHGDSQLIIRQINNIYEVRKPELVPYYTVARRLMDKFEHIEVIHVPRSKNAPANALAKLAAALVFQGDNPAQVVVEERWLLPAVLELIPEEVNIITTNSAKEEDWRQPFLDYFKHGSLPEDPVERRQLQXXLPSYIYKAGVLYKRSYGQEVLLRCVDRNEANQVLQEVHHGVCGGHQSGPKMYHSIRLAGYYWPGIMADCLKTAKTCHGCQIHDNFKHQPPALLHPTVPSWPFDAWGIDVIGLIDPPSSRGHRFILAATDYFSKWAEAVPLREVKSSDVINFLERHNIYRFGVPHRITSDNAKAFKSQKIYRFMEKYKIKWNYSTGYYPQANGMAEAFNKTLGKILKKTVDKHRRDWHDRLYEALWAYRVTVRTPTQATPYSLVYGSEAVLPLEIQLPSLRVAIHDELTKDEHIRLRFQELDAVEEERLGTLQNLELYRQNMVRAYDKLVKQRVFKKGELVLVLRHPIVVTHKTKGKFEPKWEGPYVIEQAYDGGAYQLIDHQGSRPMPPINGRFLKKYFV

SEQ ID NO: 195413 - protein, 117 aa, Oryza sativa
  Clone ID: PAT_MRT4530_91364C.1.pep
MAQPNVILKAEMKLVRQPFFLVASKQALHSAEQEARLQTVREGEAGWVEEEEEEEERRRLGGSKEATAFALLLLGFHLFQGVATCQCIFLPFQLIGELEPVQSLPNCSGCSLCLSFS

SEQ ID NO: 195414 - protein, 289 aa, Oryza sativa
  Clone ID: PAT_MRT4530_91365C.1.pep
MATPPEPSSWLSLKVFFLRVSRCEVNESMLDSVTVTHAPLTPDTVLEVSGGSVASNGHVSLRLDRAGGVGAAATEGGDSCTFVSTADVRVSGSARFDVQCRGERLVVGILDTRDAGAGGGGWVMKCQVAAQRGSGLVRRGSKEAKPPVVEVYVAGLARGAPVVFTRAMQLRFRRRRHVKAFMEPIPEHGEPAEDSKETLPPKHETEVSEYRCYKPEQDAGDADYDGFYVKPAGEEDDDGDFSWFTAGVRVGVGISVGICLGIGIGAGLLARSYHSTSRSLRSRLISSLF

SEQ ID NO: 195415 - protein, 173 aa, Oryza sativa
  Clone ID: PAT_MRT4530_91366C.1.pep
MGGCCCCSSRGSETDRAPVHIYRQQNQEEHEPLSSAYDGSSPASAIVAVDTNLDTSTPDTYRAPPAPLPYDVSLPVPENPDLEKSDLKSKTDDQQEESLEVDEFKSCEKCVAEDKPDEEDVCPICLEEYDAENPRSLTKCEHHFHLCCILEWMERSDTCPVCDQITLIDDMYE

SEQ ID NO: 195416 - protein, 672 aa, Oryza sativa
  unsure (1)..(672): unsure at all Xaa locations
  Clone ID: PAT_MRT4530_91367C.1.pep
VPRRDGGGGGDGGGHGLPRALXRELQALCKRNGVRANMTNAAMADALQSLPTVDGVDEIGTAALCLPTPSRSTMKSALKAAAAIGEEQQHGSPLPRGRRVSVMSPEAIRLDVEEGEDEMKRDLVKEIVRTPGVALRSTSRRARATPAPIPTPATTRRTAAARKVEEAAPTPATLRRSQRTAARKAAAPVVEEVTATKTTTRRSARSKVMVDLEQEVEDMAVALQEVKVQEEDPKDVASDEKCDEEEEATKILGGNSKEVESEEGEEVVSSAAPTELAVISVMSCDDPKEEEIVATGEEPAKTQEVMEDSPILGVLSKPEPVEPLSEKIEDASVGDGLGFGKLSALKEITGEMNDKEVDADEVPEEKLPADVTDDKTSEEDDLNEVEKLSAVEIPQADLTGDKTSEEEDLNEVKEGSAYENPQADRIDAESSEEDDLDGDYSEESDIDEESNEEGMLDEEFAAEEYASSEETDDESDPSEVATDSDEVEVEKLQVAMEDGLTAEANQVDDEEDDFSGDLPSDFDNADNFSDDETESDATVVISSASKAAVVKTLDDSSVTEASSEEEVSQQEVEASVNSIVKSLDEFTFTVEGTQKDELTEEMKSTDDAEDVGAKELKKEKKKKKPTVQELNATSMRKLKTMLKEELIAKAAAGEGKRLALAELDDNAGGVDC

SEQ ID NO: 195417 - protein, 179 aa, Oryza sativa
  unsure (1)..(179): unsure at all Xaa locations
  Clone ID: PAT_MRT4530_91368C.1.pep
MLSRTKNLAFDLEPATSYSWGDCHTFPFHLXDRESIFRLERIQLSFXSFKPPPDFRGFPNLRKLDLNLVHLNREDLXVMLHGCHNLEWLSLVRCYLNGKLELCNPLSRLAHLAVIQCGATMVEIHVPKLANFKYHGDFVSIAINPASKLENAYIRFFKATFEDALSALLNGIPSIQNLT

SEQ ID NO: 195418 - protein, 354 aa, Oryza sativa
  Clone ID: PAT_MRT4530_91369C.1.pep
MSCNSAEVAANDGSSNGGEKQQQQEEEVVCVTGAGGFIGSWVVKEHLLRGYRVRGTARDPTKNAHLLALDGAGERLTLCRADVLDSESLRAAFAGCHGVFHVASPVSNDPNLVPIAVEGTRNVVNAAADMGVRRVVFTSSYGAVHMNPNRSPDTVLDETCWSDPKFCRQTDVYCYAKTMAEKAAEEEAAKRGVQLAVVLPCVTVGPILHPAINTSINHVVRYLTGAAPTYPNAVAAYVDVRDVARAHALVYERHDARGRYLCIGAVLHRAHLLQMLKELFPQYPVTSKCKDDGNPMVEPYKFSNQRLKDLGFEFTPMRKCLYDAVVCMQQKGHLPLVGTAVPDQNVTSNTSSIV

SEQ ID NO: 195419 - protein, 234 aa, Oryza sativa
  unsure (1)..(234): unsure at all Xaa locations
  Clone ID: PAT_MRT4530_9136C.1.pep
YRKGNCPKCPSTTIRSASGPSFSPDFLPISWFITLTPREAQASRPEGVDLDPPRQVAWMADIRAYLGSRTLPXYQRGANGVLLKCIPREQGIEIIGDAHEGECGAYSALRTLVGKAIWQGFYWPTMLXDAQDWVRRCKACQFMPSRLISQPKPRGGYQHLYVAINKFTKWPEAYPVIKIDKHXAPKSNGQVERANTEILKGLKTKMYNVLKKHGDSWTEELPAVLWANRTTLSH

SEQ ID NO: 195420 - protein, 51 aa, Oryza sativa
  unsure (1)..(51): unsure at all Xaa locations
  Clone ID: PAT_MRT4530_91370C.1.pep
GAAREXRGGSAELNGPAGPRRRPKARARAERREGAGGPGPPCVVPGGTRLS

SEQ ID NO: 195421 - protein, 356 aa, Oryza sativa
  unsure (1)..(356): unsure at all Xaa locations
  Clone ID: PAT_MRT4530_91371C.1.pep
MAALSSRRRHGSLRLLAVALLVLAGVASSAAAAGSGRGAFDPSRVVQLSWRPRAFLHKGFLTDAECEHLISLAKDKLEKSMVADNESGKSVMSEVRTSSGMFLEKKQVVFFCSLREMKFDQLFPIYISIVCKALNHVVIFAIWTSILSNRPVLKLDEVVARIEEXIAAWTFLPXDNGESIQILHYQNGXKYEPHYDYFHDKNNQALGGHRIATVLMYLSDVGKGGETIFPEAEGKLLQPKDDTWSDCAKNGYAVKPVKGDALLFFSLHPDATTDSDSLHGSCPVIEGQKWSATKWIHVRSFDISVKQGASTDGCEDENVLCPQWAAVGECAKNPNYMVGTNEAPGFCRKSCNVCAQ

SEQ ID NO: 195422 - protein, 185 aa, Oryza sativa
  Clone ID: PAT_MRT4530_91372C.1.pep
SCNHASPVSSQGKRLTDELARNVKSLTQTYTSNTSLVAILMATITFAAAFTLPGGYSNDSGSEGLPVMAKKLAFQAFLISDTVAMCSSLAVAFICILARWEDLEFLLYYRSFTKKLMWFAYMATTIAFATGLYTVLAPRMLWLAVGICFLSVLLPILTKLLGEWPVVKLRFRLGKTFKTDLLDMV

SEQ ID NO: 195423 - protein, 567 aa, Oryza sativa
  unsure (1)..(567): unsure at all Xaa locations
  Clone ID: PAT_MRT4530_91373C.1.pep
MDLGKSASTSATLKKLQEDGALPSRGTTEREAGGLSRETVERRVGQVMISGPTTVSDIPAPLCEKGAAERDEAINVAASLKEKVVKEASDAATTSGGQAPSKARKFSSVLGHRRKTETPSVXFHLIIRLYDEEGFRHVSAACTTSAHCDDRREXARAKAARAKAGGTSSASPATASTDVVPVVGSREATPTGPVSDPAGGRSLPEAALTWEELQVKMGHLLEAGARGIGREISEVRAETTAANARAERLVRELAEAHEDLTKMRELVAGNERQRKGLEDRISELGDNLSEIRGSLRVTYTGLHQLARECGVESTTPVNPDEFSLTSSLVELATAMGEIPSKHTARIAEETSNGIFTGACHVLACVRLSRPELDLREILDQGAASDTRRERSLRLVDLEDALATQDRRILYWKTKFEVTELKRAMLAVKKEQAVETLRGREVWFSSYLKSCCTSMARVCRELRVICGDPEELAAGYISWLNGACAQLDGIGKRIDEALKQECRRASRYAGGHVLACLRDHRPRLDLEFLREVFPRSRRNPAEIDHLARSMSPLAEKVFQSMDWRWPSW

SEQ ID NO: 195424 - protein, 68 aa, Oryza sativa
  Clone ID: PAT_MRT4530_91374C.1.pep
PSTFLSNKWPTTLAKVTCDGPKPSSLTASRMVSDQWSLVTPTSDGQVTRRPSEVLVSASLERVRTRHR

SEQ ID NO: 195425 - protein, 591 aa, Oryza sativa
  Clone ID: PAT_MRT4530_91375C.1.pep
MPENQLDVEAHHPLLSALHHANVLVDNNNDKELSLMIMILGPSPACRGRSPRGLTAAAAENAPLAVVTVSTEELDGYLSSPGVDSRQPTEILDYDDFGYNYDFNNFDDLDEDYEDNYTPLFLASLWPTTRQKNNGIERELIRQQDIEGTSVFRTPQQNAVAAITILDTLLVDGPLDRSISGDLLATMDLGKSASTSANLKKLQEDGALPGREKAERKAGGLSSETVERRVGQVMISGPTTALPLTDVVGTLADHQVAASLKEKVVKEASDAATTSGGEAPTKARKFSEARAKAARAKSGGTSSASPTTVSTDVVPVVGSQEVTPSGPISDPAGGPSLPEAVLTWEELQVEMGRLLKAGARGIGREISEARAETAAANALAERLVRELAEAREDLTKMRELVAGNERQSKGLEDRMSELGDNLSEIRGSLRVTYTGLHQLAKECGVKSTIPVNLDEFSLTSSLAELATAMGEIPSKHTSRIAEETSNGIYTGVCHVLACVRLSRPELDLREILDQGAASDTRKEVMEEVSDLGESVLPLFEEDADDEDVQQRGQPESLAIIPVLEFEPHVSHDVEDHTLDVEVEMATATSSE

SEQ ID NO: 195426 - protein, 275 aa, Oryza sativa
  unsure (1)..(275): unsure at all Xaa locations
  Clone ID: PAT_MRT4530_91376C.1.pep
CCFFVPWLDSWTRIYAQNSLKIWHVGMCQAVQAPPTIQXRVRSQGPPPNGTRLPNQLSDSIAHLTFTRRDISYVVQQVCLHMHNPRDPHLTAXLKRILRYVRETLRLRHTHXQSPYNDLVVYSNVDWVGCPNTRKSTSGYAXFLGENLVSWSSKRQNTVSHSSPEAEYGAIANVVAEASXIHQLLLDLHTPLPKATLVYCDNVNDVYLSSNHVQHQRTKHVEIDLHFVREKVAVGAIRVLHVPTSCQYAYTFTKGLPTPVFTEFHSSNTVRPIDV

SEQ ID NO: 195427 - protein, 708 aa, Oryza sativa
  Clone ID: PAT_MRT4530_91377C.1.pep
MDLGKSASTSANLKKLQEDGALPGREKAERKAGGTNPQPILGRMVAIKDYIVCGFLPPPSEFLLLVLNFYGLSLLHLNPNSIAFLSVFVHLCEAYIGCPSSRSKWRNRWFYLEIKDSNPVLVVPEEQPDKIPVWTAKPPLTPSLQSFIDIIDDLQERGLSGYEVVADFVGLSSETVERRVGQVMISGPTTVAASLKEKVVKEASDAATTSGGEAPTKARKFSSVLRHRRKAATPSASDASPPPPRRQSIVTIGEKEARAKAARAKSGGTSSASPTTVSTDVVPVVGSQEVTPSGPISDPAGGPSLPEAVLTWEELQVEMGRLLKAGARGIGREISEARAETAAANALAERLVRELAEAREDLTKMRELVAGNERQSKGLEDRMSELGDNLSEIRGSLRVTYTGLHQLAKECGVKSTIPVNLDEFSLTSSLAELATAMGEIPSKHTSRIAEETSNGIYTGVCHVLACVRLSRPELDLREILDQGAASDTRKEVMEEVSDLGESVLPLFEEDADDEDVQQRGQPESLAIIPVLEFEPHVSHDVEDHTLDVEVEMATATSMAELERTMLAVKKEQAVETLRGREVWFVSYLKSCCTSMAWVCRELRVVHSDPEESAAEYISWLNGACAQLDGIGNRIDEALKQECRRTSRYAGGHVLACLRDHRPRLDFEFLHEGFARSRRTSAEIDHLARSMSPLAEKVFQSMNWHWPSW

SEQ ID NO: 195428 - protein, 574 aa, Oryza sativa
  unsure (1)..(574): unsure at all Xaa locations
  Clone ID: PAT_MRT4530_91378C.1.pep
MDLGKSASTNATLKKLQEDGALPGREKTEREAGGTNPQPLLGRMVAIEDYVVYGWFYLEIKDSNPVLVVPEEQPDKIPVWTAKPPLTPSLQSFIDIIDDLRERGLSGYEVVADFVGLSSEVVERRTGQVMISGLTTASNIPAPLCERGAGERDEAINVVTSLKEKVVEEASDAATTSGGKVLTKPRKFSSVLGHRRKAETPSVSDASPPPARRQRIVTIREKEARSKAGRAKSGGTSSTSLVTASTDVVPVVGSREATPSGPASDPAGGRGPPEAILTWEELQTEMGRLLEAGARGIGREVSEARAETAAANARAERLRKGLEDRMSELGDNLSEIRGSLRVTYTGLHQLAEECGVKSTIPANPDEFSLTSSLAELATAMGEIPSKHAARIAEETSNEMLMTRMSXQRGQPESLAMVPVLEFEPHVSHDVEDKTLDAEVEMATTTSRDALATQDRRIQYWKTKFEVAELERAMLAVKKEQAVEMLRGREGGRELRVVRGDPEESAAGYISWLNGACAQHDGIGKRIDEALKQECRRASRYAGGHVLACLXITARAWISNFYMKVFHVLGGTWWR

SEQ ID NO: 195429 - protein, 46 aa, Oryza sativa
  Clone ID: PAT_MRT4530_91379C.1.pep
YCKSTQKKYINIQLFYVFKLNVLRTIDGQSFKSLTEKKNRAAAPSC

SEQ ID NO: 195430 - protein, 601 aa, Oryza sativa
  unsure (1)..(601): unsure at all Xaa locations
  Clone ID: PAT_MRT4530_9137C.1.pep
MPISGSELCHNGENKVSEITTSAKREQNNSYLREWRARKKAKSSGCSIVSPIMPTQATILTPAEHNEDCDVRQSSMCDKDKKRLERNIYQREYRAKKNAEKVEVNKSSATPSTRRRSIAWTYNFGPMFHKDIDLVGSVGSWSKIHYEVAKCKSILIPVCAVGSYILVILDQESRTLYLLDPNPLNPMYENNPTMRYTKKLLNVTNYFNRAMRVACPGSRWIDDIDLWRHIYVTNPVADSKGNCPKCPSTTIRSASGPSLPNPRINGVDQDVGGIELAFNSCQQVPDDAAPTLTPREAQASRPEGVDLDPPRQVAWMADIRAYLGSRTLPEDHAKGEKLARISKRYMLVEGTLYQRGANGVLLKCIPREQGIEIIGDAHEGECGAYSALRXWGITSRFGVPNRIITDNXTQFTSELFGDYCDDMGFKLCFTSPAHPKSNGQVERANTEILKGLKTKMYNVLKKHGDSWTEELPAVLWANRTTLSHATGETPFFLVYAAEAVLPMELSLGSPQVALYNEADQDELHRDDLNYLEERRRRAALRATRYQRSLRHYHQRHVHDFVLHCVQSCLGLSKLSPMWERLYKVIGVPRPGSVRLAMEDGT

SEQ ID NO: 195431 - protein, 150 aa, Oryza sativa
  unsure (1)..(150): unsure at all Xaa locations
  Clone ID: PAT_MRT4530_91380C.1.pep
GDDLSEIRGSLRVTYTGLHQLAEECGIKSTIPANPDEFSLTSSLAELATAMGXIPSKHTARIAEETSNGIYTGAXGAASDTRKKVMEEVDDLGESVLPLFEEDADDEDVQQRGQPESLAIIPVFEFEPHVPHDVEDQTLDAEVEVTTTAS

SEQ ID NO: 195432 - protein, 63 aa, Oryza sativa
  Clone ID: PAT_MRT4530_91381C.1.pep
VVYLDEYYSTFHFSLMCYPRICLTVPSSLEELRPRISPCSFYNIYFSTNIGYVGKHSRLKIWH

SEQ ID NO: 195433 - protein, 712 aa, Oryza sativa
  unsure (1)..(712): unsure at all Xaa locations
  Clone ID: PAT_MRT4530_91382C.1.pep
MDLGKSASTSATLKKLQEDGALPGRENAEREAGGTNPQPILGRMVVIEDYVVCGFLSSPSEFLLLVLNFYGLSLLHLNPNSIAFLSVFVHLCEAYIGVEPFLDLFRFYYELRWMEPNRVSGCVGFRLRDGMKSRYVPFQCPSSRSKWRNRWFYLEIKDSNPILVVPEEQQDSGLSSEAVERRVGQVMISGPTTASDIPAPFCERGVTEHDEAINALPLTDVVGPLADHQVAASLKEKVVKVASDAATTSGGKAPTKARKFSSVLGHRRKAATPSVIFTLSSGYVARKASDVSPPPARRKRIVTIGEKEARANVARAKSGGTSSASPVTASTDVVPVVGSREATPSGPVSDPAGGRGLPEAVLTWEELQVEMGRLLEAGARGIGREISEARAETAAANARAERLVRELAEAREDLTKMRELVAGNERQRKGLEDRMSELGDNLSEIRGSLRVTYTGLHQLAEECGIKSTIPANPDEFSLTSSLAELATAMGXIPSKHTARIAEETSNGIYTGACHVLACRCXDEDVQQRGQPESLAIIPVFEFEPHVPHDVEDQTLDAEVEVTTTASNLKDALATQDRRIQYWKTKFEVVELERIMLSVKKEQAVETLRGREVWFGSYLKNCCTSMARVCRELRVVRGDPEESAAGYISWLNGACAQLDGIGKRIDEALKQECHLASRYFGGHVLACLRXTAHAWISNSSVKVFLVLGGIRRR

SEQ ID NO: 195434 - protein, 69 aa, Oryza sativa
  Clone ID: PAT_MRT4530_91383C.1.pep
LILCHNLIVKCIIIRCTNTGIIGKELIAYWPRCSSAANIIVYPLFGVAVFSYLPRCFNVFQSFFVFNHV

SEQ ID NO: 195435 - protein, 441 aa, Oryza sativa
  Clone ID: PAT_MRT4530_91384C.1.pep
MASIVPVLLRLLLLLLPLPLIRDHLWPSHRRPTPQDDAGELHPIFLVPGASCSDLEARLTEAYRPSTAHCGAMKGKGWFGLWENNTELLVHDYADCSLEQMTLVYDPAANEYRNLPGVETRVPNFGSAWSFGYKNPVNRLQRAQCLGKLRDWLEELGYRDGDTMFGAPYDFRYAPPVPGQTSEVYSRYFSEFMALVEAATKKKQKKAVILGHSYGGMVALEFVRSTPRAWRDAHIERLVLVAPTLQDGFVGSVMKFITGTGIIFVPTATSTRPMWRSFESAMASFPSPAVFGREPLVVTKRRDYSACDMEDLLAALGFGEGVEPFRRRAVPRMYSLEAPMVPMTCINAVGNKTPLQLVLWDDDDDDLLDASPEVAAYGDGDGEINLISMLAFDTEMGRQPGQEKRFKSVKIANANHSTIAIYDFALKRIIQEIIEVNQVCV

SEQ ID NO: 195436 - protein, 108 aa, Oryza sativa
  Clone ID: PAT_MRT4530_91385C.1.pep
MALQLATRSRKSLAIAVAAAVPLLMCLFLVAAAAAAASSETAVASSPQYQPSYGNTYSTCFEVSACDDTGCAIRCRDMGHNPAGSACWTSNVATIFCCCGRGRPPPVA

SEQ ID NO: 195437 - protein, 483 aa, Oryza sativa
  Clone ID: PAT_MRT4530_91386C.1.pep
MNLGKSASTSATLKKLQEDGALPGREKAERKAGGTNPQPILGRMVAIEDYVVVNDQICVFVHLCEAYIGVEPFLDLFRFYYELRWMESNRVSGCVGFRLRDGMKSHYVPFQCPSSRNKWRNRWFYLEIKDSNPVLVVPEEQPDKIPVWTAKPSLTPSLQPFIDIIDDLREQGLLGYEVVADFIGLSSEAVEQCVGQVMISGPTTASDIPAPLCEKGATERDEAINALPLTDVPVGPLADHQVAASLKEKVVKEASDAATTSDGKAPTKARKFSYVLGHRRKAATPSEELQVEMGRLLEAGARGTGREISEARVETAVANARAERLVRELAEACEDLTKMRELVAGNERQRKGLEDRMSELGDNLSEIRGSLRVTYTGLHQLAEECGVKSTIPVNPDEFLLTSSLAELATVIGEIPSKHSARIAEETSNGIYTGACHILACVRLSRPELDLRDILDQGAASDTRKEVMEEVSDLGESVLPLFEE

SEQ ID NO: 195438 - protein, 322 aa, Oryza sativa
  Clone ID: PAT_MRT4530_91387C.1.pep
MELVETASEKQHHNKKAIILGHSLGGMVALEYIEHLFLVTPTLSQGFVTTVRNLVSGPRNLVYVADATDLSLRPMWRSFETSIVNVPSPGVFGHEPPIVVTERRNYSAYDVEDLLAAVGFSDGVEPFRKRTVARMNYHEAPMVPLTCINGVGNRTPQQLVYWDGNFDEPPQIVYGEGDDIINLALAAKTVTEADDAGGEGKRKKEGRKGACPLLLWEKEEGAGATRQREEELCLRPLEASAWSGGGRVVTTAMTARRCGAERRHGRQARAGAADADGGSDQAKGRFKSIKLDNASHGSVLTDEWALRRVMQEILEGLYRKER

SEQ ID NO: 195439 - protein, 114 aa, Oryza sativa
  Clone ID: PAT_MRT4530_91388C.1.pep
QKLGPCYKQHSNSLFLSRLQCIAVLQSNPYCTGISTTHVPKFIFVHRAETFFLLHWTGIHSIRVSSLPSKTNPLALLLIFHWSSFKKVGFFNQKSFFLALKGQGKRHPFDLSPW

SEQ ID NO: 195440 - protein, 797 aa, Oryza sativa
  unsure (1)..(797): unsure at all Xaa locations
  Clone ID: PAT_MRT4530_91389C.1.pep
MDLGKSASTSATLKKLREDGALPGREKAEREAGGTNPQPILGRMVAIEDYVVCGFLPPPSEFLLLVLNFYGLSLLHLNPNSIAFLSVFVHLCEAYIGVEPFLDLFRFYYELRWMESNRVSGCVGFRLRDGMKSRYVPFQCPSSRSKWRNRWFYLKIKDSHPVLVVLEEQPDKIPAWTAKPPLTPSXQSFIDIIDDLRERGLSGYEVVADFVGRRIQPLQARAHPAYNYSGPDDATRVSPRGLSSEVMERRXGQVMISGPTTARNIPAPLCERGAAERDEAINVATSLKEKVVEEASDAATTSGGKVPTKPRKFSSVLGHRRKAKTPLASDASPPPARRQRIVTIREKEARSKVGQAKSGGTSSASPVMASTDVVPVVGSREATPSGPVSDPAGGRGPPEAILTWEELQAEMGRLLEAGARDIGREVSEVRVETAAANARAERLVRELAEAREDLTKMRELVAGNERQRKGLEDRMSELGDNLSEIRGSLRVTYTGLHQLAEECDVKSTIPANPDEFLLTSSLAELATAMGEIPSKHAARIAEETSNGIYTGACHVLACVKLSRPELDLREILDXGAASDMHKEVMEEVGDLGEDADDEDVQQRGQPESLAIVPVLEFEPHVSHDVEDQTLDAEVEMATTTSNLEDALATQDRRIQYWKTKFEVAELERTMLAVKKEQAVETLQGXRVCRELRVVRGDPEESAAGYISXFNGACAQLDGIGKRIDEALKLECRRASRYAGGHVLACLRDHRPRLDLEFLREGFARSRRTPAEIDHLARSMSPLAEKIFQSMDWHWLSW

SEQ ID NO: 195441 - protein, 120 aa, Oryza sativa
  unsure (1)..(120): unsure at all Xaa locations
  Clone ID: PAT_MRT4530_9138C.1.pep
MPSSATAATALQQQDTAAHRDSTNGDGSGRSMYGGGGRAMASGGGWSDGGRRAKQRGGGWKWSVGRAVGRVTAGAGRRXEQRGGGWKRSVGGLFIPARGRRRCRRRLVCVGRGGGHGREQ

SEQ ID NO: 195442 - protein, 652 aa, Oryza sativa
  Clone ID: PAT_MRT4530_91390C.1.pep
MRGAVVAAAAAAVGNMLQGWDNATIAGALLYMRRDLPALQAHPALQGLVVATSLIGATIVTTFSGPLSDSRGRRPMLIASALLYSLAGLLMLWSPNVPILLLARLVDGFAIGLAVTLVPVYISETAPPDTRGLLNTLPQLTGSTGMFLSYCMVFLITLAPIPNWRLMLGVLLLPALLYLLLTIFFLPESPRWLVSKGRMKEARTVLQMLRGRQDVSAEMALLVEGLTTGRDTAIEEYVVGPTDEAKVTLYGGMSSGLAPGSMFGSAVTLASRQGSMLDHLKDPVVALLDSLHDMNPPAGGTTDVPNLGSMIGVHDRPPIDWDEENSGDDDGDIAAPLLTMEGEAATSTVGIGGGWQLAWKWTEGVAADGTRQSTVKRMYLHEEQAEGVHAAALVSQSALCTKKEAEAEVEGGWREVLEPGGVRHALVCGVAIQILQQFSGISGVLLYTPQILEQAGVGVLLSRLGLRDDSASILISGVTTLLMLPSIGVAMRLMDVSGRRSLLLWTIPLLVASLAVLVAASVAPMAAAAHAAVCTGSVVVYLCCFVMGFGPIPNILCAEIFPTRVRGLCIAICSLAFWLADIAVTYTLPVMLASLGLAGLFAIYAAVCCVALVFVALRVPETKGLPLEVIIDFFNVGAKGTLPNLHDDDDHY

SEQ ID NO: 195443 - protein, 296 aa, Oryza sativa
  Clone ID: PAT_MRT4530_91391C.1.pep
VFVHLCEAYIGVEPFLDLFRFYYELRWMEPNRVSGCVGFRLRDGMKSRYVPFQCPSSRSKWRNRWFYLEIKDSNPILVVPEEQQDSDFVDRRIQPLQARAHPAYNYSGPDDATRVSPRGLSSEAVERRVGQVMISGPTTASDIPAPFCERGVTEHDEAINALPLTDVVGPLADHQVAASLKEKVVKVASDAATTSGGKAPTKARKFSSVLGHRRKAATPSASDVSPPPARRKRIVTIGEKEARANVARAKSGGTSSASPVTASTDVVPVVGSREATPNGPVSDPAGGRGLPEAVLT

SEQ ID NO: 195444 - protein, 85 aa, Oryza sativa
  Clone ID: PAT_MRT4530_91392C.1.pep
MGGWAGRVEERRGEHGRWAPCGGGRPDSLFRPRRCGDLVCAAGARPVVGLFRIEEKHRKNEGFGFLWIALLWRHLDHMKMFVGNT

SEQ ID NO: 195445 - protein, 44 aa, Oryza sativa
  Clone ID: PAT_MRT4530_91393C.1.pep
PNNSTIFYMPPPQFERSYIVPHTTVFWSQNPRLASSNPPSTTGR

SEQ ID NO: 195446 - protein, 109 aa, Oryza sativa
  Clone ID: PAT_MRT4530_91394C.1.pep
TNKNQIRKRRRRRRRRRRNPLIIRAHAPSSLEAHLHRSASPMHPSISLALSESHESKRCGRGGGMATREGGVPSIRLELRRRAEERGGEEARHSVAPSKPDPLMIVSPG

SEQ ID NO: 195447 - protein, 112 aa, Oryza sativa
  Clone ID: PAT_MRT4530_91395C.1.pep
GGANPPGPPREPPPLGLPPPFGPVTRVSVPGDPKPGPTRGFGFAPFVPRGAPGRAPPRPQGLGFEPPPLRVGGAPPGPNYFCSPPPGFHPFHEGSPRLSLEMAPPVWAYPGS

SEQ ID NO: 195448 - protein, 48 aa, Oryza sativa
  Clone ID: PAT_MRT4530_91396C.1.pep
PSTLDDKVEEKLQDCESYNGKSLIASLKKRKCAGYRLLDKAERQGFGA

SEQ ID NO: 195449 - protein, 63 aa, Oryza sativa
  Clone ID: PAT_MRT4530_91397C.1.pep
MASEDIQAFETLTGTLYLTFQNRNRIALKDQFDYHHPPRNYSLGSKLSSQTMEQKTPGTKATN

SEQ ID NO: 195450 - protein, 127 aa, Oryza sativa
  unsure (1)..(127): unsure at all Xaa locations
  Clone ID: PAT_MRT4530_91398C.1.pep
AIRDVAKSCCCDFLGPPGEAEPDRGARAGNGTRRRVFSSEDCPKHLTEAASVILKKCGGLPLAIISIAGLLSNKNPTVEVWTKIKNSISSXFEKDSPVDKMKRILFLSYFDLPQYLKTCLLYLSVVP

SEQ ID NO: 195451 - protein, 276 aa, Oryza sativa
  unsure (1)..(276): unsure at all Xaa locations
  Clone ID: PAT_MRT4530_91399C.1.pep
MKGRRGEARLVLDRTSDTAGRGRAVGAICINAAAHFVFVPLMAQGHLIPALDTTLLGATHGALCTIVTTPATAARAGPTVDSARRSASPSSXRLRHLLLHARPTCLVADFCHPWASELAAGLTVPRLTFFSMCAFCLLCQHNVERFGAYDGVADDNAPVVVPGLARRIEVTRAQAPGFFRVAGWDKFADDVERRYLFEMDRCQANTTKYRQSFLKSQKVHGEQAAKLQVCYRRQGCTVMPVVNSYRAHLSSSVTCQHLPQVKKPEAPYWSQPLTTS

SEQ ID NO: 195452 - protein, 55 aa, Oryza sativa
  Clone ID: PAT_MRT4530_9139C.1.pep
LLADGFTYEAEAIREWFDSGHYTSPMTNLDLPHRDLLPNHALRSAIQEWLQSNAD

SEQ ID NO: 195453 - protein, 44 aa, Oryza sativa
  Clone ID: PAT_MRT4530_913C.1.pep
TSHPIHGYTSLPTNSQFFTQYNLYATSEIRTQDLNLHIELPYQL

SEQ ID NO: 195454 - protein, 63 aa, Oryza sativa
  Clone ID: PAT_MRT4530_91400C.1.pep
KIKIKKKKKKKKKKKKKKKKKKKTMKKKKRQEGGGGRNKKKKKKKLKKKKKNKHREKKKKNLK

SEQ ID NO: 195455 - protein, 57 aa, Oryza sativa
  unsure (1)..(57): unsure at all Xaa locations
  Clone ID: PAT_MRT4530_91401C.1.pep
SPAYLVQISGEGVVPEALLVPISRARKQXEAGKQNSGSTTRARGGGRHQMENKRRNL

SEQ ID NO: 195456 - protein, 602 aa, Oryza sativa
  Clone ID: PAT_MRT4530_91402C.1.pep
MAAAHFVFVPLMAQGHLIPAVDTALLLATHGAFCTVVATPATAARVRPTVDSARRSGLPVRLAEFPLDHAGAGLPEGVDNMDNVPSEFMARYFAAVARLREPVERHLLLRADEGGAPPPTCVVADFCHPWASELAAGLAVPRLTFFSMCAFCLLCQHNVERFGAYDGVADDNAPVVVPGLARRVEVTRAQAPGFFRDIPGWEKFADDLERARAESDGVVINTVLEMEPEYVAGYAEARGMKLWTVGPVALYHRSTATLAARGNTAAIGADECLRWLDGKEPGSVVYVSFGSIVHPEEKQAVELGLGLEASGHPFIWVVRSPDRHGEAALAFLRELEARVAPAGRGLLIWGWAPQALILSHRAAGAFVTHCGWNSTLEAATAGLPVVAWPHFTDQFLNAKMAVEVLGIGVGVGVEEPLVYQRVRKEIVVGRGTVEAAVRSAMDGGEEGEARRWRARALAAKARAAAREGGSSHANLLDLVERFRPRHVAASEAANGTTAPPPPPPTVVAAEDRSGGDGSLRPLSPPSRGGSYGSGSADGDRMWARRLLLPLPGVATRPGAVAGSGAVAVAVEGGNADDGGDGGGRRTTATTTTTTRRVARGDG

SEQ ID NO: 195457 - protein, 151 aa, Oryza sativa
  unsure (1)..(151): unsure at all Xaa locations
  Clone ID: PAT_MRT4530_91403C.1.pep
LGQDPYVSLSLLLSPIPSPLPLFSHWQEASGGSKRGGDGGGGHGGEXHHTEAGGHGERRRRATLRGGWRPRRAKDGSRAEWRRRATLREGWQRQRAEDGGRGELRLAAAMLKLLPMPPPRAPSVPGCHVGMEEMGCVGPTIGHPNRVAKFG

SEQ ID NO: 195458 - protein, 172 aa, Oryza sativa
  Clone ID: PAT_MRT4530_91404C.1.pep
MSGCFCVCSFVLSAYLGSVVVAKVFFSTRAGEGLKPKLDEVLPQAAGIVFAVDAQDFLSTMQVVAEYLYDILTKATVVKKRIHVLIFCNKTDKVTAHSKEFIKKQLEKEINKLRESRKDISSADTTDEVKLGNPGETFYFSQCQNRVTVAEGAGLTGNVSAVEQFIREYVKA

SEQ ID NO: 195459 - protein, 481 aa, Oryza sativa
  Clone ID: PAT_MRT4530_91405C.1.pep
MSAAAAAPPATSLLRPAAASLTTASNSSNRVHLKNLEHLFRNRGAAVAVESATPAQQQQPVLKAPLLRLPSFLARGRGEVAMKEEAHGVSPRRLERVLLPAAPDGPSPRGNIAATWRRLHGEHDWRGLLDPLHPDLRREIVRYGEFVGAAYGAFLSRPDAAPGDRARAAPPLQDGGAYRVTAPLFATSSVGLPAWLASAAPCAAQRTSLVGYVAVCDSPAEVRRMGRRDIVIALRGTCTVLEWAENVRAGLVPATDAASAADSPDAPTPKVECGFWNLYKTAAAGGSPSLSEMVVSEVRRLLTKYEGEEVSITVTGHSLGAALAVLIADELAGLGAPAPVAVFSFGGPRVGDRAFASRVEARGARVLRVVNAHDVVPRFPPPSRYADVGRELRLDSRASPYLRPDADAACCHDLEAYIHLVDGFLGSHCPFRDNAKRSILRLLENQGGNVKQLYISKAMDMRVRLDAAVADMPAEVLECVH

SEQ ID NO: 195460 - protein, 112 aa, Oryza sativa
  unsure (1)..(112): unsure at all Xaa locations
  Clone ID: PAT_MRT4530_91406C.1.pep
SVRQQYGIATSSFLQXDATQLRNIQIWQQFALMAHQSNYLDINIVQAIPQQLQLHQFDDLYYDRNLSQAQALKATNVPSRYGIYHRYYDAPSTITTLGLVSERGLTAYRVRG

SEQ ID NO: 195461 - protein, 65 aa, Oryza sativa
  Clone ID: PAT_MRT4530_91407C.1.pep
AIGSPWTLLVTNVQIGVLRRLVNRAELYHLFTTYICFQAKVNTNYIGSTLAAQGSYLLLTSHMGS

SEQ ID NO: 195462 - protein, 449 aa, Oryza sativa
  Clone ID: PAT_MRT4530_91408C.1.pep
DRRDWSDTGHVVSRQPRFHVAPAPGESGGERREVYSCFHGAAGGCSGSGGGGGGGGSGQTASAWHWRGQSSAAPSCDAVASACGDDDGTGTNKVSVVIVEGHVGGGASRRLAVLELVSIVAVLLISSPAAAAELSVDFHAASCPQLESIVRSSVQAALQQEIALAAGLLRIFFHDCFPQARTQEHLHGCDASVYLRGGSNSEQGMGPNLTLQPRALQLVEDIRAKVHAACGPTVSCADISALATRDAVVVSGGPSYAVPLGQKDSLAPASLDLVGDLPGPGTSRVQDLIDLFASRGLRDAADLVALSGGHTVGRTRCAFFDDRARRQDDTFSKKLALNCTKDPNRLQNLDVITPDAFDNAYYIALIHNQGVFTSDMALIKDRITAPIVRQFATDKAAFFTQFAKSMVKLSNVPRTDRNVGEIRRSCFRTNSQSLVDFATSDEEGFAASA

SEQ ID NO: 195463 - protein, 336 aa, Oryza sativa
  Clone ID: PAT_MRT4530_91409C.1.pep
MSPSLLLTSRGTHSPAPRPQTRRASQLLVSFPSRCSRFVGLRLARAAADSQGPNGAAPGSGSGGDGEGKAANGADTKLPKNRRDILLEYVKNVQPEFMELFIKRAPPQVVDAMRQTVTNMIGTLPPQFFAVTVTTVAENLAQLMYSVLMTGYMFRNAQYRLELQQSLEQIALPEPKEENDSADYAPGTQKKVTGEVIRWNKTTGPEKIDAVKYIELLEAEIDELSHQVARKSSQGSNELLEYLKTLEPQNLKELASSAGEDVVFAMNAFIKRLLAVSDPAQMKTTVSETSANQLAILLNWLMIGGYSMRNIEVRFDMERVLGAAPKIGELPPGENI

SEQ ID NO: 195464 - protein, 58 aa, Oryza sativa
  Clone ID: PAT_MRT4530_9140C.1.pep
MEVAVQESATYWFEDQRTCRIISRTPMEVAVREIAMYWFEDQRMDAALEIESTKDEEG

SEQ ID NO: 195465 - protein, 118 aa, Oryza sativa
  Clone ID: PAT_MRT4530_91410C.1.pep
MERDSLTLGRGEVVVVASAAFASFLVSSATTRSTRRAAWECDARKKSSPPHGRADAKGVASGAHRREGRRGGRGSSSPLNHDSAWVVPLTDDAFSGDDDSMALWILNAITPMLLGKHS

SEQ ID NO: 195466 - protein, 145 aa, Oryza sativa
  Clone ID: PAT_MRT4530_91411C.1.pep
ERAVHTFDQRDKIDNEALNREKKIQHPNFKYYLLLPPFYNIKLFSIAHILLNIKESKHMYVFKFIPHIFTETTGDSNRQMGDDHHCKKKYMGMKRIAPWEKKGKKKEGPDHPAGFSFWAWEPAGLSGHTRGWQAKSIPNGTTIAE

SEQ ID NO: 195467 - protein, 810 aa, Oryza sativa
  Clone ID: PAT_MRT4530_91412C.1.pep
MMHGLWVQDQGVVDHLAQLVPLLHECASHVTEGSFEKADFSFKKIRMLTIADGPLQRLSTIIVDSLAHRLLSSIQGLPGALIDPSDYFEKSTLRAARHNFFKLNPYLSTGFVTINWAIMEAMEDEKSLLSKKAESLGVSFHFISVIGRLETLDFSNLRSTFQIKFGVAVAISCALQMHRLLLVDDNLSSTSIAQLQKMANFTQPKQMASSVCSPASTLNYLQTPSPRTPKLLARLLSAIRALKPNIMLIMEQDADHNTLLFRDRFNEVLNYYAALFDCFHAVAAANPGRTDERLRVDRMILREEIKNILLRLCCTDRGMFQDDMLSSATSSPASSVYSPSPSPSNGSWVQELSHDQQSVRLIGLLYQCAAEVSAGSFDRANLCLEHITQLASLDAPHALQRLAAVFADALARKLLNLILGLSRALLSSANSADAHLVPVARRHMFDVLPFLKLAYLTTNHAILEAMEGERFVHVVDFSGPAANPVQWIALFHAFRGRREGPPHLRITAVHDSKEFLANMAAVLSKEAEAFDIAFQFNAVEAKLDEMDFDALRHDLGVRSGEALAVSVVLQLHRLLAVDDGRRHAAAGCLTPVQIIARSSPRSFGELLERELNTRLQLSPDASVVSSLSPHSPAAATAAHPTTSTPKLGSFLSAVRSLSPKIMVMTEQEANHNGGAFQERFDEALNYYASLFDCLQRSAAAAAERARVERVLLGEEIRGVVACEGAERVERHERARQWAARMEAAGMERVGLSYSGAMEARKLLQSCGWAGPYEVRHDAGGHGFFFCWHKRPLYAVTAWRPAASRRGHTRS

SEQ ID NO: 195468 - protein, 106 aa, Oryza sativa
  unsure (1)..(106): unsure at all Xaa locations
  Clone ID: PAT_MRT4530_91413C.1.pep
KPVAMLGRRRRGLSSSEATNSARGGWGIADDGDLSGRRETAGRRGEAADPAPLRPDLAGTXRDDGRXGRGGPGLXGSAAXRXRRWFRXRHRGGRRGVGTFSAAETL

SEQ ID NO: 195469 - protein, 125 aa, Oryza sativa
  Clone ID: PAT_MRT4530_91414C.1.pep
CWRGSGSCRKEIEEQQQQETPGVLSVFRELNPNEMLARNTPKFDVERKEGGDTRVEIYCAAKPGLLLSTVSTLETLGLDIQQCVVSCFNDFGMHASCSEMQRERMSADMIKQELFKNAGYGGGCL

SEQ ID NO: 195470 - protein, 348 aa, Oryza sativa
  Clone ID: PAT_MRT4530_91415C.1.pep
MELDEQAFLEELFSLRRDAWEYNAMGDFFSPACAAMDGFQERHQSTTTVSVLPTFTASYEQPPPAPAAGFDCLSEVYGNAAAAFGPNAGGGGGEYGGGGDMGFLDVVEPKASMVVDGGGLGVCKVEPGLQAEGGFSAAAAAPASKKKRVEGMPSKNLMAERRRRKRLNDRLSMLRSVVPKISKMDRTSILGDTIDYMKELLERIRQLQEEIEEQQQQETPGVLSVFRELNPNEMLARNTPKVAASIHCWIYNEEDDGINGVCEVQFDVERKEGGDTRVEIYCAAKPGLLLSTVSTLETLGLDIQQCVVSCFNDFGMHASCSEMQRERMSADMIKQELFKNAGYGGGCL

SEQ ID NO: 195471 - protein, 32 aa, Oryza sativa
  Clone ID: PAT_MRT4530_91416C.1.pep
FLVSLHLEVLAPCEWHYARPIEPLLELKRQYE

SEQ ID NO: 195472 - protein, 70 aa, Oryza sativa
  Clone ID: PAT_MRT4530_91417C.1.pep
MGGADPTVSSPHARGFGGGGDGRGGSDSLSPSCADLTTSPPLSLQQQQRWASRGADVVVGEAADRQPRHG

SEQ ID NO: 195473 - protein, 85 aa, Oryza sativa
  Clone ID: PAT_MRT4530_91418C.1.pep
VLGYGPGNLTTITVLASTQMKRGHIMLKWSIPQNRIQGHIRRWTERLYLHTKAMNTGKLPTWFTLFPLIPSTEIRETALRQGVDT

SEQ ID NO: 195474 - protein, 398 aa, Oryza sativa
  Clone ID: PAT_MRT4530_91419C.1.pep
KGHFTRSPIPSMYYASTDHIRQPITTPPLRRSKLLIPVIFLPKPLTMATECDVNKSRRFDLGMSRRTRRSTSLITCYQDQQVQPLVQQLRQDAKLKTLFQCQDTELQPPCPYEDQELRILQAPLQCEVDAQETLNQHRDEQEEKLHHYLDEEHEKKLQDHLDEEPEKKLHHYLDEEQEKKLQDHLDEEPEKKLHHYLDEEQEKLFQDQDEEEKTPKQYLDEDQKTLQQCQDEEKAPNQYEDEDNTTGQYQDGEQKTAEQCEEEKTSEKYHDEEHKSLEAQHQCQDTERKAPGQCKTAKTKLITPPCANDVPRFSLQDLIQEKQLLIGEAKATSKLGNGKKAIADHKLPVPPAAGGATLAMVIKRPDGGKKSMGVIRRCVKALNQMVKAKHGSKKNKPF

SEQ ID NO: 195475 - protein, 345 aa, Oryza sativa
  Clone ID: PAT_MRT4530_9141C.1.pep
MASWPTSCTKVYEIIQFSRCKEEASATSSIIDHRTAKVGRRDDGPNMSKVLRATIPENSVSGSSVRGKLREMEMDLAVEQYGSIGASSILSTLSVPEYSNLAWDETYPKTMLSALSATKNRMYNRIAPIVGHAWVNISAQNATFMMTMQVVLNMHSCDGVMKYEPFLINLTITFYRTGGAENFFHCDKCGCCYSYVLKDSHHCVERAMHHNCPVCFEYLFDSTKDISALHCGHTIHLECLYEMRSHQQFSCPVCLRSACDMSHAWQKLDQENTIQITLHSGCSIADASDLSEENDMDPMQRLWDDIERAIPHIGTQVPRMQLLQHPADKSRPCCRVLQSLNSEEQ

SEQ ID NO: 195476 - protein, 110 aa, Oryza sativa
  unsure (1)..(110): unsure at all Xaa locations
  Clone ID: PAT_MRT4530_91420C.1.pep
GLRYLLNSSAGPKLAFGCMSVPVDLILXSTRNKDKGAIVKSINDSRSARTLSMRGNHLEAHQLEPNVAHGSYCRNRLYQXSSSTQSQPILAIANQDSSRFLLCSRTRSPP

SEQ ID NO: 195477 - protein, 127 aa, Oryza sativa
  unsure (1)..(127): unsure at all Xaa locations
  Clone ID: PAT_MRT4530_91421C.1.pep
GEGKTRRRRGARGGGARHGARGGTRRATAGGNTTGDGDGDGRAAARRHEGTGARRLNGDXDSGARGSGRRRRADDDATGGGGARGRAGRRDGCAARQRRSDGARRLGVRGDVTARGAAAATRRAAAA

SEQ ID NO: 195478 - protein, 89 aa, Oryza sativa
  Clone ID: PAT_MRT4530_91422C.1.pep
PTANSADHLGGRKGTMELKSFLNWSLAIALHPPPPAALKNHVHVQAIHLPWLVVSTNKTRGKATLYLDEVADVCSVHTSSNYICLDFHY

SEQ ID NO: 195479 - protein, 64 aa, Oryza sativa
  unsure (1)..(64): unsure at all Xaa locations
  Clone ID: PAT_MRT4530_91423C.1.pep
CRHVGSQYYWSAXGCEQGYIGQGGATMXPENEDAFMDMLALDPIEKSYKNEEVRAQAHEDLSKC

SEQ ID NO: 195480 - protein, 62 aa, Oryza sativa
  Clone ID: PAT_MRT4530_91424C.1.pep
FFFFFFSTNFIHIGYYLKSTKKNAPGYALRRGDPHHHQAARWKLSQCASHTIHSLAFREAFH

SEQ ID NO: 195481 - protein, 98 aa, Oryza sativa
  Clone ID: PAT_MRT4530_91425C.1.pep
MSRENEDAFMDMLLLDPIENRYKNEEVRAQATRDLSKCIVDHRMAAKSLPTPEQYAVERECTKAEQWLWERSQLQESLPKNVDPALWSHEINKKKTRV

SEQ ID NO: 195482 - protein, 68 aa, Oryza sativa
  unsure (1)..(68): unsure at all Xaa locations
  Clone ID: PAT_MRT4530_91426C.1.pep
METSSXPRTTLPTAKPLPAFQTLAPRPRARALRRSTIIAIMMRGRQEVPVVAVVPGAGVMIPPYRDCF

SEQ ID NO: 195483 - protein, 244 aa, Oryza sativa
  Clone ID: PAT_MRT4530_91427C.1.pep
MKPSSFLFFLFPSLSLPAASACSDLLLSFPDSTLSCCLTVSESLGGGAIGAHPRARAMGADGGGGGGRKSSSPAGKPAEAARAGSLLAGLPSRGNFVADSIASSMGGLPVYVCLHDTAPPGMRADCSASEGQVIDTDTTNILIRSLQLSKQKNEAKDVGSRTPGESSKGKRSASRLLDGKNPSKRANTGSTAGSSAHGELGSVFSEQTLQSFTVEKLRILLKERGLSPKGKKDELIARLIESSE

SEQ ID NO: 195484 - protein, 108 aa, Oryza sativa
  unsure (1)..(108): unsure at all Xaa locations
  Clone ID: PAT_MRT4530_91428C.1.pep
GRVIWSCFPYMCPVVLCVRVPPHSSLTILLYSSIPYYHTLVVPLALTRGLFYPHLFLMSVSLRSCGXSVYCARLLXGRFVRVLLACALPPCLSLVLSLAAVSRGRSGG

SEQ ID NO: 195485 - protein, 74 aa, Oryza sativa
  Clone ID: PAT_MRT4530_91429C.1.pep
EFSALKFTCALFQVHISDPTCQIQFQSNMLLPVKVKPKGDPNTPPPPPPPSFVSCIQNLLLKFFHQSLLFSIGI

SEQ ID NO: 195486 - protein, 116 aa, Oryza sativa
  unsure (1)..(116): unsure at all Xaa locations
  Clone ID: PAT_MRT4530_9142C.1.pep
FDSTKDISALHCGHTIHLECLYEMRSHQQFSCPVCLRSACDMSHAWQKLDQEVAASPMPVIYQKKXDMDPMQRLWDDIERAIPHIGTQVPRMQLLQHPADKSRPCCRVLQSLNSEE

SEQ ID NO: 195487 - protein, 175 aa, Oryza sativa
  Clone ID: PAT_MRT4530_91430C.1.pep
PRLRTAAAGGVGSLPTHSHTHTHYPPPPPPRRRDAAFLSTAISIYKTPPKIPCPSLTPPDLHRQRTKHPIGSCVLAAAGDRWRGGRGQRCCCCSSPCCSSPTLRSAPPPRRRGSPRGRVSGGGRRCWLMMVGRRRRWWWSRRADETLKVACILLSSSSTPRRRRRCPRRGRLSSS

SEQ ID NO: 195488 - protein, 68 aa, Oryza sativa
  Clone ID: PAT_MRT4530_91431C.1.pep
LGPEIFAAESGEGTNRNRHRYRHRQRRWRQRDGTRGSSYRGELGTHGDRGGLGTIRVFYRSPLPGLSG

SEQ ID NO: 195489 - protein, 101 aa, Oryza sativa
  Clone ID: PAT_MRT4530_91432C.1.pep
MARLSSSLACNLGFDSFVMLSKLLTRQLKELEDILRWILKDALAQHVFNKKELEGKFHQEFKIWIHASSRLETISIAKKDGKVSDRPWEQDADNYPVGFSC

SEQ ID NO: 195490 - protein, 41 aa, Oryza sativa
  Clone ID: PAT_MRT4530_91433C.1.pep
MGTTILNQGACIVIGVDEELKNEVKALDERNIAEGQRSEEL

SEQ ID NO: 195491 - protein, 76 aa, Oryza sativa
  Clone ID: PAT_MRT4530_91434C.1.pep
MALLPFTFLFLSLRPAILSAAVVSSSTVAGVPADRGGDDPGSGRRRSMIARRLYSSTRVLEGSDLDDGGPSSSLTF

SEQ ID NO: 195492 - protein, 127 aa, Oryza sativa
  Clone ID: PAT_MRT4530_91435C.1.pep
MGAPMPPSSSSAKEDERELISSSHPPLTRFARLSSPSTETTATASGPHLVTVACRMALAALAADGSSVSGGSRGGSSVDRVSGEWLNVVRVDSERGGVGRVGNGRTRCRRGLPLRIRRWLLAGWHRQ

SEQ ID NO: 195493 - protein, 415 aa, Oryza sativa
  Clone ID: PAT_MRT4530_91436C.1.pep
MEDGVELDQDLAATREEAEREILNTWIWDKEIDLLQREIEEQDELSRLRHEQEREDDLYVCRMIEERHGEPCHLEDHELEKIYGPHTYETDYDSDGSGVSFYSNGRNIFMKYGDGFRYEDGNPYYAADREETWEKQILRQMKFPIPDLSESWEGSLVVEGPFNLDPNLTLTDHLMPALPKWERRWLDRDGKEPCRRAIQVLDLCTFAFRDTRNSQLRNYVFDYSRENPCKLKPGAHCLQPLMTPPRGIYAVGIVLIEYRLIIKGQKEEEDQVLIDGYSIYAPSFYADFEKLIWHINTGHFGTIDLTIFAIPKAVLVDLEFELGVGKLPPLTLSARHDKHFPITVYKYYNHSGCHPDGVIRNCRFGTEYDFDDFLCESLSFTPQKYGKSSKILARNLDGIQMAMKSTWSIMCEPCL

SEQ ID NO: 195494 - protein, 97 aa, Oryza sativa
  Clone ID: PAT_MRT4530_91437C.1.pep
LGLVGWSQVLRFTLSFWIVGTSVLNDLASTASSMPVPNTVTGTATSPAATLPNAESAMANWFRCCCYHRSSPRRRVDVATATATTRRRAAFCCSCCR

SEQ ID NO: 195495 - protein, 87 aa, Oryza sativa
  Clone ID: PAT_MRT4530_91438C.1.pep
LWRPHGPPGALHRPMTFDEYREHIRRSASAARRSSSLSRWQPPSAAPLPPLLRLLLLPPQRQSSSLASYSLCAQKIAYIRMEYNLEQ

SEQ ID NO: 195496 - protein, 374 aa, Oryza sativa
  Clone ID: PAT_MRT4530_91439C.1.pep
MIEERHGEPCHLEDHELEKIYGPPAYETDNDSDEGGVSFYSNGRNIFMKYGDGFRYEDGNPYYAADREETWEKQILRQMKFPIPDLSESWEGSLVVEGPFNLDLNLTFTDHLMPALPKWERRCNVPLEIYGIFAFRDTRNSQMRNYVFDYSRENPCKLKPGAHCLQSLMTPPRGIYAVGIVLIEYRLIIKGQKEEEDQVLIDGYSMYAPSFYADFQKLIWHINTGHFGTIYLTIFAIPKAVLVDLEFEVCQIEDNHEHDSLAIVATYFNINTSFIIFNGKLGVGKLPPLTLSARHDKHFSIKVYKYYNHSGCHPDGVVRNCRFGTEYYFEDFLCESLSFTPQKYGKSSKILSRNLDGIQMAMKSTWFIMCEPCL

SEQ ID NO: 195497 - protein, 205 aa, Oryza sativa
  Clone ID: PAT_MRT4530_9143C.1.pep
KVEYPDDLTVTSLLEWRKNVVDKSISPVTWNSYIRQLKTIFKFGIEYEILSLEKNPFNKLSVKEGKHRKKIYSPEQLQKLSCGIQENANIPEYLRPTWFVQTIIMTLRCTAIRRTQLIKLKIKDVDLEKRIIYIPPEINKNHDYHTLPISNALYPYLTNLLNKLQELKQSTDNQLFNLNLFSRAVKRRGGDPPESTCRHASLSIL

SEQ ID NO: 195498 - protein, 35 aa, Oryza sativa
  Clone ID: PAT_MRT4530_91440C.1.pep
MTKLMFIGKSWTADLGQEEDPYDYYYDDPDNLENP

SEQ ID NO: 195499 - protein, 140 aa, Oryza sativa
  unsure (1)..(140): unsure at all Xaa locations
  Clone ID: PAT_MRT4530_91441C.1.pep
PPRGPEPKKGGLGPPTKTNPPPIFPRAKDQPGALDQKKIGSPPPFKKPKPHFWGAPPXNWPRGPPPPPPGFXGGPPEPKPKPWPGASGEAPPSTGGISHTILGPPPGPFLTGKGGGGILPGGPLGPFITNPIKAPGATKG

SEQ ID NO: 195500 - protein, 62 aa, Oryza sativa
  Clone ID: PAT_MRT4530_91442C.1.pep
RERCFIVYTIYPILSIHFHLLLSHNIFLSFINTSKFIIFIRFIYISPIESSYLDFLLFIITP

SEQ ID NO: 195501 - protein, 105 aa, Oryza sativa
  unsure (1)..(105): unsure at all Xaa locations
  Clone ID: PAT_MRT4530_91443C.1.pep
RLRGHCLGGKVGICYGCKXRNADDLPAPDKVVQLIQQQSLKYARIYDTNIDVIKAFANTGVELMVGVPNSDLLPFAPFSMRTRNRKLNLRGTGGCSSLTKALYTV

SEQ ID NO: 195502 - protein, 1004 aa, Oryza sativa
  unsure (1)..(1004): unsure at all Xaa locations
  Clone ID: PAT_MRT4530_91444C.1.pep
MEEEGSGRGGDGPAAHGRIGDTASLGASCVRAGVGGDSPVMVSSASVRKTVKMSETCDFIPYVDDDDDGNSEEENSASSGILPCDGMQHDTPDYIRRGAAAARHRIAPLELFSGPSPPQGPPSPSPAIGGAALEATSNDGVAEPQVHPPEGISSIISTGGGEQETATMGSQSVHETLHIEENEGKCSCCGQLKQEYSLLLREKEECRRVLEDLMRENELKSRECHEAQASLHELRMELMRKSMHVGSLAFAVXGASEREESLVSVAERFEXKFKALKAEHQILLQESLECKKFVADATQMTTTIQQHVNQYASLECEFKDLKEKFTEETKERKDLYNKLIEVKGNIRVFCRCRPLNGEEIEEGASMAVDFESAKDGELIVRGHVSSKKVFKFDSVFSPEEDQEKVFEKTVPFATSVLDGYNVCIFAYGQTGTGKTFTMEGIEDARGVNYRTLEELFRITKERQGLFQYEITVSVLEVYNEQIHDLLLTGTQPGATAKRLEVRQVAEGVHHVPGLVEARVTNMNEAWEVLQTGSKARVVGSTNANEHSSRSHCMHCVMVKGENLMNGEQTKSKLWLIDLAGSERVAKTDAQGERLKEAQNINKSLSALGDVISALATKSQHIPFRNSKLTHLLQDSLSGDSKTLMFVQISPNENDVGETLCSLNFASRVRGIELGQARKQVDVGELSRYKLMAGRAKQDSKNKDAQIKSMEETIQSLEAKNKAKDLLTMNLQEKIKELEAQLLVERKIARQHVDNKIAQDHLHQQQQSKKPENSPCPTRSPMAERNLNSTAEKPVTLLKDLGIARQMFSDSNTDTYSINHLMSMSSEKENNPAGGAQPTKARRVSLCGGAHQQPAAPPRRGSLIPLPRRNSLMLPLPLPKPATPAAAASPLDMITEQCSSPLVIAPNDIRGGGGGGGRNKRIINSILRRSLQKKVIIRPPLMAAHQSGRRAGAGVAGTTTHGGGGGGVMRARRVPVSGGRGGGGVQHNREKERGWNNGTSLRQLN

SEQ ID NO: 195503 - protein, 163 aa, Oryza sativa
  unsure (1)..(163): unsure at all Xaa locations
  Clone ID: PAT_MRT4530_91445C.1.pep
FPPPQVRGGAKGSFYAKPLWGPVAGPLGKNLFXKKQKSLLSPLNALPKKACARRIHEFFKGLGSPQGPVPIIPPLKKEIPAFLGKAKGHQGVFSPPPGRFSKVXKGVPFPGGGFPRGGGARGPFGASHFSKFEGVKPQLGRGGGDMFAFAIPVFPKGFGDPSE

SEQ ID NO: 195504 - protein, 127 aa, Oryza sativa
  Clone ID: PAT_MRT4530_91446C.1.pep
LLFFHFPAFFSLALSRLHSWSVLYRFAFSHNFGPGRSGSARRCSCPRVPRFYFLVYRISRHLYFLSFFWVTLLSPISVFLYHLGLWQPAPLIGLGVVFLDAGVLFAFVFLFCLLLWFFSSSLTTCVI

SEQ ID NO: 195505 - protein, 237 aa, Oryza sativa
  Clone ID: PAT_MRT4530_91447C.1.pep
MATRQRRHFAHPQHLLLRTHYSTTSSHFCDICRTNVAGMVGYRCNTCDIDIHDACADYFEETVSFFAHPWHTLTLSTIPDDDTNRWSCNLCTESCPRGSFVYRCAQCGFDAHPLCTLLLQTIRSPLHPQHDLNMAPSWGTCSACHQGLNMWHYRCEFCLYKLHVVCPSGAANAGQGDTSRSHNAGAGAAAATPGSSRATRIAKFLLRTSLNIAINAATGALATTVLDVLATALDDQE

SEQ ID NO: 195506 - protein, 158 aa, Oryza sativa
  Clone ID: PAT_MRT4530_91448C.1.pep
RDAIEGKVWRRSRSRQVRRRSRSRQGSAMEYVVAGFFGGVGLGGLRRRRRWQARAPVGAQHGRRRKYPGKNGGCKLWQWYEPGTTPYLKQVLNDLVSTVREVKTENSEIRASLANSRAVIDGLVTERNVYEAKSMGQKEECGSFAEMACRIKMLEESR

SEQ ID NO: 195507 - protein, 188 aa, Oryza sativa
  Clone ID: PAT_MRT4530_91449C.1.pep
TWHVALDCQSPDVSSCCSAHIFQRVVSSHAAHPQQPDSFPNERLYRAYLVIQRFKSTITSDPKNVTASWTGHDIGGEKSYLGFYCATPTGRSDDLTVTGIIWNGYGMRAPKLQGFLDQLPDLALFHAASNYFGSDIPRLNAVPYLYNLNVDRDALAHPQAEGKLTGDSRIHTPCINGEIHFIIKVITD

SEQ ID NO: 195508 - protein, 42 aa, Oryza sativa
  Clone ID: PAT_MRT4530_9144C.1.pep
RQGVAGEHPRCGVPRKVCEGFDFASAREEIKSETEECICATS

SEQ ID NO: 195509 - protein, 63 aa, Oryza sativa
  Clone ID: PAT_MRT4530_91450C.1.pep
QSRSFWHQVSHHLCTTSQCALAIIGHALVSCTRGHISGHRVTLQAVHPAFPSLVQSSSAAVAS

SEQ ID NO: 195510 - protein, 138 aa, Oryza sativa
  unsure (1)..(138): unsure at all Xaa locations
  Clone ID: PAT_MRT4530_91451C.1.pep
RDLFLASANPSPRDAAAAAAAASSSLSSASSLRGRMRRRVGVVCAAVSSXGRREVAGVQPLVEALPPVARAAGYVVGLRXGGTRTTTVLGAVNVAEAASANSAVPGVAAAGLHNYVAGCREERKEERADRERRKKRRG

SEQ ID NO: 195511 - protein, 352 aa, Oryza sativa
  Clone ID: PAT_MRT4530_91452C.1.pep
MVHPAQGQMVQDLAAGGELGAPPSRYVLREKDRPVAAAGAVQAAQRELAAIPTIDVSRLAAESGDDVVDDGGEAAKLRSALQSWGLFAVTGHGMPEPFLDEILAATREFFHLPPEEKERYSNVVAAADADGVGAGGERFQPEGYGIDRVDTDEQILDWCDRLYLQVQPEEERRLEFWPEHPAALRGLLEEYTRRSEQVFRRVLAATARSLGFGEEFFGDKVGEKVTTYARFTYYPPCPRPELVYGLKPHTDNSVLTVLLLDKHVGGLQLLKDGRWLDIPVLTNELLVVAGDEIELFALLGVADHEQVFMAPVHRVVTSERERMSVVMFYQPEPHKELAPSEELVGEERPAMY

SEQ ID NO: 195512 - protein, 109 aa, Oryza sativa
  Clone ID: PAT_MRT4530_91453C.1.pep
MAKKKRAGGEGKGEEAELVVTEGRCRHPHPDPVGLFPNSSAHGARPSPSAIPRSSPLQIHRLHHHLAASVSSPPPWASRLLPSKRSRVKGENFGEEAVSTSHDVAQREA

SEQ ID NO: 195513 - protein, 205 aa, Oryza sativa
  unsure (1)..(205): unsure at all Xaa locations
  Clone ID: PAT_MRT4530_91454C.1.pep
MDSPTTPVGFSPPLHSLVLYYEPYYTKRKRGILRQHLGFTVDRVHGGSSRERTAEIXGPRRFTGNDDDDVSDDVTTGGGSGTRAHRRTMARRRKRRTPTRCGRRCDPYRGTNGGGRRSDDDGDEDAEATAFGLTTTAVLLXSSATTEGWTRMAMTRRSRRWPSRATTTTGATAVLGXTHDGDDGARANAARALQVAASEGEGGGG

SEQ ID NO: 195514 - protein, 363 aa, Oryza sativa
  Clone ID: PAT_MRT4530_91455C.1.pep
MALSSSSHLLPFSRPPATFPRARHAGGGRGRAGATGRFIACSSPPPPDVVVTRERGKNAKLIAALEKHNVQSLELPLIKHVEGPDTDRLSAVLRDEKFDWITITSPEAAAVFLEGWKAAGNPKVRIAVVGAGTERVFDEVIQYNDGSLEVAFSPSKAMGKFLASELPRTTETTCKVLYPASAKAGHEIQNGLSNRGFEVTRLNTYTTVSVQDVDPLILKPALSAPVVAVASPSALRAWLNLASQVDNWGNAIACIGETTASAAKKFGLKSIYYPTTPGLDGWVESILEALRAHGQSKEVPGRPRGYFPRYLYQMLEVGGHLWRLHIELCASLTNRSHTFCCFSNIIERRNQVGNYCSRTTCKL

SEQ ID NO: 195515 - protein, 155 aa, Oryza sativa
  Clone ID: PAT_MRT4530_91456C.1.pep
MAGASGERPASNWDWSDYDAAFTEEADGAIAALQDTGGDGLATKQLLERYHASPLAHTILAQWYFAHADQQKPTNHLRRAAWMAPRCLHIAFALALVLIEMGSFDEADMVCAHSLLVPDLTDPVHNFISPKEQVDAIITSKAPEYRLGRGAIWAF

SEQ ID NO: 195516 - protein, 146 aa, Oryza sativa
  Clone ID: PAT_MRT4530_91457C.1.pep
MAGASGERPASNWDWSDCDAAFTEEADGAIAALQDTGGDGLATKQLLGRYHTILAQWYFARADQQKATNHLRRAAWMAPCCLHIAFALAFVLIEMGSFDEADMVCAHNLLVPDLTNPAHNFISPKEQVDAIISSKAPEYRLGRGAI

SEQ ID NO: 195517 - protein, 91 aa, Oryza sativa
  unsure (1)..(91): unsure at all Xaa locations
  Clone ID: PAT_MRT4530_91458C.1.pep
MSCCDGICGAGSACQYDGACGACKMFHDVEATASTKTLVLVAPSNKASFEEMEMAVEXGENGXAARCNHSAQCGTTLQAACSVSDSVHLQV

SEQ ID NO: 195518 - protein, 133 aa, Oryza sativa
  Clone ID: PAT_MRT4530_91459C.1.pep
PCEAGGVLDELLASCYSFRCPPFSPSRRRSPLSPQSCAAGHLRAPVPVVPLRLVAPPPSPHSTCLLCPPPPHCRAAAPLRLVVAPLCLPPCLRSSSSISPVLPPPPPFPSALCPPERRSAVRPPPTVRPRATP

SEQ ID NO: 195519 - protein, 122 aa, Oryza sativa
  Clone ID: PAT_MRT4530_9145C.1.pep
MGWELPRSAPTVAAEEEEEKTTVGERAILHSRDGGGQADAHGRLVLWCLEQEDGSDKGNFRGAELHPLSGRSSLLISTTSSKTSPQQTSSWEEIHQVTPPARFGMTLAASTTSVGIGDGDDC

SEQ ID NO: 195520 - protein, 483 aa, Oryza sativa
  Clone ID: PAT_MRT4530_91460C.1.pep
MDANSSLNEQKSEELKLKANDAFKANKFSLAIELYSQAIELNSSNAVYWANRAFAHTKLEEYGSAVQDASKAIEIDARYSKGYYRRGAAYLAMGKFKEALKDFQQVKRISPNDPDATRKLKECEKAVQKIRFEEAISVGDEEKRSVADSIDYRIIEVEPQYTGPRVDGDTITLDFVKAMLDEFEKQKCIHKRYAYQIVLQTVQLLRSVPSLVDVNVPDGSHFTVCGDVHGQYFDLLNIFKLNGLPSEENPYLFNGDFVDRGSFSVEVILTLFAFKCLYPTGMYLARGNHESKSMNKIYGFEGEVRSKLGEAFIELFAEAFCCLPLAHVINNKVFVVHGGLFSVDGVKLSDIRAIDRFREPPEEGLMCEVLWSDPQPQLGRGPSKRGVGLSFGADVTKKFLQENNLDLVVRSHEVKDEGYEIEHDGKLITVFSAPNYCDQMGNKGAYIRFTAPELKPNISSFSAVPHPDVKPMAYANNFLRMFQ

SEQ ID NO: 195521 - protein, 150 aa, Oryza sativa
  Clone ID: PAT_MRT4530_91461C.1.pep
WQPWGSRRRRTRRGAGGTRSTGTRRGCARSACATASRASPPRSPALPRRRRRRRRRRDPPPRCARRPGRGVTPPRRRPRRRPRGRRPRRRRRCSAPQVMTRRRCPLRRRRRRRRGGAASGRGCSSSSITGAGTGRPTGAHWRTPRRLLGW

SEQ ID NO: 195522 - protein, 446 aa, Oryza sativa
  unsure (1)..(446): unsure at all Xaa locations
  Clone ID: PAT_MRT4530_91462C.1.pep
FHTGELDIERLNRGVITLVPKCKEAIQIQKFRLICLLNVSFKIITEILMNRLTEVIXNIISRNQAAFIKHRYIKEGVVAIHEILNSLHTTNGKGVLFKVDFEKAYNKIKXPFVYQMLQVNEFPDRWNDWIMKTVRGGGXRVCVKVNXVEGPYFETNKGLRQRDPFSPLLFNIAVEALIALTNNAQKHGFISGLKVGRLGEEISILHYVDDTIFLLDNSLGSTKNLKFILCLFENMSGLKINFHKNEVFSVGLSMKEEEDLCAILTCKKDQGXLGILDLDIMNIALLGKRLWKLENEPVLCRKILRTKYLKKQXLALIKHKQGDSHIFXGLLEIKDIFLAFCRKQVGNGMRTHFWQDEWVGNSTIAEQFXITFTKKKIIVAKAFEKGWDFFKFRRILIEDIYXLRNGKQLKKMCAMITLKAENDKLIWTLTKNGLFTVKSFYHALKL

SEQ ID NO: 195523 - protein, 193 aa, Oryza sativa
  Clone ID: PAT_MRT4530_91463C.1.pep
RHARGEKDKNECLKTMRSSSGPCPSFTLTDAMPLLTPTSGPAVDTPWPEMTTAIRDSAGGAPTTPFDWSKLTEMAQQAVEVILTQTSEVEPLRATLVEEANKIGDLKTMLVEEKDKNEPHKTMLEEEKDKNERLNPMLVEEKKKNERLQLSFHQANTKLGQSMPYADVLGILDKSIDKAFQKRDMKKSSWKKL

SEQ ID NO: 195524 - protein, 136 aa, Oryza sativa
  Clone ID: PAT_MRT4530_91464C.1.pep
PIIVEQGSIIEIGPKRGIDLSRAVLVEYDMRIKTGERDENDLQLIDGVSCVNEILTSSNPVINRIHGDYGAVDITRACLDYAFEATVDVVISEVQTGFNLCVGCFTSGLHEEIQLFDGVIGESRGLRRHVRMWLLS

SEQ ID NO: 195525 - protein, 1714 aa, Oryza sativa
  unsure (1)..(1714): unsure at all Xaa locations
  Clone ID: PAT_MRT4530_91465C.1.pep
MDRQWMYANRRSKEFIDGVHYFLRVAKANRHKGFICYPCNKCKNHKEYSASRTIHFHLFESGFMPSYNCWTSHGEQGVEMEEDEVEDDNIPDFAQYAGFEGNQTGEEERDADGNDIADDLGXMLQDAKEDCESEKGAYKLDKMLEDHRMSLYPGCEQGHKKLDTTIEFLQWKAKNGVSDKAFGDLLRLVKNILPEGNKLPETTYEAKKIVCPLGLEVQKIHACPNDCILYRGEEYENLEACPVCKALRYKIRRDDPGEVDGQLTKKRIPAKVMWYFPIIPRLRRLFRNKGNDRMMRWHAEERQQDGMLRHPADGSQWRNIDRKFKDFGKDARNIWFGLSTDGMNPFLEMSSGHSTWPVTMCIYNLPRWLCMKRKYIMIPIIIQGLKQPGNDIDVYLRPLVEDLKLLWKKEGVPVWDEDKQEEFNLRALLFVTINDWSALSNLSGQSNKGYKACTYCMDETESIYGKSKDTLEARNDLKHMEQRGDLHPEPKEKGSHYLSPASYTLSKAEKESMFECLESIKVMSGYSTNIKRIISTKEKKFTNLKSHDHHVLMTQLLLVVIRGILPDNVRATITKLCAFMNAISQKVIDLDRLEALQNVVRYMGVLKKYIRNRARPEASIAKGYGTEEVIEFCIEFIEDLRPIEVPESRHEGRLRGKGTLGRKAIMTVDNNLFRKAHFTVLQQSSWVAPTIKEHLALVRARNIGKSDACITRHHIDTFSAWLRQHLMGNETINQQLAFLARGPSGSIATFQGYEINGYTFYTRAQDMKSTNQNIAVRIDAMGHDGTTGTYFCAIEDIWELDYGPLKVPLFRCQWVRLTGGGVMIDDSGMTTVDLNKVGYSDEPFVLANDVTQVFYMKDMSSKGKKGRGPDEPKHHVVLPGKRKIVGVEDKTDEDXDQLDGQSPFMVTIDPSILLSNEDTPYSRSDHKEGTIYLNEEGNVERDAEGNXEGNMERDEEEASGSQPSAGQKRARGQXGAVKKLEGRRIITEVDEDGRPSAPAEAAKNYVRHNGWVVRDNVPVSTVYWRRTRARGDHESFVPDSEKEMLWTTMLETFTLPAGIEDKVKRWTLKKMAEQFQSFKGDLYQKYILKGQTPNFDTISKLRDHWDEFVAYKTGQQGXGDDGKNKENAAKKKYYHHVGSGGYSVAMPKWEEMEARLFERGIEPATAKWPDRSKFWYYAHGGTLNLVDGSLVLSDQIREAARRLTDXVEASSQGTFXTDREKDELSRMRSERDTEAKIADLKYRVSSYELSMQEEVARKVDERMAAHQSHDPQPTIPPAMVSPSGNCSSCASTGQVASGMAIPTDRSGTYHCRLIPAGYSKVEVELVEGAYEDLELDYPGGDGETHLRDTSHAIILWRKWYIILPGRQAVSRAPSPPAPPSPPQAPAPTPPQAPAPAPSKSRALQAPPPAPTRATKKAKVDAAKNKDPGYDCTQEELDTYVASEVRRQLKPRSPEKKIPIDPSARNFFRGMSTPAKEAIKLSDYERTLKKASSGKSKPVPQLGEQPNQEIEPLVTGEDFGIQEFINDTGLTTDQLLRGAPIERAEVKYMYELGKPLVKPEQLQSLPTQMYKFHQLYMEMSATGREMIGARIRDTDFLQGDDILWINFKGIYELYQLDALDVSIMSCWILMEIQRARRQGVFDTGFIDPRKVNVAILDQYPQATEENLVHLLKAQHYKTFILLSYNTTVNVYDSMDKKESTFDKAFELIDRYCHKF

SEQ ID NO: 195526 - protein, 854 aa, Oryza sativa
  unsure (1)..(854): unsure at all Xaa locations
  Clone ID: PAT_MRT4530_91466C.1.pep
MDRQWIYADWRSKEFIDGVHYFLRVAEANRQKGFICCPCNKCKNRKEYSASRTIYFHLFESGFMPSYNCWTSHGEQGVEMEEDEVEDNNIPNFAQYAGFEGNQTGKEERDADGNNVADDLGQMLQDSKEDCESEKGAHKLDKMLEDHRTSLYPGCEQGHKKLDTTLEFLQWKAKNGVSDKAFGDLLKLVKNILPEGNQLSETTYEAKKIVCHLGLEVQKIHACSNDCILYRGPKQPGNDIDVYLRPLVEDLKLLWKKEGVPVWDEDKQEEFNLRALLFVTINDWPALSNLSGQSNKGYKACTHCMDETESTYLKHCRKVVYMGHRRFLATNHLVRKKGKHFEHKADHRTKPKHRGGKTMFAMVKDLKVVFGKGPGSQPIESEDGHAAMWKKNSIFWELPYWEFLDVRHAIDVMHLTKNLCVNLLLFLVVIRGILPDNVWATITKLCAFMNAISQKVIDPDRLEALQNDAVQCLVSFELIFPPSFFNIMMHLLCHLVKEIGILGPVYLHNMFPFKRYMGVLKKYVRNRARPEASIAKGYGTEEVIEFYVEFIEDLRPIRVPESRHEGRLRGKGTQGRLRGKGTLGRKAIMTVDNNLFRKAHFTVLEQSLLVAPYIEEHLALIRARNISKSDAWITRHHIDTFSTWVRQHSMGNKTINQQLAFLAREPSGLITTFQGYEINGYTFYTRAQDMKSTNQNSVVRIDAMGHDGTTGTYYGAIEDIWELDYGPLKVPLFRCLWARLTGGGVPIDDSGMTTVDLNKXFYVKDMFSKGXKGKGPDEPKRHVVLPGKRKIVGVENKTDEDYDQFDGQPPFTVTIDPSILLTNEDTPYSRSDHKEGTIVRRKYVRSTVTADVLP

SEQ ID NO: 195527 - protein, 95 aa, Oryza sativa
  Clone ID: PAT_MRT4530_91467C.1.pep
MAAAAARSLLRSSASLLRAAPARSASASSSAARPSLRRALAAPPRILRSPVELSVCVESLLPLHSATAAARMTSMLAVPGQGLGWLTEAETDGLC

SEQ ID NO: 195528 - protein, 2132 aa, Oryza sativa
  unsure (1)..(2132): unsure at all Xaa locations
  Clone ID: PAT_MRT4530_91468C.1.pep
MDRQWMYDGRRSKEFIDGVHYFXLRVAEANRQKGFICCPCNKCKNQKEYSASRTINFHLFELGFMPSYNCWTSHGEQGVEMEEDEVEDDNIPDFDQYSGFEGNQTGEKKMDADGNDVADDLGQMLQDAKEDCESEKGAHKLDKMLEDHRTSLYPGCEQGHKKLDTTLEFLQWKAKNSVSDKAFGDLLXVKNILPEGNKLPETTYEAKKIVCPLGLEVQKIHACPNDCILYRGEEYKNLEACPVCKALWYKIRRDDPGEVDGQLTKKRIPAKVMWYFPIIPRLRRLFRNKGNARMMRWHAEERQQDGMLRHPADGSRWRNIDRKFKDFGKDARNIQFGFSTDGMNPFGEMSSGHSTWPVTMCIYNLTPWLCMKRKYIIMPIIIQGPKQPGNDIDMYLRPLVKDLKLLWKKEGVPVWDEDKQEEFNLRALLFVTINDWPALSNLSGQSNKGYKACTHCMDETESTYLKHCRKVVYMGHRRFLAANHPVRKKGKHFEHKAEHRTKPKHRNGKTVFAMVKDLKVVFGKGPGSQPIESGDGHAAMWKKNSIFWELPYWKFLDVRHAIDVMHLTKNLCVNLLGFLGVYGKSKDTLEARNDLKHMEQRSDLHPEPKXEKGSHYLSPASYTLSKAEKESMFDCLESIKVPSGYSTNIKRIISMKEKKFTNLKSHDCHVLMTQLLLVVIRGILPDNVRATITKLCAFMNAISQKVIDPDRLEALQNDVVQCLVSFELIFPPSFFNIMTHLLCHLVKEISIIRPVYLHNMFPFERYMGVLKKYVRNRARPEASIAKGYGTEEVIEFCVEFIEDLHPIGVPESRHEGRLRGKGTLGRKAIMTIDNNLFRKAHFTVLQQSSLVAPYIEEHLALVRARNIDKSDAWITRHHIDTFPAWLRQHLMGNESINQQLAFLARGPSGSIATFQGYEINGYTFYTRAQDMKSTNQNSAVRVDAMGHDGTTSTYYGAIEAIWELDYGPPKVPLFRCQWIRLTGGGVMIDDSGMTTVDLKKVGYSDEPFVLANDVTQIFYVKDTSSKGKKGRGPDEPKRHVVLPARPRLLHQHLEVFARSISLGXPSPPLPRASPRRXAAVSRRRLALVVVAAASLGXRADAASLSCFMYEQMADRDEEQILYDTIAEGSSQYWNEEEGNEDPNQYLNEEVQRDAEGNQEGHVERDVEGNQEEEDSASQPSAGQKRARGQRGAAKKLEGRHNITEVDEDGRPSAPAEAAKNYVRHSGWVVRDNVPVSTVYWRRTRARGDHESFVPDSKKEMLWTTMLETFTLPAGTEDKVKRWILKKMAEQFQSFKGDLYQKYILKGQTPNFDTFPKLRDHWDEFVAYKTCEQGQAMMERNKENATKKKYHHHLGSGGYSVAMPKWEEMEASLLEWGIEPATANWPDRSKFWYYAHGGTLNLADGSLVFGDQIREAAHRLTEAVEASSQGTFRPDREKDELSLALQTLEHPGRTRGKWVIPWKIGFKEDIHTYRSRMRSKRDTEAKIADLEFRVSSYELSMQQEVARKVDERMAAHRSHDPXPTIPPAMVSPSGNRSSCASTRQVGSQSMDAMQTQHETTCPVDDITQRTPCELHIPFKNLSIKVASGMAIPTDPSGTYHCRPIPAGYSKVEVELVEGAYEDLEVDYPGGDGETHLRDTSHAIILWRKRYIILPGQQAASHAPSPPAPAPSPPQAPAPSPPHQSPVPSPPQAPTPTPPQDPAQTPPPAQTPPQAPASCPPAPSKSRTHQAPPPARTRATKKAKVDAAENKEPPYDCTQQELDAYVEAEVKRQLKPRGPEKKIPIDPSAKKFFRSMSAPAKEAIKLTDYERTLKKASSGKSKPVPQLGEQPNQEIEPLVTGEYFGIQEFINDTGLTTDQLLGDAPIKKAEVKYMYELGKSLVKPELLQSLPTQMYKFHQLYMEMSATGREMIGVRIRDTDFLQGDDILWINFRGIYELYQLDALDVSIMSCWILMEIQRXARRRGVFDTGFIDPRKVNVAMLDQYPQATEDNLVHLLKAQHYKTFILLLYNTEFHWVLLLFDLEAYTVNIYDSMDKKESTFDKVFELIDRAWYRFRHLVRGKWIERLRRKFNFPFIRMRDNLITHKEFIAAVQEQLMGFINEQILDPKGEFYYDGNTIHRSLASELATTTTSKS

SEQ ID NO: 195529 - protein, 82 aa, Oryza sativa
  unsure (1)..(82): unsure at all Xaa locations
  Clone ID: PAT_MRT4530_91469C.1.pep
VPSRRRXEAAAPRRVPRRASPPCAAVAAAAVSKPNYIKNKDYPEQGKSSLFLEHVDPNCEIVLFINKIACNDEHPTCDYAMP

SEQ ID NO: 195530 - protein, 45 aa, Oryza sativa
  Clone ID: PAT_MRT4530_9146C.1.pep
FYAADRPFFFFFFAHKKVDTGLFYDLIRIGCDAGDKLTFLYEIIR

SEQ ID NO: 195531 - protein, 1647 aa, Oryza sativa
  Clone ID: PAT_MRT4530_91470C.1.pep
MDRQWMYADRRSKEFIDGVHYFLRVAEANRKRGFICCPCNKCKNQKEYSASRTIHFHLFESGFMPSYNCWTSHGEQGVEMEEDEVEDDNIPDFAQFVGFEGNQTGEEEIAADGNDVADDLGQMLQDAREDCESEKEAHKLDKMLEDHRTSLYPGCEQGHKKLDTTLELLQWKAKNGVSDKAFGDLLKLVKNILPGGNKLPETTYEAKKIVCPLGLEVHKIHACPNDCILYRGEEYENLEACPVCKALRYKIRRDDPGEVDGQLTKKRIPAKVMWYFPIIPRLRCLFRNKGNARMLRWHAEERQHDGMLRHPADGSQWRNIDRKFKEFGKDARNIRFGLSTDGMNPFGEMSSGHSTWPVTMCIYNLPPWLCMKRKYIMMPILIQGPKQPGNDIDVYLRPLVEDLKQLWKKEGVPVWDEDKQEEFNLRALLFVTINDWPALSNLSGQSNKGYKACTHCMDETESTYLKHYLKVVFGKGPGSQHIESEDGHAAMWKKNSIFWELPYWEFLDVRHAIDVMHLTKNLCVNLLGFLGVYGKSKDTLEAHNDLKHMEQRGDLHPEPKEKGSHYLSPASYTLSKAEKESMFECLESIKVPSGYSTNIKRIISTKEKKFTNLKSHDCHVLMTQLLPVVIRGILPDNVRATITKLCAFMNAISQKVIDPDRLDALQNEVVQCLVSFELIFPPSFFNIMTHLLCHLVKEIRILGPMYLHNMFPFEMYMGVLKKYVRNRARPEASIAKGYGTEEVIEFCVEFIEDLRPIGVPESRHEGRLRGKGTLGRKAITTVDNNLFRKAHFTVLQHSSLVAPYIEEHLALVRARNIGKSDAWITRHHIDTFPAWLRQHLMGNESINQQLAFLARGPSGSIATFQGYEINGYTFYTRAQDMKSTNQNSAVRVDAMGHDGTTATYYGAIEETKKMPPRRTNWPERSKFWYYTYGGTLNPADGSLVFGDQIREAARRLTDAVEASSQGTFQPDRDRDELTLALQTPEHPGRTRGKGVIPWKIGFKEDIHTYRSRMRSKRDTEAKIADLEFRVSSYELNMQEELARKVDERMAAHRSHDPQPTIPPAMVSPSGNRSSCASTGQVGSQSMDAMQTQDESTCPVDDITQRTPCELHIPFKNLSIKVASGMAIPTDPSGTYHCRPIPAGYSKVEVELVEGAYEDLELDYPGGDAPSPPQAPASTPPQDPAPTPPRAPTPTPPQAPLPAPSKSRAPPAPPPVHTRATKKAKVDAAKNKDPGYDCTQEELDAYVASEVKRQFKPRSPEKKIPIDPSVRNFFRGMSASVKEAIKLSDYERTLKKASSGKSKPVPQLGEQPNQEIEPLVTGKEMTIEQFITDTGLTTDQLLGVAPIEKAEVKYMYELGKPLIKPELLQSLPTQMYKFHQLYMEMSATGREMIGARIRDTDFLQGDDILWINFRGIYELYQLDALDVSIMSCWILMEIQRARRRRVFDTGFIDPRKVNVAMLDQYPQETQDNLVHLLKAQHYKTFILLPYNTEFHWVLLLFDLEACTVNVYDSMDKKESTFDKVFELIDRAWYRFRHLVRGKWRERLRRKFKFPCAKQKQGTNLCGYYVYEYCHCLADQIITTRELDFIRMRDNLTTHKEFIVAVQEQLMGFINEEILDPKSEFYYDGNTIHRSLASELAASTTTSKS

SEQ ID NO: 195532 - protein, 68 aa, Oryza sativa
  unsure (1)..(68): unsure at all Xaa locations
  Clone ID: PAT_MRT4530_91471C.1.pep
PHLPLHPPSPTTIFFPYPFHXHXPILIIPKXFPLTIXIILHTSNHHNRHHHPLRILDNLKVGLLWAID

SEQ ID NO: 195533 - protein, 2478 aa, Oryza sativa
  unsure (1)..(2478): unsure at all Xaa locations
  Clone ID: PAT_MRT4530_91472C.1.pep
MGARRVLVMGTGPLGCAPHVMRAAELFNPQLSRALQELAGEPVPVEEHVAERRGGGKVSQERTSERIEVEAERVQRRQIVVAAEDDADAAMATADTASPRAFRQIERDERAVVVWQRGTRHAPWKCGRGQPVSAVDWGNGAVDGVLTMAAVAGKATAQCGVDGSDDGARLNAMGGGGEREHGGEGFLTGEDNEVMENNTACQMQRSIVGRNLEAWYELVSKVVNTVLTDQKDRFFWKNNKEGIFTVKSMYKFLMYEGLVPRKNFIWKLKIPLKIKILLWYLKEGIIFMGTHWARTWSLLLKGTDEEIVKNYCKVLEKHVCTDGLDGAWIQEAVLHWWRNHLSSMDRQWMYADRRSKEFIDGVHYFLRVAEANRHKGFICCPCNKCKNQKEYSASRTIHFHLFESGFMPSYNCWTSHGEEGVEMEEDEVEDDNIPDFSQDAGFEGNQMGEEERDADGNDVADDLGQMLQDAKEDCESEKGAHKLDKMLEDYRTSLYPGCEQGHKKLDTTLEFLQWKAKNGVSDKAFGDLLKLVKNILPEGNKLPETTYEAKKIVCPLGLEVXKIHACPNDCILYRGEEYENLEACPVCKALRYKIRRDDPGEVDGQLTKKRIPDKVMWYFPIIPRLRHLFRNKGNARTMRWHAEERQQDGMLRHPADGSQWRNIGKKFKDFEKDAXNIRFGLSTDGMNPFGEMSSSHSTWPVTMCIYNLPXWLCMKRKYIMIPIIIQGPKQLGNDIDVYLGPLVEDLKLLWKKEGVPVWDENKQEEFNLRALLFVTINDWPALSNLSGQSNKGYKACTHCMDETESTYRKHCRKVVYMGHRRFLAANHPVRKKGKHFEHKADHRTKPKYRSGKTVFAMVKDLKVVFXKGPGSQPIESEGGHAAMWKKNSIFWELPYWEFLDVCHAIDVMHLTKNLCVNLLGFLGVYGKLKDTLEACNDLKHMEQLGDLHPEPKEKGSHYLSPASYTLSKAEKESMFECLESIKVLSGYSTNINRIISTKEKKFINLKSHDCHVLMTQLLPVVIRGILPDNVRATITKLCAFMNAILQKVIDPDRLEALQNDVVQCLVSFELIFPPSFFNIMKHMLCHLVKENSILGHVYLHNMFSFERYMXVLKKYVRNRARPEASIAKGYGTEEVIEFCVKFIENLRPIRVPESRHEGRLRGKGTLGRKAIMTVDNNLFRKAHFTVLQQSSLVAPYIEEHLALVHARNIGKSDAWITRHHIDTFPAWLRQHLMGNETINQQLAFLARGPSGSIATFQGYEINGYTFYTRAQDMKSMNQNSAVRIDAMGHDGTTGTYYGAIEDIWELDYGPLKVPLFRCQWVRLTGGGVMIDDSGMTTVDLNKVGYSDEPFVLANDVTQVFYVKDMSSKGKKGRGHDEPKRHVVHPARPRLLHQHLEVFSXDRSLSASPSPPLPRASPRRXAVVSRRCLAGVVVAASAASATSAAAKYFLYEQMADRDEEQILYNTIVEGSSQYWNEEEGNEDPNQYLNEEGNVEREAEGNQEGNVERDVEGNQEEEASGSQPSAGQKRARRQRGATKKLEGRHIITEVDEDGRPSAPAEAAKNYVRHSYWVVRDNVPVSMVYWRRTRARGDHESFVPDSEKEMLWTTMLETFTLPAGTEDKVKRWTLKKMAELFQSFKGDLYQKYILKGQTPNFDTFPKLRDHXDEFVAYKTGQQGXAMMERNKENAAKKKYHHHLGSGGYSVAMPKWEEMEASLLERGIELATAKWLDRSKCWYYAHGGMLNPVDGSLVFSDQIREATHRLTDAVEASSGGTFRPDREKDELSLALQTPEHPGQTRGKGVIPWKIGFKEDIHTYRSQMRSKRDTEAKIVDLEYRVSSYELSMQEEAARKVGEHMAAHRSHDPQPTIPPAMVSPSGNRSSCASTGQVGSQSMDAMQTQDEITCPVDDITQRTPCELHIPFKNLSIKVASGMAIPTDPSGTYHCRPIPAGYSKVEVELVEGAYEDLELDYPGGDGESHLRDTSHAIILWRKRYIILPGXQAASRAPSPPAPPSPPPTPPSPPQAPAPSPPHAPAPSPPQAPTPTPPQAPTPTPPQAPTPTPPQAPHPVPSKSRAPQAPPHAPTRATKKAKVDATKNKDPGYDCMQEELDAYVASXVRRQLKPRSPEKKIPIDPSARNFFRGMSAPTKEAIKLSDYEXPVPQLGEEPNQEIEPLVTGEDFGIQEFINDTGLTMDQLLRGAPIEKAEVKYMYELGKPLVKPEQLQSLPRQIYKFHQLYMEMSATGREMIGARIRDTDFLQGDDILLINFKGIYELYQLDALDVSIMSCXILMEIQRARRRGGFDTGFIDPRKVNVAMLDQYPQATEDNLVHLLKAQHYKTFILLPYNTEFHWVLLLFDLEACTVNVYDSIDKKXTFDNVFELIDRAWYRFRHLVRGKWRERLRQKFNFPFIRMRDNLITHKEFIAAVKEQLMGFINEXILDPKGEFYYDGNTIHWSLASEITTTTTTTPPRVGPPSTRGDG

SEQ ID NO: 195534 - protein, 1786 aa, Oryza sativa
  unsure (1)..(1786): unsure at all Xaa locations
  Clone ID: PAT_MRT4530_91473C.1.pep
MDRQWMYADGRSKEFIDGVHYFFRVAEANRQKGFICCLCNKCKNQKEYSTSRTIHFHLFESGFMPSYNCWTSHGEQGVEMEEDEVEDDNIPDFAQYAGFEGNQTGEEERDADGNDGADDLGXMLQDAKEDCESEKGAHKLDKMLEDHRTSLYPGCEQGHKKLDTTLEFLQWKAKNGVSDKAFGDLLKLVKNILLEGNKLPETMYEAKKIVCXPLGLEVQKIHACPNDCILYRGEEYENLEACPVCKALRYKIRRDDPGEVDGQLTKKRIPAKVMWYFPIIPRLRRLFRNKGNARMMRWHAEERQQDGMLRHPADGSQWQNIDRKFKDFGKDERNIRFGLSTDGMNPFGEMSSGHSTWPVTMCIYNLPPWLCMKRKYIMMPIIFQGPKQPGNDIDVYLRPLVEDLKLLWKKEGVPVWDEDKQEEFNLRALLFVTINDWPALSNLSGQSNKGYKACTHCMDETKSVYGKSKDTLEPCNGLKHMEQRGDLHPEPKEKGSHYLSPASYTLIKAEKESMFECLESIKVPSGYSTNIKRIISTKEKKFTNLKSHDCHVLMTQLLPVVIRGILPDNVRATITKLCAFMNAISQKVIDPDRLAALQNDVRYMGILKKYVRNRARPEASIAKGYGTEEVIEFCVEFIEDLRPIGVLESRHEGRLRGKGTLGTKAIMTVDNNLFRKAHFMVLQQSSLVALYIEEHLALVHARNIGKSDAWITRHHINTFSAWLRQHLMGNETINXKLAFLVRGPSGSITTFQGYEINGYTFYTRAQDMKSTNQNSAMGHDGTTGMYYGAIEDIWELHYGPLKVPLFRCQWVRLTGGGVTIDDSGMTTVDLNKVXYSDEPFVIANDVTQVFYVKDMSSKGKKGKGPDEPKRHVVLPGKRKIVGVEDKTDEDYNQFDGQPPFTVMIDPSILLSNEDTPYSRSDHKEGTIYLNEEGNVERDAEGNEEGNDEEASGSHPSAGQKRARGQRGAAKKIEGRHIITEVDEDGRPSGPAEAAKNFVRHSGWVVRDNVPVSTVYWHRTRARGDNDSFVPDSEKEMLWTTMLETFTLPTGTENIVKQWTLKKXMAEQFQRFKGDLYKKYILKRLTPNFDVFPKLRDHWDEFVAYKTGQQGQAMMARNKENAAKKKYHHHLGSGGYSVAMPKWEEMEASLIERGNEPATAKWPDRSKFWYYAHGGTLNPVDGSLVFSDQIREAASRLTDAVEASSQGTFRPDREKDELSRMRSKKDTEVKIADLEYRVLSYELSMQEEXVDERMAAHLSQDPQPYIPPAMVSPSGNRSSCASTGQVASGMAIPTDPSGTYHCRPIPAGYSRVEVELVEAAYEDLELDYPGGDVETYLRDTSHAIILWHKRYIILPGXQAASRAPSPPAPPSPPAPSPPAPPPPPPPPCPPAPPKTRSRQAPPPARTRATKKAKVDATKNKEPPYDCSQEELDAYVAGEVKRQLKPRSPEKKIPIDPSEKNFFKXMSATNKEALQISDYDRTLQRAYHKKSKPVPQLGEQPNQEVEPLVTGEDFGITEFISDTGLTVDQLIRGAPIPKAEVAYKFELGKPLVTPEQLQSLPTQMYKFHERYMEMSAKGREMFGARIRNPDFLQGEDVLWIHFKDLFDLYHLDALDVSLLSAWILMEIQRARRRRVYDTGFIDPWKINTEMIDKYKKDTEDNLVHLLTQQHFKTYILLPYNIEATMYDSMNKEETIFDKVFQLIDMAWDRFRQLVCGTXKEKLGRRFHFPRIHMRDNLPHKDFITAVQEQLMGFINEEVLNPDGEFYYDGLTIHNAGPSSSDITPASKS

SEQ ID NO: 195535 - protein, 2072 aa, Oryza sativa
  unsure (1)..(2072): unsure at all Xaa locations
  Clone ID: PAT_MRT4530_91474C.1.pep
WMYADRWSKEFIDGVHYFLRVAEANRHNGFICCPCNKCKNQKEYSASKTIHFRLFESGFMPCYNCWTSHEEQGVEMEEDEVEDDNILDFAQYAGFEGNQTGXEESNADGNGVVDDLGXMLQDAKEDCESEKGAHKLDNMLEDHRTSLYPGCEQGHKKLDTTLEFLQWKAKNGVSEKAFGDLLKLVKNILLEGNKLPETTYEAKKIVWPLGLEVQKIHACSNDCILYRGEEYENLEACPVCKALRYKIRREDLGEVDGQLTKKRIPAKVMWYFPIIPRLRRLFRNKGNARMMRWHAEERQQDGMLRHPADGSQWRNFDRXFGLSTDGMNPFGEMSSGHSTCPVTMCIYNLPLWLCMKRNYIMMPIIIQGPKQPGNDIDMYLRPLVEYLKLLWKKEGVPMWDEDKQEEFNLRALLFVTINNWPALSNLSGQSNKGYKACTHCMDETESTYLKHSMKAVYMGHRRFLAANHPVRKKGKHFEHTADHRTKPKHCSGKTVFALVKDLKVVFGKGPGSQPIESEDGHAAMWKKNTIFWELPYWEFLDVRHAVDVMHLTKNLCVNLLGFLSVYGKSKDTLEACNDLKHMEXRVDLHPEPKEKGSHYLSPASYTLSKAEKESMFECLESIKVPSGYSTNIKRIISTKKKKFTNLKSLDCHVLMTQLLPVIIRGILPDNVRATITKLCAFMNAISQKVIDPYRLEALQNDMVQCLVSFELIFPPSFFNIMTHLLCHLVKEIGILGPVYLHNMFPFERYMGVLKKYVRNRARPEESIAKGYGTEEVIEFCVEFIEDLHPIRVPESHHEGRIRGKGTLGRKAIMTVDHNLFRKAHFTVLQQSSLVAPYIEEHLALVRARNIGKSDAWITRHHIDTFSVWLRQHLMGNETINQQLAFLARGPSGSIATFQGYEINRYTFYTRVQDMKSTNHNSAVCIDAMGHDSTTGTYYGAIKDIWELDYGPLKVPLFRCXWVRLTGGGVTIDDSGMTTVDLNKVGYSDESFVLANDVTQVFYVKDMSSKRKKGKGPDEPKRHVVLPVRPRLLHQHLEVFXRSISASPSPPLPRAXPRADGIYDYYNFNIRLVLILRLANMTYRLSKYFLYEQMADRDEEQIMYDTIVEGSSQYXNEEEGNEDPNQYLNEKGNVERDAEGNEEEEASETHPSAGQKTARGQRGSAKKIEGRHIITEVDEDGRPSAPAEAAKNFVRHSSWDVRDNVPVSTVYWRRTRARGDNDSFVPESEKEMLWTTMLETFTLPADTENIVKQWTLKKMAXXFQSFKGDLYKKYILKGLTPNFDVFPKLRDHWDEFVAYKTGQQGQAMMVKNKENAAKKKYHHHLGSGGYSVAMPKWEEMEARLIERGIEPATAKWPDRSKFWYYAHGGMLNPVDGSLDFSDQIREAASRLTDAVEASSQGTFRPDREKDELSLALXTPEHPGRTRGKGVIPXKIGFKEDIHTYMSRMRSKRDTEAKIADLEYRVSSYELSMQEEVARKVDELMAAHRSXDPQLYIPPAMVSPSCNRSSCASTGQVGSQSMDAMQTQDETTCPVDDITQRTPCEVHIPFKNLSIKVASGMAIPTDPSGTYHCRPIPAGYSKVEVELVEAAYEDLELDYPGGDXHLRDTSHAIILWRKRYIILPGRQAASHAPSPPVPPPRPPAPSPPAPQPPPPAPSPPAPPAPPPPPCPPAPPKTRSRQAPPPARTRATKKAKVDATKNKEPPYDCSQEELDAYVAGEVKRQLKPRSPEKKIPIDPSVKNFFKGMSTTNKEALKLSDYDRTLQKAYHKKSKPVPQLGEQPNQEVEPLVTGKDFGITDFISDTSLTLDXLIGGAPIPKAEVAYKFELGKPLVTPEQLQSLPTQMYKFHERYMEMSAKGREMFGARIRNPDFLQREDILWIHFKDVSDLYHLDALDVSLLSAWILMEIQRAQQRGVYDTGFIDPRKINTEMIDKYEKDTEDNLVHLLTQQHFKTFILLPYNIEFHWVLLFFDLDACRVTVYDSMNKEEKIFDKVFQLIDKASDRFRQLVRGTWKEKLGRRFHFPRIHMRDNLPHKDFITAIQEQLMGFINEEVLNPDGEFYYDGSIIHNIGPSS

SEQ ID NO: 195536 - protein, 96 aa, Oryza sativa
  unsure (1)..(96): unsure at all Xaa locations
  Clone ID: PAT_MRT4530_91475C.1.pep
QGDAVLXPMYVCSLVSRPHXAVPRFIQCKTMKRTKTPXIVSPYLWKNLPKNKXSPXILIXSNNXRWILDVALERLSIHSXPNGEXSMXPGGSAXSK

SEQ ID NO: 195537 - protein, 58 aa, Oryza sativa
  Clone ID: PAT_MRT4530_91476C.1.pep
AKSDPPKLLLGKFGIDPPCWAPPGVFNLNVLWQILCVHPTGGCFFFSCNPSRVFTPAY

SEQ ID NO: 195538 - protein, 888 aa, Oryza sativa
  Clone ID: PAT_MRT4530_91477C.1.pep
MRPDARLDAAVFQLTPTRTRFDLVVIVNGRKEKIASGLLNPFLAHLKVAQDQIAKGGYSITLEPSSGVGAPWFTRGTVERFVRFVSTPEVLERVTTIESEILQLEDAISIQSNDNLGLRSKGDAFLFAIWKVEDHGGKLTESNEGTRANHSPDADKAIVIYQPGSQPTPAVHDETTTHEENSKVQLLRVLETRKNVLRKEQAMAFARAVAAGFDIDNLGYLIAFAERFGASRLMRACSQFIELWKRKHETGQWIEVEPEAMSTHSEFPPFNPSGIVFVGDNMKQNTETMSVSNGEANGEDASKAEHKSGQQMGYQAAYPPWAMHPPPYHMQGMPYYPGPYYPPYPPVDDPRYHYSGRKSSRKHSSDSKESEVLDEGIDGSSSERGSSHGHKSHKKGKRSGKKKPSVVVIKNVNVTSKKHGSSESESQSSSEDGSQDSDDTHYKKRHGKHKSSGSKKKEGAKTNFDSGDDYNNKDESSYGQDADQGNWNAFQSFLMRAEEKTRSNDADMFSGEKAPPSRKKNNVNTADPILLAGGDSGDVYEQRGAGFDPVNGRSRAIRLQSNDELMMSGEGGRYMDGEIKEIEAGGGRYRRGTSEDFMLYGQERSMDRRSALDPLAEARYRNPNQVDKNGYAAADESFIIPLRSGSQDNVGPEYRATIDIDVELPTNTKKTSDGKAGTQLFYEPDELMPERGSEDASFGYDPAMDYESNMMVRAVKVEDSNDEDVSHSNDGDVKKPEKEKIRGTKDGSDKRKKDAILRRLSAPKTPLNDAQKRAQNMRAYKADLQKLKKEQEEEQMKRLERLKLERQKRIAARSNGKSDPPKASREHANGLSISVPSLTGLKKEKSGSTESFSERLKRLAEPKSIGGADHLSNPKSVTTDHSRRRSMV

SEQ ID NO: 195539 - protein, 1980 aa, Oryza sativa
  unsure (1)..(1980): unsure at all Xaa locations
  Clone ID: PAT_MRT4530_91478C.1.pep
MLGWRPVKDGVIGPYIWKSYREVYEEVLQVGSALQQLGVKPGSRIGIYGSNCPQWIVAMQFAGINKACSKNGVSDKAFGDLLKLVKNILPGGNKLPETTYEAKKIVCPLGLEVHKIHACPNDCILYRGEEYENLEACPVCKALRYKIRRDDPGEVDGQLTKKRIPAKVMWYFPIIPRLRRLFRNKGNARMLRWHAEERQQDGMLRHPADGSQWRNIDRKFKEFEKDARNIRFGPKQPGNDIDVYLRPLVEDLKQLWKKEGVPVWDEDKQEEFNLRALLFVTINDWPALSNLSGQSNKGYKACTHCMDETESTYLKHCRKVVYMGHRRFLAANHPVRKKGKHFEHKADHRTKPKHRSGKTVFAMVKDLKVVFGKGPGSQHIESEDGHAAMWKKNSIFWELPYWEFLDVRHAIDVMHLTKNLCVNLLGFLGVYGKSKDTLEARNDLKHMEQRGDLHPEPKEKGSHYLSPASYTLSKAEKESMFECLESIKVPSGYSTNIKRIISTKEKKFTNLKSHDCHVLMTQLLPVVIRGILPDNVRATITKLCAFMNAISQKVIDPDRLEALQNEVVQCLVSFELIFPPSFFNIMTHLLCHLVKEIRILGPMYLHNMFPFERYMGVLKKYVRNRARPEASIAKGYGTEEVIEFCVEFIEDLRPIGVPESRHEGRLRGKGTLGRKAITTVDNNLFRKAHFTVLQHSSLVAPYIEEHLALVRARNIGKSDAWITRHHIDTFPAWLRQHLMGNESINQQLAFLARGPSGSIATFQGYEINGYTFYTRAQDMKSTNQNSAVRVDAMGHDGTTATYYGAIEDIWELDYGPLKVPLFRCQWVRLTGGGVMIDDSGMTTVDLNKVGYSDEPFVLANDVTQVFLVKDMSSKGKKGRGPDEPKRQVVLPVRPRLLHQHLDVFGRSISLGLSPSPPLPRANPRADAAVSRRRLELVVLAAASASSAAAASLRCFLYQXMADRDEEQILYDTIAERSSQYWNEEEGNEDPNQYLNEEGNVERDAEGNQQGHVERDVEGNQEEEASGSQPSVGQKRARGQRGAAKKLEGRHIITEVEENGHPSAPAEAAKNYVRHSGWVVRDNVPVSTVYWRRTRARGDHESFVPDSEKEMLWTTMLETFTLPAGTEDKVKRWTLKKMAEQFQRFKGDLYQKYILKGQTPNFDKFPKLRDHWDEFIAYKTGEQGQAMMERNKENAAKKKYHHHLGSGGYSVAMPKWEQMEASLIERGIEPATANWPERSKFWYYAHGGTLNPADGSLVFGDQIREAARRLTDAVEASSQGTFQPDRDRDKLTLALQTPEHPGRTRGKGVIPWKIGFKEDIHTYRSRMRSKRDTEAKIADLEFRVSSYELNMQEEVARKVDERMAAHRSHVPQPTIPPAMVSPSGNRSSCASTGQVGSQSMDAMQTQDESTCPVDDITQRTPCELHIPFKNLSIKVASGMAIPTDPSGTYHCRPIPAGYSKVEVELVEGAYEDLELDYPGADGETHLRDTCHAIILWRRRYIILPGRQAASRAPSPPAPPSPPHDPAPSPPHAPPAPSPPQAPASTPPQDPAPTPPRAPTPTPPQAPLPAPSKSRAPPAAPPAHTRATKKAKVDAAKNKDPGYDCTQEELDAYVASEVKRQFKPRSPEKKIPIDPSVRNFFRGMSASVKEAIKLSDYERTLKKASSGKSKPVPQLGEQPNQEIEPLVTGKEMTIEQFITDTGLTTDQLLGVAPIEKAEVKYMYELGKPLVKPELLQSLPTQMYKFHQLYMEMSATGREMIGARIRDTDFLQGDDILWINFRGIYELYQLDALDVSIMSCWILMEIQRARRRRVFDTGFIDPRKVNVAMLDQYPQETEDNLVHLLKVQHYKTFILLPYNTEFHWVLLLIDLEACTVNVYDSMDKKESTFDKVFELIDRAWYRFRHLVRGKWRERLRRKFKFPFIRMRDNLTTHKEFIAAVQEQLMGFINEEILDPKGEFYYDGNTIHRSLASELAASTTTSKS

SEQ ID NO: 195540 - protein, 112 aa, Oryza sativa
  Clone ID: PAT_MRT4530_91479C.1.pep
MNGRRVYLVEIRNAPGRLRNCWEGRSVRASSLLRQLAKGGCAARRLSWVTPGTATSTSPSSLTMRRGIGRLAHRTFRPHFVGKPVVPAALMNRPTRGERRFAYWALFRFLAH

SEQ ID NO: 195541 - protein, 352 aa, Oryza sativa
  Clone ID: PAT_MRT4530_9147C.1.pep
MGAVSRSGRAVAVLQLVSTVVLLLSPPPAAASRRDMSVDFHAASCPQLETIVRSAVQAALQREIALAAGLLRIFFHDCFPQGCDASVYLNATNPNTEQFPQGPNETLQPRALQLVEDIRAKVHAECGPTVSCADISALATRDAVVVSGGPSYAVPLGQQDSLAPASVDLVGDLPGPSTSRVQALIDLFATRGLGDPADLVALSGGHTVGRARCDFFRDRAGRQDDTFSKKLKLNCTKDPNRLQELDVITPDAFDNAYYIALTTGQGVFTSDMALMKNQTTASIVRQFAQDKAAFFDQFAKSMVKLSKVPRPGGNVGEIRRSCFLSNSNGPRLDLVVAAATDQDPGFAASASA

SEQ ID NO: 195542 - protein, 2120 aa, Oryza sativa
  unsure (1)..(2120): unsure at all Xaa locations
  Clone ID: PAT_MRT4530_91480C.1.pep
MDRQWMYADRQSKEFIDGVHYFLRVAEANRQRGFICCPCNKCKNQKEYSASRTIHFHLFESGFMPSYNCWTSHGEXGVEMEENEVEDDNIPDFAQYVGFEGNQTGEEERDADGNDVADDFGQMLQDAKEDYESEKGDHKLDKMLEDHRTSLYPGCEQGHKKLDTTLEFLQWKXKNGVSDKAFGDLLKLVKNILPEGNKLPETTYEAKKIVCPLGLEVQKIHACPNDCILYRGEEYENLEACPVCKALRYKIRRDDPGEVDGQLTKKIIPAKVMWYFPIIPQLSRLFRNKGNARMMRWHAEECQQDWMLRHPADGSQWRNIDIKFKEFGKDARNIRFGLSTDGMNPFGEMSSGHSTWPVTMCIYNXPPWLCMKRKYIMMPIIIQGPKQPGNDIDVYLRPLVEDLKLLWKKEGVPVWDEDKQEEFNIRALLFVTINDWPALSNLSGQSNXGYKACTHYMDETESTYLKHCRKVVYMGHCRFLAANHPVRKKGKHFEHKADHRTKPKHRNGKTVFAMVKDLKVVFGKGPGSQPIESEDGHAAMWKKNSIFWELPYWEFLDVRHAIDVMHLTKNLCVNLLGFLGVYGKSKDTLEARNDLKHMEQRGDLHPEPKEKGIHYLSPASYTLSKAEKESMFECLESINVPSGYSTNIKRIISTKEKKFTNLKSHDCHVLMTQLLPVVIRGILPDNVRATITKLCAFMNAISQMVIDPDRLEALQNDVVQCLVSFELIFPPSFFNIMTHLLCHLVKEIXYLGPVYLHNMFPFERYMGVLKKYVRNRARLEASIAKGYGTEEVIEFCVEFIEDLHPIGVPESRHEGRLRGKGTLGRKAIMTVDNNLFRKAHFMVLQQSSLVAPYIEEHLALVRARNIGKSDAWITRHHIDTFPAWIRQHLMGNESINQQLAFLARGPSGSIATFQGYEINGYTFYTRAQDMKSTNQNIAVRVDAMGHDGTTGTYYGAIEDIWELDYGPLKVPLFRCQWVRLTGGGVMIHDSGMTTVDLNKVGYSDEPFVLANDVTQVFFVKDMSSKGKKGRGPDEPKRHVVLPGKPHLLHQHLEVFARLISLGXPSPPLPRASPRRXAAVSRRRLALVVIATASVSSAAAASLRCFLYEQMADRDEEQILYDTIAEGSSQYWNEEEGNEDPNQYLNEEGNVERDAEENQEGHVERDVEGNQEEEASGSQPSVGQKRARGQRGAAKKLEGRHIITEVEEDGPSAPAEAAKNYVCHSGWFVRDNVSVITVYWRRTRARGDHKSFVPDSEKEMLWTTMLETFTLPAGTEDKVKRWTLKKMAELFQSFKGDLYQKYILKGQTPNFDTFPKLRDHWDEFVAYKTGEQGQAMMERNKENAAKKKYHHHLGXGGYSVAMPKWEEMEASLLERGIEPATSNWPKRSKFWYYAHGGTLNPADGSLVFGDQIREAARRLTDAVEASSQGTFRPDRERDELSLALQTPEHPGRTRGKGVIPWKIGFKEDIHTYRRRMRRKRDTEAKIADLEFRVSSYERSMQEEVARKADERIAAHRSHDPQPTIPPAMVSPSGNRSSCVSTGQVGSQSMDAMQTQDESTCPVDDITQRTPCELHIPFKNLSIKVASSMAIPTDPSGTYHCRPIPAGYSKVEVELVEGAYEDLELDYPGGDGETHLRDTSHAIILWRRRYIILPGRQAASRAPSPPAPPSPPQDPAPSPPHAPAPSPPQAPAPTPPRAPAPTPPQAPLPAPSKSRAPQAPPPAHTRATKKAKVDAAKNKDPGYDCTQEELDAYVASEVKRQFKPRSPEKKIPIDPSVMNFFRGMSAPAKEAIKLSDYEQTLKKASSGKSKPVPQLGEQPNQEIEPLVTGKEMTIEEFITDTGLTTDQLLGVAPIEKAEVKYMYELGKPLVKPELLQSLPTQMYKFHQLYMDMSATGREIIGARIRDTDFLXGDDVLWINFKGIYELYQLDALDVSIMSCWILMEIQRARRRGVFDTGFIDPRKVNVAMLDQYPQATEDNLVHLLKAQHYKTFILLPYNTEFHWVLLLFDLSACTVNVYDSMDKKESTFDKVFELIDRAWYRFRHLVRGKWRERLRRMFKFPFIRIRDNLTTHKEFIAAVQEQLMGFINEQILDPKDEFYYDENTIHRSWQPCLTPLLALKAP

SEQ ID NO: 195543 - protein, 251 aa, Oryza sativa
  unsure (1)..(251): unsure at all Xaa locations
  Clone ID: PAT_MRT4530_91481C.1.pep
TRPDSKSSKHCVVLDIEGTTTPXSFVTDVMFPYARDNVRKHLTSTYSSDETKEDIKLLRIQVEEDLKNGIVGSVPIPPDDADKEEVINALVANVESMIKADRKITSLKQLQGHIWRTGFESKELQGVVFDDVPEALKHWHASGMKVYIYSSGSREAQRLLFGNTXYGDLRQYLCGFFDTTTGNKRETRSYFEISQSLGVDSPAQILFITDVFQEAVAAKSAGFEVIISIRPGNAPLPENHGFRTIKSFSEI

SEQ ID NO: 195544 - protein, 2038 aa, Oryza sativa
  unsure (1)..(2038): unsure at all Xaa locations
  Clone ID: PAT_MRT4530_91482C.1.pep
MDRQWMYAGRRSKEFIDGVHYFLRVAEANRQKSFICCPCNKCKNQKEYSVSRTIHFHLFESGFMPSYNCWTSHGEQGVEMEEDEVEDDNIPDFAQYAGFEENQTGEEERDADGNNVADDLGQMLXDAKEDCESEKGAHKLDKMLEDHTTSLYPGCEQGHKKLDTTLEFLQWKAXKNGVSDKVFGDLLKLVKNILPEGNKLPETTYEAKKIVCPLGLEVQKIHACPNDCILYRGEEYENLEACPVCKALRYKIRRDDPGEVDGQLTKKKIPAKVMWYFPIIPRLRRLFRNKGNARMMRWHAEERQQDGMLRHPADGSQWRNIDRKFKDFGNDARNIRFGLTTDGMNPFGEMSSSHSTWPITMCIYNLPPWLCMKRKYIMMPIIIQGPKQPGNDIDVYLRPLVEDLKXCWKKEGVPVWDEDKQEEFNLRALLFVTINDWPALSNLSGQSNKGYKACTHCMDETESTYLKHCRKVVYMGHRRFLAANHPVRKKGKHFEHKADHRTKPKHRSGKTVFAMVKDLKVVFGKGPGSQPIESEDGHAAMWKKNSIFWELPYWEFLDVRHAIDVMHLTKNLCVNLLGFLGVYGKSKDTLEARNDLKHMEQRGDLHSEPKEKGSHYLSPASYTLIKAEKESMFECLESIKVPSGYSTNIKRIISTMEKKFTNLKSHDCHVLMTQLLPVVIRGILSDNVRATISKLCAFMNAISQKVIDPDRLEALXNDVVQCLVSFELIFPPSFFNIMTHLLCHLVKEIGILGPVYLHNMFPFERYMGVLKKYVRNRARPEASITKGYGTEEVIEFCIEFIEAIHPIGVPESRHEGRLWGKGTLGRKAIMTVDNNLFRKAHFTVLQQYSLVAPYIKEHLALVRAKNIGXSDAWITRHHIDTFSTWLRQHLMGNETSSQQLAFLARGPSGSIATFQGYEINGYTFYTRAQDMKSTNQNSVVRIDAMGHDGTTGTYYGAIEDIWELDYELKVPLFRCQWVRLTGGGVTIDDSGMTTVDLNKVGYSDEPFVLTNDVTKVFYIKDMSSKGKKGKVTDEPKRHVIFRLRPRLLHQHLAVFXISASPSPPPCLGQSRADTTVVSRRRSMVLTASAADTAAALLANKYFLYAQMADRDEEQILYDTIAEGSSXYWNEEEGNEDPNQYLNEEGNVERDAEGNEEGNDAEEASGSQPSAGQKRARGXRGAAKKIKGRHIITEVDEDGRPSAPAEATKNFVRHSGWVVRDNVPVSTVYWRRTRARGDDDSFVPDSEKEMLWTTMLETFTLPAGTDNLVKQWTLKKMAEQFQSFKGDLYKKCILKGLTPNFDVFPKLRDHWDEFVAYKTGQQGQAMMARNKENAAKKKYHHYLGSGGYSVAKPKWEEMEASLLERGIEPATANWPDRSKFWYYAHGGTLNPVDGSLVFSDQIREXMQEEVARKVDERMAAHRSQDPQPYIHPAMVSPSGNRSSCASTGQVGXQSMDAMQTQDETSCPVDEITQRTPCELHIPFKNLSIKVASGMAIPTDPSGTYHCRPIPAGYSRVEVELVEAAYEDLELDYPGGDDETHLRDTSHAIILWRKRYIILPGRQAAFRAPSPPAPPSPPAPSPLAPPPPPAAPSPSAPPPPPAAPSPPAPPPPPPPPCPPAPPKTRSRQAPPPARTRATKKAKVDATKNKEPPYDCSQEELDAYVAGEVKRQLKPRSPEKKIPIDPSVKNFFKGMSKTNKEALQISDYDRTLQRAYHKKSKLVPQLGEQPNQEVEPLVTGEDFGITDFIADTGLSVDQLVGAAPIPKAEVAYKFELGKPLVKPEQLESLPTQMYKFHERYMEMSANGREMFGARIRNPDFLQGDDVLWIHFKDLFDLYQLDALDVSLLSAWILMEIQRARRRRVYNTGFIDPRKINSEMIDKYEKDTEDNLVHLLTQQHFKTYILLPYNTEFHWVLLFFDLDACRVTVYDSMNKEEKIFDKVFKLIDKAWDRFRQLVRGTWKEKLGRRFYFPRIHTRDNLPHKNFITAVQEQLMGFINEEVLNPDGEFYYDGSIIHNVGPSSSDITPASKSKSLLLWQTSR

SEQ ID NO: 195545 - protein, 327 aa, Oryza sativa
  Clone ID: PAT_MRT4530_91483C.1.pep
MAAAAAAASAPRLLLPPAASTFPHQHEHVRRNWHRPRRQVISARAGASVAARGLDADDFRHPLDKQNTLLLRAVPGLNDMGKALLGPVSEQVMVLQNIGSSVLVSENQLSDLHQILTEAAKLLNTDAPDLYIRQNPVPNAYTLAISGKKPFIVVHTSLVELLTRKELQAVLAHELGHLKCDHGVWLTFANILTMGAYSVPGFGMVAGFLEEQLYRWLRAAELTCDRAALLVVQDPKVVISVLMKLAGGCPSLADQLNVDAFLEQARSYDKAASNPVGWYIRNAQTRELSHPLPVMRAREIDEWSRSREYKTVQQKVIQLQLNDHDAS

SEQ ID NO: 195546 - protein, 529 aa, Oryza sativa
  Clone ID: PAT_MRT4530_91484C.1.pep
MACCGGGRGEGAAATESEAYLEGEAVREARELVAELCRHFYGQGWVTGTGGSITVKANDPALPLADQLIVMSPSGVQKERMVAEDMYVLSADGKVLSSPVSKPWPNKPPKCTDCAPLFMKAYLMRGAGAVIHSHGMETCIATMLDPGAKEFRMTHMEMIKGIKGHGYRDELVVPIIENTPYEYELTDSLAEAIAAYPKATAVLVRNHGIYVWGDSWINAKTQAECYHYLFDAAIKLYQLGIDWTTPEHGPINSAKRPRSVLSSSIPNGCPDSKSSKHCVVLDIEGTTTPISFVTDVMFPYARDNVRKHLTSTYSSDETKEDIKLLRIQVEEDLKNGIVGSVPIPPDDADKEEVINALVANVESMIKADRKITSLKQLQGHIWRTGFESKELQGVVFDDVPEALKHWHASGMKVYIYSSGSREAQRLLFGNTAYGDLRQYLCGFFDTTTGEIMIPSRINRSNKRETRSYFEISQSLGVDSPAQILFITDVFQEAVAAKSAGFEVIISIRPGNAPLPENHGFRTIKSFSEI

SEQ ID NO: 195547 - protein, 316 aa, Oryza sativa
  Clone ID: PAT_MRT4530_91485C.1.pep
MRHMSSYTTPSAASAADLRGAGTSGSPDESSHPAPDPDPRFHHHPPPPPPPPPPPGPKKPSPSSPEKGPPASEGGLDRRVRGRVRARRRTVAVAEAEGRRRMMVVEEEVAVAGGTGEEEASGRRRRSDSGGGGGLEEGAAAEISMVGGDGRAIGEGEKERKRRRVGKWGKSYVWRVKVDWFLQDFKAFNTKGAGCNILHQAFKVFTYKRVLVPYQRCNLEILPTGHHLCCNLAIRLVLGAAANTSSHGSESTSPCLARENEKQHVTIDESSSSNDEEPRRHTHINWIEEENIRLLSCWLHRSTDPVKGIDMKSEYY

SEQ ID NO: 195548 - protein, 78 aa, Oryza sativa
  unsure (1)..(78): unsure at all Xaa locations
  Clone ID: PAT_MRT4530_91486C.1.pep
SRXXSDSXEXWXTXPSAGIXXXXGGSSXXVXCXXXXXSTATXXXSXSGAXXATYAPXSXXTSTXXXASXTPSXRRNXR

SEQ ID NO: 195549 - protein, 91 aa, Oryza sativa
  Clone ID: PAT_MRT4530_91487C.1.pep
MVEEAASPSKAAVGATQVVIASLKSVGGGVPPLLIGPETTREDANDGTVKLGRSGLGLIKFGLERWRMIIRALHEDGSSSTPAPLYPSLRR

SEQ ID NO: 195550 - protein, 456 aa, Oryza sativa
  Clone ID: PAT_MRT4530_91488C.1.pep
AHDRFIKNLAMLQKLNILRKEMYRGYYTLICFRCHNNEEDNVKDREVSYYFTPSKLNPAKRVRFCTGSGQTLRDQLQQVLGSLQVTLEDMREFLMFFNSCPHLCRQPYSMHLLLDRCLFGRQMETEHIMNFLLKEDIPSAENLGVLPIIGPGKVGKSTLIEHACEDERVRNRFSQIVCFNDDDVGHANMVALRDCGVIKHKNHSIGGDRMLIIIELMGDIDEGVWGRLYSASKISVAVGSKIIVTSRSDKIVSFGTTQVLRVNFFTQEAYWYFFKVRTFGSLDAEEHPKLASLAMDIAREMNQCFMGSCIYSVLLKANFNARFWSMALARIREFKLKNNLIYNAYLVGGPWEAVKPAYVRTVNKISSEYLVVLHDYQTLSVPNMVHCYTNSAQSEGEVPEVSMQDFLFGSVKPQGKFKVLAWRSHLPPHYNYIFNCEVRRPHHMVTSKKRSHKLCT

SEQ ID NO: 195551 - protein, 52 aa, Oryza sativa
  Clone ID: PAT_MRT4530_91489C.1.pep
MGPIKSCRLTRGTPLSIAIYGVKTSGFPFILLVIVVLGGYKRGKTHAAWHAR

SEQ ID NO: 195552 - protein, 157 aa, Oryza sativa
  Clone ID: PAT_MRT4530_9148C.1.pep
RRRRVLPPQPCLPPSGEDSSNWAADFVKVAPGPPLRTSSWPATLTSTSRGCWHLHCQTVAAMHPRGKHPAGSIRKHLPTSKHALSPLAGSTAGASAGQHTSGAFCSQHRPSKAFLHVIRCFSILHPCHLTSCYLLFHHVGAWFVHSHFRQSSMGGSM

SEQ ID NO: 195553 - protein, 64 aa, Oryza sativa
  Clone ID: PAT_MRT4530_91490C.1.pep
MEQRKPWRAVGSSAMDPAIVVQVGGSFRFTMVVGKGIQDFQALLHQGYSRTPSATAAAAAAQPP

SEQ ID NO: 195554 - protein, 68 aa, Oryza sativa
  Clone ID: PAT_MRT4530_91491C.1.pep
LTYIRPYNQSTGISYFIYNLIQSLLNIFLLFEHGLTNHFYLLGLLGKLVAVAAAALQHMQPNRPVVNN

SEQ ID NO: 195555 - protein, 82 aa, Oryza sativa
  unsure (1)..(82): unsure at all Xaa locations
  Clone ID: PAT_MRT4530_91492C.1.pep
YSLVSNSKARKISTLYATPAELALAGLDLNKTAARDKICTAIHYRXKMITGAQPGTAQDVDWSTTLASKVVRLLKRVKDLHG

SEQ ID NO: 195556 - protein, 340 aa, Oryza sativa
  unsure (1)..(340): unsure at all Xaa locations
  Clone ID: PAT_MRT4530_91493C.1.pep
MATGESQQASRREGRERDEHDASRRERERDHTHGRRPHSSSRSRRDDPSPRRRREDRRHHESDRSHRHRSRAEESAKAVDRDQKRDRPLQDAAQPDDPLRAETKPLDDARNGSPARHERSPRGTKRFPESRDARRPRSFFQHDERGSAGQGGRCYYRQASASLICVCLLLFFKDRGRQRDEKEHVGDREKNKDEGKAMQDEQQNDGESTWKHDGFFQLEEEAHPAKRRPPFNEMGMPLEGKESVLSVTEPDSRSHKHDQAGPTSAIGEERRNYHPRGFDRHEGPFVRPDGQGMRRGFSDHRNAGQRNGYDSWGRFAGRGRGRYRFNNSYDGXKQHAPGCW

SEQ ID NO: 195557 - protein, 155 aa, Oryza sativa
  Clone ID: PAT_MRT4530_91494C.1.pep
EGRHRAFFPCTLAADQAEDLQWRQPRRPSSSSSRGSRTPATRCSCRWTPARTCSTRRTTAWRTTSCAPTAPAATSPSPTSPTAAAAPTPPPSPAPPSPSPHSAATNKATPPLPPPAPAALTPPPTPSITMACHRRCKWVDYGCWSVSREPTYFNL

SEQ ID NO: 195558 - protein, 209 aa, Oryza sativa
  Clone ID: PAT_MRT4530_91495C.1.pep
AFSSVGAVESAYAIATKKLLRLSEQQVLDCSGGGDCGGGYTSTVLSEFAVKKGIALDASGNPPYYPPYQAKKLACRTVAGKPVVKMDGAASVPSSNEVALKQSVYKQPVSVLIEANSNFQLYKQGVYSGPCGTSINHAVLAVGYGATPDNTKYWIVKNSWGTGWGEMGYIRMKRDIAAKSGLCGIALYGMYPIKKTAAISMVVDAVDSY

SEQ ID NO: 195559 - protein, 987 aa, Oryza sativa
  unsure (1)..(987): unsure at all Xaa locations
  Clone ID: PAT_MRT4530_91496C.1.pep
MADRDEEQILYDTIAEGSSQHWNEEEGNEDPNQYLNEEGNMERDAEGNQQGHVERDVVGNQEEEASGSQPSIGQKRARGQRGAAKKLEGRHIITEVEEDGRPSAPAEAAKNYVRHSGWVVRDNVPVSTVYWRRTRAHGDHESFVLDSEKEMLWTTMLETFTLPAGTEDKVKRWTLKKMAEQFQSFKGDLYQKYILKGQTPNFHTFLKLRDHWDKFVAYKTGEQGQVMMERNKENAAKKKYHHHLGSGGYSVAMPKWEEMEASLLERGIEPATANWPERSKFWYYAHGGTLNPADGSLVFADQIREAARRLTDAVEASSQGTFRPDRDRDELTLALQTPEHPGRTRGKGVIPWKIGFKEDIHMYRSRMRSKRDTETKIADLEFRVSSYELGMQEEVARKVDECMAAHRSHDPQPTIPPAMVSPSGNRSSCASTGQVGSQSMDAMQTQDESTCPVDDITQRTPCELHIPFKNLSIKXLGMAIPTDPSGTXHCRPIPARYSKVEVELVEGAYEDLELDYPEGDGXPALSPPHAPLAPSPPQAPAPTPPQAPAPTPPRAPTPTPPQAPLPAPSKSRAPPAPPPAHTRATKKAKVDAAKNKDPGSQETIQAXSPEKKIAIDPSVRNFFRGMSAPVXEAIKLSDYERTLKKASSAKSKPVPQLGEQPNQEIEPLVNGEDMTIEEFITDTGLTTDQLLGVEPIEKAEVKYMYELGKPLVKPELVQSLPTQMYKFHQLYIEMSTTGREMIGARIRDPDFLQGDDILWINFKGIYELYELDALDVSIMSCWILMEIQRARRRRVFDTGFIDPRKVNVAMLDQYPQATEDNLVHLLQAQHYKTFHWVLLLFDLSACTINVYDSMDKKESTFDKVFELIDRAWYWFRHLVHGNWRERLRRKFKFPCAKQKQGTNLCGYYVYEYCHCLADQIITTRELDFIRMRDNLTTHKEFIAAVQEQLMGFINEEILDPKGEFYYDGNTIHRSLASELATTTTSKS

SEQ ID NO: 195560 - protein, 1074 aa, Oryza sativa
  Clone ID: PAT_MRT4530_91497C.1.pep
MSTSCSSSGALRAAATKALLLVVFVSLSRPFPCTARDSLLRGASIAVEDHATDVLLSPDGTFACGFYGVSPTVFTFSVWFARAADRAVVWSANRARPVHSKRSRLKLSGRRGALVLTDYDGEVVWNSTSFDHPTDTLLPTQRIAAGEAMVSADKILAAGFYSFRFSDYAMLSLVYDNHEMCSIYWPNPYYSYWQNSRKIYNFTREAFFDASGHFSSSDNATFGAADLGKNVAVRRRLTLDTDGNLRLYSLDEVAGTWLVSWMAFSNPCIIHGVCGANAVCLYSPAPVCVCAPGYARADPSDWSRGCRPTFNSGDGGGRPRAMKLVALPHTDFWGFDINSSENLSLDECSTRCMSEPSCVVFQYKQGKGECYPKSLMFNGRTFPGLPGTAYLKVPADLDMPEIHIHQWQKDGDRHAIAIQEDIVGCGGMSSPEFLLNVSNASSSKSNQGKSIWFYFYGFLTAFFVIESEIGRGGSGVVYKGILDDERTVAVKVLQDVKQGEDVFQAELSVIGRIYHMNLVRMWGFCSEGIHRILVYEYIENGSLAKVLFQGRDSGMFLGWKQRFNIALGVAKGLAYLHNECLEWIIHCDMKPENILLDEDMEPKITDFGLSKLLNRDGSGSDMSWIRGTRGYMAPEWVSSLPITEKVDVYSYGVVLLELVKGVRISDWVLDGKEELEAELRSVVKMVVSKLESNIESLVADLMDDRLHDARMIADYAHFGDVITFDTTFGTNKESRPFGMRSPQLSESLNSNLKGHLKSDLDIGRFLNRVERVVEEKREKELQSEYESRKKLPRIMMMTPMLVQASKLYTPALFEVFQAEYEKSMATYTKGSNGSNDFIIAIGSLDDQFILEDEHKVTANPFDQTVSCSCPMFERIGLLCRHALKALDLVNIKLLPEKYVLKRWTREAKCGAIQDMHGRQIVEDPKLSTTLRYRYLYQQFLPLASRAVDFEECYLLVEEALHAVSKKVEDKIKQTYSDGIAKSNDQSTSQLAQNLAHVSGLKKKESRKRVTKRKTNWIDKLQKTKKRKPEEKAEEENLQTDVEEHQECEAISSYAQLLLELTAQVTMFRRVRTHS

SEQ ID NO: 195561 - protein, 1021 aa, Oryza sativa
  unsure (1)..(1021): unsure at all Xaa locations
  Clone ID: PAT_MRT4530_91498C.1.pep
MADRDEEQILYDTIAEGSSQYWNEEEGNEDPNQYLNEEGNVERDAEGNQQGHVERDVEGNQEEEASGSQPSVGQNRARGQRGAAKKLEGQHIITEVEEDGRPSAPAEAAKNYVRHSGWVVRDNVPVSTVYWXRTRARGDHESFVPDSEKEMLWTTMLETFTLPAGTEDKVKRWTLKKMAEQFQSFXGDLYRKYILKGQTPNFDTFPKLRDHWDEFVAYKTGEQGQAMMERNKENAAXKKYHHHLGSGGYSVAMQXWEQMEASLIERGIEPATANWPERSKFWYYAHGGTLNPADGSLVFGDQIREAARRLTDAVEASSQGTFRPDRDRDELTLALQTPEHPGRTRGKGVIPWKIGFKEDIHTYRSRMRSKRDTEAKIADLEFRVSSYELNMQEEVARKVDERMAAHRSHDPQPTIPPAMVSPSGNRSSCASTGQVGSQSMDAMQTQDESTCPVDDITQRTPCELHIPFKNLSIKVASGMAIPTDPSGTYHCRPIPAGYSKVEVELVEGAYEDLELDYPGGDGETHLRDTCHAIILWRRRYIILPGRQAASRAPSPPAPPSPPQDPAPSPPHAPPAPSPPQAPASTPPQDPAPTPPRAPTPTPLQAPLPAPSKSRAPPAPPPAHTRATKKAKVDAAKNKDPGYDCTQEELDAYVASEVKRQFKPRSLEKKIPIDPSVRNFFRGMFASVKEAIKLSDYERTLKKASSGKSKPVPQLGEQPNQEIEPLVTGEEMTIEQFITDTGLTTDQLLGVAPIEKAEVKYMYELGKPLVKPELLQSLPTQMYKFHQLYMEMSTTSREMIGARIRDTDFLQGDDILWINFRGIYELYQLDALDVSSMSCWILMEIQRARWRRVFDTGFIDPRKVNVAMLDQYPQETEDNLVHLLKAQHYKTFILLPYNTEFHWVLLLFDLDACTVNVYDSMDKKESTFDKVFELIDRAWYRFRHLVRGKWRERLRRKFKFPFIRMRDNLTTHKEFIAAVQEQLMGFINEEILDPKGEFYYDGNTIHRSLASELAASTTTSKS

SEQ ID NO: 195562 - protein, 2068 aa, Oryza sativa
  unsure (1)..(2068): unsure at all Xaa locations
  Clone ID: PAT_MRT4530_91499C.1.pep
MDRQWMYADRRSKEFIDGVHYFLRVAEANRHKGFICCPCNKCKNQKEYSASRTIHFHLFESGFMPSYNCWTYHREQGVEMEEDEVXDDNILDFAQYVGFKGNQTGEEERDADGNDVADDLGQMLQDAKEDCESEKEAHKLDKMLEDHRTSLYPGCEQGHKKLDTTMEFLQWKAKNCVSDKAFGNLLKLVKNILPEGNKLPETTYEAKKIVCHLGLEVQKIHACPKDCILYRGEEYENLEACHVCKALRYKIRRDDPGEVDGQLAKKIIPAKVMWYFPIIPRLRRLFRNKGNARMMRWHAAERQQDGMLRHPADGSQWRNIDRKFKDFGKDARNIRFGLSTDGMNPFGEMSSGHSTWPVTMCIYNRTKPKHRSGKTVFAMVKDLKVVFRKGPGSQPIESEDGHAAMWKKNSIFXELPYWEFLDVRHAIDVMHLTKNLCIDLFGFLGVYGKSKDTLEARNDLKHMEQRGDLHLEPKEKGSHYLSPASYTLSKAEKENMFECLECIKVPSGYSTNIKRIISMKEKKFTNLKSHDCHVLMTQLLPVVIRGILLDNVRATITKLCAFMNAISQKVIDPDRLEALQNDVVQCLVNFKLIXPPSFFNIMTHLLCHLVKEIRILGPVYLHNMFPLERYMDVLKKYVRNRARPEASIAKGYGIEEVIEFCVEFIEDLRPIGVPESLHEGRLRGKGTLERKAIMRVDNNLFRKAHFTVLQHSSLVAPYIEEHLALVRARNIGKSDAWITRHHIDTFPTWLRQHLMGNESINQQLAFQARGPSGSIATFQGYEINGYTFYTRAQDMKSTNQNSVVLVDAMGHDGTTATYYGAIEDIWELDYGPLKVPLFRYQWVRLTGGGVMIDDSGMTTVDLNKVGYSDEPFILANDVTQVFFVKDMSSKGKKGRGPKEPKRQVVLPARPRLLHQHLXVFGRSISLGLSPSPPLPRANPRVDAAVSRCRLELIVLAAASASSAAAASPRCFLYQQMADRDEEQILYDTIAEGSSQYWNEEEGNADPNQYLNEEGNVERDAEGNQQGHVKRDVEGNQEEEASGSQPSVGQKRARRQXGAAKKLESRHIITEVEEDGRPIAPAEATKNYLRHSGWVVRDNVPVSTVYWQRTRARGDHESFVSDSEKEMLWTTMLETFTLPAGTEDKVKRWTLKKMAEQFQSFKGELYKKYILKRQTPNFDTFPKLRDHWDEFVAYKTGEQGQAMMERNKENAAKKKYHHHLGSGGYSVAMPKWEEMEASLIERGIEPATANWPERSKFWYYAHGGTLNLADGSLVFGDQIREAARRLTDTVEASSQGTFRPNRDRDELTLALKTPELPGRTRGKGVIPWKIGFKVDIHTYRSRMRSKRDTEAKIADLEFRVSSYELSMQEEVARKVDERMAAHRSHDPQPTIPPAMVSPSGNRSSCASTGQVGSXSMDAMQTQDESTCPVDDITQRTPCELHIPYKNLSIKVASGMAIPTDPSGTYHCRPIPAGYSKVKVELVEGAYEDLQLDYPGGDGETHLRDTSHAIILWRRRYIIIPWRQAASRAPSPPAPPSTPQDPAPSPPHYPPAPSPPQAPAPTPPQYPAPTPPRAPTPTPPQAPLLAPSKSRALPAPPPAPTRATKKAKVDAAKNKDPGYDCTQEELDAHVASEVRRQLKPRSPEKKIPIDPSVRNFFRGMSAPAKEAIKLLNYERTLKKASSGKSKPVPQLGEQPNQEIEPLVTGKEMTIEQFITDTGLTTDQLLGVAPIEKAEVKYMYELGKPLVKPELLQSLPTQMYKFHQLYMEMSATGREMIEARIRDTDFLQGDDILWINFRGIYELYQLDALDISIMSCWILMEIQRARRRRVFDTGFIDTRRVNVAMLDQYPQETVDNLVHLLKVQHSKTFILLPYNTEFHWVLLLFDLSACTVNVYDSMDKKESTFDKVYELIDSAWYRFRHLVRGKWRERLRRKFKFPFIRMRDNLTTHKEFIAAVQEQLMGFINEEILDPKGEFYYDGNTIHRSLASELAASTSSNEPTLENVSHKLKGMESWYEELMRNSKSYKESIDKHLKTLSESLARISRFYGGLNREIRDIFEYKEYNTVNRLFH

SEQ ID NO: 195563 - protein, 513 aa, Oryza sativa
  Clone ID: PAT_MRT4530_9149C.1.pep
MATVTRLCVTKSVPTVNGQFPGPKLVVREGDTLVIRVTNNINNNVTFHWHGIRQVRSGWADGPAYITQCPIRSGGSYVYRFTVTGQRGTLWWHAHFSWLRATLYGPLVILPPRGVAYPFPKPHREVPLLLGEWFNADPEAVIKQALQTGGGPNVSDAYTFNGLPGPTYNCSSSNDTFKLRVRPGKTYLLRLINAALNDELFFGVANHTLMVVQADASYVKPFAATALVISPGQTMDVLLTAAANNPPSRSFAIAVAPYTNTVGTFDNTTAVAVLEYYGAATSAAALRSLPLPSLPAYNDTGAVANFSASFRSLASAQYPARVPRTVDRHFFFAVGLGADPCQSPVNGTCQGPNNTRFAASMNNVSFVMPRTSLLQAHYQRRYNGVLAANFPAAPRTPFNYTGTPPNNTFVTHGTRVVPLSFNTTVEVVLQDTSILGAESHPLHLHGYDFYVVGTGFGNYDASNDTAKYNLVDPVQRNTISVPTAGWVAIRFVADNPGWLPALYLYLHLKREFL

SEQ ID NO: 195564 - protein, 160 aa, Oryza sativa
  unsure (1)..(160): unsure at all Xaa locations
  Clone ID: PAT_MRT4530_914C.1.pep
GPFDFSSERQEPLDLLIGEISSXSSRTLFCKRILLCPSHGGGCRDPQPKAPLMPVTASTPHLPLXPPHRRFLPSALLPPPGRPPPHAKHHRWTIFFPCQAPMQSLPSHLQWRDALGSQTMAANLLLIHIPTATSXLHAPIPTSRAITSITPDPSLPHRLI

SEQ ID NO: 195565 - protein, 109 aa, Oryza sativa
  Clone ID: PAT_MRT4530_91500C.1.pep
WVRLQEFGTRSSEVRRRALSALKGAAKENPAAIMGQASIFGPALADCLKDGSTPVRLAAERCALHSFQLAKGTENVQAAQKYITGLDARRLAKYPEESDGEDSEDNASG

SEQ ID NO: 195566 - protein, 519 aa, Oryza sativa
  Clone ID: PAT_MRT4530_91501C.1.pep
MPPTREPAHPPHHLPSLFRSKSNPPLGRSACAAAAAAPTGATAREGVGEKQEETPNRPGRGLGHPAPAVPPGRPSGVRPPRPTYPCPRRASAPFRVVPWLRCPLSSRFLRLHVQYVPDMCLCQVRLFLSEDSPSQAGLRPQDNLQAKGSWLLHAAGPSSDDSLPPGFESLPPSNDLKIDMSQIPLIRWKCPPHIVLEQDWHIVAGEESREIEIQNERINGALEAIYPRPSNIPPNPFLSLDVKDAHYDDSKTLLVPLIPLEDDDASDQLEGPTLDLPSHYNITGPQAAVSATVTAIMQTIQSNQNGSMADQNGSTIDQELLFKILSDPSQLQRLMKECGPVRHEQSASSSVVAPSTLPPPPPMMNRPPSTIPSVAMNHPPSSSPAMNFGSALPSSSPSVNFGSVPGRGVGYYKTLIHQHGGERLEQPFEQHGMQFGMYRQPGPPQNGGIDAMNGAAAMVSRDGKVRPMKPCAYFNSPKGCRNGASCTFLHDASAPTRKDHQKQKGSKRIKLDNTMGGRN

SEQ ID NO: 195567 - protein, 1798 aa, Oryza sativa
  unsure (1)..(1798): unsure at all Xaa locations
  Clone ID: PAT_MRT4530_91502C.1.pep
MDRQWMYADRRSEEFIDGVHYFLRVAEANKQKGFICCPCNKCKNXKEYSASRTIHFHLFESGFMPSYNCWTSHGEQGVEMEEDEVEDDNIPDFAQYAGFEGNQTGEEDRDADYNDVADDLGQMLQDAKEDCESEKGAHKLDKMLEDHRTSLYPGCEQGHKKLDTTLEFLQWKAKNGVSDKAFGDLLKLVKNILPEGNKLPETTYEAKKIVCPLGLEVQKIHACLNDCILYHSEEYENLEACPICKALRYKIRRDDPGEVDGQLTKKRIPAKVMWYFPILTRLRHLFRNKGNARMMRWHAEERQQDGMLRHPADGSQWRNIDRKFKGFGKDARNIRFGLSTDGMNPFGEMSSGHSTWPVTMCIYNLPPWLCMKRKYIMMPIIIQGPKQPGNDIGVFLIPLVEDLKLLWKKEGVPVWDEDKQEEFNLRALLFVTINDWPALSNLSGQSNKGYKACTHCMDETESVYGKSKDTLEARNDLKHMEQRGNLHPEPQEKGSHYLSPASYTLSKAEKESMFQCLESIKVPSGYSTNIKRIISTKEKKFTNLKSHDCHVLMTQLLPVIIRGILPDNVRATITRLCSFMNAISQKVIDPDRLEALQNDVRYMGVLKKYVRNRARPEASIAKGYGTEEVIEFCVEFIEDLRPIGVPESRHEGRLRGKGTLGRKAIMTVDNNLFRKAHFTVLQQSSLVAPYIEEHLALVRARNIGKSDAWITRHHIDTFPAWLRQHLMGNETINXQLAFLARGPSGSIATFQGYEINGYTFYTRAQDMKSTNQNSAVRIDAMGHDGTTGTYYGAIEEIWELDYGPLKVPLFWCQWVRLTGGGVTIDDSGMTTVDLNNVGYSDEPFVLANDVTQVFYVKDMSSKGKKGKGPDEPKRHVVLPGKRKIIGVEDKTDEDYDQFDGQPPFTVTVDPSILLSNEDTPYSRSDHKEGTTYLNEEGNAERDAEGNEEGNVERDAEGNEEEASGSHPSAGQKRARGQRGAAKKIEGRHIITEVDADGRPSAPAQTAKNFVRHSGWVVRDNVPVSKVYWRRTSARGDDDSFVPESEKEMLWTTMLETFTLPSGIENIVKQWTLKKMAEQFQTFKGDLYRKYILKGQTPNFDVFPKLRDHWDEFVAYKTGQQGQAMMERNKENAAKKKYHHHLGSGGYSVAMPKWKEMEASLLERGIEPATAKWPDRSKFWYYAHGGTLSPVDGSLVFSDQIREAANRLTDAVEASSQGTFRPDREKDELSRMRSKRDTEAKIADLEYRVSSYELSMQEEVARKVDERMAAHRSHDPQPYIPPPMVSPSGNRSSCASTGQVASGMAIPTDISGTYHCRPIPAGYSRVEVELVEAVYEDLELDYPGGDGETHLRDTSHAIILWRKRYIILPGRQAASRAPSPPAPPPPPPAPSPPAPPAPPPPPPPCPLAPPKTRSRQAPPPASTRATKKAKVETTKNKEPPYGCSQEELDTYVAGEVKRQLKPRSPEKKIPIDPSVKNFFKGMSIANKEALKLSDYDRTLRKAYYKKSKLVPQLGEQPHQVTGEDFGITDFISDTGLTMAQLVGGAPIPKAEVAYKFELGKPLVRPEQLQSLPTQMYKFHERYMEMSANGREIFGARIRNPDFLQGEDVLWIHFNDVFDLYHRDALDVSLLSAWILMEIQRARRRRVYNTGFIDPRKINTEMLDKYEKDTEDNLVHLLTQQHYKTFILLPYNTEVTVYDSMNKEEKVFDKVFQLIDMAWDRFRQLVRGTWKEKLGRRFHFPHIHMREKLPHKDFIMAVQEQLMGFINEEVLNPDGEFYYDGSTIRNVGPSSSDVTQASKS

SEQ ID NO: 195568 - protein, 86 aa, Oryza sativa
  unsure (1)..(86): unsure at all Xaa locations
  Clone ID: PAT_MRT4530_91503C.1.pep
MSFVISLILLTIINDAVIDNNLFSSWFGMVYSWFGDKTVQPGXWLLGMVGPMQXGMLYSVGLILFNXKYFTVLLNSEVFVKCHLCK

SEQ ID NO: 195569 - protein, 145 aa, Oryza sativa
  Clone ID: PAT_MRT4530_91504C.1.pep
DAWAATVTAIMQTIQSNQNGSMADQNGSTIDQELLFKILSDPSQLQRLMKECGPVRHEQSASSSVVAPLVSIPPPQITASSPAPFSDHVGTFHGMNPTLPPPPPMMNRPPSTIPSVAMNHPPSSSPAMNFGSALPSSSPSVNFGS

SEQ ID NO: 195570 - protein, 1023 aa, Oryza sativa
  Clone ID: PAT_MRT4530_91505C.1.pep
MYAQMADRDEEHILYDTIAEGSSQYWNEEEGNEDPNQYLNKEGNVHRDAQGNEEGNDAEEASGSQPSAGQKRARGQRGAAKKIEGRHIITEVDEDGRPSAPAEAAKNFVCHSGWVVRDNVPVSTVYWRKTRARGDDDSFVPDSEKEMLWTTMLETFTLPAGTENLVKQWTLTKMAEQFQSFKGDLYKKYILKGLTPNFDVFPKLRNHWDEFVAYKTGQQGQTKMARNKENAAKKKYHHHLGSGGYSVAKLKWEKMEASLLERGIEPATANWPDRSKFWYYAHGGTLNPVDGSLVFSDQIREAASRLMDAVVASSQGTFRPDREKDELSLALQTPEHPGRTRGKGVIPWKIGFKEDIHTYRSQMRSKRDTEAKIADLEYRVSSYELSMQEEVARKVDERMAAHRSQDPQPYIYPAMVSPSGNRSSCASTGQVESQSMDAMQTQDETSCPVDEITQRTPCELHIPFKNLSIKVASGMAIPMDPSGTYHCRPIPAGYSRVEVELVEAAYEDLELDYLGGDGETHLRDTSHAIILWRKRYIILPGRQAAFRAPSPPAPPSPPAPSPPAPPPPPAAPSPPAPPSPPAPSPPAPPPPPAAPSPPAPPPPPPPPCPPAPPKIRSRQAPPPARTRATKKAKVDATKNKEPPYDCSQEELDAYVAGEVKRQLKPRSPEKKIPIDPSVKNFFKAMSKTNKEALQISDYDRTLQRAYHKKSKPVPQLGEQPNQEVEPLVTSEDFDITDFIADTGLSVDQLVGAAPIPKAEVAYKFELDKPLVKPEQLESLPTQMYKFHERYMEMSTNGREMFGARIRNSDFLQGDDVLWIHFKDLFDLYQLDALDVSLLSAWILMEIQRARRRRVYDTGFIDPRKINSEMVDKYEKGIEDNLVHLLTQQHFKTYILLPYNTEFHWVLLFFDLDACRVTVYDSMNKEKKIFDNIFKLIDRAWDRFRQLVRGTWKEKLGRRFHFARIHMRDNLPHKDFITAVQEQLMGFINEEVLNPDGEFYYDGSTIHNVGPSSSDITSASKSKS

SEQ ID NO: 195571 - protein, 169 aa, Oryza sativa
  unsure (1)..(169): unsure at all Xaa locations
  Clone ID: PAT_MRT4530_91506C.1.pep
FPPPVPLPLQIQPSPRPLRLRRRRRRRHRSDGEGGSGGEAGGNPKPSRSRGREPAAGFSARSRRSRRVSWASGGNLCKVRLFLSEDSPSQAGLRPQDNLQAKGSWLLHAAGPSSDDSLPPGFESLPPSNDLKIDMSQIPLIRWKCPXNIVLEQDWHIVAGEKVGRLKLK

SEQ ID NO: 195572 - protein, 1248 aa, Oryza sativa
  unsure (1)..(1248): unsure at all Xaa locations
  Clone ID: PAT_MRT4530_91507C.1.pep
MDRQWMYADRRSKEFIDGVHYFLRVAEANRQRGFICCPCNKCKNQKEYSASRTIHFHLFESGFMPSYNCWTSHGEQGVEMEEDEVEDDNIPDFAQYVGFEGNQTGEEEIAADGNDVADDLGQMLQDAREDCESEKEAHKLDKMLEDHRTSLYPGCEQGHKKLDTTLELLQWKAKNGVSDKAFGDLLKLVKNILPGGNKLPETTYEAKKIVCPLGLEVHKIHACPNDCILYRGEEYENLEACPVCKALRYKIRRDDPGEVDGQLTKKRIPAKVMWYFPIIPRLRRLFRNKGNARMLRWHAEERQQDGMLRHPADGSQWQNIDRKFKEFGKDARNIRFGLSTDGMNPFGEMSSGHSTWPVTMCIYNXPPWLCMKRKYIMIPIIIQGPKQPGNDIDVYLRPLVEDLTXLWKKEDVPVWDEDKQEEFNLRALLFVTINDWPALSNLSGQSNKGYKACTHCMDETESTYLKHCRKVVYMGHRRFLAANHPVRKKGKHFEHKADHRTKPKHRSGKTVFAMVKDLKVVFGKGPRSQPIESEDGHAAMWKKNSIFWELPYWEFLNVRHAIDVMHLTKNLCVNLLGFLGVYGKSKDTLEAHNDLKHMEQRGDLHPEPKEKGSHYLSPASYTLSKAEKESMFECLESIKVPSGYSTNIKRIISTKEKKFTNLKSHDCHVLMTQLLPVVIRGILPDNVRATITKICAFMNAISQKVIDPDRLEALQNEVVQCLVSFELIFPPSFFNIITHLLCHLVKEIRILGPMYLHNMFPFERYMGVLKKYVRNRARPEASIAKGYGTEEVIEFCVEFIEDLRPIGVPESRHEGRLRGKGTLGRKAIMTVDNNLFRKAHFTVLQHSSLVAPYIEEHLALVRARNIGKSDAWITRHHIDTFPAWLQQHLMGNETINQQLAFLARGPSGSIATFQGCEINGYTFYTRAQDMKSTNQNSAVRIDAMGHDGTTGTYYGAIEDIWELDYGPPKVPLFRCQWVRLTGGGVMIDDSGMTTVDLNKVGYSDEPFVLANDVTQVFYMKDMSSKGKKGRGPDEPKHHVVLPARPHLLHQHLEVFSXDRSPLASPSPPLPRASPRRXAVVSRRRLRRRRISGVRAATASPSLSLCFLYEQMVDRDEEQIMYDTIADGSNQYXNEEEGNEDPNQYLNEEGNVERDAEGNQEGNVERDVEWNQVEEASGSQPSAGQKRARGQRGAAKKLEGRHIITKVDKDGXPSAPAEAAKNYVRHSGWVVRDNVPVSLIQFRVQQAEA

SEQ ID NO: 195573 - protein, 114 aa, Oryza sativa
  Clone ID: PAT_MRT4530_91508C.1.pep
APPRAMGGSTRIHVVVITPGARLSLFPNDFFPPFMWFLPGWQPVQTWVFSRRWEPLWCPIPCFPICGDYGSPTPPWHSFLPGYRGYLLFLEYVPDHALGIPFPCILWTGLKSWF

SEQ ID NO: 195574 - protein, 141 aa, Oryza sativa
  Clone ID: PAT_MRT4530_91509C.1.pep
IAALASRHSSASPVITLATSAQKIPEKFVQQHLTETYTNNHQNAIIVCPLGKFWRVELQREQPDVLLRDGWAPFLAAHDLSEGNILLFRYEGNMVFTVEVFLQNGCLKEYKTAALYLTDGAAKVGVSPVKRKRTRRIEAYL

SEQ ID NO: 195575 - protein, 55 aa, Oryza sativa
  Clone ID: PAT_MRT4530_9150C.1.pep
IYRCSSHTMYTAFLRMVCCPECTLTPLKDSLLQHSMQPEHAASAAQSDSPSARRA

SEQ ID NO: 195576 - protein, 886 aa, Oryza sativa
  unsure (1)..(886): unsure at all Xaa locations
  Clone ID: PAT_MRT4530_91510C.1.pep
MPDGNQERHVERDVEGNQEEEDXARQPTAGQKRARGQRGAAKKLEGRHIITEVDEDGRPSAPAEAAKNYVRHSSWVVRDNVPVSTVYWRRTRARADHESFVPDSEKEMLWTTMLETFTLPAGTEDKVKRWTLKKMAEQFQSFKGELYKKYILKGQTPNFDTFPKLRDHWDEFVAYKIGEQGQSMMEKNKENAAKKKYHHHLGSCGYSVAMPKWEEMEARLLERGIEPATANWPERSKFWYYAHGGTLNPADGSLTPEHLGRTRGKGVIPWKIGFKEDIHTYRSRMRSKRDTEAKIEDLEFRVSSYELSMQEEVAKKVDERMAAHRSNDPQPTIPPAMVSPSGNHSSYASTGQVGPQSMDAMQTQDESTCPVDDITQRTPCELHIPFKNLSIKVASGMAILTDPSGTYHCRPIPAGYSKVEVELVEGAYVDLELDYPGGDASSPSQAPAPTPPQAPAPTPPQAPLPAPSKSRAPQAPPPAHRRATKKAKIDAAKNKDPGYDCTQEELDAYVASEVKRQFKPRSPEKKIPIDPSVMNFFRGMSAPVKEAIKLSDYERTLKKASSGKSKPVPQLGEQPNQEIEPLVTGKEMTIEEFITDTDLTTDQLLGVAPIEKEQVKYMYELGKPLVKPELLQSLPTQMYKFHQLYMEMSATGREMIGARISDTDFLQGDDILWINFKGIYELYQLDALDISIMSCWILMEIQRARRRGVFDTGFIDPRKVNVAMLDQYPQATEDNFVHLLKAQHYKTFILLPYNTEFHWVLLLFDLSACTVNEVTNRGEARKKVQLPLIQCPLCKENTVVVRTSRTPTNLGRIFYTCPDHEKDGSGCNFWYWEEGYMKYLKRNGFIDGEEATEVKKAAELKNASKFDGDVVLRQDDELKKALTDVW

SEQ ID NO: 195577 - protein, 462 aa, Oryza sativa
  Clone ID: PAT_MRT4530_91511C.1.pep
PIHTISEEPPLHSNHHAQAGSLLAAFTLTHTASSATCDIVAVARFSHSPPSMPLSAGSLRRRPKFAAPLLSPACLHRLSVPGEFAARLDDDDAAGVGEEEEEESGRRAAAVLVVGPLGKVWRVELRRSPAGDGEAWLGGGWSELAAAHGLGEGWGVVLRLERRGVASLRVFDPGFCLARFCTPHAGMRTKDRPRFIKLLQQEDLEKMKIPEKFVQQHLTETYTNNHQNAIIVCPLGKFWRVELQREQPDVLLRDGWAPFLAAHDLSEGNILLFRYEGNMVFTVEVFLQNGCLKEYKTAALYLTDGTEGPSNAPQQSAAKVGVSPVKRKRTRRIEGTCLEGPNRKSRASPISVKVEPHKKHVSIVSQNSFTKEMTAYSIHSLLSVRGTFCSQIGLLEACAITLKISMKKKGSWRVAFKTANTYGYINGPGWRKFCLENEVKEGDRLTFNAIETTVWHVVIVHC

SEQ ID NO: 195578 - protein, 851 aa, Oryza sativa
  unsure (1)..(851): unsure at all Xaa locations
  Clone ID: PAT_MRT4530_91512C.1.pep
MDRQWMYADRRSKEFIDSMHYFLRVAEANRQKGFICCPCNKCKNQKEYSASRTIHFHLFESGFMPSYNCWTSHGEQGVEMEENEVEDDNILDFAQYARFERNQTGEEERDADGNDVVDDLGQMLQDAKEDCESEKGAHNLDKMLEDHRTSLYPGCEQGHKKLDTTLEFLQWKAKNGVSEKAFGDLLKLIENILPEGNKLPETTYEAKKIVCPLGLEVXKIHACPNDCILYRGEEYENLEACPVCKALRYKIRRDDPGEVDGQLTKKRIPAKVMWYFPILPRLRRLFRNKGNARMMRWHAEERQQDGMLRHPADGSQWRNIDRKFKDIGKNARNIRFGLSTDGMNPFGEMSSGHSTWPVTMCIYNLPPRLCMKRKYIMIPIIIQGPKQPGNDIDVYRRPLVEDLKLLWKKKGVPVWDEDKQEEFNLQVLLFVTINDWPALSNLSGQSNKGYKACTHCMDETESTYLKHCRKVVYMGHRRFLAANHSVQKKGKHFEHKVDHCTKPKHRSGKTVFXMVKDLKVVFXKGPGSQPIESEDGHAAMWKKNSIFWELLYWEFLDVRHAIDVMYLTKNLCVNLFGFLGVYGKLKDTLEARNDLKHMEQRGDLHPEPKEKGSHYLSPASYTLSKAEKESMFECLXSIKVPSRYSTNIKRIISMKEKKFTNLKSHDCHVLMTQLLPIVKRGILPNNVRATITKLCAFMNAISQKVIDPNRLEALQNDVVQCLVSFELIFPPSFFNIMTHLLCHLVKEIGILDPVYQHNMFPFERYMGVLKKYVRNRARPEASIAKGYGTEEVIEFCVEFIEDLHPIGVPESCHEGRLRGKGTLGRKAIMTVDNNLFRKAHFTVLQQSSFLS

SEQ ID NO: 195579 - protein, 2115 aa, Oryza sativa
  unsure (1)..(2115): unsure at all Xaa locations
  Clone ID: PAT_MRT4530_91513C.1.pep
MDRQWMYADRRSKEFIDGVHYFLRVAEANRQKGFICCPCNKCKNQKEYSASRTIHFHLXESGFMPSYNCWTSHGEQGVEMEEDEVEDANIPDFAQYARFEGNQTGEEERDADGNDVADDFGQMLQDARXDCESEKGAHKLEKMLEDHKTSLYPGCEQGHKKLDITLEFLQWKAKNGVSDKAFGDLLKLVKNILPEGNKLPETTYEAKKIVCPLGLEVQKIHACPNDCILYRGEEYENLEACPVCKALRYKIRQDDPGEVDGQLTKKRIPAKVMWYFPIIPRLRRLFRNKKNARMMRWHAEERQQDGMLRHPADGSQWRNIDRKFKDFEKDAQNIRFGLSTDDMNPFGEMSSGHSTWPVTMCIYNLPPWLCMKRKYIMMPIIIQGPKQPGNDIDVYLRPLVEDLKLLWKKEGVPVWDEDKQEEFNLRALLFVTINDWLALSKLSGQSNKGYKACTHCMDETESTYLKHCRKVVYMGHRRFLAANDPVRKKGKHFKHKADHRTKPKHHSGKTVFAMVKDLKVVFGKGPGSQPIESEDGQAAIWKKNSIFWKLPYWEFLDVRHAIDVMHLTKNLCINLLGFLGVYGKSKDTLEARNDLKHMEQRGDLHPEPKEKGSHYLSPASYTLSKAEKENMFECLESIKVPFGYSTNIKRIISTKEKKFTNLKSHDCHVLMTQLLPVVIRGILPDNVRATITKLYAFMNAISQKVIDPYRLEALQNDVVQCLISFELIFPPSFFNIMTHLLCHLVKEIGILGHVYLHNMFPFERYMGVLKKYVRNRARPEASIAKGYGTEEVIEFCVEFIEDLRPIGVPESRHEGRLRGKGTLGRKAIMTVDNNLFRKAHFTVLQQSSLVAPYIEEHLALVRARNIGKSDAWITRHHIDTFSMWLQQHLMGNKTINQQLAFLARGPFGSIATFQGYEINGYTFYTRAQDMKSTNQNSAVRIDAMGHDGTTGTYYGAIEDIWELDYGPLKVPLFRCQWVRLTGGGVTIDDSGMTIVDLNKVGYSDEPFVLANDVTQVFYVKDMSSNGKKGKGPDEPKRHVVLPVRPRLLHQHLDVFSRPLPCSVAPSPPPPSKPPPPAISGAXRRRLHLTVVLAASAADAAATSLGCFLYAQMADRDEEQVLYDTIAEGSSQCWNEEEGNEDPNQYLNEEGNVERDAEGNDEGNNEEEASGSHPSAGQKRARGQRGAAKKIEGRHIITEVDENGRPSAPAEAAKNFVRHSGWVVRDNVPVSTVYWRRTRARRDNDSFVPDSEKEMLWTTMLETFTLPAGTKNIVKRWTLKKMAEQFQSFKGDLYKKYILKGLTPNFDVFPKLRDQWDEFVAYKTGQQGQAMMARNKENAAKKMYHHHLGSGGYSVAMPKWEEMEASLIERGIEPATAKWPDRSKFWYYAHGGTLNPVDGSLVFSDQIREAASRLTDAVVASSQGTFRPDREKDELSLALQTPEHPGRTRGKGVIPWKIGFKEDIHTYRSRMRSKRDTEAKIADLEYRVSSYELSMQEEVARNVDERMATHRSQDPQPYIHPAMVSPSSNRSSCASTGQVGSQSMDAMQTQDETTCPIDEITQRTPCELHILFKNLSIKVASGMAIPTVPSGTYHCRPIPAGYSRVEVELVEAAYEDLELDYPGGDGETHLRDTSHAIILWRKRYIILPGRQAASRAPSPPALPSPPAPSPPVPPPRPPAPSPPAPPPPPPPPCPPAPPKTRSRQAPSPARTRATKKAKVDATKNKEPPYDCSQEELDAYVAGEVKRQLKPRSLEKKIPIDPSVKNFFKGMSATNKEALQISDYDRTLQRAYHKKSKPVPQLGEQPNQEVEPLVTGEDFGITEFISDTGLTVDQLVGGAPIPKAEVAYKFELGXPLVKPEQLQSLPTQMYKFHERYMEMSAKGREMFGARIRNPDFLQGEDVLWIHFKDLFELYQLDALDVSLLSAWILLEIQRARWRRVYDTGFIDPRKINTEMIDKYEKDTEDNLVHLLTQQHFKTYILLPYNTEFHWVLLFFDLDACRVTVYDSMNKEKIFDKVFKLIDRAWDRFRQLVRGNWKEKLGRRFHFPRIHMRDNLPHKDFITVVQDQLMGFINEKILNPDGEFYYDGSTIHNLWPSGSPLAFSSKPPRPLKYINFQS

SEQ ID NO: 195580 - protein, 189 aa, Oryza sativa
  unsure (1)..(189): unsure at all Xaa locations
  Clone ID: PAT_MRT4530_91514C.1.pep
IPLPPPLSPPQRPLPPHPPSPPPXPPTRPPPRPPTQTPLMTLTPPLLPHPHPPPPTPLLPPHHPSPFTPSAYAPPSLPPPSPYPPAPLLPPPXPPPPPRPCPPPAPPPRDRSLPPPEXTPPPTRPNPGPAPPAPTPPQHSLPRTAPQLLRPPGPHPGRPPLAAGQFPYGPLKQPPVALPKLCCVCHKGM

SEQ ID NO: 195581 - protein, 1004 aa, Oryza sativa
  unsure (1)..(1004): unsure at all Xaa locations
  Clone ID: PAT_MRT4530_91515C.1.pep
MADRDEEQILYDTIAEGSSQYWNEGEGNEDPNQYLNEEGNVERDAEGNEEGNDEEETSGSHPSARQKRARGQQGAAKKTEGRHIITEVDEDGRPSAPAEAAKNFVRHSGWVVRDNVPVSTVYWRRTRARGDNDSFGPATQSKXSMLWTTMXLETFTLPAGTENIVKQWTMKKMAEQFQSFKGDLYKKYILKGLTLNFDVFPKLRDHWDEFAAYKTGQQGQAMMARNKDNAAKKKYHHHLGSGGYSVAMPKWEEMEASLIERGIEPATAKWPDRSKFWYYAHGGTLNPVDGSLVFSDQIREAASRLTDAVVASSQGTFXPDREKDELSLALQTPEHPGXTRGKGVIPWKIGFKEDIHTYRSRMRSKRDTEAKIADLEYRVSSYELSMQEEVSRKVDERMAAHRSQDPQPXIHPAMVSPSGNRSSCASTGQVGSQSMDAMQTHDETTYPVDEIMQRTPCELHISFKNLSIKVASGMAIPTDPSGTYHCRPIPAGYSRVEVELVEAAYEDLELDYPGGDGETYLRDTSHAIILWRKRYIILPGRQAASRAPSPLAPPSPPAPSPPIPPPRPPAPSPPAPLAPPPPPPPPCLPAPPKTRSRQAPPPARTRATKKAKVDATKNKEPPYDCSQEELDAYVAGEVKRQLKPRSPEKKIPIDPSVKNFFKGMSTTNKEALQISDYDRTLQRAYHKKSKPVPQLGEQPNQEVEPLVTGEDFGITEFIADTGLTVDQLVRGAPIPKAEVTYKFELGKPLVKPKKLQSLPTQMYKFHERCMEMSAKCREMFGARIRNPDILQGEDVLWIHFKDLFDLYQLDALDVSLLSAWILMEIQRARQRRVYDTRFIDPRKINIEMIDKYEKDTEDNLVHLLTQQHFKTYILLPYNTEFHWVLLFFDLDACRVTVYDSMNKEEKIFDKVFKLIDRAWDRFRQLVRGTWKEKLGRRFHFPRIHMSDNLPHKDFITAFQEXLMGFINEGVFNPDGEFYYDGSTIHNVGPPTITYDHSYLLPSHL

SEQ ID NO: 195582 - protein, 187 aa, Oryza sativa
  unsure (1)..(187): unsure at all Xaa locations
  Clone ID: PAT_MRT4530_91516C.1.pep
GCGPSAVPIDDVDGMLSEREIPGEHDPLCKTKNELLVNWDALRPTDKDRGSVLAAPNRPFDLDEAAARRLPRRLKVNLPDASYRKKXLSVLLAKEHLAHDGHLEAVPSLPEGYSGRDRKELCITAAHDPITDLLETAMKDNALPDCQDRPLAQCLSSSDVRALRLCEFIRAHHQVXATVSSDSSNMD

SEQ ID NO: 195583 - protein, 426 aa, Oryza sativa
  unsure (1)..(426): unsure at all Xaa locations
  Clone ID: PAT_MRT4530_91517C.1.pep
ILWTGAHGVERRFLAAVVVPALSSSRLVRRRWAEGVGRATVRQGAGGDDDREVELPEDVLAEILRRLPPRSLAASRCVCTDWRSAIDSRRLLXLPLSLAGIFIHFNALTFPEFFSRPSSSPTTVRGMLDFLPPEEQSPDIGDHCNGLLLLFSLLVVNPATRRWARLPPLPRTFAKLESGFFDKEFIVFDTTLSPHYEVFNIQFVDVGWYNVKTMDPVLKKSEWPPSPLVLHVFSSATGRWEERSFSREGDAAGTVASAQRLCRPEQCGEWELYNGNYDPSHFHSPNDDAPAENNFEWYSDDDNIVENQEVEDDSQLYELELQLYLWLVVHKGDHHGLTITLLLAAAFFFLILLSSSLGQNQRETAQVRPQEASSCSRWHKCRGGADSGLPRRSGTAVRAHRTVYCVECASAAVPARRSLPPQPARP

SEQ ID NO: 195584 - protein, 332 aa, Oryza sativa
  unsure (1)..(332): unsure at all Xaa locations
  Clone ID: PAT_MRT4530_91518C.1.pep
VSTLLGGPDSDTATCPGDSAHSTDLYTFSAAGFQFRDFDPGRLRDRGDRHXPEIKPDITDSSEDETPVPHITFLGGPRTLSTAHKSTRPPGKKPKPDPEATTSEPWGLRWFLIVCETHPPLPRLTSSLMMASQRRASTSNEETQTPDLTTLAGVMATQTQLLQAIVNNQGNRGGSSFGEFMRTKPPTFATAEERMDAEDWLRIIEKKLTLVRVREADKVIFAANQLEGPAGDWWDTYKEAREEDAGEPNWEEFTTAFRDNFVPAAVMRIKKNEFRRIRQGNTTIQEYLNRLTQLACYATGDLADEEEKIDKFIEGLNDELRGPMIGQDHDSF

SEQ ID NO: 195585 - protein, 202 aa, Oryza sativa
  Clone ID: PAT_MRT4530_91519C.1.pep
RRQSRDDDRRKKSPLDAVRARPKLPPSTISLLPRVNRANSCRTVRLKIDGGISSHNSNHSPLSQPFSPSPPPRVAPGLAPSRRQLIPTAVKSILHRIVSPNRSSASSFTSPHQPEHRRPRAALFFTAAKFFWPQSVVSTDLVANPSTYQISSSAADRRRRRYLAPSPLRPQPLSPSIAAVIPNPSTAGCIWGNGLYLDRDST

SEQ ID NO: 195586 - protein, 92 aa, Oryza sativa
  Clone ID: PAT_MRT4530_9151C.1.pep
PPPVGNPKAKFSPMHWRLGKGKKNRKKKTEPPQKPDVQKGKKKSRAQRPKGALPCKGFAGGKKKGPPLSHPPQFGFAGGFPKGGNVWVGPPR

SEQ ID NO: 195587 - protein, 88 aa, Oryza sativa
  unsure (1)..(88): unsure at all Xaa locations
  Clone ID: PAT_MRT4530_91520C.1.pep
TPGCRSGVGQGKILNSGVSGGGGHGGRGGDGFLHERHAEGGPMHRPADLPRYLGSVSGHVTTTFSSARGGIIXMGPWYSSLPSPFPSR

SEQ ID NO: 195588 - protein, 123 aa, Oryza sativa
  unsure (1)..(123): unsure at all Xaa locations
  Clone ID: PAT_MRT4530_91521C.1.pep
KLVPLQDSRAGSILPATTRVLSDPYIPPIREGRYVQTGLFAKEPHLAWTSPAPRWQAPRQPPRSTRQTPSDDAGGSSHPPYFQMIKDAITVLNERTGXSSAHSITKYMXDKHGXALAANYKKM

SEQ ID NO: 195589 - protein, 152 aa, Oryza sativa
  Clone ID: PAT_MRT4530_91522C.1.pep
MSYFQDKISQKGGSSGNTSNRVDILRGSVMEKKCLGMAEKPLHSKDLQEALRVVSSNKDLFLKFLEEPNSIFSRQLVGSHTNLAPPQKKRITVLKPLGSFESDGTRQTGTEQIQEQNGAAMREFHQSSNFKEENPSLPSRIVLLRPTPGKPS

SEQ ID NO: 195590 - protein, 69 aa, Oryza sativa
  Clone ID: PAT_MRT4530_91523C.1.pep
TPWCKASTTMHYEIIEQNNRAPNMMHIYRTLSCRRTITLHHREYHITRHIRLLARNTKHYSDCFFVPLD

SEQ ID NO: 195591 - protein, 299 aa, Oryza sativa
  Clone ID: PAT_MRT4530_91524C.1.pep
MSGDGVYTPPGRRSSSSGNGTDGSGTDGRNDSRELVVQQVKEAGVTLRYPVLTSSNYIEWSLLMKVNMQAQGVWDAVELGNTEHRIDRMALAAILQAVPSEMLATLASKDTAKEAWEAVRTMRMGVERVREAKAQSLRKEFELIRMKEGESVDDFAMRLTGLVNNIHTLGAMMEEEMVVKKFLRVVPSKYTQVAISIEQLIDLKTLSVEELTGRLKSVEERYEIDGNGSEAYGRLLLTEEQWMERMKSKKKKDTFDKAKVRCYKCQGYGHYSWEEKCAGLKEKQALLAVASADNEPTLL

SEQ ID NO: 195592 - protein, 124 aa, Oryza sativa
  Clone ID: PAT_MRT4530_91525C.1.pep
VAEENSFLKPSMVTERSALQESFTTNKRRSFQETPVLRSMKATTSTWEKETLTIDGISKQATRMAPGTGPQQVHNFNSLSDDFQIPIRNLGGEGTGKSVGKWCKGVATPGSLNTNANKRNLIAV

SEQ ID NO: 195593 - protein, 172 aa, Oryza sativa
  Clone ID: PAT_MRT4530_91526C.1.pep
MVLAQLGGSISRALAQMSNATVIDDKAFADCLHEIARALLQSDVQIRMVSDMRANIRRAVNLDALPAGTNKRRIIQQAVFAELCNMLDPGKPSFTPTKGKPSVVMFVGLQGSGKTTTCTKYAHYHQLKGFKPSLVCADTFRAGAFDQLKQNATKAKIPYYGRLVLYIHTFTY

SEQ ID NO: 195594 - protein, 403 aa, Oryza sativa
  Clone ID: PAT_MRT4530_91527C.1.pep
MADPSRSSPTAAAAGDALLAAAAAPGDAPDATALAVAADADAEFGFQRAELGTEKLAGTVQFHERHVFLCYKGPEVWPSHVEAAESDRLPRLLAAAIKTHKSDLKKKTKLTICEGEDGTESSNGDVLIFPDMIRYRGLTHFDVDNFVQEVLVKDTEWLPGSPEAIKGSYVFVCCHASRDKRCGVCGPALIKRFKEEIGVQGLADQVSVSACSHVGGHKYAGNVIVFSADAKGEVTGHWYGYVSPDDVPVLLHKHIGQGEIVDHLWRGQMGLSEEEQRKALESKHVTNGVTEDGAHESPEETTNGSACNPVAAGGCCQGNGGFTCCQSDLPKEDKSITAEQNQKSSEKGADKECAAGSKKRHMKMCSMPTWFETWETADTYAALGIVAAAASVFVAFRIYKNLN

SEQ ID NO: 195595 - protein, 71 aa, Oryza sativa
  Clone ID: PAT_MRT4530_91528C.1.pep
MATGRGGAGLDRNGPAPDPRLYPPPPAPQSETQRKCNGRRPAAETEAQQPAWAEAQPRRELTRRSSLQRLR

SEQ ID NO: 195596 - protein, 96 aa, Oryza sativa
  Clone ID: PAT_MRT4530_91529C.1.pep
MATGRGGAGLDRNGPGPDPRLYPPPPAPVPSSEAGDARRRQRRSSRRHAAELQQSETQRKCNGRRPAAETEAQQPAWAEAQPRRELTRRSSLQRLR

SEQ ID NO: 195597 - protein, 123 aa, Oryza sativa
  unsure (1)..(123): unsure at all Xaa locations
  Clone ID: PAT_MRT4530_9152C.1.pep
AGATTTSSHENPKXNHNNNIINTXNNTNNTYTINNIGRSNQGDVGGGRHIPSAGSXPAGAADVVVAAGSKGEAAAAAAQSKGEAWGGWGGGRGPLDPTTGNAVASTSGSARQIAVATRAVAGE

SEQ ID NO: 195598 - protein, 94 aa, Oryza sativa
  Clone ID: PAT_MRT4530_91531C.1.pep
IHTATHTNPWHCYMPTRLQHLLILLLAATLHADERAGFTIKNISLHSTIRHNLYTSRTIKKLYRIEGCDHTDQHLISFHLICLMRPRTSLQSPA

SEQ ID NO: 195599 - protein, 681 aa, Oryza sativa
  Clone ID: PAT_MRT4530_91532C.1.pep
MPHQHTERFRARLDLYDTRDKKKYELPPRTIAVGRITPLNHKTGHSSPSTMQTRRITPLDPIHGGFGLRGVRVAVHGEDGGSEAASRTAACTHAAGGRRRWRGRRQGRDAHGGEDGGTHNAAARTHADGGRRWRRGRRHGRDVHGGTHGAAARTHGAAARTHADRPRRQRRSALRISSLYSKARAVVVTDGFRWRCQSSGRVMELLRRRYRSDGGEGEGEGRKAWPGGRRSTRGVLPSSLPPPVPGHVRACRYPRRRLRPPVLAAVRNADWTTTRMPRRPKPPQIGSRGVIRPGCVVRGEECPVLWFRGFLQGMYNGRHRVSSLTEDTHMDTRLSIKATTRWVPQNPKKLDEDTLAHTSPRRRCRPRFRHRRRSEAAYLAPSCADLAPSRLDRMERRRPRRIEEEVAAPAEEVTQVVVGIVSRLSPLSLSLAATAAGLSLSLSLPSPASVRAMSERGKGWKVSLARAREIELHGRKVGQQASFQALFPSFHDQTLALAPRRRQGGTMRRRERQGKKEGEVKHDRNYEPDTHWCKSVSKTNRSSPDTLLQKQTNKQTSHQSRTETNPKRINAERDQQRHAATASDRYVVRRCRSGTFPLPLVRNHAMAPAQSAAHTHSLLQGCKGMQTQSRLRRVDRPSNLRTMRDAALHHSLVALVLSLPTRLHREISVTRLVRHFAISKE

SEQ ID NO: 195600 - protein, 108 aa, Oryza sativa
  Clone ID: PAT_MRT4530_91533C.1.pep
TGHPTLSPSHSCGYIYISCAQRATAGSHSLTRSRHHRVWHTHPSFQTHIISPVAHTQCSPASSQQSSNTTWGSLVGALRGASVSLHIPRDILAPLSIQTSVPIAHTVR

SEQ ID NO: 195601 - protein, 485 aa, Oryza sativa
  Clone ID: PAT_MRT4530_91534C.1.pep
MSLLTAMFLSLAITTTTTTVLLLLTPAAATALQVMMTQLRRPSGSGGCFPGEMDALLEFKEGIADDTTGLLASWRPEDGQDCCRWTGVRCSDRTGHIVKLNLGSRESINPFAMRLFGEISHSLLSLHHLQHLDLSHNSLEGPTGDMPEFLGSLKSLRYLNLSGIPFHGLVPPHLGNLSNLRVLDLSYTANSYSPDISWVTRLRRLRYLNMGDVNLSMADYRTSASRFARTYTRRNVYSVLRRRQRAGTPSRNVPEVWGATSRSSPKHAAELIGKFDKEKSDLVRSIGFGGLLELPQINGIDRRFTRWLLSRVNCDSRTLRVGNNLDVELSPRNVHRVLGIPFEGMEVCPMPDNSKDEKDSFVQHYIGAPGFEASALKGAEEVIRRTFPDGMNSWFRTAFVVWIVGTFLAPKTSHKALLRKSKYVRRQQWSLWASSSEKLFQRRTSLLFKKAWRVAFFDLCDKLYDKTYVLVAVSWARFTRKAAAN

SEQ ID NO: 195602 - protein, 1803 aa, Oryza sativa
  unsure (1)..(1803): unsure at all Xaa locations
  Clone ID: PAT_MRT4530_91535C.1.pep
MDRQWMYVDRRSKEFIDGVHYFLRVAEASRQRGFICCPCNKCKNQKEYSASRTIHFHLFESGFMPSYNCWTSHGXQGVEMEEDEVEDDNIPDFAQYVGFEGNQTGEEEIAADGNDVADDLGQMLQDAKEDCESEKGAHKLDKMLEDHRTSLYPGCEQGHKKLDTTLEFLQWKAKNGVSDKAFGDLLKLVKNILPEGNKLPETTYEAKKIVCPLGLEVXKIHACPNDCILYRGEEYENLEACPVCKALRHKIRRDDPREVDGQLTKKRIPAKVMWYFPIIPWLRRLFRNKGNARMMXWHAEERQXDGMLRHPADGSXWRNIDRKFKEFGKDARNIRFGLSTDGMNPFGEMSSGHSTWPVTMCIYNLPPWLCMKRKYIMMPIIIQGPKQPGNDIDVYLRPLVEDLKLLWKKEGVPVXDEDKQEEFNLRALLFVTINDWLVLSNLSGQSNKGYKACTHCMDEIESVYGKLKDTLEARNDLKHMEQRGDLHPEPKEKGSHYLSPASYTLSKAEKESMFECLESIKVPSGYSTNIKRIISTKEKKFTNLKSHDCHVLMTQLLPVVIRGILPDNVRATITKLCVFMNAISQKVIDPDRLEALQNEVRYMGVLKKYVRNRTRPKASIAKGCGTEEVIEFCVEFIEDLRPIGVPESRHEGRLRGKGTLGRKAIMTVDNNLFRKAHFTVLQHSSLVAPFIEEHLALVRARNIDKFDAWITRHHIDTFPAWLRQHLMGNESINQQLAFLARGPSGSIATFQGYEINGYTFYMRAXDMKSTNQNSAVRVDAMGHDGTTATYYGAIEDIWEFDYGPLKVPLFRCQWVRLTGGGVMIDDSGMTTVDLNKVGYSDEPFVLANDVTQVFFMKDMSSKGKKGRGPDEPKRHVVLPGKRKIVGVEDKTDEDYDQLDGQPPFTVTIDPSIPLSNEDTPYSRSDHKEGTIYLNEEGNVERDAEGNQQGHVERDVEGNQEEEASGSQPSVGQKRARGQXGAAKKLEGRHIITEVEEDGRPSALAEAAKNYVRHSGWVVRDNVPVSMVYWQRTRACEDHESFVPDSEKEMLWTTMLETFTLPTGTEDKVKRWTLKKMTEQFQSFKGDLYQKYILKGQTSNFDTFPKLRDHXDEFVAYKTGEQGQAMMERNKENAAKKKYHHHLGSGGYSVAVPKWEEMEASLLEKGIKPATANWPERSKFWYYAHGGTLNPADSSLVFGDQIREAARRLTDAVEASSQGTFRPDRERDELSRMRSXRDTEAKIADLEFRVSSYELSMQEEVARKVDERMAAHRSHDPQPTIPTAMVSPSGNRSSCTSTGQVASGMAIPTDPSGTYHCRPIPAGYSKVEVELVEGAYEDLELDYPGGDGETHLRDTSHAIILWHRRYIILPGRQAASRAPSPPAPPPQAPAPTPPRAPTPTPPQAPLPAPSKSRASQAPPPAHTRATKKAKVDAAKNKDPGYDCTQEELDAYVASEVKRQFKPRCLEKKIPIDPSVRNFFRGMSAPAKEAIKLSDYERTLKKASFGKSKPVPQLGEQPNXEIEPLVTGEEMTIEEFITDTGLTTDQLLGVAPIEKAEVKYMYELGKPLVKPELVQSLPTQIYKFHQLYMEMSATGREMIGARIRDTDFLQGDDIQWINFKGIYEQYQLDALDVSIMSCWILMEIQRARRRGVFDTGFIDPRKVNVAMLDQYPQATEDNLVHLLKAQHYKTFILLPYILTVNVYDSMDKKESTFDKVFELIDRAWYRFRHLVRDNWRERLRRKFKFPFIRMRDNLTTHKEFIPAVQEQLMGFINEQILDPKGEFXYDGNTIHRSLASELATTTSKS

SEQ ID NO: 195603 - protein, 68 aa, Oryza sativa
  unsure (1)..(68): unsure at all Xaa locations
  Clone ID: PAT_MRT4530_91536C.1.pep
MAYDSDNPFLNHPKDFLSSNNSVKAKKQGHPANSFCNRIDLDFHTPRKXIERRYIDNKCRFSETASIK

SEQ ID NO: 195604 - protein, 2101 aa, Oryza sativa
  unsure (1)..(2101): unsure at all Xaa locations
  Clone ID: PAT_MRT4530_91537C.1.pep
MDRQWMYADRRYKEFIDGVHYFLRVAGANRQKGFICCPCNXCKNQKEYSASRTIHFHLFESGFIPSYNCWTSHGEQGVEMEEDEVEDDNIPDFAQYAGFEENQTSEXERDADGNNVADDVGQMLQDAKEDCESEKEAHKLDKMLEDHRTSLYPGCEQGHKKLDTTLEFLQWKAKNGVSDKAFGDLLKLVKNNLPEGNKLPKTTYEDKKIVCPLGLEVQKIHACPNDCILYRSEEYENLEACPICKALRYKIRRDDPGEVDGQLTKKRIPAKVMWYFPIIPRLRRLFRNKGNARMMRWHTEERQQDGMLRHPADGSQWRNIDRKFKDFGKDARNIRFVLSTDGMNPFGEMSSGHSTWPVTMCIYNLPLWLCMKRKYIMMSIIIQGPKQPGNDIDVYLRPLVEDLKLLWKKEGVPVWDEDKQEEFNLRALLFVTINDCPALSNLSGQSNKGYKACTHCMDETESTYLKHCRKVVYMGHRRFLAANHPVRKKGKHFEHNADHCTKPKHRSGKTLFAMVKDLKVVFGKGPGSQLILSEDGHVAMWKKNSIFWELPYWEFLDVHHAIDVMHLTKNLCVNLLGFLGIYGKSKDTLEARNDLKHMEQRGDLHPEPKEKGSHYLSPASYTLSKAEKESMFECLESIKVPSGYSTNIKRIISTKEKKFTNLKSHDCHVLMTXLLLVVIRGILPDNVRATITKLCAFMNTISQKVIDPDRLEALQNDVVQCLVSFELIFPPSFFNIMTHLLCHLVKEIGILGPVYLHNMFPFERYMGVLKKYVRNRARPEASIAKGYGTEEVIEFCVEFIEDLRPIGVPESRHEGRLRGKGTLGRKAIMTVDNNLFRKAHFTVLQQSSLVAPYIEEHXALVRARNIGKSDAWITRHHIDTFSTWLRQHLMGNETINQQLAFLVRGPSGSIATFQGYEINGYTFYTRAQDMKSTNQNSAVRIDAMGHDGTTGTYYGAIEDIWKLDYGPLKVPLFRCQWVRLTDGGITIDDNGMTTVDFNKVGYSDEPFVLANDVTQLFYVKDMSSKGKKGKGPDEPKRHVVLPVRPHLLHQHLDVFXISASPSPPPCLGQPRADTAVVSRRRLTVLDASAVDAAAASLGCFLYAQMADRDEEQILYDTIAEGSSXYWNEEEGNEDQNQYLNEEGNVERDAEGNDEEEASGSHPSAGQKRARGQRGAAKKIEGRHIITEVDEDGRPSAPAEAAKNFVRHSGWVVRDNVPVSTVYWRRTRARGDNDSFVPDSEKEMLWTTMLETFTLPAGTENIVKQWTLKKMAEXFQSFKRDLYKKYILKGLTPNFDVFPKLRDHWDEFVAYKIGQQGQAMMARNKDNATKKKYHHHLGSGGYSVAMHKWEEMEASLIERGIEPATAKWPDRSKFWYYAHGGXLNPVDGSLVFSDQIREAASRLTDAVVASSQGTFLPDREKDELSLALQTPEHPGRTRGKGVIPWKIGFKEDIHTYRSRMRSKRDTEVKIADLEYRVSSYELSMQEEVARKVDERMAAHRSQDPQPYIHPAMVSPSGNRSSCASMGQVGSQSMDAMQTQDETTCPVDEILQRTSCELHIPFKNLSIKVASRMTIPTDPSETYHYRPIPAGYSRVEVELVEAAYEDLELDYPGGDGETHLRDTSHAIILWRKRYIILPGQQAASRAPSPPAPPSPPAPSPPVPPARPPAPSPPAPPPPPAAPSPPAPPPPPCPPAPPKTRSRQAPSPARTRETKKAKVDATKNKEPPYDCSQEELDAYVAGEVKRQLKPRSPEKKIPIDPSVKNFFKGMSTTNKEALQISDYDRTLQRAYHKKSKLVPQLGEQPNQEVEPLVTGEDFGITEFISDTGLTVDQLVGGAPIPKAEVAYKFELSKPLVKPEXVXSLPTHMYKFHEWYMEMSGKGREMFGARIRNPDFLQGEDVLWIHFKDLFDLYQLDSLDVSLLSAWILMEIQRVRRRRVYDTGFIDPRKINTEMIDKYEKDTEDNLVHLLTQQHFKTYILLPYNTEFHWVLLFFDLDACRVTVYDSMNKEEKIFDKVFKLIDRAWDRFRQLVRRTWKEKLGRRFHFPRIHMRDNLPHKDFITAVQEQLMGFINEKVLNPDGEFYYDGSTIHNVSPSSSDITPAS

SEQ ID NO: 195605 - protein, 103 aa, Oryza sativa
  Clone ID: PAT_MRT4530_91538C.1.pep
SNGTDTRTWAPSRMHICLHMDQYSQCPRIYVRIHTLNHTADMTNKHSETRRAGCRTGPRGTARPRQGASGFNPAADAPRQMYFQDDDRTEPNLSRILMPTCTA

SEQ ID NO: 195606 - protein, 1034 aa, Oryza sativa
  unsure (1)..(1034): unsure at all Xaa locations
  Clone ID: PAT_MRT4530_91539C.1.pep
LSRCFLYQQMADRDEEQILYDTIAEGSSQYWNEEEGNEDPNQYLNEEGNVERDAEGNQQGHVERDVEGNQEEEASGSQPSVGQNRARGQRGAAKKLEGQHIITEVEEDGRPSAPAEAAKNYVRHSGWVVRDNVPVSTVYWXRTRARGDHESFVPDSEKEMLWTTMLETFTLPAGTEDKVKRWTLKKMAEQFQSFKGDLYRKYILKGQTPNFDTFPKLRDHWDEFVAYKTGEQGQAMMERNKENAAKKKYHHHLGSGGYSVAMPKWEQMEASLIERGIEPATANWPERSKFWYYAHGGTLNPADGSLVFGDQIREAARRLTDAVEASSQGTFRPDRDRDELTLALQTPEHPGRTRGKGVIPWKIGFKEDIHTYRSRMRSKRDTEAKIADLEFRVSSYELNMQEEVARKVDERMAAHRSHDPQPTIPPAMVSPSGNRSSCASTGQVGSQSMDAMQTQDESTCPVDDITQRTPCELHIPFKNLSIKVASGMAIPTDPSGTYHCRPIPAGYSKVEVELVEGAYEDLELDYPGGDGETHLRDTCHAIILWRRRYIILPGRQAASRAPSPPAPPSPPQDPAPSPPHAPPAPSPPQAPASTPPQDPAPTPPRAPTPTPLQAPLPAPSKSRAPPAPPPAHTRATKKAKVDAAKNKDPGYDCTQEELDAYVASEVKRQFKPRSLEKKIPIDPSVRNFFRGMFASVKEAIKLSDYERTLKKASSGKSKPVPQLGEQPNQEIEPLVTGEEMTIEQFITDTGLTTDQLLGVAPIEKAEVKYMYELGKPLVKPELLQSLPTQMYKFHQLYMEMSTTSREMIGARIRDTDFLQGDDILWINFRGIYELYQLDALDVSSMSCWILMEIQRARWRRVFDTGFIDPRKVNVAMLDQYPQETEDNLVHLLKAQHYKTFILLPYNTEFHWVLLLFDLDACTVNVYDSMDKKESTFDKVFELIDRAWYRFRHLVRGKWRERLRRKFKFPFIRMRDNLTTHKEFIAAVQEQLMGFINEEILDPKGEFYYDGNTIHRSLASELAASTNIHFSILGF

SEQ ID NO: 195607 - protein, 125 aa, Oryza sativa
  Clone ID: PAT_MRT4530_9153C.1.pep
EDVKKEQAAEEATRADRIDGNSGGVYRLAKLKYPTFSGTVPRLRITKSTRYIEYYGMPMKMGESRATMHMEGMAELWMTTYEKRHERDRGRNWEAVEERFGPYDHKQKLTGLLELRQEGIMTVSR

SEQ ID NO: 195608 - protein, 206 aa, Oryza sativa
  unsure (1)..(206): unsure at all Xaa locations
  Clone ID: PAT_MRT4530_91540C.1.pep
MRARPKPPLSPILILPGVNRANSCRTVGLKIDGGIPSHNSNHSPLNRPFSPSPPPRVAPGLVPTHRXPNSHAVKPNLRRILSPNXSSASSFISPRQAEHRRPRAALFFAAKKFFRPQSFISATLATNPSTHQINPSAAACRRXRTVTPSPLRPQPLSPSIAAFGERPKVEEEKREREXTGLEDSSDSIDNINQSQDIEQGKLPYTF

SEQ ID NO: 195609 - protein, 194 aa, Oryza sativa
  unsure (1)..(194): unsure at all Xaa locations
  Clone ID: PAT_MRT4530_91541C.1.pep
NNYLEGNPPFGMSSKSRIFQFRNCLMKVKDHFFKYGSFSMWQXTKIIFWKNTWLGXALKDQHSSLYNVVRKKEFTVAXGYEQNPVDHISFKRAIVDQKLIEWNNLNLRLANITLSNEKMITLYGQFVKXQFSVNYRYIVIMNSNIRIRKRILXNLKVPLKCQCFMWFHNNVILMKDNMAKREGGETKKCVDVIA

SEQ ID NO: 195610 - protein, 1248 aa, Oryza sativa
  unsure (1)..(1248): unsure at all Xaa locations
  Clone ID: PAT_MRT4530_91542C.1.pep
MDRQWMYADRWSKEFIDGVHYFLRVAEANRHKGFICCPCNKCKNQKEYSASRTIHFHLFESGFMLSYNCWTSHGEXGVEMEEDEVEDDNIPDFGQYAGFEGNQTGEEERDADGNDVADDLGQMLQDAKEDCESEKGAHKLDKMLEDHRTSLYPGCEQGHKKLDTTLEFLQWKAKNGVSDKAFGDLLKLIKSILPEGNKLPETMYEAKKIVYPLGLEVQKIHACLDDCILYRSEEYENLEACPVCKALRYKIRRDDPGEVDGQLTKKRIPAKVMWYFPIIPRLRHLFRNKGNARMMRWHAEERQQDGMLRHPADGSQWQNIDRKFKDFGKDARNIRFGLSTDGMNPFGEMSSGHSTWPVTMCIYNXPPWLCMKRKYIMMPIIIQGPKQPGNDIDVYLRSLVEDLKLLWKKEGVPVWDEDKQEEFNLRALLFVTINDWPALSNLSGQSNKGYKACTHCMDETESTYLKHCRKVVYMCHRRFLAANHPVRKKGKHFEHKADHRTKPKHRSGKTVFAMVKDLKVVFGKGPRSQPIESEDGHAAMWKKNSIFWELPYWEFLNVRHAIDVMHLTKNLCVNLLGFLGVYGKSKDTLEAHNDLKHMEQRGDLHPEPKEKGSHYLSPASYTLSKAEKESMFECLESIKVPSGYSTNIKRIISTKEKKFTNLKSHDCHVLMTQLLPVVIRGILLDNVRETITKLCAFMNAISQKVIDPDILEALQNDVVXCLVSFELIFPPSFFNIMTHLLCHLVKEISILGPVYLHNMFPFERYMGVLKKYVRNRARLEASIAKGYGTEEVIEFCVEFIEDLRPIGVPESRHEGRLRGKGTLGRKAIMTVDNNLFRKAHFTVLQQSSLVAPYIKEHLALVRARNIGKSDAWITRHHIDTFPAWLQQHLMGNETINQQLAFLARGPSGSIATFQGCEINGYTFYTRAQDMKSTNQNSAVRIDAMGHDGTTGTYYGAIEDIWELDYGPPKVPLFRCQWVRLTGGGVMIDDSGMTTVDLNKVGYSDEPFVLANDVTQVFYMKDMSSKGKKGRGPDEPKHHVVLPARPHLLHQHLEVFSXDRSPLASPSPPLPRASPRRXAVVSRRRLRRRRISGVRAATASPSLSLCFLYEQMVDRDEEQIMYDTIADGSNQYXNEEEGNEDPNQYLNEEGNVERDAEGNQEGNVERDVEWNQVEEASGSQPSAGQKRARGQRGAAKKLEGRHIITKVDKDGXPSAPAEAAKNYVRHSGWVVRDNVPVSLIQFRVQQAEA

SEQ ID NO: 195611 - protein, 1795 aa, Oryza sativa
  unsure (1)..(1795): unsure at all Xaa locations
  Clone ID: PAT_MRT4530_91543C.1.pep
MDRQWMYADRRSKEFIDGVHYFLRVAEANRQRGFICCPCNKCKNQKEYSASRTIHFHLFESGFMPSYNYWTSHGEQGVEMEEDEMEDDNIPDFAQYVGFEGNQTGEEERDADGNDVADDLGQMLQDAKKDCESEKGAHKLDKMLEDHRTLLYLGCEQGHKKLDTTLEFLQWKAKNGVSDKAFGDLLKLVKNILPEGNKLPEYEAKKIVCPLGLEVQKIHACPNDCILYRGEYENLEACPVCKALQYKIRRDDPGEVDGQLTKKRIPAKVMWYFPIIPQIRHLFRNKGNARMIRWHAEERQQDGMLRHPADGSQWRNIDRKFKEFGKDARNIRFGLSTDGMNPFGEMSSGHSTWPITMCIYNXPPWLCMKRKYIMMPIIIQGLKQLGNDIDVYLRPLVEDLKLLWKKEGVPVWDEDKQEEFNIRALLFVTINDWPALSNLSGQSNKGYKACTHCMDETESVYGKSKDTLEAHNDLKHMEQRGDLHPEPKKKGSHYLSLASYTLSKAEKESMFECLESIKVPSGYSTNIKRIISMKEKKFTNLKSHDCHVLMTQLLPVVIRGILPDNVRATITKLCAFMNVISQKVIDPDILEALQNDVRYMGVLKKYVRNRARPEASIAKGYGTEEVIEFCVEFIEDLRPIGVPESRHEGRLRGKGTLGRKAIMTVDNNLFRKAHSTVLQQSSLVAPYIEEHLALVRARNIGKSDAWITRHHIDTFPAWIRQHLMGNESINQQLAFLARGSSGSIATFQGYEINGYTFYTRAQDMMSTNQNSAIRVGAMGHDGTTGTYYGAIEDIWELDYGPLKVPLFRCQWVRLTGGGVMIDDSGMTTVDLNKVGYSDEPFVLANDVTXVFFVKDMSSKGKKGRGPDESKRHVVLPGKRKIIRVEDKTDEDYDXLDGQPPFTVTIDPSILLSNEDTPYSRSDHKEGTITLNNCNALSSILEKHMXWKIIFSALISSPGSXTLTKFKKNLEIAGKYLXSRSMRTTGSKDIFTPGXLRRTGSKDLFFSPGCSQQPGVKISNLYSRLFSSTGTKDLGLYIFPMRALVISTXLRSFCPIDLSRLLLRRHCLGHPHADAAAVSRRRLALVVVAAASASFXLPHLWGESRRAPPPSRSLSPISISLSLPLEFQTPTPTSSRHDAAPRRCRARRHAAVPRAGPMPRAAPRRRRAAPPPLRCRHTENVNERTNVNENKVNEREXRTSERXVNEPTNVNENERTNVNENKVNERXENERTNVNEPTNVNENERMNVNENKRLFDERMAAHRSNDPQPTIPPAMVSPSGNRSSYASTGQVASGMAIPTDPSGIYHCRPIPAGYSKVEVELVEGAYEDLELDYPGGDGETHLRDTSHAIILWRRRYIIFPGRQAASHAPSPPAPPSPPXDPAPSPPHAPAPSPPQAPPAPSKSRAPQAPLPAHTRATKKGKVDAAKNKDPEYDCTQEELDAYVALEVKRQFKPRSPEKKIPIDPSVMNFFRGMSAPAKEAIKLSDYERTLKKASSGKSKPVPQLGEQPNQEIEPLVTGKEMMIEEFITDTGLTTDQLLGVAPIEKAEVKYMYELGKPLVKPELLQSLPTQMYKFHQLYMEMSATGREMIGARIRDTDFLQGDDILWINFKGIYELYQLDALDVSIMSCWILMEIQRARQRGVFDTGFIDPRKVNVAMLDQYPQATEDNLVHLLKAQHYKTFILLPYNTELNVYDLMDKKESTFDKVFELIDRAWYRFRHLVRGKWRERLRRNFKFPFIRMRDNLTTPKEFIAAVQEQLMEFINEQILDPKGEFYYDGNTIHRSLASELATTTTSKS

SEQ ID NO: 195612 - protein, 135 aa, Oryza sativa
  Clone ID: PAT_MRT4530_91544C.1.pep
DLDLGILRLSSEMIGGGCFGDGGIGGDGRGGSSDLFPSLTYPIVCSLPSRADPPSAAMGGADPVTSSPPSHIPSLVHPLLRGSTVGGDGRGGYSNLFPSRADPVVCSPPSPPPLARIRRRRLWEGRIRRPLPLPR

SEQ ID NO: 195613 - protein, 422 aa, Oryza sativa
  Clone ID: PAT_MRT4530_91545C.1.pep
MAKAMEQERREVKSRASALPGQRRLRRRVQGEDYLPKEDNFALASSPPQGPKKPFRPIKPGGNRVGDRQTAHQGPMSPYVIMYPCKCSFHKGNHMDRQWMYADWRSKEFIEGVHYFLRVAEANKRNGFTCCPCNKCKNQKEYSVSRTIHFHLFESGFMPSYNCWTSHGEQGVEMEEGEVEDNNLPDWAQYAGFEGNQTGEVDRDAGDNDAADDLGQMLQDAKEDCESCKQGHKKLDTTLEFLQWKAKNGVSDKAFGDLLKLVNNILPEGNKLPKTTYEAKKIVCPLGLEVQKIHACPNDCILYRGEEYENLEACPVCKALRYKIRRDDPGEVDGQLTKKRIPAKVMWYFPIIPWLRRLFRNKGNARMMRWHAKERQQDGMLRHPADGSPWRNIDRKFKDFGKDARNIWFGLSMDGMNCHDRK

SEQ ID NO: 195614 - protein, 148 aa, Oryza sativa
  unsure (1)..(148): unsure at all Xaa locations
  Clone ID: PAT_MRT4530_91546C.1.pep
LVAFARALLHREPQATGPCGDPSHGSPPRAPTPAIAAVASTSAAAGGGGGGEANYEVSDDYRAKWERHERAVXELLQRCRAFTMAVRTNDSAVRARLHRLEKRERLGRQVGTKDGDCQRRCWRRGWRGAQPRGHRVGAGRKGSAGGGR

SEQ ID NO: 195615 - protein, 2020 aa, Oryza sativa
  unsure (1)..(2020): unsure at all Xaa locations
  Clone ID: PAT_MRT4530_91547C.1.pep
MYADRRSKEFIDGVHYFLRVAEANRQRGFIFCPCNKCKNQKEYSASRIIHFHLFESGFMPSYNCWTSHREQGVEMEEDEVEDDNIPDFAQYVGFEENQTGEEEIAADGNDVADDLGQMLQDAREVCESEKEAHKLDKMLEDHRTSLYPGCEQGHKKLDTTLEFLQWKAKNGVSDKTFGDLLKLVKNILPGGXNKLPETTYEAKKIVCPLGLEVHKIHACLNDCILYRGEEYENIEACPVCKALRYKIRRDDPGEVDGQLTKKRIPAKVMWYFPIIPRLRRLFRNKGNARMLQWHAEXRQQDGMLRHPADGSQWRNIDRKFKEFGKDARNIRFGLSTDGMNPFGEMSSGHSTWPVTMCIYNXPPWLCMKRKYIMMPIIIQGPKQPGNDIDVYLRPLVEDLKQLWKKEGVPVWDKDKQEEFNLRALLFVTINDWPALSNLSGQSNKGYKACTHYMDETESTYLKHCRKVVYMGHRRFLATNHPVRKKGKHFEHKADHRTKPKHRSGKTVFAMVKDLKVVFGKGPGSQPIESEDGHAVMWKKNSIFWELPYXEFLDVRHAIDVMHLTKNLCVNLLGFLGVYGKSKDTLEARNDLKHMEQCGDLHPEPGVKIRGYIFSRTFSADRSLSASLLRRHCLGQIPALTPPYLAVVSSSSSSPPPHLWGESLRRLSLHRSPISISLSVAPPATRRHATTTPRHAAAGTPRRRLRHCARHAAAATPRRRLRRRATPPPHATTRRRRRRHAAAAAPSAGPMXRHTAINEHVNVRCRENVYENENDRTNESENEHVNVSCHENVNENERTNMNELGNVNERTNVNELGNVNERTNMNEREREMQYIYVTRHXPNTYFLYLAEKTCCRSRPSSRSGRASPRRNSCRQVMXNNINDCYICNAIKNIRLVIRXHIRLCSTYYIIIDYGIGVTPXQLTILVLIXDLAYTTVTLSIHDSXSVLACNIIXSFNIRLLYLXLDLVCNXIDYGIGATPXIDYCSLNXDLAYTHETLSIYMTILVLALKHKCRVTRCFLYQQMADRDEEQILYDTIAEGSSQYWNEEEGNEDPNQYLNEEGNVERDAEGNQQGHVERDVEGNQEEEASGSQSSVGQKRARRQRGAAKKLEGRHIITEVEEDGRPSAPAEAAKNYVRHSGWVVRDNVPVSTVXDHESFVPDSEKEMLWTTMLKTFTLPAGTEDKVKRWTLKKMAEQFQSFKGDLYQKYILKGQTPNFDTFPKLRDHWDKVVAYKTGEQGQAMMERNKENATKRKYHHHLGSEGYSIAMPKWKEMEASLIERGIEPATANWSERSKFWYYAHGGTLNPADGSLVFGDQIREAARRLTDAVEASSQGTFRPDRDRDELTLALQTPEHPGXTRGKGVIPWKIGFKEDIHTYRSQMRSKRDTEAKVADLEFWVSSYELSMQEEVXRLVDERMAAHRSHDPQPTISPAMGSPSENRSSCVXTGQVGSQSMDAMQTQDESTCPVDDITQRTPCELHIPYKNLSIKVASGMAIPTDPSGTYHCRPIPAGYSKVEVELVEGAYEDHELDYPGGDGETHLRDTSHAIILWRRRYIILPGRQAASRAPSPPAPPSPPQDPAPTPPYAPPAPSPPQAPALTPPQDPAPTPPRAPTPTPPQAPLPAPSKSRAPPAPPPAHTRATKKAKVDTAKNKDPGYDCTQEELDAYVASEVKRQFKPRSPEKKIPIDPSVRNFLRGMSAPVKEAIKQSDYERTLKKASSGKSKPVPQLGEQPNQKIEPLVTGKDMTIEEFIIDTGLTTNQLLGVEPIEKKELKYMYELGKPLVKPGLVQSLPTQMYKFHQLYMEMSATGREMIGARIRDPDFLQGDDILWINFKGIYEVYQLDALDVSIMSCWILMEIQRARXRRVFDTGFIDPRRVNIAMLDQYSQETEDNLVHLLKAQHYKTFILLPYNIEFHWVLLLFDLSACTVNVYDSMDKKESTFDKVFELIDRAWYRFRHLVRGNWRERLRRRFKFPFIRMMDNLTTHKEFIAAVQEQLMGFINEEILDPKGEFYYDGNTIHRS

SEQ ID NO: 195616 - protein, 1843 aa, Oryza sativa
  unsure (1)..(1843): unsure at all Xaa locations
  Clone ID: PAT_MRT4530_91548C.1.pep
HLYSGFWLNNYSIVFLVLGSACRQAQQAQHARKIEQIMDRQWMYADRRSKEFIDGVHYFLRVAEANRQRGFICCPCNNCKNQKEYSVSRTIHFHLFGSVFMPSYNCWTSHGEQGVEMEEDEVEDDNIPDFAQYVGFEENQTGEEEIAADGNDVADDLGQMLQDAREDCESEKEAHKLDKMLEDHRTSLYPGCEQRHKKLDTTLEFLXWKAKNGVSDKAFGDLLKLVKNILPGGNKLPETTYEANKIVCPLGLEVHKIHACPNDCILYRGEEYENLEACLVCKALRYKIRRDDPGEVDGQLTKKRIPAKVMWYFPIIPRLRRLFRNKGNARMLRWHAEEHQQDGMLRHPADGSQWRNIDRKFKEFGKDARNIRFGLSTDGMNPFGEMSSGHSTWPVTMCIYNXPPWLCMKRKYIMMPIIIQGPKQPGNDIDVYLRPLIEDLKQLWKKEGVPVWDEDKQEEFNLRALLFVTINDWSALSNLSGQSNKGYKACTHCMDETESVYGKSKDTLEARNDLKHMEQRGDLHPEPKEKGSHYLSPASYTLSKAEKESMFECLESIKVPSGYSTNIKRIISTKEKKFTNLKSHDCHVLMTQLLPVVIRGILPDNVRATITKLCAFMNAISQKVIDPDRLEALQNEVRYMGVLKKYVRNHARPEASIAKGYGTEEVIEFCVEFIEDLRLIGVPESRHEGRLRGKGTLGRKAIMMVDNNLFRKAHFTVLQHSSLVAPYIEEHLALVRARNIGKSDAWITRHHIDTFPTWLRQHLMGNESINQQLAFLARGPSGSIATFQGYEINGYTFYTRAQDMKSTNQNSAVRVDTMGHDGTTATYYGAIEDIWELDYGPLKVPLFRCQWVRLTGGGVMIDDSGMTTVDLNKVGYSDEPFVLANDVMQVFFMKDMSSKGKKGRGPDEPKRQVVLPGKRKIVEVEDKTDEDYDQLDGQPLFTVTIDPSILLSNEDTPYSRSDHKEGTIYLNEEGNVERDAEGNQQGHVKRDVEGNQEEEASGSQPSVGQKRAHGQRGAAKKLEGRHIITEVEEDGRPSASAEAAKNYVRHSGWVVRDNVPISTVYWRRTRARGDHESFVPDSEKEMLWTTMLETFTLPTGTEDKVKRXTLKKMAEXFQSFKGDLYQKYILKGQTPNFDTFSKLRDHWDEFVAYKTGEQGQAMMERNKENAAKKKYHHHLGSGGYSVAMPKWEEMEASLIERGIEPATANWPERSKFWYYAHGGTLNPADGSLVFGDQIREAARRLTDAVEASSQGTFRPDRDRDELSRMRSKRDTEAKIADLEFRVSSYELRMQEEVARKVDERMAAHRSHDPQPTIPPAMVSPSGNRSSCASTGQVASGMAIPTDPSGTYHCRPIPAGYSKVKVELVEGAYEDLELDYPGGDGEAHLRDTSHAIILWRRRYIIFPGRQAASCAPSPPAPPPQDPTPTPPRAPTPTPPQAPLPAPSKSRAPQXPPPAHTRATKKAKVDAAKNKDPRYDCTQEELDAYVASEVKRQFKPRSPEKKIPIDPSVRNFFRGMSAPVKEAIKLSDYERTLKKASFGKSKPVPQLGEQPNQEIEPLVTGDDMTIEEFVIDTGLSTDQLLGVEPIEKAELKYMYELGKPLVKPELVQSLPTQMYKFRQLYMEMSATGREMIGARIRDLDFLQGDDILXINFKGIYEVYQLDALDVSIMSCWILMEIQRARRRRVFDTGFIDPRRVNVAMLDQYPQETEDNLVHLLKAQHYKTFILLPYNTELNVYDSMDKKEFTFDKVFELIDRAWYRFRHLVRDNRRERLRWRFKFPFIRMRDNLTTHKEFIAAVQEQLMGFINEEILDPKGEFYYDGNTIHRSLVSELAASTTTTSKS

SEQ ID NO: 195617 - protein, 2108 aa, Oryza sativa
  unsure (1)..(2108): unsure at all Xaa locations
  Clone ID: PAT_MRT4530_91549C.1.pep
MDRQWMYANWRSKEFIDGVYYFLRVAEANRQRGFICYPCNKCKNQKEYSASRTIHFHLFESGFMPSYNYWTSHEEQGVEMEEDEVEDDNIPDYTQYVGFEGNQTGEEERDADGNDVADDLGQMLQDAKKDCESEKGAHKLDKMLEDHITSLYPGCEQGHKKLDTTLEFLQWKAKNRVSDKAFGDLLKLVKNILPEGNKLPETTYEAKKIVCPLGLEVQKIHACPNYCSLYRGEKYENLEACPVCKALRYKIRRDDPGEVDGQLTKKRIPAKVMWYFPIIPWLRRLFRNKGNARIMRWHAEERQQDGMLRHPADGSQWRNIDRKFKEFGKDARNIRFGLSTDGMNPFGEMSSGHSTWPVTMCIYNXPPWLCMKRKYIMMPIIIQGPKQPGNDIDVYLKPLVEDLKLLWKKEGVPVWDEDKHEEFNIRALLFVTINDWPALSNLSRQSNKGYKACTHCMDETESTYLKHCRKVIYMGHRRFLAANHPVRKKGKHFEHKADHRTKPKHRSGKTVFAMVKDLKVVFGKGPGSQPIESEDGHTAMWKKNSIFXRXPYWEFLDVHHAIDVMHLTKNLCVNLLGFLGVYGKSKDTLESRNDLKHMEKRGDLHPEPNEKGSHYLSPASYTLSKAEKESMFECLESIKVSSGYSTNIKRIISTKEKKFTNLKSHDCHVLMTQLLPVVIRGILPDNVRATITKLCAFMYAIPQKVIDPDRLEALQNDVVQCLVSFELIFPPSFFNIMTHLLCHLVKEISILGPVYLHNMFPFERYMGVLKKYVRNRARPEASIAKGYGTEEVIEFCVEFIEDLRPIGVPESRHEVRLRGKGTLGRKAIITVDNNLFRKAHFMVLQQSSLVAPYIEEHLALVRARNIGKSDAWITRHHIDTFPAWIRQHLMGNESINQQLAFLARGPSGSIATFQGYEINGYTFYTRAQDMKSTNQNSAVRVDAMGHDGTTGTYYGAIEDIWELDYGPLKVPLFWCQWVRLTGRGVMFDDSGMTTVDLNKVGYSDEPFVLANDVTQVFFVKDRSSKGKKGRGPYEPKRHVIPDARPRLLHQHLEVFARSISLGXPSPPLPRASPRRXAAVSRRCLALVVVTAXAAAASLSRSLRCFLYEQMADRDEEQILYDTIAEGSSQYWNEEEGNEDSNQYLNEEGNVERDAEGNQEGHVERDVEGNQEEEASGSQPSVGQKRARGQRGAAKKLEGRHIITEVEEDGRPSAPTEAAKNYVRHSGWVVRDNVPVSTVYWRRTRARGDHESFVPDSEKEMLWTTMLETLTLPAGTEDKVKRWTLKKMAEQFQSFKGDLYQKYILKGQTPNFDTFPKLRDHWDEFVAYKTGEQGQAMMERNKENAAKKKYHHHLGSGGYSVAMPKWEEMEASLLERGIEPATANWPERSKFWYYAQGGTLNPADGSLVFGDQIREAARXLTDAVEASSQGTFRLDRERDELSLALQTPEHPGRTRGKGVIPWKLGSXEDIHTYRSRMRRKRDTEAKIADLEFMVSSYERSMQEEVARKVDERMAAHRSHDPQPTIPPTMVSPSGNRSSCASTGQVGSQSMDAMQTQDESTCPVDDITQRTPCELHIPFKNLSIKVASGMAIPTDPSGTYHCRPIPAGYSKVEVELVEGAYEDLELDYPGRDGETHLRDTSHAIILWRRRYIILPGRQVASRAPSPPALPSPPQDPASSPPHAPAPSPPQAPAPTLPQAPAPTPPQAPLPAPSKSRAPQAPPPAHTRATKKVKVDTAKNKDPGYDCMQEXLDAYVASEVKRQFKPRSPEKKIPIDPSVMNFFRGMSSPAKEAIKLSDYERTLKKASSGKSKPVPQLGEQPNQEIEPLVTGKEMTIEEFITDTGLTTDQLLGVAPIEKAEVKYMYELSKPLVKPELLQSLPTXMYKFHQLYMEMSATGREMIGARIKDIDFLQGDDILWINFKGIYEIYQLDALDVSIMSCWILMEIQRARWRGVFDTGFIDPRKVNVAMLDQYPXATEDNLVHLLKAQHYKTFILLPYNTEFHXMPLLFDLSTCTVNVYDSMDKKESTFDKVFELIDRAWYRFRHLVRGKWRERVRRKFKFPFIHMRDNLTTHKEFIAAVQEQLMGFINEQILDTKPALYYAANTIHSAP

SEQ ID NO: 195618 - protein, 85 aa, Oryza sativa
  unsure (1)..(85): unsure at all Xaa locations
  Clone ID: PAT_MRT4530_9154C.1.pep
MPLPSTTVSSSTPGPNMAAPXTLAPCPCHRGTRAVVEVLTGQKGRPATLAPPLIPWRQHSWRAPPLCLKPHGPHHLSPPHSHFRH

SEQ ID NO: 195619 - protein, 1117 aa, Oryza sativa
  Clone ID: PAT_MRT4530_91550C.1.pep
MADRDEEQILYDTIAEGSSQYWNEEEGNEDPNQYLNEEGNVERDAEGNQQGHKRARGQRGAAKKLEGRHIITEVEEDGRPSAPAEAAKNYVRHSGWVVRDNVPVSTVYWRRTRARGDHESFVPDSEKEMLWTTMLETFTLPAGTEDKVKRWTLKKMAEQFQSFKGDLYQKYILKGQTPNFDTFPKLRDHWDEFVAYKTGEQGKAMMERNKENAAKKKYHHHLGSGGYSVAMPKWEQMEASLIERGIEPATANWPERSKFWYYAHGGTLNPADGSLVFGYQIQEAARRLTDAVEASSQGTFRPDRDRDELTLALQTPEHPGRTRGKGVIPWKIGFKEDIHTYRSRMRSKRDTEAKIADLEFRVSSYELNMQEEVARKVDERMAAHRSHDPQPTIPPAMVSPSGNRSSCASTGQVGSQSMDAMQTQDESTCPVDDITQRTPCELHIPLKNLSIKVASGMAIPTDPSGTYHCRPIPAGYSKVEVELVEGAYEDLELDYPGGDGETHLRDTCHAIILWRRRYIILPGRQAASRAPSPPAPPSPPQDPAPSPPHAPPAPSPPQAPASTPQDPAPTPPRAPTPTPPQAPLPAPSKSRAPPAPPLAHTRATKKAKVDAAKIKDPGYDCTQEELDAYVASEVKRQFKPRSPEKKIPIDPSVRNFFRGMSASVKEAIKLSDYERTLKKASSGKSKPVPQLGEQPNQEIEPLVTGKEMTIEQFITDTGLTTDQLLGVTPIEKAEVKYMYELGKPLVKPELLQSLPTQMYKFHQLYMEMSATGREMIGARIRDTDFLQGDDILWINFRGIYELYQLDALDVSIMSCWILMEIQRARRRRVFDTGFIDPRKVNVAMLDQYPQETEDNLVHLLKAQHYKTFILLPYNTEFHWVLLLIDLEACTVNVYDSMDKKESTFDKVFELIDRAWYRFRHLVRSKWRERLRRKFKFPCAKQKQGTNLCGYYVCEYCHCLADQIITTRELDFIRMRDNLTTHKEFIAAVQEQLMGFINEEILDPKAVASLLSFPTSRCFTGPTRINPSLPHRSSPLPLHARIDSLSCISLRRPLRINLAVILSISRIVLARTGAGMSSASRATRKQNEGVALSPSVAPMAARALLPPSSSMSKGCSPL

SEQ ID NO: 195620 - protein, 455 aa, Oryza sativa
  Clone ID: PAT_MRT4530_91551C.1.pep
MASQPPALDILVREPDGFSVWSGPPYPTGSAPPVRLPKTACSATYFSSDGSRLLATVASASATVYDCRTLSVVRSFELPGLLAAALSPAGTFLQTFQKSSSPQEKNVTVWHVDTATALYQHYQKNMSKATWPMVQFSADESVACRMMTNEIQFFDPKDFTKGFVYKLRMPGIAAMQLASAPGSHVAGFVPEAKGVPASVQIFSCDKDAQGQAVARRSFFRCSTVQFHWNKGSTGLLVVAQADVDKTNQSYYGETKLNYLTTDRAFEGIVPLKKKLVGKTKAECSVTSEWSPDGRHFMTATTAPRLQIDNGIKIFDHNGSLQFKKMFEKLYQADWKPEAPEKFSDIADLTISLGSIKIEETKKQGSLHFLIFHVISAQGSKSAQPSSKAPANIAAKPTAYRPPHSKNSADVQDKLFGGLASTGGEMSKNALRNKKRREKQKEKKAAEGSGASADDN

SEQ ID NO: 195621 - protein, 124 aa, Oryza sativa
  Clone ID: PAT_MRT4530_91552C.1.pep
MALSGKHGPTWLADRVGVHDELVEPASCVRTMADQPDLVSTFGGSCGDPTTSFSSDGDVVGRRGGAIAWTQWEEGEGRRWKGRPDPVFLDLAVIGVGSDGGGVKWGRMELDAHEAGGGGRRVRR

SEQ ID NO: 195622 - protein, 116 aa, Oryza sativa
  Clone ID: PAT_MRT4530_91553C.1.pep
ARADGGALVPDLSAIPPSPAPAGATARRTRRSTGPIPPSPALVPEGKIPMCAPTNRRERKENKSGRKERDASVRQKGKRWLDLIPAKIRDPFSLDTRNYPPPPPLYARGTPLPIQP

SEQ ID NO: 195623 - protein, 69 aa, Oryza sativa
  Clone ID: PAT_MRT4530_91554C.1.pep
LQYVECVSTSNRLYIMIGHAWLCAISNGYDLNTYGRVFCFHVQAEALFEYYDYSWVRICENIAAAMYTQ

SEQ ID NO: 195624 - protein, 405 aa, Oryza sativa
  Clone ID: PAT_MRT4530_91555C.1.pep
MRPLAIRRREARLLPPLAVLVRSMAYVDVKMRWKKDASFDAVPVLSQARDLRPLVSLAGLLSPSPTPVSAVSKLRIPLEVPDRRVISFLRRFPAAFVESVGPEHNHPWFRLSGSAAGLLQEEREVFAARRADITSRLGRLLLMAPRRRLPLRAAQGMLWHLGLPEDYFRCRDYDIAQDGFRILTIGDSVCREEEEDDGRELVLIDNGEHQEMPKSVLQMDAIRRFGSMETVPIPLFQSKGLRLKQKIEAWLEGFQKLPYVSPYEDFSGIYRDSDVSEKRVVGVLHELLSLFVTCSAERRRLLCLRQHLGLPQKFHRVFERHPHVFYLLLKEKTCFVVLKEAYLARGDTAIEEHPMLVVRRKYAGLMEESREIIRCRRSGKPFPSKHKDHEQIEDSEGANSAPILS

SEQ ID NO: 195625 - protein, 179 aa, Oryza sativa
  unsure (1)..(179): unsure at all Xaa locations
  Clone ID: PAT_MRT4530_91556C.1.pep
DSAESSPRARDLFLLLDRVHPWRRPXXXXXEEEEASKLXLKPAGXKVFSNCCPRXXAPPGARPSRCSTGSPPXGLRALPVGNPPGHPQKPMSXXCCRRSXAAVLLHPRQGSPRGGGAEKKNFGXRLXVXXLPKICSEKRPAGXXLPXLLXPPTXSXXXGXFXSLXLXFXNPXFPXLFXX

SEQ ID NO: 195626 - protein, 163 aa, Oryza sativa
  Clone ID: PAT_MRT4530_91557C.1.pep
MTKDTPVGDELRRGMWMTKDAATGDELRRGVDGGGCGRRRRAPAWGVDDGGRGRRRRAPTWRGRWRMWPPATSSGAGRGRWDHRRRRFSARLLILIHRKHHPPRGKNRMVPDRYHLIHHKYHLTAGDGRGGVPPPCAGVDDDAASAAAFATISRKNSNISSPH

SEQ ID NO: 195627 - protein, 268 aa, Oryza sativa
  Clone ID: PAT_MRT4530_91558C.1.pep
MQNPPSHPVDLPLAAAPPPVKAPTPRPPTPASLQPESPGVFFTAAAAAAPVGSSHRRIAIAVDLSDESAYAVRWAVANYLRPGDAVILLHVRPTSVLYGADWGSVDLSLPAANPNPSGDPPSAEDDAEAAARKMEDDFDAFTASKADDLAKPLKDAGIPYKIHIVKDHDMKERLCLEVERLGLSAVIMGSKGFGASRRTSKGRLGSVSDYCVHHCVCPVVVVRFPDDGVAEGGEAGGASELAVGEEVLHPVPEEDAEYHDATEEHKGN

SEQ ID NO: 195628 - protein, 55 aa, Oryza sativa
  Clone ID: PAT_MRT4530_91559C.1.pep
SEYIDSSDVGYTCTNTNMVMGSGEITAKGNVHYEKRGKETCPSTDLMLCAVWINA

SEQ ID NO: 195629 - protein, 50 aa, Oryza sativa
  Clone ID: PAT_MRT4530_9155C.1.pep
TQQQILGKPNTTVPQQELQGQRKQTTKGHMIPMGRTLTKNRRKIMTTNET

SEQ ID NO: 195630 - protein, 69 aa, Oryza sativa
  Clone ID: PAT_MRT4530_91560C.1.pep
VLQAVIGVYHSYSVGSLGQMQFSSGMWKPGQTTLQSRRSQSREDLTSSLADLHLPKHSQNWRYDLVPAA

SEQ ID NO: 195631 - protein, 568 aa, Oryza sativa
  Clone ID: PAT_MRT4530_91561C.1.pep
MAASPESSPSSANSTTPSAPSPSSSLSKSPSPPSPSSPPPPASTNAPPKSAGGVSSSTQAQPSSESSSESTTTPSAPAERKSGGSSRGESGRYRGDVTAGVFVGLFVVAMVAVLAGVVAIVVCCCIKITKKKKRPPPPNMPFFTDEKGNVYYATGGLPPMWQQHGSSNYSIPPPPPPGWHMSSSAGGFSGEMGMGYSSGPYGPALPPPSPNVALGFSKSSFSYEELAAATSGFSAANLLGQGGFGYVYKGVLAGNGKEVAVKQLKSGSGQGEREFQAEVDIISRVHHRHLVSLVGYCIAANQRMLVYEFVPNGTLEHHLYRGGNGDRVLDWSARHRIALGSAKGLAYLHEDCHPRIIHRDIKAANILLDANYEAMVADFGLAKLTTDTNTHVSTRVMGTFGYLAPEYASTGKLTEKSDVFSFGVMLLELLTGRRPVDTSNYMEDSLVDWARPVLARLLVAGGEEGGLIRELVDSRLGGEYSAVEVERMAACAAASIRHSARQRPKMSQIVRALEGDASLSLDHHHDDDFSASSEISRHRQVAFDSGDYTDDYSTTSTSTHSSRLPPKR

SEQ ID NO: 195632 - protein, 113 aa, Oryza sativa
  Clone ID: PAT_MRT4530_91562C.1.pep
VNIRALELLIIHVFCWYQMSFHKGKLLHGVVQQFYRHKTIAHRQLYYVVEQKNKKHLKYTACSVELISQFRNSDILGLGADLYTSSPRPTTLVNHINFFLQFHLVTCTVAHTS

SEQ ID NO: 195633 - protein, 136 aa, Oryza sativa
  unsure (1)..(136): unsure at all Xaa locations
  Clone ID: PAT_MRT4530_91563C.1.pep
MYAFSARAAASKVYYSEQQREGMEQTLDVPRSLRLPTPKAQQQMDEFCRDRHKEIETTKDFSEHAIPMGPLKKIASSQKVNMMMSFDMPAFLSEKREPLGQKLDERAXPFAQSHNRCMRLDTEIXEAIAPTEPYDF

SEQ ID NO: 195634 - protein, 54 aa, Oryza sativa
  Clone ID: PAT_MRT4530_91564C.1.pep
MTGCMFGSVSGQQLSATFYSRSCPRALAIIRAGVRAAVAQEPRMGASLLRLHFH

SEQ ID NO: 195635 - protein, 788 aa, Oryza sativa
  Clone ID: PAT_MRT4530_91565C.1.pep
MPKWEEMEASLIERGIEPATANWPERSKFWYYAHGGTLNPADGSLVFGVQIREAAQRLTDAVEASSQGTFRPDRDRDELTLALQTPEHPGRTRGKGVIPWKIGFKEDIHTYRSRMRSKRDTEAKIADLEFRVSSYELNMQEEVARKVDERMAAHRSHDPQPTIPPAMVSPSGNRSSCASTGQVGSQSMDAMQTQDESTCPVDDITQRTPCGVGMAIPTDPSGTYHCRPIPAGYSKVEVELVEGAYEDLELDYPGGDGETHLRDTSHAIILWRRRYIILPGRQAASRAPSPPAPPSPPHDPAPSPPHAPPAPSPPQAPASTPPQDPALTPPRAPTPTPPQAPLPAPSKSRAPPAAPPAHTRATKKAKVDADKNKDPGYDCTQEELDAYVASEVKRQFKPRSPEKKIPIDPSVRNFFRGMSASAKEAIKLSNYERTLKKASSGKSKPVPQLGEQPKQEIEPLVTGKEMTIEQFITDTGLTTDQLLGVAPIEKAEVKYMYELGKPLVKPELLQSLPTQMYKFHQLYMEMSAAGREMIGARIRDTDFLQGDDILWINFKGIYELYQLDALDVSIMSCWILMEIQRARRRRVFDTGFIDPRRVNVALLDQYPQETEDNLVHLLKAQHYKTFILLPYNTEFHWVLLLFDLEACTVNVYDSMDKKESTFDKVFELIDRAWYRFRHLVRGKWRERLRRKFKFPCAKQKQGNNLCGYYVCEYCHCLANQIITTRELDFIRMRDNLTTHKEFITAVQEQLMGFINEEILNPKGEFYYDGNTIHRSLASELAASTTTSK

SEQ ID NO: 195636 - protein, 1846 aa, Oryza sativa
  Clone ID: PAT_MRT4530_91566C.1.pep
MDRQWMYADRRSKEFIDGVHYFLRVAEANRQRGFICCPCNKCKNQKEYSASRTIHFHLFESGFMPSYNCWTSHGEQGVEMEEDEVEDDNIPDFAQYVGFEGNQTGEEEIAVDGNDVADDLGQMLEDAREDCESEKEAHKLDKMLEDHRTSLYPGCEQGHKKLDTTLELLQWKAKNGVSDKAFGDLLKLVKNILPGGNKLPETTYEAKKIVCPLGLEVHKIHACPNDCILYRGEEYENLEACPVCKALRYKIRRDDPGEVDGQLTKKRIPAKVMWYFPIIPRLRRLFRNKGNARMLRWHAEERQQDGMLRPPADGSQWRNIDRKFKEFGKDARNIRFGLSTDGMNPFGEMSSGHSTWPVTMCIYNLPPWLCMKRKYIMMPIIIQGPKQPGNDIDVYLRPLVEDLKQLWKKEGVPVWDEDKQEEFNLRALLFVTINDWPALSNLSGQSNKGYKACTHCMDETESTYLKHCKKVVYMGHRRFLAANHPVWKKGKHFEHKADHRTKPKHRSGKTVFAMVKDLKVVFGKGPGSQHIESEDGHAAMWKKNSIFWELPYWEFLDVRHAIDVMHLTKNLCVNLLGFLGVYGKSKDTLEARNDLKHMEQRGDLHPEPKEKGSHYLSPASYTLSKAEKESMFECLESIKVPSGYSTNIKRIISTKEKKFTNLKSHDCHVLMTQLLPVVIRGILPDNVRATITKLCAFMNAISQKVIDPDRLEALQNKVVQCLVSFELIFPPSFFNIMTHLLCHLVKEIRILGPMYLHNMFPFEMYMGVLKKYVRNRARPEASIAKGYGTEEVIEFCVEFIEDLRPIGVPESRHEGRLRGKGTLGRKAITTVDNNLFRKAHFTVLQHSSLVAPYIEEHLALVRARNIGKSDAWITRHHIDTFPAWLRQHLMGNESINQQLAFLARGPSGSIATFQGYEINGYTFYTRAQDMKSTNQNSAVRVDAMGHDGTTATYYGAIEETKKMPPRRTNWPERSKFWYYTYGGTLNPADGSLVFGDQIREAARRLTDAVEASSQGTFQPDRDRDELTLALQTPEHPGRTRGKGVIPWKIGFKEDIHTYRSRMRSKRDTEAKIADLEFRVSSYELNMQEELARKVDERMAAHRSHDPQPTIPPAMVSPSGNRSSCASTGQVGSQSMDAMQTQDESTCPVDDITQRTPCELHIPFKNLSIKVASGMAIPTDPSGTYHCRPIPAGYSKVEVELVEGAYEDLELDYPGGDAPTPPQDPAPTPPRAPTPTPPQAPLPAPSKSRAPPAPPPVHTRATKKAKVDAAKNKDPGYDCTQEELDAYVASEVKRQFKPRSPEKKIPIDPSVRNFFRGMSASVKEAIKLSDYERTLKKASSGKSKPVPQLGEQPNQEIEPLVTGKEMTIEQFITDTGLTTDQLLGVAPIEKAEVKYMYELGKPLIKPELLQSLPTQMYKFHQLYMEMSATGREMIGARIRDTDFLQGDDILWINFRGIYELYQLDALDVSIMSCWILMEIQRARRRRVFDTGFIDPRKVNVAMLDQYPQETEDNLVHLLKAQHYKTFILLPYNTEFHWVLLLIDLEACTVNVYDSMDKKESTFDKVFELIDRAWYRFRHLVRGKWRERLRRKFKFPCAKQKQGTNLCGYYVCEYCHCLADQIITTRELDFIRMRDNLTTHKEFIAAVQEQLMGFINEEILDPKGEFYYDGNTIHRLPSGDDTSNKRSSVQMATTLAKVGPFGAGGTPVDIDHTLPPDHLKSIKIWYDEDGINGLKFSYLHAANKRKLTTTRVWGDDSGSSDEINIEDDDDYVNKLEGRTDGRTKIKSLRITTKNNNNPDWLGDKTKEGDYFSVPVEDGQIVAFFGRTDQYINALGVYILGTPYQQSTP

SEQ ID NO: 195637 - protein, 54 aa, Oryza sativa
  Clone ID: PAT_MRT4530_91567C.1.pep
IMNIFKNSYSNWTNLYTSIQDIITKCSNILLSDNRKKNLNITERSSTDVVPLAE

SEQ ID NO: 195638 - protein, 1015 aa, Oryza sativa
  unsure (1)..(1015): unsure at all Xaa locations
  Clone ID: PAT_MRT4530_91568C.1.pep
MDRQWMYADRRSKEFIDGVHYFLRVAKANRHKGFICCPYNKCKNQKEYSASRIIHFYLFESGFMPSYNCWTSHREQGVEMEEDEVEDDNITDFAQYAGFXGNQMDEEERDADGNDIVDDLGQMLQDAKEDCESEKGAHKLDKMLEDHRTSLYPGCEQGHKKLDTTLEFLQWKAKNGVSDKAFGDLLKLVKNILPEGNKLPETTYEAKKIVCPLGLKVQKIHACPNDCILYRGEENKGNARMMRWHAEERQQDGMLRHPADGLQWRNIDRKFKDFGKDARNIQFGLSTDGMNPFGEMSSGHSTWPVTICIYNLPPWLCMKRKYIMMPIIIQGPKQPGNDIDVYLRPLVEDLKLLWKKEGVPVWDEDKQKEFNLRALLFVTINDWPALSNLSGQSNKGYKACTHCMDETESTYLKYCRKVVYMGHRRFLAANHPVRKKGKHFEHKADHRTKPKHRSGKTVFAMVKDLKVVFGKGRGSQPIESEDGHAAMWKKNSIFWELSYWEFLDVRHAIDVMHLTNNLCVNLLGFLGVYGKSKDTLEARNDLKHMEQRGDLHPEPKEKGSHYLSLASYTLSKAEKESTFECLESIKVPSGYSTNIKRIISTKEKKFTNLKSHDCHVLMTQLLPVVIRGILPDNVRAIITKLCAFMNAISQKVIDPHRLEALQNDVVQCLVSFELIFPPSFFNIMTHLLCHLVKEIGILGPVYLHNMFPFERYMGVLKKYVRNRARPEASIAKGYGTEEVIEFCVEFIEDLRPIGIPESRHEGRLRGKGTLGKKAIMTLDNNLFRKAHFTVLQQSSLVALYIEEHLALVCTKNIGKSDAWITRHHIDTFSTWLRQHLMGNETINQQLAFLARGPSGSIATFQVYEINGYTFYTRAQDMKSTNQNSAVRIDAMGHDGTTGTYYGAIEDIWELDYGPLKVPLFRCQWVRLTGGGVTIDDSGMTTVDLNKVGYSDEPFVLANDVTQVFYVKDMSSKEKKGKVTDEPKRHVVLPGKRKIVGLEDKTDEDYDQFDGQPLSR

SEQ ID NO: 195639 - protein, 74 aa, Oryza sativa
  Clone ID: PAT_MRT4530_91569C.1.pep
FFFFLSTAKWQGGGLQAIGMHSHQLCHQQPSQHTQTWCSQSHTPGQGQHCVQHQLLTHTHKQPLPSCTSCIISS

SEQ ID NO: 195640 - protein, 62 aa, Oryza sativa
  unsure (1)..(62): unsure at all Xaa locations
  Clone ID: PAT_MRT4530_9156C.1.pep
TAAARSGCLFWPQQEVVGPRDGSTRPATRPWTVKKQEVXAIADRWAGASPLIACLRVERGVV

SEQ ID NO: 195641 - protein, 1141 aa, Oryza sativa
  Clone ID: PAT_MRT4530_91570C.1.pep
MPKGSLETQLHSEGGEQLGFLQRLDILLDVSMAMEYLHYHHCEVVLHCDLKPSNVLFDQDMVALVADFGIAKLLRGDDNSVISASMPGTIGYMAPEYGSVGKASRKSDAFSYGIMLLELFTGKRPTDPMFVGELSLRQWVTSAFPSNVMDVVDNRLLVQDSSSSLNNFIVPVFELGLQCSHELPDQRMTMSEVVMDRQWMYADRRSKEFIDGVHYFLRVAEANRQKGFICCPCNKCKNQKEYSASRTIHFHLFESGFMPSYNCWTSHGEQGVEMEEDEVEDDNIPDFAQYAGFEENQTGEEERDADGNNVADDLGQMLQDAKEDCESEKGAHKLDKMLEDNRTSLYPGCEQGHKKLDTTLEFLQWKANNGVSDKAFGDLLKLVKNILPEGNKLPETTYEAKKIVCPLGLEVQKIHACPNDCILYRGEEYENLKACPVCKALRYKIRRDDPGEVDGQLTKKRIPAKVMWYFPIIPRLRRLFRNKGNARMMRWHAEERQQDGMLRHPADGSQWRNIDRKFKDFGKDARNIRFGLSTDGMNPFGEMCSGHSTWPVTMCIYNLPPWLCMKRKYIMMPIIIQGPKQPVNDIDVYLRPLVEDFKLLWKKEGVPMWDEDKQEEFNLRALLFVTINDWPALSNLSGQSNKGYKACTHCMDEIESVYGKLKDTLEARNDLKHMEQRGDLHPEPKKKGSHYLSPASYTLSKAEKESMFECLESIKVPSGYSMNIKRIISTKKKKFTNLKSHDCHVLMTQLLPVVIRGILPDNVRTTITKLCVFMNAISQKVIDPDRLEALQNDVRYMGVLKKYVHNRARPEASIAKGYGTEEVIEFCVEFIEDLRPIGVPESRHEGRLRGKGTLERKAIMTADNYLFRKAHFTVLQQSSLVAPYIEEHLALVRAKNIGKSDAWITRYHIDTFSTWLRQHLMGSKTINQQLAFLAWGPSGSIATFQGYEINGYTFYTRAQDMKSTNQNSAVRIDAMGHDGTTGTYYGAIEDIWELDYGPLKVPLFRCQWIRLTGGGVTIDDSGMTTVDLNKVGYSDEPFVLVDDVTQVFYVKDMSSKGKKGKVTDEPKRHVVLPRKRKIVGVEDKTDEDYDQFDGQPPFTVTIDPSILLSNEDTPYSRSDHKEGTIVRRKYVRSTVTADVLP

SEQ ID NO: 195642 - protein, 330 aa, Oryza sativa
  Clone ID: PAT_MRT4530_91571C.1.pep
MASTSSGSSSTSAANVGDSTGVIFANPYATVNVKTHVPITLELKNPNFNKWKTFFTSMCGKFGLLPHIDGTAPSRPDDSAWAQADCCVRGLLFGFISDSILNIVMEPDQTARDLWLVIDDLFQANKEPHAIYLSHEFHSMTQGDLSIADYRQKVKTAADALRDMVYLFLSDSMLLTYYGEPYLTLTRLEIAYAVQQVCLFMHDPREPHLALVKRILRYIKEANPESWSHSREGIRRADIDDDMGETVGLAEGQTTLVPSGAIPGGAPTEGGNHLGGAPAGATVECHGGGRRGTTLAPPPANGESMAPAAAAVHARRREEERLALAGAAVE

SEQ ID NO: 195643 - protein, 2107 aa, Oryza sativa
  unsure (1)..(2107): unsure at all Xaa locations
  Clone ID: PAT_MRT4530_91572C.1.pep
MDRQWMYADRRSKEFIDGVHYFLRVAEANRQKGFICCPCNKCKNQKEYSASRTIHFYLFESEFMPSYNCWTSHGEQGVEIEEDEVEDDNIPDFAQYVGFEGNQTGEEERDADGNDVADDLGQMLQDAKEECESEKGAHKLDKMLEDHRTSLYPGCEQGHKKLDITLEFLQWKAKNGVSDKAFGDLLKLIKNILPKGNKLPETMYEAKKIVCPLGLEVQKIHACPNDCILYRGEEXENLEACPICKALRYKIRRDDPGEVDGQLTKKRIPAKVMWYFPIIPRLRRLFRNKRNARMMRWHAEERQQDGMLRHPADGSQWRNIDRKFKDFGKDARNIQFSLSTDVINPFREMSSGHSTWPVTMCIYNXPPWLCMKRKYIMMPIIIQGPKQPGNDIDVYLRPLVEDLKLLWKKEGVPVCDKDKQEEFNLRALLFVTINDWPALSNLSGXSNKGYKGCTHCMDETESTYLKHCRKVVYMGHRRFLAANHPVWKKGKHFEHKADHRTKPKHRSGKTVFAMVKDLKVVFGKGPGSQPIESEDGHAAMWKKNSIFWELPYWEFLDVRHAIDVMHLTKNLCVNLLGFLGVYGKSKDTLEARNDLKHMEQRGDLHPEPKEKGSHYLSPASYTLSKAEKESIFECLESIKVPSGYSTNIKRIISTKEKKFTNLKSHNCHVLMTQLLPVVIRGIHPDNVWATITKLCAFMNAILXKVIDPDRLEALQNDVVXCLVSFELIFPPSFFNIMTHLLCHLVKEISILGPMYLHNMFPFERYMGVLKKYVRNHARPEASIAKGYGTEEVIEFCVEFIEDLRPIGVPESRHEGRLRGKGTLGRKAIMTVHNNLFRKAHFTVLQQSSLVAPYIEEHLALVRARNIGKSDAWITRHHIDTFPAWVRQHLMGNESINQQLALLARGPSGSIATFQGYEINGYTFYTRAQDMKSTNQNSAVRVDAMAHDRTTGTYYGAIEDIWELDYGPLKVPLFRCQWVRLTSGGVMIDDSGMTTVDLNKVGYSDESFVLANDVTQVFYVKDMSSKGKKGRGPDEPKRHVVLPARPRLLYQHLEVFARSISLGXGHPRADAAVVSRRRLALVVVAASASSAAAASLGCFLYEQMADRDEEQILYDTIAEGSSQYWNKEEGNEDTNQYLNEEGNVERDAEGNXEGHVERDVEGNQEEEASGSQPSAGQKRARGQRDAAKKLEGRHIITEVDEDGRPSASVEAAKNYVRHSGXVVRDNVPVSTVYWCRTRARGDHERFVPDSEKEMLWTTMLETFTLPAGTEDKVKTWTLKKMAEQFQSFKGDLYQKYIMKGQTPNFDTFPKLMDHWDEFVAYKTGEQEQAMMERNKENAAKKXYHHHLGSGGYSVAMSKWEEMEASLLERGIEPATANWPERSKFWYYAHSXTLNPADGSLVFGDQIREAARRLTDALKASSQGTFRPDREKDELSLALQTPEHLGQTRGKGVIPWKIGFKEDNHTYRSRMRIKRDTEAKIADLEFRVSSYELSLQEEVARKVDEHMAVHRSHDPXPTIPPAMVSPSGNRSSCASTGQVGSQSMDAMQTQDETTYPVDDITQRTPCELYIPFKNLSIKVASGMAIPTDPLGTYHCRPIPAGYSKVEVELVEGAYEDLELDYPRGDGETHLHDTSHAIILWRKWYIILPWRQAASRAPSPPQSPAXSPPHAPAPTPSQAPALTPPQAPTPTPPQAPLPAPSKSRAPKAPPPTPTRATKKAKVDAAKNKDPGYDCTQEELDAYVASEVRRQFKPRSLEKKIPIDPSVRNFFRGMSAPAKEAIKLSDYERTLKKASSGKSKLVPQLGEQPNQEIEPLVTGEVFGIQDFINDIGLTTDQLLRDAPIEKAEVKYMYELGKPLLKPELLQSLPTQMYKFHQLYMEMSATGREMIGARIRDTDFLQGDDILLINFKGIYELYQLDALDVSIMSCWILMEIQRAQRRGVFDSGFIDPRKVNVAMLDQYPQATEDNLVHLLKAQHYKTFILLPYNTEFHWVLLLFDLEACTFNVYDSMDKKESTFDKVFELIDRAWYRFRHLVRGKWRERLRQKFKFPFIRMRDNLITHKEFIAAVQEQLMRFINEQILDPKGEFYYDGNTIHMSLASEIATTTTSKS

SEQ ID NO: 195644 - protein, 2123 aa, Oryza sativa
  unsure (1)..(2123): unsure at all Xaa locations
  Clone ID: PAT_MRT4530_91573C.1.pep
MDRQWMYADRRSKEFIDGVHDFLRVAEANRHKGFICCPCNKCKNQKEYSASRTIHFHLFESGFMPSYNCWTSHGEQGVEMEEDEVEDDNILDFAQYVGFEGNQTGEEERDADGNDVADDLGQMLQDAKEDCEREKGAHKLDKMLEDHRTSLYPGCEQGHKKLDTTLEFLQWKAKNGVSDKAFGNLLKLVKNILSEGNKLPETMYEAKKIVCPLGLEVQKIHACPNDCILYRGKKYENLEACPVCKALXYMIRRDNPGEVDGQLTKKRIPAKVMWYFPIIPRLRHLFRNKGNARMMRWHTEERQQDGMLRHLADGSQWRNIDRKFKDFGKDARNIRFGLSTNGMNPFREMSSGHSTWPITMCIYNLLPWLCMKRKYIMMPIIIQGPKQPSNDIDVYLRPLVEDLKLLWKKEGVPVXDEDKQEEFNLRVLLFVTINDWPALSNPSGQSNKGDKACTHCMDETESTYLKHCRKVVYXGHRRFLAANHPVRKRGKHIEHKADHRTKPKHRSGKTVFAVVKDLKVVFGKXGPGSQPIESEDGHAAMWKKNSIFWELPYREFLDVRHAIDVMHLTKNLCVNLLGFLGVYGKSKDTLEARNDLKRMEQRGDLHPEPKEKGSHYLSPASYTLSKAEKESMFECLESINVPSGYSTNINRIISTKEKKFTNLKSYDCHVLMTQLLPVVIRGILPDNVRATITKLCAFMNAISQKVTDPDRLEALLNDVXFELIFPPSFFNIMTHLLCHLVKEISILGPVYLHNMFPFERYMGVLKKYVRNHARPEASIAKGYGTEEVIEFRVEFIEDLRPIGVPESRHEGRLRGKGTLGRKAIMTIDNNLFRKAHFTFLQQSSLVAPYIKEHLALVHARNIGKSDAWITRHHIDTFPAWLXQHLMGNETINQQLAFLVRGPSGSIATFQGYEINGYTFYTRAQDMKSTNQNSVVRIDAMGHDGTTGTYYGAIEDIWELDYGPLKVPLFRCQWVRLTGGGVMIDDSGMTTVDLNKVGYSDEPFVLANNVTQVFYVKEMSSKGKKGRGPDEPKRHVVLSVRPRLLYQHLEIFAXDRSLSASPSQPLPRASPHRXAVVSRRRLARVVIAASAAASDPDLDANYFLYEQIADRDEEHILXDTIAEGSSQYLNEEEGNEDPNQYLNQEGNVERDAEGNQEGHVXRDVEGNQEEEASGSQPSAGQKRARGQRGAAKKLEGWHIITEVDEDGRPSAXAEATKNYIRHSGWVVWDNVPVSTVYWRRTRAHGDHESFVPYSEKEMLWTTMLETFTLPTGTEDKVKRWTLNKMAEQFQSFKGDLYQKYILKGQTPNFDTFPKLRDHWDEFVAHKTCEQGQAMMERNKENAAKKKYHHHLGSGGYSVAMPKWEEMEASLLERGIEPATANXPERSKFWYYAHFGTLNPVDGSLVFSDQIREATRRLTDAVEASSQGTFRPDREKDELSLALQTPEHPGXTRGKGVIPWKIGFKEDIHTYRSRMRSKRDTEAKIADLEFRVSSYELSMQEEVARKVDERMAAHWSNDPQPTIPPAIVSPSGNRSNCASTGQGGSQSMDAMQTQDKTTCPVDDITQRTPSELHIPFKNLSIKVASGMAITTDPLGTYHCRTIPAGYSKVEVELVEGAYEDLELDYPGGDGETHLRDTSHAIILWRKRYIILPGRQAASRAPSPPAPPSPPQAPAPSPHAPAPSPPQAPAPTPPQAPAPTPPQAPTPTPPQAPRSAPSKSRAPQAPPPAPTRATKKAKVHTAKNKDLGYDCTQEELDAYVASEVRRQLKPRSPEKKIPIDSSVKNFFRGMSAPAKKAIKLSDYERTLEKASSGKSKPVPQLGEQASQEIEPLVTGEDFGIQEFIDDTGLTTDQLIXGAPIEKAKVKYMYELDKPLIKPEQLQFLPTQMYKFHQLYMEMSATGREMIRARIRDTDFLQGDDILWINFKGIYELYQLDALDVSIMSCCILMEIQRARRWGVFDTGFIDPRKVNVTVLDRYLQDTEDNLVHLLKAQHYKTFILLPYNTEFHWVLLLFDLEACTVNVYDSMDKKESTFDKVFELINRAWYRFHHLVRGKMRERLRRKFNFPFIRMRDNLITHKEFITVVQEQLMGFINEQILDAKGEFYYDGNTIHRSLASEIATTTTSK

SEQ ID NO: 195645 - protein, 247 aa, Oryza sativa
  Clone ID: PAT_MRT4530_91574C.1.pep
MNVAPVHHAQYPFSSCSHTSCPIVPKGMPIVRRTYILAAGLLLGIRAVGITDYLEITIPLAYLSVAWLQPVVSIASEHGNAECSNTTKETSFQSGMSRICSATSIIQWNKQMSSMRCQYILARLGGPGRESGLESGISALHLLFLNYIVHLQNLNICTKARADMTPQKRDGVDDAFTLPAVPNGRANAGKERTTASTGTFLHLARTKVAGAQHKAAVAPVPLYTHPVPRDGHRCHLPGRRRAKRILK

SEQ ID NO: 195646 - protein, 1601 aa, Oryza sativa
  Clone ID: PAT_MRT4530_91575C.1.pep
MDRQWMYADRRSKEFIDDVHYFLSVAKANRQRGFICCPCNKCKNQKEYSASRTIHFHLFESGFMPSYNCWKSHGEQGVEMEEDEVEDDNIPDFAKYVGFEGNQMGEEERDADGNDVAEDLGQMLQDTKEDCESEKGAHKLDKMLEDHRTSLYPGCVQGHKKLDTTLEFLQWKAKNGVSDKAFDDLLKLVKNILPEGNKLPETTYEAKKIVCPLGLEVQKIHACPNDCILYRGEEYENLEACPVCKALRYKIRRDDPGQVDGQLTKKRIPAKSNKGYKACTHCMDEIESTYLKHYRKVVCMGHRRFLAANHPVRKKGKHFEHKADHRTKPKHRNGKTVFAMVKDLKVVFGKGPGSQPIQSEDGHVAMWKKNSIFWELPYWEFLDVRHAIDVMHLTKNLCVNLLGFLGLYGKSKDTLEACNDLKHMEQRGDLHSKPKEKGSHYLSPASYTLSKAEKEIVIRGILPHNVRATITKLCAFMNAISQKVIDPDRLEALQNDMVQCLVSFELIFTPSFFNIMTHLLCHLVKEISILGPVYLHNIFPFERYIGVLKKYVRNRARPENLSKIFAQSGYLNHAMKGDYGKGNSRKESNNDAPYIEEHLALVRARNIGKSDAWITRHHIDTFLAWIRQHLMGNESINQQLAFLARGPSGSITTFQGYEINGYTFYTRAQDMKSTNQNSAVRVDAMGHDGTTGTYSGAIEDIWELDYGPLKVPLFCGMTTVDLNKVGYSDEPFVHANDVTQVFLVKDMSSKGKKGRGPDEPKRHVVLPGKRKIVGVEDKTDEDYDQLDGQPPFTVTIDPSILLSNEDTPYSHSDHKEGTIGELYKKYILKGQTPNFDTFPKLRDHWDEFVAYKTGEQEQEMMERNKENAAKKKYHHHLGSGGYSVTMPKWEEMEASLLERGIEPATANWPERSKFWYYAHGGTLNPANGSLVFSDQIREAARRLTDEVEASSQGTFRPDRERDELSLALQTPEHSGRTRGKGVIPWKIGFKEDIHTYRSRMRSKRDTEAKIADLEFRVSSYELSMQEEVARKVDESMAAHRSNDPQPTIPPAMVSPLGNRSSCASTGQVGSQSMDAMQTQDESTCPVDDITQRTPCELHIPFKNLSIKVASGMAIPTDPSGTYHCRPIPAGYSKVEVELVEGAYEDLELDYPGGDAPSPPQAPAPTPPQAPAPTPPRSPTLTPLQAPLPAPSKSRAPQAPPPAHRRATKKVKIDAAKNKDPGYDCTQEELDAYVASEVKRQFKPRSPEKKIPIDPSVMNFFRGMSAPTKEAIKLSDYERTLKKASSGKSKPVPQLGEQPNQEIEPLVTGKEMMIQEFITDTGLTTDQLLGVAPIEKAEVKYMYELGKPLVKPELLQSLPTQIYKFHQLYMEMSATGREMIGVRIRDTDFLMEIQRARRRGVFDTGFIDPQKVNVAMLDQYPQATEDNLVHLLKAQHYKTFILLPYNTEFHCVLLLFDLSACTVNVYDSMDKKESMFDKVFELIDRAWYRFRHLVRGKWRERLRRKFKFPCAKQKKGTNLCGYYVCEYCHCLADQIITTRELNYIRMRDNLTTHKEFITAVQEQLMGFISEQILDPKGEFYYDGNTIHRSLASELATTTTSKS

SEQ ID NO: 195647 - protein, 1105 aa, Oryza sativa
  unsure (1)..(1105): unsure at all Xaa locations
  Clone ID: PAT_MRT4530_91576C.1.pep
PPSPPPPRRRAKRRPDAATPPLTNTXNENEHVNVRWRENVNENEXDRTNESENEHVNVRCRENVNENERTNVNERTNVNVKCNIYMLHGIYMADRDEEQILYDTIAEGSSQYWNEEEGNEDPNQYLNEEGNVERDAERNQQGHVERNVEGNQEEEASGSQPSVGQKRARGQRGAAKKLEGRHIITEVEEDGRPSAPAEAAKNYVRHSGWVVRDNVPVSTVYWRRTRARGDHESFVPDSEKEMLWTTMLETFTLPAGREDKVKRWTLKKMAEQFQSFKGDLYQKYILKGQTPNFDTFPKLRDHWDEFVAYKTGEQGQAMMERNKENAAKKKYHHHLGSEGYSVAMPKWEVMEASLIERGIEPATANWPERSKFWYYAHGGTLNPADGSLVFGDQIREAARRLTDAVEASSQGTFRPDRDRDELTLALQTPEHPGXIRGKGVIPWKIGFKEDIHTYRSRMRSKRDTEAKIADLEFRVSSYELSMQEEVARKVDERMAAHRSHDPQPTIPPAMVSPLGXNRSSCASTGQVGSQSMDAMQTQDESTCPIDDITQRTPCELHIPYKNLSIKVASGMAIPTDPSGTYHCRPIPAGYSKVEVELVEGAYEDLELDYPGGDRSCTVSSSCSASTVSTSGSSTDSSSGSCTDSSSGSYTYSSVSSSSGTFKVKGPPXAPPPAHTRATKKAKVDAAKNKDPGYDCTQEELDAYVASEVKRQFKPRSPEKKIPIDPNVRNFFRGMSAPVKEAIKLSDYERTLKKASSGKSKPVPQLGEQPNQEIEPLVIGEDMTIEEFIIDTGLTTDQLLGVEPIEKAELKYMYELDKPLVKPELVQSLPTQMYKFHQLYMEMSATGREMIGARIRDPDFLQGDDILXINFKGIYEVYQLDALDVSIMSCWILMEIQRARRRRVFNTGFIDPRRVNVAMLDQYPQETEDNLVHLLKAQHYKTFILLPYNTEFHWVLLLFDLSACTINVYDSMDKNESTFDKVFELIDMAWYRFHHLVRGNWRERLRRRFKFSCAKQKQGTNLCGYYVCEYCHCLADQIITTRELDFIRMRDNLTTHKEFIAAVQEQLMGFINKEILDPKGEFYYDGNTIHRSLASELAASTTTTSK

SEQ ID NO: 195648 - protein, 283 aa, Oryza sativa
  unsure (1)..(283): unsure at all Xaa locations
  Clone ID: PAT_MRT4530_91577C.1.pep
MAAAAPPAGPGLYSDIGKKARDLLYRDYHTDQKFTLTTYAANGAAITVAGTKKNESIFSEIQSQVKNNNVSVDVKATSDSKLITTFTVHDLGTPGXLKGILSIPFXPYQKFANGLRSSTLDPHAGLNAIVGLNANPLVSFSGVFGTGAFAVGTDVAFDTATGDFTKYNAGLSHTTPDLTAALLLNNKGDSLAASYYHKVSKTSAVGAELAHSFSSNENTLTFGTQHALDELTTVKARFNNFGMASALIQHEFRPKSLVTISTEVDTKAIDKSSKVGLSLVLKP

SEQ ID NO: 195649 - protein, 339 aa, Oryza sativa
  Clone ID: PAT_MRT4530_91578C.1.pep
MGRRCGHKTVMGTPLGAVLCKIAGVVVLVHGLSDVLPIEDRSCHLFVATHVRRYNLPRTAAASSVPHSVPPKPRPWLLPPGERRRPLRVGAEVARGFELAAAALLSGGIRLAVPRPVLAPGRRGLAARLRPASGVPQGRNGRATTVLRVCAILTGDDLDTPPSRSFFRLLIIYNRPGFTAMRCYSSDDSSWGPERRKPYCARLGHALAAAWPTGPSTGRRSSARAIGLSHGHLRPARTTPIELRWFGEKSGTVVYTVGEANGGLRGEHGGWDSPEASRRWRLQHMQEYLSTKLETDSVSDSPCTRTRRVAGMDGAERVTTASASASGSSLAYKLSKRAS

SEQ ID NO: 195650 - protein, 1068 aa, Oryza sativa
  unsure (1)..(1068): unsure at all Xaa locations
  Clone ID: PAT_MRT4530_91579C.1.pep
MDRQWMYADRRSKEFIDGVHYFLRVAEANRQRGFICCPCNKCKNQKEYSAFRTIHFYLFESGFMPSYNXWTSHGEQGVEMEEDEVEDDNISDYCXYERIEGNQTGEEDIDADYNDVADDLGQMMQDAKEDCESEKGAHKLDKMLEDHRTSLYPGYEQGHKKLDTTLEFLQWKAKNGVSXKAFGDLLKLVKNILPEGNKLPETTYEAKKIVCPLGLEVQKIHACPNDCILYHGEEYENLEACPVCKALRYKIRRDDLGEVDRQLTKKRIPAKVMWYFPIIPRLRRLFRNKGNARMMCWHAEERQQDGMLRHPADGSQWRNIDRKFKDFGKDARNIRFGLSTDGMNPFGEMSNGHSTWPVTMCIYNLPPWLCMKRKYIMIPIIIQGPKQPGNDIDVFLRQLVKDLKLLWKKEGVPVWDEDKQEEFNLXALLFVTINDWPTLSNLSGQSNKGYKACTRCMDETESMYLKHCRKVVYIGHRRFLTANHSVRKKGKHFEHTADHRTKPKHRSGKTVFAMVKDLKVVFGKGPSSQPIESEDGHAAMWKKNSIFWELPYWEFLDVRHAIDVMHLTKNLCVNLLGFLGVYGKSKDTLEARNDLKHMEQRGDLHPVPQEKGSHYLSPASYTLSKAEKESMFQCLESIKVPSGYSTNIKRIISTKEKKFTNLKSHDCHVLITQLLPVIIRGILPDNVRTTITKLCSLMNAISQKVIDPDRLEALQNDVVQCLVSFVLIFSPSFFNIMTHLLCHLVKEIGIPGPVFLHNMFPFERYMGVLKKYVRNXARPEASIAKGYGTEEVIEFCIEFIEDLRTIGVPESRHEGRLRGKGTLGRKAIMTVDNNLFRKAHFTVLQXSSLVAPYIEEHLALVRARNIGNSDAWITRHHIDTFPAWLRQHLMGNETINQQLAFLAKGPSGSIATFQGYXINGYTFYTRAQDMKSTNQNSAVRIDAMGHDGTTGTYYGVIKEIWELDYGPLKVPLFRCQWVRLTGGGVTIDDSGMTTVDLNKVGYSDEPFVLANDVTQVFYVKDMSSKGKKGKGPDEPKRHVVLPGKRKIVGIRRYIYSRCALVFSFAATA

SEQ ID NO: 195651 - protein, 332 aa, Oryza sativa
  unsure (1)..(332): unsure at all Xaa locations
  Clone ID: PAT_MRT4530_9157C.1.pep
MATVSGTDRLRDLHAFDDTKAGVKGLVDAGVTTVPYFFRHHPDPLPVAAPSEAASAIPLIDLAKADVDRGRVVAEVRTAAETVGFFQVVNHGVAGELMDEMLAAVRRFNEEPLEAKVPYYTRDVASKVRFNSNFDLFRSPAANWRDTMFVEMFPEVPSPEEIXPPPCKGVLEEYPAAVRRLGERLFELLSEALGLPAGTXSGGLQAVLPRPPEERWVDVPPVAGALVVNVGDLLQLVSNERLRSVEHRVLPTGAAGPARVSVACFFRLAYSSTRPCVPVVGGGSGARAAAVYRSTTAGEFLAHYNGKGLDGRSALDHFRIPAAAASPPPPPQ

SEQ ID NO: 195652 - protein, 53 aa, Oryza sativa
  Clone ID: PAT_MRT4530_91580C.1.pep
FISSFCSALHQVLIECLRFPISNIYYLIVLTLSCCLWHAERILAYKCNTSIVV

SEQ ID NO: 195653 - protein, 1068 aa, Oryza sativa
  unsure (1)..(1068): unsure at all Xaa locations
  Clone ID: PAT_MRT4530_91581C.1.pep
MDRQWMYADRRSKEFIEGVHYFLRVAEANKRNGFICCPCNKCKNQKEYYASRTIHFHLFESGFMPSYNCWTSHDEQGVEMKEDEAEDKNIPDWAQYARFEGNQTSEVDRDAGDNNAADNLGLMLHEAKEDCESEKEAHKLERMLEDHRTSLYPGCEXGHKKLDTTLEFLQRKAKNGVSDKAFGNLLKLVKNILPEGNKLPETTYEAKKIVCPLGLEVQKIHACPNDCILYRGEEYENLEACPVCKALRYKIRREDSGEVDGQPTKKRISAKVMLYFAIIPQLRRLFRNKGNARMMRWHAEERQQDGMLRHPADGSQWXNIDRKFKDFGKDARNIRFGLSTDGMNPFGEMSSGHSTWPVTMCIYNLPPWLCMKRKYIMMPIILQGPKQPDNDIDVYLRPLVEDLKLLWKKEGVPVWDEDKQEEFNLLALVFVTINDWPALSNLSGQSNKGYKACTHCMDETESTYLKHCWKVVYMGHRRFLAVNHPVQKKGKHFEHKVDHRMKPKHRNEKTMFAMVNDLKVVLGKGPGSQPIESEDGHAAMWKKNSIFWELPYWEFLDIRHAIDVMHLTKNLCVNLLGFLDVYGKSKDTLEARNDLKHIEQRGDLHPEPKEKGSRFLSPASYTLIKAEKGSMFECLESIKVPSGYSTNIKRIISTKEKKFTSLKSHDCHVLMTQLLPVVIRGILPNNVQATITKLCAFMNAISQKVIDPDRLEALQNDVVQCLVTFELIFPPSFFNILTHLLCHLVKEIGILGPVYLHNMFPFERYMGILKKYVRNRARPEASIAKGYGTEEVIEFCIEFIEDLRTIGVPESRHEERLRGKGTLGRKAIMTVDNNLFRKAHFTVLQQSSLVAPYIEEHLALVRARNIGKSDAWITRHHIDTFLAWLRQHLMGNETINQQLAFLARGPSGSIATFQGYEINGYTFYTRAQDMKSTNQNSVVCIDAMGHDGITGTYYGAIEDIXELDYGPLKIPLFRCQWVRLTGGGVTIDNSGMTTVDLNKVGYSDEPFVFANDVTQVFYVKDMSSKGKKGKGPDEPKRHVVLPGKPRPLYQHLEIFSPIDLGFSFAATA

SEQ ID NO: 195654 - protein, 105 aa, Oryza sativa
  unsure (1)..(105): unsure at all Xaa locations
  Clone ID: PAT_MRT4530_91582C.1.pep
SDTIEYSSLHACSEFWNPVRPLERALNSNXPSAFMPTLILVNLDLMESLFRHFSISSNLISKXSRVNGNRQNKTMLLLKPNLGLGPCNRIGPCWKCLPPPPRIST

SEQ ID NO: 195655 - protein, 211 aa, Oryza sativa
  Clone ID: PAT_MRT4530_91583C.1.pep
MASRLLARSKALALALSRADAAAPGPAAGVQWLRTLSSLPRDPAAAASPAPAPRQPAVGSPLGLSKIPGYEQTSRLSGTQVLPRWFSTGTSNGSSAQQEGATRKVMAFSPLEASIAKPRKGPLTSESWKVKQTELLTRSTYYMIPTLLLVSKNSISTSLLVASVFHQVYMFYKEILLDYVHHDITRKWVFIYFKILLIIMAKETVVYFDLF

SEQ ID NO: 195656 - protein, 106 aa, Oryza sativa
  unsure (1)..(106): unsure at all Xaa locations
  Clone ID: PAT_MRT4530_91584C.1.pep
SGIPXVDPRVRKPTAGEHLLFSYFLICLPYQVARHFNTLYSSSSAHYCAISYVSSKFTCVSSKLTLLYNFQQYMSCSEFACVSSKFKMLDIDCPYDASCNDPIISM

SEQ ID NO: 195657 - protein, 104 aa, Oryza sativa
  Clone ID: PAT_MRT4530_91585C.1.pep
CATTARSRRRADQPGKTGRRNHGLTETCLLAAVRSLSFHVRRVRLLQVQQRGRAPFPRRDSRLFACSAHDPCGPEPNVHLCMGPLARGPLRGCHCRPGPAKRQV

SEQ ID NO: 195658 - protein, 190 aa, Oryza sativa
  Clone ID: PAT_MRT4530_91586C.1.pep
FIPLIFFHKQACAAPYHELISAKAEKKPPKPKPGGPPGGKRKRGPNKGGNQKTNLPTHKKRPIQGAPQGRRKSKQKGGRKKKKAPNTHPRGKNPKPPAGAQFKKKKKPKGRTPKTKKTPGHFERRGPKQMGGELFSQKTPPQKGRQRAGEPPTPPTRGGGPPPGGRQKNPPPPPGGRGGPPPHGGKTPPP

SEQ ID NO: 195659 - protein, 70 aa, Oryza sativa
  Clone ID: PAT_MRT4530_91587C.1.pep
EHTQQAPFLGGKIFKHFNFYTNNTKLNQLNKVPSKKTDRKSLVSVFLLNKLISIAESSKKSTSTVCSASP

SEQ ID NO: 195660 - protein, 95 aa, Oryza sativa
  Clone ID: PAT_MRT4530_91588C.1.pep
MGKTSAWRWKGMTSAPTAAAEGDDLGSDGGSGRGRTRLRRGQRSHEAAAAGDGSHRCGSSSGRAAAKSALCTYAARRREAASVEGSSGRRVAAGW

SEQ ID NO: 195661 - protein, 181 aa, Oryza sativa
  Clone ID: PAT_MRT4530_91589C.1.pep
MSFCGISDGGAAQRVRAGEAGTATRVAAGGGSEGGGGRASCSMSSSSRSDGDGGRASNCGGAGASCGARRWGRRREQLRHRRSKLQREQQQEERRGRRGSEQQRGRRRSEHLRRRRSKLRCVAAGTAARATAATAEQAARAVVGTTAEQATTVAEQQAVRAAAGTVTEQAAAGTAMEQAMQ

SEQ ID NO: 195662 - protein, 408 aa, Oryza sativa
  Clone ID: PAT_MRT4530_9158C.1.pep
MATVSGTDRLRDLHAFDDTKAGVKGLVDAGVTTVPYFFRHPPEPLPVASPSEAAAAIPLIDLAKADVDRGHVVSQVRSAAETAGFFQVVNHGVAGELMDAMLAAARRFNEEPLEAKVPYYTRDVASKVRFSSNFDLFRNGFRSPAANWRDTLVIEMWPEPPSPEEIPPPCRGVLEEYAAAARRLGERLLELLSEGLGLPAGYLGREAGCTDGLSLSVAANYYPACPEPEATMGATKHADPSFLTVLLQDTSGGLQALLDQPRRRWVDVPPVAGALVVNVGDFLQLVSNDRLRSVEHRVLPTGAAGPARVSVACFFRVEYASTRPYVPVVVGGGGARAAAVYRSTTAGEFLAHFNGKGLDGRSALDHFRIPAAASSPPPPLLLAGSIRSLMVVRRTWRFGKPFNIYVNA

SEQ ID NO: 195663 - protein, 490 aa, Oryza sativa
  unsure (1)..(490): unsure at all Xaa locations
  Clone ID: PAT_MRT4530_91590C.1.pep
MALKSPVDFAGSITSGQKDPCCFGVPGCNPRCVRYNKKSRTCRLVTRAISVDRPQLDFSNSDWKKQFQEDLDRRHSLPHLKDVIDVEPRPTTFSLKRGTPQKNGNGNLQGSWNGXVRVDDVAHFKFIEFASLTCAGPHCLFIDCGXDEQKMHRVDQSDXIYLDTNXVLTGIVTEGGLCPGRNDVVWHTLQILEQYXTKNIVGIQHDFDGFVEDQLAEVPARRLDMLFVLGGNGTHAGANLIHEECRKRKLKVSIVGVPKTIDNDILLMDKTFGFDTAVEAAQRAINSAYIEAHSAFHGIGLVKLMGRSSGFITMHASLSSGQVDICLIPEVPFTLDGPNGVLQHLEHLIETKGFALICVAEGAGQEHLQQSNATDASGNMILGDIGVHLHQKIKAHFKEIGVHSDVKYIDPTYMVRAVRANASDAILCTVLGQNAVHGAFAGFSGITTGICNTHNVYLPISEVIKSTRFVDPNSRMWHRCLTSTGQPDFH

SEQ ID NO: 195664 - protein, 73 aa, Oryza sativa
  unsure (1)..(73): unsure at all Xaa locations
  Clone ID: PAT_MRT4530_91591C.1.pep
HELVPNSARGQVGEAVQDLDRRATPVVKEAPGLARSAAADVQALRWLVCTVTXLAKYAIARPDPMARDLYTRY

SEQ ID NO: 195665 - protein, 175 aa, Oryza sativa
  Clone ID: PAT_MRT4530_91592C.1.pep
MDSSNNNNNNKRARDAEDEADEAKRLRAEDLLDMLDDDTDAGGAAGDLASVMRSFEEEIVAGDVAGDVAPTTQPELGFLLEASDDELGLPPATASSSEEEAGAGEPEDAIGFGGQIWGFEDEIGGGGYAGFALTSPEAVAAAAAAAEWDDDGFDAGLFGFGDEVSALRHETMPAV

SEQ ID NO: 195666 - protein, 195 aa, Oryza sativa
  unsure (1)..(195): unsure at all Xaa locations
  Clone ID: PAT_MRT4530_91593C.1.pep
ETDRHGGGDDENKRRKRKKNRTLKEKKTTGEKKGKKKRRKKMEERXKRKKKMKIKKKKKVKSRWKKSRKKTDKKRRKKQKKKEKRKRVKKDGKKKKPKKHGTNPYRVRKNTTKKQQRRKTYENNRKKGPEKKLKSTWKKSRKKDXKKKTKKQKKEKRKRVKKXRKKRKRTKKICKKGRKRKKRRTEFFLRNLTYF

SEQ ID NO: 195667 - protein, 51 aa, Oryza sativa
  Clone ID: PAT_MRT4530_91594C.1.pep
MVLLIFFYLWRFFSGKRVAVIVNGRGGKAVAGCPIYIVEFHDGDGAWLLQL

SEQ ID NO: 195668 - protein, 161 aa, Oryza sativa
  unsure (1)..(161): unsure at all Xaa locations
  Clone ID: PAT_MRT4530_91595C.1.pep
ARGVHTPTGVDTPALLPLALALVAIPIAILLFNRIRRGRLPPGPRAWPVVGNLFDIHXVRCRCFMEWAGKYGPIITVWLGTSPTVVVSTSELAREVLKNNDQQLADRPRNRSSERFSRGGVDLIWADYGPHYIKVRKLCNLKLFAPSRMEALRPIREDEVT

SEQ ID NO: 195669 - protein, 76 aa, Oryza sativa
  Clone ID: PAT_MRT4530_91596C.1.pep
KASPGGGGPQHPGMFHLKGGGAPPGGFPCFPFPWAWRGVVTGFHSLKTPPVAPKKKRPWGGCLGPKKLTVPFPWPP

SEQ ID NO: 195670 - protein, 1668 aa, Oryza sativa
  unsure (1)..(1668): unsure at all Xaa locations
  Clone ID: PAT_MRT4530_91597C.1.pep
MQCFYVSRGKRSEPPLSPEEEAKFEASDCLFRGALISVLADNIVDVYMHMPSGKDMWDALEAKFGVSDAGSELYVMEQFYDYKMVDDRSVVEQAHEIQMLAKELENNNCELPDKFVAGGIIAKLPPSWSDFATSLKHKRQEFSVPDLIGSLGVEEKARAKDVRGKKVEGGSSANMVQKKNPHASHNNKKVKPDVKPKAATNFKKKSKGKAKGDCFVCGKSGHWAKDCPERKDRKSANMIISEGGGTSGDATFFENEFPMKYTPSTSSKETVMPHEHFAPIEHNDQTPEENPEEDNIVDTRKSKRQRVAKSFGDDYIVYLVDDTPRTIEEAYSSPDADYWKEAVRSEMDSIMSNGTWEVVERPYGCKPVGCKWVFKKKLRPDGTIEKYKARLVAKGYTQKEGEDFFDTYSPVARLTTIRVLLALAASHGLLIHQMDVKTAFLNGELEEEIYMDQPDGYVLEGQEGMVCKLLKSLYGLKQAPKQWHEKFDTTLTSAGFVVNEADKCVYYRYGGGEGVILCLYVDDILIFGTSLNVIEEVKDYLSKSFEMKDLGEADVILNIKLQRGDEDGRAIRFLGSARRDYSLFVNIYFIFTNMSNTGDKEKETPVNTNGGNTTSNSSGGPFLGTIHFHLFESGFMPSYNCWTSHGEQGVEMEEDEVEDDNIPDFAQYVGFEGNQTGEEEIAADGNDVADDLGQMLQDAREDSESEKEAHKLDKMLEDHRTSLYPGCEQGHKKLDTTLDLLQWKAKNGDGILRHPADGSQWRNIDRKFKEFGKDARNIRFGPKQPGNDIDVYLRPLVEDLKQLWKKEGVPVWDEDKQEEFNLRALLFVTINDWPALSNLSGQSNKGYKACTHCMDETESTYLKHCRKVVYMGHRRFLAANHPVRKKDKHFEHKADHRTKPKHRSGKTVFAMVKDLKVVFGKGPGSQHIESEDGHAAMWKKNSIFWELPYWEFLDVRHAIDVMHLTKNLCVNLLGFLGVYGKSKDTLEARNDLKHMEQRSDLHPEPKEKGSHYLSPASYTLSKAEKESMFECLESIKVPSGYSTNIKRIISTKEKKFTNLKSHDCHVLMTQLLPVVIRGILPDNVRATITKLCAFMNAISQKVIDPDRLEALQNEVVQCLVSFELIFPPSFFNIMTHLLCHLVKEIRILGPMYLHNMFPFERYMGVLKKYVRNRARPEASIAKGYGTEEVIEFCVEFIEDLRPIGVPKSRHEGRLQGKGTLGRKAITTVDNNLFRKAHFTVLQHSSLVAPYIEEHLALVRARNIGKSDAWITRHHIDTFPAWLRQHLMGNESINQQLAFLAWGPSGSIATFQGYEINGYTFYTRAQDMKSTNQNSAVRVDAMGHDGTTATYYGSIEDIWELDYGPLKVPLFRCQWVRLTGGGVMIDDSGMTTVDLNKVGYSDEPFVLANDVTQVFFVKDMSSKGKKGRGPDEPKRQVVLPGKRKIVGVEDKTDEDYDQLDGQPPFTVTIDPSILLSNEDTPYSRSDHKEGTIGASPRRRRRHISPSSRARRRRRLLRHRRISGVRAAARRLPLDLSLRSRSLSLSRLPPAAEFQTPTLTSXTTRRRATTTPRHETPRRRTPPPRHADAARGATPPPPRPAAAPLPPHRERERAXNVNENKVNECERERANERERXTNVNENERTNVNENKVNEREQERANERERANERE

SEQ ID NO: 195671 - protein, 70 aa, Oryza sativa
  unsure (1)..(70): unsure at all Xaa locations
  Clone ID: PAT_MRT4530_91598C.1.pep
RRSSVSXRXNXCXCSHXXXVDXDRVXEHLPXEAXXCRGVPVVELGDDPPQVGRRXRAQHLPLVLPEVXXT

SEQ ID NO: 195672 - protein, 79 aa, Oryza sativa
  Clone ID: PAT_MRT4530_91599C.1.pep
GSISIHPAASSLPLSQPTLPFPSPPPLCPLSQPMLPSPGPPCPSPSRPATSLPLHPLFQSAVCFPLASSNTCDRRPPHG

SEQ ID NO: 195673 - protein, 73 aa, Oryza sativa
  Clone ID: PAT_MRT4530_9159C.1.pep
MPREEWLALAPREVKPRKNGQETEGKHMGRPMANATSCERHHSLHPSRITELAPLNHMVEKPLSQLDGKAFLG

SEQ ID NO: 195674 - protein, 80 aa, Oryza sativa
  unsure (1)..(80): unsure at all Xaa locations
  Clone ID: PAT_MRT4530_915C.1.pep
GGKFGFGNGFHLGGGFGGFKIFPXLGAPPPPQTFFLVGPSPKGGFGGMEMAGENGENGGFGFPPCKCGPHFKGCSFCSRK

SEQ ID NO: 195675 - protein, 252 aa, Oryza sativa
  unsure (1)..(252): unsure at all Xaa locations
  Clone ID: PAT_MRT4530_91600C.1.pep
MDSPATPTDFSPLHSLAHYNESCYTKDKAGDLAGDWMVGRDFGGHVHVEDDETNPTVLTLEPNDERRRPATRXTAAAAPVGGGGXAPVVGGNGGRAAGLPLTLAHLLAAAASGGDDEGGGTALPEMAGGGGELGGGGGGATEHGKAWETGQTKEEDXGILFIALDXRDRTPPARNQSGKXKNSVLEXTRKRVRFGXNTQRLAPIFRGKDRGGXEDQNPTNNRTRGGRIXADLEGKGGGSGGMAGLGRATARG

SEQ ID NO: 195676 - protein, 1315 aa, Oryza sativa
  unsure (1)..(1315): unsure at all Xaa locations
  Clone ID: PAT_MRT4530_91601C.1.pep
MWKKNSIFWELPYREFLDVRHAIDVMHLTKNLCVNLLGFLGVYGKSKDTLEARNDLKHMEQRGDLHPEPKEKGSHYLSPASYTLSKAEKESIFEYLESIKVPSGYSTNIKRIISMKEKKFTNLKSHDCHVLMTQLLPVVIRGILPENVRATITKLCAFMNAISQKVIDPDRLEALQNEVVQCLGKFELIFLPSFFNIMTHLLCHLVKEIRILRPVYLHNMFPFERYMGVLKXYVRNRARPEASIAKGYGTEEVIEFCAEFIEDLRPIGVPESRHEGRLRGKGTLGRKXAIMTVDNNLFRKAHFTVLQHSSLVAPYIEEHLALVRARNIGKSDAWITWHHIDTFPTWLRQHLMGNESINQQLAFLARGPSGSIATFQGYEINGYTFYTRAQDMKSTNQNSAVRVDAMGHDATTATYYGAIEDIWELDYGPLKVPLFWCQRVRLTGGGIMIDDSGMTTVDLNKVGYSDEPFVLANDVTQVFFVKDMSSKGKKGRGPNEPKRQVVLPGKRKIVGAEDKTDEDYDQLDRQPPFTVTIDPSILLSNEDTPYSRSDHKEGTIVRRKNTYMADRDEEQILYDTIAEGSSQYWNEEEGNEDPNQYLNEKGNVERDAEGNQQGHVERDVEGNQEEEASGSQPSVGQKRARGQRGAAKKLEGRHIIMEVEEDGRPSAPAVAAKNYVRHSGWVVRDNVPVSTVYWRRTRTRGDHESFVLDSEKEMLWTIMLETFTLPAGTEDKVKRWTLKKMAEQFQSFKGELYKKYILKGQTPNFDTFPKLRDHWDEFVAYKTGEQGQAMMERNKENAAKKKYHHYLGSGGYSVTMPKWEEMEAILIERGIEPATANWPERSKFWYYAHGGTLNPADGSLVFGDQIREAARRLTDAVEASSQGTFRSDRYRDELTLALSRMRSKRDTEAKIADLEFRVSSYELSMQEEVTRKVDERIAAHRSHDPQPTIPPAMMSPSGNRSSCALTGQVGLQSMDAIQTQDESTCPVDDITQQTPSELHIPYKNLSIKVASGMAIPTDPSGTYHCRPIPAGYSKVEVELVEGAYEDLELDYPGGDGXPAPTPPQDPAPTPPRAPTPTPPQAPLPAPSKSRAPPXAPPPAHTRATKKAKVDAAKNKDPGYDCTQEELDAYVASEVKRQFKPRSPEKKIPIDPSVRNFFRGMSASVKEAIKLSDYERTLKKASSGKSKPVPQLGERPNQEIEPLVTGKEMMIEQFITDTGLTTDQLLGVAPIEKTEVKYMYELGKPLVKPELLQSLPTQMYKFHQLYMEMSATGREMIGARIRDTDFLQGDDILWINFRGINELYQLDALDISIMSC

SEQ ID NO: 195677 - protein, 1040 aa, Oryza sativa
  Clone ID: PAT_MRT4530_91602C.1.pep
MPRRRANRRPDAATPPLTNENENDRTNESENEHVNVRCRENVNENENDRTNESENEHVNVRCRENVNENENDRTNESENENDRTKISENEGTNVNENKRTNYLNEEGNVERDAEGNQQGHVERDVEGNQEEEASGSQPSIGQKRARGQRGAAKKLEGRHIITEVEEDGRPSAPAEAAKNYVRHSGWVVRDNVPVSTVYWRRTRARGDHESFVPDSEKEMLWTTMLETFTLPAGTEDKVKRWTLKKMAEQFQSFKGDLYQKYILKGQTPNFDTFPKLRDHWDEFVAYKTGEQGQAMMERNKENAAKKKYHHHLGSGGYSVAMPKWEQMEASLIERGIEPATANWPKRSKFWYYAHGGTLNPADGSLVFGDQIREAARRLTDAVEASSQGTFRPDRDRDELTLALQTPEHPGRTRGKGVIPWKIGFKEDIHTYRSRMRSKRDTEAKIADLEFRVSRYELNMQEEVARKVDERMAAHRSHDPQPTIPPAMVSPSGNRSSCASTGQVGSQSMDAMQTQDESTCPVDDITQRTPCELHIPFKNLSIKVASGMAIPTDPSGTYHCRPIPTGYSKVEVELVEGAYEDLELDYPGGDGSCTVSSSCSASTVSTSGSSIDSSSGSCTDSSSCSYTYSPASSSSGTFKVRGPPAPPPAHIRATKKAKVDAAKNKDPGGMSAPVKEAIKLSDYERTLKKASSGNSKSVPQLREQLNQEIEPLVIGEDMTIEEFIIDTGLTTDQLLGVEPIEKAELKYMYELGKPLVKPELVQSLPTKMYKFHQLYMEMSATGREMIGARIRDPDFLQGDDILWINFKGIYEVYQLDALDVSIMSCWILMVIQRARQRRVFDTGFIDSRRVNVAMLDQYPQETEDNLVHLLKAQHYKTFILLLYNTEFHWVLLLFDLSACTVNVYDSMDKKESTFYKVFELIDRAWYRFRHFVHGNWSERLRRRFKFPCAKQKQGTNLCGYYVCEYCHCLADQIITTRELDFIRMRDNLITHKEFIAAVQEQLMGFINEEILDPKGEFYYDRNTIHRSLASELAATTTTSKS

SEQ ID NO: 195678 - protein, 118 aa, Oryza sativa
  Clone ID: PAT_MRT4530_91603C.1.pep
MLSKLIFDLYYSEGNIRYGQNEVDMFEFKSMTKGIDRVVERSSGGVCNWLMRGFKINPQTHGLIVLYVLVNRQLVGYFWELMPMDCTDTWRRYVEMACERCWPLSILVQVYEKESTLD

SEQ ID NO: 195679 - protein, 1299 aa, Oryza sativa
  Clone ID: PAT_MRT4530_91604C.1.pep
MDRQWMYADRRSKEFIDGMHYFLRVAEANRQRGFICCPCNKCKNQKEYSASRTIHFHLFESGFMPSYNCWTSHGEQGVEMEEDEVEDDNIPDFAQYVGFEGNQTGEEEIAADGNDVADDLGQMLQDAKEDYESEKEAHKLDKMLEDHRTSLYPGCEQGHKKLDTTLEFLQWKAKNGVSDKAFGNLLKLVKNILPEGNKLPETTYEAKKIVCPLGLEVQKIHACPNDCILYRGEEYENLEACPVCKALRYKIRRDDPGEVDGQLTKKRIPAKVMWYFPIIPRVRRLFRNKGNARMMRWHAEERQQDGMLRHPADSSQWRNIDRKFKEFGKDARNIRFGLSTDGMNPFGEMSSGHSTWPVTICIYNLPPGYARRGSVPVWDEDKQEEFNLRALPFVTINDWPALSNLSGQSNKGYKACTHCMDETESTYLKHYRKVVYMGHRRFLAANHSVRKKGKHFEHKADHRVYGKLKDTLEARNDLKHMEQRGDLHPEPKEKGSHYLSPASYTLSKAEKESMFECLESIKVPSGYSMNIKRIISTKEKKFTNLKSHDCHVLMTQLLLVVIRGILPDNVRATITKLCAFMNAISQKVIDPERLEALQNEVVQCLVSFELIFPPSFFNIMTHLLCHLVKEISILGPVYLHNMFPFERYMGVLKKYVRNRARPEASIAKCYGTEEVIEFCVEFIEDLRPIGIPESRHEGRLRGKGTLGRKAIMMVDNNLFRKAHFTVLQHSSLVAPYIEEHLALVRARNIGKSDAWITRHHIDTFPAWLRQHLMGNESINQQLAFLARGPSGSIATFQGYEINEYTFYTRAQDMKSTNQNSVVHVDAMGHDGTTATYYGAIEDIWELDYGPLKVPLFRGMTTVDLNKVGYSDEPFVLANDVTQVFFMKDMSSKGKKGRGPDEPKRHVVLPGKRKIVGVEDKTDEDYDQLDGQPPFTVTIDPSILLSNEDTPYSRSDHKEGTIVRRKKDVVVVVPQAGVMADRDEEHILYDTIAEGSSQYWNEEEGNEDPNQYLNEEGNVERDAEGNQEGHMERDVEGNQEEEASGSQPSAGQKRACGQRGAAKKLEGGHIITEVDEDSRPSAPAEAAKNYVRHSGWVVRDNVLVSMVYWHRTRARGDHESFVPDSEKEMLWTTMLETFTLPAGTEDKVKRWTLKKMAEQFQSFKRDLYQKYILEGQTPNFDTFPKLRDHWDEFVAYKTGQQGQAMMERNKENAAKKKYHHHLGSGGYSIAMSKWEEMEASLLERGIEPATTNWPDRSKFWYYAHGGTLNPADGSLVFSDQIREAARRLTDAVEASSQGTF

SEQ ID NO: 195680 - protein, 827 aa, Oryza sativa
  unsure (1)..(827): unsure at all Xaa locations
  Clone ID: PAT_MRT4530_91605C.1.pep
KALEYKIRRDDPGEVDGQLTKKRIPAKVMWYFPIIPRLRRLFRNKGNARMLRWHAEERQQDGMLRHPADGSQWRNIDRKFKEFGKDARNIRFGLSTDGMNPFEEMSSGHSTWPVTMCIYNLXPWLCMKRKYIMMPIIIQGPKQPGNDIDVYLRPLVEDLKQLWKKEGVPMWDEDKQEFNLRALLFVTINDWPALSNLSGQSNKGYKACTHCMDETESTYLKHCRKVVYMGHRRFLAANHPVRKKGKHFEHKADHRTKPKHHSGKTVFVMVKDLKVVFGKEPGSQPIESEDGHAAMWKKNSIFWELPYWEFLDVRHAIDVMHLTKNLCVNLLGFLGVYGKSKDTLEARNDLKYMEQRSDLHPERKEKGSHYLSPASYTLSKAENESMFECLESIKVPSGYSTNIKRIISTKEKKFTNLKSHDCHVLMTQLLPVVIRGILPDNVRATITKLCAFMNAISQKVIDPDRLEALQNDVVQCLVSFELIFPPSFFNIMTHLLCHLVKEISILGPVYLHNMFPFERYMGVLKKYVRNRARPEASIAKGYGTEEVIEFCVEFIEDLRPIGVPESRHEGRLRGKGTLGRKAIMTSDAWITRHHIDTFPAWLQQHLMGNETINQQLAFLARGPSGSIATFQGYEINGYTFYTRAQDTKSTNQNSVVRIDAMGHDGTTGTYYGAIEDIWELDYGPLKVPLFRCQWVRLTGGGVMIDDSGMTTVDLNKVGYSDEPFVLANDVTQVFYVKDMSSKGKKGKGPDEPKRYVVLQGKRKIIGVEDKTDEDYDQLDGQPPFTVTIDLSILLSNEDTPYSRSDHKEGTIVRRKYVRSTVTADVLT

SEQ ID NO: 195681 - protein, 2134 aa, Oryza sativa
  unsure (1)..(2134): unsure at all Xaa locations
  Clone ID: PAT_MRT4530_91606C.1.pep
MDQQWMYADRRSKEFIDDVHYFLRVAEANRQRGFICCPCNKCKNQKEYSASRNIHFHLFESGFMPSYNCWTSHGEQGVEMEEDEVEDDNIPDFAQYVGFEGNQTSEEERDADGNDVADDLDQMLQDAKEDCESEKGAHKLDKMLEDHRTSLYPGCEQGHKKLDTTLEFLQWKAKNGISDKTFGDLLKLVKNILSEGNKLLETTYEAKKIVCPLGLEVQKIHACPNNCILYRGEXLEACPVCKALRSKIRRDDPGEVDGQLTKKRIPAKVMWYFPIIPRLRRVFRNKGNARMMRWHTEEHQQDGMLRHPADGLQWRNIDRKFKDFGNDARNIRFGLSMDGMNPFGEMXSGHSTWPVTMCIYNXPPWLCMKRKYIMMPIIIQGPKQPGNDIDVYLRPLVEDLKLLWKKEDVPVWDEDKQEEFNLRALLFVAINDWPALSNVSGQSNKGYKACTHCMDETESTYLKHCRKVVYMGHRRFLAANHPVRKKGKHFXHKADHRTRPKHRSGKTVFAMVKDLKIVFVKGPGSQPIESEDGHAAMXKKNSIFWELPYWEFLDVRHAIDVMHLTKNLCVNLLGFLGVYGKSKDTLEARNNLKHMEQRDDLHLEPKEKGSNYLSPASYTLSKAEKESTFECLESIKVPYGYSTXIKRIISTKEKQFTNLKSHDCHVLMTQLLPVVIRGILPNNVRTTITKLCAFMNAISQKVIDPDRLEALQNDVVQCLVSFELIFPPSFFNIMTHLLCHLVKEISILGPVYLHNMFILESYMGVLKKYVCNRARPEASIAKGYGTEEVIEFCVEFIEDLRPIGIPESRIEGRLRRKGTLGRKAIMTIDNNLFRKTHFTVLQQSSLVAPYIEEHLALVRARNIGKSDAWITRHHNDTFPAWLRQHLMGNESINXQLAFLARGPSGSIATFQGYEINGYTFYTRAQDIKSTNQNSAVRVDAMGHNGTTGMYYGAIEDIWELDYGPLKVPLFRCQWVRLTGGGVMVDDSGMTTVDLNKVGYSDEPFVLANDVTQVFYVKDMSSKGKKGRGPDEPKRHVVLPARPRLLHQHLEVFARSISLGXPSPPLPRASPCRXTVVSRHRLALVVVVAASASSAAAAASRCFLYEQMADRNEEQILYDTIAEGSSQYWNKEEGNEDPNQYLNEEGNVERDAEGNQEGHVERDVEGNQEEEASGSQPSAGQKRARGQRGATKKLEGWHIITEVDEDGRPSAPVEAAKNYVRHSGWVVRDNVNVSTVYWHRXRARGDHESFVPDSEKEMMWTTMLETFTLPAGTEDKVKRWTLKKMAEQFQSFKRDLYQKYILKGQTPNFDTFPKLRDHWDEFVAYKTGEQGQAMMERNKENAAKKKYHHHLGSGGYSVAMPKWEEIEASLLERGIESATANWPERSKFWYYTHGGTLNPADGSLVFGDQIREAARRLTDTVEASSQGMFRPDKGKDELSLALQTPEYPGRTRGKGVIPWKIGFKEDIHTYRSRMGSKRDTEAKIADLEFRVSNYELSMQEEVARKGDERMTTHRSNDPXPTIPPAMVSPSGNCSSCASTGQVGSQSMDVMQTQDETTCPVDDITQRTPCELHIPFRNLSIKVASGMAIPTDPSGTYHCRPIPARYSKVEVELVEGAYEDLELDYPRGDGETHLRDTSHAIILWRKRYIILPRRQAASRAPSPPALPSPPHAPAPSPPHAPAPSPPQAPAPTPPQAPAPTPPXAPLPAPSKSRAPQAPPPAPTRATKKAKVDAAKNKDPGYDCMQEELDAYMASEVRRQFKPRSPEKKIPIDPSVRNFFRGMSAPAKEAIKLSDYERTLKKASSRKSKPVPQLGEQPNQEIEPLVTGEDFGIQDFINDTGLTMDQLLEDAPIEKAEVKYMYELGKPLVKPELLQSLPTQMYKFHQLYMEMSATGREMIGARIRDKDFLQGDDILWINFKGIYELYQLDALDVSIMSCWILMEIQRARRQGVFDTGFIDPRKVNVAMLDQYPQATEDNLVHLLKAQHYKTFILLPYNTEFHYVLLLFDLEACTVNVYDSMDKKESTFDKVFELIDRAWYRFRHLVRGKWRERLRRKFKFPFIGMRDNLITHKEFIAAVQEQLMGFINEQILDPKSEFYYDGNTIHKSFWPGGHGAWRRGAHAAVARDGDRRRRAASW

SEQ ID NO: 195682 - protein, 1635 aa, Oryza sativa
  unsure (1)..(1635): unsure at all Xaa locations
  Clone ID: PAT_MRT4530_91607C.1.pep
MDRQWMYADRQSKEFIDGVHYFLRVAEAYRQRGFICCPCNKCKNQKEYSASRTIHFHLFESGFMPSYKCWTSHGEQGVEMEEDEVEDDNIPDFAQYVGFEGNQTGEEKIAADGNDVADDLDQMLQDAREDCESEKEAHKLDKMLEDHRTSLYPGCEQGHKKLDTTLEFLQWKAKNGVSDKAFGDLLKLVKNILPGGNKLPETTYEAKKIVCPLGLEVHKIHACPNDCILYRGEEYENLEACPVCKALRYKIRRDDPGEVDGQLTKKRIPAKVMWYFPIIPRLRRLFRNKGNARMMRWHAEERQQDGMLRHPADGSQWRNIDRKFKEFGKDARNIRFGPKQPGNDIDVYLRPLVEDLKLLWKKEGVPVWDEDKHEEFNLRALLFITINDWPALSNLSGQSNKGYKACTHCMDETESTYLKHCRKVVYMGHRRFLAANHPVRKKGKHFEHKADHRTKPKHRSGKTVFAMVKDLKVVFGKGPGSQPIESEDGHAAMWKKNFIFWELPYWEFLDVRHAIDVMHLTKNLCVNLLGFLGVYGKSKDTLEARNDLKHMEQRGDLHPEPKEKGSHYLSPASYTLSKAEKESIFECLESIKVPSGYFTNTRRIISTKEKNFTNLKSHDCHVLMTQLLPVVIRGNLPNNVRATITKLCAFMNAISQKVIDPDRLEALQNEVVQCLVSFELIFPPSFLNIMTHLLCHLVKEISILGPVYLHNMFLFERYMGVLKKYVRNRARLEASIAKGYGTEEVIEFCVEFIEDLRPIGVPESRHEGRLRGKGTLGRKAIMTVDNNLFRKAHFTVLQHFSLVAPYIEEHLALVRARNIGKSDAWITRHHIDTFPAWLRQHLMGNESINQQLAFLARGPSGSIATFQGYEIDGYTFYTRAQDMKSTNQNSAVRVDAMGHDGTTATYYGAIEDIWELDYGPLKVPLFRCQWVRLTSGGVMIDDSGMTTVDLNKVGYSDEPFVLANDVTKGKKGRGPDEPKRQVVLPGKRKIVGVDDKTDEHYDQLDEQPPFMVTIDPSILLSNEDTPYSRSDHKEGTIVRRKNTYMADRDEEQILYDTIAEGSSQYWNEEEGNEDPNQYLNEEGNVERDAEGNHQGHVERDVEGNQEEEASGSQPSVGQKRARGQRGAAKKLEGRHIITEVEEDGRPSAPAEAAKNYVRHSGWVVRDNVPVSTVYWRRTRARGDHESFVPDSEKEMLWTTMLETFTLPAGTEDKVKRWTLKKMAEQFQSFKGDLYQKYILKGQTPNFDTFPKLRDHWDEFVAYKTGEQGQAMMERNKENAPKKKYHHHLGSGGYSVAMPKWEEMEASLLERGIEPATANWPERSKFWYYAYGGTLNLADGSLVFGDQIREAARRLTDAVEASSQGTFRPDRDRDELTLALQTPEHPGRTRGKWVIPWKIGFKEDIHTYRSQMRSKRDTEAKIADLEFRVSSYELSMQEEVAGKVDECMAAHQSHDPQPTIPPAMVSPSGNRSSCASTGQVGSQSMDAMQTQDESTCPVDDITQRTPCELHIPFKNLSIKVASGMAIPTNPSGTYHCRPSPAGYSKVEVELVEGAYEDLELDYPGGDGXPAPSPPHAPPAPSPPQAPAPTPPQDPAPTPPRAPTPTPPQAPLPTPSKSRAPPAPPPAHARATKKAKV

SEQ ID NO: 195683 - protein, 895 aa, Oryza sativa
  unsure (1)..(895): unsure at all Xaa locations
  Clone ID: PAT_MRT4530_91608C.1.pep
MADRDEEQILYDTIAEGSSQYWNEEEGNEDPNQYLNEEGNVERDAEGNQQGHVERDVEGNQEEEASGSQPSVGQKRACGQRGAAKKLEGRHIITEVEEDGRPSAPAEAAKNYVRHSGWVVRDNVPVSRVYWRRTRARGDHESFVPDSEKEMLWTTMLETFTLPAGTEDKVKRWTLKKMAEQFQSFKGDLYQKYILKGQTPNFDTFPKLRDHWDEFVAYKTGEQGQAMMERNKENAAKKKYHHHLGSGGYSVAMPKWEEMEASLIERGIEPATANWPERSKFWYYAHGGTLNPADGSLIGFKEDIHTYRSRMRSKRDTEAKIADLEFRVSSYELNMQEEVARKVDERMAAHRSHDPQPTIPPAMVSPSGNRSSCASTGQVASGMAIPTDPSGTYHCRPIPAGYSKVEVDLVEGAYEDLELDYPGGDGXYIILPGRQAASRAPSPPAPPSPPQDPAPSPPHAPPAPTPPQDPAPTPPRAPTPTPPQAPLPAPSKSRAPPXAPSPAHTRATKKAKVDAAKNKDPGYDCTQEELDAYVASEVKRQFKPRSPEKKIPIDPSVRNFFRGMSASVKEAIKLSDYERTLKKASSGKSKPVPQLGEQPNQEIEPLVTGKEMTIEQFITDTGLTTDQLLGVAPIEKAEVKYMYELGKPLVKPELLQSLPTQMYKFHQLYMEMSATGEEEGGATPATTVAAVETTGEKEGSSGSERPGRQEKEAASSPVTNPRARPSHTSAASTTTSSSATKAAIVVVFIHPQTVVTPRWVLSFSHPFPSGADYRAALMCPAIAQATPTPLLAAPSNWRPDLLLLAPLPSLPPLLGAAPIPPLYTAPGNAAELPRRAASLPLRATALPCSPPSMLPSSPPPLAITCVAGALPLLLAHHQLEFPGDFVRVNERVAFD

SEQ ID NO: 195684 - protein, 140 aa, Oryza sativa
  Clone ID: PAT_MRT4530_91609C.1.pep
RNAGFHYQSLVWGKTGFIRKNAKKRGHTQGRRGNPPQGRGEKTPRQVFKKPTHKKNGPEKRRNNVKNIPGGAGKRGEEGGRFLKEGRLGALKKKSSRTPFGGTLFLIMPGGGPPQGGVISRGPRKGDQGIQGVQGGGGGG

SEQ ID NO: 195685 - protein, 290 aa, Oryza sativa
  Clone ID: PAT_MRT4530_9160C.1.pep
MAAIASDDEAAEADGCGTIIRLPRNTSLPTCSPPTPPAGNGACGGCASGRTRAPRHCRPSELAGRGRPREVRMAREGKEWGAVVVMSPSPPRHGARHGGRVNAASFSGGIVAGVAPTPPRFLTPATGFQLRSPSGSRYCQEPVVTHDFLNTRCRRRPNYGEVEEMIMKAAKMGQMSSQIGVVLRHQHGIPLVKSIASSKILHILKAHGLAPKILEDLYFLIKKAVAIRKHLERNRKDKDSSFRLILVESRIHRLVRYYKRTKKLPPTLRSWIIFLEFSTVFSCSLYFYKA

SEQ ID NO: 195686 - protein, 873 aa, Oryza sativa
  Clone ID: PAT_MRT4530_91610C.1.pep
MADRDEEKILYDTIAEGSSQYWNEEEGNEDPNQYLNEEGNVERDAEENQEGHVERDVEGNQEEEASGSQPSVGQKRARGQRGAKKKLEEAAKNYVRHSGWVVRDNVPVSTVYWRRTRARGDHESFVPDSKKEMLWTTMLETFTLPAGTEDKKYILKGKTQNFDTFPKLRDLWDEFVAYKTGVQGQAMMERIKEHAAKKKYHHHLGSGGYSVAMPKWEEMEASLLERGIEPATANWLERSKFLYYAHGGTLNPADGSLGTFRPDRERDELSLALQTLEHPGRTQGKGVIPWKIGFKEDIHTYRSRMRRKRDTKAKIADLEFRVSSYERSMQKEVTRKVDERMAAHRSHDPQPTIPPAMVASGMAIPMDPSGTYHCRPIPAGYSKVEVELVEGAYEDLELDYPGGDGETHLRDTSHAIILWCKRYIILPGRQAASRAPSPPAPPSPPQAPAPSPPHAPAPSPPQAPTPTPPQAPTPTPLQAPLLAPSKSRAPQAPPPAPTRATKKAKVDGEVRRQFKPRSLEKKIPIDASVRNFFRGMSAPAKEAIKLSDYERTLKKASSGKSKPVPQLGEQPNQEIEPLVTGEDFGIQDFINDTGLTTYQLLRDAPIENAEVKYMYELGKPLVKPELLQSLPTQMYKFHQLYMEMSATGREMIGSRIRDTDFLQGDDILWINFKGIYELYQLDALDVSIMSCWILMEIQRARRRGVFDTGFIDPRKVNVAMLDQYPQATEDNLVHLLKAQHYKTFILLPYNTEFHWVLLLFDLEACTVNVYDSMDKKESMFDKVFELIDRAWYRFRHLVRGKWRERLRRKFKFPFIRMRDNLITHKEFIAAVHEQLMGFINEQILDPKGEFYYDGNTIHRSLASEISTTTTSKS

SEQ ID NO: 195687 - protein, 95 aa, Oryza sativa
  Clone ID: PAT_MRT4530_91611C.1.pep
SACGFIIGSEQIPVDPSFFNGYQGNQAGTMRQIDMTAIGYCIAQSSQALPVIAETTSGGNNLTGLMNMDENVSDDSVDAFALVNSWINSSPPSFK

SEQ ID NO: 195688 - protein, 143 aa, Oryza sativa
  Clone ID: PAT_MRT4530_91612C.1.pep
PAGVVKVADFGVARFQDQGGNMTAETGTYRWMAPEVINHQPYDNKADVFSFAIVLWELITSKIPYNTMTPLQAAVGVRQGLRPGLPENAHPQLLDLMRRCWEGIPSNRPPFSDILAELEDLLARVQGTSGEASQRQDDSGAKD

SEQ ID NO: 195689 - protein, 2109 aa, Oryza sativa
  unsure (1)..(2109): unsure at all Xaa locations
  Clone ID: PAT_MRT4530_91613C.1.pep
MDRQWMYADRRSKEFIDGMHCFLRVAKANRQRSFICCPCNKCKNQKKYSASRTIHFHLFESGFMPSYNCXTSHKEQGVEMEXNEVEDDNIPDFAQYIGFEGNQTGEEERDADGNDVADDLGQMLQDAKEDCESEKGAHKLDKMLEDHRTSLYSGCEQGHKKLDTTLEFLQWKAKNGVSDKAFGDLLKLVKNILPEGYKLPETTYEAKKIVCPLGLEVQKIHACPNDCFLYRGEEYENLEACPVCKALRYKIRRDDPGEVDGQLTKKRISAKVMWYFPIIPRLRRLFRNKGNARMMRWHAEERQQDGMLRHPADGSQWRNIDRKFKEFGKDARNIRFGLSMDGMNPFGEMSSDHSTWPVTMCIYNLXPWLCMKRKYIMMPIIIQGPKQPGYNIDVYLRPLVEDLKLLWKKEGVPVWDEDKQEEFNLQALLFVTINDWPALSNLSGQSNKGYKACTHCMDETESTYLKHYRKVVYMGHRRFLTANHPVRKKGKHFEHKVDHRTKPKHRSGKTVFAMVKDLKVVFGKGPESQPIESEDGHTAMWKKNSIFWELPYWEFLDVHHAIDVMHLTKNLCVNLLGFLGVYGKSKDTLEARNDLKHMEQRGDLHPEPKEKGSHYLSPASYTLSKAEKESMFECLESIKVLSGYSTNIKRIISTKEKKFTNLKSHDCHVLMTQLLPVVIRGILPDNVQATITKLCAFMNAISQKVIDPDRLEAVQNDLVQCLVSFKLIFPPSFFNIMTHLLCHLVKEISILGSVYIHNMFRFERYMGVLKKYXNRARPEASIAKGYGTEEVIEFCVEFTEDLRPIRVPESRHEGRLRGKGTLRRKAIMKVDNNLFRKAHFTVLQQSSLVAPYIEEHLALVRARNIGKSDAWITRHHIDTFPAWLQQYLMGNESINQQLAFLARGPSGSIATFQGYEINGYTFYTRAQDMKSTNQNSDVCVDAMGHDGTTGTYYGAIEDIXELDYGPLKVSLFWYQWVRLTSGGVMIDDSGMTTVDLNKVGYSDEPFILANDVMQVFYVKDMSSKGKKGRGPDEPKRHVILPARPRLLHQHLEVFARSISLXSPSPQLRRASLRRXAAVSRRRLALVVVAASSAAASLSSAIRCFLYEQMADRDEEQILYNTIAEGSSQYWNEEEGNEDPNQYLNEEGNVERDAEGNQEGHVERDVEGNXEEEVSGSQPPVGQRRARGQRGAAKKLEGRHIITEMDEDGRPSAPAEAAKNYIRHSGWVVWDNVPVSTVYWRRTRARGDHESFVPDSEKEMLWTTMLETFTLPAGTEDKVKKWTLKKMAQQFQSFKGDVYQKYIMKGQTPNFDTFSKLRDHXDEFVAYKTGEQGQAMMERNKENAAKKKYHHHLGSGSYSVVMPKWEEMEASLLERGIEPATANWPERSKFWYYAHGGTLNPADGSLVFGDQIREAARRLTDAVEASSQGTFRPDREKDELSLALQTXYPGRTRGKGVIPWKIGFKEDIHTYRSRIRSKRDTEAKIADLEFRVSSYELSMQEEVARKVDERMAAHRSHDPQPTIPSAMVSPSGNRSSCASTGQVGSQSMDAMQTQDESTCPVDDITQQTPCELYIPFKNLSIKVASGMAIPTDLSGTYHCRPIPAGYSKVELELVEGAYEDLKLDYPRGDGETHLRDTSHAIILWRKRYIILPGRQAASRAPSPPAPPSPPQAPAPTPPQAPAPTPPQVPLPAPSKSRASQAPPPAPTRATKKAKVDAAKNKDPGYDCTQEELDAYVASEVKRQFKPRSLVKKIPLDPSVRNFFRGMSAPAKEAIKLSDYERTLKKASSGXSKPVPQLGEQPNQEIELLVTGEDFGIQEFINDTGLTTDQLLGDAPIEKAEVKYIYELGKPLVKPELLQSLPTQMYKFHQLYMEMSATGREMIGARIRDTDFLQGYDILWINFKGIYELYXLDALDVSIMSCWILMEIQRARRRGVFDTGFIDPRKVKVAMLDEYPQATEDNLVHLLKAXHYKTFILLPYNTEFHWVLLHFDLEACTVNVYDSMDKKESTFDKVFELIDRAWYRFRHLVRGNWRERLRRKFKFPFIRMRDNLITHKEFIAVVQEQLMGFINEQILNPKGEFYXDGNTIHRQWRPRSGRHQQQGLPGGGARR

SEQ ID NO: 195690 - protein, 640 aa, Oryza sativa
  Clone ID: PAT_MRT4530_91614C.1.pep
MATTVSSQFSICFCVLLLVHDSMAQLFYPRTNPWHSPHQGSFSEYRFDRLQAFESLQKVRSEGGVTEYVDERNELFQHTGTFVIRRIIQPQGLLVPRYTNTLSMVYIIQGRGTMGLTFLGCPATYQQQFQQFSPQWQSESQKFRGEHQKIYQFRQGDIIPLPAGVAHWFYNDAANNNRVQQVYGSSIEQHPRQNIFNRIGVEQLSEALGINTVAAKRPQSQNDQRGEIIVDGLYPTAVFKGRKVRLIPRNTREWNKRAWDKDFYTGSGPQDLPEDMVKSSTKKVVIDKPSMARDIPTSLCDLPQAVRDGIVNEVAATKDVVEMEIGSSTAEKVANMASQPGSSGTVGSKKRKWGFGVDPTGGVLTKGTHSLTSSPDNAPTSGRLKPMRFMSKSKAKAAPTISNQNMGKHDEASSQPATHIIVSPSTAPLPSVAAVVLPPPGTAFNHLASACQEVLFSAKAASTEVNRLIAELTATNEKLSKLKEELTTANTNNESLRLLIKENSEMHQEGQKALAEEKSKREALYAGLKENFFAFNEVAKQLGRGVQPPPHFDDVSLLASIGELVGEMEKVPADIIQKADWDTRIALKTGACHTLACISSKHPELDLNKEVHEGVAEEEREKLMDQLEKTGEAVASFYLD

SEQ ID NO: 195691 - protein, 359 aa, Oryza sativa
  Clone ID: PAT_MRT4530_91615C.1.pep
RLDVLGSILRNKGSWSGSSHSSAAERTLPFQVKGGEWEIDKRLLKMGGMIASGSCGDLYHGTYLGEDVAVKILRSEHLNKNVWNEFTQEVYILREVQHTNVVRFIGACTKPPQFCIITEYMSGGSLYDFVHKQHNVLDLPTLLKFAVDVCRGMCYLHQRGIIHRDLKSANLLMDKDHVVKVADFGVARFQDQGGNMTAETGTYRWMAPEHFFSPCSLGERMNWDKEEIVINHQPYDNKADVFSFAIVLWELITSKIPYNTMTPLQAAVGVRQGLRPGLPENAHPQLLDLMRRCWEGIPSNRPPFSDILAELEDLLARVQEQQEHSNQMKEHNSSSNLKLSNAGMLGSNYIQDGNMDLDF

SEQ ID NO: 195692 - protein, 246 aa, Oryza sativa
  Clone ID: PAT_MRT4530_91616C.1.pep
MGANGHPPPASAAAQNGSHSSGGGGGGDGGGGGANPSPGGTVAALRHDPGLAREWSPEEQSTLDELLVKYASDAPVIRYAKIAMKLPDKTVRDVALRCRWMNKKESGKRKKEDHSSSKKSKDKKEKVSDSSLKPPVHIAGRPNVPPYPLPALPIDDDEISSKAIGGPTGEILETNAQVLSQISTNLSTMQIQDNISLLCQTRDNILRVLKEINDAPDIMKQMPPLPVKINEELVNSMLPRPTVPMQ

SEQ ID NO: 195693 - protein, 69 aa, Oryza sativa
  Clone ID: PAT_MRT4530_91617C.1.pep
RHPYPCDSLHIHIYITHHHPSGVVAPIITHFGAPHPGRTPLTHPGAPTASQGTAHHSLWGDPPISICVP

SEQ ID NO: 195694 - protein, 71 aa, Oryza sativa
  Clone ID: PAT_MRT4530_91618C.1.pep
SGTNTWGMRQKSCTTCQTTTYYLLWMKHITKGWVSVDSGHVWTIVPRLQEVYTHAEDGHIRTQFDTSRRLG

SEQ ID NO: 195695 - protein, 126 aa, Oryza sativa
  Clone ID: PAT_MRT4530_91619C.1.pep
NPKSEVATAESPNSCVQFLACLVFFSPHSDRSRCCVRFFELWSMASIVLLLSELLGGESTSVMAADWYMSGHSLREFRPVAAAPAAAAAVAKCERPAAEAAGEKKKEESFEDLAAVSRIAVDVMWP

SEQ ID NO: 195696 - protein, 82 aa, Oryza sativa
  Clone ID: PAT_MRT4530_9161C.1.pep
MPREEWLALAPREVKPRKNGPRDRRKAHGAPHGKCYGTLARIHLRSCERHHSLHPSRITELAPLNHMAEKPLSQLDGKAFLG

SEQ ID NO: 195697 - protein, 52 aa, Oryza sativa
  Clone ID: PAT_MRT4530_91620C.1.pep
MTNEAELWWLARAAIPALVVPVVGTGTISSSVSPLLSFWRAPNSGGRAHSGK

SEQ ID NO: 195698 - protein, 245 aa, Oryza sativa
  Clone ID: PAT_MRT4530_91621C.1.pep
MGSLGGEEGARPAAAAEGARRPRFLCLHGFRTSGEIMRKQVVGKWPADVTARLDLVFADAPFPAEGKSDVEGIFDPPYYEWFQFDKNFTEYRNFDECLNYIEELMIKEGPFDGLMGFSQGSILSGALPGLQEQGLALTRVPKIKYLIIIGGAKFQSPTVAEKAYANNIKCPSVHFLGDTDFLKTHGEKLIESYVDPFIIRHPKGHTVPRLDEKSLEIMLRFLDKIEKETALEHSSTDVDEKEMYL

SEQ ID NO: 195699 - protein, 74 aa, Oryza sativa
  Clone ID: PAT_MRT4530_91622C.1.pep
IWRAVTLPPFHNLLPGFFLNHPVPHRVAPFCLGITFFFFGAIWGFFCLRWWPFVVCSPRPVASPLFPPACYFPH

SEQ ID NO: 195700 - protein, 116 aa, Oryza sativa
  Clone ID: PAT_MRT4530_91623C.1.pep
IEPGTTVTVKWRGKPVLIRRRTEDDIAPGNSVDVGSLRHPQQDAERVKNPEWLVVIGVCTHLGCIPLPNAGDFGGWFCPCHGSHYDISGRIRKGPAPFNLEVPTYSFLEENKLLIG

SEQ ID NO: 195701 - protein, 101 aa, Oryza sativa
  unsure (1)..(101): unsure at all Xaa locations
  Clone ID: PAT_MRT4530_91624C.1.pep
MRQACFVYLSLGGVXLNGPIALLSGLNPRPLSLVAHFFAVAIYGVGRLMLPLPSPKRMWIGVRLISSACGIIFPIIKAEGVRHMFFPATVPAYYRAPRPME

SEQ ID NO: 195702 - protein, 600 aa, Oryza sativa
  Clone ID: PAT_MRT4530_91625C.1.pep
MAVASEAACRRAASCFFEGLVMRMHQYGKLRGHDGCVNTVSFNPAGNLLVSGSDDMDIILWDWLAKTQRLIYPSGHQENVFHARVMPFTDDSAIVTVAADGQVRVGQLNEGGEVTTKQIGVHDDRAHKLAIEPGSPYIFYSCGEDGLVQHFDLRNDSPMKLFSCYSFSNSRRRVRLNTIAIDPWNPNYLSIGGSDEYVRVYDLRRIQLGASNDMNQPVDTFCPKHLMGGKVHITGIAYSYAREILVSYNDEHIYLFQNNMGLGPNPESAQAEFLDRLEQPQAYTGHRNFRTVKGVSFFGPNDEYVLSGSDCGNVFVWRKKGGELLRMMHGDKSVVNCIEPHPHFPFLATSGIDKTVKIWTPSANKVMSLPKNAKQIIASNKRAREIDASRPELTLSSDLIMHVLRLQRRQSELYREHEPATADLASDDDESFFAGFDDANRNGLANDATRGTQILMIRAGKIKRLGLKSVTTYLDSVVNQECYWVFSSHVGFVRSRIQSLKDRESKMDNAKCHLQDHLQGFADAVLGNGFGFPEKTHDHLPRSGYIPAKINTRRLLATCQLPQRRGLPDGIQQGLAKAYTAFWVGTAVGEIRCRLAAWIT

SEQ ID NO: 195703 - protein, 204 aa, Oryza sativa
  unsure (1)..(204): unsure at all Xaa locations
  Clone ID: PAT_MRT4530_91626C.1.pep
MAVASEAACRRAASCFFEVGRQEIGSSTPRASSRRISGSEGLVMRMHQYGKLRGHDGCVNTVSFNPAGNLLVSGSDDMDIILWDWLAKTQRLIYPSGHQENVFHARVMPFTDDSAIVTVAADGQVRVGQLNEGGEVTTKQIGVHDDRAHKLAIEPGSPYIFYSCGEDGLVQHFDLRNDSPMXALSCYSFLNSRRRVRLNTIAID

SEQ ID NO: 195704 - protein, 86 aa, Oryza sativa
  unsure (1)..(86): unsure at all Xaa locations
  Clone ID: PAT_MRT4530_91627C.1.pep
LGGGSRRSTPGSIPLGENHVGLRAASSLXLEGGSHRSTTGSIPXREEPRGFEGGLLPXLGGGSHRSIPGSIPLWRSHVGLRVASSL

SEQ ID NO: 195705 - protein, 70 aa, Oryza sativa
  Clone ID: PAT_MRT4530_91628C.1.pep
MAVCFEGTVVTNIIFRAFFTYLELQMHPGKATPVFNIITLLGVETRPRGMYTRGNGGDKIGDGQKWPRQA

SEQ ID NO: 195706 - protein, 86 aa, Oryza sativa
  Clone ID: PAT_MRT4530_91629C.1.pep
KKPSPEGCPSISFKTNANPRVTPPPGKNPKFRPTPGNVIPKPSPQSRDQAPTLKKKRGKKLGPPPPKKQQKTHPGFLNESENEPLK

SEQ ID NO: 195707 - protein, 281 aa, Oryza sativa
  unsure (1)..(281): unsure at all Xaa locations
  Clone ID: PAT_MRT4530_9162C.1.pep
GGAPSAPQDAPRGISVNPRAPGNARPLPRPGGTPPPFPLXPPPPTPLFFSPLTPFFFFPPPQPSPISHPPSPSPLPPTPLFNPPSPPLLSPPPPIISHFPSSPFPSPPPXSLFPPPPLLPPPPSIFSLSPPPPSILSPFFPPHLFSPPSAPPFPIHSXPLPPTPPTHPPHVSFFFPPSLYPPPLFSLPFPSVHPFSPFFTYSNSLRPPPCYTXPSSFLSPFLLYHLYPILPPHSPLTPPSSPTSSLLTSLSSLFSPLPPSLQHSLPSITGYPAFPPSLTYR

SEQ ID NO: 195708 - protein, 121 aa, Oryza sativa
  unsure (1)..(121): unsure at all Xaa locations
  Clone ID: PAT_MRT4530_91630C.1.pep
MDGHVDSFNGVSRRFKLSITNLVDWYLAQIAKSPFLPLSKFIALTDMVPLSTRSVLYGLSRAIYMYLKEHPXLSYVENKRLFGLINSNHLSSDSTMYPVQINRLPLHAVVQVLFRPSNQQS

SEQ ID NO: 195709 - protein, 547 aa, Oryza sativa
  Clone ID: PAT_MRT4530_91631C.1.pep
MDLGKTITDTAAMKELQVEGLLLGREVLERDEGSTEPNPPLGRMGRISGCCGFCLRDHMRARYIPFQCHLSRSKWRQRWFFLEIKNPNPVLVVPEDQPERSSDWTSKPPLTLSLETFVGISDDLRERGLTGYDVAQDFVSRRIQPLQARAHPAFDYTGAKDVTRISLRGLNNNMVAHQVGQVLVSSPSTAAEIPILVCNLEDADKAVAINALPLTDAIGPLVDHQASASLKSNVSEETTAAIALAENSGTAKKRKWAVTSCGGKTRRQASGSDGGSDLPPTPKKRLLKGGVSRKASPPSSAQSGDQVATSDVPTVVATRTSSAAAVSPRIGTIAPPLPPSTPAAPSSWSERQFRGLREKSSELEDHLTTIRESLRKDFTRLHQVAGELGIYSSIPQHPDETSLTFGLQDLVKAMEAAPAKHAAKVAEETCTRVRTGACHVLACVKIAHPEVDLEQAMAKGGADDTREDVMSEVADLGELILSFYEECLDVEDVQQSGRPDSPEFAPVASPQASSPDVNENAMIAVNAAEVVTSPGPSPTTLLRENLG

SEQ ID NO: 195710 - protein, 1981 aa, Oryza sativa
  Clone ID: PAT_MRT4530_91632C.1.pep
MDRQWMYADRRSKEFIDGVHYFLRVAEANRQRGFICCPCNKCKNQKEYSASRTIHFHLFESGFMPSYNCWTSHGEQGIEMEEDEVEDDNIPDFAQYVGFEGNQTGEEEIAADGNDVADDLGQMLQDARENCESEKEAHKLDKMLEDHRTSLYPGCEQGHKNDKAFGDLLKLVKNILPGGNKLPETTYEAKKIVCPLGLEVHKIHACPNDCILYRGEEYENIEACPVCKALRYKIRRDDPGEVDGQLTKKRIPAKVMWYFPIIPRLRRLFRNKGNARMLRWHAEERQQDGMLRHPADGSQWRNIDRKFKEFGKDARNIRFGPKQPGNDIDVYLRPLVDDLKQLWKKEGVPVWDEDKQEEFNLRALLFVTINDWPALSNLSGQSNKGYKACTHCMDETESTYLKHCRKVVYMGHRRFLAANHPVRKKGKHFEHKADHRTKPKHRSGKTVFAMVKDLKVVFGKGPASQHIESEDGHAAMWKKNSIFWELPYWEFLDVRHAIDVMQLTKNLCVNLLGFLGVYGKSKDTLEARNDLKHMEQCGDLHLEPKEKGSHYLSPASYTLSKTEKESMFECLESIKVPSGYSTNIKRIISTKKKKFTNLKSHDCHVLMTQLLPVVIRGILPDNVQATITKLCAFMNAISQKVINPDILEALQNEVVQCLVSFELIFPPSFFNIMTHLLCHLVKEIRILGPVYLHNMFPFESYMGVLKKYVRNRAHPEASIAKGYGTEEVIEFCVEFIEDLRPIGVPESRHEGRLWGKGTLGRKAIMTVDNNLFRKAHFTVLQHSSLVAPYIEEHLALVRARNIGKSDAWITRHHIDTFPTWLRQHLMGNESINQQLAFLARGPSGSIATFQGYEINGYAFYTRAQDMKSTNQNSAVRVDAMGHDGTTATYYGAIEDIWELDYGPLKVPLFRCQWVRLTGGGVMIDDSGMTTVDLNKVGYSDEPFVLANDITQVFFVKDMSSKGNKGRGPDETKRQVVLPGKRKIVGVEDKTDEDYDQLDGQPPFTVTIDPSILLSNEDTPYSRSDHKEGTIVRRKNIYYLNEEGNVERDAEGNQQGHVERDVEGNQEEEASGSQPSVGQKRARGQRGAAKKLEGRHIITEVEEDGRPSAPAEAAKNYVRHSDSEKEMLWTTMLETFTLPAGTEDKVKRWTLKKMAEQFQSFKGELYKKYILKGQTPNFDTFPKLRDHWDEFVAYKTGEQGQVMMERNKENAAKKKYHHHLGSGGYSVAMPKWEELEASLIERVEASSQGTFQPDRDRDELTLALQTPEHPGRTRGKGVIPWKIGFKEDIHTYRSRMRSKRDTEAKIADLEFWVSSYELSMQEEVARKVDERIAAHRSHDPQPTIPPAMVSPSGNRSSCASTGQVASGMAIPTDPSGTYHCRPIPAGYSKVEVELVEGAYEDLELDYPGGDAPTPPQDPAPTPPRAPTPTPPQAPLPAPSKSRAAPAPPPAHTRATKKAKVDAAKNKDPGYDCTQEELDAYVASEVKRQFKPRSPEKKIPIDPSVRNFFRGMSASVKEAIKLSNYERTLKKASSGKSKPVPQLGEQPNQEIEPLVTGKEMTIEQFITDTGLTTDQLLGVAPIEKAEVKYMYELGKPLVKPELLQSLPTQMYKFHQLYMEMTATGREMIGARIRDTDFLQGDDILWINFRGIYELYQLDALDVSIMSCWILMEIQRARRRRVFDTGFINPQRVNVAMLDQYPQETEDNLVHLLKAQHYKTFILLPYNTDAEEHLGRRFSRPGSRRDTVPLAPVLPAAVRRFPLAERRRAAVPPSSRGAPTPSSPPFPAPRRRVLGELLVSLLASLLCLPCALPRRWPPPVTTWPCAAAPLAWATRTLLVAPRRSRAPPPPMRAASPAPPVGRRLRRPRYRRAMAQLGRLCAVLCPSRAAPGRPIGLGRSGPSVLVDRWWTASVVPFPSFRKIAFAGIRVQKIQVKKQGKSHIPLEHARVGVMERGGPWDGLCRFRIHLGTRGDCPLPAGDGGET

SEQ ID NO: 195711 - protein, 59 aa, Oryza sativa
  Clone ID: PAT_MRT4530_91633C.1.pep
CLDLTHFCIGRGGIGMNIWRLLKIISCSCYLGREAEELVKAVLADGKAKSSRYVVGRCK

SEQ ID NO: 195712 - protein, 410 aa, Oryza sativa
  Clone ID: PAT_MRT4530_91634C.1.pep
MAAAARKGTATPLGAVFSPEETRRAVARVAEAVADRRAELGRLQGFSADNAALVSLVQRLPDEVSHDIMVPFGGAAFFPGRLIHTNELLVLLGEGYYVERSAKQTTEILHRRGMELEAQVEAMKATISDLEAEAKFFESTAAEASAVEGLIEIREEYDEDTEINSSTLDASSSASGMPDKDREYTQIMARLDELEMEENDAGSTSEEDGEDDEDDEDDEEDAGPSEDDKEDEEEENILIDDNDHHNASLGASFSGSGGNDQSHESAQLKSALKKPGGREILKSASFAPSASTPHSVFPGQTSTINPGIQLPLKKAVSFQDDNRHTVGPSKSLPLPQGPKHSSPILQVSSDNPTSHDRKIMSSGQKAFTGSIIEHDDNISTLQPSKSAALQNPASSSSRPVSRFKMQKGGR

SEQ ID NO: 195713 - protein, 1067 aa, Oryza sativa
  unsure (1)..(1067): unsure at all Xaa locations
  Clone ID: PAT_MRT4530_91635C.1.pep
MDRQWMYADRRYKEFIDGVHYFLRVAEANRXKGFICCPCNKCKNQKEYSASRTIHFHLFESGFMPSYNCWTSHGEQGVEMEEDEVEDDNIPDYAQYAGFEGNQMGEEERDADGNNVADDLGQMLQDAKEDCKSEKGANKLDKMSEDHRTSLYLGCEQGHKKLVTTLEFLQWKAKNGVSDKAFGDLLKLVKNILPEGNKLPETTYEAKKIVCPLGLEVQKIDACPNDCILYHGEEYENLEACPVCKALRYKIRRDDPGEVDGQLTKKRIPAKVMXYFPIIPRLRRLFRNKENARMMRWHAEERQQDGMLRHPADGSQWRNIDRKFKDFGKDTRNIRFGLSTDGMNPFGEMSSGHSTWPVTMCIYNLPPWLCMKRKYIIMPIIIQGPKQPGNDIDVYLRPLVEDLKLLWKKEGVPVWDEDKQEEFNLRALLFVTINDWPALSNLSGQCNKGYKACTHCMDETESTYLKHCRKVIYMGHRRFLAANHSVRKKGKHFEHKADHRTNPKHCSRKIVFAMVKDLKVVFGKGPGSQPIESEDGHAAMWKNNSIFWELPYWEFLDVRHAIDVMHLTKNLCVNLLGFLGVYRKSKDTLEARNDLKYMEQRGDLHPETKEKGSHYLSPASYTLSKAEKESMFECLESIKVPFGYSTNIKRIISTKEKKFTNLKSHDCHVLMTQLLPVVIRGILPNNVXATITKLCAFMNAISQKVIDPDRLEALQNDVVQCLVSFELIFPSSFFNIMTHLLCHLVKEIGILGPVYLHNMFPFERYMGVLKKYVRNRARPEASIAKGYGTEEVIEFCVEFIEDLRPIGVPESRHKGRLRGKGTLGRKAIMTVDNNLFRKTHFTVLQQSSLVAPYIEEHLALVRVRNISKSDAWITRHNIDTFSTWLRQHLMGNETINQQLAFLARGPSGSIATFQGYKINGYTFYTRAQDMKSTNQNNVVRIDAMGHDGITGTYYGAIEDIWXELDYGPLKVPLFRCXWVRLTGGYITIDDSGMKTVDLNKVGYSDEPFVLANDVTQVFYVNDMSSKGKKGKGPDEPKRHVVLPVRPRLLHQHLDVFRSRLLLRRHRA

SEQ ID NO: 195714 - protein, 1913 aa, Oryza sativa
  unsure (1)..(1913): unsure at all Xaa locations
  Clone ID: PAT_MRT4530_91636C.1.pep
MDRQWMYADRRSKEFIDGVHYFLRVAEANKQKGFICCPCNKCKNQKEYSASRTIHFHLFESGFMPSYNCWTSHGEQGVEMEEDEVEDDNIPDFAQYAGFEGNQTGEEDRDADYNDIADDLGQMLQDTKEDCESEKRAHKLDKMLEDHRTSLYSGCEXGHKKLDTTLEFLQWKAKNGVSDKAFGDLLKLVKNILPEGNKLPETTYEAKKIVCPLGLEVQKIHACPNDCILYRGEEYENLEACPVCKALXYKIRRDDLGEVDGQLTKKRIPAKVMWYFPIIPRLRRLFRNKGNARMMRWHAEERQXDGMLRHPADGSXWRNIDRKFKDXGKHARNIWFGLSTDGMNPFGEMTSGHSTWPVTMCIYNLPLWLCMKRKYIMMPIIIQGPKQPGNDIDVFLRPLVEDLKLLWKKEGVPVWDEDKQEGFNLXALLFVTINDWPALSNLSGQSNKGYKACTDCMDETESTYLKHCRKVVYTGHRRFLAANHLVRKKGKHFEHKADHRTKPKHHSGKTVFAMVKDLKVVFGKGPGSQPIDCEDGHAAMWKKNSIFWELPYWEFLDVRHAIDVMHLTKNLCVNLLGFLGIYGKSKDTLEARNDLKHMEQRSDLHPEPKEKGSHYLSPASYTLSKAEKESMFQCLESIKVPSGYSTNIKRIISTKEKKFTNLKSHDCHVLMTQLLPIIIRGILPDNVRATITKLCSFMNAISQKVIDPDRLEALQNDVVQCLVSYELIFPPSFFNIMMHLLCHLVKEIGILGPVFLHNMFPFERYMGVLKKYVRNRTRPEASIAKGYGTEEVIEFCVEFIEDLRPIRVPESHHEGRLWRKGTLGRKAIMTVDNNLFRKAHFTVLQQSSLVAPYIEEHLALVRARNIGKSDAWITRHHIDTFPAWLRQHLMGNETINQQLAFLARGPSGSIATFQGYEINGYTFYTRAQDIKSTNQNSDVRIDAMGHDGTTGTYYGAIEEIWELDYGPLKVPLFRCQWVRLTGGGVTIDDSGMTTVDLNKVGYSDEPFVLANDVTQVFYVKDMSSKGKKGKGPDEPKRHVVLPVRPRLLYQHLDVFPPIXLLAPSPPLPRHPRTDTAVVSRHRLAVLAASAADAAAAASLGCFFYEQIADRDEEQILYETIVEGSSQYWNEKKGNEDPNXYLNEEENMERDEEGNEEGNVERDAEGNDEDASGSHPSAGQKRARGQQGAAKKIEGQHIITEVDADGRPSAPAKAAKNFVRHIGWVVRDNVPVSKVYWRRTRARGDNDSFVPESEKEMLWTTMLETFTLPAGTENIVKQWTLKKMAEEFQTFKGDLYQKYILKGQTPNFDVFPKLRDHWDEYIAYKTGQQGQAMMKRNKENTAKKKYHHHLRSGGYSVAMPKWEEMEASLLERGIKPATAKWPDRSKFWYYAHGGTLNPIDGSLVFSDQIREAANRLTDAVEASSQGTFRPDREKDELSLALQTPEHPRRTRGKGVIPWKMGFKEDIHTYRSRMRSKRDTEAKIADLEYRVSSXELSMQEEVARKVDERMAAHRSHDPQPYIPPPMVSPSGNRSSCASTGQVGSHSMDAMQTQDETTCPVDEITQRTPCELHIPFKNLSIKVVSGMAIPTDISGTYHCRPIPAGYSMVEVELVEAVYEDLELDYPGGDGETHLRDTSHAIILWRKRYIILPRRQAASRAPSPPALPSPPAPSPPVPPPRPPAPSPPAPPPPPPAPSPPAPLPPPPPPCPPAPPKTRSRQAPPPASTRATKKAKVDTTKNKEPPYGCSQEELDAYVAGEVKRQLKPRSPEKKIAIDPSVKNFFKGMSTTNKEALKLSDYDRTLRKAYYKKSKPVPQLGEQPHQVFEPLVTGEHFGITDFISDTGLTMAQLVGGAPIPKVEVAYKFELGKPLVRPKQLQYIHICVYIYMCIYIYIYSTPVNDIGAAVADEIMQTEGT

SEQ ID NO: 195715 - protein, 69 aa, Oryza sativa
  Clone ID: PAT_MRT4530_91637C.1.pep
TVTSRPFFFFWIVIHHQETCYEPTSRGKSHFPTSPWSSMYSPSPVESVLPPVKSFSILRTGFLTIYHQT

SEQ ID NO: 195716 - protein, 896 aa, Oryza sativa
  Clone ID: PAT_MRT4530_91638C.1.pep
MLQSKTFVKKTRAGRVQKVVREHYLRDDISCGAASCSTCGAVEHPLSADAAAILVVDTNVVLHQIDLLENPAIDDVVLLSVVLDEVKNKNLAVFNRIKALCSNKARRFFVFTNEHHRDTYVKEMVGESPNDRNDRAIRVATRWYQSHLGENVKVLLITNDRDNKRKAIEEGINAETVESYVRSLAQPGLLDLVVVSTSGDVTMEDVEDLRPSKKKVIYSEHKPMSEITAGLRCGIYHQGKLRVNRYNPFEAYVGSESIGDEIVIHGRSNMNRAFDGDIVAVELLPQDQWHESKSFIADDDEDDEEDVHLAPNSADDAPRKANPTQSTAASSADSVSSRPVGRVVGIIKRNWNSYCGSLEPMPMPAGSGGVAHALFVSKDRRIPKIRIQTRQLGNLLDKRIIVAVDSWDVLSRYPSGHYVVLIENDINTRPFSTQVLACLPPLPWTLSPEDLANPNRQDLRHVRVFSVDPPDIADVTNFVHPGTPLDEEASQRGTSVYLVGQRIDMLPKPLTEDVCSLRADVERLAFSVIWEMTPHADIISTRYTKSVIKSCAAMSYVEAQARMDDSRLVDPLTVDLRNLNSLAKIMRHRRCERGALTLASAEVKFEIDSETHDPLDIGIYQIREANQMIEEFMLAANISVAEKILKHFPLCSLLRRHPSPTKEMLEPLLRTASSVGLNLDVSSSKALAESLDNAKNDDPYFNKLIRILATRCMTQAVYFCSGDLTFSEYYHYGLAASLYTHFTSPIRRYADVIVHRLLAAALEIAKLPPLFQDGPQLTGVADNLNYRHRNAQMASRASVELHTLIYFRTRRMDTEARIVKIKANGFIVFVPKFGIEGPIYLTPKGDKGGDWVVDEVHQRVTKPGTNVSYAVLQTVMIHMEVVEPQPHRPKLQLTLI

SEQ ID NO: 195717 - protein, 116 aa, Oryza sativa
  Clone ID: PAT_MRT4530_91639C.1.pep
ENHYQYMSELTGDLAQGGHSKHFSSLQLLTTRDVLQNGTAACYARQRKKKEHSITKTQNSSLAKQPVKGKWGSMLFGLSFFLFVFVLFIGCGVLVLLVLRDEIVHVALCLGELHLV

SEQ ID NO: 195718 - protein, 92 aa, Oryza sativa
  Clone ID: PAT_MRT4530_9163C.1.pep
MDVGCVQLCRVFDYESTLFSSDHISLVEKPSLVGPPDFTIVPIVLKTGTKNIFSPGLKALRNFLPTGTKDLFIVPVSNTNREKRSVDVINRD

SEQ ID NO: 195719 - protein, 2002 aa, Oryza sativa
  unsure (1)..(2002): unsure at all Xaa locations
  Clone ID: PAT_MRT4530_91640C.1.pep
IGQILQDAKENDESEKEAHKLERMLEDHRTSLYPGCEQGHKKLDTTLEFLQWKAKNGVSDKEFGDLLKLVKNILPEGNKLPETTYEAKKIVYPLGLEVQKIHACPNDCILYRGEEYENLEACTVXKALRYKIRREDLGEVDGQPTKKRISTKVMWYFPIIPRLRCLFRNKGNARMMRWHAEERQQDGILRHPADGSQWRNIDRKFKDFGKDARNIQFGLSTDGMNTFGEMSSSHSTWSVMMCIYNLPPXLCMKRKYIMMLIIIQGPKQPDNDIDVYLRPLVEDLKLLWKKEGVPVWDEDKQEELNLXVLLFVTINDWPTLSNLSGXSNKGYKACTHCMDETKSTYLKHCRKFVYMGHRRFLVANHLVRKKGKHFEHKADHRTKPKHRSGKTVFAMVKDLKVVFGKGPGSQPIESEDGHAAMWKKNFIFWELPNWEFLDVRHAIDVMHLTKNLCVNLLGFLGVYGKSKDTLEARNDLKHMEQLGDFHPEPKEKGSYYLSPASYTLSKAEKESMFECLESIKVPSGYSTNIKRIVSTKENKFTNLKCHDCHVLMTQLLLVVRRGILPDNVRAIITKLCAFMNAISQKVIDPNRLEALQNDVVQCVVSFELIFPPSFLNIMTHLLXYMFPFERYMGVLKKYVRNRARPEASIAKGYGTEEVIEFCVEFIEDLRPIGVPESRHEGRLWGKGTLGRKAIMTVDNNLFRKAHFTVMQQSSLVAPYIEEHLALVHARNIGKSDAWITRHHIDTFPAWLXQHLMGNETINQQLAFLVRGPSGSIATFQGNEINGYTFYTRAQDMKSTNQNSAVCIDAMGHDGTTGTYYGAIEDIWELDYGPLKVPLFLCQWVRLTGXGVTIDDSGMTTVDLNKVGYSDEPFVLANDVTQVFYMKDMSSKGKKGKGLDEPKRHVVLDARPRLLHQHLEGFSLISASPSPPLPKASPRRXAVVSRRRLAGVVVASSVASAAAASLGCFLYEQMADCDEEQILYDTIAEGSSQYWNKEEGNEDPNQYLNEEWNMERDAERNQEGNVERDVEGNEEEEASGSQPSAXQKRARGQQGAAKKLEGQHIITEVDEDGRPSAPAEAAKNYVRHNGWVVQDNVSVSTVYWRRIRARGDHESFVPDSEKEMLWTTMLETFTLPAGIENIVKRXTLKKMAEQFHSIKGDLYQKYIVKGQTPNFNTFPKLRDHWDEFVAYKIGQQGXAMMERNKENTAKKKYHHHLGSGSYSIAMPKWEEMEASLLERGIEPATAKWPDQSKFWYYAHGGTLNPVDGSLVFSDQIREAASRLTDAVEASSQGTFRPDREKDELSLALQTPKHPGQTRGKGVIPWKIGFKEDIHTYRSRMRSKRDTEAKIADLEYRVSSYELSMQEEVARKVDERMATHRSLDPQPYIPPAMVSPSGNRSSCASTGQVGSQSMDAMQIQDETTCPVNVITRWTPCELHIPFENLSIKVASGMAIPTDPSGTYHCRLIPAGYSKVEVELVEAAYEDLELDYLGGDGETHLRDTSHATILWRKRYIILLGRQAASRAPSSPAPPSPPQAPAPSPPHAPALSPPQAPAPTPPQAPTPTPPQAPRPAPSKSRAPQAPLPAPTRATKKAKVDASKNKDPGYDCTQEELDAYVASEVRRQLKPQSPEKKILIDPSVRNFFRGMSSPAKEAIKLSDYERTLKKASSGKSKLVPQLGEQPNQEIEPLVTGEEFGIQDFINNTGLTTDQLLRDPPIEKAEVKYLYELGKPLVKPEXLQSLPIQMYKFHQLYMEMNATGREMIGARIRDTDFLQGEDILXINFKGIYELYQLDALDVSIMSCWTLMEIQRARRRGVFDTGFIDPRKVNVAMLDQYPQATEDNLVHLLKAQHYKTFILLPYNIEFHWVLLLFDLSACTVNVYDSMDKKESTFDKVFELIDRAWYRFRHLVRCAKQKKGTNLCGYYVCEYCHCLADQIITIRKLNFIRMRDNLTTHKEFIAAVQEQLMGFINEQILDPKGEFYYDGNTIHRSLASELATTTTSKS

SEQ ID NO: 195720 - protein, 126 aa, Oryza sativa
  Clone ID: PAT_MRT4530_91641C.1.pep
SAPAAGRSPPRTAPSRPRTSRRSPRCSRRDCSLLRSTGDKTKHGRKPHPYIHHARQRKKKEHSITKTQNSSLAKQPVKGKWGSMLFGLSFFLFVFVLFIGCGVLVLLVLRDEIVHVALCLGELHLV

SEQ ID NO: 195721 - protein, 1656 aa, Oryza sativa
  Clone ID: PAT_MRT4530_91642C.1.pep
MAMAERRLEASARGGRGDGGSGGGWGGGGNGGAGRRSEHTAVAMAERWAAALAIMAMAEVRGRQPRDGLRLHCQPLGPSPPPRALPQPTARASSASCRLHLPSTPTARPPAPIPAPACAQRAISRRSDIRRRAVGEEAPVAGRSAMLAARGGLPVAAPRALATAAGCRVPVTPAARCTPHPSPVAPDAREDCESEKEAHKLDKMLEDHRTSLYPGPKQPGNDIDVYLRPLVEDLKQLWKKEGVPVWDEDKQEEFNLRALLFVTINDWPALSNLSGQSNKGYKACTHCMDETESTYLKHCRKVVYMGHRRFLAANHPVRKKGKHFEHKADHRTKPKHRSGKTVFAMVKDLKVVFGKGPGSQHIESEDGHAAMWKKNSIFWELPYWEFLDVRHAIDVMHLTKNLCVNLLGFLGVYGKSKDTLEARNDLKHMEQRGDLHPEPKEKGSHYLSPASYTLSKAEKESMFECLESIKVPFGYSTNIKRIISTKEKKFTNLKSHDCHVLMTQLLPVVIRGILPDNVQATITKLCAFMNAISQKVIDPDRLEALQNEVVQCLVSFELIFPPSFFNIMTHLLCHLVKEIRILGPMYLHNMFPFERYMGVLKKYVRNRARPEASIAKGYGTEEVIEFCVEFIEDLRPIGVPESRHEGRLRGKGTLGRKAIMTVDNNLFRKAHFTVLQHSSLVAPYIEEHLALVRARNIGKSDAWITRHHIDTFPAWLRQHLMGNESINQQLAFLARGPSGSIATFQGYEINGYTFYMRAQDMKSTNQNSAVRVDAMGHDGTTTTYYGAIEDIWELDYGPLKVPLFRCQWVRLTGGGVMIDDSGMTTVDLNKVGYSDEPFVLANDVTQVFFVKDMSSKGKKGRGPDEPKRQVVLPGKRKIVGVEDKTDEDYDQLDGGIYIPGQIPAPTPPYLAVVSSSSSSPPPPPPPLPPHLWGESRRISLHASRSLRSRSLSVAFDAAAFDAAQRRRRMPTPRRRRRRHAAAAFTAARANAAAATPRRRRHATPRHRRHATPPPPRPHNATPPPRRRANRRPDAATPPLTNENENDRTNESENEHVNVRCRDNVNENENDRTNVNELGNMADRDEEQILYDTIAKGSSQYWNEEEGNEDPNQYLNEEGNVERDAEGNQQGHVERDVEGNQEEEASDSEKEMLWTTMLETFTLPAGTEDKVKRWTLKKMAEQFQSFKGDLYQKYILKGQTPNFDTFPKLRDHWDEFVAYKTGEQGKAMMERNKENAAKKKYHHHLGSGGYSVAMPKWEQMEASLIERGIEPATANGRNDRSSVEASSQGTFRPDRDRDELTLALQTPEHPGRTRGKGVIPWKIGFKEDIHTYRSRMRSKRDTEAKIADLEFRVSSYELNMQEEVARKVDERMAAHRSHDPQPTIPPAMVSPSGNRSSCASTGQVASGMAIPTDPSGTYHCRPIPAGYSKVEVELFEGAYEDLELDYPGGDGGTSSSLGDKRRLVHHLLRLRHLLLRILHRLLLMLRQHRLHLRLQHRLLRILHRLLLVLLHLLPRKLLFRHLQSQGPPPAPPLAHIRATKKAKVDAAKNKDPGYDCTQEELDAYVASEVKRQFKPRSPEKKIPIDPSVRNFFRGMSASVKEAIKLSDYERTLKKASSGKSKPVPQLGEQPNQEIEPLVTGKEMTIEQFITDTGLTTD

SEQ ID NO: 195722 - protein, 237 aa, Oryza sativa
  Clone ID: PAT_MRT4530_91643C.1.pep
MGGDGKRTKLPWLGVARDVDDDGGPFTNCSSDLHIFDDDDDEATTLKTKGSTVGSGRNDERRQQAVACGDRDEWQAAIRMVLRPVELDLSVASCAVSVERPESPSAASLVKYKQESHFVTKSAFLNASALPASLAARLYDGETDQVVVQAVASLSFTIGGARGVSAGKRGHNFTLIHCWPVSISSYYEVSGGKASCSQDTTEAAVAGLTHDRYIGGPCPETYKNSGKCSRNSTGIKG

SEQ ID NO: 195723 - protein, 444 aa, Oryza sativa
  Clone ID: PAT_MRT4530_91644C.1.pep
MREILHIQGGQCGNQIGAKFWEVICDEHGVDATGRYAGDSDLQLERINVYYNEASGGRYVPRAVLMDLEPGTMDSVRSGPFGQIFRPDNFVFGQSGAGNNWAKGHYTEGAELIDSVLDVVRKEAENCDCLQGFQVCHSLGGGTGSGMGTLLISKIREEYPDRMMLTFSVFPSPKVSDTVVEPYNATLSVHQLVENADECMVLDNEALYDICFRTLKLATPTFGDLNHLISATMSGVTCCLRFPGQLNSDLRKLAVNLIPFPRLHFFMVGFAPLTSRGSQQYRALTVPELTQQMWDAKNMMCAADPRHGRYLTASAMFRGKMSTKEVDEQMLNVQNKNSSYFVEWIPNNVKSSVCDIPPRGLKMAATFVGNSTSIQEMFRRVSEQFTAMFRRKAFLHWYTGEGMDEMEFTEAESNMNDLVAEYQQYQDATADEEYEDEEEEAEAE

SEQ ID NO: 195724 - protein, 926 aa, Oryza sativa
  Clone ID: PAT_MRT4530_91645C.1.pep
MADRDEEQILYDTIAEGSSQYWNEEEGNEDPNQYLNEEGNVERDAEGNPEGNQEGHGKRDVEGNQEEEASGSQPSVGQKRARGQRGAAKKLEGRHIITEVDEDGRPSAPAEAAKNYVRHSSWVVRDNVPVNTVYWRRTRACGDHESFVPDSEKEMLWTTMLETFTLPAGTEDKGQTPNFDTFPKLRDHWDEFVAYKTGEQGQAMMERNKENAAKKKYHHHLGSSGYSVAMPKWEEMEASLLERGIEPATANWPERSKFWYYAHGGTLNPADGSLVFGDQIREAARRLTDELEASSQGAFRPDREKDELSLALQTPEHPGRTRGKGVIPSKIGFKEDIHTYRSRMRSKRDTEAKIAYLEFRVSSYELSMQEEVARKVDERMAAHRSHDPQPTIPPAMVSPSGNRSSYASTGQVGSQSMDAMQTQDESTCPVDDITQRTPCELHIPFKNLSIKVASGMAIPTDTSGTYHCRSIPAGYSKVEVEFVEGAYEDLELDYPGGDGETHLRDTSHAIILWRKRYIILPGQQAASRAPSPPAPPSPPQAPAPSPPHAPAPSPPQAPAPTPPQAPTPTPPQAPLPAPSKSRAPQAPPPAPTRATKKTKVDAAKNKDPGYDCTGMSAPAKEAIKLSDYERTLKKASSGKSKPVPQLGEQPNQEIEPLVTSEDFVIQEFIYDTGLTTDQFLGDAPIEKAELYMEMSATGREMIGARIRDTDFLQGDDILWINFKGIYELYQLDALDVSIMSCWILIEIQRARRRVVFDTGFIDPRKVNVAMLDQYPQATEDNLVHLLKAQHYKTFILLSYNTEFHWVLLLFDLEACTVNVYVSMDKKESTFDKVFELIDSAWYRFRHLVRGNWRERLRRKFKFPCAKQKQGTNLCGYYMCKYCHCLADQIITIRELDFICMRDNLITQGIYRGGSRTTHGIYQRTNP

SEQ ID NO: 195725 - protein, 69 aa, Oryza sativa
  unsure (1)..(69): unsure at all Xaa locations
  Clone ID: PAT_MRT4530_91646C.1.pep
SALGAPAXCXVRGDRSWEXXGGXSPPXEPDXXAYAXAAALRVRCRLGREGTPCAAACFPXKILGFRRRE

SEQ ID NO: 195726 - protein, 1068 aa, Oryza sativa
  unsure (1)..(1068): unsure at all Xaa locations
  Clone ID: PAT_MRT4530_91647C.1.pep
MDRQWLYADRWSKEFIEGVHYFLRVAEANKRNGFICCPCNKCKNQKEYSASRTIHFHLXFESGFMPSYNCWTSHGEQGVEMEEDEAEDENIPDWAQYAGFEGNQTGEVDRDAGDNDAVDDLGQMLQDAKEDCESEKEAHKLERMLEDHRTSLYPGCEQGHKKLDTTLEFLXWKAKNGVSDKAFGDLLKLVKNILPEGNKLPETTYEAKKIVCPLGLEVQKIHACPNDCILYRSEEYENLEACPVCKALRYNIKREDPGEVDGQPTKKRIPAKVMWYFPIIPRLRRLFRNKGNARMMRWHAEERQQDGMLRHPADGSQWRNIDRKFKDFGKDARNIRFGLSTDGMNLFGEMSSGHSTWPVTMCIYNLLPWLCMKRKYIMMPIIIXGPKQPGNDIDVYLRPLVEDLKLLWKKEGVPEWDEDKLEEFNLXALLFVTINDWPALSNLSGQSNKGYKACTHCMDETKSTYLKHCRKVVYMGHRRFHAVNHPVRKKGKHFEYKADHCTKPKHRSGKTVFAMVKDLKVVFGKGPGSQPIXSEDGHAVMWKKNSIFWQLPYWEFLDVHHAIDVMHLTKNLCVNLLGFLGVYGKSKDTLEARNDLKHMEQRGDLHLEPKEKGSHYLSPASYTLSKAEKESMFECLESIKVPSGYSTNIKRIISTKEKKFTNLKSHDCHVLMTQLLPVLIRGILPDNVRATITKLCAFMSAISQKVIDPDRLEALENDLVQCLVSFELIFPPSFFNIMTHLLCHLVKEIGILGPVYLHNMFPFERYMGVLKKYVHNRARPEASIAKGYGTEEVIEFCVEFIEDLRPIEVPESRHEGRLRGKGTLXRKAIMTVDNNLFRKAHFTVLQQSSLLAPYIEEHLALVRTRNIGKSDAXITRHHIDTFPAWLRQHLMGNETINQQLAFLVRGPSGSIATFQGYEINGYTFYTRAQDMKNTNQNNAVRIHAMGHDGTTGTYYGAIEDIWELDYGPLKVPLFRCQWVRLTGGDVTIDDSGMTTVDLNKVGYSDEPFVLANDVTQVFYMKDMSSKGKKGKGPDEPKRHVVLSARPRLLHQHLDVFFPDLGFSFAATA

SEQ ID NO: 195727 - protein, 1155 aa, Oryza sativa
  unsure (1)..(1155): unsure at all Xaa locations
  Clone ID: PAT_MRT4530_91648C.1.pep
MAAATASGKPLVAFPWRSRALRCRALLAAVTGQEPIVASLGMGEGGGGRRQRGFVAAESSRGQKVRWRNRMDRQWMYADRRSKEFIDGVHYFLRVAEANRQKGFICCPCNKCKNQKEYSASRTIHFHLFESGFMPSYNCWTSHEEQGVEMEEDEVEDDNIPDFAQYVGFEGNQTGEKERDADGNDVADDLGQMLQDAKEDCESEKGAHKLDKMLEDHRTSLYPGCEQGHKKLDTTLEFLQWKAKNGVSDKAFGDLLKLVKNILPEGNKLPETTYEAKKIVYPLGLEVXKIHACPNDCILYRGEEYENLEACPVCKALRYKIRRDDPGEVDGQLTKKRIPAKVMWYFPIIPRLRRLFRNKGNARMMRWHAEERQQDVMLRHPADGSQWRNIDRKFKYFGKDARNIRFGLSTDGINPFGEMSSGHSTRPVTMCIYNLPXLCMKRKYIMMPIIIQGPKQPGNDIDVYLRPLVEDFKLLWKKEGVPMWDEDKQEEFNLQALLFVTINDWPALSNLSGQSNKGYKACTHCMYETESTYLKHCRKVVYMGHRRFLAANYPVXKKGKHFEYKADHRTKPKHRSGKTVFAMVKDLKVVFGKGPGSQPIESEDGHAAIWKKNSIFWELPYWEFLDVRHAIGVMHLTKNLCVNLLGFLGVYGKSKDTLEARNDLKHMEQRVDLHPEPKEKGSHYLSPASYTLSKAEKESMFECLESIKVPSGYSTNIKRIISTKEKKFTNLKSHDCHVLMTQLLPVVIRGILPDNVRATITKLCAYMNAISQKVIDPDRLEALQNDVVQCVVSFELIFPPSFFNIMTHLLCHLVKEISIFGPVFLHNMFPFERYMGVLKKYVRNRARPEASIAKGYGTEEVIEFCVEFIEDLRPIEVPESRHEGRLRGKGTLGRKAIMTVDNNLFRKAHFTVLQQSSLVTPYIEEHLALVRARNIGKSDAWITRHHIDTFPAWLRQHLMGNESINQQLAFLARGPSGSIATFQGYKINGYTFYTRAQDMKSTNQNSAVRVDAMGHNXTTDTYYGAIEDIWELDYDPLKVHLFRCQWVRLTGEGVMINDSGMTTVDLNKVGYSDEPFVLANDVTQVFYVKDMSSKGKKGRGPDEPKRHVVLPGKRKIVYLSSLLFSSSLPLSFSFLPPIPFSFSRARARAGESEAR

SEQ ID NO: 195728 - protein, 1801 aa, Oryza sativa
  unsure (1)..(1801): unsure at all Xaa locations
  Clone ID: PAT_MRT4530_91649C.1.pep
MDRQWMYADRRSKEFIDGVHYFLRVAEANKQKGFICCPRNKCKNQKEYSASRTIHFHLFESGFMPSYNCWTSHGEQGVETEEDEVEDDNIPDFAQYARFEGNQTGEEDIDADYNDVADDLGQMLQDAKEDCESEKGAHKLDKMLEDHRTSLYPGCEQRHKKLDTTLEFLQWKAKNGVSDKAFGDLLKLVKNILPEGNKLPETTYEAKKIVCPLGLEVQKIHACPNDCILYHSEEYENLEACPVCKALRYKIRRDDPGEVDGQLTKKRIPAKVMWYFPIIPRLRRLFRNKGNARMMRWHAEERQQDGMLRHPADGSQWQNIDRKFKDFGKDARNIRFGLSTDGMNPFGEMSSGYSTWPVTMCIYNLPPWLCMKRKYIMMPIIIQGPKQPGNDIDVFLRPLVEDLKLLWKKEGVPVWDEDKQEEFNLRALLFVTINDWPALSNLSGQSNKGYKACTHCMDETEXVYGKSKDTLEARNDLKHMEQRGDLHPEPQEKGSHYLSPASYTLSKAEKESMFQCLESIKVPSGYSTNIKRIISTKEKKFTNLKSXMTCHVLMTQLLPVIIRGILPDNVRATITKLCSFMNAISHKVIDPDRLEALQNDVRYMGVLKKYVRNRARPEASIANGYGTEEVIEFCIEFIEDLCPIGVPESRHEGRLRGKGTLRRKAIMTVYNNLFRKTHFTVLQQSSLVAPYIEEHLALVRARNIGKSDAWITRHHIDTFPTWLRQHLMGNETINQQLAFLARGPSGSIATFQGYEINGYTFYTRAQDMKSTNQNSAVRIDAMGHDGTIGTYYGAIEEIWELDYGPLKVPLFRCQWVRLTGGGVTIDDSGMTTVDLNNVGYSDEPFVLANDVTQVFYVKDMSSKGKKGKGPDXPKRHVVLPGKRKIVGVEDKTDEDYDQFDRQPPFTVTVDPSILLSNEDTLYSRSDHKEGTIYLNEKGNAERDAEGNEEGNVERDAEGNEEEASGSHPSAGQKRTRGQXGVAKKIQGWHIITEVDADGRPSAPAQAAKNFVRHSGWVVRDNVPVSKVYWRRTRARGGDDSFVPESEKEMLWTTMLETFTLPAGTENIVKQWTLNKMAEQFETFKGDLYRKYILKGQTPNFDVFPKLRDHWDEFVAYKTGQQGQAMMERNKENATKKKYHHHLGSGGYSVAMPKWEEMEASLLERGIEPAIAKWPDRSKFWYYAHGGTLNPVDGSLVFSDQIREAANRLTDAVEASSQGTFRPDREKDELSRMRSKRDTEAKIADLEYRVSSYELSMQEEMARKVDERMAAHRSHDPQPYIPPPMVSPSDNRSSCASTGQVVSGMAIPTYISGTYHCRPIPAGYSRVEVELVEAVYEDLELDYPGGDGETHLRDTSHAIILWRKRYIILPRRQAASRAPSPPAPPPPPPAPSPPAPPPPPPPCPPAPPKTRSRHAPPPASTRATKKAKVDTTKNKEPPYGCSQEELDAYVAGEVKRQLKPRSPEKKIPIDPSVKNFFKGMSTANKEALKLSDYDRTLRKAYYKKSKPVPQLGEQPHQVVEPLVTSEDFGITDFISDTGLTMAQLVGGAPIPKAEVAYMFELGKPLVRPEQLQSLPTQMYKFHERYMEMSANGREMFGARIRNPDFLQGEDVLWIHFKDVFDLYHLDALDVSLLSAWILMEIQRVRRRRVYDTGFIDPRKINTEMLDKYEKDTEDNLVHLLTQQHFKTFILLPYNTEVIVYDXMNKEEKVFDKVFQLIDRAWDRFRQLVHGTWKEKLGWRFHFPRIHMREKLPHKDFITAVQKQQMGFINEEVLNPDGEFYYDGSTICNVGPSSSDVPQASKL

SEQ ID NO: 195729 - protein, 72 aa, Oryza sativa
  Clone ID: PAT_MRT4530_9164C.1.pep
PSSPSPLCRSPAGCGAAADGRQRWQRARATSSISSRSTSSACYLFLFFFRLQHLWVDLVTSLVEGSKDYSWK

SEQ ID NO: 195730 - protein, 75 aa, Oryza sativa
  Clone ID: PAT_MRT4530_91650C.1.pep
VAPSNYRIIPARPKSPLTRFHLFRSEFMKCRHCHTPLKQTFLDLGFAPPSNAYLNQIDLSRPEVTYPLRIPGYRA

SEQ ID NO: 195731 - protein, 1729 aa, Oryza sativa
  Clone ID: PAT_MRT4530_91651C.1.pep
MEEDEVEDDNIPDFAQYVGFEGNQTGEEEIAADGNDVADDLGQMLQDANEDCESEKEAHKLDKMLEDHTTSLYPDCEQGHKKLDTTLEFLQWKAKNGVSDKAFGDLLKLVKNILPEGNKLPKTTYEAKKIVCPLGLEVQKIHACPNDCILYRGEEYENLEACPVCIALRYKIRRDDPGEVDGQLTKKRIPAKVMWYFPIIPRLRRLFRNKGNTRMMRWHAEERQQDRMLRHPADGSQWRNIDRKFKEFGKDARNIRFDLKLLWNKECVPVWDEDKQEEFNLRALLFVTINDWPALSNLSGQSNKGYKACTHCMDETESTYLKHCRKVVYMGHRRFLAANHPVRKKGKHFEHKADHRTKPKHRSGKTVFAMVKDLKVVFGKGPGSQPIESEDGHAAMWKKNSIFWELPYWEFLDIRHTIDVMHLTKNLCVNLLGFLGVYGKLKDTLEARNDLKHMEQCGDLHPEPKEKGSHYLSPASYTLSKAEKESMFECLESIKKVIDPDRLEALQNEVVQCLVSFELIFLPSFFNIMTHLLCHLVKEISILGPVYLHNMFPFERYIGVLKKYVRNRARPEASIAKGYGTEEAIEFCVEFIEDLRPIGVPESRHEGRLRGEGTLGRKAIMTVDNNLFRKAHFTVLQHSSLVAPYIEEQLALVHARNIGKSDAWITRHHIDTFPAWLRQHLMGNESINQQLAFLARGPSGSIATFQGYEINGYTFYTRAQDMKSTNQNSAVRVDAMGHDGTTGTFYGAIEDIWELDYGPLKVPLFRCQWVRLTGGDVMIDDSGMTTVDLNKVGYSDEPFVLANDVTQVFFVKDMSSKGKKGRGPDEPKRQVVLLGKRKIVGVEDKTDEDYDQLDRQPPFTVTIDPSILLSNEDTPYSRSDHKEGTIVRRKNTYTSRHDDAAPCRRLRRHANAAAFAAAQRHATPPRHAPARCRHTAVNEHVNENEHVNVTENVNEGTNVIENVNEGTNVTENENDRTNVNENENERTNVNENERTNVNENERERERERVNERERKRANENEGTNVNVNQDEGTNMADHDEEQILYDTIAEGSSQYWNEEEGNEDPNQYLNEEGNVERDAEGNQQGHTERDVEGNQEEEASGSQPSVGQKRARGQREDKVKKWTLKKMAEQFQSFKGDLYQKYILKGQTPNFDTFPKLRDHWDEFVAYKTGEQGQAMMERNKENAAKKKYHHHLGSGGYSVAMPNGMLNPADGSLVFDDQIREATRRLTDAVEASSQGTFRPDRDRDELTLALQTPEHPGRTRGKGVIPWKIGFKEDIHTYRSRMRSKRDTEAKIADLEFRVSSYELSMQEEVARKVDERMAAHRSHDLQPTIPPAMVSPSGNRSSCASTGQVGSQSMDAMQTQDESTCPVDDITQRTPCELHIPFKNLSIKVASGMAIPTDPSGTYHCRPIPAGYSKVEVELVEGAYEDLELDYPGGDGETHLRDTSHAIILWCRRYIILPGRQAASRAPSHPAPPSPPQDPAPSPPHAPPAPSPPQAPAPTPPQAPALTPPWAPTPTPPQAPLPTPSKSRAPPAPPPAHTRATKKAKVDAAKNKDPGGMSAPVKEAIKLSDYERTLKKASSGKSKPVPQLGEQPNQEIEPLVTGEDMTIEEFITDTGLTTDQLLGVEPIEKAEVKYMYELGKPLVKPELVQSLPTQMYKFHQLYMEMSATGREMIGVRIRDLDFLQGDDILWINFNVVNLFGAPWCPGTIVEIEYIPNSNEYETFSFT

SEQ ID NO: 195732 - protein, 219 aa, Oryza sativa
  unsure (1)..(219): unsure at all Xaa locations
  Clone ID: PAT_MRT4530_91652C.1.pep
PGLQAHNRKRSQNRLEGPGLSVSQKVXYCISTVGGQYIWSRLQSFSAFRRWGDSEQRPLARRAWGLVQHAEGLYRASSFFNLLLFLYGARYKTIVERILKAXLVYESPNMNRAVSFEYMNRQLVWNEFSEMLLLLLPLLNSSSVKKFLLPFSKDKSASSSGDEADCPICRSSPSIPFEALPCQHRYCYYCLQTRCAATNSYRCARCNEIVVAIQRQGSS

SEQ ID NO: 195733 - protein, 609 aa, Oryza sativa
  unsure (1)..(609): unsure at all Xaa locations
  Clone ID: PAT_MRT4530_91653C.1.pep
MASYVPCSSSSTHRSRNFCDLVLVYAIIGSMHSSMTLFSVCKILSLYVDMCFVDYSKEVHSYLKYCKDVVFTGMTFSLEEEHLIDIFWDMYKGKEDENAKLCQEKLRTTNGVNKRCRDGSSNYSLQNKGILIFHIIPDYHPENPWNVLHPSNKRFEERKSCTDAGMLPGPLLPLPPPPPPELVVYPSVPSLPPSATPPSSSSSIGSSIAIVVLVVITTAIVTVAIVVIRRSYRRGRRLSCSSFSPRRSLSPRALSSSPSAMSQMWRAAVAAVGSSPRASAASARSWPEMAAPSSAPGDPGRGPPVALSSSAQGAVQGTAGLMASSATSAAAMAPPPSAPSLPEVERVILELLSLPPSPLQPAMSGSTATXSSATNCFSQLICTSSFRCAPTCSTSAASSPGSAAASRRCYAAPSAMLPSPPAAAPTREASFQPSAQGSTTSSRRFWRCPRRQPRRWRRQWGDLVGGCAPRWTGSPAAGGRAPAAAPSQRWRRRGAPRRAAPPEAGALALAARAAATSTSALTRVAFRRRCSCSCSCRCCLSLMKRWLQPTMMLGDLAAGSALLWPHSLGAGPCSPPPAAPPQWSYQCPPRGARQLGAPTRGRGAGILRR

SEQ ID NO: 195734 - protein, 94 aa, Oryza sativa
  Clone ID: PAT_MRT4530_91654C.1.pep
MATVQSTKQYLAGRRRRRDRSATEYCSRVQYSRCCCFFASCRLGRIHHSPQKKSRPRPANLQASPIILTLQDGTTVCDSDTAVSYCEYMLCICL

SEQ ID NO: 195735 - protein, 122 aa, Oryza sativa
  Clone ID: PAT_MRT4530_91655C.1.pep
MRKQRGSSSAVSIWKALLILLALICALRPAQGGRGVSVGYPGPRSNKASSYSRGGVGCSSIDECDAPPAPGRAGAADAIGRNGALNPPRYPVPRIPGEPYTRPGRGCTVAYGCYGGPPAAKP

SEQ ID NO: 195736 - protein, 521 aa, Oryza sativa
  Clone ID: PAT_MRT4530_91656C.1.pep
MAVEESPPPPPSSPPPPPSSPQPAAEVGAGGRRADKSGRRLEVYSEVLARLRGLGAAAPVEISPAYEDALWAHFHRLPARYALDVHADRAEDVVTHHRLLEEARDPDRRPALSVRVVQVSRILDGDMDDCSELGMEPVHTNHLARQMVHPPPAFGSCSNLEALALEASEANLRSSNNDEDSSVHLISRPMHEITFATTDKPKVLSQLTCLLSELGLDIQEAHAFSTSDGYSLDVFVVTGWHLGGTEQLKEKLLEKFHDIETQAWPTSNSSSQSLEGPSGGESMPSTSVEIPTDGTDVWEIDLKLLKFGTKVASGSNGDLFRGSYCSQDVAIKVVRPERISADMYRDFAQEVYIMRVCRVIFAPVIELLNESDHIFQVVKVADFGVARVKDQSGVMTAETGTYRWMAPEVIEHKPYDHKADVFSFGIVLWELLTGKIPYEYLTPLQAAIGVVQKGLRPTIPKDTHPKLSELLQKCWHRDPAERPDFSQILEILQRLPKEVRADTEGRQKSKAGFLSALKRNH

SEQ ID NO: 195737 - protein, 64 aa, Oryza sativa
  Clone ID: PAT_MRT4530_91657C.1.pep
LLKKKKKKKKKKKKKKKKKKKKKKKKKKKKKKKKKKKKGGGPFKEPNFTSRGWKSNIFFLGPPK

SEQ ID NO: 195738 - protein, 157 aa, Oryza sativa
  Clone ID: PAT_MRT4530_91658C.1.pep
NLAAPSPRVDQKALAGNATDKVDTADGRTESHHCSTQERRPILSEEQDTEDTIEFDTKLSTSEGASSIERIKSVGKSRTNTISKDHLKNLVPFTEEWLAVMEAFGEEVLEQKTGAVQNSPTDKAAPEPSPWSPVKRKAQDVGPFDCTKYSKNVRTSD

SEQ ID NO: 195739 - protein, 535 aa, Oryza sativa
  unsure (1)..(535): unsure at all Xaa locations
  Clone ID: PAT_MRT4530_91659C.1.pep
MAVVLTHGVVDEGGGERRWIWLVAEEAGKEAARRGRGECGKRKTRRWSSSPRPSRPPYPPMPPPPRHRRNLPTPHVPWKSHAADLARAEHDRRDAQACRAYHARAAASVRVAAHDALFARDLAAIPEDRWAHDGDYFERPLPLEGGGALFRVLFKGMASREVVGPRDRDPGVGVLAVAICGPRGEVVLRIHKPVQAQAQQGRMMLEAMALVEGLNAALALGIRTLNVLTDNKPLHNHMSGIWRPRQKRLVDLINEAFSTKQKFEQCEILCVARTQVNYVTKLATDSLHTQIAKAAAVSAGKEKKENCTICLEDTDVSKIHAVEGCAHRFCFSCMKERVKVKLLHGMLPACPQDGCTTKLXVEGSKMFLSPRLLAIMVQRIREAQIPPTHKIYCPYPKCSALMSMRELXTSNASIILKMTCYDYKRRYPHARLEDAYLQNLARQRCGYEFCYTCGKEWKEKKATCSCPLWDERNIIRDDPQGNAAIHDDPEDEYDDYYDEDENNYYVGEGLQYNVDYHRQYDGGDRHHGHFYQYNR

SEQ ID NO: 195740 - protein, 270 aa, Oryza sativa
  Clone ID: PAT_MRT4530_9165C.1.pep
MRLASRDKRRVPCCFFPLLPRDSIRHPLLGGQRDGGGKPRPTMQRLSRFVPSSSRRVTDLKDALWSGSLTFQHALSTFAADENTSGRKFASYTVFKGKAALSMQPILPSFSKLESGGSRVNKNGSVMLTFFPAVGQRKYDYSKKQLFALSPTEVGSLISLGPAESCEFFHDPSMKSSHEGQVKKSLSVTPLGNDSGYFLNITVLNNLQKTTERLSLPISKAEFTVMRTALSFALPHILGWDQALTNHQPSPSPASKPRVERPHPDSEWER

SEQ ID NO: 195741 - protein, 311 aa, Oryza sativa
  Clone ID: PAT_MRT4530_91660C.1.pep
MEDFAHLEAQSFRSGYEIWLISKHCPTHSHLRFCAGIWIKNHATNTELSNGCLLLLRVCGGAPNSTVAQVAEAPTTNASATWFGTVVVIDNPLTDGPNLTSSRLVGRAQGMYVVAAGKDALSLMMAMNFVFAHDGPCNGSSLAVFGAMFSSLAAWPPAGRRRLLLAPRGAADARFPPPPAPPARRTALLRMRLAAVHRRQLRTDSPPPAFLARSLQCRASACRVLPVRSGSGSTTVASSAGPPLPWRLAGRRWTMIPLEVFDRMPDRSSTQQRSMGNRSKRQRGWAGPKQLVYTGEPHDLGETGAATDSEE

SEQ ID NO: 195742 - protein, 491 aa, Oryza sativa
  Clone ID: PAT_MRT4530_91661C.1.pep
MGSIAADGDKPHAVCMPFPAQGHVTPMLKLAKILHHRGFHITFVNTEFNHRRLLRSRGAAALDGLPGFRFAAIPDGLPPSDADATQDVPPLCRSTRETCLPHFSRLLADLNANASPESPPVTCVVADDVMSFAVDAAREFRVPCALFWTASVCGYMGYRYYRSFLDKGIFPLKEEQLTNGFLDAPVDWTPGMSKHLRLKDFPSFFRATDPDEYMFHFALHVTERLAEADAAVLNTFDELEPEALDAMRAMLPPSVSIHTIGPLGFLAEQVVPKGSPLDALGSNLWKEDDSCFGWLDGKPPRSVVFVNYGSVTVMTNEELVEFAWGLANSGHDFLWIVRPDLIHGDAAVLPPEFMESVGGRGLLASWCPQEAVLRHEAVGVFLTHSGWNSTVESLCGGVPMLCWPFFAEQQTNRRYSCTEWGVAMEIDDDVRRDAVEAKIREAMGGDKGREMRRRAGEWKETGLRATRPGGRAHASLDALVADVLLSGGKAR

SEQ ID NO: 195743 - protein, 62 aa, Oryza sativa
  Clone ID: PAT_MRT4530_91662C.1.pep
RPGEGTATGKNRPDSYCPSSGCRPTTTKPRRRRRVWRERREEGNGLCFSAAASLYSTVARVR

SEQ ID NO: 195744 - protein, 121 aa, Oryza sativa
  Clone ID: PAT_MRT4530_91663C.1.pep
MAVDEVDESAGREEGWIWPLFNRSCAADLTVRCSCTTDLVVHRGESGDERKGEYGRSSTALTPSTSPSPAATPPSTNANTTWATPPLLRYEFVAAGAQLRGVPEGANTPLSAPSLLYYLAH

SEQ ID NO: 195745 - protein, 177 aa, Oryza sativa
  Clone ID: PAT_MRT4530_91664C.1.pep
MSWHRAGVLLLGAQSCLPVPGVPAVGGVGSVLLFMARMGWELCHVFRPYTVVQWRVLGKARLLRAPRWCCVRAPVEATVTFVRVPRATRKWEVIITRAGAGRGALPLRLHRNTDTGIIGNLVKALAGVPQAKRVQGTEPRILEGDEVVRRCEPAVLHRQRVMRPVRVDQDQGEHVLV

SEQ ID NO: 195746 - protein, 2034 aa, Oryza sativa
  Clone ID: PAT_MRT4530_91665C.1.pep
MDRQWMYADRRSKEFIDGVHYFLRVAEANRKRGFICCPCNKCKNQKEYSASRTIHFHLFESGFMPSYNCWTSHGEQGVEMEEDEVEDDNIPDFAQFVGFEGNQTGEEEIAADGNDVADDLGQMLQDAREDSESEKEAHKLDKMLEDHRTSLYPSCEQGHKKLDTTLELLQWKAKNGVSDKAFGDLLKLVKNILPGGKKLPETTNKGNARMLRWHAEERQHDGMLRHSADGSQWRNIDRKFKEFGKDARNIRFGLSTDGMNPFGEMSSGHSTWPVTMCIYNLPPWLCMKRKYIMMPIIIQGPKQPGNDIDVYLRPLVEDLKQLWKKEGVPVWDEDKQEEFNLRALLFVTINDWPALSNLSGQSTKGYKACTHCMDETESTYLKHCRKVVYMGHRRFLAANHPVRKKGKHFEHKADHRTKPKHRSGKTVFAMVKDLKVVFGKGPGSQHIESEDGHAAMWKKNSIFWELPYWEFLDVRHAIDVMHLTKNLCVNLLGFLGVYGKSKDTLEARNDLKHMEQRGDFHPEPKEKGSHYLSPASYTLSKAEKESMFECLESIKVPSRYSTNIKRIISTKEKKFTNLKSHDCHVLMTQLLPVVIRGILPDNVRATITKLCAFMNAISQKVIDPDRLEALQNEVVQCLVSFELIFPPSFFNIMTHLLCHLVKEIRILGPMYLHNMFPFERYMGVLKKYVRNRARPEASIAKGYGTEEVIEFCVEFIEDLRPIGVPKSRHEGRLRGKGTLGRKAIMTVDNNLFRKAHFTVLQHSSLVAPYIEEHLALVHARNIGKSDAWITRHHIDTFPAWLRQHLMGNESINQQLAFLARGPSGSIATFQGYEINGYTFYTRAQDMKSTNQNSAVRVDAMGHDGTTATYYGAIEDIWELDYGPLKVPLFRCQWVRLTGGGVMIDDSGMTTVDLNKVGYSDEPFVLANDVTQVFFVKDMSSKGKKGRGPDEPKRQVVLPGKRKIVGVEDKTDEDYDQLDGQPPFTVTIDPSILLSNEDTPYSRSDHKEGTIVRRKCFLYQQMADRDEEQILYDTIAEGSSQYWNEEEGNEDPNQYLNEEGNVERDAEGNQQGHVERDVEGNQEEEASGSQPSIGQKRARGQRGAAKKLEGRHIITEVEEDGRPSAPAEAAKNYVRHSGWVVRDNVPVSTVYWRRTRARGDHESFVPDSEKEMLWTTMLETFTLPAGTEDKVKRWTLKKMAEQFQSFKGDLYQKYILKGQTPNFDTFPKLRDHWDEFVAYKTGEQGKAMMERNKENAAKKKYHHHLGSGGYSVAMPKWEQMEASLIERGIEPATANWPERSKFWYYAHGGTLNPADGSLTPEHPGRTRGKGVIPWKISFKEDIHTYRSRMRSKRDTEAKIADLEFRVSSYELNMQEEVARKVDERMAAHRSHDPQPTIPPAMVSPSGNRSSCASTGQVGSQSMDAMQTQDESTCPMDDITQRTPCELHIPLKNLSIKVASGMAIPTDPSGTYHCRPIPAGYSKVEVELVEGAYEDLELDYPGGDGETHLRDTCHAIILWRRRYIILPGRQAASRAPSPPAPPSPPQDPAPSPPHAPPAPSPPQAPASTPQDPAPTPPRAPTPTPPQAPLPAPSKSRAPPAPPLAHTRATKKAKVDAAKNKDPGYDCTQEELDAYVASEVKRQFKPRSPEKKIPIDPSVRNFFRGMSASVKEAIKLSDYERTLKKASSGKSKPVPQLGEQPNQEIEPLVTGKEMTIEQFITDTGLTTDQLLGVAPIEKAEVKYMYELGKPLVKPELLQSLPTQMYKFHQLYMEMSATGREMIGARIRDTDFLQGDDILWINFRGIYELYRLDALDVSIMSCWILMEIQRARRRRVFDTGFIDPRKVNVAMLDQYPQETEDNLVHLLKAQHYKTFILLPYNTEFHWVLLLIDLEACTVNVYDSMDKKESTFDKVFELIDRAWYRFRHLVRGKWRERLRRKFKFPCAKQKQGTNLCGYYVCEYCHCLANQIITTRELDFIRMRDNLTTHKEFIAAVQEQLMGFINKEILDPKGEFYYDGNTIHRSLASELAASTTTSKS

SEQ ID NO: 195747 - protein, 1811 aa, Oryza sativa
  unsure (1)..(1811): unsure at all Xaa locations
  Clone ID: PAT_MRT4530_91666C.1.pep
QCCHVGPRIFLTFPAISMDRQWMYADRRSKEFIDGVHYFLRVAEANRQRGFIYCPCNKCKNQKEYSASRTIHFHLFESGFMPSYNCWTSHGEQGVEMEEDEVEDDNIPDFAQYVGFEGNQTGEEEIAADGNDVADDLGQMLQDAREDCESEKEAHKLDKMLEDHRTSLYPGCEXGHKKLDTTLELLQWKAKNGVSDKAFGDLLKLVKNILPGGNKLPETTYEAKKIVCPLGLEVHKIHACPNDCILYRGEEYENLEACPVCKALRYKIRRDDPGEVDGQLTKKRIPAKVMWYFPIIPRLRRLFRNKGNARMLRWHAEERQQDGMLRHPADGSQWRNIDRKFKEFGKDARNIRFGLSTDGMNPFGEMSSGHSTWPVTMCIYNLPPWLCMKRKYIIMPIIIQGPKQPGNDIDVYLIPLVEDLKLLWKKEGVPVWDEDKQEEFNLRALLFVTINDWLALSNLSGQSNKGYKACTHCMDETESVYGKSKDTLEARNDLKHMEQRGDLHPEPKEKGSHYLSPASYTLSKAEKESMFECLESIKVPSGYSTNIKRIISTKEKKFTNLKSHDCHVLMTQLLPVVIRGILPDNVRATITKLCAFMNAISQKVIDPDRLEALQNEVRYMGVLKKYVRNRARLEASIAKGYGIEEVIEFCVEFIEDLRPIGVPESRHEGRLRGKGTLGRKAITTVDNNLFRKAHFTVLQHSSLVAPYIEEHLALVRARNIGKSDAWITRHHIDTFPAWLRQHLMGNESINQQLAFLARGPSGSIATFQGYEINGYTFYTRAQDMKSTNQNSAVRVDAMGHDGTTATYYGAIEDIWELDYGPLKVPLFRCQWVRLTGGGVMIDDSGMTTVDLNKVGYSDEPFVLANDVTQVFFVKDMSSKGKKGRGPDEPKRQVVLPGKRKIVGVEDKTDEDYDQLDGQPPFTVTIDPSILLSNEDTPYSRSDHKEGTIYLNEEGNVERDAEGNQQGHVERDVEGNQEEEASGSQPSVGRKRARGQRGAAKKLEGRHIITEVEEDGRPSAPAEAAKNYVRHSSWVVRDNVPVSTVYWRRTRARGDHESFVPDSEKEMLWTTMLETFTLPAGTEDKVKRWTLKKMAEQFQSFKGDLYQKYILKGQTPNFDTFPKLRDHWDEFVAYKTGEQGQAMMERNKENAAKKKYHHHLGSEGYSVAMPKWEQMEASLIERGIEPATANWPERSKFWYYAHGGTLNPADGSLVFGDQIREAARRLTDAVEASSQGTFRPDRDRDELSRMRSKRDIEAKIADLEFRVSSYELNMQEEVARKVDERMATHRSHDPQPTIPPAMVSPSGNRSSCASTGQVASGMAIPTDPSGTYHCRPIPAGYSKVEVELVEGAYEDLELDYPGGDGETHLRDTCHAIILWRRWYIILPGRQAASRAPSPPAPPSPPQDPAPSPPHAPPAPSPPQAPPAPSKSRPPPAPLPAHTRATKKVKVDAAKNKDPGYDCTQEELDAYVASEVKRQFKPRSPEKKIPIDPSVRNFFRGMSASVKRSIFXKSKPVPQLGEQPNQEIEPLVTGKEMTIEQFITDTGLTTDQLLGVAPIEKAEVKYMYELGKPLVKPELLQSLPTQMYKFHQLYMEMSATGREMIGARIRDTNFLQGDDILWINFRGIYELYQLDALDVSIMSCWILMEIQRARRRRVFDTGFIDPRKVNVAMLDQYPQETEDNLVHLLKAQHYKTFILLPYNTELNVYDSMDKKESTFDKVFELIDRAWYRFRHLVRGKWRERLRRKFKFPLIRMRDNLTTHKEFIAAVQEQLMGFINEEILDPKGEFYYDGNTIHRSLASELAASTTTSKS

SEQ ID NO: 195748 - protein, 113 aa, Oryza sativa
  Clone ID: PAT_MRT4530_91667C.1.pep
MAGDGTAHRREKGGDACRRLICCNGGSVVGNGSRRRVAEADWCGKVAAADWLGGGGGKARDGVDGGALGRGERTKEGPNSVTMEKTSGFSTGGSFLCGRRLTTTAWRWYDEPT

SEQ ID NO: 195749 - protein, 247 aa, Oryza sativa
  unsure (1)..(247): unsure at all Xaa locations
  Clone ID: PAT_MRT4530_91668C.1.pep
MGKHGKCDVEACYPGGAPGGGMYPYMIENAQLRWAFIRKVYVIVSVQLLVTVAVAGAVNLVEPIKTFFQARTPEVLVAYVIIIISPLIMMLPMIYFRNKHPINLFFLLLFTVCISFSVGLGCPLXNGTVIFQAAGMTAAIVIGLTCYTFWAAKRGYDFEFLGPFLFAATLVLFLYAIITIFLPMGRTGKLVYGCVAALIFSGFIIYDTDNLIKRYTYDEYVAAAITLYLDIINLFMALVTALQAADG

SEQ ID NO: 195750 - protein, 1692 aa, Oryza sativa
  unsure (1)..(1692): unsure at all Xaa locations
  Clone ID: PAT_MRT4530_91669C.1.pep
MEEDEVEDVNIPDFAQYVGFEGNQTGEEEIAADGNDVADDLGQMLQDAREDCESEKEAYKLDKMLEDHRTSLYPGCEQGHKKLDTTLELLQWKAKNGDGMLRHPADGSQWRNIDRKFKEFGKDARNIRFGLSTDGPKQPGNDIDVYLRPLVEDLKQLWKKEGVPVWDEDKQEEFNIRALLFVTINDWPALSNLSGQSNKGVNKPRGAPEGGLAGTADGRRRARAPMVTAGDHRRGGAAPERAEGRGKRKGRSHGSPRSTTTTGTATEAEEGGGAVRDDEGDGAPAVGGRSEGADGVDDDVAKPKEVTPSREEVRSDDGGGPEVGGDGGERANHPVRKKGKHFEHKADHRTKPKHHSGKTVFAMVKDLKVVFGKGPGSQHIESEDGHAAMWKKNSIFWELPYWEFLDVRHAIDVMHLTKNLCVNLLGFLGVYGKSKDTLEARNDLKHMEQRGDLHPEPKEKGSHYLSPASYTLSKAEKESMFECLESIKVPSGYSTNIKRIISTKEKKFTNLKSYDCHVLMTQLLPVVIRGILPDNVRATITKLCAFMNAISQKVIDPDRLEALQNKVVQCLISFELIFPPSFFNIMTHLLCHLVKEIRILGPMYLHNMFPFERYMGVLKKYVRNRARPEASIAKGYGTEEVIEFCVEFIEDLRPIGVPESRHEGRLRGKGTLGRKAIMTVDNNLFRKTHFTVLQHSSLVAPYIEEHLALVRARNIGKSDAWITRHHIDTFPAWLRQHLMDNESINQQLAFLARGPSGSIATFQGYEINGYTFYTRAQDMKSTNQNSAVRVDAMGYDGTTATYYGAIEDIWELDYGPLKVPLFWCQWVRLTGGGVMIDDSGMTTVDLNKVGYSDEPFVLANDVTQVFYVKDISSKGKKGRGPDEPKRPVVLPARPRLLHQHLEVFSRIXSLSASPSPPLPRASPRRXAVVSRRRLARVIVAASAAAASLGCFSYEQMADRDEEXILYDTIAEESSQYWNEEEGNEDPNQYLNEEGNVERDAEGNQEGNVERDVEGNQEEEASGSQPSAGXKRARGQRGAAKKLEGWHIITEVDEDGRPSAPAEAAKNYVRHIGWVVRDNMPVSTVYWXTRARGDHESIVPDSKKEMLWTAMLETFTLPAGTEDKVKRWTLKKMAEQFQSFKGDLYQKYILKGQTPNFDTFPKLRDHWDEFIAYKTGQQGQAMMERNKENAAKKKYHHHLGSGGYSVAMPKWEEMEASLLERGIEPATAKWPDRSKFWYYAHGGMLNPIDGSLVFSDQICKAARRLTDVVEASSQGTFRPEREKDELSLALQTPEHPGRIRGKGVIPWKIGFKEDIHTYRSRMRSKRDTDAKIADLEYRVSSXELSMQEEVARKVDERIAAHRSHDPQLTIPPAMVSPSGNRSSCASTGQVGSQSMDAMQTQDETTCPVDDITQRTPCKLHISFKNLSIKVASGMAIPTDPSGTYHCRPIPAGYSKVEVELVEGTYEDLELDYHRGDGETHLRDTSHAIILWRKRYIILPGRQAASRAPSPPALPSPPQAPAPSPPHAPAPSPPQAPAPTPPQAPSPTPPQAPTPTPSQAPRLAPSKSRAPQAPPPAPTRATKKAKVDAAKNKDPGYDCTQEDLDAFVASEVRRQLKPRSPEKKIPIDPSTRNFFRGMSAPAKEAIKLSDYERTLKKASFGKSKPVPQLREQPNQEIEPLVTGEDLKIFKKIND

SEQ ID NO: 195751 - protein, 56 aa, Oryza sativa
  Clone ID: PAT_MRT4530_9166C.1.pep
FLSAAHTVGISPSPATPLPRRTIRLSSVLRRFATSKGTRNGRTDRKWVCGLGESLA

SEQ ID NO: 195752 - protein, 1871 aa, Oryza sativa
  unsure (1)..(1871): unsure at all Xaa locations
  Clone ID: PAT_MRT4530_91670C.1.pep
MEEDKVEDDNIPDFAQYVGFEGNQTGEEEIAADGNDVADDLGQMLQDAREDCESEKEAHKLVRMLEDHRTSLYPGCERGHKKLDTTLELVQWKAKNGDGMLRHPADGSQWRNIDRKFKEFGKDARNIRFGLSTDGMNPFGEMSSGHSTWPVTMCIYNLPPWLCMKRKYIMMPIIIQGPKQPGNDIDVYLRPLVEDLKQLWKKEGVPMWDEDKQEEFNLRALLFVTINDWPALSNLSGQSNKGYKACTHCMDETESTYLKHCRKVVYMGHRRFLAANHPVRKKGKHFEHKADHRTKPKHRSGKTVFDMVKDLKVVFGKGPGSQHIESEDGHAAMWKKNSIFWELPYWEFLDVRHAIDVMHLTKNLCVNLLGFLGVYGKSKDTLEARNDLKHMEQRGDLHSEPKEKGSHYLSPASYTLSKAEKESMFECLESIKVPSGYSTNIKRIISTKEKKFTNLKSHDCHVLMIQLLPVVIRGILPDNVRATITKICAFMNAISQKVIDPDRLEALQNEVVQCLVSFELIFPPSFFNIMTHLLCHLVKEIRILGPMYLHNMFPFERYMGVLKKYVRNRARPEASIAKGYGTEEVIEFCVEFIEDLRPIGVPESRHEGRLRGKGTLGRKAITTVDNNLFRKAHFTVLQHSSLVAPYIEEHLALVRARNIGKSDAWITRHHIDTFPAWLRQHLMGNESINQQLAFLARGPSGSIATFQGYEINGYTFYTRAQDMKSTNQNSAVRVDAMGHDGTTATYYGAIEDIWELDYGPLKVPLFRCQWVRLTSGGVMIDDSGMTTVDLNKVGYSDEPFVLANDVTQVFFVKDMSSKGKKGRGPDEPKRQVVLPGKRKIVGVEDKTDEDYDKLDGQPPFTVTIDPSILLSNEDTPYSRSDHKEETIERRKCFLYQQMADRDEEQILYDTIAEGSSQYWNEEEGNEDPNQYLNEEGNVERDAEVNQQGHVERDVEGNQEEEASGSQPSVGQKRARGQRGGAKKLEGRHIITEVEEVGRPSAPAEAAKNYVRHSGWVVRDNVPVSTVYWRRTRARGDHESFVPDSEKEMLWTTMLETFTLPAGTEDKVKRWTLKKMAEQFQSFKGDLYQKYILKGQTPNFDTFPKLRDHWDEFVAYKTGEQGQAMMERNKENAAKKKYHHHLGSGGYSVAMPKWEQMEASLIERGIEPATANWPEQSKFWYYAHGGTLNPADGSLVFGYQIREAARRLTDAVEASSQGTFRPDRDRDELTLALQTPEHPGRTRGKGVIPWKIGFKEDIHTYRSRMRSKRDTEAKIADLEFRVSSYELNMQEEVARKVDERMAAHRSHDPQPTIPPAMVSPSGNRSSCASTGQVGSQSMDAMQTQDESTCPVDDITQRTPCELHIPFKNLSIKVASGMAIPTDPSGTYHCRPIPAGYSKVEVELVEGVYEDLELDYPGGDGXPAPSPPHAPPAPSPPQAPASTPPQDPAPTPPRAPTPTPPQAPLLAPSKSRAPPXAPPPAHTRATKKAKVDAAKNKDPGGMSASVKEAIKLSDYERTLKKASSGKSKPVPQLGEQPNQEIEPLVIGKEMTIEQFITDTGLTTDQLLGVAPIEKAEVKYMYELGKPLVKPELLQSLPTQMYKFHQLYMEMSATGREMIGARIRDTDFLQGDDILWINLRGIYELYQLDALDVSIMSCWILMEIQRARRRRVFDTGFIDPRKVNVAMLDQYPQETEDNLVHLLKAQHYKTFILFPYNTEFHWVLLLFDLEACTVNVYDSMDKKESTFDKVFELIDRAWYRFRHLVRGKWRERLRRKFKFPCAKQKQGTNLCGYYVCEYCHCLADQIITTRELDFIRMRDNLTTHKEFIAAVQEQLMGFINEEILDPKGEFYYDGNTIHRSLASELAASTTTSKS

SEQ ID NO: 195753 - protein, 2295 aa, Oryza sativa
  unsure (1)..(2295): unsure at all Xaa locations
  Clone ID: PAT_MRT4530_91671C.1.pep
MDRQWMYADRRSKEFIDGVHYFLRVAEANRKRGFICCPCNKCKNQKEYSASRTIHFHLFESGFMPSYNCWTSHGEQGVEMEEDEVEDDNIPDFAQFVGFEGNQTGEEEIAADGNDVADDLGQMLQDAREDCESEKEAHKLDKMLEDHRTSLYPGCEQGHKKLDTTLELLQWKAKNGVSDKAFGDLLKLVKNILPGGNKLPETTYEAKKIXVCPLGLEVHKIHACPNDCILYRGEEYENLEACPVCKALRYKIRRDDPGEVDGQLTKKRIPAKXVMWYFPIIPRLRRLFRNKGNARMLRWHAEERQQDGMLRHPADGSQWRNIDRKFKEFGKDARNIRFGLSTDGMNPFGEMSSGHSTWPVTMCIYNLPPWLCMKRKYIMMPIIIQGPKQPGNDIDVYLRPLVEDLKQLWKKEGVPVWDEDKQEEFNLRALLFVTINDWPALSNLSGQSNKGYKACTHCMDETESTYLKHCRKVVYMGHRRFLAANHPVRKKGKHFEHKADHRTKPKHRSGKTVFAMVKDLKVVFGKGPGSQHIESEDGHAAMWKKNSIFWELPYWEFLDVRHAIDVMHLTKNLCVNLLGFLGVYGKSKDTLEARNDLKHMEQRGDLHPEPKEKGSHYLSPASYTLSKAEKESMFECLESIKVPSGYSTNIKRIISTKEKKFTNLKSHDCHVLMTQLLPVVIRGILPDNVRATITKLCAFMNAISQKVIDPDRLDALQNEVVQCLVSFELIFPPSFFNIMTHLLCHLVKEIRILGPMYLHNMFPFERYMGVLKKYVRNRARPEASIAKGYGTEEVIEFCVEFIEDLRPIGVPESRHEGRLRGKGTLGRKAIMTVDNNLFRKAHFTVLQHSSLVAPYIEEHLALVRARNIGKSDVWITRHHIDTFPAWLRQHLMGNESINQQLAFLARGPSGSIATFQGYEINGYTFYTRAQDMKSTNQNSAVRVDAMGHDGTTATYYGAIEDIWELDYGPLKVPLFRCQWVRLTGGGVMIDDSGMTTVDLNKVGYSDEPFVLANDVTQVFFVKDMSSKGKKGRGPDEPKRQVVLPVRPRLLHQHLDVFGRSISLGLSPSPPLPRANPRADAAVSRRRLELVVLAAASASSAAAASLRCFLYQQMADRDEEQILYDTIAEGSSQYWNEEEGNEDPNQYLNEEGNVERDAEGNQQGHVERDVEGNQEEEASGSQPSVGQKRARGQRGAAKKLEGRHIITEVEEDGRPSAPAEAAKNYVRHSGWVVRDNVPVSTVYWRRTRARGDHESFVPDSEKEMLWTTMLETFTLPAGTEDKVKRWTLKKMAEQFQSFKGDLYKKYILKGQTPNFDTFPKLRDHWDEFVAYKTGEQGQAMMERNKENAAKKKYHHHLGSGGYSVAMPKWEEMEASLIERGIEPATANWPERSKFWYYAHGGTLNPADGSLVFGVQIREAAQRLTDAVEASSQGTFRPDRDRDELTLALQTPEHPGRTRGKGVIPWKIGFKEDIHTYRSRMRSKRDTEAKIADLEFRVSSYELNMQEEVARKVDERMAAHRSHDPQPTIPPAMVSPSGNRSSCASTGQVGSQSMDAMQTQDESTCPVDDITQRTPCELHIPFKNLSIKVASGMAIPTDPSGTYHCRPIPAGYSKVEVELVEGAYEDLELDYPGGDGETHLRDTSHAIILWRRRYIILPGRQAASRAPSPPAPPSPPHDPAPSPPHAPPAPSPPQAPASTPPQDPAPTPPRAPTPTPPQAPLPAPSKSRAPPAAPPAHTRATKKAKVDADKNKDPGYDCTQEELDAYVASEVKRQFKPRSPEKKIPIDPSVRNFFRGMSASVKEAIKLSDYERTLKKASSGKSKPVPQLGEQPKQEIEPLVTGKEMTIEQFITDTGLTTDQLLGVAPIEKAEVKYMYELGKPLVKPELLQSLPTQMYKFHQLYMEMSATGREMIGARIRDTDFLQGDDILWINFTHIYELYQLDAVDVSIMSCWILMEIQRARRRRVFDTGFIDPRRVNVAMLDQYPQETEDNLVHLLKAQHYKTFILLPYNTEFHWVLLLFDLEACTVNVYDSMDKKESTFDKVFELIDRAWYRFRHLVRGKWRERLRRKFKFPCAKQKQGNNLCGYYVCEYCHCLANQIITTRELDFIRMRDNLTTHKEFITAVQEQLMGFINEEILNPKARRGREVGSGAGTGGELEGGGGCRRATAARRASPTSPSPPVASTPGGCHRATAALMQCQRVSDLLIVATFLSFPFELFYFATCADLSEVKCAVLHFCAFIVLCSATNLLAAFTHALPHSTPLLRALTTAKVLAVAASSAVTVSLPTFIPKLLCFKV

SEQ ID NO: 195754 - protein, 161 aa, Oryza sativa
  Clone ID: PAT_MRT4530_91672C.1.pep
MFQPNIAILSPHTISQRPHLDRAPAPIRTSVATSPSSSSSPLPATSRRRQAVKSHKPPQPLTSLPATCVARHLSICRRCLCAFAPASHCRHFLTLRPPPSLLRPLAACPPEGVVACSAPRLLASATASTAVGRLRHPLASASTASRLHTSTPAGRQPWKLE

SEQ ID NO: 195755 - protein, 2163 aa, Oryza sativa
  unsure (1)..(2163): unsure at all Xaa locations
  Clone ID: PAT_MRT4530_91673C.1.pep
MKLIKMDRQWMYADRRSKEFIDGVHYFLRVAEANRQRGFICCPCNKCKNQKEYSASRTIHFHLFESGFIPSYNCWTSHGEQGVEMEEDEVEDDNIPDFAQYVGFEGNQTGEEEIAADGNDVADDLGQMLQDAREDCESEKEAHKLDKMLEDHRTSLYPGCEQGHKKLDTTLELLQWKAKNGVSDKAFGDLLKLVKNILPGGNKLPETTYEAKKIVCPLGLEVHKIHACPNDCILYRGEEYENLEACPVCKALRYKIRRDDPGEVDGQLTKKRIPAKVMWYFPIIPRLRRFFRNKGNARMLRWHAEERQQDGMLRHPADGSQWRNIDRKFKEFGKDARNIRFGLSTDGMNPFGEMSSGHSTWPITMCIYNLPPWLCMKRKYIMMPIIIQGPKQPGNDIDVYLRPLVEDLKLLWRKEGVPVWDEDKQEEFNLRALLFVTINDWPALSNLSGQSNKGYKACTHCMDETESTYLKHCRKVVYMGHRRFLAANHPVRKKGKHFEHKADHRTKPKHRSGKTVFAMVKDLKVVFGKGPGSQHIESEDGHAAMWKKNSIFWELPCWEFLDVRHAIDVMHLTKNLCINLLGFLGVYGKSKDTLEARNDLKHMEQRGDLHPEPKEKGSHYLSPASYTLSKAEKESMFECLESIKVPSGYSTNIKRIISTKEKKFTNLKSHDCHMLMTQLLPVVIRGILPDNVRATITKLCAFMNAISQKVIDPDRLEALQNEVVQCLVSFELIFPPSFFNIMTHLLCHLVKEIRILGPMYLHNMFPFERYMGVLKKYVRNRARPEASIAKGYGTEEVIEFCIEFIEDLRPIGVPESRHEGRLRGKGTLGRKVITTVDNNLFRKAHFTVLQHSSLVAPYIEEHLALVRARNIGKSDAWITRHHIDTFPAWLRQHLMGNESINQQLAFLARGPSGSIATFQGYEINGYTFYTRAQDMKSTNQNSAVRVDAMGHDGTTATYYGAIEDIWELDYGPLKVPLFRCQWVRLTGGGVMIDDSGMTTVDLNKVGYSDEPFVLANDVTQVFFVKDMSSKGKKGRGPDEPKRQVVFPGKRKIVGVEDKTDEDYDQLDGQPLSRENVNENENDRTNESENENDRTKTSENEGTNVNENKRTNVNENERTNMNELGNMADRDEEQILYDTIAEGSSQYWNEEEGNEDPNQYLNEEGNVERDAEGNQQGHVERDVEGNQEEEASGSQPSVGQKRARGQRGAAKKLEGRHIITEVEEDGRPSAPAEAAKNYVRHSGWVVRDNVPVSTVYWRRTRARGDHESFVPDSEKEMLWTTMLETFTLPAGTEDKVKRWTLKKMAEQFQSFKGDLYQKYILKGQTPNFDTFPKLRDHWDEFVAYKTGEQGKAMMERNKENAAKKKYHHHLGSGGYSVAMPKWEQMEASLIDRGIEPATANWPERSKFWYYAHGGTLNPADGSLVFGYQIQEAARRLTDAVEASSQGTFRPDRDRDELTLALQTPEHPGRTRGKGVIPWKIGFKEDIHTYRSRMRSKRDTEAKIADLEFRVSSYELNMQEEVARKVDERMAAHRSHDPQPTIPPAMVSPSGNRSSCASTGQVGSQSMDAMQTQDESTCPVDDITQRTPCELHITFKNLSIKVASGMAIPTDPSGTYHCRTIPAGYSKVEVELVEGAYEDLELDYPGGDGXYIILPGRQAASRAPSPPAPPSPPQDPAPSPPHAPPAPSPPQAPASTPQDPAPTPPRAPTPTPPQAPLPAPSKSRAPPXAPPLAHTRATKKAKVDAAKNKDPGYDCTQEELDAYVASEVKRQFKPRSPEKKIPIDPSVRNFFRGMSASVKEAIKLSDYERTLKKASSGKSKPVPQLGEQPNQEIEPLVTGKEMTIEQFITDTGLTTDQLLGVAPIEKAEVKYMYELGKPLVKSELLQSLPTQMYKFHQLYMEMSATGREMIGARIRDTDFLQGDDILWINFRGIYELYQLDALDVSIMSCWILMEIQRARRRRVFDTGFIDPRKVNVAMLDQYPQETEDNLVHLLKAQHYKTFILLPYNTEFHWVLLLIDLEACTVNVYDSMDKKESTFDKVFELIDRAWYRFRHLVRGKWRERLRRKFKFPCAKQKQGTNLCGYYMCEYCHCLADQIITTRELDFIRMRDNLTTHKEFIAAVQEQLMGFINEEILDPKGEFYYDGNTIHRSLASELAASTTTSKS

SEQ ID NO: 195756 - protein, 178 aa, Oryza sativa
  unsure (1)..(178): unsure at all Xaa locations
  Clone ID: PAT_MRT4530_91674C.1.pep
MASAPLPQAAQLGYKPNVFSFWIXFLQLRLIDYCKNEHMTYSXSHTANMQVHKDTKGWHNIGSFAKAAFSKELRRRTHEPSQRRKRQANTQNXRKRPGEPRHNNANGGHREREGIKVTLTTIXRRRTATEDSRRRASKGGEVLSTEAMXSGDVRRQRRGGRASLRSCESNGGNRDTRI

SEQ ID NO: 195757 - protein, 2110 aa, Oryza sativa
  unsure (1)..(2110): unsure at all Xaa locations
  Clone ID: PAT_MRT4530_91675C.1.pep
MDRQWMYADRRSKEFIDGVHYFLRVAEANRQRGFICCPCNKCKNQKEYSASRTIHFHLFESGFMPSYNCWTSHGEQGVEMEEDEVEDDNIPDFAQYVGFEGNQTGEEEIAADGNDVADDLGQMLQDAREDWESEKEAHKLDKMLEDHRTSLYPGCEQGHKKLDTTLELLQWKAKNGVSDKAFGDLLKLVKNILPGGNKLPETTYEAKKIVCPLGLEVHKIHACPNDCILYRGEECENLEACPVCKALRYKIRRDDPGEVDGQLTKKRIPAKVMWYFPIIPRLRRLFRNKGNARMLRWHAEERQQDGMLRHPADGSQWXNIDRKFKEFGKDARNIRFGLSTDGMNPFGEMSSGHSTWPVTMCIYNXPPWLCMKRKYIMMPIIIQGPKQPGNDIDVYLRPLVEDLKQLWKKEGVPVWDEDKQEEFNLRALLFVTINDWPALSNLSGQSNKGYKACTHCMDETESTYLKHCRKVVYMGHRRFLAANHPVRKKGKHFEHKADHRTKPKHRSGKTVFAMVKDLKVVFGKGPGSQHIESEDGHAAMWKKNSIFWELPYWEFLDVRHAIDVMHLTKNLCVNLLGFLGVYGKSKDTLEARNDLKHMEQRGDLHPEPKEKGSHYLSPASYTLSKAEKESMFECLESIKVPSGYSTNIKRIISTKEKKFTNLKQRCSCRCHXTMEQLPRITVLSRTYGNLTMVLSRFLCSGANGLGKRKIVGVEDKTDEDYDQLDGQPPFTVTIDPSILLSNEDTPYSRSDHKEGTIVRRKYVXNYCVHDVNYFGCIDYPYKSIXCMAYINYARLLEVSTSLNQGFLKXKSRKIFKSIKFNIFLKXHSYIRVFHNLIXSFICYLYMTIRIFKRLKSCMWHLHMLIXEFLAFNXIIPTLSTYDDYNFYXNFKSCSMYIHILIRVFTNIIISFIYMLSIYDYWNFYXLYLLITIYPLNLSKIICSAIIFSPGXLTLTGFKKNFEIAGKDIYSRLLRTTETKDIFSPGXRTTGSKDPGVYIFPVRPRLLHQHLNVFGRSISLGLSPSPPLPRANPRADXAAVSLRRLELVVLAAASVSSAAAASLRCFMYQQMADPDEEQILYDTIAEGSSQYWNEEEGNEDPNQYLNEEGNVERDAEGNQQGHVERDVEGNQEEEASGSQPSVGQKRARGQRGAAKKLEGRHIITEVEEDGRPSAPAEAAKNYVRHSGWVVRDNVPVSTVYWRRTRARGDHESFVPDSEKEMLWTTMLETFTLPAGTEDKVKRWTLKKMAEQFQSFKGDLYQKYILKGQTPNFDTFPKLRDHWDEFVAYKTGEQGQAMMERNKENAAKKKYHHHLGSGGYSVAMPKWEQMEASLIERGIEPATANWPERSKFWYYAHGGTLNPADGSLVFGYQIQEAARRLTDAVEASSQGTFRPDRDRDELTLALQTPEHPGRTXGKGVIPWKIGFKEDIHTYRSRMRSKRDTEAKIADLEFRVSSYELNMQEEVARKVDERMAAHRSHDPQPTIPPAMVSPSGNCSSCASTGQVGSQSMDAMQTQDESTCPVDDITQRTPCELHIPFKNLSIKVASGMAIPTDPSGTYHCRPIPAGYSKVEVELVEGAYEDLELDYPGGDGETHLRDTCHAIILWHRRYIILPGRQAASHAPSPPAPPSPPQDPAPSPPHAPLAPSPPQAPASTPPQDPAPTPPRAPTPTPPQAPLPAPSKSRAPPAPPPAHTRATKKAKIDAAKNKDPGYDCTQEELDAYVASEVKRQFKPRSLEKKIPIDPSVRNFFRGMSAPVKEAIKLSDYERTLKKASSGKSKPVPQLGEQPNQEIEPLVTREDMMIEKFIIDTGLTTDQLLGVEPIEKAXLKYMYELGKPLVKPELVQSLPTQMYKFHQLYMEMSATGREMIGARIRDPDFLQGDDILWINFKRIYEVYQLDALDVSIMSCWILMEIQRARRRRVFDTGFIDPRRVNVAMLDQYPQETEDNLVHLLKAQHYKTFILLPYNTEFHWVLLLFDLSACTVNVYDSMDKKESTFNKVFELIYRAWYRFRHLVCGNWRERLRRRFKFPFIRMRDNLTTHKEFIAAVQEQLMGFINEEILDPKGEFYYDGNTIHRSLASELAASTTTCHPMRWAFGIFQRINLRVGLSPS

SEQ ID NO: 195758 - protein, 1737 aa, Oryza sativa
  Clone ID: PAT_MRT4530_91676C.1.pep
MGAVLGTGRVGTLTRVALTVLVFLLLLPSHALAAAVAKDTSATLVETLPLPTTLVGPESVAFDKFGDGPYSGVSDGRILRWDGADKGWTTDCKNEQMIEDKDEVHAHLIMNGFMKKYTCWTKHGEQEAPDVAAEEVLDQDVENTAAAREGMFVPSPLGGETIDLDTQCLSTMLHDIEDAEDNDRDYEKFSKLVEDCQMPLYDGCKSKHSKLSCVLELMKLKASNGWSDKSFTELLELLKDLLPEGNNLPQTTYEAKQVLCPLGLENVCESLMGLLLNPGTTKDGLNARRDLEDMGVRSELHPITTESGRVYLPPACYTLSKEEKIDLLTCLSGIKVPSGYSSRISRLVSLQDLKLVGMKSHDCHVLITQLLPVAIRNILPPKVRHTIQRLCSFFHAIGQKIIDPEGLDELQAELVRTLCHLEMYFPPTFFDIMEHLPVHLVRQTKCCGPAFMTQMYPCERYLGILKGYVRNRSHPEGSIIESYTTEEAIEFCVDYMSETSSIGLPRSHHEGRLDGVGTVGRKTIRLDRKVYDKAHFTVLQHMTEVVPYVDEHLAVIRQENPGRSESWGPEWSATTWQGYDINGYTFHTVKQDSKCTVQNSGLRIEAASDSGRRDQYYGRVEQILELDYLKFKVPLFRCRWVDLRNVKVDNEGFTTVNLANNAYKDEPFVLAKQVVQVFYIVDPCNKKVHVVREGKRRIVGLDNIADEDDYNQHVHGIGQEIPLEEEEEEDEVQYARPSQVTSPVTAQSVGPVTGGLTCDGSTIRCPLSLTHSLDRRLASLDLSAALYALLSTAASTSPPPSSPPTNPPPSPPPSTPSSPPPRPRPLRHHLCRRPLRRPPHRRLDLSAGLSTAADSRPPPSISIDLSAAISAALSTAISALYAALPTAASTSPPLPPHSLSRRPPGPPLSRHARTVVAATGISSPPPPPLDRDSSSPCAASSARRLLSRPTAPRTVIGRWSNCCGIAARENFGILHKDIGKVTEAEKERAWTAMEKWFTFPAEAKDRLKRKAFQKMGKAWKNWKSKLFTEFVNPPGNHTPFDEYPQITEAVWEEFCSLKTTQEFRESSEAHRLLQQRNEHPHRLGTAGYIGKEAIWAQEDAAAAAANVPAPFSDIPEQRARNWARARGKVNPDGSVTFENKSDAVVYQELLCLVTEQALQSEVESTPKRREDDILTKALGTKEHPGRTRGIGSDVPWKHGLPQYRSQYRKRKVSKEERDARLKAELKVEVIQELEASMNARVEERVNKVLADMNIPRVTTPDVQPTPRVQHDASPSQHRSSCASTEVPAPGLPIAPLAAVDHIEGAAQCVLLARVHPTFAPEVAEGMAFKPSVTDKVHGADLLAGYAKVSIDTVKNTWSGYPLPVPPNDEIMTLGDARKTFIQWPKEDIVVKMTPHLSRPTELTPPKSKLSIEAPRGPALSVPHSPGGADMDLADIAQSLALIKTTTKDDSSPPLVKGQKRERGKGKVGELPPEPKRGKTATSMPVSKAGKVVRAPAQFELGMPLVEDNVLAVMGIVCRELHKQYMELSNAKRKMRESSIVGHHDHQPFLSSPAYITIGFDDLFDLFRIRKLDTGLLKCYSLLCWIESRRLGKQVGFLDPSMVNEVNLRQSFTKVVDYVNQCLWAHQDKEYIMCAHNQERHWILLVIVPKWTRVTYLNSNKSKDYDFTEITKALNMAWGPYVEKGGRHKEGKDELYHDTKFACAQQIGNQCGLHVCHNMSTLLREVKDFNPEVVANGE

SEQ ID NO: 195759 - protein, 112 aa, Oryza sativa
  Clone ID: PAT_MRT4530_91677C.1.pep
MSDEYITIYSSNSILLNKKENIIGQRTHMSTTPTTTFQLKMEKKNDSVGQRIRKKLIDETHHKWEHFTTSDSERLASRTCTSCYRTAARQLGCSCRIFSMKTNLFVAVFRYF

SEQ ID NO: 195760 - protein, 710 aa, Oryza sativa
  unsure (1)..(710): unsure at all Xaa locations
  Clone ID: PAT_MRT4530_91678C.1.pep
MCIYNLPPWLCMKRKYKMMPIIIQGPKQPGNDIDVYLRPLVEDLKLLWKKECVPVWDKDKQEEFNLQVLLFVTINDWPALSNLSGQSNKGYKACTHCMDETESTYLKHYRKVVYMSHRRFLAANHPVRKKGKHFEHTADHRTKPKHHSGKTMFDMVKYLKVVFGKGPGSXPIESEDGHVAMWKKXNSIFWELPYWEFLDVHHAIDVMHLTKNLCVNLLGFRCVYGKSKDTLEARNDLKHMEQRGNLHPEPNEKGSHYLSPASYTLSKGRERKVCLECLESIKVPSGYSTNIKRIISTKEKKFTNLKSHECHVLMTQLLPVAIRGILSDNVRATITKLCAFMNAISQKXIDPDRLEALQNNMVQCXLVSFELIFPPSFLNIMTHLLCHLVKEIGILGPVYLHNMFPFERYMGVLKKYVRNRARPETSIAKGYGTXEVIEFCVEFIEDLRPIGIPESRHEGRLRGKGTLRRKAIMMVDNNLFRKAHFTVLQQSSLVAPYIKEHLALVRARNIGKSDAWITRHHIDTFSAWLRQHLMGNETINQQLAFLARGPSGSIATFXGYEINGYTFYTRAQDMKSTNQNGAVRIDAMGHDGTTGTYYGAIEDIWELDYGPLKVPLFRCQWVRLTGGGVTIDDSGMTTVNLNKVGYSDEPFVPVNDVTEVFCVNDISSKGKKGKGPDEPKRHMVLPRKRKIIGVEDXFDGQPPFTVTIDP

SEQ ID NO: 195761 - protein, 369 aa, Oryza sativa
  Clone ID: PAT_MRT4530_91679C.1.pep
MVNSRTNGSGNNNNEGNPTLAQVLAQQTQLMNMMIQQMQNQLNQGNNNAPPPQNKLTDFLRVRPPTFSSTTNLVEAGDWLHAVEKKLELLQCTDQEKVVFASHQLQGPASEWWDHFRMNRADGQPITWAEFTEAFKKTHIPVGVVALKKREFRALKQKDHTVAEYLHEFNRLARYAPEDVRTDEERQEKFLEGLKDELSVTLISHDYVDFQQLVDKAIRLEDKKNMMDNRKRKMTVFHEAQGSSQRQRIKPLQIGESSSAGQGQSQQLNIGGEIKSETNGSNEVNIEQANQPVPVQQDQSQENNSSGREQQVCFNCYNPGHFARECPKPKHQQSQVNNIVVTGANAVSVASSRVASSSVTAQPPVSRQQ

SEQ ID NO: 195762 - protein, 157 aa, Oryza sativa
  Clone ID: PAT_MRT4530_9167C.1.pep
CSGGLQRWRRGGRGRRRLGDHDDDLPERRRRLERRRRTTRAAATTAARGHTALRLYRRREAKARVAAGRGDTGDPFKGARRQRQRPTAAGDAKETSGSEREKPIRINLESNTFQAILADDSKREKVEEIPRIISPLTIRPEKERRGRIWKETAAQLG

SEQ ID NO: 195763 - protein, 95 aa, Oryza sativa
  unsure (1)..(95): unsure at all Xaa locations
  Clone ID: PAT_MRT4530_91680C.1.pep
FPIKPRLRXFFRNKGNVKMFPWPPXKRPQDGMFSPPPHGFQWGNLAQKFXKFGKGALNLRFGLSTFPPPENCLFPNPCVFIPKTRKTGVPPPNLF

SEQ ID NO: 195764 - protein, 2152 aa, Oryza sativa
  Clone ID: PAT_MRT4530_91681C.1.pep
MDRQWMYADRRSKEFIDGVHYFLRVAEANRKRGFICCPCNKCKNQKEYSASRTIHFHLFESGFMPSYNCWTSHGEQGVEMEEDEVEDDNIPDFAQFVGFEGNQTGEEEIAADGNDVADDLGQMLQDAREDCESEKEAHKLDKMLEDHRTSLYPGCEQGHKKLDTTLELLQWKAKNGVSDKAFGDLLKLVKNILPGGNKLPETTYEAKKIVCPLGLEVHKIHACPNDCILYRGEEYENLEACPVCKALRYKIRRDDPGEVDGQLTKKRIPAKVMWYFPIIPRLRRLFRNKGNARMLRWHAEERQQDGMLRHPADGSQWRNIDRKFKEFGKDARNIRFGLSTDGMNPFGEMSSGHSTWPVTMCIYNLPPWLCMKRKYIMMPIIIQGPKQPGNDIDVYLRPLVEDLKQLWKKEGVPVWDEDKQEEFNLRALLFVTINDWPALSNLSGQSNKGYKACTHCMDETESTYLKHCRKVVYMGHRRFLAANHPVRKKGKHFEHKADHRTKPKHRSGKTVFAMVKDLKVVFGKGPGSQHIESEDGHAAMWKKNSIFWELPYWEFLDVRHAIDVMHLTKNLCVNLLGFLGVYGKSKDTLEARNDLKHMEQRGDLHPEPKEKGSHYLSPASYTLSKAEKESMFECLESIKVPSGYSTNIKRIISTKEKKFTNLKSHDCHVLMTQLLPVVIRGILPDNVRATITKLCAFMNAISQKVIDPDRLDALQNEVVQCLVSFELIFPPSFFNIMTHLLCHLVKEIRILGPMYLHNMFPFERYMGVLKKYVRNRARPEASIAKGYGTEEVIEFCVEFIEDLRPIGVPESRHEGRLRGKGTLGRKAIMTVDNNLFRKAHFTVLQHSSLVAPYIEEHLALVRARNIGKSDVWITRHHIDTFPAWLRQHLMGNESINQQLAFLARGPSGSIATFQGYEINGYTFYTRAQDMKSTNQNSAVRVDAMGHDGTTATYYGAIEDIWELDYGPLKVPLFRCQWVRLTGGGVMIDDSGMTTVDLNKVGYSDEPFVLANDVTQVFFVKDMSSKGKKGRGPDEPKRQVVLPVRPRLLHQHLNVFGRSISLGLSPSPPLPRANPRADAAVSRRRLELVVLAAASASSAAAASLRCFLYQQMADRDEEQILYDTIAEGSSQYWNEEEGNEDPNQYLNEEGNVERDAEGNQEEEASGSQPSVGQKRARGQRGAAKKLEGRHIITEVEEDGRPSAPAEAAKNYVRHSGWVVRDNVPVSTVYWRRTRARGDHESFVPDSEKEMLWTTMLETFTIPAGTEDKVKRWTLKKMAEQFQSFKGDLYKKYILKGQTPNFDTFPKLRDHWDEFVAYKTGEQGQAMMERNKENAAKKKYHHHLGSGGYSVAMPKWEEMEASLIERGIEPATANWPERSKFWYYAHGGTLNPADGSLVFGVQIREAAQRLTDAVEASSQGTFRPDRDRDELTLALQTPEHPGRTRGKGVIPWKIGFKEDIHTYRSRMRSKRDTEAKIADLEFRVSSYELNMQEEVARKVDERMAAHRSHDPQPTIPPAMVSPSGNRSSCASTGQVGSQSMDAMQTQDESTCPVDDITQRTPCELHIPFKNLSIKVASGMAIPTDPSGTYHCRPIPAGYSKVEVELVEGAYEDLELDYPGGDGETHLRDTSHAIILWRRRYIILPGRQAASRAPSPPAPPSPPHDPAPSPPHAPPAPSPPQAPASTPPQDPAPTPPRAPTPTPPQAPLPAPSKSRAPPAAPPAHTRATKKAKVDAAKNKDPGYDCTQEELDAYVASEVKRQFKPRSPEKKIPIDPSVRNFFRGMSASVKEAIKLSDYERTLKKASSGKSKPVPQLGEQPKQEIEPLVTGKEMTIEQFITDTGLTTDQLLGVAPIEKAEVKYMYELGKPLVKPELLQSLPTQMYKFHQLYMEMSAAGREMIGARIRDTDFLQGDDILWINFKGIYELYQLDALDVSIMSCWILMEIQRARRRRVFDTGFIDPRRVNVAMLDQYPQETEDNLVHLLKAQHYKTFILLPYNTEFHWVLLLFDLEACTVNVYDSMDKKESTFDKVFELIDRAWYRFRHLVRGKWRERLRRKFKFPCAKQKQGTNLCGYYVCEYCHCLADQIITTRELDFIRMRDNLTTHKEFIAAVQEQLMGFINEEILNPKGEFYYDGNTIHRSLASELAASTTTSKS

SEQ ID NO: 195765 - protein, 229 aa, Oryza sativa
  unsure (1)..(229): unsure at all Xaa locations
  Clone ID: PAT_MRT4530_91682C.1.pep
HHQWPDQDGDLAGDRATGCGFGGHEHVEDDETNPTILTLVPNDDRRRPATRRRRRRLGLHGAAELRXPATEKEGWPSFPSPRRTQRWXRRPATTMETAARRHRRWPAAAVCLAAVATELRSTEEDGRGGKRKRRTRGSYLXPWIEEIGLLPQEIDPGNQKLGFGDKLENEFDSDKILNDLLRFLGVKIEEDKRNISPQLNWKKEQRGGEIWKEEAAALCTARLARALHE

SEQ ID NO: 195766 - protein, 319 aa, Oryza sativa
  Clone ID: PAT_MRT4530_91683C.1.pep
MAIVCAGFPANDGSLHPNFYAATCPQAETIVRQEVTRALYTNIGFAAGLVRMHFHDCFVRGCDGSVLLESTSDNVAERDSPINNPSLRGFEVIDAAKARLEAACPGVVSCADVLAYAARDGVALTGGPRYDVPGGRRDGTASLEPEVADNIPAPTFTLDQLTQSFAAKGLTQEEMVTLSGAHTVGRAHCTSFSDRLYNFSATGAADPSVDPALLPQLRRACPAAGPDGAVDAGLVVPMEPRTPNGFDALYYWAVLRNRALFTSDQALLSSPPTAAQVRQTAYGGYPWKLKFAAAMVKMGQIEVLTGGSGEIRTKCSAVN

SEQ ID NO: 195767 - protein, 270 aa, Oryza sativa
  unsure (1)..(270): unsure at all Xaa locations
  Clone ID: PAT_MRT4530_91684C.1.pep
TTIPGCTDLTPNQELNKLLLVIASIIIVRGVRLITKNIAQPAHNRGHGYSNSFPLARGVPLYPQGTASTSCLPCVAIXGKYPNRGCDNTLCTTQLTTVHHSWIIITPSINITRGMDSSATPTDFSPLLSLAPRNESCYTMALDHNSTGDRELGXAIRRHQHEEDDDANSPVQRTTTNDDKRRPATRSDGGSARVYVGDGAPAVFGGCKGADGVLLLLTNPTVATEGGGDDHSSGAARLKXRQQRRWLGLRGGGATGNGRDRDLGQTEEDD

SEQ ID NO: 195768 - protein, 2017 aa, Oryza sativa
  Clone ID: PAT_MRT4530_91685C.1.pep
MTSRVWGISTIRLEGNTISLINSRTKMATSPEIGWSAATLEDMCRKSLSELDKMDRQWMYADRRSKEFIDGVHYFLRVAEANRQRGFICCPCNKCKNQKEYSASRTIHFHLFESGFMPSYNCWTSHGEQGVEMEEDEVEDDNIPDFAQYVGFEGNQTGEEERDADGNDVADDLGQMLQDTKEDCESEKGAHKLDKMLEDHRTSLYPGCEQGHKKLDTTLEFLQWKAKNGVSDKAFGDLLKLVKNILPEGNKLPETTYEAKKIVCLLGLEVQKIHACPNDCILYRGEEYENLEACPVCKALRYKIRRDDPGEVDGQLTKKRIPAKVMCNLSGQSNKGYKACTHCMDETESTYLKHCRKVVYMGHRRFLAANHPVWKKGMHFEHKADHRTKPKHRNGKIVFAMVKDLKVVFEKGPGSQPIESEDGHAAMWKKNSIFWELPYWEFLDVRHAIDVMHLTKNLCVNLLGFLGVYGKSKDTLEARNDLKHMEQRGDLHPEPKEKGSHYLSPASYTLSKAGKESMFECLESIKVPSGYSTNIKRIISTKEKKFTNLKSHDCHVLMTHLLPVVIRGILPDNVRATITKQCAFMNAISQKVIDPDRLEALQNEVVQCLVSFELVFPPSFFNIMTHLLCHLVKEIRILGPMYLHNMFPFERYMGVLKKYVRNRARPEASIAKGYGTEEVIEFCVEFIEDLRPIGVPESRHEGRLRGKGTLGRKAIMTVDNNLFRKAHFTVLQHSSLVAPYIEEHLALVRARNIGKSDAWITRHHIDTFPAWLRQHLMGNESINQQLAFLARGPSGSIATFQGYEINGYTFYTRAQDMKSTNQNSAVRVDAMGHDGTTATYYGAIEDIWELDYGPLKVPLFRCQWVRLTGGGVMIDDSGMTTVDLNKVGYSDEPFVLANDVTQVFFVKDMSSKGKKGRGPDEPKRQVVLPVRPRLLHQHLDVFGRSISLGLSPSPPLPRANPRADAAVSRRRLELVVLAAASASSDAAASLRCFLYQQMADRDEEQILYDTIAEGSSQYWNEEEGNEDPNQYLNEEGNVERDAEGNQQGHVERDMEGNQEEEASGSQPSVGQKRARGQRGAAKKLEGRHIITEVEEDGRPSAPAEAAKNYVRHSGWVVRDNVPVSTVYWRRTRARGDHESFVPDSEKEMLWTTMLETFTLPAGTEDKVKRWTLKKMAEQFQSFKGDLYQKYILKGQTPNFDTFSKLRDHWDEFVAYKTGEQGQAMMERNKENAAKKKYHHHLGSGGYSVAMPKWEEMEASLIERGIEPATANWPERSKFWYYAHGGTLNPADGSLVFGDQIREAARRLTDAVEASSQGTFRPDRDRDELTLALQTPEHPGRIQGKGVIPWKIGFKEDIHTYRSRMRSKRDTEAKIADLEFRVSSYELNMQEEVARKVDERMAAHRSHDPQPTIPPAMVSPSGNRSSCASTGQVGSQSMDAMQTQDESTCPVDDITQRTPCELHIPFKNLSIKVASGMAIPTDPSGTYHCRPIPAGYSKVKVELVEGAYEDLELDYPGGDGETHLRDTSHAIILWRRRYIILPGRQTASRAPSPPAPPSPPQDPAPSPPHAPPAPSPPQAPASTPPQDPAPTPPRAPTPTPPQAPLPAPSKSRAPPAPPPTHTRATKKAKVDAAKNKDPGYDCTQEELDAYVASEVKRQFKPRSPEKNIPIDPSVMNFFRGMSAPVKEAIKLSDSERTLKKASSGKSKPVPQLGEQPNQEIEPLVTGKDMTIEEFIIDTGLSTDQLLGVEPIEKAELKYMYELGKPLVKSELVQSLPTQMYKFHQLYVEMSATGREMIGARIRDPDFLQGDDILWINFKGIYEVYQLDALDVSIMSCWTLMEIQRARRRRVFDTGFIDPRRVNVAMLDQYPQETEDNLVHLLKAQHYKTFILLPYNTEFHWVLLLFDLEACTVNVYNSMDKKESTFDKVFELIDRAWYRFRHLVRGKWRERLRWKFKFPFIRMRDNLTTHKEFITAVQEQLMGFINEEILNPKGEFYYDGNTIHRSLASELAASTTTSK

SEQ ID NO: 195769 - protein, 278 aa, Oryza sativa
  unsure (1)..(278): unsure at all Xaa locations
  Clone ID: PAT_MRT4530_91686C.1.pep
EALAPLPQAAQLGYKPNVFSFWILFLQLRLIDYCKNEHMTYSTSHTANMQVHRDSKGWHNIGSFAKAAFSKXLRERTHEPSQRRKRQANTQNXRKRLXKPKTCTRRGRRDEPNGTHXQRQTTTTGDERNGGGGSVHRRRRLSGGRRRRGSGGRASPPLGAPTGGDGKRRRRRRRRGGQQHGDHQRRHERRRVAVEEHAVPHRVVRLENGVAGDVAVGVVGPDAAGRGEAGVVGDGGGEDGEEKEALVHLLQYALVMLIQLWIRRRRRRTSTVLRRRLH

SEQ ID NO: 195770 - protein, 250 aa, Oryza sativa
  Clone ID: PAT_MRT4530_91687C.1.pep
VRGVRLITKNIAQPAHDRRHSYSNSFTLARDVPLYPQDTIPHMLPYPEVPPRHCKGGNRDNTLCTTQLTTVHHSWIIITPSKTKGMDSPATPTDFSPLLSLAPYNESCYTKGKADATTGKRELGWAIREHLRVEDDDANSPVQRTTTDDDERRPATRFAGGSARVPDGDGAPMVFGGCEGVDGVPLLRAHPTAATDGSGDDASGGATRPEDRRRRRRLEQGGGGSTGDGSAWDLGQTEEDVKGMLYIGLD

SEQ ID NO: 195771 - protein, 122 aa, Oryza sativa
  unsure (1)..(122): unsure at all Xaa locations
  Clone ID: PAT_MRT4530_91688C.1.pep
MSSVGLITKNIVRPAHNHGHGYSNSFTLARDVPLYPQDTIPHMLPCPEVPPRHCXGGNRDSTLHTTQLTTVYYFWIIITPSITRGMDSPATPXTDFSPLHSLAHHNESCYTKDKVVAHAGFR

SEQ ID NO: 195772 - protein, 37 aa, Oryza sativa
  Clone ID: PAT_MRT4530_91689C.1.pep
MAPASSKDTASDVDKDGHCSIHGSGNGGRVSLMALLE

SEQ ID NO: 195773 - protein, 864 aa, Oryza sativa
  Clone ID: PAT_MRT4530_9168C.1.pep
MGAIGGDELVQWDKMGAAEAVNGGCGGAGKMDRIQVLVRLRPLSEKEVARREPAEWECINDSTVMFRSTFPDRPTAPTAYTFDRVFHSDCSTKEVYEEGVKEVALSVVSGINSSIFAYGQTSSGKTYTMTGVTEYTVADIYDYINKHEERAFVLKFSAIEIYNEVIRDLLSAENTPLRLWDDAEKGTYVENLTEVVLRFGSILKGLISVCEAIQTVESSAREFLGKDKSTTLVASANFVDLAGSERASQALSAGTRLKEGCHINRSLLALGTVIRKLSMGSNAHIPYRDSKLTRILQPSLGGNARTAIICTLSPATSHIEQSRNTLLFGSCAKEVVTNAQVNVVMSDKALVKHLQKELARLESELRHPVQSSSLETLLKEKDNQIRKMEKEIKELKSQRDLAQSRLQDLLQSVGDHDLNRQVQGKHSVRSPPSVGMPPSVSRDDSSQVSHDDSDLYKEVRCIESNRTGGNDQLDLSAGESSSPQDSNMNSGLHGNDSNASVNSRHSRPSGEAPITLEEHLENIRRPFVSLAKDLGSSTRNSSNLRVIGRSRSCRSLTGSTMFDDMEMDDCTPLNRSLVEFPGRPVESHRRGSALHYDAETDTLSRAGSMSSEISTFKDAKTNGSVACDTEFTGIGEFVAELKEMAQVHYQKQLGDQNANGKSIGLDPIEGVSQSPSRWPLEFEKKQQEIIELWQACSISLVHRTYFFLLFKGEAADSIYMEVELRRLSFLRDTYSRGSTPSNAIVGSLSTSPVASAKKLQREREMLARQMQKRLSTEEREHTYTKWGVSLDSKRRKLQVARRLWTETKDLEHVRESASLVAKLIGLQEPGQVLKEMFGLSFAPQQQPTRRRSSNGWRYGIPSFA

SEQ ID NO: 195774 - protein, 242 aa, Oryza sativa
  Clone ID: PAT_MRT4530_91690C.1.pep
MAIKRGSNRRAVEEYSGKAVTTDGLAGLLENTCAIVACTVALEGMHRKVYEESNGVGTFPVAWQAAGSWNEQLRLACERKGVWKAREGANVGDVLIKIQELAGVVTSVPGLLMPLLSWEKHSAGLTRERVAELIDLGPCIGRLWVCPWYHYFDTDNGWVYLGCGRDKLDRDDSKERYRNQVGSHAVVCFAYRFCENGEMHVLVLDNHDDDGPQRWIDVEELDAIFTLTVECLTNGGASPPRR

SEQ ID NO: 195775 - protein, 128 aa, Oryza sativa
  Clone ID: PAT_MRT4530_91691C.1.pep
EAPAPLPQAAQLGYKPNVFSFWILFLQLRLIDYCKNEHMTYSTSHTASMQVHKDTKGWHNIGSFAKAAFSKELRRRTHEPSQRRKRQANTQNEENRLRLLRTCTPIGRRDEPNGSYHDDQRRTMTARD

SEQ ID NO: 195776 - protein, 92 aa, Oryza sativa
  Clone ID: PAT_MRT4530_91692C.1.pep
FQPVQAGSSGIVSIRALEVRATVPIVFRCRQRSAMVPAESSIVQVENPLCTFLKVPDGVELSCVCYAMVPYGSHFDPIGFHMQITHVKACHG

SEQ ID NO: 195777 - protein, 291 aa, Oryza sativa
  unsure (1)..(291): unsure at all Xaa locations
  Clone ID: PAT_MRT4530_91693C.1.pep
MTSAMTSPPAAAARRLGRLGRRTLAGERRLYGTNGGHQDVDHGAANSPMTKTSAEDQRTTAAARKKRRRRSGRRRRRSSGGLRRRRRGGRGRRRPCEPDGGDGDRRRRLQRRRDAAEPTATTAATRATRRRRXTRRQAKAKEATGRGELGGPFKGARRRRRRPTAAGDEKESLRLEGKRPIRIELDSTNFQNDLADVSKGEKVEEIPEIVSPQSIRPEKERNGRIXEGNGDGGALXGFGRRQPEEDEGSDRRAPPVSDRTRARGGCGLGRLGRGEREGFWADFRPKAKRRV

SEQ ID NO: 195778 - protein, 373 aa, Oryza sativa
  Clone ID: PAT_MRT4530_91694C.1.pep
MAGKENAAAAQPRLTRAAAKRAAAVTAVAVAAKRKRVALSELPTLSNNNAVVLKPQPAPRGGKRAASHAAEPKKPAPPPAPAVVVVVDDDEEGEGDPQLCAPYASDINSYLRSMEVQAKRRPAADYIETVQVDVTANMRGILVDWLVEVAEEYKLVSDTLYLTVSYIDRFLSAKSINRQKLQLLGVSAMLIASKYEEISPPNVEDFCYITDNTYMKQEVVKMERDILNVLKFEMGNPTTKTFLRMFIRSSQEDDKYPSLPLEFMCSYLAELSLLEYGCVRLLPSVVAASVVFVARLTLDSDTNPWSKKLQEVTGYRASELKDCITCIHDLQLNRKGSSLMAIRDKYKQHRFKGVSTLLPPVEIPASYFEDLNE

SEQ ID NO: 195779 - protein, 104 aa, Oryza sativa
  Clone ID: PAT_MRT4530_91695C.1.pep
SWALIELPIGPGWRGQDPPRARCRAACSYRCNPRLRLNPSYLPENATSSTSTRTNATETPCGPASFILGKRDHSDRTVAYALMSQQHDHMYQSSRTPQTLTERR

SEQ ID NO: 195780 - protein, 122 aa, Oryza sativa
  Clone ID: PAT_MRT4530_91696C.1.pep
HDRHRHDHHLAPADEEHGGEQQKPAGGDQGDGIVGHRPRQVRRLVVPLRQGLVVVDPDQGHPDEEWHHRRRPTTAAAAAQPPRRRGTPVVAHDHLFFFELFLLLMLLLFLLLLSTLLSTTQL

SEQ ID NO: 195781 - protein, 514 aa, Oryza sativa
  unsure (1)..(514): unsure at all Xaa locations
  Clone ID: PAT_MRT4530_91697C.1.pep
MHRVAMAAAAAGDGGDGRGRTLGAVIKEKDEELALFLEMRRREKERGXLPLPRRPSSCCFPGTASTWRGMGCFSSTNRRRARSPPGGADDFLNSDGGDKNDYDWLLTPPGTPLFPSLEESKKSPVSQTGTPKTRPTALKSRVIGQSSRSSIKNXLPLRATSSNNLNSAATTRRPSSSGGHTSNSSRPSTPTGRPALTNTSKGSRPSTPTSRATVPSKSGPPAPRSSTPTSRSTLTSARSTTPSRTSGPATRTSIPSGRASAPASRSSTPTSRSSIPATRSSTPSSRPSIPAQSKPVSRSSTPTRRPSATSTQHGSLAAPVRSTSISKPAPTMSKSSSPAKTIASTPSRGSSPTVKSRPWKPSEMPGFSLDAPPNLRTSLPERPTSATRGRPGAPSSRSSSVEPGPAARPRRQSCSPSRGRTLNGSVPSGSSVPAVRRSHLNSGDSVNPVQMGNKMVERVVNMRRLVPPKHDDQRSSLNGLSGKSSNSPDSSGFGRTLSKKSLDMALRHMVHYFL

SEQ ID NO: 195782 - protein, 65 aa, Oryza sativa
  Clone ID: PAT_MRT4530_91698C.1.pep
MRTSFASIKIRHAGWFARVAWRPVHNDAVLCSVGSCTEPQIVLVRIRENPSITTLYREQFAQVAS

SEQ ID NO: 195783 - protein, 204 aa, Oryza sativa
  Clone ID: PAT_MRT4530_91699C.1.pep
MASKGLLVFTLLLAAAFLVNCARQEPHQNSRLYVRAEPNEGPTADPDAGAGGDHGTSSGNGKASGHRPQAKFGGGCCCGAGCSEQCAECPRPPHPPPSPSPCVHPPCCESAAGCCCNGCSGGGCGGGQCPPSPSCENHHPPCKPGCCCCGCSGGECPPPPSPPCQHECPPTPPCEHPPCSESGCCDKGCNSCCNRCGEYGQSRP

SEQ ID NO: 195784 - protein, 157 aa, Oryza sativa
  unsure (1)..(157): unsure at all Xaa locations
  Clone ID: PAT_MRT4530_9169C.1.pep
SADQVGGCEVEPWVVGRPWRWRRRRRWRWRWRRGGCLLQSFELYEAESKFYILGTNTDKTSWKLLKIDRIEPSELNIDESSTVYSHSGYLDLLKVLDEDHRSTGGVKFVTKCFGIIGFIKFLGPYYMLIITEQRKIGXIFGHPVYQVTRTAMIELSN

SEQ ID NO: 195785 - protein, 110 aa, Oryza sativa
  unsure (1)..(110): unsure at all Xaa locations
  Clone ID: PAT_MRT4530_916C.1.pep
HRVDSASAAVPPHRRFLPSALLPPPGRPPPHAKHHRWTIFFPCQAPMQSLPSHXSPPSPTKISQDRLTELQWRDALGSQTMAANLLLIHIPTATSLAPCSHTNLQSHHIH

SEQ ID NO: 195786 - protein, 364 aa, Oryza sativa
  Clone ID: PAT_MRT4530_91700C.1.pep
MGVPLVTHHTGIPEKRGALQTGLQGLAARGDKVSKNASPRREKGFPPPAAQEFSANEKAVFVQLHNNARAAVGVGPVAWNDALAAQALQHARYCQTQHIPGPYGENLWWSYGAGTTGTPADAMSYWVGEKPYYDYSSNSCGGRECRHYTQVVWRRTAYVGCARVACNTNNGIGTIIACNYYPGGVLVDVRPYCLKILNPSVHSVERLFCIKRQNDGKMGARRQIAPIDGPVALSSIRFLPIGASLLLMQNPLSPTPQRWTVVAPHCTPRLPPRPPPQTPLAVAAAALDHPLLPHLTRRHPSNPIDLLSFPSSMRRITGGSGATTFLYRLLEDMAAAFLNQLWRALWHSSPSSWRLPSHPTRSGF

SEQ ID NO: 195787 - protein, 162 aa, Oryza sativa
  Clone ID: PAT_MRT4530_91701C.1.pep
MVTSNRGQVVIASLSITPDSLSNNTIKELALKYKINIQEQIEENIKIPKSIISLLPLDPPPPLVLSSSQPAPCSWSRIRPPTSMHQQIQPPLSRVDEGRRGGRDQAMMTRRTGPTPRPGRARPRLGRRVTSSSLAAQDLIESSLSGSRSSAFTSLRHNTLSS

SEQ ID NO: 195788 - protein, 158 aa, Oryza sativa
  Clone ID: PAT_MRT4530_91702C.1.pep
MAAFAMIIMATTTTAQQFSEDEKAAFVNLHNSARAAVGVGRVAWNDALAAQALQHARYCQTQHIPGPYGENLWWSYGAGTTGTPADAMSYWLAEKAKYYYDSNYCSAGELGCTHYTQVVWRRTAYVGCARVACNTNGIGTIIACNYFPRGNMKNERPY

SEQ ID NO: 195789 - protein, 134 aa, Oryza sativa
  Clone ID: PAT_MRT4530_91703C.1.pep
DLVSYGHVRLRHCRREYPPSDPGKLLSPGVCRPGQCNGLTVCMADPAHWSWKSYPVMIPRTNRPSQWLQPPWTIPPASSVLEWCHCSGNRPGGRSCPELSVPWAPPQGNTPPSGGGEHALLVISRNPFRGSTEA

SEQ ID NO: 195790 - protein, 384 aa, Oryza sativa
  Clone ID: PAT_MRT4530_91704C.1.pep
MAASGEGASLASAAGGEDGRRRRVSYFYEPSIGDYYYGQGHPMKPHRIRMAHSLVVHYGLHRLLELSRPYPASDADIRRFHSDDYVAFLASATGNPALLDARAVKRFNVGEDCPVFDGLFPFCQASAGGSIGAAVKLNRGDADITVNWAGGLHHAKKGEASGFCYVNDIVLAILELLKFHRRVLYVDIDVHHGDGVEEAFFTTNRVMTCSFHKYGDFFPGTGHITDVGAGEGKHYALNVPLSDGIDDDTFRDLFQCIIKKTAVAVGVEPDNKLPYNDYYEYFGPDYNLHIQPRSVENLNSTKDLENIKSMILDHLSKIEHVPSTQFHDRPSDPEAPEQEEEDMDKRPPQRSRLWSGGAYESDTEDPDNMKTETNDLSASSVMKV

SEQ ID NO: 195791 - protein, 181 aa, Oryza sativa
  Clone ID: PAT_MRT4530_91705C.1.pep
MDDAQKSTPSQTRIKPTDMLLNPKIWTCTEVKQVANALYFVTTAWQSSGTITGRCAAPTPSIPLPLHSIGPQADSSHHPVITAIATEPIRGDPGYHVEETPDPVRGMPDLDVGMLALAVPYTAFSTDRCTIATCAPSSSGSPLSFLPLASLIARSGRGGPDLRNVTFARLPRCPTIGRVFE

SEQ ID NO: 195792 - protein, 150 aa, Oryza sativa
  Clone ID: PAT_MRT4530_91706C.1.pep
MVYNINETGCPEEVDARLQDPTSAANCEAPEEKKLDNLKAETYKREITNIISELSVGLCKNLDDLSPEMVKGVKLEVAKHREAIRNRIVELRAQGASSSVVVAPQEEIVAPHAFQFDLNEPAAVDDDPPIVRKRSISPATKGALFGKTFI

SEQ ID NO: 195793 - protein, 75 aa, Oryza sativa
  Clone ID: PAT_MRT4530_91707C.1.pep
MGDLIAIIDWINDIIMINILPCLIGFASTPTASPLALIFDIGIHEDLHAYTTMNAAYISSTTSCCGSISMCPLYG

SEQ ID NO: 195794 - protein, 100 aa, Oryza sativa
  Clone ID: PAT_MRT4530_91708C.1.pep
MNPSPSLPPESRRSSPLPLPLSPTQPAPSPIQRHNTLQSPNKPSKRISPPTPQLTPSADAPSCVHPASSPPLPPCALHRPPPSPSDHLLVWQAWTRPAKL

SEQ ID NO: 195795 - protein, 1007 aa, Oryza sativa
  unsure (1)..(1007): unsure at all Xaa locations
  Clone ID: PAT_MRT4530_91709C.1.pep
MADRDEEKILYDTIAEGSSQYWNEEEGNEDPNQYLNEEGNVERDAEENQEGHVERDVEGNQEEEASGSQPSVGQKRARGQRGAKKKLEGRHIITEXENGRPSAPAEAAKNYVRHSGWVVRDNVPVSTVYWRRTRARGDHESFVPDSKKEMLWTTMLETFTLPAGTEDKVKRWTLKKMAXKYILKGKTPNFDTFPKLRDHWDEFVAYKTGEQGQAMMERNKENAAKKKYHHHLGSGGYSVAMPKWEEMEASLLERGIEPATANWLERSKFLYYAHGGTLNPADGSLVFGDQIREAARRLTDAVEASSQGTFRPDRERDELSLALQTLEHPGRTQGKGVIPWKIGFKEDIHTYRSRMRRKRDTKAKIADLEFRVSSYERSMQKEVTRKVDERMAAHRSHDPQPTIPPAMVSPSGNRSSCASTGQVGSXSMDAMQTQDESTCPVDDITQRTPCELHIPFKNLSIKVASGMAIPMDPSGTYHCRPIPAGYSKVEVELVEGAYEDLELDYPGGDGETHLRDTSHAIILWRRQYIILPGRQAASRAPSPPAPPSPPQDPALSPPHALAPSLPQAPAPTPPQTPALTPPRAPTPTPPQAPLPAPSKSRAPQAPPPAHTRAMKKAKVDTAKNKDPGYDCTQEELDVYVASEVKRQFKPRSPEKKIPIDPSVMNFFRGMSAPAKEAIKLSDYEQTLKKASSGKSKPVPQLREQPNQEIEPLVTGKEMTIEEFITDTGLTTDQLLGVAPIEKAEVKYMYELGKPLVKPELLQSLPTQMYKFHQLYMEMSVTGREMIGARIRDTDFLQGDDILWINFKGIYELYQLDALDVSIMSCWILIEIQRARRRGVFDTGFIDPRKVNVAMLDQYLQATEDNLVHLLKVQHYKTFILLPYNTEFHWVLLLFDLSACTVNVYDSMDKKESTFDKVFELIDRAWYQFRHLVRGKWRERLRRKFKFPFIRMRDNLTTHKEFIAAVQEQLMGFINEQILDPKGEFYYDGNTIHRSLASELATTTTSKS

SEQ ID NO: 195796 - protein, 447 aa, Oryza sativa
  Clone ID: PAT_MRT4530_9170C.1.pep
MPVGEFADFGMDVGTVSPSPLANVGGSQPRWKKPGEGYLKINVDGAFSGIAQNLVAGASSSEIAIAVSAGSGNLQNVSEPSQAEAEAETCLQAFKFASDAAQLHNEPSPDDNLPSRLRRPPPPPRWMPATDEGTASTVSAISVASTEAGRALDAVARRVRQRPHRLDDERSSAWASAQHTYPARTTAATTIDDDDDNDLTTMSSESEDDGDRRISRLRLPPVTARVAPQPGGAKGAMPRHGRPSLRLRCPASVTKLAMANCRWKMKNARRRRDGSEPWTSTRRRYDTSSTGLRPPPLAAILTHNAIAIAGEESLGAAAVAALVNLDRLELDLRHNAPCSRKRSAVAMANLYKRDYSSRSLLLQFRYKLDFDKSVDLFVHRSSKPKLSLDDDDEEEEEVSDIAVLSGQSFECLQSTLKRVSLQFRMEIEDQLLWIAACQLLRRKRHGS

SEQ ID NO: 195797 - protein, 622 aa, Oryza sativa
  Clone ID: PAT_MRT4530_91710C.1.pep
MAAATEQHCGGGGGDKEKDLLSAVVGDIRSYSGSDPLRPWLRGMRKMEAALPPATLRAKLPRFLQKCAQEFQDDARYRDDSRYLRVWIQLMDYVKDAKPLLKKMEKNRIGLKRSAFYMAYAVYYEKHKRFEDAENMYRLGTQNLAEPVGELQKAHEQFIRRVELYKRRKSRVQQERMPNKVQSIAISKNEVEGQSRSCTKPKSNPVQRSGSGSNPHLGFPHPLGRPLSRGTSGETMSLSRHNSDDTVVVRFVGSALVGKSETEDACHHGLVEPTINTKEAMDAISSMFLEPLEPETKLKRRSNRDKPSFNQEASAFEIFVDEDEPNKSGPSKLQDKNMKQDNPKLSQQASAFEIFVDEDDPYCNNQNMVQHRHFNKENTQVNQNASGFEIFVDENEAHGNGRNAMSHKSSGCPPKPSRDSKQQANFDFQKPFVGGFAILPDDEDEQLEKNDNGVKINSGTVQLTDDKDTSLCSRQTDSKIRCDDLRPAISGLREDTVFHRFVGSAVVGEPKVENACHHGLVEPTVNLKEAMDDINNMFGIPLNFKGDKPKNKKTTALSERKAALLSGFSILADDEPGENPAAQVKPSNASKFECQSGLFEPTITTRDVMAEINDMFGMPLDF

SEQ ID NO: 195798 - protein, 2135 aa, Oryza sativa
  unsure (1)..(2135): unsure at all Xaa locations
  Clone ID: PAT_MRT4530_91711C.1.pep
MDRQWMYADRRSKEFIDSVHYFLRVTEANMQRGFICCPCNKCKNQKEYSASRTIHFHLFESGFMPSYNCWTSHGKQGVEMEEDEVEDDNIPDFAQYVGFEENQTGEEEIAADGNDVADDLGQMLQDAREDCESEKEXHKLDKMLEDHRTLLYPGCEQGHKKLDTTLEFLQWKAKNGVSDKAFGDLLKLVKNILPGGNKLPETTYEAKKIVCPLGLEVHKIHACPNDCILYRGEEYENLEACPVCKALRYKIRRDEPREVDGQLTKKRIPAKVMWYFPIIPRLRRLFRNKGNARMLRWHAEERQQDGMLRHPADGSQWXNIDRKFKEFGKDARNIRFGLSTDGMNPFGEMSNGHSTWPVTMCIYNLXPWLCMKRKYIMMPIIIQGPKQPGNDIDVYLRPLVEDLKQLWKKEGVPMWDEDKQEEFNLRALLFVTINDWPALSNLSGQSNKGYEACTHCMDETESTYLKHCRKVVYMGHRRFLAANHPVWKKGKHFEHKADHHTKPKHRSGKTVFAMVKDLKVVFGKGPGSQPIESEDGHAAMWKKNSIFWELPYWEFLDVRHAIDVMHLTKNLCVNLLGFLGVYGKSKDTLEARNDLKHMEQCGDLHPEPKEKXSHYLSPASYTLSKAEKERMFECLESIKVPSGYSTNIKRIISMKEKKFTNLKSHDCHVLMTQLLPVVIRGILLDNVRATITKLCAFMNAISQKVIDPDRLEALQNEVVQCLVSFELIFPPSFFNIMTHLLCHLVKEIRILGLVYLHNMFPFERYMGVLKKYVRNRARPEASIAKGYGTEEVIEFCVEFIEDLRPIGVPELRHEGRLRGKGTLGRKAIMTVDNNLFRKAHFTVLQHSSLVAPYIEEHLALVRARNIGKSDAWITRHHIDTFPXWLRQHLMGNESINQQLAFLARGPSGSIATFQGYEINGYTFYTRAQDMKSTNQNSAVRVDAMGHDGTIATYYGAIEDIWELDYGPLKVPLFRCQWVRLTGGGVMIDDSCMTTVDLNKVGYSDEPFVLANDVTQVFFVKDMSSKGKKGRGPHEPKRQVVLPARPRLLHQHLXVFGRSISLGLSPSPPLPRANPRADAAVSRRRLELVVLAAASASSAAAASLRCFLYQQMADRDEEQILYDTIAEGSSQYWNEEEGNEDPNQYLNEEGNVERDAEGNQQGHVERDVEGNQEEEASGSQPSVGQKRVHGQRGAAKKLEGRHIITEVEEDGRPSAPAEAAKNYVRHSGWVVRDNVPISTVYWRRTRARGDHESFVPDSEKEMLWTTMLETFTLPAGTEDKVKRWTLKKMAEQFQSFKGELYKKYILKGQTPNFDTFPKLRDHWDEFVAYKTGEQGQAMMERNKENAAKKKYHHHLGLGGYSVAMPKWEEMEASLIERGIEPATANWPERSKFWYYAHGGTLNPADGSLVFGDQIREAARRLTDAVEASSQGTFXPDRDRDELTLALQTPEHPGRTRGKGVISWKIGFKEDIHTYRNRMRSKRDTEAKIADLEFRVSSYELSMQEEVARKVDERMAAHRSHDPQPTIPPAMVSPSGNRSSCASTGQVGSQSMDAMQTQDESTCPVDDITQRTPCELHIPYKNLSIKVASGMAIPTDPSGTYHCRPIPAGYSKVEVELVEGAYEDLELDYPEGDGETHLRDTSHAIILWCRRYIILPGRQAASRAPSPPALPSPPQDPALSPPHDLPAPSPPQAPAPTPPQDPAPTPPRAPTPTPPQAPLPAPSKSRAPPAPPPAHTRATKKAKVDAAKNKDPGYDCTQEELDAYVASEVQRQFKPRSPEKKIPIDPSVRNFFRGMSASVKQAIKLSDYERTLKKASSGKSKPVPQLGEQPNQEIEPLVTGKEMTIEKFITDTGLTTDQLLGVAPIEKVEVKYMYELGKPLVKPELLQSLPTQMYKFHQLYMEMSATGREMIGARIRDTDFLQGDDILWINFKGISELYQLDALDVSIMSCWILMEIQRAXRRRVFDTGFIDPRRVNVAMLDQYPQETEDNLVHLLKAXHYKTFILLPYNTEFHWVLLLFDLSACTVNVYDSMDKKESMFDKVFELIDRAWYRFRHLVRGKWRERLRRKFKFPFIRMRDNLTTHKEFIAAVQEQLMGFINEKILDPKGEFYYDGNTIHRYWPCEFRXSTPRKPSRLLK

SEQ ID NO: 195799 - protein, 638 aa, Oryza sativa
  Clone ID: PAT_MRT4530_91712C.1.pep
MAAATEQHCGGGGGDKEKDLLSAVVGDIRSYSGSDPLRPWLRGMRKMEAALPPATLRAKLPRFLQKCAQEFQDDARYRDDPRYLRVWIQLMDYVKDAKPLLKKMEKNRIGLKRSAFYMAYALYYEKHKRFEDAENMYRLGTQKYHLPFINVFNSLAEPVGELQKAHEQFIRRMKLYKRRKSRVQQERMPNKVQSIATSKNEVEGQSRSCTEPKSNPVQRSGSGSNPHLGFPHPLGRPLYRGTSGDTKSLSRHNSDDTVVVRFVGSALVGKSETEDACHHGLVEPTINTKEAMDAISSMFLEPLEPETKLKRRSNRDKPSFNQEASAFEIFVDEDEPNKSGPSKLQDKNKLQDKNMKQDNPKLSQQASAFEIFVDEDDPYCNNQKMVQHRHFNKENTQVNQKASGFEIFVDENEPHGNGRNAMSHKSTVCPPKPSRDSRQQANFDFQKPFVGGFAILPDDEDEQLEKNDNGVKINSGTMQLTDDNTSLCSRQTDSKIRCDDLHPAISGLREDTVFHRFVGSAVVGEPKVENACHHGLVEPTVNLKEAMDDINNMFGIPLNFKGEKPKNKKTTTLSERKAAPLSGFSILADDEPGENPAAQVKPSNASKFECQSGLFEPTITTRDVMAEINDMFGMPLDF

SEQ ID NO: 195800 - protein, 971 aa, Oryza sativa
  Clone ID: PAT_MRT4530_91713C.1.pep
MADRDEGQILYDTIAEGSSQYWNEEEGNEDPNQYLNEEENVERDAEGNQEGHVERDVEGNQEEEASGSQPSAGQKRARGQRGAAKKLEGRHIITEVDEDGRPSAPVEAAKNYVHHSGWVVRDNVPVSMVYWRRTRACGDHESFVPDSEKEMLWTTMLETFTLPAGTEDKVKRWTLKKMAEQFQSFKGDLYQKYILKGQTPNFDTFPKLRDHWDEFVAYQTGQQGQAMMERNKENAAKKKYHHQLGSGGYSVAMPKWEEMEASLLERGIEPATANWPDRSKFWYYAHGGTLNPADGSLDPLVLLFRLPPLPSSSVLRSSVATAAKQTAAAGHLRCRRAAVSIVVAGRRHHRWVRRGEGKLGHPSFSVAGVIPWKIGFKEDIHTYRSRMRSKRDTEAKIADLEYKVLSYELSMQEEVARKVDERMAAHRSHDPQPTIPPAIVSPSGNRSSCALTGQVVSQSMDTMQTHDETTCPVDDITQRTPCELHIPFKNLSIKVSSPILAGYSKVEVELIEGAYEDLELDYPGGDAPSPPQAPAMTPPQAPAPTPPQAPRPAPSKSRAPQAPPPAPTRATKKAKVDTAKNKDPGKEDFIDPSVKNFFRGMSAPAKEAIKLSDYERTLKKASSGKSKPVPQLGEQPNQEIEPLVTGEDFGIQEFINDTGLTVDQLLRGAPIEKAEAKYMYELGKPLVKPEQLQSLPTQIYKFHQLYMEMSTTGREMIGARIRDTDFLQGDDILWINFKGIYELYQLDALDVSIMSCWILMEIQRARQRGVFDTRFIDPRKVNVAILDQYPQATEDNLVHLLKAQHYKTFILLPYNTEFHWVLLLFDLEACTVNVYDSMDKKESMFDKVFELIDRAWYRFRHLVRGKWRERLRRKFNFPCAKQKQGTNLCGYYVCEYCHCLADQIITTRELDFIRMRDNLITHKEFIAAVQEQLMGFINEQILDPKGEFYYDGNTIHRSLASEITTTTTSKL

SEQ ID NO: 195801 - protein, 2202 aa, Oryza sativa
  unsure (1)..(2202): unsure at all Xaa locations
  Clone ID: PAT_MRT4530_91714C.1.pep
MAYAAIRQLLVAALDQKRQGQPLPPLPFTIHDANVFTAGDHPSHLYYNLKSNAAEDGSVYVFSPGRKIPRPRNITGGYWKVMINQPESIIATADGAKIGRSRRWAFVNDWSVGCDVEGWAMEELRIAGGTTATTRPDDDLRLYRLYRLAHEFDRANTKKRQKQEHAGIQEVHGFVHHVTNSLNPRNMSTVPDASYKQMDRQWMYADRRSKEFIDGVHYFLRVAEANRQRGFICCPCNKCKNQKEYSASRTIHFHLFESGFMPSYNCWTSHGEQGVEMEEDEVEDDNIPDFAQYVGFEGNQTGEEEIAADGNDVADDLGQMLQDAREDCESEKEAHKLDKMLEDHRTSLYPGCEQGHKKLDTTLELLQWKAKNGVSDKAFGDLLKLVKNILPGGNKLPETTYEAKKIVCPLGLEVHKIHACPNDCILYRGEEYENLEACPVCKALRYKIRRDDPGEVDGQLTKKRIPAKVMWYFPIIPRLRRLFRNKGNARMLRWHAEERQQDGMLRHPADGSQWRNIDRKFKEFGKDARNIRFGPKQPGNDIDVYLRPLVEDLKQLWKKEGVPVWDEDKQEEFNLRALLFVTINDWPALSNLSGQSNKGYKACTHCMDETESTYLKHCRKVVYMGHRRFLAANHPVRKKGKHFEHKADHRTKPKHRSGKTVFAMVKDLKVVFGKGPGSQHIESEDGHAAMWKKNSIFWELPYWEFLDVRHAIDVMHLTKNLCVNLLGFLGVYGKSKDTLEARNDLKHMEQRGDLHPEPKEKGSHYLSPASYTLSKAEKESMFECLESIKVPSGYSTNIKRIISTKEKKFTNLKSHDCHVLMTQLLPVVIRGILPDNVRATITKLCAFMNAISQKVIDPDRLEALQNEVVQCLVSFELIFPPSFFNIMTHLLCHLVKEIRILGPMYLHNMFPFERYMGVLKKYVRNRARPEASIAKGYGTEEVIEFCVEFIEDLRPIGVPESRHEGRLRGKGTLGRKAITTVDNNLFRKAHFTVLQHSSLVAPYIEEHLALVRARNIGKSDAWITRHHIDTFPAWLRQHLMGNESINQQLAFLARGPSGSIATFQGYEINGYTFYTRAQDMKSTNQNSAVRVDAMGHDGTTATYYGAIEDIWELDYGPLKVPLFRCQWVRLTGGGVMIDDSGMTTVDLNKVGYSDEPFVLANDVTQVFFVKDMSSKGKKGRGPDEPKRQVVLPGKRKIVGVEDKTDEDYDQLDGQPPFTVTIDPSILLSNEDTPYSRSDHKEGTIVRRKGFLKVLNHMADRDEEQILYDTIAEGSSQYWNEEEGNEDPNQYLNEEGNVERDAEGNQQGHVERDVEGNQEEEASGSQPSIGQKRARGQRGAAKKLEGRHIITEVEEDGRPSAPAEAAKNYVRHSGWVVRDNVPVSTVYWQRTRARGYHESFVPDSEKEMLWTTMLETFTLPAGTEDKVKRWTLKKMAEQFQSFKGDLYQKYILKGQTPNFDTFPKLRDHWDEFVAYKTGGYSVAMPKWEQMEASLIERGIEPATANWPERSKFWYYAHGGTLNPADGSLVFGDQIREAARRLTDAVEASSQGTFRPDRDRDELTLALQTPEHPGRTRGKGVIPWKIGFKEDIHTYRSRMRSKRDTEAKIADLEFRVSSYELNMQEEMARKVDERMAAHRSHDPQPTIPPAMVSPSGNRSSCASTGQVASGMAIPTDPSGTYHCRPIPARYSKVEVELVEGAYEDLELDYPGGDGXYIILPRRXAASRAPSPPAPPSPPQDPAPSPPHAPPAPSPPQAPASTPPQDPAPTPPRAPTPTPLQAPLPAPTKSRAPPAPPPAHTRATKKAKVDAAKNKDPGKXKIPIDPSARNFFRGMSASVKEAIKLSDYERTLKKASSGKSKPVPQLGEQPNQEIEPLVTGKEMTIEQFITDTGLTTDQLLGVAPIEKVEVKYMYELGKPLVKPELLQSLPTQMYKFHQLYTEMSATGREMIGARIRDTDFLQGDDILWINFRGIYELYQLDALDVSIMSCWILMEIQRARRRRVFDTGFIDPRKVNVAMLDQYPQETEDNLVHLLKAQHYKTFILLPYNTEFHWVLLLFDLEACTVNVYDSMDKKESTFDKVFELIDRAWYRFRHLVRGKWRERLRRKFKFPCAKQKQGTNLCGYYVCEYCHCLADQIITTRELDFIRMRDNLTTHKEFIAAVQEQLMGFINEQILDPKGEFYYDGNTIHRSLTSELATTTTSKS

SEQ ID NO: 195802 - protein, 1808 aa, Oryza sativa
  unsure (1)..(1808): unsure at all Xaa locations
  Clone ID: PAT_MRT4530_91715C.1.pep
DLVMDRQWMYADRRSKEFIDGVHYFLRVAEANRQRGFICCPCNKCKNQKEYSASRTIHFHLFESGFMPSYNCWTSHGEQGVEMEEDEVEDDNIPDFAQYVGFEGNQTGEEEIAADGNDVADDLGQMLQDAREDCESEKEAHKLDKMLEDHRTSLYPGCEQGHKKLDTTLELLQXKGKNGVSDKAFGDLLKLVKNILPGGNKLPETTYEAKKIVCPLGLEVHKIHACPNDCILYRGEEYENLEACPVCKALRYKIRRDDPGEVDGQLTKKRIPAKVMWYFPIIPRLRRLFRNKGNARMLRWHAEERQQDGMLRHPADGSQWRNIDRKFKEFGKDARNIRFGLSTDGMNPFGEMSSGHSTWPVTMCIYNLPPWLCMKRKYIMMPIIIQGPKQPGNDIDVYLRPLVEDLKQLWKKEGVPVWDEDKQEEFNLRALLFVTINDWPALSNLSGQSNKGYKACTHCMDETESVYGKSKDTLEARNDLKHMEQRGDLHPEPKEKGSHYLSPASYTLSKAEKESMFECLESIKVPSGYSTNIKRIISTKEKKFTNLKSHDCHVLMTQLLLVVIRGILPDNVRATITKLCAFMNAISQKVIDPDRLEALQNEVRYMGVLKKYVRNRARPEASIAKGYGTEEVIEFCVEFIEDLRPIGVPESRHEGRLRGKGTLGRKAITTVDNNLFRKAHFTVLQHSSLVAPYIEEHLALVRARNIGKSDAWITRHHIDTFPAWLRQHLMGNESINQQLAFLARGPSGSIATFQGYEINGYTFYTRAQDMKSTNQNSAVRVDAMGHDGTTATYYGAIEDIWELDYGPLKVPLFRCQWVRLTGGGVMIDDSGMTTVDLNKVGYSDEPFVLANDVTQVFFVKDMSSKGKKGRGPDEPKRQVVLPGKRKIVRVEDKTDEDYDQLDGQPPFTVTIDPSIFLSNEDTPYSRSDHKEGTIYLNEEGNVERDAEGNQQGHVERDVEGNQEEEASGSQPSVGQKRARGQRGVANKLEGRHIITEVEEDGHPSAPAEAAKNYVRHSGWVVRDNVPVSTVYWRRTRARGDHESFVPDSEKEMLWTTMLETFTLPAGTEDKVKRWTLKKMAEQFQSFKGDLYKKYILKGQTPNFDTFPKLRDHWDEFVAYKTGEQGQAMMERNKENAAKKKYHHHLGSGGYSVAMPKWEQMEASLIERGIEPATANWPERSKFWYYAHDGTLNPADGSLVFGDQIREAARRLTDAVEASSQGTFRPDRDRDELSRMRSKRDTEAKIADLEFRVSSYELNMQEEVARKVDERMAAHRSHDPQPTIPPAMVSPSGNRSSCASTGQVASGMAIPTDPSGTYHCRPIPAGYSKVEVELVEGAYEDLELDYPGGDGETHLRDTCHAIILWRRRYIILPGRQAASRAPSPPAPPPQDPAPTPPRAPTPTPPQAPLPAPXKVRGPPAPPPAHTRATKKAKVDAAKNKDPGYDCTQEELDAYVASEVKRQFKPRSPEKKIPIDPSVRNFFRGMSASVKEAIKLSDYERTLKKASSGKSKPVPQLGEQPNQEIEPLVTGKEMTIEQFITDTGLTTDQLLGVAPIEKAEVKYMYELGKPLVKPELLQSLPTQMYKFHQLYMEMSATGREMIGARIRDTDFLQGDDILWINFRGIYELYQLDALDVSIMSCWILMEIQRARRRRVFDTGFIDPRKVNVAMLDQYPKETEDNLVHLLKAQHYKTFILLPYNTELNVYDSMDKKESTFDKVFELIDRAWYRFRHLVRGKWRERLRRKFKFPFIRMRDNLTTHKEFIAAVQEQLMGFINEEILDPKGEFYYDGNTIHRSLASELAASTTTSKS

SEQ ID NO: 195803 - protein, 100 aa, Oryza sativa
  Clone ID: PAT_MRT4530_91716C.1.pep
KVGCEHMVLMVVLMTIKDRFASYCCETFTVPTTSQHGQRLYLLYSRVHYSVPDCEAARSPWGSLGSPCLVYKGVTMIRERCTVLSCVVQRVLSRFPPLQC

SEQ ID NO: 195804 - protein, 2119 aa, Oryza sativa
  unsure (1)..(2119): unsure at all Xaa locations
  Clone ID: PAT_MRT4530_91717C.1.pep
MDRQWMYADRRSKEFIDGVHYFLRVAEANRQKGFICCPCNKCKNQKEYSASRTIHFHLFESGFMPSYNCWTSHGEQGVEMEEDEVEDDNIPDFAQYVGFEGNQTGEEERDADGNDVADDLGQMLXDAKEDCESEKGAHKLDKMLEDHRTSLYLGCEQGHKKLDTTLEFLQWKAKNGVSDKAFGDFLKLVKNILLEGIKLLETTYEAKKIVCPLGLEVQKIHACPNDCILYRGEXYENLEACPICKALQYKIRRDDLGEVDGQLTKKRIPAKVMWYFPIIPRLRHLFRNKGNARMLRWHAEERQQDGMLRHPADGSQWRNIDRKFKDFGKDAQNIRFCLSTDGMNPFGEMSSGHSTWPVTMCIYNLPPXLCMKRKYIMMPIIIQGRKQPGNDIDVYLRPLVEDLKLLWKKEGVPVWDEDKQEEFNLRALLFVTINDWPALSNLSGQSNMGYKACTHCMDETESTYLKHCSKVVYMGHRRFLAANHPVRKKGKHFEHKADHRTKPKHRSGKTVFSMVKDLKVVFGKGPGSQPIESEDGHAAIWKKNSIFWELPYWELLDVHHAIDVMHLTKNLCVNLLGFLGVYGKSKDTLEARNDLKHMEQRGDLHPEPKEKGSHYLSPASYTLSKAEKESMFECLDSIKVPSGYSTNIKRIISTKEKKFTNLKSHDCHVLMTQLLPVVIRGILPDNVRATITKLCVFMNAISQKVIDPDRLEALQNEVVQCLVSFELIFPPSFFNIMTHLLCHLVKEIRILGPMYLHNMFPFERYMGVLKKYVRNRARPEASIAKGYGTEEVIEFCVEFIEDLRPIGVPESRHEGRLRGKGTLGRKAITTVDNNLFRKAHFTVLQQSSLVAPYIEEHLALVRARNIGKSDAWITRHHIDSFPAWLRQHLMFNESINQQLAFLARGLSGSIATFQGYEINGYTFYTRAQDMKSTNQNIAVRVNAMGHDGTTGTYYGAIEDIWELDYGPLKVPLFRCQWVRLTSGGVMIDDSGMTTVDLNKVGYSDEPFVLANVVTQVFYVKDMSSKGKKGRGPDEPKHHVVLPTRPRLLHQYLEVFARSISLGXPSPPLPTASLHRXAVVSCRCLVLVVVAASASSAAAVSLNCFLYEQMANRDEEHILYDTIADXSSQYWNEEEGNEDPNQYLNEEGNMERDVEGNQEGHMERDVEGNQEEEASGSQPSAGQKRARRQRGAAKKLEGRHIITEVDXDGRPSALAEATKNYVRHSGWVVGDNVPVSTVYWRRTRARGDHESFVLDSEKEMPWTTMLETFTLPAGTEDKVKRWTLKKMAEQFQSFKGDLYQKYILKGQTPNFDTFLKLRDHWDXFVAYKTGEQGQAMMERNKENAAKKKYHHHLGSGGYSVAMPKWEEMEASLLERGIEPVTANWPEQSKFWYYAHGGTLNPADGSLVFGDXIRKAARRLTDAVEASSQGTFXPDIEKDELSLALQTPEHLGRTRGKGVIPWKIGFKEDIHTYRSRMRSKRDTEAKIADLEFRVSSYELGMQEEVARKVDERMAAYQSHDPQPTIPPAMVSPXGNRSSCASTGQVGSQSMDAMQTQDETTCPVDDITQRTPCELHIPFKNLSIKVASGMAILTDPSSTYHYRPIPAGYSKVEVELVEGAYEDLELDYPGGDGETHLRDTSHAIILWRKRYIILPRRXAASRAPSPPAPPSPPQAPAPSPPLAPAPSPPQAPAPTPPQAPTPTPPQAPLLAPSKSRAPXAPPPAPTRATKKAKVDAAKNKDPGYDCTQEELDAYVASEVRRQLKPRSPEKNIPIDPSVKNFFRGMSAPAKEAIKLSDYERTFKKASSRKSKPVPQLGEQPNQEIEPLVTGEDFEIQDFINDTGLTTDQLLRDAPIEKAEVKYMYELGKPLVKPELLQSLPTQMYKFHQLYMEMSATGREMIRARIRDTDFLQGDDILWINFKGIYEIYQLDALDVSIMSYWILMEIQRARRRXVFDTGFIDPRKVNVAMLDQYPQATEDNLVHLLKAQHYKTFILLPYNREFHWVLLLFDLEACTVNVYDSMDKKESTFDKVFELIDRAWYRFRHLVRGKWRERLRRKFKFPFIRMRDNLITHKEFIAAVQEQLMGFINEXILDPKGKFYYDRNTIHRSLSSEIATTTTSKS

SEQ ID NO: 195805 - protein, 836 aa, Oryza sativa
  unsure (1)..(836): unsure at all Xaa locations
  Clone ID: PAT_MRT4530_91718C.1.pep
MPSTSTSTTPGPRPLPALSVAISTTTAASTSPPPPTLPPSPPPPSCVCRRPSITGPDLPDPNLPDAWIDDIGLHRRPPRPLRRCLSALVFAAAGIQDAYGLRRLLQTMTTPGANPPSPTPARIQEXANPATETVAESHPSTTANRPRNXHTSMSDGTSAXPTAPRTVIGRWSNCCGLAARENFGILHKDIDKVTKAEKERAWTAMEKWFTFPAKAKDRLKRKAFHKMGKAWKNWKSKLFTEFVNLPGNHTPFDEYPQITEAVWEEFCSLKNTQEFRESSEAHRLLQQRNEHPHRLGTAGYIGKKAIWAQEDAAAAAANVPTPFSDIPEQRARNCAREGLGLVAEQASQSEVESAPKRREDDILTKGLGTKEHPGRTRGIGSDVPWKHGLPQYSSQYRKRKVSKEERDARLKAELKVEVIQELEASMNARVEERFNKVLANMNIPRGTTPAVHPTPRAQHDASPSQHRSSCASTEVPAPGLPVAPLAAVDHIEGVAQCVLLARVHPTFAPEVAEGMAFKPSVTDKVHCAYLLAGYAKVSNDTVKDTWSGYPLPVPPNDEIMTLGDARKTFIQWPKEDIVVKMTPRPSRPTELTPPKSKLSIEAPRGPALSVPHSPDGANMDLADIAQSLALIKTTRKADSSPPLIKGQKRERGKGKVGKLAPEPKRGKAVTSMPVSKAGKVVRAPAQFELGMLLVEDNVLAVMGIACRELHKQYMKLSNAKQKMRVGFLDPSMVNEVNLRQSFTEVVDYVNRVTYLNSNKSKDYDFTEITKALNMAWGPYVEKGGRHKEGKDELYHDTKFACAQQIEDQCGFHVCHNMSTLLREVKDFDPEVVANGE

SEQ ID NO: 195806 - protein, 1195 aa, Oryza sativa
  Clone ID: PAT_MRT4530_91719C.1.pep
MEKVRASFLMDTFWQDHHFRLFISDTEGFNAVVNLITDMISCLRSKLEEASLLISDPGLRCIFLLNNWQLVLRRVESMDLPSSALIETSMTQRNPHKCTQIYINSQKSEHHRPRPDGVGRDEVEAPRSCSPRHRRGGSVLLEPPPGRIRPPRARPPQRRPPPIGQIWERGEEGMGRRGAAASFVVAVVAASVVVAVVAVASRRRRRAHPHRRPGGSVLPAPVLPGDGLLPSDRSGRGERRGWEGAVPPLPSWSPSSPLLSRSPSSPSPVAVVAVHIRAAAGADLSSPHPSSPAAGIPPVVVAVIGAAPLQGGGWGRKEGGGETGERTIHFHLFESGFMPSYNCWTSHGEQGVEMEEDEVEDDNIPDFAQYVGFEGNQTGEEEIAADGNDVADDLGQMLQDAREDCESEKEAHKLDKMLEDHRTSLYPGCEQGHKKLDTTLELLQWKAKNGRKYIMMPIIIQGPKQPGNDIDVYLRPLVEDLKQLWKKEGVPVWDEDKQEEFNLRALLFVTINDWPALSNLSGQSNKGYKACTHSNHPVRKKGKHFEHKADHRTKPKHRSGKTVFAMVKDLKVVFGKGPGSQHIESEDGHAAMWKKNSIFWELPYWEFLDVRHAIDVMHLTKNLCVNLLGFLGVYGKSKDTLEARNDLKHMEQRGDLHPEPKEKGSHYLSPASYTLSKAEKESMFECLESIKVPSGYSTNIKRIISTKEKKFTNLKSHDCHVLMTQLLPVVIRGILPDNVRATITKLCAFMNAISQKVIDPDRLEALQNEVVQCLVSFELIFPPSFFNIMTHLLCHLVKEIRILGPMYLHNMFPFERYMGVLKKYVRNRARPEASIAKGYGTEEVIEFCVEFIEDLRPIGVPESRHEGRLRGKGTLGRKAIMTVDNNLFRKAHFTVLQHSSLVAPYIEEHLALVRARNIGKSDAWITRYHIDTFPAWLRQHLMGNESINQQLAFLARGPSGSIATFQGYEINGYTFYTRAQDMKSTNQNSAVRVDAMGHDGTTATYYSAIEDIWELDYGPLKVPLFRCQWVRLTSGGVMIYDSGMTTVDLNKVGYSDEPFVLANDVTQVFFVKDMSSKGKKGRGPDEPKRQVVLPGKRKIVGVEDKTDEDYDQLDGQPPFTVTIDPSILLSNEDTPYSRSDHKEGTIVRRKYVRSTVTADVMPANPRADAAVSRRRLELVVLAAASASSAAAASLG

SEQ ID NO: 195807 - protein, 482 aa, Oryza sativa
  Clone ID: PAT_MRT4530_9171C.1.pep
MAVEAEAEVEVEVEAGGCLLQSFELYEAESVSASRPNRNGCCPCRVVVLPPDFCCADAWCALLDSGKDGASFEKFYILGTNTDKTSWKLLKIDRIEPSELNIDESSTVYSHSGYLDLLKVLDEDHRSTGGVKFVTKCFGIIGFIKFLGPYYMLIITEQRKIGAIFGHPVYQVTRTAMIELSNSESRAKFLNSKDEDRYKKLLQTIDLRKDFFFSHSYNIMRSFQKNFNDPKEGWDLYDTMFVWNEFLTRGVRNILKSTIWTVALVYGFFKQDKLAISGKDIMLTLVARRSRHYAGTRYLKRGVNDEGSVANDVETEQIIFEDMLGPKQISSVVQNRGSIPLFWSQETSKLNLKPDIILHEKDKNYEATRLHFENLRIRYGNPIIILNLIKKRERRPRESILRSEFDKAIKIINNDLPGENHLRFLHWDLHKNSQSKLYFRKSTNALQMLLKVAFEALNLTEFFYYQVPPARRAESSFNLHAP

SEQ ID NO: 195808 - protein, 266 aa, Oryza sativa
  unsure (1)..(266): unsure at all Xaa locations
  Clone ID: PAT_MRT4530_91720C.1.pep
TTIPGCTDLTLNQELSKLLPGITSIIIVRGVRLITKNIAQLAHNRGHGYSNSFTLIRGVPLYPQDTIPHMLPCPEIPPRHCKGGNRDNTLCTTQLKTVHRSWIIITPXKQGMDSPATPTDFSPLLSLVPRNESCYTKAADDLAGAMDLGRAIGGHLRVEDDEANPTVLTKTTNDARRRPATKRTAAAARLDGDGGAPVAGGEGEGAAEVLLTTAHLTAAAASGGDGXGDGAARLEIAGDGXRLGQRGGSATGDEGARDLGQTEEDD

SEQ ID NO: 195809 - protein, 1243 aa, Oryza sativa
  unsure (1)..(1243): unsure at all Xaa locations
  Clone ID: PAT_MRT4530_91721C.1.pep
RHPLLTQRSQGGNNSEEKVRAVNRHRRWQISAPTPPYLAVVSSSSSSPPPPPPPLPPHLWGESRRRQISLHLDLSDLDLSPSRRPPRDAAPRRRRATPTPRQAAAGTPRRRLRRRARNATAGXATPPPSPARAQCRRQHATPPPXRRATPPPSPPRNAAAACQRHVAARAMPPPPRPRRRRHGPATPRRRRRRHAAAAAATPPCQPPPRCRHTAVNERERERSNERERERTRQRTLPRERERERERSNEREREXGTNMADRDEEQILYDTIAEGSSQYWNEEEGNEDPNQYLNEEGNVERDAEGNQQGHVERDVEGNQEEEASGSQPSVGQNRARGQRGAAKKLEGRHIITEVEEDGRPSAPAKAAKNYVRHSGWVVRDNVPVSTVYWRRTRARGDHESFVPDSEKEMLWTTMLETFTLPAGTEDKVKRWTLKKMAEQFQSFKGDLYRNYILKGQTPNFDTFPKLRDHWDEFVAYKTGEQGQAMMERNKENAAKKKYHHHLGSGGYSVAMPKWEQMDASLIERGIEPATANWPEQSKFWYSAHGGTLNPADGSLVFGDQIREAARRLTDAVEASSQGTFRPDRDRDELTLALQTPEHPGRTRGKGVIPWKIGFKEDIHTYRSRMRSKRDTEAKIADLEFRVSSYELNMQEEVARKVDERMAAHRSHDPQPTIPSAMVSPSGNRSSCASTGQVASGMAIPTDPSGTYHCRPIPAGYSKVEVVLVEGAYEDLELDYPGGDGETHLRDTCHAIILWRRRYIILPGRQAASRAPSPPAPPSPPQDPAPFPPHAPPAPSPPQAPASTPPQDPAPTPPRAPTPTPPQAPLPAPSKSRAPPAAPPAHTRATKKAKVDAAKNKDPGYDCTQEELDAYVASEVKRQFKPRSPEKKILIDPSVRNFFRGMSASVKEAIKLSDYERTLKKASSGKSKPVPQLGEQPKQEIEPLVTGKEMTIEEFITDTDLTTDQLIGVAPIEKAEVKYMYELGKPLVKLELLQSLPTQMYKFHQLYMEMSAAGREMIGARIRDTDFLQGDDILWINFKGIYELYQLDALDVSIMSCWILMEIKGARRRRVFDTGFIDPRRVNVAMLDQYPQETEDNLVHLLKAQHYKTFILLPYNTEFHWVLLLFDLEACTVNVYDSMDKKESTFDKVFELIDRAWYRFRHLVRGNWRERLRRKFNFPCAKQAQGTNLCGYYVCEYCHCLADQIITTRELDFIRIRDNLTHKEFIAVVQEQLMGFINEQILDPN

SEQ ID NO: 195810 - protein, 211 aa, Oryza sativa
  unsure (1)..(211): unsure at all Xaa locations
  Clone ID: PAT_MRT4530_91722C.1.pep
MSSVRLITKNIVKLTHNRGHGYSNSFTLARDVPLYPQDTTPXMSPCASVPPRYLGXNSDNTSHTTQLTTVHRSWIIISPSKPEAMDSPATPTDFAPLHSLAPRNESCYTKARLHATTGTRELGXAIRGHLRVEDNDANSPVQETMTDDDERRPATRSNGGSARVGGGGGAPVACDNGEGAAEVLLCAHPTAATDGNGDGASGGATRPEDRR

SEQ ID NO: 195811 - protein, 258 aa, Oryza sativa
  Clone ID: PAT_MRT4530_91723C.1.pep
MDSPATPVGLSPPLLSLVLRNESCYTKGKEGLLRQRLGFAVDRVHGSGSRERTAEIDLIQTDGRDRSVHDRLTGDGDDDVSDEVTSGGGSAALRHKRRAPRRRSRRGELTDDQNVGGRPTDGGGVEEKAAEKIGSTAATVLRRSSATAKRWTGTAATWRSRRWPSRVTTTTIATAAHGWTNGGDGGAKAQRLGRYTRRRAKAKEAAGRGELGGPFKGASERRRRPTATGGEKERLATRVALVALNYKSGTHRVGVAAK

SEQ ID NO: 195812 - protein, 1044 aa, Oryza sativa
  Clone ID: PAT_MRT4530_91724C.1.pep
MARSVGGGSGGGGERPGSAPMRLCVHVLEARGLQAAYLTGHSDPYVRLQMGRRRAKTTVVKRCLSPLWDEEFGFAVGDAEEELVVSVLNEEGYFGGGFLGRVKVPLSTVMAADGLSLGTAWYHLHSKGGRFRKKRRVAGEIRLRIYLSRTAICDEPRNMPMQLINDTPCSSMRSVGTTASSLSARSVGTTASSLSARSVGTTASSLSASVSSLDLSACPSMERASCSSMDKLSQGIMDQQGRRSPGQLSCISTERSILLEPEEDDNDATTNASSVVEVMSRYFCRKPVDAAPSATSDHEQFQDTQMNSESCENGDNGALPETSLNELMKSLESKDKGSEMPENLRGGILVDQSYVLQPTEMNSMLFSAHSDFWPAVAEVQGLSGFQTDPWKLVSNDCLKRTLSYTKAASKLVKAVKITEEQTYLKAAGNSFAVLSSVSSPEVPCGNCFKVEILYCITPGPQLPSKEQTSHLTISWRLNFVQSTMLKGMIESGTKQGLREGYAQFTEVLSQKTKVIAPDDSNLSKDEILSSLQTQEESIWKLAARFLGNFAFIFSLCIALYATAHLRLVKPNMVHGLEYFGIDLPDSIWEVVFCAILIIQGQNIFKSGRRFLYAWKQRGSDHGVKAHGDGWLLTVALIEGSGVVGSEIFEFNAMDDPPSRLEVVVHDSEGPHNKIPIGQTEVNFLKNNLSDLGDMWLPLDGRFPQGCEPKLHLRIFLNNSRGTEIVMNYLAKMGKEVGKKIHLRSAQTNSAFRKLFSLPPEEFLIDDFTCYLKRKMPLQVAPPTLAKVGSPSLMIILRKDRGLEARHGAKTLDPQGKLKYHFQTFVSFNDAHRIIMALWKMRSVDPEQKGEMIDKNSELKQLPCEEGSLLANEDVKMSEVYSAVLSVDINSLMDMFSGGPLEHKVMQKAGCVDYSPTEWELLNQNIYQRQISFKFDKILSRFGEASTTQRKYNLANRDGWVIEEVMTLQGVQHEDYSSIQLKYQMTSTSLKPSTCSIQVLLGIAWLKGAKQQKKVVKNVMSNSANRLREIFSEVEKELASKKGVS

SEQ ID NO: 195813 - protein, 1945 aa, Oryza sativa
  unsure (1)..(1945): unsure at all Xaa locations
  Clone ID: PAT_MRT4530_91725C.1.pep
MWVITEMLFVKDIYSRLLRTTGTKDPGVYIFPVRPRLLHQHLNVFGRSISLGLSPSPPLPRANPRADAAVSRRRLELVVLAAASASSAAAASLRCFLYQQMADRDEEQILYDTIAEGSSQYWNEEEGNEDPNQYLNEEGNVERDAEGNQQGHVERDVEGNXEEEASGSQPSVGQKRARGQRGAAKKLEGRHIITEVEEDGRPSAPAEAAKNYVRHSGWVVRDNVPVSTVYWRRTRARGDHESFVPDSEKEMLWTTMLETFTLPAGTEDKVKRWTLKKMAEQFQSFKGDLYQKYILKGQTPNFDTFPKLRDHWDEFVAYKTGEQGKAMMERNKENAAKKKYHHHLGSGGYSVAMPKWEQMEASLIERGIEPATANWPERSKFWYYAHGGTLNPADGSLVFGYQIQEAARRLTDAVEASSQGTFRPDRDRDELTLALQTPEHPGRTRGKGVIPWKIGFKEDIHTYRSRMRSKRDTEAKIADLEFRVSSYELNMQEEVARKVDERMAAHRSHDPQPTIPPAMVSPSGNRSSCASTGQVGSQSMDAMQTQDESTCPVDDITQRTPCELHIPLKNLSIKVASGMAIPTDPSGTYHCRPIPAGYSKVEVELVEGAYEDLELDYPGGDGETHLRDTCHAIILWRRRYIILPGRQAASRAPSPPAPPSPPQDPAPSPPHAPPAPSPPQAPASTPQDPAPTPPRAPTPTPPQAPLPAPSKSRAPPAPPLAHTRATKKAKVDAAKIKDPGYDCTQEELDAYVASEVKRQFKPRSPEKKIPIDPSVRNFFRGMSASVKEAIKLSDYERTLKKASSGKSKPVPQLGEQPNQEIEPLVTGKEMTIEQFITDTGLTTDQLLGVTPIEKAEVKYMYELGKPLVKPELLQSLPTQMYKFHQLYMEMSATGREMIGARIRDTDFLQGDDILWINFRGIYELYQLDALDVSIMSCWILMEIQRARRRRVFDTGFIDPRKVNVAMLDQYPQETEDNLVHLLKAQHYKTFILLPYNTEFHWVLLLIDLEACTVNVYDSMDKKESTFDKVFELIDRAWYRFRHLVRSKWRERLRRKFKFPCAKQKQGTNLCGYYVCEYCHCLADQIITTRELDFIRMRDNLTTHKEFIAAVQEQLMGFINEEILDPKGDFINMPLDEDLPPTGSQPNPAADDDEDPDGGHIWQMGHPQVGPGDWDDLVQQQDAANGKVEDAWGQDHPMGQIMEANPDGQIDLAAANPGHENVVVPFVPAADKGKKAHEDMEILEVLPLAVHPPSSPVCQTAAPLMLPKALVKKRDGKTLLYNPYRRQSARLQHIKGDSELKVDPRMGIGKPRGKFARKLKELAGMNAESKLLSLRQKIEDSGCQWSFRRYPDYLVISSFCGDSGRVKIDTKIPKSPIFIFENYWVEMDGFFDIVQVVWSLDPGFNDPAKCISFKLKVLRKKLLAWSKNLSKLMGLLKNCNKVVDFLDLVEENRMLSIYEWNFRETVKEIDSLMSIIPADKAPGPDGFNGFFMKKCWHIIAQDYYRLVAHFHAGNVDLEILNSSFITLVPKKTSLETVNDFRPISLMGISLKIVTKLLAGRLQGVILKLVSDNHYGFIKGKTIQDCPAWPFEYIHQCQQSKREIVLLKLDFEKAFDTIEHSAILSVMQHMGFPLKWIEWVQMVFSTASSAVLLNGVPGNSFKCRRGVRQGVPLSLLLFVLGAELLQRIINKAFHQGLLSKPINESSGEGFPIIQYADDTLILLKTSQKEVFCFKAILNMFAQSTGLKHMVKFYNGADLPWVKLISQSYYDSKVPHLMMNKGSFWWRDVTSLVDIFRGIAKCEIRTGRTALFWNDLWNDDFKCISYPNLFAVTMYKSDSVKAMCSRPLEDSFALPLSDEAYSKFLQLQEVLDSLNLQSRMGDAWNFIWGSDKYTAKKFYKLNYSALQPPRPMIWLWKTKCVMKIKVFAWLMFCDRLNTRDMLDRRHCA

SEQ ID NO: 195814 - protein, 704 aa, Oryza sativa
  Clone ID: PAT_MRT4530_91726C.1.pep
LNQGNNNAPPPQNKLADFLRVRPPTFSSTTNPVEAGDWLHAVEKKLELLQCTDQEKVVFASHQLQGPVGVVALKKREFRALKHKDRTVAEYLHEFNRLARYAPEDVRTDEERQEKFLEGLKDELSVMLISHDYVDFQQLVDKAIRLEDKKNRMDNRKRKMTVSQEAQGSSQRQRIKPLQISESSSAGQGQSQQLNIGGEIKSETNESNEVNIEQANQPVLVQQDQSNNSSGREQQEPMQCQLRLQELRLQVLQLSHQFQSGMPRSLVAASSNSPPPPAELRRGRAAALAVAAACRRRQEVRRGERKPGRPSFFAAGRRSSPPSVNPSRRPFPVVAGRRRTSFVVVCARLRSGEKSTGVAGESMPLVFEGVIMIQERALKHKDRTVAEYLHEFNRLARYAPEDVRTDEERQEKFLEGLKDELSVMLISHDYVDFQQLVDKAIRLEDKKNRMDNRKRKMTVSQEAQGSSQRQRIKPLQISESSSAGQGQSQQLNIGGEIKSETNESNEVNIEQANQPVLVQQDQSNNSSGREQQEPMQCQLRLQELRLQVLQLSHQFQSGMPRSLVAASSNSPPPPAELRRGRAAALAVAAACRRRQEVRRGERKPGRPSFFAAGRRSSPPSVNPSRRPFPVVAGRRRTSFVVVCARLRSGEKSTGVAGESMPLVFEGVIMIQERCAVMDYVVQGWYTSGQSKTIRISVLESNSAS

SEQ ID NO: 195815 - protein, 100 aa, Oryza sativa
  unsure (1)..(100): unsure at all Xaa locations
  Clone ID: PAT_MRT4530_91727C.1.pep
XXPXLCPXXAXTGXXSAQEDFXWCLKSLGKXLXSXNLXWFFFWHLAGAQEWEDXPGDFLLQSWDXSFIINHACNDAXAPYELXXXQMIXISKKKKKKKKK

SEQ ID NO: 195816 - protein, 2172 aa, Oryza sativa
  unsure (1)..(2172): unsure at all Xaa locations
  Clone ID: PAT_MRT4530_91728C.1.pep
MDRQWMYADRRSKEFIDGVHYFLRVAEANRQRGFICCPCNKCKNQKEYSASRTIHFHLFESGFMSSYNCWXTSHGEQGVEMEEDEVEDDNIPDFAQYVGFEGNQTGEEERDADGNDVADDLGQMLQDTKXDCESEKGAHKLDKMLEDYRTSLYPGCEQGHKKLDTTLEFLQWKAKNGVSDKAFGDLLKLVKNILPEGNKLPETTYEAKKIVCPLGLEVQKIHACPNDCILYRGEEYENLEACPVCKALRYKIRRDDPGEVDGQLTKKRIPAKVMWYFPIIPQLRRLXRNKGNARMMRWHAEERQQDGMLRHPADGSQWXNIDRKFKEFGKDTRNIRFGLSMDGMNPFGEMSSGHSTWPVMMCIYNLPPWLCMKRKYIMMPIIIQGPKQPGNDIDVYLRPLVEDLKLLWKKEGVPVWDEDKQEEFNIRALLFVTINDWPALSNLSGQSNKGYKACTHCMDETESTYLKHCRKVIYMGHRRFLAANHPVRKKGKHFEHKADHRTKPKHRNGKTVFAMVKDLKVVFGKGPRSQPIESEDGHAAMWKKNSIFWELPYWEFLDVHHAIDVMHLTKNLCVNLLGFLGVYGKSKDTLEARNDLKHKEQRGDLHPEPKEKGSHYLSPASYTLSNAEKESMFECLESIKVPSGYSTNIKRIISIKEKKFTNLKSHDCHVLITQLLPVIIRGILPDNVRATITKLCAFMNAISQKVIDPDRLEALQNDVVQCLVSFELIFPPSFFNIMTHLLCHLVKEISILGPVYLHNMFPFERYMGVLKKYVRNRARPEASIAKGYGTEEVIEFCVEFIEDIRPIGVPESRHEGRLRGKVALGRKAIMTVDNNLFRKAHFTVLQQSSLVAPYIEEHLALVRARNIGKSNAWITRHHIDTFLAWIRQHLMGNESINQQLAFLARGPFGSIATFQGYEINGYTFYTRAQDMKSTNQNSVVRVDAMGHDGTTGTYYGAIEDIWELDYGPLKVPLFRCQWVRLTGGGVMIDDSGMTTVDLNKVGYSDKPFVLANDVTQVFFVKDMSSKGKKGRGPDEPKRHVVLPARPRLLHQHLEVFARSISLGXPSPPLPRDPRSDAATVSRRRLALVVVAAASTFSAAAASLKCFLYEQMADRNEEQILYDTIAEGSSQYWNEEEGNEDPNQYLNEEGNVERDAEGNQEWHVERDVEGNQEEASGSQPSVGQKRARGQRGAAKKLEXGRHIITEVEXAGRPSAPAEAAKNYVCHSGWVVRDNVPVSTVYWRRTRAHGDHESFVPDSEKEMLWTTMLETFTLPAGTEDKVKRWTLKKMAEQFQSFKGELYKKYILKGQTPNFNTFPKLRDHWDEFVAYKTGEQGQAMMERNKENAAKKKYHHHLGSGGYSVAMPKWEEMEASLLERGIEPATANWPERSKFWYYAHGGMLNLADGSLVFGDQIQEAARRLTDAVEASSQGTFRPDRERDKLSLALQTPEHLGRTXGKGVIPWKIGFKEDIHTYRSRMRSKRDTEENIAXLEFRVSSYELSMQEEVARKVDERMAAHQSNDPQPTIPPAMVSPSGNRSNCASTGQVGSQSMDAMQTQDESTCPVDDITQRTPCELHIPFKNLSIKVASGMAIPTDPSGTYHCRPIPAGYSKVEVELVEGAYEDLELDYPGGDGETHLRDTSHAIILWRRRYIILPGRQAASRAPSPPAPPSPPQDPAPSPPQAPAPTPPQAPAPTPPRSPTPTPPQAPLPAPSKSRAPQAPPPAHRRTTKKAKIDAAKNKDPGYNCTQEELDAYVASEVKRQFKPRSPEKKIPIDPSIMNFFRGMSAPAKEAIKLSDYERTLKKASSGKSKPVPQLGEQPNQEIEPLVTGKEMTIEEFITDTSLTTDQLLGVAPIEKAKVKYMYELGKPLVKPELLQSLPTQMYKFHQLYMEMSATGREMIGARIRDTDFLQGDDILWINFKGIYELYQLDALNVSIMSCWILMEIQRARRRXVFDTGFIDPRKVNVAMLDQYPQATEDNLVHLLKAQHYKTFILLPYNTEFHWVLLLFDLEACTVNVYDSMDKKESTFDKVFELIDRCYARLPPRSTNCRKKKCGHSNKLLSVEYLNGMSLSLNMIELPLRLQISDIQIRYVRFPRYYQMLLIVIRFTYFNIFDGAERNIPNHELLVARCLIGVILLLPQTGNEIHEIDICMTSGMVIFFVECSFKNLHLFV

SEQ ID NO: 195817 - protein, 911 aa, Oryza sativa
  unsure (1)..(911): unsure at all Xaa locations
  Clone ID: PAT_MRT4530_91729C.1.pep
MSTPGANPPSPTPARIQEEANPATEAIAEGHPGTTAVQQPEIHXEQHTSMSGETSAXPTAPRTVIGRWSNCCGLVARENFGILYKDIGKVTEAEKERAWTAMEKWFTFPAEAKDRLKWKAFHKMGKGWKNWKSKLFTEFVNPPGNHTPFDEYPQITEAVWEEFCSLKNTQEFRESSEAHRLLQQRNEHPHRLGTAWYIGKXAIWAQEDAAAAAANVPAPFSDIPEQRARNWARARGKVNPDGSVTFENKSDAVVYQELLGLVAEQASQSDVESTPKRREDDILTKALGTKGHPGRTRGIGSDVPWKHGLPQYSSQYRKRKVSKEERDARLKAELKVEVIQELEASMNARVEERVNKVLADMNIPRVTTPAVQPTPRVQHDASPSQHRSSCASTEVPAPGLPIAPLAAVDHIEGAAQCVLLARVHPTFAPEVAEGMAFKPSVTDKVHGADLLAGYAKVSIDTVKDTWSGYPLPVPPNDEIMTLGDARKTFIQWPKEDIVVKMTPRPSRPTELTPPKCKLSIEAPRGPALSVPHSPGGADMDLADIAQSLAPIKTTRKADSSPPLVKGQKRERGKGKVGELAPEPKRGKAATSMPVSKSGKVVRAPAQFELGMPLVEDNVLAVMGIACRELHKQYMELSNAKRKMRESSIVGHHDHQPFLSSPAYITIGFDDLFDLFRIRKLDTGLLKCYSFEITKALNMAWGPYVEKGGRHKEGKNELYHDTKFACAQQIGDQCGFHVCHNMSTLLREVKDFDPEVVQVDDIMALIHLYPRVAGCINGGDIKRSYSAHVHVVFILNIPLQTLPLGTRACFHTSERVHTHPHRRTLNRATYLTESWATRDHHHRHGPRCVSRRTHRGHAPGGIEGSTVAPRRRCRTSSRPAVDQWLPPSPGSSRGATQRRSRARYPGRRLRQV

SEQ ID NO: 195818 - protein, 73 aa, Oryza sativa
  Clone ID: PAT_MRT4530_9172C.1.pep
MWGRRQLIPYSDIACRLLLSRRHPVGRLLPFQRRPFVYSRRNDNRQEKKRGDEGGGGGGEGEVEGQREKSSVE

SEQ ID NO: 195819 - protein, 113 aa, Oryza sativa
  Clone ID: PAT_MRT4530_91730C.1.pep
MAMAALREASRRLVSRRESPAAYARPFLLTHSRGITYRLFIGGLSQFATEDSLAEAFSQYGQVLEATIVTDKMTNRPKGFGFVKFASEEAANKAKEEMNGKASFLKQCIFSSA

SEQ ID NO: 195820 - protein, 175 aa, Oryza sativa
  unsure (1)..(175): unsure at all Xaa locations
  Clone ID: PAT_MRT4530_91731C.1.pep
EAPAPLPQAAQLGYKPNVFSSXILFLQLRLIDYCKNEHMTYSTSHTANMQVHKDTKGWHNIGSFAKAAFSKTFKRRTHEPSQRRKRQANTQNKRELLRHQRRSGCTGRSKETNGRDRFYPKRAADDGDDWSDGGARLDRRQRRRRLGLRGGGARRDGGLRQRWRRWLGGGDGGPR

SEQ ID NO: 195821 - protein, 903 aa, Oryza sativa
  Clone ID: PAT_MRT4530_91732C.1.pep
MSTPGANPPSPTPARIKEEANPATEAVAEGHPATTAVQQPEIHELPHEQHTSMSGGTSASRSSRNPRSQNIWPTTVQVIREVDASGRPTAPRIVIGRWSNCCGIAARENFGILHKDIGKVTEAEKERAWTAMEKWFTFPAEAKDRLKRKAFQKMGKAWKNWKSKLFTEFVNPPGNHTPFDEYPQITEAVWEEFCSLKTTQQFRESSEAHRVLQQRNEHPHRLGTAGYIGKEAIWAQEDAAAAAANVPAPFSDIPEQRARNWARARGKVNPDGSVTFENKSDAVVYQELLCLVAEQASQSEVESAPKRREDDILTKALGTKEHPGRTRGIGSDVPWKHGLPQYSSQYRKRKVSKEERDARLKAELKVEVIQELEASMNARVEERVNKVLADMNIPRVTIPAVQPTPRVQHDASPSQHRSSCASTEVPAPGLPIAPLAAVDHIEVIVVIQSISNKRHLHIPILNSNFHLMQGAAQCVLLARVHPTFAPEVAEGMAFKPSVTDKVHGADLLAGYAKVSIDTVKDTWSGYPLPVPPNDEIMTLGDARKTFIQWPKEDIVVKMTPRPSRPTELTPPKSKLSIEAPRGPALSVPHSPGGADMDLADIAQSLAPIKTTRKADSSPPLVKGQKRERGKGKVGELAPEPKRGKAATSMPMSKSGKVVRAPAQFELGMPLVEDNVLAVMGIACRELHKQYMELSNAKRKMRESSIVGHHDHQPFLSSPAYITIGFDDLFDLFRIRKLDTGLLKCYSLLCWIESRRHGNQVGFLDPSMVNEVNLRQSFTEVVDYVNRCLWAHQDKEYIMCAHNQERHWILLVIVPKWSRVTYLNSNKSKDYDFSEITKALNMAWDPYVEKGGRHKEGKNELYHDTKFACAQQIGDQCGFHVCHNMSTLLREVKDFDPEVVANGE

SEQ ID NO: 195822 - protein, 377 aa, Oryza sativa
  Clone ID: PAT_MRT4530_91733C.1.pep
MVNTRASGSGNNNNEGNPILAQVLAQQTQLMNMMIQQMQNQLNQGNNNAPPPQNKLADFLRVRPPTFSSTTNPVEAGDWLHTIEKKLELLQCTDQEKVVFASHQLQGPASEWWDHFRMNRAEGQPITWVEFTEAFKKTHIPVGVVSLKKREFRTLKQKDHTVAEYLHEFNRLARYAPEDVRTDEERQEKFLEGLKDELSVTLISHDYVDFQQLVDKAIRLEDKKNRMDNRKRRMTVFQEAQGSSQRQHIRPLQIGESSSAGQGQSQQLNIAGEIKSETNESNDVNIEQANQPVPVQQDQSQENNTSGREQQVCFNCYKPGHFARECPKPKRQQPQGQVNNIVVTGANAVPVASSRVASSSVTAQPLVSKQQQFSLKP

SEQ ID NO: 195823 - protein, 86 aa, Oryza sativa
  unsure (1)..(86): unsure at all Xaa locations
  Clone ID: PAT_MRT4530_91734C.1.pep
TGAIDHRRSSLYLSLSXSLSLSLSLSLKLIDQDCLGFYSNVIGRRTAYGDPGGNHNMATFGGNTFARWFHCSGKFLGSFCKRSRGF

SEQ ID NO: 195824 - protein, 397 aa, Oryza sativa
  Clone ID: PAT_MRT4530_91735C.1.pep
MVNTRASGSGNNNNEGNPTLAQVLAQQTQLMNMMIQQMQNQLNQGNNNAPPPQNKLADFLRVRPPTFSSTTNPVEAGDWLHAVEKKLELLQCTDQEKVVFVSHQLQGSASEWWDHFRINRAEGQPITWADFTEAFKKTHIPVGVVSLKKREFRALKQKDHTVAEYLHEFNRLARYAPEDQLVDKAIRLEDKKNRMDNRKRKMTVFQEAQGSSQRQRIKPLQIGGSSSAGQGQSQPLNIGGEIKLETNESNEVNIEQANQPVPVQQDQSQENNSSGREQQPCAAVATVVVVTREGHRRDRQVVAVLVRRFAAAEDRRSTVAAVDPISAAASSSSPALSVALPPWFWSPVSSPRRPLPVGALRSRRRVSSFCVLACRFRRCEGSRVRSLKCFAKCCFCK

SEQ ID NO: 195825 - protein, 56 aa, Oryza sativa
  Clone ID: PAT_MRT4530_91736C.1.pep
MRPSILIDLITKPVAAQRHRTHAHKAIAPSERGESGVEPGPVAALGSLDGGGKKWH

SEQ ID NO: 195826 - protein, 136 aa, Oryza sativa
  Clone ID: PAT_MRT4530_91737C.1.pep
GFRLSNVRLDHRGRQCRRRGVRLRLRRPGGGSPVARRSRQERLRRRSNPARWIRRRWLRRPENFSRRRRRWRWEWLRRDRRERLAAFSLDAGGEVTTMAAGDCNKKKHDHRRPRRRRRHETEPTSHRSIHQSLPAG

SEQ ID NO: 195827 - protein, 107 aa, Oryza sativa
  Clone ID: PAT_MRT4530_91738C.1.pep
SRRRRPGPPPPRRPERPPAPVPPHPHPRPAPTRRPWRRRRRASSPAGEPGSGRYCVGRRFLSHGLLRRGSIPGAPRGTASVPSPEAARRRPAAAGGRRDGPSTASRN

SEQ ID NO: 195828 - protein, 164 aa, Oryza sativa
  Clone ID: PAT_MRT4530_91739C.1.pep
MATRVTTAMDMATTNRCLLPLQHSFARDVCVSLHLAPPSASSCAELHMNDDVTVGPAVLAANNAWSVAMTKERAAKSGHFSPASSFTSLPPSPHHHRLLWSSSCLVNLVADDHLDTLHSEEGLREEPRWTCVVLSGAPNFLYERVWVDPVGEQRGGVTSDKIWV

SEQ ID NO: 195829 - protein, 162 aa, Oryza sativa
  unsure (1)..(162): unsure at all Xaa locations
  Clone ID: PAT_MRT4530_9173C.1.pep
MAAGRWGGCVWTPASAAAARWRPAPXSAWGFYCHWWISSSLMGGDVWMWSWWDDDLCWREAGMGLDVRDGDFFIVGRVFSLPSVSPFFGRTLFLSWGMLGGGWRLRLTVEVYGGWMAFRGWQRSKLLADGGAATLGNDDMLQSLLRSSGAGRVKEVAPRWLG

SEQ ID NO: 195830 - protein, 91 aa, Oryza sativa
  Clone ID: PAT_MRT4530_91740C.1.pep
PPRGACVLTPPPGAAPPPDPRPPPPPSQSRRHPHHHPAHSPQPPPSPVPAAVIDPAAAAADPTADPATSPSPSGSPGCPSARRRGAPHRRR

SEQ ID NO: 195831 - protein, 63 aa, Oryza sativa
  Clone ID: PAT_MRT4530_91741C.1.pep
IEVALELCWTYIDKGRIATILVSVCQAVAPCVTPITFLLYQRRIVLFPQQLIVASWLASYYTH

SEQ ID NO: 195832 - protein, 62 aa, Oryza sativa
  Clone ID: PAT_MRT4530_91742C.1.pep
YCVLDGQTREHALVAFTLGVQQMICCCNTMDATTPKYSNARYEEIATEVSCYLKKVCFNPDK

SEQ ID NO: 195833 - protein, 197 aa, Oryza sativa
  Clone ID: PAT_MRT4530_91743C.1.pep
MAGLDTDTSTSTTSNIHGSMAHASRRARRWRCTCRRSANCKGKSKFVLEHQAMWEKEGRNKGYDTTVHRWRFATVPEGKILAGWEKSDILPLSKRDFLVADDAPSLQHLGCDGRGLAVLVCLTDDELKVQDKVYYDGLLESRWAEDTGSSYAPRTAAVASSVTGRRHDQRGQRHDGGDEEHSGGKVPQGQDSGEARI

SEQ ID NO: 195834 - protein, 61 aa, Oryza sativa
  Clone ID: PAT_MRT4530_91744C.1.pep
RVGPTPSKIYEAFYKNLKLGIHYDSTNRTNIAELLRYNSTKSNDEMTRHKDYTTQKKEGQI

SEQ ID NO: 195835 - protein, 133 aa, Oryza sativa
  Clone ID: PAT_MRT4530_91745C.1.pep
MDEGGGGKDAEFARAIEGRESSWRRWRGVTNARVGSEYWQWWFDGRRKWIKISHQEVTGGLGKYITDNHVFVGFDTTPMVAPAMSPFIHILTSLSFIPYSHRCRNINVQDTCSSSIIPYTNRMSIDIRTRVNS

SEQ ID NO: 195836 - protein, 2886 aa, Oryza sativa
  Clone ID: PAT_MRT4530_91746C.1.pep
MVERRAAALAIVALAERRSSFLTENCKSNIKLMRSRKAIKCFLPRWCKLYARCILGGHDAQPEATGDHDGTSFGVQGGDPQSAAPLPPGLSACMDRQWMYADRRSKEFIDGVHYFLRVAEANRQRGFICCPCNKCKNQKEYSASRTIHFHLFESGFMPSYNCWTSHGEQGVEMEEDEVEDDNIPDFAQYVGFEGNQTGEEEIAADGNDVADDLGQMLQDAREDCESEKEAHKLDKMLEDHRTSLYPGCEQGHKKLDTTLELLQWKAKNGVSDKAFGDLLKLVKNILPGGNKLPETTYEAKKIVCPLGLEVHKIHACPNDCILYRGEEYENLEACPVCKALRYKIRRDDPGEVDGQLTKKRIPAKVMWYFPIIPRLRRLFRNKGNARMLRWHAEERQQDGMLRHPADGSQWRNIDRKFKEFGKDARNIRFGLSTDGMNPFGEMSSGHSTWPVTMCIYNLPPWLCMKRKYIMMPIIIQGPKQPGNDIDVYLRPLVEDLKQLWKKEGVPVWDEDKQEEFNLRALLFVTINDWPALSNLSGQSNKGYKACTHCMDETESTYLKHCRKVVYMGHRRFLAANHPVRKKGKHFEHKADHRTKPKHRSGKTVFAMVKDLKVVFGKGPGSQHIESEDGHAAMWKKNSIFWELPYWEFLDVRHAIDVMHLTKNLCVNLLGFLGVYGKSKDTLEARNDLKHMEQRGDLHPEPKEKGSHYLSPASYTLSKAEKESMFECLESIKVPSGYSTNIKRIISTKEKKFTNLKSHDCHVLMTQLLPVVIRGILPDNVRATITKLCAFMNAISQKVIDPDRLEALQNEVVQCLVSFELIFPPSFFNIMTHLLCHLVKEIRILGPMYLHNMFPFERYMGVLKKYVRNRARPEASIAKGYGTEEVIEFCVEFIEDLRPIGVPESRHEGRLRGKGTLGRKAIMTVDNNLFRKAHFTVLQHSSLVAPYIEEHLALVRARNIGKSDAWITRHHIDTFPAWLRQHLMGNESINQQLAFLARGPSGSIATFQGYEINGYTFYTRAQDMKSTNQNSAVRVDAMGHDGTTATYYGAIEDIWELDYGPLKVPLFRCQWVRLTGGGVMIDDSGMTTVDLNKVGYSDEPFVLANDVTQVFFVKDMSSKGKKGRGPDEPKRQVVLPGKRKIVGVEDKTDEDYDQLDGQPPFTVTIDPSILLSNEDTPYSRSDHKEGTIMADRDEEQILYDTIAEGSSQYWNEEEGNEDPNQYLNEEGNVERDAEGNQQGHVERDVEGNQEEEASGSQPSVGQKRARGQRGAAKKLEGRHIITEVEEDGRPSAPAEAAKNYVRHSGWVVRDNVPVSTVYWRRTRARGDHESFVPDSEKEMLWTTMLETFTLPAGTEDKVKRWTLKKMAEQFQSFKGDLYQKYILKGQTPNFDTFPKLRDHWDEFVAYKTGEQGKAMMERNKENAAKKKYHHHLGSGGYSVAMPKWEQMEASLIERGIEPATANWPERSKFWYYAHGGTLNPADGSLVFGYQIQEAARRLTDAVEASSQGTFRPDRDRDELTLALQTPEHPGRTRGKGVIPWKIGFKEDIHTYRSRMRSKRDTEAKIADLEFRVSSYELNMQEEVARKVDERMAAHRSHDPQPTIPPAMVSPSGNRSSCASTGQVGSQSMDAMQTQDESTCPVDDITQRTPCELHIPFKNLSIKVASGMAIPTDPSGTYHCRPIPAGYSKVEVELVEGAYEDLELDYPGGDGETHLRDTCHAIILWRRRYIILPGRQAASRAPSPPAPPSPPQDPAPSPPHAPPAPSPPQAPASTPPQDPAPTPPQDPAPTPPRAPTPTPPQAPLPAPSKSRAPPAPPLAHTRATKKAKVDAAKNKDPGYDCTQEELDAYVASEVKRQFKPRSPEKKIPIDPSVRNFFRGMSASVKEAIKLSDYERTLKKASSGKSKPVPQLGEQPNQEIEPLVTGKEMTIEQFITDTGLTTDQLLGVAPIEKAEVKYMYELGKPLVKPELLQSLPTQMYKFHQLYMEMSATGREMIGARIRDTDFLQGDDILWINFRGIYELYQLDALDVSIMSCWILMEIQRARRRRVFDTGFIDPRKVNVAMLDQYPQETEDNLVHLLKAQHYKTFILLPYNTEFHWVLLLIDLEACTVNVYDSMDKKESTFDKVFELIDRAWYRFRHLVRGKWRERLRRKFKFPCAKQKQGTNLCGYYVCEYCHCLADQIITTRELDFIRMRDNLTTHKEFIAAVQEQLMGFINEEILDPKGEFYYDGNTIHRSLASELAAECIGLQAFTPNWYRDIKSKKDIEKIVQRLEDIQIIGEIPMKYWEKNAIECKINIINPEYIIKTSPIEATPKDIEEFKMHIEELLKLGAIRESRSPHRSAAFIVRNHAEEVRGKSRMVINYKRLNDNTIEDAYNIPNKQEWINRIQGSKYFSKFDLKAGFWQVKMAEESIEWTAFTCPQGHYEWLVMPLGLKNAPALFQRKMQNIFNDNQEFVLVYIDDLLIFSKTYKDHIAHLELFFRKVEQNGLILSKKKMEICKEKVNFLGHEIGEGKIHLQEHIAKKILQFPDAMNDKKKLQQFLGLVNYARNHINNLAKLAGPLYTKLRKNGQKYFNSEDIKLVRLIKEKVKELKPLELPLEESYFIIETDASQQGMKRSMNYAGVECFTFGDDNKLRIFPPNSYKFKPKDHIILDEVQECILDNFWYQYNNKREEKGYLLSILNSLSEYFHLINGSLMPANEDHEVIQQKPIYVVFDGKLPGVYISFEEIVAQKIDAKLMGGISWKKYKDIDEALSQARKILGINYYLEPAAKEYIQKCKKAKGKKTSEIPIKMTIKEEGFFKKPTYKECLTKGVDPLDGEYIDWKIIEKFEEASPQLKKELKEEILKELKQEMDQKFEQIKKAVDEKLEVSFSDLDTMDLGGHGQPDE

SEQ ID NO: 195837 - protein, 96 aa, Oryza sativa
  Clone ID: PAT_MRT4530_91747C.1.pep
HEGRASRPTPHRRGGDGRRRRRHRPHAAGQQLPWSDFSISSNSIAFSLLNFRLLLRFRLCFDALSDLWLTCLLVRSFRTLQLLYRHVGFSLRLHLS

SEQ ID NO: 195838 - protein, 2046 aa, Oryza sativa
  unsure (1)..(2046): unsure at all Xaa locations
  Clone ID: PAT_MRT4530_91748C.1.pep
MGLLRRMDRQWMYADRRSXKFIDGVHYFLRVAEANRQRGFICCPCNKCKNQKEYSASRTIHFHLFESGFMPSYNCWTSHGEQGVEMEEDEEEDDNIPDFAQYVGFEGNQTGEEEIAADGNDVADDLGQMLQDAREDCESEKEAHKLDKMLEDHRTSLYSGCEQGHKKLDTTLELLQWKAKNGVSDKAFGDLLKLVKNILPGGNKLPETTYEAKKIVCPLGLEVHKIHTCPNDCILYRGEEYENLEACPVCKALRYKIRRDDPGEVDGNKGNARMLRWHAEERQQDGMLRHPADVSQWRNIDRKFKEFGKDARNIRFGLSTDGMNPFGEMSSGHSTWPVTMCIYNLPPWLCMKRKYIMMPIIIQGSKQPGNDIDVYLRPLVEDLKQLWKKESVPVWDEDKQEEFNLRALLFVTINDWPALSNLSGQSNKGYKACTHCMDETESTYLKHCRKVVYMGHRRFLAANHPVRKKGKHFEHKADHRTKPKHRSGKTVFAMVKDLKVVFGKGPGSQHIESEDGHAAMWKKNSIFWELPYWEFLDVRHAIDVMHLTKNLCVNLLGFLGVYGKSKDTLEARIDLKHMEQRGDLHPEPKEKGSHYLSPASYTLSKAEKESMFECLESIKVPSGYSTNIKRIISMKEKKFTNLKSHDCHVLMTQLLPVVIRGILPDNVRATITKLCAFMNAISQKVIDPDRLEALQNEVVQCLVSFELIFSPSFFNIMTHLLCHFVKEIRILGPMYLHNMFPFERYMGVLKKYVRNRARPEASIAKGYGTEEVIEFCVEFIEDLRPIGVPESRHEGRLRGKGTLGRKAITTVDNNLFRKAHFTVLQYSSLVAPYIEEHLALVRARNIGKSDAWITRHHIDTFPAWLRQHLMGNESINQQLAFLARGPSGSIATFQGYEINGYTFYTRAQDMKSTNQKSVVRVDAMGHDGTTATYYGAIEDIWELDYGPLKVPLFRCQWVGYSDEHFVLTNDVTQVFFVKDMSSKGKKGRGPDEPKRQVVLPGKRKIVGVEDKTDEDYDQLDGQPPFTVTIDPSILLSNEDTPYSRSDHKEGTIMADRDEEQILYDTIAEGSSQYWNEEEGNEDPNQYLNEEGNVERDAEGNQQGHVERDVEGNQEEEASGSQPSVGQKRARGQRGAAKKLEGRHIITEVEEDGRPSAPAEAAKNYVRHSGWVVRDNVPVSTVYWRRTRARGDHESFVPDSEKEMLWTTMLETFTLPAGTEDKVKRWTLKKMAEQFQSFKGDLYQKYILKGQTPNFDTFPKLRDHWDEFVAYKTGEQGQAMMERNRENAAKKKYHHHLGSGGYSVAMPKWEQIEASLIERGIEPATANWPERSMFWYYAHGGTLNPADGSLVFGDQIREAARRLTDAVEASSQGTFRPDRDRDELTLALQTPEHPGRTRGKGVIPWKIGFKEDIHTYRSRMRSKRDTEAKIADLEFRVSSYELNMQEEVARKVDERMAAHRSHDPQPTIPPAMVSPSGNRSSCASTGQVGSQSMDAMQTQDESTCPVDDITQRTPCELHIPFKNLSIKVASGMAIPTDPSGTYHCRPIPAGYSKVEVELVEGAYEDLELDYPGGDGXYIILPGRQAASRAPSPPAPPSPPQDPAPSPPHAPPAPSPPQAPASTPPXDPAPTPPRAPTPTPPQAPLLAPSKSRAPPAPPPAHTRATKKAKVDAAKNKDPXPRSPEKKIPIDPXVRNFFRGMSASVKEAIKLSDYERTLKKASSGKSKPVPQLGEQPNQEIEPLVTGKEMTIEQFITDTGLTTDQLLGVAPIEKAEVKYMYELGKPLVKPELLQSLPTQMYKFHQLYMEMSTTGREMIGARIRDTDFLQGDDILWINFRGIYELYQLDALDVSIMSCWILMEIQRARRRRVFDTGFIDPRKVNVAMLDQYPQETEDNLVHLLKAQHYKTFILLPYNTEFHWVLLLFDLEACTVNVYDSMDKKESTFDKVFELIDRAWYRFRHLVRGKWRERLRRKFKFPCAKQKQGTNLCGYYVCEYCHCLADQIITTRELDFIRMRDNLTTHKEFIAAVQEQLMGFINEEILDPKVFNY

SEQ ID NO: 195839 - protein, 89 aa, Oryza sativa
  Clone ID: PAT_MRT4530_91749C.1.pep
MISPFVTKSVAVIKPKLSDRKLDQKYTESWGSEELTNQKADADDEIVLHFGRRIQQPCGWIFCMRSRDPVKGDGCTFMGMECSQHAISE

SEQ ID NO: 195840 - protein, 129 aa, Oryza sativa
  Clone ID: PAT_MRT4530_9174C.1.pep
SPSGHLTTTERPQREALRRHPATVSLHLPTERPSTGFPTEDDDYHGPSAMAELQRQGLWSLGLVHFTESNHDPRRSKGEGGVLSRGSPAKNGKEEIKLPDLDPEGEEREEEDEQERWEETEEKDKGNLV

SEQ ID NO: 195841 - protein, 2575 aa, Oryza sativa
  Clone ID: PAT_MRT4530_91750C.1.pep
MTSIPDHLVSPIFFRVARDGDVGRAGASGDGGAAGRGGRRWPHLHDHPGGWHGSAEQEKVRAAGTPRLEFLMIAELLPHLQDPEVMRRPEVRRPLAGLEDTLREAHELVASCQESSAAYRLVMAGRQAERFRDVESSIDCYLLVFPFISHIEVTRRLDLIHNILVPNDTTVPPSPSVGSSTHDLVFVDVVRKVASHGKGGEVFTLVELAAATNNFAADREIGYGSFGTVYKGTFPDGRKVAIKHEGADSVQGHRDAFLSEVDILPTLRHRHIIRLLGWCVAEKENSLVYEYMKNGSLHDHLHGGAPSSSSPSPVTTSWRKHMEILLGISRAIEYLHSHAVTPVIHRDDKASNILLDDTWAPRLADFGLSLKISWDDIKCRNAPVMGTSRYADPEYISTGRLTLAMDVYSFGVVMLEMLTGKTAAGLVSNNKNSLVSFALPKIEAKKLEEVLDRRPAQKPTARQLQATDLVAATAARCLCLQGKKRPAISEVVAELTLMDRQWMYADRRSKEFIDGVHYFLRVAEANRQRGFICCPCNKCKNQKEYSASRTIHFHLFESGFMPSYNCWTSHGEQGVEMEEDEVEDDNIPDFAQYVGFEGNQTGEEEIAADGNDVADDLGQMLQNAREDCESEKEAHKLDKMLEDHRTSLYPGCEQGHKKLDTTLELLQWKAKNGVSDKAFGDLLKLVKNILPGGNKLPETTYEAKKIVCPLGLEVHKIHACPNDCILYRGEEYENLEACPVCKALRYKIRRDDPGEVDGQLTKKRIPAKVMWYFPIIPRLRRLFRNKGNARMLRWHAEERQQDGMLRHPADGSQWRNIDRKFKEFGKDARNIRFGLSTDGMNPFGEMSSGHSTWPVTMCIYNLPPWLCMKRKYIMMPIIIQGPKQPGNDIDVYLRPLVEDLKQLWKKEGVPVWDEDKQEEFNLRALLFVTINDWPALSNLSGQSNKGYKACTHCMDETESTYLKHCRKVVYMGHRRFLAANHPVRKKGKHFEHKADHRTKPKHRSGKTVFAMVKDLKVVFGKGPGSQHIESEDGHAAMWKKNSIFWELPYWEFLDVRHAIDVMHLTKNLCVNLLGFLGVYGKSKDTLEARNDLKHMEQRGDLHPEPKEKGSHYLSPASYTLSKAEKESMFECLESIKVPSGYSTNIKRIISTKEKKFTNLKSHDCHVLMTQLLPVVIRGILPDNVRATITKLCAFMNAISQKVIDPDRLEALQNEVVQCLVSFELIFPPSFFNIMTHLLCHLVKEIRILGPMYLHNMFPFERYMGVLKKYVRNRARPEASIAKGYGTEEVIEFCVEFIEDLRPIGVPESRHEGRLRGKGTLGRKAITTVDNNLFRKAHFTVLQHSSLVAPYIEEHLALVRARNIGKSDAWITRHHIDTFPAWLRQHLMGNESINQQLAFLARGPSGSITTFQGYEINGYTFYTRAQDMKSTNQNSAVRVDAMGHDGTTATYYGAIEDIWELDYGPLKVPLFRCQWVRLTGGGVMIDDSGMTTVDLNKVGYSDEPFVLANDVTQVFFVKDMSSKGKKGRGPDEPKRQVVLPGKRKIVGVEDKTDEDYDQLDGQPPFTVTIDPSILLSNEDTPYSRSDHKEGTIMADRDEEQILYDTIAEGSSQYWNEEEGNEDPNQYLNEEGNVERDAEGNQQGHVERDVEGNQEEEASVEEDGRPSAPAEAAKNYVRHSGWVVRDNVPVSTVYWRRTRARGDHESFVPDSEKEMLWTTMLETFTLPAGTEDKVKRWTLKKMAEQFQSFKGDLYQKYILKGQTPNFDTFPKLRDHWDEFVAYKTGEQGQAMMERNKENAAKKKYHHHLGSGGYSVAMPKWEQMEASLIERGIEPATANWPERSKFWYYAHGGTLNPADGSLVFGYQIQEAARRLTDAVEASSQGTFRPDRDRDELTLALQTPEHPGRTRGKGVIPWKIGFKEDIHTYRSRMRSKRDTEAKIADLEFRVSSYELNMQEEVARKVDERMAAHRSHDPQPTIPPAMVSPSGNRSSCASTGQVASGMAIPTDPSGTYHCRPIPAGYSKVEVELVEGAYEDLELDYPGGDGETHLRDTSHAIILWRRRYIILPGRQAASRAPSPPAPPSPPQDPAPSPPHAPPAPSPPQAPASTPPQDPAPTPPRAPTPTPPQAPLPAPSKSRAPPAPPPAHTRATKKAKVDAAKNKDPGYDCTQEELDAYVASEVKRQFKPRSPEKKIPIDPSVRNFFRGMSASVKEAIKLSDYERTLKKASSGKSKPVPQLGEQPKQEIEPLVTGKEMTIEQFITDTGLTTDQLLGVAPIEKAEVKYMYELGKPLVKPELLQSLPTQMYKFHQLYMEMSAAGREMIGARIRDTDFLQGDDILWINFKGIYELYQLDALDVSIMSCWILMEIQRARRRRVFDTGFIDPRRVNVAMLDQYPQETEDNLVHLLKAQHYKTFILLPYNTEFHWVLLLFDLEACTVNVYDSMDKKESTFDKVFELIDRAWYRFRHLVRGKWRERLRRKFKFPCAKQKQGNNLCGYYVCEYCHCLANQIITTRELDFIRMRDNLTTHKEFITAVQEQLMGFINEEILNPKGEFYYDGNTIHRSLASELAASTTTSK

SEQ ID NO: 195842 - protein, 518 aa, Oryza sativa
  Clone ID: PAT_MRT4530_91751C.1.pep
MGNRTSRHHRAAPEQPPPQPKPKPQPQQQQQQWPRPQQPTPPPAAAPDAAMGRVLGRPMEDVRATYTFGRELGRGQFGVTYLVTHKATGKRFACKSIATRKLAHRDDIEDVRREVQIMHHLTGHRNIVELRGAYEDRHSVNLIMELCEGGELFDRIIARGHYSERAAAALCREIVAVVHSCHSMGVFHRDLKPENFLFLSKSEDSPLKATDFGLSVFFKPGEHFKDLVGSAYYVAPEVLKRNYGAEADIWSAGVILYILLSGVPPFWAESEDGIFDAVLRGHIDFSSEPWPSISNGAKDLVKKMLRQDPKERLTSAEILNHPWIREDGEAPDKPLDITVISRMKQFRAMNKLKKVALKVVAENLSDEEITGLKEMFRSLDTDNSGTITLEELRSGLPKLGTKISESEIRQLMEAADVDGNGTIDYAEFISATMHMNRLEKEDHILKAFEYFDKDHSGYITVDELEEALKKYDMGDDKTIKEIIAEVDTDHDGRINYQEFVAMMRNNNPEIAPNRRRMF

SEQ ID NO: 195843 - protein, 1019 aa, Oryza sativa
  Clone ID: PAT_MRT4530_91752C.1.pep
MADRDEEQILYDTIAEGSSQYWNEEEGNKDPNQDLNEEGNVERDAEGNQEGHMERDVEGNQEEEASGSQPSVGQKRARGQRGAAKKLEGRHIITEVEEDGRPSAPAEAAKNYVRHSGWVVRDNVPVSMVYWRRTRARGDHESFVPDSEKEMLWTTMLETFTLPAGTEDKVKRWTLKKMAEQFQSFKGELYKKYILKGQTPNFDTFPKLRDHWDEFVAYKTGEQGQAMMERNKENAAKKKYHHHLGSGGYSVAMPKWEEMEASLLERGIEPATANWPERSKFWYYAHGGTLNPADGSLVFGDQIREAARRLTNAVEASSQGTFRPDRERDELSLALQTPEHPGQTRGKVVIPWKIGFKEDIHTYRSQMRSKRDTEAKIADLEFRVSSYELSMQEEVARKVDERMAAHRSNNPQPTIPPAMVSPSGNRSSCASTGQVGSQSMDAMQTQDESTCPVDDITQWTPCELHIPFKNLSIKVASGMAIPMDLSGTYHCRPIPAGYSKVEVELVEGAYEDLALDYPGGDGETHLRDTSHAIILWHRRYIILPRRQAASRAPSPPAPPSPPQDPAPSHPHAPAPTPPQAPAPTPPRSPAPTPPRSPTPTPSQAPLPAPSKSRAPQAPPPAHTRATKKAKIDAAKNKDPGYDCTQEELDAYVASEVKRQFKPRSPEKKIPIDPSVMNFFRGMSAPAKEAIKLSDYERTLKKASSGKSKPVPQLGEQPNQEIEPLVTGKEMMIKEFITDTGLTTDQLLGVTPIEKAEVKYMYELGKPLVKPELLQFLPTQMYKFHQLYMEMSATGREMIGARIRDMDFLQGDDILWINFKGIYELYQLDALDVSIMSCWILMEIQRARRRGVFDTGFIDARKVNVAMLDQYPQATEDNLVHLLKAQHYKTFILLPYNTEFHWVLLLFDLSACTVNVYDSMDKKESTFDKVFELIDRAWYRFRHLVRGKWRERLRRKFKFPFIRMRDNLTTHKEFITAVQEQLMGFINEQILDPKGEFYYDGNTIHRSLASELATTITSKS

SEQ ID NO: 195844 - protein, 94 aa, Oryza sativa
  Clone ID: PAT_MRT4530_91753C.1.pep
PAGNYFLNKIPGQRSPEPSNKIVPHAGVPPATARHRRRGYHWDFEVAPLSIWAAAPSRAPRGLSPCPSPSPPRRWPPAVRRRRDAGFSQPISRP

SEQ ID NO: 195845 - protein, 103 aa, Oryza sativa
  unsure (1)..(103): unsure at all Xaa locations
  Clone ID: PAT_MRT4530_91754C.1.pep
MPAPPSLFHHERRCSQSGAPTALGVVRQRQWRSVAXERWESCSNGCPGCGSDADDNHDDARRWRLRQLQRXVTTPSPRGAPVAEGGDDNQKAVAEGEDDNEEA

SEQ ID NO: 195846 - protein, 2310 aa, Oryza sativa
  unsure (1)..(2310): unsure at all Xaa locations
  Clone ID: PAT_MRT4530_91755C.1.pep
MDRQWMYADRRSKEFIDGVHYFLRVAEANRQRGGFICCPCNKCKNQKEYSASRTIHFHLFESGFMPSYNCWTSHGEQGVEMEEDEVEDDNIPDFAQYVGFEGNQTGEEEIAADGNDVADDLGQMLQDAREDCESEKEAHKLDKMLEDHRTSLYPGCEQGHKKLDTTLELLQWKAKNGVSXKAFGDLLKLVKNILPGGNKLPETTYEAKKIVCPLGLEVHKIHACPNDCILYRGEEYENLEACPVCKALRYKIRRDDPGEVDGQLTKKRIPAKVMWYFPIIPRLRRLFRNKGNARMLRWHAEERQQDGMLRHPADGSXQWRNIDRKFKEFGKDARNIRFGLSTDGMNPFGEMSSGHSTWPVTMCIYNLPPWLCMKRKYIMMPIIIQGPKQPGNDIDVYLRPLVEDLKQLWKKEGVPVWDEDKQEEFNLRALLFVTINDWPALSNLSGQSNKGYKACTHCMDETESTYLKHCRKVVYMGHRRFLAANHPVRKKGKHFEHKADHRTKPKHRSGKTVFAMVKDLKVVFGKGPGSQHIESEDGHAAMWKKNSIFWELPYWEFLDVRHAIDVMHLTKNLCVNLLGFLGVYGKSKDTLEARNDLKHMEQRGDLHPEPKEKGSHYLSPASYTLSKAEKESMFECLESIKVPSGYSTNIKRIISTKEKKFTNLKSHDCHVLMTQLLPVVIRGILPDNVRATITKLCAFMNAISQKVIDPDRLEALQNEVVQCLVSFELIFPPSFFNIMTHLLCHLVKEIRILGPMYLHNMFPFERYMGVLKKYVRNRARPEASIAKGYGTEEVIEFCVEFIEDLRPIGVPESRHEGRLRGKGTLGRKAITTVDNNLFRKAHFTVLQHSSLVAPYIEEHLALVRARNIGKSDAWITRHHIDTFPAWLRQHLMGNESINQQLAFLARGPSGSIATFQGYEINGYTFYTRAQDMKSTNQNSAVRVDAMGHDGTTATYYGAIEDIWELDYGPLKVPLFRCQWVRLTGGGVMIDDSGMTTVDLNKVGYSDEPFVLANDVTQVFFVKDMSSKGKKGRGPDEPKRQVVLPVRPRLLHQHLNVFGRSISLGLSPSPPLPRANPRAXAAVSRRRLELVVLAAASASSXGVGKCLGLSRCFLYQQMADRDEEQILYDTIAEGSSQYWNEEEGNEDPNQYLNEEGNVERDAEGNQQGHVERDVEGNQEEEASGSQPSVGQKRARGQRGAAKKLEGRHIITEVEEDGRPSAPAEAAKNYVRHSGWVVRDNVPVSTVYWRRTRARGDHESFVPDSEKEMLWTTMLETFTLPAGTEDKVKRWTLKKMAEQFQSFKGDLYQKYILKGQTPNFDTFPKLRDHWDEFVAYKTGEQGQAMMERNKENAAKKKYHHHLGSGGYSVAMPKWEQMEASLIERGIEPATANWPERSKFWYYAHGGTLNPADGSLVFGYQIQEAARRLTDAVEASSQGTFRPDRDRDELTLALQTPEHPGRTRGKGVIPWKIGFKEDIHTYRSRMRSKRDTEAKIADLEFRVSSYELNMQEEVARKVDERMAAHRSHDPQPTIPPAMVSPSGNRSSCASTGQVGSQSMDAMQTQDESTCPVDDITQRTPCELHIPFKNLSIKVASGMAIPTDPSGTYHCRPIPAGYSKVEVELVEGAYEDLELDYPGGDGETHLRDTCHAIILWRRRYIILPGRQAASRAPSPPAPPSPPQDPAPSPPHAPPAPSPPQAPAPTPPQDPASTPPQDPAPTPPRAPTPTPPQAPLPAPSKSRAPPXAPPLAHTRATKKAKVDAAKNKDPGYDCTQEELDAYVASEVKRQFKPRSPEKKIPIDPSVRNFFRGMSASVKEAIKLSDYERTLKKASSGKSKPVPQLGEQPNQEIEPLVTGKEMTIEQFITDTGLTTDQLLGVAPIEKAEVKYMYELGKPLVKPELLQSLPTQMYKFHQLYMEMSATGREMIGARIRDTDFLQGDDILWINFRGIYELYQLDALDVSIMSCWILMEIQRARRRRVFDTGFIDPRKVNVAMLDQYPQETEDNLVHLLKAQHYKTFILLPYNTEFHWVLLLFDLEACTVNVYDSMDKKESTFDKVFELIDRAWYRFRHLVRGKWRERLRRKFKFPFIRAXGNNLTTHKEFIAAVQEQLMGFINEEILDPKGEFYYDGNTIHRSLASELAASTTTSKSEAGAATAFRRNRGAAGGEDDTATSTEETATSVGVPATYRSRPKTGRYWMPTRRPLRRASGEEEVMPGMRAASRSRGRWWRRRPALRQGDRGGWRRPARRKGKGDGGNVASGVSARNGGQAGEEEVAATLEEATARPAGARARRHRRLEAVGGVGERGGRRGDG

SEQ ID NO: 195847 - protein, 90 aa, Oryza sativa
  Clone ID: PAT_MRT4530_91756C.1.pep
YGETWGHPLGLSSLSSPFNLVLLVIFIDPCQNLSDQGLDIGWEKPASRRRRTAGGHRRGGEGEGQGERPRGAREGAAAQMERGATSKSQW

SEQ ID NO: 195848 - protein, 173 aa, Oryza sativa
  Clone ID: PAT_MRT4530_91757C.1.pep
QYPLHNTTQNSAPFLDHNHPLKNQRHGLPSDPRGLISATSQSGAQDGDLAGDWMVGCDFGGHEHVEDDETNPTVLTLEPNDERRRPATRSSGGTASVDGGDGAPVTGDSGERAAGLLHTSAHLTAVTATGGDDGGDGTTRMELGRRRRRGGARGGGATRHGRPRERGHTKEED

SEQ ID NO: 195849 - protein, 2030 aa, Oryza sativa
  Clone ID: PAT_MRT4530_91758C.1.pep
MPLYDGCKSKHSKLSCVLELMKLKASNGWSDKSFTELLELLKDLLPEGNNLPQTTYEAKQVLCPLGLEVRRIHACPNDCILYYKEYADLDVCPICGASRYKRAKSEGEGSKSKRGGPAKVVWYLPIAERMKRMFANKEQAKLVRWHAEERKVDTMLRHPADSVQWRTIDRIYQEFSNDPRNMRFAMCTDGINLFGDLSSRHSTWPVLLVNYNLPPWLCFKRKYIMLVMLIQGPRQPGNDIDVFLEPIIDDFERLWNEGTRTWDAYAQEYFNLHAMLFCTINDYPALGNLSGQTVKGKWACSECMEETRSKWLKHSHKMVYMGHRRFLPRYHPYRNMRKNFNGHRDTAGPPTELTGTEVHNLVMGITNEFGKKRKVGKRKEKSTSKEKTDEHVEKQKTKERSMWKKKSIFWRLPYWKDLEVRHCIDLMHVEKNVCESLMGLLLNPGTTKDGLNARRDLEDMGVRSELHPITTEFGRVYLPPACYTLSKEEKIDLLTCLSGIKVPSGYSSRISRLVPLQDLKLVGMKSHDCHVLITQLLPVAIRNILPPKVRHTIQRLCSFFHAIGQKIIDPEGLDELQAELVRTLCHLEMYFPPTFFDIMEHLPVHLVRQTKCCGPAFMTQMYPCERYLGILKGYVWNRSHPEGSIIESYTTEEAIEFCVDYMSETSSIGLPRSHHEGRLDGVGTVGRKTIRLDRKVYDKAHFTVLQHMTEVVPYVDEHLAVIRQENPGRSKSWVRNKHMSSFNEWLKNRIARLQNLSSETLQWLSQGPEWSATTWQGYDINGYTFHTVKQDSKCTVQNSGLRIEAASDGGRRDQYYGKVEQILELDYLKFKVPLFRCRWVDLRNVKVDNEGFTTVNLANNAYKDEPFVLAKQVVQVFYIVDPCNKKLHVVREGKRRIVGLDNIADEDDYNQHVHGIGQEIPLEEEEEEDEVQYARVDHEEGLFLAVTGEATCDGHIIHRPPLHRLDLDLSATISAAALYAALPTAASTSLPPFPPPPPHSLSRPPPSISIDLSAAISAALSTAISALYAVLPTATSTSPPLPPHSLSRRPPGPPLSRHARTVVAATGISSPPPPPLDRTSTRRRAKKPPPRRRAEKPCAVRLPGLVVAVCRLLCSSSPLQLNHVNARRKPALPNTCEDPGRSKPSHRGSCRRIAAGTTYVDVGRDKCKPTAPRTVIGRWSNCCGLAARENFGILHKDIGKVTEAEKERAWTAMEKWFTFPAEAKDRLKRKAFQKMGKAWKNWKSKLFTEFVNPPGNHTPFDEYPQITEAVWEEFCSLKTTQEFRESSEAHRVLQQRNEHPHRLGTAGYIGKEAIWAQEDAAAAAANVPTPFSDIPEQRARNWARARGKVNPDGSVTFENKSDAVVYQELLGLVAEQASQSEVESAPKRREDDILTKALGTKEHPGRTRGIGSDVPWKHGLPQYSSQYRKRKVSKEERDARLKAELKVEVIQELEASMNARVEERVNKHRSSCASTEVPAPGLPIAPLAAVDHIEGAAQCVLLARVHPTFAPEVAEGMAFNPSVTDKVHGADLLAGYAKVSIDTVKDTWSGYPLPVPPNDEIMTLGDARKTFIQWPKEDIVVKMTPRPSRPMELTPPKSKLSIEAPRGPALSVPHSPGGADMDLADIAQSLAPIKTTRKADSSPPLVKDQKRERGKGKVGELAPEPKRGKAATSMPVSKSGKVVRAPAQFELGMPLVEDNVLAVMGIACRELHKQYMELSNAKRKMRESSIVGHHDHQPFLSSPAYITIGFDDLFDLFRIRKLDTGLLKCYSLLCWIESRRHGNQVGFLDPSMVNEVNLRQSFTEVVDYVNRLAETNTSDGLLVTCPSEVGVTCDGRPPVKAGCINGGDIKRSYSAHVHVVFILNIPLQTLPLGTRACFHTSERVHTHPHRRTLNRATYLTESWATRDHHHRHGPRCVSRRTHRGHAPGGIEGSTVAPRRRCRTSSRPAVDQWLPPSPGSSRGATQRRSRARYPGRRLRQVSSMKALKKKLLCWAGGKKNKYIEMFLTPEDAFELATKELQHTAVSRILLI

SEQ ID NO: 195850 - protein, 84 aa, Oryza sativa
  Clone ID: PAT_MRT4530_91759C.1.pep
MRSYRTEDWLRKEVAAVMQTVVGSKGKTDDTGRRSRWAMPPAGRSREGVAAHGGGLKESGEANLRELDPACGGAHPMKSMVAIE

SEQ ID NO: 195851 - protein, 269 aa, Oryza sativa
  Clone ID: PAT_MRT4530_9175C.1.pep
MAQEPINHHQHQHDPPKQPPPREADDDHHRIQEREPLPPPTTTTRNQRLQLQLGGDGHHNHHHHHHQEVAGTSGSSSGGSSSNNGGGGTRDWLRLATGPASPGASAGSDHDLFPSTTTTAPAPQPPTPTPTPTPTPTPRHHHHDVLVLPGMPPPGSFLRPGPAMPGIPQAVVLPPSAVAAAAGVWFVLQAAPLQGREPFLPQIPRSYLRIKDGRVTVRLLTKYLVNKLGLEDESEVRGVCLGWHISPPSPLDKSFSIHAIPFHSIPSIL

SEQ ID NO: 195852 - protein, 371 aa, Oryza sativa
  Clone ID: PAT_MRT4530_91760C.1.pep
MVNTRASGSGNNNNEGNPTLAQVLAQQTQLMNMMIQQMQNQLNQGNNNAPPPQNKLADFLRVRPPTFSSTTNPVEAGDWLHAIEKKLELLQCTDQEKVVFASHQLQGPASEWWDHFRMNRAEGQPITWAEFTEAFKKTHIPVGVVASKKREFRALKQKDHTVAEYLHEFNRLARYAPEDVRTDEERQEKFLEGLKDELSVTLISHDYADFQQLVDKAIRLEDKKNRMDNRKRKMTVFQEAQGSSQRQRIKPLQIGEPFSAGQGHSQQLNIGGEIKSETNESKEVNIEQANQPVPVQQDQSQVNNSSGREQQVCFNCYKPGHFARECPKPKHQQPQGQVNNIVVTGANAVPVASSRVVSSSVTTQPPVSKKQ

SEQ ID NO: 195853 - protein, 74 aa, Oryza sativa
  Clone ID: PAT_MRT4530_91761C.1.pep
KVEQLANIFQLNWICYLIHICHGANRGLGCNKQGISYSLVSSSCYPGCLLALVRQLSLFSKAEEQRQAQVFTYI

SEQ ID NO: 195854 - protein, 511 aa, Oryza sativa
  Clone ID: PAT_MRT4530_91762C.1.pep
MDSSSNRIGFPLSKPSFPSPSPPPWAFAAASLHLFKDPRALLYPSPPSPSPLVVGRALAPCALASPSPPPLQPCAAVVSAVAVAREDRRRVRKVVAVLVRPFAVAGDRRSFIAVVNPKVSAASSSSPSPSVASPPLLWSPMVNTRANGSGNNNNEGNPTLAQVLAQQTQLMNMMIQQMQNQLNQGNNNAPPPQNKLTDFLRVRPPTFSSTTNPVEAGDWLHTIEKKLELLQCTDQEKVVFASHQLQGPASEWWDHFRMNKAEGQPITWAEFTEAFKKTHIPAGVVALKKREFRALKQKDRTVTEYLHEFNRLARYAPEDVRTDEERQEKFLEGLKDELSVMLISHDYEDFQELVDKAIRLEDKKNRMDNRKRRMTVFQEAQGSSQRQCIKPLQIGESSSAGQGQSQQLNIGGEIKSETNESNEVNIEQANQPVPVQQDQSQENNSSGRKQQVCFNCYKPGHFARECPKPKHQQPQGQVNNIVVTGANAVPVASSRVVSSSVTTQPPVSRQQ

SEQ ID NO: 195855 - protein, 307 aa, Oryza sativa
  Clone ID: PAT_MRT4530_91763C.1.pep
MRRQLPCLFKQSGSSSSHHDESSTGSLADVSMDDVDAPRRLLNDADLDLVDDRERQAYYMLSDREYAHTREYSPELLKRIGVENVVIPGARTTEMTCSRAYRYVMYIEGCRERCHSRPKTTLRNGPRNFRRGFLLIPWNSHRRECAYLMGFWVRVLKSAYFVKQTLLINAPRLLRHRKEPYLRQSSSISGDPPAAMDLGKSTSTSATLKKLQEEGALPGREKAEREAAVSDVPEESVSVEEDSEAFAEAQGNGEKFVGVAGESIASGFEGEIMMQERCTVWYTSGQSKTIRIAVPAVMGRSNNVFRD

SEQ ID NO: 195856 - protein, 123 aa, Oryza sativa
  Clone ID: PAT_MRT4530_91764C.1.pep
MASSATETETVRALHILIKHEGSRRKASWKDPDGRVISATTRADAAARLADLRDQILSGRANFADLAARHSDCSSARRGGDLGTFGRRQMQKPFEDATFALKVGEMSDTVDTDSGVHIILRTA

SEQ ID NO: 195857 - protein, 182 aa, Oryza sativa
  unsure (1)..(182): unsure at all Xaa locations
  Clone ID: PAT_MRT4530_91765C.1.pep
GLRWTGCTAAVHGNERPRSILSKTDGRDRTVHDRLTGNGNDDVSGYVSDDVSTGGGSATHARRRTTARRRKRRTPTGRGRRGELTGDQNNGGRATDGAGDEEEAAAEIGSTTATVLRQSSAAAKGRTRTAATWRPRWRSSRATAMTGTAAAHGWSDGDDGGARXHGARALPTARDKGEGGGG

SEQ ID NO: 195858 - protein, 133 aa, Oryza sativa
  unsure (1)..(133): unsure at all Xaa locations
  Clone ID: PAT_MRT4530_91766C.1.pep
RRRPLAAALAPPPVGAAFAPPSPPPVTVTGNACARAVAVAVAAWPVLSRAGSPSPVRSAPGRSRPSIPWTGGGPPAWSRSTVDXPLVRRCRVGPACRRPFSLSPEPLTGGARLPAPRPALMTSAMDMQASTSS

SEQ ID NO: 195859 - protein, 168 aa, Oryza sativa
  unsure (1)..(168): unsure at all Xaa locations
  Clone ID: PAT_MRT4530_91767C.1.pep
MRRGRQWGAAVGTTAVGSGRWWRWGRGGGERLRRRSVAAAAAVAVGSGGGDXGCGSSGGGGERRQRRSAAAAVAATVGGSGGCXWGRGGGERRRRQSAAAVAVAVGSGCGGGGDDGGGERRQLLRWGVAALLAPSPAQNVRQPLCSSRRAISSGIIIAAVSSSGTHST

SEQ ID NO: 195860 - protein, 847 aa, Oryza sativa
  Clone ID: PAT_MRT4530_91768C.1.pep
MSTPGANPPSPTPARIQEEANPATEAVAEGHPATTAVQQPEIHELPHEQHTSMSGGTSASRSSRNPRSQNIWPTTVQVIREVDASGRPTAPRTVIGRWSNCCGIAARENFGILHKDIGKVTEAEKERAWTAMEKWFTFPAEAKDRLKRKAFQKMGKAWKNWKSKLFTEFVNPPGNHTPFDEYPQITEAVWEEFCSLKTTQEFRESSEAHRLLQQRNEHPHRLGTAGYIGKEAIWAQEDAAAAAANVPAPFSDIPEQRARNWARARGKVNPDGSVTFENKSDAVVYQELLGLVTEQASQSEVESAPKRREDDILTKALGTKEHPGRTRGIGSDVPWKHGLPQYRSQYRKRKVSKEERDARLKAELKVEVIQELEASMNARVEERVNKVLADMNIPRVTTPAVQPTPRVQHDASPSQHRSSCASTEVPAPGLPIAPLAAVDHIEGAAQCVLLARVHPTFAPEVAEGMAFKPSVIDKVHGADLLAGYAKVSIDTVKDTWSGYPLPVPPNDEIMTLGDARKTFIQWPKEDIVVKMTPRPSRPTELTPPKSKLSIEAPRGPALSVPHSPGGADMDLADIAQSLAPIKTTRKADSSPPLVKGQKRERGKGKVGELAPEPKRGKAATSMPVSKSGKVVRAPAQFELGMPLVEDNVLAVMGIACRELHKQYMELSNAKRKMRESSIVGHHDHQPFLSSPAYITIGFDDLFDLFRIRKLDTGLLKCYSLLCWIESRRHGNQVGFLDPSMVNEVNLRQSFTEVVDYVNRCLWAHQDKEYIMCAHNQDEITKALNMAWGPYVEKGGRHKEGKNELYHDTKFACAQQIGDQCGFHVCHNMSTLLREVKDFDPEVVANGE

SEQ ID NO: 195861 - protein, 430 aa, Oryza sativa
  Clone ID: PAT_MRT4530_91769C.1.pep
MGQLPISLFFADKIQSRGEITSALMMDRLLNIPGPPLGSIENIKLRMLRSAAFDRWWIEWKKHLFHQSASMYMTDLFPEAVPQTTESSPPHHSDSGLEIQHALGLLPNSGGLAPPVIGYYAPKTSTLLHGLPLVPIAPDTGKKKRTKSVVAPSAATKKSKKEKTAVDDLPSIDLDVEQFLEGEELEEAVDEAAENISETRKQTPPADIPAPQKPPSSPVHPTYKPRPRRSPTPVPESSEHTPSATGSHHVEEEVAPTPAIPVLANIFSIDIRQFMDEDRFLEIHDQLPDELADVITPAAYLEQHRLKLEKAKQRIADRRERRYLEATIQASRASINEEKAKLDELEVGPSSTQANIEQLNARKIELLAELEQCNAQIAIEEQKLADLPKATEDQRSKLKSFVKYLTELTKYLKVISGADAADAQIIDEVD

SEQ ID NO: 195862 - protein, 560 aa, Oryza sativa
  Clone ID: PAT_MRT4530_9176C.1.pep
MDGMKDGRDEEVATDAVGAGGVDVGGETSKLIDQDCMAILDVLARRLMSGESEPYIGKIIKIWQQNQAKKVKILWFFLPDEIRKHLSGPVMEKEIFLACGEGVGLADINPLEAIGGKCTVLCISKDERNRQPSPRELAMADYIFYRFFDVNSCTLSEQLPEKIAGVEGNLLLNSKVEQVTSCSDQEVHGVDQKMLNVPVPLPQSTVMEDESPVAAVSLPPSVFKEENVASAIPFPQPVVKEESAAAAIPPPHVALKEESVSKSTENITKPAQKVLPGERPPKRVKFSENVTVQNVPLDVPERPSRTGPLELAGRQADRSKWFKIPWDTRLRNADEQGTLVYIQNLDIQFAAADIEELIRDALQLNCIAKPINHPTYDDPNNGKAYAIFKTKSAADSAISKINSGLVVGGRPLYCSKGLLKVPKPSETLLGHLTINNIRMGIRQREEQVLMLSYEVCSISFLCLNIFAQPLFFLQKKAVSTSHCSQPNTMEYDLALDWMLVRAKQETKFRTLHKLLNAATGLGRLKIDTANSGDRLVGIVGIAKDDHVFVLDALGEPYAGS

SEQ ID NO: 195863 - protein, 128 aa, Oryza sativa
  Clone ID: PAT_MRT4530_91770C.1.pep
MSSVGLITKNIAQLAHNRGHGYSNSFTLARDVPLYTHDTIPHMSPCPEVPPRHYKRGNRDNTFRTTQLTTVHHSWIIITPSITRGMDSPATPTDFSPLFSLAPRNEPCYTKAASDTATAALALEQQRR

SEQ ID NO: 195864 - protein, 72 aa, Oryza sativa
  Clone ID: PAT_MRT4530_91771C.1.pep
MMRTTSVDYNLEHQRKLSTTRKFDTQDKSDDGSTKKRSPQPLFPHRRRRTTGDEEGSERVLRGEGERNRIVT

SEQ ID NO: 195865 - protein, 2300 aa, Oryza sativa
  Clone ID: PAT_MRT4530_91772C.1.pep
MAQVACAGAARRANCDVEVACGSLLPTEEVLDQDVENTAAAREGMFVPSPLGGETIDLDTQCLSTMLHDIEDAEDNDRDYEKFSKLVEDCQMPLYDGCKSKHSKLSCVLELMKHKASNGWSNKSFTELLELLKDLLPEGNNLPQTTYEAKQVLCPLGLEAELVRTLCHLEMYFPPTFFDIMEHLPVHLVRQTKCCGPAFMTQMYPCERYLGILKGYVRNRSHPEGSIIESYTTEEVIEFCVDYMSETSSIGLPRSHHEGRLDGVGTVGRKTIRLDRKVYDKAHFTVLQHMTEVVLYVDEHLAVIRQENPGRSESRVRNKHMSSFNEWLKNRIARLQNLSSETLQWLSQGPEWSATTWQGYDINGYTFHTVKQDNKCIVQNNGLRIEAASDGGRRDQYYGRVEQILELNYLKFKVLLFRCRWVDLCNVKVDNEGFTTVNLANNAYKDEPFVLAKQVVQVFYIVDPCNKKLHVVLEGKRRIVGLDNIADEDDYNQHVHGIGQEIPLEEEEEEDEVQYARDLTCDGPAVLGLSQVALPVTAPRLAPITGEATCDGPIIRRHLDLFTTALSAISAALPTAASTSPPPSSPPPSPPPSRPLHRPPRRRPLHRPPRRRPLHRHLDLSAALSTAAASLTLSTAAVHLHRPLRRHLRRPLYRHLRPLRRPPHRRLDLSTAAASLTLSTAAGTSSQSPRQDRRRRHRDLLSAASSSRLGPPRAAVPRSRRRAAVLRSRAPCACRDSSSPCAASSARRLLSRIAAGTTYVDVGRDKCKPTAPRTVIGRWSNCCGLAARENFGILHKDIGKVTEAEKERAWTAMEKWFTFPAEAKDRLKRKAFQKMGKAWKNWKSKLFTEYVNPPGNHTPFDEYPQITEAVWEEFCSLKTTQEFRESSEAHRVLQQRNEHPHRLGTAGYIGKEAIWAQEDAAAAAANVPAPFSDIPEQRARNWARARGKVNPDGSVTFENKSDAVVYQELLSLVAEQASQSEVETAPKRREDDILTKALGTKEHPGRTRGIGSDVPWKHGLPQYSSQYRKRKVSKEERDARLKAELKVEVIQELEASMNARVEERVNKHRSSCASTEVPAPGLPIAPLAAVDHIEGAAQCVLLARVHPTFAPEVAEGMAFKPSVTDKVHGADLLAGYAKVSIDTVKDTWSGYPLPVPPNDEIMTLGDARKTFIQWPKEDIVVKMTPRPSRPTELTPPKCKLSIEAPRGPALSVPHSPGGADMDLADIAQSLAPIKTTRKADSSPPLVKGQKRERGKGKVGELAPEPKRGKAATSMPVSKSGKVVRAPAQFELGMPLVEDNVLAVMGIACRELHKQYMELSNAKRKMRESSIVGHHDHQPFLSSPAYITIGFDDLFDLFRIRKLDTGLLKCYSLNRCEPLHVKKPSTLRTCETTGRQPPHTTSRDFAIRPSVLVACNASILGERRRMPGGFILAWLTRPDYTRGACVRGHPAACSGGLTNRLASVAAEWCLRLHGWPIMPPLLGVYDFTAGLPPSPPSGASAYTAGLLRRRCWASTTSPPTGRLVSRRLMFLPARLAYYAAVVGRLRLHRRPASVAADWCPRLYGWLVTPPFMGVHVFADRLAFAAAEWCLRLHGWPIMPPLLGVYVFTVGLPPSPPIGASAYTAGLLCRRCWASTSSPSACLRRRRLVPPPTRLAYYAAAVGRLRLHRRLASVAADWCLRLHGWPIMPPLLGVYDFTAGLPPSPPSGASAYTAGLLCRRCWASTTSPPACLRRRRLVSSPIRLVGHTTVHGRPRLRDRLAFAAAEWCLRIHGWPIMPPLLGVYDFTAGLPLLPPIGAPAYTAGLLCRRCWASTTSPPACLRRRRLVSSPIRLVGHTTVHGRPRLHRRPTSDAADWCLRLHGWTYYARRCWAFTTSPPACLRRRRLVSSPIRLVGHTTIHGRPRLRRPAGLRRRRVVPPPTRLAYYAAVVGRLRLHRRPASVAADWCPRLYGWLVTPPFMGVHVFADRLAFAAAEWCPRLYGWLVTPPFMGVHDFTAGLPPSPPIGASAYTAGLLCRRCWASTTSPPACLRRRRLVPPPTRLAYYAAAVGRLRLHRRLASVAADWCLRLHGWPIMPPLLGVYDFTAGLPPSPPSGASAYTASLLCCCCWASTLSPPACLRRRRLVSSPIRLVGHTTVHGRPCLRLHGWPIMPPLLGVYDFTAGLPPSPPIGASAYTAGLLCRRCWASTTSPPACLRRRRLVPPPTRLAYYAAAVGRLRLHRRLASVAADWCLRLHGWPIMPPLLGVYDFTAGLPPSPPTDVLRLHGWPIMPPLLGVYDFTTGLPPSPPTGVPAYTVGWSHHR

SEQ ID NO: 195866 - protein, 129 aa, Oryza sativa
  Clone ID: PAT_MRT4530_91773C.1.pep
ATSGVPVREQLFNVSICHYNNGKLFHHGEFSRSFGRTFDTTGLEVATPILLQRDDGHKHRRGSHGDIIFLTSRGEVTSYSPGLLGHDAIWRWQLSTGATWSNLPSPSGMMENIVVPTLKAFSLRAYDPK

SEQ ID NO: 195867 - protein, 109 aa, Oryza sativa
  Clone ID: PAT_MRT4530_91774C.1.pep
LLSNTMQTKHCHGSKQMLDVIGGINFFSAENNQAGDGCISSSMPLEERRWLDSHTPKSSLDLIHDGDDGGDHRVEPYLETLVSGADSVMHIGHHTCSIPYPNPNRRSQP

SEQ ID NO: 195868 - protein, 199 aa, Oryza sativa
  Clone ID: PAT_MRT4530_91775C.1.pep
WPATKRTAAAARLDGDGGAPVVGGEGGRAAEVLLTTAHPNRGCDNTLCTTQLTTVHHSWIIITPSHQWPNQDGDLAGDWMVGCDFGGQEHVEDDETNPTVPTLEPNDERRRPATRSSGGAASVDGGDGAAVVGGFGEIAAGLLHPPAHLTVVTETGGDGGGGGATRMELGRRLRRGGARGGGATRHGRPRERGQTKEED

SEQ ID NO: 195869 - protein, 60 aa, Oryza sativa
  Clone ID: PAT_MRT4530_91776C.1.pep
MDRQEKWIFTGGRVRTAASKDALLFAGGPLKRLRAKIGFSHAAVASTTVQYNRRNGQRGG

SEQ ID NO: 195870 - protein, 133 aa, Oryza sativa
  Clone ID: PAT_MRT4530_91777C.1.pep
KKAYQTKHCHGSKQMLDVIGGINFFSAENNQAGDGCISSSMPLEERRWLDSRTPKSSLDLIHDGDDGGDHRVDPYVETLVSGDASVMRIGHDACCIRSTGANSRWHPFPQWQVILCMFLTLSIQIGALAESDM

SEQ ID NO: 195871 - protein, 210 aa, Oryza sativa
  Clone ID: PAT_MRT4530_91778C.1.pep
MNATVTSLTSNIKELAHGEVQKDSQRSAIASSVTSSYSTAHPTEDADSRTLYVSNVHFGATKDALSRHFNKFGAVLKVVIVTNAATGQPTGSAYVEFLHKESAERALSLNGTSFMARILKVVRRSSHEAAHFYGWPGGGRTSMYARHGRMAYPRGGLPGSTFRGRAPMIAGARSLQWKREPSVTDSNTGATVALPSAEQVLPPAHRGDEL

SEQ ID NO: 195872 - protein, 193 aa, Oryza sativa
  Clone ID: PAT_MRT4530_91779C.1.pep
MEAEDAAGGGGDGGRYFKADLTGAGVVQLSERVREKLREFVDDYTNNTLVEYVILLLEGGKRKDEAIKELDVFLGKDSRAFISWVDNKDDEAPNELPGEQKSSELQLRSKDQTHPECVSEPSTTRSRTKRDWKGIGREGNENFPLRSVLKDILHGEEKRSQKVNEIRHPPSSNQRNGRKRDRDDEPQQIKLNI

SEQ ID NO: 195873 - protein, 87 aa, Oryza sativa
  unsure (1)..(87): unsure at all Xaa locations
  Clone ID: PAT_MRT4530_9177C.1.pep
WRRRLGLRGGGGLRRPAAERRGWPSFPTAWXSPRRWRRPTATAEEARRRGWRSPAATARLGGVGDELRGTGGNLTKATPTPPHHQLH

SEQ ID NO: 195874 - protein, 735 aa, Oryza sativa
  Clone ID: PAT_MRT4530_91780C.1.pep
MEAEDAAGGGGDGGRYFKADLTGAGVVQLSERVREKLREFVDDYTNNTLVEYVILLLEGGKRKDEAIKELDVFLGKDSRAFISWLWDHLSVNLHLYVQTQEQLQVDNKDDEAPNELPGEQKSSELQLRSKDQTHPECVSEPSTTRSRTKRDWKGIGREGNENFPLRSVLKDILHGEEKRSQKVNEIRHPPSSNQRNGRKRDRDDEPQQIKRDLPLRRDVGASCRLLKFAVRDAVKAVQQTSSSTEPSSKRLRSVVSTSSADSLHGKRIETSTEGHLYDKKPERTRQILQVPGAALALRAAAEAAADSTKVRSTGSVFSRLGQGNAVNQTPRSREQQRDYEDFKPATTADDHDSDRYDNDDEISGDITLEDGEAEMNVDSTSDDDVSRDDGITRYGSSDSQVAAYPSVVEKKDVFVKCSVEPETSTMRHSNLIKEEQPGSLSVISMSKTVVVPVNANNLEPSNYETPKDVHVVEKTDITPMNATVTSLTSNIKMRSKADRSSSENTLLNDLSLLSSIGLNWVGRFYLTVEKTTQELAHGEVQKDSQRSAIASSVTSSYSTAHPTEDADSRTLYVSNVGIYVFSSHMVHFGATKDALSRHFNKFGAVLKVVIVTNAATGQPTGSAYVEFLHKESAERALSLNGTSFMARILKVVRRSSHEAAHFYGWPGGGRTSMYARHGRMAYPRGGLPGSTFRGRAPMIAGARSLQWKREPSVTDSNTGATVALPSAEQVLPPAT

SEQ ID NO: 195875 - protein, 150 aa, Oryza sativa
  Clone ID: PAT_MRT4530_91781C.1.pep
HAKPHGFKYKSGQYIYVNCGKVSPFEWHPFTITSAPDDSYLSMHIRCRGDWTSSFRAIFSQICRPPMNGQSGLLRADCMSMEHHSRFPKLLIDGPYGAPAQDYWKYDVLLLIGLGIGATPLISIVKDVLNHIYDDPESAASPHTTNGGGA

SEQ ID NO: 195876 - protein, 90 aa, Oryza sativa
  Clone ID: PAT_MRT4530_91782C.1.pep
MEYKVTTCIIPSQGAKVTRKTDIEVVDLRGWQWSFRREKQRSAEIDDGAEETGQACECDVDSATEIGGGTEKVEERSGATRRRTGGDREE

SEQ ID NO: 195877 - protein, 165 aa, Oryza sativa
  Clone ID: PAT_MRT4530_91783C.1.pep
KLGKKIGSGSFGELYLAVKVQNSEEVAVKLESVKSRHPQLHYESKLYMLLQGGTGIPHLKWFGVEGEYRVMVIDLLGPSLEDLFNYCNRKLSLKSVLMLADQMIARVEYMHTRGFLHRDIKPDNFLMGLGRKANQVYVIDYGLAKKYRDLQTHKHIPYRENKNLT

SEQ ID NO: 195878 - protein, 34 aa, Oryza sativa
  Clone ID: PAT_MRT4530_91784C.1.pep
MSEIQELFARQIKMMIYVDFDKVDVCTRVRCPLG

SEQ ID NO: 195879 - protein, 38 aa, Oryza sativa
  Clone ID: PAT_MRT4530_91785C.1.pep
RYGRRGYATLFNLEQQLDTEYYMGLPCKLVVLLRPNHK

SEQ ID NO: 195880 - protein, 126 aa, Oryza sativa
  Clone ID: PAT_MRT4530_91786C.1.pep
MTSSTAATTWVATSPELERSAGLSKGIYTGGDSPVTGDGGEGTAELSLFHAHPTAARGGSGDGQNDGARRLFVGRRRRRLRRRGGGSTPPHLVTTRIWEGRGPDDGDHDRREGRDVDVHGNDNDSD

SEQ ID NO: 195881 - protein, 72 aa, Oryza sativa
  Clone ID: PAT_MRT4530_91787C.1.pep
DSGSLKSNKGDPLESRGLLLVLALKVMRALPPLRLVDAINQSIANISGEEGQQAPIDSHQLSSSSSSEKQEV

SEQ ID NO: 195882 - protein, 46 aa, Oryza sativa
  unsure (1)..(46): unsure at all Xaa locations
  Clone ID: PAT_MRT4530_91788C.1.pep
RPRVRSYGGVIVEAYKSHFKGGGPRXKNGGCKCGTSCSCTDCKCGK

SEQ ID NO: 195883 - protein, 566 aa, Oryza sativa
  unsure (1)..(566): unsure at all Xaa locations
  Clone ID: PAT_MRT4530_91789C.1.pep
IGLICTGKINNPRRVITTHRKIGPTTALSVERNSGFSRWYQSFRCSFLLNPEFLSTLKAIVGPIFRVESKLPVFDGKYDSAAYVNWELAVEKQFDEYDFSNAQMIKAVSNKCIGSASFWWHTVGNKLETWDECKILMRKRFVFSYYRRALFEKFEHIKQGDKTVREYFHDFKICITYSGLQESNENTMTRFFRGLNSNIQVGLVNVTYNHIGQLFMLACNIERKILENPMEQQAMLVPPIADILQEVQNSPQNEKNDMFEMSLPSLANEEKADAPTLSEEGIKGKLNGAEITQDEYASDELHFSTCHASEEQLLVEPIAEMPLSQVDLLAVPCDREELCDNASLISMPQLVNEHAISSVLLCADFKHVVHIANDIEERKLITSFNTXGYVQFDDFXHVFANHTTSSLSSFDWMKQVILNGLYEEHHMEKTTTIFREEGEDDVTIATMDTNIAHIMDEQEDIKVKASKCWNPIRPPAALLISNGHQISIRAPFLAREYLMESSRSPLSNGSSLIAKFHLIEPQLKQQGIGFICIDKINNPRRGVSIAKAQQNVLYGCSRIVNVSPKS

SEQ ID NO: 195884 - protein, 1212 aa, Oryza sativa
  Clone ID: PAT_MRT4530_9178C.1.pep
MQFMMPLDTNACAQPMRRAGEGAGTERLMERLNIGGMTQEKALRKRCFGDGVTGTARCVFTSDADRDTPHLRTQSSRKNYADASHVSAVILGGGTGVQLFPLTSTRATPAVPVGGCYRLIDIPMSNCFNSGINKIFVMTQFNSASLNRHIHHTYLGGGINFTDGSVQVLAATQMPDEPAGWFQGTADAIRKFMWILEDHYNQNNIEHVVILCGDQLYRMNYMELVQKHVDDNADITISCAPIDGSRASDYGLVKFDDSGRVIQFLEKPEGADLESMKVDTSFLSYAIDDKQKYPYIASMGIYVLKKDVLLDILKSKYAHLQDFGSEILPRAVLEHNVKACVFTEYWEDIGTIKSFFDANLALTEQPPKFEFYDPKTPFFTSPRYLPPARLEKCKIKDAIISDGCSFSECTIEHSVIGISSRVSIGCELKDTMMMGADQYETEEETSKLLFEGKVPIGIGENTKIRNCIIDMNARIGRNVIIANTQVYVLGLFWNGNSIIGILKFAPLSQQTCPVICFACLMCLRFFNSHLLATYETEELMGEVNSCKEMKSVCNWFALARQLIILLSVLVSCPGCQDFLSSLKMSHSSDEDSEISDSEIDEYADKFYARLVAGEFKVKDGQSYSCPFCSGKKKKDFNINNLIQHASGVGAASNRQAKDKATHRALAKHLKNGLTKSSGQQSQTAVVEPQPLPNRDEKFVWPWMGVLVNVPTEWKDGRQIGRSGNHLKEQLSRFCPLKIIPLWNFRGHSGNAIVEFGKDWHGFRNALAFEDYFGKEGYGRRDWKEKQNQGSNLFGWVARAEDHTSPGLIGDHLRKNGDLKTINDLENEGARKTDKLVANLANQIEVKNRHLQELEVTYNERTTSLEKMMGQREQLLQKYNEEIRKMQQLAQRHSQKIIDENQKLRSELESKMSELNTVSKELDEIAAKSDYDRRIIDQEKQKNAIKSSHLKLATLEQERADENVLKLVREHKREKEAAVKKILKLEQQVDAKQKLELDIQQLKGKLEVMKHMPGDEDSALKNKIDELSEELQEKMDELDAMESLNQTLVIKERKSNTEMQDARKELENGLLDLLDGQSHIGIKRMGELDLEAFSKACRKMSSEEDAEITAAILCSKWQAEIKNPDWHPFRFVLVDGQEKEIIEDDAKLQELKEEHGEDIYRLVRDALCEINEYNPSGRFPVGELWNFKDKRKATLKETVQFVLRQWRANRRKR

SEQ ID NO: 195885 - protein, 66 aa, Oryza sativa
  unsure (1)..(66): unsure at all Xaa locations
  Clone ID: PAT_MRT4530_91790C.1.pep
ISCLSPKSNRNPASSESSHLVDVDLNLXMXISLGXMLQEGSAAYDNPFTEESXMTTICXLQKKKKK

SEQ ID NO: 195886 - protein, 378 aa, Oryza sativa
  Clone ID: PAT_MRT4530_91791C.1.pep
MAGIRKIIGDSCAQHRHLRRDMRRDQHDHYEVSDDVLGKIKSALPYFEGNYDPRAYINWELAVDSEFQKHVLSEKQKVMCASSVLIKHASNDWKHLCRHNKIPQSWKYLKRYFRDVYVPMYYADILFNKLQCLKQDTRTVTSYYHDMQACLLRCGLDECEEAKELRFLCGLNKEIQDMLDCQRYTSLSHLLQLACNAESKIEERDMKEPPIPLFTLKVKAPPSSEEDIKGKVNGIEINHGECIVNEVNLSTFHTKVEQPLVESNAGIPLSQVDLLAVPCDKEELCDNASLISMPQLVNEHDISRVSLCADFKHAVHIANEVEERIRLICTGKINNPWRGVSIAKAQHNVLYGCSRIVNVFSTNRSYLNSPKDRANNSL

SEQ ID NO: 195887 - protein, 441 aa, Oryza sativa
  Clone ID: PAT_MRT4530_91792C.1.pep
MAGLRKGIREHRLLHLRRDMTTSPRDAYEVHDYNFEQVASKLPFFDGKYDSITYIDWELAVDNEFDIYDFSDAQMIKAASNKFTSSALFWWTYVSNKPETWDELKTMIRKRFMTSYYKCTLREKLEHLKQGDRTVREYIHEFKVCIIYSGLKECNENTMRRFFNGLNSEIQVLLDNVTYNHIGHLFMLARSIESQIISKARMHDQCDLSPIYESPIYLCNDDVQTLEEQSFVSPVTNVLQEDQHIQEKENDILEKKEDEAPAMSEESSQGKLNGAERNEGEYSQGELHLSTFHAIVEQPLVESIAELPLSQVDLLAVPCDKEELCDNASLIFMPQLVNEHAIPVVNTNCADFKHVVHIANRVEERELTSSLNTLGYVQFADFHELDNLKEKLFAKSDLPCPRIRLICTGKINNPQRGVSIAKAQRNVLYSCSRIVNVSPKS

SEQ ID NO: 195888 - protein, 35 aa, Oryza sativa
  Clone ID: PAT_MRT4530_91793C.1.pep
VAISDSKFHNLAAVPETVTNDGHGRLHPALSYSPT

SEQ ID NO: 195889 - protein, 432 aa, Oryza sativa
  Clone ID: PAT_MRT4530_91794C.1.pep
MAGLRKGIREHRLLHLRRDMTTSPRDAYEDELKTMMRKRFVTSYYKCTLWEKLEHLKQGDRTVREYIHEFKEDQHIQEKENGILEKKEDEAPTMSEESSQGKLNGAERNEGEYSQGELYLSTFHAIVEQPLVESIAELPLSQIDLLAVPCDKEELCDNASLISMPQLVNEHAIPVVNTNCADFKHVVHIANRVEERELTYSLNTLGYVQFADFHELDNLKEKLFAKSDLPCPSNTIFHLFGEYNDRGIYLVHRVYICSDLEPPVLVDKTCKLERNVIANKIISSLSCCDWKKQVVLNRLHEEHHMEKPRTVFREEGEDDVTIATIDTTVVHIKIKPSKFCNPVRPPATVWTSNGRQICMRAPFWVHEYLMESSRSHLSNGSSFIAKFHPSRPKSQKEGVASPIMAYGLITSSGTPAQVGPMWGAPQPGGARP

SEQ ID NO: 195890 - protein, 1026 aa, Oryza sativa
  unsure (1)..(1026): unsure at all Xaa locations
  Clone ID: PAT_MRT4530_91795C.1.pep
TSSLKGQRDKQYHAQARWLLFLFHAKSCTSPPGSCKSSYCDRVRELVVHLTDCQIKDCSYRHCRESKMVSDHYKNCINEHCHVCCKAKEMLRRSSELAHKQNPAEPILITQHNMNQRSADRVHGDRMDIDQAVETFDDQPPAAKRPKLQLVSPDASENVPVCQKNPGFMLQEAHPRQLDQNKKMVPDQEVDVGLDIRHPQVTLVSCHGSDEKIGAAQNTVIPGALNKIHCHVQQETVVADKESVTVVDVKKKTGSVDVTISKTGKPKVKGVSLMELFTPEQIHEHINSLRQWIGQSKAKXAEKNQVIGYSESESLCQLCKVENLTFEPRPIYCSPCGARIKQNASYYTGSTAMGRLFFCISCYNASLGNTIEVELIKLSKADLEKKRNSDEPEEGWVQCDKCECWQHQICALFNARRNDVEEAEYTCFKCYIEEFKRGLRMPLPESVVRGAKDLPRTLLSDHIEERLFKRLREERQERANKLKTSLDEVPGADGLVVRVVSSVDKKLEVKPHFFKILQEDNYPAEFPYKSKAILLFQKIEGVEVCLFGMYVQEYGAECKFPNQRRVYLSYLDSVKYFRPDIETVSGQALRTYVYHEILIGYLEYYKQRGFTSCYIWACPPVKGEDYILYCHPEIQKTPKSDKLRQWYLSMLQKAIKENIVVELTNLYDQFFVTAKECKIKVSAARLPYFDGDYWPGAAEDIINQLQLEGDGKLLKKGRVNKIITKRALKAAGHTDLSGNASKEAMLMQKLGEIICPIKDDLIMVHLQYSCSHCCTFMVSGRRWVCNECKSFYICDRCYNAEQRLEEKERHPSNSKCLHILHPVEIVGVSEDTKDRDIILENEIFDTRQAFLSFCQGYHYQYDTLRRAKHSTMMMLYHLHNPTGPAFVATCNVCNCDIENGQGWYCKDCPDFDMCASCYQKHXGANHHHKLTNHPSSAECNVQNKGAWQKHVLQVRVWLELALHASSCHVRNCQYPNCRKLKGLFHHGAQCKIRLTKGCKQCARMWYIIRLHSQSCRQSDCAVPRCR

SEQ ID NO: 195891 - protein, 1048 aa, Oryza sativa
  unsure (1)..(1048): unsure at all Xaa locations
  Clone ID: PAT_MRT4530_91796C.1.pep
MGLLRCNLEETEDAVMARFLGGLNREIYDIVDYKDYINMTRLFRLACNAENKIEEDMKKKHAMSLPPITNHLQEVRNHKKEERDMKEPPIPLFTLKFEAPPSSEEDIKGECVVNEVNLSTFHAKVEQPLVESNAEIPLSQVDLLAVPCDKEELCDNALLISMPQQVNEFAIPNXYVQFDDFXELDNLKEKLFVMSDLPCPTDVTFHIFGENNDVGVYLVHRVYIYSDLEPPVHVDKTCKLERNVIANQIISSLACFDWKKQVVVNGLHKEHHMEKLRTVFREEGEDDVTMATMDTTIAHIMDEQEDIKVKASKCWNPIRPPAALLISNGCQISIRAPFLAREYLMESSRSPLSNGSSLIAKFHPSQPQMKKQGAASPVMGLWACNFVWDPGPSGAMWGAPQPGIGLICTGKINNSQRGVSITKAQRNVSYGFSRIVNEEMRLKLMRGTNPIRSTYTVADNRECYNCGQVGHETVVALGDTAVVEEVTEGVVVEVVVGAKVLLRPMQPLRRWEEWQNNKTNKSSNTTTHFGNFANYAQVGEVNLLSVSSAIDQLKCIVVFDDNSCLFQEKGTERRIGTAVRHDELWYINHEELGLAAVVGDVEKEISLLHCQLGHPSFGVLSKLYPDLFSRVDMHRLVCDDCELDEGIIHQTTCPGTPPQSGVAERKNRHLLEVARFLMFQMNVPKYLWSEAVMTTAYLINQMLSRILGMKSPVELFLGKREYKVPLKVFGYVCFVRDHRPFVGKLDPHAVKCVFVGYASSQKGYKCWDSIGRRLFEFSTVMEDDSREGETEGGDTHEKNVGYKNGEAVVVGSIPCSIDGVSKEVEKFVEATQDKDGELVLHERDGEVVLHEGDGEVVVGTIPCPMEQTEKVKQKDMLVYQRRRFDNHGEKRKKSVQDQVESCHTQNTQSQSPLRASLLQPPWLLLRQLTVSIPNERKWAKQDPRWKDAKKDELNALVKNKTWELVRLPPVKQIPEGKVDRYKSRLVAKGYNQTYGIHYDETFAPVAKMGIVKTLVSCAVNFGWPLHQLDVKNAFLHGDLHERSIWRSL

SEQ ID NO: 195892 - protein, 703 aa, Oryza sativa
  Clone ID: PAT_MRT4530_91797C.1.pep
MKLSELGKPDEYLFVWRGEIGRLENFGSERGGGRGSSPGFAKWTVQEPAGERFDWLETEGFYCCEAQVHFTGKRLDGTWFASTREDGVPLTFILGQENVMRGFSMAVSSMQAGEKAVFTIPPELAGTKSRCPVDIPGNIAPNEALRFDIELISLVTITDILDDEGILKKIIKRGLGSDKPCDLDEALVNYNACLEDGMSVSMSEGIEFNLAEGFFCPAFARAVETMTEGEEAVLIVKPEYGFGERGRPSIGDEAGVPPDATLYVYLQLMSWKTVRHIGENGTILKKTLCRGNLEGQQTENEAVVGVRLIGKLQDGAVFDQRGHEGDEPFKFMVDEEQVSEGLEEAVLTMREGEVSLFTIPPHRVQDQLLVVPVGSSVTYEIELVSVVNDKPPRLMSQAETIEAAAEKEKEGDKLFSSSKFLRAYRRYYKARQIILLRFGRGETDEEIKQMLISLTFKAAECANQLQRYEQAYHRYREILEYDPGNVKAREMTGRAFPEASLGIDTAAMHRGLDQVLGETCEVSDDTYQLSLCPRSLISDAASRTASLACIVGLSRKEDGNLAGSGHGDNALRAAARAPEAELRRMRRGSGVGDAPPAWRRSPFRPKEEFRVCGGYMTPEFSEMRLKQGHKYHGSINIFVPPIPRPETNANQAVPAAPTGHRLTHSPTTPPGPNNEKRNRSSRVPVAARKGLASCFRCISSDCN

SEQ ID NO: 195893 - protein, 387 aa, Oryza sativa
  Clone ID: PAT_MRT4530_91798C.1.pep
MVNTRASGSGNNNNEGNPTLAQVLAQQTQLMNMMIQQMQNQLNQGNNNAPPPQNKLADFLRVRPPTFSSTTNPVEAGDWLHAVEKKLELLQCTDQEKVVFASHQLQGSASEWWDHFRMNRAEGQPITWAEFTEAFKKTHIPVGVVALKKREFRALKQKDHTVAEYLHEFNRLARYAPEDVRTDEERQEKFLEGLKDELSVTLISRDYVDFQQLVDKAIRLEDKKNRMDNRKRKMTVFQEAQGSSQRQRIKPLQIGESSSVGQGQSQQLNIGGEIKSETNESNEVNIEQANQPVPVQQDQSQENNSSGREQQEPMQCQLRLQELRLQSSSSLGEIAVVVAKSPPSSSASSSPPKTAGAPSPPSTRSPPPLLPRRQRRPLLLRRFFGYR

SEQ ID NO: 195894 - protein, 788 aa, Oryza sativa
  Clone ID: PAT_MRT4530_91799C.1.pep
LDTPFRISVGLVRLQFSHVYLLAARVSARPSVCLFFRTPTYHVFNSYLYQIVLLSCSCSVSPIVLAGIGLICTGKINNPRRGVSIAKAQRNVLYGCSRVVNVFSTNRSYHQLTERSGQTTALSVERNSRFIRWYQSFRCSPYSKCLPRHRYIQPPLGCLVESVYVTIPLALVRTWLHKEFGAVRAQCGHFHLRQHMASDQHDANKVHDHNLARVESVLPSFDGKYDSAAYINWELAVEKQFDEYDFSNAQMIKAASNKCTGSASFWWHTVGNKLETWDECKILMRKRFVFSYYRRALLEKFEHLKQGDKTIREYFHDFKICITYSGLQESNENTMTRFFRGLNSNIQAGLVNVTYNHIGQLFMLACNVERKILEKPTEQQAMRVPPIADVLQEVQNNPQNEKNDMFEMSLPSLANEEKADASALSEEGIKGKLNGAEITQGEYASDELHFSTFHADLEQTLVEPTSELPLSQVGLHSVPCDKEELCDSTSLISMPQLVNEHAIPTVNSYCADFKHVAHIANEVEERELRSSLNTLGYVQFDDFCELDNLKEKLFAKSDLPYPTNVIFHIFGEYNDLGIYFVHRVYICSDLELPVHVDKTNKLERNVIANQIVSSLPCFDWKKQVVVNGLRKEHHMEKPRTVFREEGEDDVTMATTDATIAHIMDEQEDIEITSSKCWNPIRPPATLLTSNGRRICIRPPFSAREYLMESSQSPLSNGSSLISEFHLVWPESQAQGGPRPKWDPSGVRPNQVEHDPRVSLVVLPPLYIARNRVDLHRQDQQPTERCIDR

SEQ ID NO: 195895 - protein, 518 aa, Oryza sativa
  Clone ID: PAT_MRT4530_9179C.1.pep
MQFMMPLDTNACAQPMRRAGEGAGTERLMERLNIGGMTQEKALRKRCFGDGVTGTARCVFTSDADRDTPHLRTQSSRKNYADASHVSAVILGGGTGVQLFPLTSTRATPAVPVGGCYRLIDIPMSNCFNSGINKIFVMTQFNSASLNRHIHHTYLGGGINFTDGSVQVLAATQMPDEPAGWFQGTADAIRKFMWILEDHYNQNNIEHVVILCGDQLYRMNYMELVQKHVDDNADITISCAPIDGSRASDYGLVKFDDSGRVIQFLEKPEGADLESMKVDTSFLSYAIDDKQKYPYIASMGIYVLKKDVLLDILKSKYAHLQDFGSEILPRAVLEHNVKACVFTEYWEDIGTIKSFFDANLALTEQPPKFEFYDPKTPFFTSPRYLPPARLEKCKIKDAIISDGCSFSECTIEHSVIGISSRVSIGCELKDTMMMGADQYETEEETSKLLFEGKVPIGIGENTKIRNCIIDMNARIGRNVIIANTQGVQESDHPEEGYYIRSGIVVILKNATIKDGTVI

SEQ ID NO: 195896 - protein, 440 aa, Oryza sativa
  Clone ID: PAT_MRT4530_917C.1.pep
MEHLSEELIIEILKKITRTSDLNSLSLVSKQLYTIDAEQRAAIRLGCGLATEDFLALCSRFPNLLKVEIDYSGSTPGNGNHIDNQGLFVLSSCCTLLNDITLTFCSKINDAGIVCLSYCKKLISLKLNSLPEVTSSGLLMLFFGCKALSSLFINDCKGIAGSTEWLEYLGTDGSLEELVVNNCQEISQYDLCCQNLEDLRLARVITEPEGPETGLRFLLRKCKALERLCLEYVNGVIDKDMIVLSQSCKNLKSISLWMIPGLYHEPDGIVFRTDLTDESLEALTNNCPLLQDVELAFTGVDHWEPPEIGFIQEGLVKLMHYCPIRTLTLNGALFFNDKGMKGLSSAPFMETLSLVDCKEITDSGMCFLVQYPCLTDLKLQHCPGLTDVGIAELVHAQKLQSLVVDGCCNISENAVQCAARSVQYFVNSAGSCAAHFKRLH

SEQ ID NO: 195897 - protein, 151 aa, Oryza sativa
  unsure (1)..(151): unsure at all Xaa locations
  Clone ID: PAT_MRT4530_91800C.1.pep
LIICKFFLWFAFQQRCWTVDLLQKHGIDSHSACPFCAQELEMTNYILLDYVFARQVWLRMLSPPSWAXLSPPHGSWLQEWWPSSRACLPEYLRAGFDSLVLLISWQLXKERNSRVFDSALSSVSVVLESILWNGHLWSLASVAXFGDFMGV

SEQ ID NO: 195898 - protein, 239 aa, Oryza sativa
  unsure (1)..(239): unsure at all Xaa locations
  Clone ID: PAT_MRT4530_91801C.1.pep
MASAPLPQAAQLGYKPNVFSFWILYLQLRFDDYCKNEHVTYSTSHTANMQVHKDTKGWHNIGSFAKAAFSKELRVRTHEPSQRRKRQANTQNKSDRLRIWRTXTRRGRRDEPNDTHPRAKRRPTTAGDEEAXGGGSGCTGRRSSDDRRRKRKGGRASPHHGAPNGGDGDRRRRWRRRRGGTGDGRRRRFAWRRWRRDSGDRRQRGESGRASPPSRAPNGGDGATEHGRGRERGQTKEED

SEQ ID NO: 195899 - protein, 434 aa, Oryza sativa
  Clone ID: PAT_MRT4530_91802C.1.pep
MATTDATIAHIMDEQEDIEIKYSKCWNPIRPPTTLLTSNGHRICIRPPFSARIGLICTGKINNLRRGIRKIIGDSCAQHRHLRRDMRRDQHDHYEEVRNHEKEERDMKEPPIPLFTLKFETPPSSKEDIQEQPLVEPNAGIPLSQVDLLAVPCDKEELCDNASLISMPQLVNEHAIPSVSLCADFKHAVHIVNEVEERKLLSSLNTLGYVQFDDFGELDNMKEKLFAKSDLPCLTNAIFHIFGKYNDRGIYLVHRVFICSDLEKHVIANHTISSFSSFDWMKQVILNGLYEEHHMEKPRTVFREEGEDDVTMATTDTSVAHIMDEQQDIKFESSKCQNSIRPPATLLTSNGRRSSIRPPFSAREYLMESSRSPLSNASSLIAKFHLSRQQLKKQGIGLICTGKISNPRRGVSIAKAQHNVSYGCSRIVNVSPKS

SEQ ID NO: 195900 - protein, 154 aa, Oryza sativa
  Clone ID: PAT_MRT4530_91803C.1.pep
MDSPATPVDFSPLLSLAHYNESRYTKDGDLAGDWMVGCDFGGHEHVEDDETNPTVLTLEPNDERRRPATRSVGGAASVDGGDGAPVTGGFGGQAAGILHTSAHLTAVTATGGDDGSGGATRMELGRRRRRGGARGGGATRHGRPRERGQTKEED

SEQ ID NO: 195901 - protein, 513 aa, Oryza sativa
  Clone ID: PAT_MRT4530_91804C.1.pep
MAGIRKIIGDSCAQHRHLRRDMRRDQHDHYEVSDDVLGKIKSALPYFEGNYDPRAYINWELAVGSEFQKHVLSEKQKVMCASSVLIKHASNDWKHLCRHNKIPQSWKDLKRYFRDVYVPMYYADILFNKLQCLKQDTRTVTSYYHDMQACLLRCGLDECEEAKELRFLCGLNKEIQDMLDCQRYTSLSHLLQFACNAESKIEENMKKKHVMSLPPITNYLQEVCNHEKEERDMKEPPIPLFTLKFETPPSSKEDIQGKVNGTEINQGECIVNEVNLSTFHAKVEQPLVEPNAGIPLSQVDLLAVPCDKEELCDNASLISMPQLVNEHAIPSVSLCADFKHAVHIANEVEEQHHMEKPRTVFREEGEDDVTMATTDTSVAHIMDEQQDIKFESSKCQNPIRPPATLLTSNGRRSSIRPPFSAREYLMENSRSPLSNASSLIAKFHLSRQQLKKQGAATPVMGLWACNFIWDPGPGIGLICTGKINNPRRGVSIAKAQHNVSYGCSRIVNVSPKS

SEQ ID NO: 195902 - protein, 293 aa, Oryza sativa
  unsure (1)..(293): unsure at all Xaa locations
  Clone ID: PAT_MRT4530_91805C.1.pep
LGSPKAAAGSGERTARGGRTFAGETAAFRPQTEGTQHVEDDAANXPVTKTXAAEDQRTAAATRRKRRSSSGRRRRRRSDGLRRRRSGGRGRRRLGEPDGGDGDRRRRLQRRRGAAEPTATTAATRATRRRRXTRRQAKAKEATGRGELGGPYIGARRRRQRPTAAGDEKESSRLEGKRPIRIELYFHELPKRFSRCFQRRKGRGDPGDCFPSINSAGEGKERPDLEGNGDGGALGFQAAAAARGRRXLTGGAHLSAAERERGERRLGGXAGWAEGKREKGFGPAFGPKPKEDF

SEQ ID NO: 195903 - protein, 438 aa, Oryza sativa
  Clone ID: PAT_MRT4530_91806C.1.pep
MATIDTTIAHIMDEQDYIKIKSSKCWNSIRPPATLLTSNGRQICIRAPFWARIRLICTGKINNPPLSSTLRKIGPNNCLECRKELRVRQVVSELSLLGLCKGKRDGHAQHQHLHHQQDIATSSRITYEVYDNDLARVESKLPVFDGQLFMLACNVERKILENPTEQQAMLVPPITDVLQEVQNSPQNEKNDMFEMSLPSLANEEKADAPTLSEECIKDKLNGAEITQVDLHFVPRDKEELCDSTSLISIPQLVNQHATFNLDSPCTEFKHVIHTSIENDELQLQSSLNTLGYILFDDSCELNYLKDKIFAHSDLPSPRNIVLNRPRDENHMEKPRTVFRKEGEDDVTMATTDTTIAHIMDEQDDIKIKSSKCWNPIRPPTTLLTSNSRQICIRAPFWARIRLICTGKINNPQRGVSIAKAQHNVLYDCSWVVNVSLKS

SEQ ID NO: 195904 - protein, 173 aa, Oryza sativa
  unsure (1)..(173): unsure at all Xaa locations
  Clone ID: PAT_MRT4530_91807C.1.pep
EAPAPLSQAAQLGYKPNVFSFWILFLQLRLIDYCKXEHMTYSASHTANMQVHKDTKGWHNIGSFAKAAFSKDLRERTHEPSQRRKRQANTQNARDXWPGDWRAPTRRGRRDEPDGTHHDDKRRTTTAGDEKGDGGGSVERRRRAVXGRRRKRGGGRGSPHHGVPNGGDRSTGV

SEQ ID NO: 195905 - protein, 493 aa, Oryza sativa
  Clone ID: PAT_MRT4530_91808C.1.pep
MATTDTSVAHLMDGQQDIKFESSKSQNPIRPPTTLLTSNGRRSSIRPPFSAREYLMESSRSPLSNASSLIAKFHLSRQQLKKQGIGLICTGKINNPRRGIRKIIGDSCAHHRHLRRDMRSDQHDLYEEVRNHEKEERDMKEPPIPLFTLKFETPPSSKEDIQGKVNGTEINQGECIINEVNLFTFHAKVEQPLVEPNAGIPLSQVDLLAVPCDKEELCDNASLISMPQLVNEHAIPSVSLCADFKHAVHIANEVEERKLLSSLNTLGYVQFDDFCELDNLKEKLFAKSDLPRPTNAIFHIFGKYNDRGIYLVHRVFICSDLEKHVIANHTTSSFSSFDWMKQVILNGLCEEHHMEKPRTVFREEGEDDVTMTTTDTSVAHLMDGQQDIKFESSKCQNPIRPPATLLTSNGRRNSIRPPFSAREYLMESSRSPLSNASSLIAKFHLSRQQLKKQGIGLICTGKINNPRRGVSIAKAQHNVSYGCSRIVNVSPKS

SEQ ID NO: 195906 - protein, 48 aa, Oryza sativa
  unsure (1)..(48): unsure at all Xaa locations
  Clone ID: PAT_MRT4530_91809C.1.pep
FFFFFGXLXFCAQXSTNTXDCKRANNQTVXLXXQHLASNSXXRQNSGL

SEQ ID NO: 195907 - protein, 163 aa, Oryza sativa
  Clone ID: PAT_MRT4530_9180C.1.pep
LKTINDLENEGARKTDKLVANLANQIEVKNRHLQELEVTYNERTTSLEKMMGQREQLLQKYNEEIRKMQQLAQRHSQKIIDENQKLRSELESKMSELNTRSKELDEIAAKSDYDRRIIDQEKQKNAIKSSHLKLATLEQERADENVLKLVREHKREKEAAVRK

SEQ ID NO: 195908 - protein, 404 aa, Oryza sativa
  Clone ID: PAT_MRT4530_91810C.1.pep
MVNTRANGSGNNNNEGNPTLAQVLAQQTQLMNMMIQQMQNQLNQGNNNAPPPQNKLADFLRVRPPTFSSTTNPVEAGDWLHTIEKKLELLQCTDQEKVVFASHQLQGPASEWWDHFRMNRAEGQPITWAEFTEAFKKTHIPAGVVALKKREFRALKQKDRTVTEYLHEFNRLARYAPEDVRTDEERQEKFLEGLKDELSVMLISHDYADFQQLVDKAIRLEDKKNRMDNRKRKMTVFQEAQGSSQRQRIKPLQIGESSFAGQGQSQQLNIGGEIKSETNESNEVNIEQANQPVPVQQDQSQENNSSGRKQQPRRSAAPAVAAACRRRQEVRRGERKPGRPSFFAAGRRSSPPSVNPSRRPFPVVAGRRRTSFVVVVSTVGFVSSSSTCTCPPNPQPAVFLRFAC

SEQ ID NO: 195909 - protein, 191 aa, Oryza sativa
  unsure (1)..(191): unsure at all Xaa locations
  Clone ID: PAT_MRT4530_91811C.1.pep
MDSPATPVGLSPPLLSLVLRNEPCYTKGKGGLLRQRLGFXAVDRAHGSGSRERTAEINPXKTDGRDRTVHDRLTGEDDDDVSGDVTTGGGGXKARAAHARRRTAALRHKQRAPRXCGRRGELTGDQRSGGGTTDSAGDEEEAAAEIGSTTAMVLRRSSAAAKGRTRMAMTSRTRWWRRRPTTAAATAARRG

SEQ ID NO: 195910 - protein, 131 aa, Oryza sativa
  Clone ID: PAT_MRT4530_91812C.1.pep
MAGHKVFLLFLAVLGSLAILSQSESTSDMDGDKSTVDLCSESSGGQYCCFPGNGCYPDRAQCISAAKTGRTPTAPRTLLHLPLPPSHRNRCAITRICQEICHLCLETISRHDQEIATFLAFLFEFIFSLVD

SEQ ID NO: 195911 - protein, 155 aa, Oryza sativa
  Clone ID: PAT_MRT4530_91813C.1.pep
MDSPATPVGLSPPLLSRVPRNEPCYTKDGDLAGDWMVGCDFGGHVHVEDDETNPTVLTLEPNDERRRPATGSSGGAASVDGGDGAPVISGFGGQAAGLLHPPAHLTAVTATGGDDGGGGTTRMELGRRRRRGGARGGGATRHGRSRERGQTKEED

SEQ ID NO: 195912 - protein, 111 aa, Oryza sativa
  unsure (1)..(111): unsure at all Xaa locations
  Clone ID: PAT_MRT4530_91814C.1.pep
LNVDPPHFFFENGDNLYCVGFPNGGFPSKDGKGMVLFGDLVPSNKLVVYDLENPVLGWAEYHCSSSLXIKDGPPGAPYPVSAPNISSGWRFPWPKPLAVFLVTKVVRYLIF

SEQ ID NO: 195913 - protein, 415 aa, Oryza sativa
  Clone ID: PAT_MRT4530_91815C.1.pep
MSSTNKSSPARNESGGDGDGDIAVDLFPFLRVYKDGRIKKFVRHATVPASPVERSPSGVVTKDVVAVDDETGVSVRLFLPVDAAAAAVAAGRRLPLVVYVHGGAFCSGSASAPPFHRYAESLAARAAAVVVSVDYRLAPEHPMPAGYDDAWAALRWAASSRHSDPWVSNYADTACVFLAGESAGANIVHNVALRAAAAAAAGEDDDDGGGGIDIEGIILLQPCFWGTERLPCERPAAWRRAAPPMFLPERLDALWPFATAGAAGNGDPRIDPPAEAVASLPCRRALVSVATEDVLRGRGRRYAAALMRGGAWGGEATLVESGGEDHCFHLSPRPNPNAAALMDHVAEFIAKGNTSTSSPMAKRRRRRRRCTLHGAGAEKTTSMHALRGQTAPKVQHAGSGIMANKADKYVVRSCL

SEQ ID NO: 195914 - protein, 594 aa, Oryza sativa
  unsure (1)..(594): unsure at all Xaa locations
  Clone ID: PAT_MRT4530_91816C.1.pep
MADLDQSSSDVAALKKLYTEGAVPPKQIMAREAGGTNPSPILGRIVVVEDFVRCGFLPPPSEFLLLVLNFYGLSLLHLNPNSIAFLSIFAHLCEAYIGVVPFLYFFRFFYELRWIXNRVSGCCGFRLREGMKAKYIPLQCHTSRSHWRSRWFSLELKELDPVLVVPEVQPECSEDWTSKPPLTPSLQAFVDAVSELRERGLTGYEVVEDFVSRQIQPLQARAHPALDYTGAEDEVLISAASTADEPPAPLCDKSAVEKAAAINASASLKEKVADKVTNISSIPAIAGGSGTKRKPWRLEWGHDLLSYAGHGQSGPPPKRRTLKLPAGKKASAISAQSGSEAATSGSPAAVIPRVEMKEIVAGNEMQRQGMEKKMNDTQEILFSLHDSLRKSFTNLHRLALSCGVESSIPTHLDETSLTSALSELPGEMEAIPSWHTAHIADEISNGIHTGACHLLACVKLALPSVDLKEILSKGAADATREDVMSSAEDVQQGGCPDLAMINLPSSSDMPFPNIFKDGERWRPLHALPFVDLDGAIAEQDRRIAYWRMKFKVAELERSLLVVKKNQDVEALQGREVWLNSYLKSCCNAMVGVCH

SEQ ID NO: 195915 - protein, 247 aa, Oryza sativa
  unsure (1)..(247): unsure at all Xaa locations
  Clone ID: PAT_MRT4530_91817C.1.pep
QVSPSIFIVRGVRLITKNISQPAHDRGHGHSNSFTLARDVPLYPQDTIPHMLPCPEVPPRHYKGGNCDNTLRTTQLTTVHHSWIIITPSKTRGMDSPATPXDFSPLLSLAPRNESCYTKGKADATTGKRGLGWAIXGHLRVEDDDANSPVQENTTDDDGRRPAARFQGGTVRVDGGDGAPVVFGGCEGAAEVLLLRAHPTAATDGSGDDASGGATRPEDRRRRRRRIWRGKRRLHRYRTAGSGSVQA

SEQ ID NO: 195916 - protein, 394 aa, Oryza sativa
  Clone ID: PAT_MRT4530_91818C.1.pep
RERGGGNGYGCRPEPSTRILFLFFFRILTNIVLVRVAEALSIGVNYGQIANNLPSPSRVSWLLRSLKISKVKLFDADPHVLRAFLGTGVEFVVGIGNEAVPAMASPAAAESWLQLHVVPHLRAGARITCITVGNEVFKGNDTALQASLLPALRSVHQALGALGLQGRVNVTTAHSLDIMGVSYPPSAGAFHPSAAPHLQPFLAFLSAARAPFLINCYPYFAYKDDPARVPLEYVLFQPNAGVVDPRTRLVYDNMLYAQVDAVYAAIQAMGHTDIDVKVSETGWPSRGDPDEAGATPENAGTYIGNLLRRIEMKQGTPLRPQAPIDVYVFALFNENLKPGPASERNYGLFYPDGTPVYNVGLRGYLPPMASHEAATQVIHWFLLIATASVVFALS

SEQ ID NO: 195917 - protein, 38 aa, Oryza sativa
  Clone ID: PAT_MRT4530_91819C.1.pep
DGLKLGRKTPMALLIKARLSADNNDVTTLILENLTKEN

SEQ ID NO: 195918 - protein, 167 aa, Oryza sativa
  Clone ID: PAT_MRT4530_9181C.1.pep
GRVIKERKSNTEMQDARKELENGLLDLLDGQSHIGIKRMGELDLEAFSKACRKMSSEEDAEITAAILCSKWQAEIKNPDWHPFRFVLVDGQEKEIIEDDAKLQELKEEHGEDIYRLVRDALCEINEYNPSGRFPVGELWNFKDKRKATLKETVQFVLRQWRANRRKR

SEQ ID NO: 195919 - protein, 80 aa, Oryza sativa
  Clone ID: PAT_MRT4530_91820C.1.pep
KKSNNLQSLQLQMIKLARYADLSLMWWDFFYFLILLIDHSKNIALFSHANHGGVAKRFRFGNTFWNGLFIKFKNKSLKNN

SEQ ID NO: 195920 - protein, 65 aa, Oryza sativa
  Clone ID: PAT_MRT4530_91821C.1.pep
MATTSDVPEYLRNQIMIPMLQEPSHFFLGLMGNINPTHCINTETNRIPFRQTKPNLAKWSTTFRA

SEQ ID NO: 195921 - protein, 311 aa, Oryza sativa
  Clone ID: PAT_MRT4530_91822C.1.pep
MAKNTCKLCYRRFGNPRALAGHMRSHSVAASRSQISSTSSASTSVAVGDDDGGGDAKRPIQGYVLREKPKRRVRLAESDFSDRESETEYYSSPPHGKRANTGSGDVEQVSSVSDATSEEDVALSLMMLSRDTWPATPPPPPPYRLRGAGYDDGSDGGDAPPAPAAAAAQKRTRFQCPACKKVFRSYQALGGHRASHMRGGRGGCCAPPPNPPPSPATPLQPLPECDGGEEEGAKPHPHECPYCFRVFASGQALGGHKRSQLCSAAAAAASGDDIPAMIKSNGFIDLNLPAPFDDVELSAVSDPFLSSKPGS

SEQ ID NO: 195922 - protein, 64 aa, Oryza sativa
  Clone ID: PAT_MRT4530_91823C.1.pep
ARGRCFNSCNPKLWCSSQRVKLGREMEHPLCFIVEHYIKQTLYLIDLNRATYLLCTIIAARGVP

SEQ ID NO: 195923 - protein, 99 aa, Oryza sativa
  unsure (1)..(99): unsure at all Xaa locations
  Clone ID: PAT_MRT4530_91824C.1.pep
HXSGTFSRIARPVLNMELRAFELIKVSHQEEIELDHNINDGFIVAVVYDDSTAVRLGISQGDIILSYNGLHDFTLHKLEEFLLSLGWGITCKWRSRVGM

SEQ ID NO: 195924 - protein, 62 aa, Oryza sativa
  Clone ID: PAT_MRT4530_91825C.1.pep
MDPFTRKGGRRSVAPHQLGKGRWQSGLEKSVARPLLGGRKRISSAATTARKEEEALEWHSHR

SEQ ID NO: 195925 - protein, 87 aa, Oryza sativa
  unsure (1)..(87): unsure at all Xaa locations
  Clone ID: PAT_MRT4530_91826C.1.pep
IRRPLPLPQLLALELHGSRDESNVSSSSPSSSSPDHQEINPVVFXTVVLEIDVNVIITDYYMPGMTXYDLLKRVKVSFVCIEFILIL

SEQ ID NO: 195926 - protein, 46 aa, Oryza sativa
  Clone ID: PAT_MRT4530_91827C.1.pep
LMMRQALFMIVKRRECCGFALSSLPPPLVHTNCVIPTSGGNHLSAL

SEQ ID NO: 195927 - protein, 126 aa, Oryza sativa
  Clone ID: PAT_MRT4530_91828C.1.pep
MTDLMLRLTGPQMWVTPESPFLEMPSLRKLLVVDMPPRWDATWICALVEEAPSLERLHVHFSQRCEDDDEMAVRRKLEIVWEQEPSRALHSHLEELVVIGFQIKKERKVQLVRHIMVVAPCCSAQA

SEQ ID NO: 195928 - protein, 111 aa, Oryza sativa
  Clone ID: PAT_MRT4530_91829C.1.pep
VISGQHSTMKILLEHHADPNRVFNLDGTPLIMSIVSGSLECVKLLIKVGADMNFRDSNGVTCVMVAANHGSSVIMKCLLDAGANPNIPDEVSNILSSIACDWMLLRQAVWS

SEQ ID NO: 195929 - protein, 289 aa, Oryza sativa
  Clone ID: PAT_MRT4530_9182C.1.pep
MDAPPAFRSSSPSSSNASVPMVVITVVGILAAFALLASYYAFVTKCQALRGLWSRGAMPWRGHGGGGARRRAAREASVIRTVATEERGLGMPFIRMLPVVRFTAAACGGAGGEGGGGGVGARISVSECAVCLSEFVERERVRLLPNCSHAFHIDCIDTWLQGNARCPFWGRGEKMGGRKGRGDSHHHHHNHNHRPDDELINSIVIEVRGEHESWVSHRGGAAAAPPATKRTPQRRRKPESVGDEAIDTRKKYDEEFAVQPMRRSLSMDDSCHKQLYVSVQEFLTQQRQV

SEQ ID NO: 195930 - protein, 238 aa, Oryza sativa
  Clone ID: PAT_MRT4530_91830C.1.pep
MVQECSRHVGKKRTIEKGKKPPYRRPVPRVRRAANQLLPPPASASSPAPSFPSPDLPLEQLGMMPNSELWATSSPTPASVVRINTLRSSSLHTLRWTPPPPKALFSLPRRSERRAGVRRSAARVRRLCGRRGSGGGSRRHRAGCVRRRGAVVRWPCGHGGGRRRGGAQVPPPAFGDVRGPGKRRGERDVVGSGEHGQDGGKDRVGRLVEAVRREEEDERYAELLTDCLVLVFRRLDLD

SEQ ID NO: 195931 - protein, 75 aa, Oryza sativa
  unsure (1)..(75): unsure at all Xaa locations
  Clone ID: PAT_MRT4530_91831C.1.pep
LLLPLSLHPSRYKFSYQPSNLGCVRSGVIGRLXVSFSVRTLPKLLNGVFFAKSFYRKVALENHINPFLKFKIANI

SEQ ID NO: 195932 - protein, 124 aa, Oryza sativa
  Clone ID: PAT_MRT4530_91832C.1.pep
LSSFFQRRSERRAGVRRSAARVRRLCGRRGSGGGSRRHRAGCVRRRGAVVRWPCGHGGGRRRGGAQVPPPAFGDVRGPGKRRGERDVVGSGEHGQDGGKDRVGRLVEAVRREEEDERVRRRRRA

SEQ ID NO: 195933 - protein, 253 aa, Oryza sativa
  Clone ID: PAT_MRT4530_91833C.1.pep
MAHILKTSSTRKKYTEGRSAGEKEGGTTTAAAPPAETTRWSSLAATTASLVAIGLGGAALLVWWVLAFHPANARLWMVPAGLVLLGTPILAWLSLCLYAGPCTAVRDAPVHLHIHVHYYFDFFVNSAASCSVLMLEGEGHVALIWTYGIYDLVYTVAFQDYFLRVCDMVNANLATSCAKCSASCAASAGGLHEPHSNLSSDASRDTLLRRGHRCVTRCSTAASPSSSCGTMDLPSAQDALRASAGAAAPGAAT

SEQ ID NO: 195934 - protein, 246 aa, Oryza sativa
  unsure (1)..(246): unsure at all Xaa locations
  Clone ID: PAT_MRT4530_91834C.1.pep
VRLLLWISIAHIMNQQEDIKIKSSMCCNLIRPRVTLLISNGRQIYIRAPFWAREYLMESSRSPPSNGSSLISEFYLVWPQSQKQGVASPVLGQWTCNFVWDPXPMWGPCGVRPNLVEHDPWTLLVVLPPLXIVRNRVDLHRQDQQPMERCIDRXGATQRLVRTTHQKIGPTTVLSVERNSGSIIGSNDSSRNLHVNCVISFFLTFNAPCICLNLLIVTVHADDASPHRHEATQKRQIARAILVTAH

SEQ ID NO: 195935 - protein, 535 aa, Oryza sativa
  unsure (1)..(535): unsure at all Xaa locations
  Clone ID: PAT_MRT4530_91835C.1.pep
MATTDATIAHIMDEQEDIKIKSYKYWNPIRPPTTLLTSNGRRICIRPPFSPQLKQQGVASPIMGLWACNFVWDPGPRIGLICTGKINNSRRAVSIAKAQHNVSYGCSRVVNISPKSRRRLRVSVIVGTYENGIGSLPRFYFCSFHKFLSPYNRCLPRHRYIQPPLGCLIESVYVTIPLALNIHEEKSNRIEVPSPSLTKEEEKTDAATSSEQRTTGNLNGAAINQEEQPLVEPIAEMPLSQVDLLAVPCDKEELCDNASFISMPQLVNEHAISSVSLCANFKHVVHIANEVQERELLSSLNTLGYVQFDDFCELDNLKKKLFAKSDLPCPTSAIFHIFGESDDRGIYLVHRVYICSDLEPPIHVDKTCKLEXNVIANQIVSSLPCFDXKKQVIVNGLRKEHHMEKPRTVFREEGEDDVTMATTDATIAHIMDEQEDIKIKSSKCWNPIRPPTTLLTSNGRRICIRPPFSPQLKQQGVASPIMGLWACNFVWDPGPRIGLICTGKINNSRRGVSIAKAQYNVSYGCSRVVNISPKS

SEQ ID NO: 195936 - protein, 371 aa, Oryza sativa
  Clone ID: PAT_MRT4530_91836C.1.pep
MAGIRKIIGDSCAQHRHLRRDMRRDQHDHYEEVHNHEKEERDIKEPPVPLITLKVEAPPSSEEGIKGKLNGAKINKAEQPLVEPTAEIPLSQVDLFVVPCDKEELCDNASLISMPQLVNEHAIPTVNSYCADFKHVVHIANEVEERELRSSLNTLGYVQFDDFCELDNLKEKLFAKSDLPYPTNVIFHIFGEYNDLGIYFVHRVYICSDLEPPVHVDKTCKLERHVVLNRPRAEHHMEKPRTVFREEGEDDVTMATTDTSVTHIMDEQQDIKFKSSKCWNPIRPPTTLLTSNGRRIFIRPLFSAHEYLMESSRSPLSNASSLIAKYYLSRQQLKKQGASTPVMGLWACNFVWDPGPSGAHVGCAPIRWRTT

SEQ ID NO: 195937 - protein, 357 aa, Oryza sativa
  unsure (1)..(357): unsure at all Xaa locations
  Clone ID: PAT_MRT4530_91837C.1.pep
MVSGGRVGGGEGEAGEAAEVAVAMVDNEEEMAQAQAPPAAAVAARELVVGYALTSKKAKSFLQPKLRGLARKKGILFVAIDQKRPLSDQGPFDIVLHKLTGREWQQLLEEYREEHPEVTVLDPPGAIEHLLNRQSMLQEVSELDLSDCHGRVGVPKQLFVNTDPSSIPAAVMRAGLSLPLVAKPLVAKSHELSLAYDPISLTKLEPPLVLQEFVNHGGVLFKVYIVGDAIRVVRRFSLPNVDVGDLSNNAGVFRFPRVSCASANADDXDLDPHVAELPPRPLLEILARELRRRLGLRLFNIDMIREHGTRDRFYVIDMNYFPGYGKMPGYEHVFTDFLLSLVQKEYKRRPSYSSCEG

SEQ ID NO: 195938 - protein, 178 aa, Oryza sativa
  Clone ID: PAT_MRT4530_91838C.1.pep
MASSSSSSKKLSLTFVVLLLAGLVVLGEMAGAATAAAADCSTVRCIQGGYITCKNYPGKKLDGRPVAETAPEQAASENYSPTLSWVHANRLIKNLRVELNRKRRKTVLGNHDRDPDLTQEFSDAATMCCHCQPRMALRDSNGGTLAASSLRISWTSNGCCRGWWPLTAASSRRRLSAV

SEQ ID NO: 195939 - protein, 553 aa, Oryza sativa
  Clone ID: PAT_MRT4530_91839C.1.pep
MARVKGSGCGGSGGGRWARRRRRRPVGVVETGDSRGVEVGDGHGGAEGSMDTTATLSSRSGIGLICTGKINNPRRVITTHRKIGPTSALSVERNSGFIRWYQSFRCSLYRKCLPRHRYIQPSLGCLVESVYVTIPLALVRSWIRKIIGDSCAQHRYLRRDMRRDQHDHYEEVHNHEKEERDMKEPPVPLITLKVEAPPLSEEGIKGKLNGAEINKAEQPLVEPTAEIPLSQIDLFAVPCDKEELCDNASLISMPQLVNEHAIPTVNSYCTDFKHVVHIANEVEERELRSSLNTLGYVQFDDFCELDNFKEKLFAKSDLPYPTNVIFHIFGEYNDLGIYFVHRVYICSDLEPPVHVDKICKLEKNVIANQIVSSLPCFDWKKQVVVNGLRKEHHMEKPRTVFREEGEDDVTMATTDATIAHIMDEQEDIEIKYSKCWNPIRPPTTLLTSNGHRICIRPPFSAREYLMESSRSPLSNGSSLFSEFYLVWPESQEQGVASPIMGLWACNFNWDPGPGIGLICTGKINNPRRGVSIAKAQHNVSYGCSRIVNVSPKS

SEQ ID NO: 195940 - protein, 97 aa, Oryza sativa
  Clone ID: PAT_MRT4530_9183C.1.pep
GAMVALDLEGVSNALKIDIVMVCCSQCRMLFCLFQWHTCPSVFDSRIDAKITVFRYVYRLICIRNFSTLISYRQFHCLCLWKAIGHEPDLSQSGLGL

SEQ ID NO: 195941 - protein, 77 aa, Oryza sativa
  Clone ID: PAT_MRT4530_91840C.1.pep
MPSPLLFSPLPAMAAHLLPLRAFFTPHDGCTLSLPATAAHLLHSPARHSSATAARLLYSPTRLSPAVKPTAHHSPAT

SEQ ID NO: 195942 - protein, 580 aa, Oryza sativa
  unsure (1)..(580): unsure at all Xaa locations
  Clone ID: PAT_MRT4530_91841C.1.pep
MTGLRKGITDHRLVHLRQQMAGDPHGAYKVHDNDLARVESNLPVFDGKYDSAAYVNWELAVDKQFDEYDFSNAQMIKAASNKCTGSASFLWHTVGNKLDTWDEYKILMRKRFVFSYYRRALFEKFEHLKQGDKTVREYFHDFKICITYSGLQESNENTMTRFFRGLNSNIQAGLVNVTYNHIGQLFMLACNVERKILENPMEQQAMLVPPITDILQEVQNSPQNEKNDMFEMSLPSLANEEKADAPTLSEEGIKGKLNGAEITQEEQPLVEPIAEMPLSQVDLLAVPCDRVEVCDNASLISMPQLVNEHAISSISLCADFKHVVHIANEVKERELLSSLNTLGYVQFDDFCELDNLEEKLFAKTDLPCPTNAIFHIIGEYDDRGICLVHRVYICSDLEPPVHVDKTGKLERDVISNHITSSLSCFDWMKXVVLNRPRDEHHMEKPRTVFREEREDDVTMATTDTTIVHIMDEQEDIKVKSSKCWNPIRPPTTLLTSNGRQISIRAPFSAHEYLMESSRSPLSNGSSLIVIFHLSYLQLKKQGIGLICTGKINNPRRGVLIAKAQHNVSCNFVSKNCNSTS

SEQ ID NO: 195943 - protein, 47 aa, Oryza sativa
  Clone ID: PAT_MRT4530_91842C.1.pep
RTRATIYMNITCCLAKKKHSLEMHRATANSCLSTNSPRISLCRHSHL

SEQ ID NO: 195944 - protein, 2002 aa, Oryza sativa
  unsure (1)..(2002): unsure at all Xaa locations
  Clone ID: PAT_MRT4530_91843C.1.pep
RPRVLGPSQVVLPVTAPRSGAHSHSLTLSTAASPLSTSLPPSTRPPLHRRPRRRQIRRPLRPLRHPLRPPLHRLDLDLSATISAAALYAALPTAASTSLPPSPPPPPHSLSRPPPSISIDLSAAISAALSTAISALYAALPTASTSTSPPPSLPPPSTPPSPPPPRPLCRPLHRRRLTHSLDRRRPSPSTSPPPSPPPSLPPSPPSTPPSPRAASTSPPLPPHSLSRRPPGPPLSRHARTVVAATGISSPPPPPLDRDLHELPQEQHTSMSGETSAXPTAPRTVIGRWSNCCGIAARENFGILHKDIGKVTEAEKERAWTAMEKWFTFPAEAKDRLKRKAFQKMGKAWKNWKSKLFTEYVNPPGNHTPFDEYPQITEAVWEEFCSLKTTQEFRESSEAHRVLQQRNEHPHRLGTAGYIGKEAIWAQEDAAAAAANVPAPFSDIPEQRARNWARARGKVNPDGSVTFENKSDAVVYQELLGLVAEQASQSEVESAPKRREDDILTKALGTKEHPGRTRGIGSDVPWKHGLPQYSSQYRKRKVSKEERDARLKAELKVEVIQELEASMNARVEERVNKVLADMNIPRVTTPAVQPTPRVQHDASPSQHRSSCASTEVPAPGLPIAPLAAVDHIEGAAQCVLLARVHPTFAPEVAEGMAFKPSVTDKVHGADLLAGYAKVSIDTVKDTWSGYPLPVPPNDEIMTLGDARKTFIQWPKEDIVVKMTPRPSRPTELTPPKSKLSIEAPRGPALSVPHSPGGADMDLADIAQSLAPIKTTRKADSSPPLVKGQKRERGKGKVGELAPEPKRGKAATSMPVSKSGKVVRAPAQFELGMPLVEDNVLAVMGIACRELHKQYMELSNAKRKMRESSIVGHHDHQPFLSSPAYITIGFDDLFDLFRIRKLDTGLLKCYSLLCWIESRRHGNQVGFLDPSMVNEVNLRQSFTEVVDYVNRCLWAHQDKEYIMCAHNQERHWILLVIVPKWSRVTYLNSNKSKDYDFSEITKALNMAWGPYVEKGGRHKEGKNELYHDTKFACAQQIGDQCGFHVCHNMSTLLREVVEVHNEQNTRNFGNHLRTFMGFRDIKSRCFSLRITDKDLANIAYDGLLDSIKEKLNGQIFLDVDHVLHEALAQKSQVDDNSLNASLDDSAISCIAEPRDGSDCGNNLCNDAVTSIAESNVGPDCLTNLDDNVTTIIAEPSVGSDCVTNLDNDGIAEPNNGLDCVASLENNIIENIAELSDGSDCITSESEIALSPKIESQIGHVDVRKDDDNVLRDSGAIESKVVMHTYQRPYPEYVDSVPYPQGFEVPNFTKFTGENARTTMEHIGHFIDQCGKAGSDDLLKLKLFPLSLLNFASTWYSLLAPSSISTWSQMEHEFHDYFKDASLMEQRPIDTSSVTCETISVTSMPKTGIVSDPLPISSINVDKKKGKSVIIGDPRPKNRINNAKAGDHKIAKDESSSSQKTKKPKLTFEMLMAKYKKGLAGQRFDNQTCDSKRPRSSRRKRFGQTSKQSEPSTIPTPYKPPIVMPWYPYPMSLYGYPFMYYMPWMPQPPMPCHQGWKQSPRTVPSHSNSRQDRFPRKNRSGGSKVKKVKKVWVRKEAKAPEVVAIKEESQDVHVPTGDAVETTQAKEIEADAVTINIGGLTETAGRSNRQSTAGLTDLTGRSDRRLVAGLTGLSGRRLQRLRVIGQKEEEAEDVENKTCNNLEPRKAPRQMWRSKEGRSDWNYTAGLTSDDQWSDRLCMAGLIGIPWPIYPSLSKGHWLVLVAMGYFTKWAEAVPLDNVTFEVNLGSLRYFKQDDMSVEDYKTLMGSNFEDVIDKRLKTSKEMKTLQDGVFREQLMGDSLKKYFPSIWQGGMCLHPNLAPMDEIGKNCQSLESAGFPSQGRSDRRYMGGLTSYRAGLTAEIELGASKLYHVDAKFDKERENNFNLSNARSGRPESRSDRWDKTRSDRPSGHSGNLSAHRINEFAQPPGGEGGWRGVFKLSWKFYYGERVIQLACAANTLTALGPF

SEQ ID NO: 195945 - protein, 319 aa, Oryza sativa
  Clone ID: PAT_MRT4530_91844C.1.pep
MAGLRKGIREHRLLHLRRDMTTSPNDTYEVHDYNFEQVASKLPFYDGKYDSVAYIDWELAVDNEFDIYDFSDAQMIKAASNKFTSSALFWWTYVSNKPETWDELKTMMRKRFVTSYYKCTLREKLEHLKQGDRTVREYIHEFKVCIIYSGLKECNENTTRRFFNGLNSEIQVLLDNVTYNHIGHLFMLARSIESQIISKARMHDQCDLSPISESPIYLCNDDVQTLEEQSFVSPVTNVLQEDQHIQEKENGILEKKEDEAPAMSEKSSQGKLNGAERNEGIGLICTGKINNPRRGVSIAKAQHNVSYGCSRIVNVSPKS

SEQ ID NO: 195946 - protein, 277 aa, Oryza sativa
  unsure (1)..(277): unsure at all Xaa locations
  Clone ID: PAT_MRT4530_91845C.1.pep
TTIPGCTDLTPNQEYTIPNQELSKLLPDITSIIIVRGVRLITKNIAQPAHNRGHGYSNSFTLARGVPLYPQDTIPHMLPCPEVPPRHCKGGNRDNTLRTTQLTTVHHSWIIITPSKTRGMDSPATPTDFSPLLSLAPRNEPCYTKDKADDLAGDREVGRAIXRHLHVEDDDANSPVLANAMDDDEWWPAASSSGGTARVVGGGGSPVTGNGGEGAAEVPRLRAHLTAATGSGGDCXRDGAARLDVGRRRRRRRLGRRGGGATGDEKARELGQTKEDA

SEQ ID NO: 195947 - protein, 702 aa, Oryza sativa
  Clone ID: PAT_MRT4530_91846C.1.pep
MVGMDWHILLVCKHHIKLWRHGVNNGKTCTEDAAGAGAMAVRISPGANAVSSAATTDTNIAHMMDEQEDIKVKASKCWNPIRPPAALLSSNGRQISIRAPFSAREYLMESSRCPLSNGSSLILKFHLIEPQLKQQGAASPVMGLCACNFVWDPGPKWGPCGVRPKLVEHDPRTLLVVLPHPKIARNKVDLHQQDQQPTERCIDRKGATQRLLSSTHRKIGPTTALSAEWNSGFIRWYQSFRCSCLVRVEFRVLVTFCATVVAAAVWIRKIIGDNGAQHRHLRRDMRSDQHTIMSYSSFAHLLQLACHAEKQIEDVNKKQVVDVPPITNILQEVNNCNKEERDMKEPSVPLFTFKVEAPPSSEEGIKGKLNGAEINQGECVVNELNLSTFHAILEQPLVEPTAEIPLSQVDLFAVPCDKEELCDNASLISMPQLVNEHAISSVSLCADFKHVVHIANDIEERKLITSFNTLGYVQFDDFCELNNLEEKLFAKSDLPCPTNAIFYIFGEYNDRGIYLVHRVFICSDLEKHIIANHTTSSFSSFDWMKQVILNGLCEEHHMKKPRTVFREEGEDDVTIATTDTNIAHIMDEQEDIKIKASKCWNPIRPPAALLSSNGHQISIRAPFSAREYLMESSRSPSNGSSLISKFHLIEPQLKQQGAASPVMGLCACNFVWDPGPKWGPCGVRPKLVEHDPRTLLVVLPHS

SEQ ID NO: 195948 - protein, 58 aa, Oryza sativa
  Clone ID: PAT_MRT4530_91847C.1.pep
WRRRDKFRNLLTNIRKGRTTGMGLRRRISTEEGWTGWISATRTRRRRRRGAAVSLAAA

SEQ ID NO: 195949 - protein, 394 aa, Oryza sativa
  unsure (1)..(394): unsure at all Xaa locations
  Clone ID: PAT_MRT4530_91848C.1.pep
MPLVFEGMVNTRANGKWNNNNEGNPTLAQVLAQQTQLMNMMIQQMQNQLTQGNTNAPPPQNKLADFLRVRPPTFSSTTNPVEAGDWLYAVEKKLELLQCTDQEKVVFASHQLQGPASEWWDHFRMNRAEGQPITWVEFTEAFKKTHIPVGVVSLKKREFRTLKQKDHTVAEYLHEFNRLARYALEDVRTDEERQEKFLEGLKDELSVTLISHDYVDFQQLVDKAIRLEDKKNRMDNRKRRMTVFQEAQVATIEHRXDQSQENNSSGREQQVCFNCYKPGHFARECPKPKRQQPQGQLRAAVAAVAPAVRRRRSGRRCRSGRPPSGSPSRRRPRPPLRHRRRSPEHHRRRRPDLRRRFNLVAVAVRCSSAAPLVTAPPFASERAPSEPPSRRRRW

SEQ ID NO: 195950 - protein, 533 aa, Oryza sativa
  unsure (1)..(533): unsure at all Xaa locations
  Clone ID: PAT_MRT4530_91849C.1.pep
MATTDTTIAHIMDEQGYIRINSSECWNPIRPPATLLTSNGRRICIRPPFSAQSHKQDATSPVLGLWACNFXWDPGPNGAHVGTGKINNSQRGVSIAKAQRNVLYGCSRIVNVSPKSRRHPRVSVVVETYENRISSLPRFYFRTLKKFLSVSSSVWPRHRYIQPPLGCLIESVYVTIPLALNISNARKHEQCDLSLASESLISLKHEEPAISEDSLXGKLNGAKLNEVEQPLGEPTAEIPLSQVDLLAVPCDKEELCDNASLISMPQLVNEHAISSVSLCADFKHVVHIANEVEEHELLSSLNTLGYVXFDDFCELDNLEEKLFAKSGLPCPTNAIFHIFGEYDDRGICLVRRVYICSDLEPPVHVDKTCKLERHVISNHITSSLSCXKQVVLNRPCDEHHMEKPRTVFXEEGEDDVTMATTDTTIADIMHEQGDIEIKFSKCXNPIQPPATLLTSNSRRICIRPPFSAQSHKKGVASHVLGLWACNFVWDPGPRIGLICTDKINNPRRGVSIAKAQRNVLYGCSRIVNVSPKS

SEQ ID NO: 195951 - protein, 198 aa, Oryza sativa
  unsure (1)..(198): unsure at all Xaa locations
  Clone ID: PAT_MRT4530_9184C.1.pep
PTRPLIKSTSFLSLYLSLYLSPPAAAGGPSHHHHLLRPYTISANRSIRTHSFSDAGYGRIHPREYEYGTLXIINGGVKPHTPPGISSSXSTPVDCKPSSHHLTSIHHCASSTRITIPTAXSDLSAGTLCLISPTDILPGFLPMFRSGSCSYIRTKSYMEDXHVCVHYLIKHLAVRTPVIPAPVAFYGVNDGHGGSDAA

SEQ ID NO: 195952 - protein, 908 aa, Oryza sativa
  unsure (1)..(908): unsure at all Xaa locations
  Clone ID: PAT_MRT4530_91850C.1.pep
MSTPGANPPSPTPARIQEEANPATEAVAEGHPATTANQQPEIHELQQEQHTSMSGGTSASRSSRNPRSQNIWPTTVQVIREVDASGRPTAPRTVIGRWCNCCGLAARENFGILHKDIGKVTEAEKERAWTAMEKWFTFPAEAKDKLKRKAFQKMGKAWKNWKSKLFTEYVNPPGNHTPFDEYPQITEAVWEEFCSLKTTQEFRESSEAHRVLQQQNEHPHRLGSARYIGKEAIWAQEDAAAAAANVPAPFSDIPEQRARNWARARGKVNPDGSVTFENKSDAVVYQELLGLVAEQASQSEVESAPKRREDDILTKALGTKEHPGRTRGIGSDVPWKHGLPQYSSQYRKRKVSKEERDARLKAELKVEVIQELEASMNARVEERVNKVLADMNIPRVTTPAVQPTPRVQHDAIAEGMAFKPSVTDKVHGADLLAGYAKVSIDTVKDTWSGYPLPVPPNDEIMTLGDARKTFIQWPKEDIVVKMTPRPSRPTELTPPKGKLSIEAPRGPALSVPHSPGGADMDLADIAQSLAPIKTTRKADSSPPLVKGQKRERGKGKVEELAPEPKRGKAATSMPVSKSGKVXVSAPAQFELGMPLVEDNVLAVMGIACRELHKQYMELSNAKRKMRESSIVGHHDHQPFLSSPAYITIGFDDLFDLFRIQKLDTGLLKCYSFAAATCSTPPSSPAELHPRRAAASVVAAGRRHRRKVRRGVEKPGRSLPAVAGHRSPVVAVDRSRAAVRPRRRPSSFVVWFEGEYRWVRLVVLYVFMSSKVAADHPISGEVAILVRPLMRLRSGEKSTGVTGESMPLVFEGVGFLDPSMVNEVNLRQSFTEVVDYVNREITKALNMAWGPYVEKGGKHKEGKNELYHDTKFACAQQIGDQCGFHVCHNMSTLLREVKDFDPEVVANGE

SEQ ID NO: 195953 - protein, 467 aa, Oryza sativa
  Clone ID: PAT_MRT4530_91851C.1.pep
MTTTDTTITHIMDEQADMKIKSSKCWNLIRPPAALLTSNGRRICIRPPFLARTRLICTDKINNPQRGLSKGIREHWLLHRLQDMTTSPCDAYEDGKYDSVAYIDWELAVDNEFDKYDFSEAQMIKAASNKFTSFALFWWSYVSNQPETWDEFKTMMRKRFVTSYYKCTLREKLEHLKQGDRTVREYIHEFKGVQNIQQKEENGVLEKKGDEAPAVSEESLQEELCDNASLISMPQLVNEHAISSVYLCADFKHVVHIANEVEEHELLSSLNTLGYVWFDDFCELENLKEKLFAKSDLPCPTNAISHIFGEYNDRGIYLGHRVYICSYLEPSVHVDKTSKLERNVTANKIISSLACFDWKKQVVLNGLREKHHMEKPGTVFHKDGEDDVTMATTDTTITHIMDEQADMKIKSSKCWNSIRPPTTLLTSNGRRICMRPPFSARIRLICTGKINNPWRGVSIAKAQHNNV

SEQ ID NO: 195954 - protein, 601 aa, Oryza sativa
  Clone ID: PAT_MRT4530_91852C.1.pep
MAGLRKGKQDGHAQRQHLHLRRDMTTSSRDAYEVHDYNFAQVACKLPVYDGKYDSAAYINWELAVEKQFDEYDFSNAQMIKAASNKCTGSASFWWHTVGNKLETWDECKILMRKRFVFSYYRRALLEKWEHLKQGDKTVREYFYDFKICITYSGLQESNENTMTRFFRGLNFNIQAGLVNVTYNHIGQLFMLACIVERKILENPMEQQDMLVPPITNVLQEVQKSLQNEKNDMFEMSLPSLANEEKADAATLSEESSQGKLNGAERNEGEYSQGELHLSTFHAIVEQPLVESITELPLSQVDLLAVPCDKEELCDNVSLISMPQLVNEHVSSTISLCADSKHVVHIANEVEERELLSSLNTLGYVQFDDFCELDNLKEKLFAKSDLPCPTNAIFHIFGEYNDRGIFLVHRVYICSDLEHLVVPDKICKLERHVTASHIVSSLSCFDCKKQVVFSGLREEHHMEKTRTVFCEEGEDDVTMATMDTTIAHIMNQQEDIKIKSSMCCNLIRPRVTLLTSNGRQIYIRAPFWAHEYLMESSRSPPSNGSSLISEIYLVWPQSQKQGIGLICTGKISNPRRGVSIAKAQHNVSYGCSRIINVSPKS

SEQ ID NO: 195955 - protein, 740 aa, Oryza sativa
  Clone ID: PAT_MRT4530_91853C.1.pep
MAGAVLVAIAASIGNLLQGWDNATIAGAVLYIKKEFNLQSEPLIEGLIVAMSLIGATIITTFSGAVADSFGRRPMLIASAVLYFVSGLVMLWAPNVYVLLLARLIDGFGIGLAVTLVPLYISETAPTDIRGLLNTLPQFSGSGGMFLSYCMVFGMSLMPQPDWRIMLGVLSIPSLIYFALTIFYLPESPRWLVSKGRMAEAKRVLQGLRGREDVSGEMALLVEGLGVGKDTKIEEYIIGPDDELADEGLAPDPEKIKLYGPEEGLSWVARPVHGQSALGSALGLISRHGSMVSQGKPLVDPVVTLFGSVHEKMPEIMGSMRSTLFPNFGSMFSVAEQQQAKGDWDAESQREGEDYGSDHGGDDIEDSLQSPLISRQATSVEGKEIAAPHGSIMGAVGRSSSLMQGGEAVSSMGIGGGWQLAWKWTEREGADGEKEGGFQRIYLHEEGVTGDRRGSILSLPGGDVPPGGEFVQAAALVSQPALYSKELMEQRLAGPAMVHPSQAVAKGPKWADLFEPGVKHALFVGIGIQILQQFAGINGVLYYTPQILEQAGVGVLLANIGLSSSSASILISGLTTLLMLPSIGIAMRLMDMSGRRFLLLATIPILIVALAILILVNILDVGTMVHASLSTVSVILYFCFFVMGFGPIPNILCAEIFPTTVRGICIAICALTFWIGDIIVTYTLPVMLNAIGLAGVFGIYAVVCILAFLFVFMKVPETKGMPLEVITEFFSVGAKQAKED

SEQ ID NO: 195956 - protein, 323 aa, Oryza sativa
  Clone ID: PAT_MRT4530_91854C.1.pep
MDGGGSGAGRKKLKHRLAAILSVFTRRAGDRKRRGEEGAAAPPPPPPPLAFPSYSRLGGAGGKKAAAGKHERRLSLSVPRPPPLVNITIDCAGRRSVDAADPSLLAPLDLDARKMERRLTGTGLPYETGEWEGRKCPPSTPFAAAPPLARWKERASVSSRRLSTHSSRRLMSSSSSDDEYDEDSRNLFSSRSFSSDSSDFYNCPRKNTRARASVSGPCRAPPPSSRRGTSQSCRYSFELPRGSTASAATDGGFAVVKRSSDPYEDFRKSMEEMIAEGAACGGGDGDGELSAERLLETYLVLNSPRHYPAILAAFADVRETLFP

SEQ ID NO: 195957 - protein, 182 aa, Oryza sativa
  Clone ID: PAT_MRT4530_91855C.1.pep
MAYGQAGTSKLYTPIIFEAFQAEYERFMAACAEVLDGDNKYLVAIGDENLAFEEEYMVADNTLNILTKEVENKMATSPCINLGDPCAARVDVQEPNVSLTNASLKKKEFRTRNLKRNRSWTDKNGTRRKKQSTTKKTKQQDVENAGLQAQAVEESSSRTNISDVGQYGVINTFTQLLMTGNH

SEQ ID NO: 195958 - protein, 67 aa, Oryza sativa
  Clone ID: PAT_MRT4530_91856C.1.pep
MTESPFLPRERLFKQQQYFQNLTKHTYLKGRYDVVTSVAIPLALAASSLFMIGRGVYNMSHGVGKKE

SEQ ID NO: 195959 - protein, 94 aa, Oryza sativa
  unsure (1)..(94): unsure at all Xaa locations
  Clone ID: PAT_MRT4530_91857C.1.pep
RVRERKRLEERDGSLHDAPMASQLMKSTLVCSKPWGLAGXTAMTRRPRFTHKVHTRMRSHTYQVEHAINGYLFIRSQETPVTXRPLVAWDACNL

SEQ ID NO: 195960 - protein, 87 aa, Oryza sativa
  Clone ID: PAT_MRT4530_91858C.1.pep
PITYQVRLPTSTNPFCCRSTHTTHTFAASSIPPLLHDNQGDQKDKRCEFGKFFRCYPLLFLLYSGGNLHLSVAFGRSDLSRCPPFVN

SEQ ID NO: 195961 - protein, 1331 aa, Oryza sativa
  Clone ID: PAT_MRT4530_91859C.1.pep
MKRRMRGGGGAAMAVATGAVMLFLAATLSGVSANTDSDDVNALNVLYTSMNSPSQLTNWVSQNGDPCGQSWLGITCSGSRVTAIKLSGMGINGTLGYNMNLLTSLVELDTSKNNLGGSDIPYNLPPNLERLNLAENNFTGSIPYSISQMIALRILNLGHNHLATTNDMFNQLTNLTTFNLQNNGFNGTIDVLADLPLTDLNVANNQFTGWIPDKLKKIKNLQTNGNSFGSGPSPPPPPYQSPPYKSPPYKSPQSRQPAPPTTTVNNNPSDDGRKHSKLSGGAIAGIVVCLVVVGAIVAFFVIKKKYWSLPRGGDPEQKEPLSPIVSGFKDSLKQMKSIKIISTIGKEELQKTVSMNLKPPTRIDLHKSIDENDVTSKSFTRKISFSSIRTPAYTVADLQVATGSFCADNLIGEGLFGRVYKAKFNDHKVLAVKKINFSAFPGHPSDLFIELVANISRLNHPSLSELVGYCSEHGQCLLAYEFYRNGSLKDLLHLVDDQSQPLSWNSRVKIALGSARALEYLHETCSPSVIHKNFKSSNIFLDNELNPHLSDSGFADLIPNRESQVSDEDSGYRAPEVTMSGQYSVKSDVYSFGVVMLELLTGRKPFDRSRPRSEQSLVGWATPQLHDIDALDQMVDPALQGLYPSKSLSRFADAIALCVQSEPEFRPPMSEVVQLLVRLVQRANMTRMCGADGHSWRRDGESRDQEPWVCIAVARVQARMVGSKGQRWRRRNKHRGVSALGRSLKPSRKASRHVVPCRARSFTQCSLGGGSADQEIVIALGSNVGDRISTFDRALRMMKNSGVNITRHACLYETSPAYVTDQPRFLNSAVRGTTKLEPHELLKKLKEIEKDIGRTDGIRYGPRPIDLDILLYGKSHISTENLTVPHERIHERPFVLAPLVDLLGSSTDDNVEKSWHSLAKCTGGFFESWDKLGGESIIGTEGIKRVLPVGNRLLDWSERTLVMGVLNLTPDSFSDGGKFQEVEAAIAQTKLLISEGADIIDIGAQSTRPLARRLSADEELERLVPVLDAITGIPEMEGKLLSVDTFYAEVAAEAVKRGVHIVNDVSGGQIDPRILEVVAELGVPYVTMHMRGDPSTMQSEQNLLYGDVCKEVASELYKRVRQAELSGIPLWRIVLDPGIGFSKNSKHNLEVIMGLESIRTEIGKMSLGASHVPILLGPSRKRFLGEICNRVNPTERDAATMVVATAGILNGANISFMDLQFPNGQLTYVTGDRITASGFLPLFGGLLQAHGKYPGETRVSFSCKNKQGTKFTPMFQWPDKSLSFGVTQALAWKRAGLMPWYHAKGMHLFRMKLSECKCRMIKLVITGMVVP

SEQ ID NO: 195962 - protein, 116 aa, Oryza sativa
  Clone ID: PAT_MRT4530_9185C.1.pep
MASGSNSSCWCGRLVAPARLNPCLCEVSSSLQRATIIYPRAMSMEDNACHFSRVESDTSVGNGMRALCPGSTRLRRCGQVLPYPIETHAFYWAMAGGPHVQLGMVNPIHRVVAWIK

SEQ ID NO: 195963 - protein, 348 aa, Oryza sativa
  Clone ID: PAT_MRT4530_91860C.1.pep
MNAAARKAAAAARLPAAVLVVVAVGAFLISYNLLAIVLRGGGGAATGAGRERDPVVAMPGWMRAAGSAGGGRRRPFHVALTATDAAYSRWQCRVMYYWYKRMQARPEGADMGGFTRVLHSGKPDALMGEIPTFVVDPLPAGKDHGYVVLNRPWAFVQWLEKAKIEEEYILMAEPDHIFVRPLPNLARDDPAAFPFFYITPSEHESVLRKYYPKERGPVTNIDPIGNSPVIIKKIQLEKIAPTWMNVSIQMKEDQETDKAFGWVLEMYAYAVASALHGVQHILRKDFMIQGVLTYGKIGEWRFDKRAYQDRPPPRNLTLPPPGVPESVVTLVKMVNEATANLPGWDDGR

SEQ ID NO: 195964 - protein, 129 aa, Oryza sativa
  Clone ID: PAT_MRT4530_91861C.1.pep
MNVSIQMKEDQETDKAFGWVLEMYAYAVASALHGVQHILRKDFMIQPPFDTKLGNTFIIHFTYGCDYTLKGVLTYGKIGEWRFDKRAYQDRPPPRNLTLPPPGVPESVVTLVKMVNEATANLPGWDDGR

SEQ ID NO: 195965 - protein, 879 aa, Oryza sativa
  Clone ID: PAT_MRT4530_91862C.1.pep
MPSRMMQAFAQEASDFDRQMGCMAGMFQIFDRRRLLTARQRGGARGTAPPGHVLPNSNSNVSIQNPVASNNTLDKTFSKSMTENSSLSMESSRASSSSSSCSSFSSTDINRPIQQELSYINKERFAGKPPRSSQTKSVKCSKTEAKTKDPHTGFRDIVKESINRETHGMTIKTSTKESRKGLHKDSPRPLLISKSTDGTYVIGIDRSTGVPGYVHESSRPPRFSCDDRQLLRSVEAQDSKKPSAKLKELPRLSLDSRKESMNPCSRLKNSGYIRTDDNLLDVLKHQESPSHQRASSVVAKLMGLEGTTPDIHETARSPTPVHGTQIDQPSHCQRIKNQDHSVPVQKNHSPVLKTNPSPRIIPEAAPWRQNERAVTGRAAEVKPRTASIYADIQRRLRGLELSECNKELRALRILSTLHKKDGPSQSDNNPELTAIQKKASEQIVDSENFQSPIVIMKPARCITKPDASDTLVAPLSRPKGIRRLRHEETSFTRKNENSDSKRNHSPNESAHSSGEEPVNSARSPRLSSSLSPRLAQKKADSERRWSTGFANIDVGVVDHPNPLNANSPYIHQSKIASTPNREEMPTILPADKKKIHPQENIPSPVSVLDATFYHEGSSPSLKRISDSFKDGETHTSDESWNPTSLPDTPPSKASNDGNQIKAENMKALIQKLELLQMLSEEALKTDDTFSSVAANKDHQYLYEILSASGILHNKLNFQMMPHQLRPSSYPINPELFLILEQAKPDEEKLHPRFICDLANELLAQQMDANHTVNSSVQFFQSKKLSGWQLFKDLCAEIDMIQSRSSMIRCSEEGDGRLAEDAMQGMKEWNSSDRERQGIVLAIEKSIFKDLIDEIISGVDKGKVHLTQWKLRRQLSFISI

SEQ ID NO: 195966 - protein, 65 aa, Oryza sativa
  Clone ID: PAT_MRT4530_91863C.1.pep
PTRPKNLQPPFDTKLGNTFIIHFTYGCDYTLKGVLTYGKIGEWRFDKRAYQDRPPARNLTLPPSG

SEQ ID NO: 195967 - protein, 115 aa, Oryza sativa
  Clone ID: PAT_MRT4530_91864C.1.pep
MASSGDGDEPRSGAEPRVDRLPQQEHKVAGAIGVAIRGIHVDRWRRTGKQGRRGGEANGDLLTDHEGEQGRGGGEAVLGRGQLNPESLELFAEWHGGTTRRRHAKRRRDDTAAAS

SEQ ID NO: 195968 - protein, 60 aa, Oryza sativa
  unsure (1)..(60): unsure at all Xaa locations
  Clone ID: PAT_MRT4530_91865C.1.pep
FFFFFFFFFFFFFFFFFFFFFFXSLTTVPASHIIQKSKTTFTCFLGSHEHKDTTITKISN

SEQ ID NO: 195969 - protein, 76 aa, Oryza sativa
  Clone ID: PAT_MRT4530_91866C.1.pep
IGGYPSTFRHLMFFFYLHRDNVVLKYHHNISSNTIYHIKLLFSNFEEIAVLHRRRGRAGGGERVLQHRLLRVAHGK

SEQ ID NO: 195970 - protein, 106 aa, Oryza sativa
  Clone ID: PAT_MRT4530_91867C.1.pep
DGNNTWPEETTYLVEELFHSTAPKVVDVIRLVKIAQVHTAASECLLELSKLYRDFPLVDRKGPKFSGELAELCESEKSEQAKAFLKQCMDILKDFEDATGLAMEMD

SEQ ID NO: 195971 - protein, 87 aa, Oryza sativa
  unsure (1)..(87): unsure at all Xaa locations
  Clone ID: PAT_MRT4530_91868C.1.pep
GGPPPYIYPLSPPPPKIPFFSPAPPTXIPSPSPVFLLTPPHLFGFPETPPNPCGKTPLSLPQSKKMSLLDPSKMYIPHKKTRYSSPP

SEQ ID NO: 195972 - protein, 1809 aa, Oryza sativa
  Clone ID: PAT_MRT4530_91869C.1.pep
MAETTSQAAAAAAAAQTDAEREEALDRMLTRLALAEDARLAPLLARVLPYAITSLASPTASVRKLVMEILSHINKRVKHRPEISLPMLDLWRIYTESTSSTIVRNFCIVYIEMAFERLLSEDKGSIAPDLLINISNVTEQHQGIILRLVVKAIGECNTHKVGDNVASKYQSISGSNDDLVFADFCFHTVVYQTPPQGVGCPAGLSVAQSDRVTGKQPLKGDTLTSRKLGILNVIEAMQLAPEIVYPLYLAAASDSQESVTKRGEELLKRKASAVNLEDSNLMKKLFTLFNGTASAENIAAELKVAPAHSSLRVRLMGVFCRSIAAANAFPYTLQCIFGCIYGNGTTSRLKQLGMEFTVWVFKHAANDQLKLIGPVILSGILRSLDGSSTTEADSSSRDIKIFAYQAIGLLATRMPNLFSNKTDMAIRLFTALRLEEQSLRLTIQEAATALATAYKLTNDLMRNKLISFVDEAHERIVTPHGPNMPLENVFGTEGRYKKANVLLSVDIFGFYILGASVVILKDLEALLLENSQMEQSEVRFSAVRWATTLYDMKHCPSRYICMLGASDVKLDIREMALTGLNLLNDERESSAIATDSNYPDIADMLVSSRYVNRLLWLRTLLGHVDADAREATSRLLGITSSALSSTAALDLLSELTSTFDQNRPSRFENYHGLLCAIGYITAGCLKESYITEEIVQKSIDVLVKVVESEGSALASTAMEALGHIGLRCLLPSINRNSSQAALLTILNEKLAKLLSENDTKAIQKILISLGHLSWNELSFAHLNNALDLIFSLSRSKVEDVLFAAGEALSFIWGEVPVTTDVILETNFVSLSQATNYLTGDAPLLVSSNSNKGSDCEEAHAMAREEIIKRLFDTLIYSSRKEERCAGTVWLVSLTMYCGQHPKILELLPQIQEALTHLLGDQNDLTQDLASQGMSIVYELGDASMKEQLVHALVNTLSGAAKKKRAIKLMEDSEVFQEGTIGNNPTGGKLSTYKELCSLANEMGQPDLIYKFMDLANYQAAINSKRGAAFGFSKIAKQAGEALQPHLHTLIPRLVRYQYDPDKNIQDSMAHIWKLIVADPKKTIDEHYDLIVEDLLVQSGSRLWRSREASCLALADIIQGRRYGQVSKHLRKIWITTFRAMDDIKETVRNAGDSLCRAVSLLTVRLCDVSLTTSSDANETMNIVLPYLLSEGILSKVSSVQKASISLVMKLAKGAGPALKPHLSELVSCMLECLSSLEDQRLNYVEMHAGNAGIQTEKLESLRIAVAKDSPMWETLDICLKVVDKESLDLLVPRLAQMVKSAVGLNTRVGVASFITLLVQKVMVEIKPYAAALLRLLYSAVLEEKSSAAKRAFASSCAAVLKYASPSQAQKLIEDTTSLHLGEKNAQLSAAILIKSYLSNAADILSGYNAVVLPVIFASRFDDDKDIGALYGELWEDIPSSERVTLQLYLPEIISLLCDSMSSSSWAGKRKSAKAIKKLCDALGESLSVHHNNILESLLKELPGRFWEGKDAILDALAALCSSCHTAMSAEDSGMPSVILNAVCAACSRKSKLYREAAFSCLQQVITAFKDPGFFNIVFPMLYEVSNRSVICKTRNSSSLTASSSAEQDETEGVSVSLDKVLNCVASSITVAFLQDIINQRKNILEIILNSLSPEESWQIKLSSFLCIKELCYKFQNSDGNNTWPEETTYLVEELFHSTAPKVVDVIRLVKIAQITALLLYVTVHMLVFGFTDFRTNSYKVHTAASECLLELSKLYRDFPLVDRKGPKFSGELAELCESEKSEQAKAFLKQCMDILKDFEDPTGLAMEMD

SEQ ID NO: 195973 - protein, 80 aa, Oryza sativa
  Clone ID: PAT_MRT4530_9186C.1.pep
MSRDPLVVGHVVGDILDPFNKSASLKVLYNNKELTNGSELKPSQVANEPRIEIAGRDIRNLYTLNHEDALVVTQPLKLTK

SEQ ID NO: 195974 - protein, 80 aa, Oryza sativa
  Clone ID: PAT_MRT4530_91870C.1.pep
PPPHPELVCPTRRRSRRQPPGRRQLDRRRRAPLRVPRARRGSRRRRRGHRPFSQVVSYTASRCRVHTLVMRVHGYCHYYH

SEQ ID NO: 195975 - protein, 63 aa, Oryza sativa
  Clone ID: PAT_MRT4530_91871C.1.pep
MPVLAPGARAVQGDASGGWSLRLGHGLPPGTDDEDDPAEAVVYTTCPHAPTMRRHPPRVRTRP

SEQ ID NO: 195976 - protein, 101 aa, Oryza sativa
  Clone ID: PAT_MRT4530_91872C.1.pep
MGSTSSMLTQYDIEEVQDHCDHAFIFRVYDTDCNGKVAFDDILSILRDLSGSFMTEQQRQKVLIHVLEEAGYTKDSNFTLPDFMKILDNSDVKMEVEVPID

SEQ ID NO: 195977 - protein, 561 aa, Oryza sativa
  unsure (1)..(561): unsure at all Xaa locations
  Clone ID: PAT_MRT4530_91873C.1.pep
MATTDTSVAHIMDEQQDIKFESSKCRNPIRPPATLLTSNGRRICIRPPFLARIRLICTGKINNPWRGIRKIIGDSCAQHRHLRRDMRRDQHDHYEVSDDVLGKIKSALPYFEGNYDPRAYINWELAVDSEFQKHVLSEKQKVMCASSVLIKHASNDWKHLCRHNKIPQSWKYLKRYFRDVYVPMYYADILFNKLQCLKQDTRTVTSYYHDMQACLLRCGLDECEEAKELRFLCGLNKEIQDMLDCQRYTSLSHLLQLACNAESKIEERDMKEPPIPLFTLKVKAPPSSEEDIKGKVNGIEINHVEQPLVESNAGIPLSQVDLLAVPCDKEELCDNASLISMPQLVNEHDISRVSLCADFKHAVHIANEVEERKLLSSLNTLGYVQFDDFCELDNLKEKLFAKSDLPCPTNAIFHIIGKYNDRGIYLVHRVFICSDVEKHVIANHTTSSFSCFDXMKQVILNGLCEEHHMEKPRTVFREEGEDDVTMATTDTSVAHIMDEQQDIKFKSSKCWNPIRPPATLLTSNGYQICIRPPFLAHEYLMESSRSSLSNRSSLITRLHLV

SEQ ID NO: 195978 - protein, 594 aa, Oryza sativa
  Clone ID: PAT_MRT4530_91874C.1.pep
MPGLRKGIREHQLLHLRRDMTTSPRYAYEVHDYNFEQVASKLPFYDGKYDSVAYIDWELAVDNEFDIYDFSDAQMIKAASNKFTSSALFWWTYVSNKPETWDELKTMMRKRFVTSYYKCTLREKLEHLKQGDRTVREYIHEFKVCIIYSGLKECNENTTRRFFNGPSSEIQVLLDSVTYNHIGHLFMLARSIESQIISKARMHDQCDLSPISESPIYLCNDDVQTLEEQSFVSPVTNVLQEDQHIQEKVNGILEKKEDEAPAMSKESSQGKLNGAERNEGEYSQGELHLSTFHAIVEQPLVESIAELPLSQVDLLAVPCDKEELCDNVSLISMPQLVNEHVSSTISLCADSKHVVHIANEVEECELRSSLNTLGYVQFDDFCELDNLKEKLFAKSDLPYPTNAIFHIFGKYNDRGIYLVHRVFICSDLEKHVIANHTTSSFSSFDWMKQVILNGLCEEHHMEKPRTVFHEEGEDDVTMATTDTSVAHIMDEQQDIKFESFKCWNPIRPPATLLTSNGRRICIRPPFLARIGLIFTGKINNPRRGVSIAKAQHNVSYGCSRIVNVFPQIVVISTHRKIGPTTALSDEWNSGFINT

SEQ ID NO: 195979 - protein, 278 aa, Oryza sativa
  unsure (1)..(278): unsure at all Xaa locations
  Clone ID: PAT_MRT4530_91875C.1.pep
LVHESSSDDDDDFFXVAAQIMHSYWYSVNTSKHGGYVMGHEVVDRNRETXHLKFYQDYFFDNPTYDLVLFKHRNRMSRPLFLCIINAIEDQDDYFVQKINAISILGLSCHQEITAAIRQSAYGIAADALDEYVGLAESTAIENLRRYVKAIVEVFEHEYLRSSNENDTTRLLALGENRGFPSMLGSVDRMHXKCKNCPTECXGYVXGHVHEPIMILEXVASKDLWIXTRFTFFCLHGSHNDINVLHRXSPLFAKVAAAKLTSKQNPKCKMVAARSLYR

SEQ ID NO: 195980 - protein, 534 aa, Oryza sativa
  unsure (1)..(534): unsure at all Xaa locations
  Clone ID: PAT_MRT4530_91876C.1.pep
MATTDTTIAYIMDEQEDIKVKASKCXNPIRPPAALLISNSRQISIRAPFLAQMKKQGAASPVMGLWAYNFVWDPGPRIGLICTGKINNSRRGVSIAKAQHNISYGCSRIVNVSPKSHRHRRVLVVVGIFENGTASLPVFYFFSFQKFLSPYSKCLPRHRYIQTPLGCLVESVYITIPLALEVRNHKKEERDMKEPPIPLFTLKFEAPPSSEEDIKGKVNGAEINLVEQPLVESNAEIPLSQVDLLAVPCDKEELCDNALLISMPQQVNEFAIPNVNSANFKHVVHIAHEVQERQLISSLNTLGYVQFDDFCELDNLKEKLFVMSDLPCPTDVTFHIFGENNDVGVYLVHRVYIYSDLEPPVHVDKTCKLERNVIANQIISSLACFDWKKQVVVNGLHKEHHMEKLRTVFREEGEDDVTMATMDTTIAHIMDEQEDIKVKASKCWNPIRPPAALLISNGCQISIRAPFLAQMKKQGAASPVMGLWACNFVWDPGPRIGLICTGKINNSQRGVSITKAQRNVSYGFSRIVNVSPKL

SEQ ID NO: 195981 - protein, 190 aa, Oryza sativa
  Clone ID: PAT_MRT4530_91877C.1.pep
MATTDTSVAHIMDEQQDIKFESCKCRNPIRPPATLLTSNGHRICIRPPFSAQSQAQGVASPIMGLWACNFIWDPGLGIGLICTGKINNPRRGLSIAKAHHNVSYGCSWIVNVSPKSRRRLRVSVIVGTYENGIGLLPRFYFCSFQKFLPPYSKCLLRHRYIQPPLGCLVESVYVTIPLALVRICKSSVKS

SEQ ID NO: 195982 - protein, 76 aa, Oryza sativa
  Clone ID: PAT_MRT4530_91878C.1.pep
PARPHQLPPKKTLLPSSRICPKKLNKRAAKIRVGIRRQRRDRAEVAGFLRSEPLPLAVAREGFGGRKKRILVNDER

SEQ ID NO: 195983 - protein, 566 aa, Oryza sativa
  unsure (1)..(566): unsure at all Xaa locations
  Clone ID: PAT_MRT4530_91879C.1.pep
MATTDATIAHVMDEQEDIKIKSSKCWNPIRPPTTLLTSNGCRICIRPPFSAREYLMESSWSPLSNGSSLIAKFHLIEPQLKQQGAASPIMGLWACNFVWDPGPGGAHVXIGLICTGKISNPRRVITTHRKIGPTTALSVERNXRVHQVVSELSLLGIRKIIGDSCAQHRHLRRDMRRDQHDHYEEVHNHEKEERDMKEPPVPLITLKVEAPPLSEEGIKGKLNGAEINKAEQPLVEPTAGIPLSQVDLLAVLCDKEELCDNASLISMPQLVNEHAISSVSLCADFKHVVHIANEVQERKLLSSLNTLGYVQFDDFCELDNLKKKLFAKSDLPCPTTAIFHIFGESDNRGIYLVHRVYICSDLEPPIHVDKTCKLERNVIANQIVSSLPCFDWKKQVVVNGLRKEHHMEKPRTVFREEGEDDVTMATTDATIAYIMDEQEDIKIKSSKCWNPIRPPTTLLTSNGCRICIRPPFLAREYLMESSWSPLSNGSSLIAKFHLIEPQLKQQGAASPIMGLWACNFVWDPGPGIGLICTGKISNPRRGVSIAKAQHNVSYGCSRIVNVSPKS

SEQ ID NO: 195984 - protein, 51 aa, Oryza sativa
  unsure (1)..(51): unsure at all Xaa locations
  Clone ID: PAT_MRT4530_9187C.1.pep
SEQFITDQESLXCPFITLGIVICDRVLMAEIVSSVVVHEAVXQIIHGLVNW

SEQ ID NO: 195985 - protein, 66 aa, Oryza sativa
  Clone ID: PAT_MRT4530_91880C.1.pep
MILHHSLQVEARPAPAIQRETLHEANILQCDLSRTEHERTIQMAAAAEARLELAYGVLLPYKIRCV

SEQ ID NO: 195986 - protein, 995 aa, Oryza sativa
  Clone ID: PAT_MRT4530_91881C.1.pep
MAGLCKGKRDDHAQHRLLHHQRDIVTSSRIAYEVHDNDLAKVESNLPVFDGKYDSAAYVNWELAVDKQFDEYDFSNAQMIKAASNKCTGSASFWWYTVGNKLETWDECKTMMRKNIVFSYYKRTLLEKLEHIKQGDKTVREYFHDFKICITYSGLKENENTMTRFFRGLNSDIQAGLINVTYNHISHLFMLACSVESNILKSPREKRAMLVPPISDILQGAQNIHHEEKSNMIEMPSTSLTKEEEKIDAPTSFEERITSNLNGAAINQVEQPLVEPIAEMPLSQVDLLVVPCDKEELCHNVSLISMPQLVNEHVSSTISLCADSKHVVHIANEVEERELLSSLNTLGYVQFDDFCELDNLKEKLLAKSDLPCPTNAIFHIFGEYNDRGIFLVHRVYICSDLEHLVVLDKICKLERHVNANHIISSLSCFDCKKQVVFSGPSEEHHMEKPRTVFHEEGEDDVTMATMDTTIAHIMNQQEDIKIKSSMCCNLIRPRATLLTSNGRQIYIRAPFWAREYLMESSRSPPSNGSSLISEFYLVWPQSQKQGIRLICTGKINNPRRGVSIAKLLTKVIANRLSKVAQKTISESQTAFIPGRQILDGVVILHEVLHEVKIKKQSGIIVKFGFEKAYDKVQWQFLFDVLERKGFDEKVIGWIKHATLNGKVAININGNTEEFFRTYKGVRQGDPLSPLLFNYVANALSEMLTRAKEADHIRGLVPHLVEGGLTYLQYADDTTLFMSLSDENICTAKFLLFCFEEMSGLKINYQKSEMNSIRSRFFWEGLEMKRKYHMVRWEALCRPKDFGGLGFSNTRVMNIALLSKWIIKLESGCNDACCKLLRNKYMQEGGFFQSNARGASQFWKGLYEIKKWLSLGSAYELGNAKFLWCCVRDALLWKEIPTSRVELLDITKSVSNRRAILCLFAACFWAIWLVRNDWVLNDKLLKDVTQLPHKVMSFLMQWRSLAQQKLMGSWIRFRYYCVPAFTRWGSKGMRQAPGQG

SEQ ID NO: 195987 - protein, 79 aa, Oryza sativa
  unsure (1)..(79): unsure at all Xaa locations
  Clone ID: PAT_MRT4530_91882C.1.pep
GRVGVETLDAVMAKNAVIVRKSREKLTCEQHHHPPARQQQQQAHQHHQQLAAGQTRXEMFDLLSSLPSTSSASLNDQPS

SEQ ID NO: 195988 - protein, 133 aa, Oryza sativa
  unsure (1)..(133): unsure at all Xaa locations
  Clone ID: PAT_MRT4530_91883C.1.pep
DVTMATTDTTINHIMDEQEDMKIKSSKCWNPIRPPNTLLTSNGRRISIRPPFSACEYLMESSRSPLXNGSSLIAKFHFSRQQLKEQGATTPVMGLWACNFVWDPGPSGAHVGCIPIRWRTHYLYNQVRTPRSI

SEQ ID NO: 195989 - protein, 251 aa, Oryza sativa
  Clone ID: PAT_MRT4530_91884C.1.pep
MASSSSTSNSAISSVVASAVATTTPGAGSPCAACKFLRRKCLPGCVFAPYFPPEEPQKFANVHKVFGASNVTKLLNELLPHQREDAVSSLAYEAEARVKDPVYGCVGAISVLQRQVHRLQKELDTAHAELLRYACGEVGIPTALPVTAAPRLAAAMPAPGQLAAAVSAGMYGGGRRLGVIDGGGIAPPSPHTAGCYYARNNNAGSIGADVAPVLPYASVANWTVNAISTTTTNSGSESIGMDHKEGGDSSM

SEQ ID NO: 195990 - protein, 64 aa, Oryza sativa
  unsure (1)..(64): unsure at all Xaa locations
  Clone ID: PAT_MRT4530_91885C.1.pep
CWPDLSVSXDNYDLXEKTLTIRLQPYKTLCCALAIDTPLHGLLILPVQINLIPASKSKKQARTR

SEQ ID NO: 195991 - protein, 162 aa, Oryza sativa
  Clone ID: PAT_MRT4530_91886C.1.pep
DCSLLLHGDLATAAVGLSSPSSPTPAGLSSPAPTAPAPQPATAVPSLAASSPRPVPPLPRTSSSRVAAPPPHPPLCRPVRHLSPPPLLSSALTPNLTAHHRFVGRRATSPHSSPPPPTSPLPATPDPAATCARSHCERLVLAPPPPAPLGRLSPAVVAPPDP

SEQ ID NO: 195992 - protein, 323 aa, Oryza sativa
  Clone ID: PAT_MRT4530_91887C.1.pep
MSRRSVNPSRRVADGGLPSVGGLLHPKSRSPPVLTIALVVLGVIILIAYFNSGSGVTVTSREAVSRSEGSCTPEVMQALPYLKKAYGNELHKVLHVGPDSCTVVSNLLKEGKVEAWGVEPYDLEDTDSSCKSLVRKGFVRMADIKFPLPYRQDSFNLVIVSDALDYLTPRYLNKTLPDLARISTDGLVIFAGNPGQQKAKVSELPKFGRQLHHQTETEVERVLALLSSIVFAWQEEEEEEEEEEEEEEEAMEGLLPFLYRAIVHYANGGQTPIGNPFTNESPSASPRAPYYVRLAGGAADSGRLRFAEVPVFPSPASRDAQLL

SEQ ID NO: 195993 - protein, 186 aa, Oryza sativa
  unsure (1)..(186): unsure at all Xaa locations
  Clone ID: PAT_MRT4530_91888C.1.pep
MATMDTSVAHIMHEQQDIKFKSSKCWNPIRSPATLLTSNGRRICIRPLFSAREYLMKSSRSPLSNGSDQIAKFHLNQQQLKKQYATTPLMGLWACNFVWDPGPSXGPCGVRPNQVEDDIAFILFLLVSSXACRNKVDLHRQDQQPTKRCIDRXGATQQRLSTTHXKIGPTTALSXLEWSSGFISFE

SEQ ID NO: 195994 - protein, 323 aa, Oryza sativa
  unsure (1)..(323): unsure at all Xaa locations
  Clone ID: PAT_MRT4530_91889C.1.pep
LCDVTIATMDTTIAHIIDEQEDIKVKASKCWNPIRPPTALLISNGHQISIRALFLAREYLIESSRNPLSNGSSLIVKFHLIEPQLKQQARVSARPSVCLFGTPLYHVSIHICASCLSSNSVAFYLVLACSRLRAGIGLICIDKINNPWRAVLIAKAQQNVLYGCSRIVNVSPKSXVITTHRKIGPTTALSVERNSGFIRWYQSFRCSRLVRLVFRVLVTFYTRVIAASVSLLSSGPTKTESACCHGSIFVVFKSFYRSVLVLHQGFVVYPGLVLVLWFCFALEEEEGERNIEDLFGFGWVEGKKKKGKNRIGKKKKIRSGGNP

SEQ ID NO: 195995 - protein, 70 aa, Oryza sativa
  unsure (1)..(70): unsure at all Xaa locations
  Clone ID: PAT_MRT4530_9188C.1.pep
GFKTGERIESILDSISLSAQVRYDKTPEEGIQERRFFDAXINPKEWHDLLTAKFRSIVQSSVRHSSLSVP

SEQ ID NO: 195996 - protein, 73 aa, Oryza sativa
  Clone ID: PAT_MRT4530_91890C.1.pep
MAEEGDKMGFFPRLRGRGAALPVAAARLRWVLLPRALLTSLGRGNLASRVAWRWTRGEAAGIGWSGTRRRAWR

SEQ ID NO: 195997 - protein, 38 aa, Oryza sativa
  Clone ID: PAT_MRT4530_91891C.1.pep
VFERCSQWTRVIIFVVSNCLFSGLPSIQVYHMHLLQLK

SEQ ID NO: 195998 - protein, 71 aa, Oryza sativa
  unsure (1)..(71): unsure at all Xaa locations
  Clone ID: PAT_MRT4530_91892C.1.pep
GKGLLKGGTKRHRMVLRDIMQRITIPAILKLARRGSLIRISSLIYXETRGVLKIFLENVIRDAVTXYTEHA

SEQ ID NO: 195999 - protein, 104 aa, Oryza sativa
  Clone ID: PAT_MRT4530_91893C.1.pep
FFKITLQLMHPSGQALHSKVSTIARHNSANQGNSVALTEVFKHNSIDNALQSVVGHKREVHDLTPKKNIGREDTHSRAKKIGKARPDSSYANFTNSQLLTTSRF

SEQ ID NO: 196000 - protein, 178 aa, Oryza sativa
  Clone ID: PAT_MRT4530_91894C.1.pep
ELWYESWISHLVQKVGKMVALGTIQRTDKNAISVDGQALNDCVDILVNIVFNQHTIIPRAYGMISKLGSAQARCIPWPRDNLMHPSGQALHSKVSTIARHNSANQGNSVALTEVFKHNSIDNALQSVVGHKREVHDLTPKKNIGREDTHSRAKKIGKARPDSPYANFTNSQLLTTSRF

SEQ ID NO: 196001 - protein, 71 aa, Oryza sativa
  Clone ID: PAT_MRT4530_91895C.1.pep
KSSRKKKNKKKKKKKKKIKKKKKKKKKKKKKKNNKKKKKEKINILMDVIIHLGGGVGNLYYTYILLFMYNI

SEQ ID NO: 196002 - protein, 165 aa, Oryza sativa
  Clone ID: PAT_MRT4530_91896C.1.pep
MPPLATMSSPGSLLLLTPAVYQGIGRNRGGQSQEGQSISSSRSLKTKLSVSARAVSSCEASMRITCCANQTQTARRKSFSGPTSPPSGSVKEKVRSPKLDDGGTGFPPFRFGGGGGGGGGGGSNSAGGFILFVIVLLLDYLREFERNLQNGTRRGSDYDNGLAPQ

SEQ ID NO: 196003 - protein, 62 aa, Oryza sativa
  Clone ID: PAT_MRT4530_91897C.1.pep
MNLKAPMQIQLAYTNYQDDWVMSMENIQNKKFNIFGGTPQCPKILLEAKTKNICISPSIIWD

SEQ ID NO: 196004 - protein, 201 aa, Oryza sativa
  Clone ID: PAT_MRT4530_91898C.1.pep
MSSPGSLLLLTPAVYQGIGRNRGGQSQEGQSISSSRSLKTKLSVSARAVSSCEASMFYTVKSFIDQFIGYNILILRNTFISMMLLNLEVQTRSSNQQKRITCCANQTQTARRKSFSGPTSPPSGSVKEKVRSPKLDDGGTGFPPFRFGGGGGGGGGGGSNSAGGFILFVIVLLLDYLREFERNLQNGTRRGSDYDNGLAPQ

SEQ ID NO: 196005 - protein, 138 aa, Oryza sativa
  unsure (1)..(138): unsure at all Xaa locations
  Clone ID: PAT_MRT4530_91899C.1.pep
MARGDGARRRAAATXMAARLGGGTAARRLSGDARXRGRERKGGGDASPTRIDDGERRETXRRRDVLRDDQKNTTGKVREXERDRSELGRQPKAATVAMLTGARGTAGSSGGFARRRGGRGGAQAREPDDGDGGTRRQL

SEQ ID NO: 196006 - protein, 42 aa, Oryza sativa
  Clone ID: PAT_MRT4530_9189C.1.pep
TCEHVSSSFRRAFKSYYEVLSAREVPGLLEVEVKSHSDTEEC

SEQ ID NO: 196007 - protein, 43 aa, Oryza sativa
  Clone ID: PAT_MRT4530_918C.1.pep
MTWRAPSPGSDHGQVRTGKVVVGDGEMIYPRGGSYPVSVGTKV

SEQ ID NO: 196008 - protein, 212 aa, Oryza sativa
  unsure (1)..(212): unsure at all Xaa locations
  Clone ID: PAT_MRT4530_91900C.1.pep
YLTFTRPDISYDVQQVCLHMHDPQEPHLATLKRIIHYVHGTLDYSLHIHRCPTIDLVSXSDVNWAGCPDPRWSTSGYAVFLGDNLISWSSERXNTVSCSSXEAKYRVVANAVAETCWLRQLLHEFHTPQRKATLVYCDNVSVVYLSINLVXHQRTKHVEIDLYFIRDRVATGXVRVRHVPTTSQFADIFTKGLPSTVFSEFRSSLNVWPADA

SEQ ID NO: 196009 - protein, 66 aa, Oryza sativa
  unsure (1)..(66): unsure at all Xaa locations
  Clone ID: PAT_MRT4530_91901C.1.pep
VGRRGRTAVGFDLRRGAPGTQFRPYSEVVXNXAASTWPVVFNKRSXXWGKTLGRLTQTLNSAFASN

SEQ ID NO: 196010 - protein, 493 aa, Oryza sativa
  Clone ID: PAT_MRT4530_91902C.1.pep
MRRLAVAAAALLLVAWHFSLITMAAAQLSPPQPPDDQYDDPPMPGLPVSPPSPGYSDSPEPPLPDSPPSQEPDTPEPAPPTPPQQQQQPWQSPLPPRREPAPPRTVVPPQEPGWSSVPPPPARVINYTTTGCTTMLVFGDSTVDPGNNNRLQTAMKANFLPYGADFLGGRPTGRFSNGRLITDILGTDTNTPIALHLHLHKYFRVEQMCFDLEVGIFEDKLCGYAAEKLGIARSIPGFRDPRLRSGQLRRGVSFASAGSGYDEATARSSNALSFPNQIEDLWRYKRNLQRLVGRRRAEELVRRATFVVSAGTTDLLFHYLASNQSAAESGPQYENQLISRVANYTQVMAALGGRRFVFVGVPPIGCLPIARTLLGTGTTRCHENMNLLATSFNERLVEVVRLLKNQPNIRATFVDTYTTIGMATISPNNYGLTETSRGCCGTGVIEVGQTCRGRRACTHPSKYIYWDAAHHTERMNQIITEEVIMNSIGEIYA

SEQ ID NO: 196011 - protein, 36 aa, Oryza sativa
  Clone ID: PAT_MRT4530_91903C.1.pep
GVLFISRYTDSGSHSEVTLRIQGSCAIHKNDVCVLM

SEQ ID NO: 196012 - protein, 65 aa, Oryza sativa
  Clone ID: PAT_MRT4530_91904C.1.pep
PDVVYIWCWTSMESINTPFFWWGLFYLHVEIACLSTDLLNFWRHKIPLITVGLHVYALCHTTAQA

SEQ ID NO: 196013 - protein, 65 aa, Oryza sativa
  Clone ID: PAT_MRT4530_91905C.1.pep
MVQASPFCGKPNEDASAHLQQFLEMCSSYIVKGVSPDAIRLRLFPFSLLGRAKQWFYANCAMVDT

SEQ ID NO: 196014 - protein, 62 aa, Oryza sativa
  Clone ID: PAT_MRT4530_91906C.1.pep
QMGSGLILRQQKWYHNISHKREILTCINKLRGRTFKKTKNWTHTFPKKRKIRDAKSSCGGGL

SEQ ID NO: 196015 - protein, 129 aa, Oryza sativa
  unsure (1)..(129): unsure at all Xaa locations
  Clone ID: PAT_MRT4530_91907C.1.pep
PPCPWPGRDLRPPPLLPPAPPLPWPRPERPPPRAPPPPRWLPPAPPPRPPPALPPPWPAPPHPPPGAPIPPLXPPPGIPPPPXPWPASLPPPPPXPPRSWPPPLPLVSFPPTPPPPXPPKPQEPAPLSP

SEQ ID NO: 196016 - protein, 50 aa, Oryza sativa
  Clone ID: PAT_MRT4530_91908C.1.pep
YDHEDATVSFSEITIHPILPVDSSRTPLDHLIQSPEYARLYCSSASASIA

SEQ ID NO: 196017 - protein, 57 aa, Oryza sativa
  Clone ID: PAT_MRT4530_91909C.1.pep
MSNKLDLLFLLDEEPTVVQQRGKTNSHTEGYTHWIIPATEYMTSSAKKHTGTAGTST

SEQ ID NO: 196018 - protein, 57 aa, Oryza sativa
  Clone ID: PAT_MRT4530_9190C.1.pep
MGHTNLHSAGSRCNVGARLFADDVTGVRPVTNRDECLEALIIPTGRSEACDRPPVAT

SEQ ID NO: 196019 - protein, 112 aa, Oryza sativa
  Clone ID: PAT_MRT4530_91910C.1.pep
MRLTTRKRKESAQWFELMLRFIKPSSRGAIVSSSPSWRSRARGPSDLAPAVPHLVRHLKEEKRRGEERKDLAGSPRLCCVDLPPTGSGGHGKEEALVAPQGNRERCQPPRGC

SEQ ID NO: 196020 - protein, 119 aa, Oryza sativa
  unsure (1)..(119): unsure at all Xaa locations
  Clone ID: PAT_MRT4530_91911C.1.pep
TMATTDTTIAHIMREQEDIKIKVSKCWNPIRPPAALLISNGRRICIRPPFLAREYLMESLRSPLSNGSSLIAKFHPSHPRMNKQGAASPVMGLWACNFVWDPGPSGAXWGAPQPGGARP

SEQ ID NO: 196021 - protein, 655 aa, Oryza sativa
  unsure (1)..(655): unsure at all Xaa locations
  Clone ID: PAT_MRT4530_91912C.1.pep
MDSVSPMATTDTTVAHIRDEQQDIKFKSSKCXNPIRPPATLLTSNGRRICIRPPFSAREYLMESSRSPLFKGSXLIAKFLLCHAQLKEECVTSPVMGLWACNFVWDPGPXWGPCGVRPKQVEDDLXVLPYPXIAWNKVDLHWQDLQHTERCIDNXGATQRLLASTHRKIGPXTTALSVERNSGFIKWYQSFHCSAIVRLEFRVLVTFSTTVVACXVWMKTVAGDGNWRHRRRRRTARKDMLDCQRYTSLSYLIQLACNAESQIEEDMKKQYAMFLPSITNHLQEVHNDRKEDKGMDEPPIPLFTLKVEAPPPSEEGIKGKLNGAKINQGECVVNKLNLSTFHAKVEQPLVEPTAEIPLSQTDLFAVPCDKEVLCDNASLISMPQLVNEHAISHTSSLCDDFKHVIHIANEVEERELTSSLNTLGYIQCDDFCELDSLKAKLFAKSDLPXPTNAIFHIFGEYNDREIYLVHRVYICSDLERHVISYHITSSLSCFVWMKQVVLNRPXDEHHMEKSRTVFYEEGEDDVIMATMDTTIAYIMDEQQDIKFKPSKCWNPIXPPAAQLASNGHRIYIRPPFSAHEYSMESFRSLLSKRSXLITKFFVSHVQLKEQCVASLVXLWACNFVWEPGPXWGPCGVRLNQVEDXPRVLLEVLPHV

SEQ ID NO: 196022 - protein, 210 aa, Oryza sativa
  unsure (1)..(210): unsure at all Xaa locations
  Clone ID: PAT_MRT4530_91913C.1.pep
LGSPSKHDVIMANIDITIAHIMDEQEDIKIKSSKCWNPIRPPATLLTSNGRRICIRPPFSAREYLMESSRSPLSNGSSLITKFHVIWPQPHKQGAASFVXASGLVTLFGTPAYGTPTYHLYSILICNSDCFYLVLACFFDLVVGIRLICTGKINNLRRGVSIAKAQHNNVSYGCSRVVNVFPKSXLSTTHRKIGPTTTFSVSSETQASSK

SEQ ID NO: 196023 - protein, 176 aa, Oryza sativa
  Clone ID: PAT_MRT4530_91914C.1.pep
MLVSAEGGSGSGGSLCRLSSPFGGGEVKFRDEKIALQLYHRCQLSSSPLPGLGWRIRYLQAQSSLPTIVVAPTVVESGAVGSLVLVAPAGSYSQGHCHHFLSPPLPLPAASTLDPPSPSFPPILPNAGEPATMLRRCHTPSSRGKRGRSSRQGSVKGPVDADPPAIEPPAKPSTCR

SEQ ID NO: 196024 - protein, 164 aa, Oryza sativa
  unsure (1)..(164): unsure at all Xaa locations
  Clone ID: PAT_MRT4530_91915C.1.pep
MATTDATIAHIMDEQDDIKVKASKCWNPIRPPDALLISNGRQISIQALFSAREYLMESSRNPLSNGSSLIAKFHLGPLGLNKVDLHRQNQQSTEXLSSIHRKIGPXTTALSVEWNSGFIRWYQSFRCSLSMVMFESPEDEDEDEDKIKCFTQNEVRVTAHTVYA

SEQ ID NO: 196025 - protein, 217 aa, Oryza sativa
  Clone ID: PAT_MRT4530_91916C.1.pep
MDGYGTTEFGFATSTAECIRQTLDATQQPQDRPTKTSENYKNGTVAVILNGLCEEHQMEKPRTVFREEGEDDVTMVTTDTSVAHIMDEQQDIKFESSKCQNPIRPPATLLTSNGRRICIRPPFSAHEYLMESSRSPLSNGSNLIAKFHLSRQKLKKQVAVTPVMGLWACNFVWDPGPRIGLICTGKINNPRRGVSIAKAQHNVSYGCSQIVNVSPKS

SEQ ID NO: 196026 - protein, 98 aa, Oryza sativa
  unsure (1)..(98): unsure at all Xaa locations
  Clone ID: PAT_MRT4530_91917C.1.pep
PVSSKAKPCSPRATASLSLPQFWPTPSVAAAPPPRHHRAPCRATGLASISSCXRQRSSRQPCAVTDERRRAAAMAEHGQGAMATLPPPPSLTSGCSRT

SEQ ID NO: 196027 - protein, 320 aa, Oryza sativa
  unsure (1)..(320): unsure at all Xaa locations
  Clone ID: PAT_MRT4530_91918C.1.pep
RTQYTPISHLKQGDKTVQEYFHNFKICITFSGLKESNENTMTRFFRGLNSDIQARLINVTYNHIGHLFMLACSVESNILKNPREKQAMLVPPITDILQGAQNIHHEEKSNMIEMPSPSLTKTEEKTDAPTLSEXGIKGKLNGAAINQEEQPLVEPIAEMPLSQVDLLAVPCDKEELCDNASLISMPQLVKEDAISIVSLCVDFKHVVHIANEIEECELLSSLNTXGYVRFDDFCELENLKEKLFAKSNLPCPTNAIFHIFGEYNDVGIYLVHRVYICSDLEXLVHVDKTYKLERNVNANQIISSLPCFDWKKQVVLNGLR

SEQ ID NO: 196028 - protein, 634 aa, Oryza sativa
  Clone ID: PAT_MRT4530_91919C.1.pep
MATTDTTIAHIMDEQGDIKIKSSKCWNLIRPPTTLLTSNGHRICIRPLFSARIRLICTGKINNPRRGVSIAKGYTKSLELFVLNVDIFTFDNTWQVTNMTQISGLQESNENTMTRFFRGLNSNIQAGLVNVTYNQIGQLFMLACNVERKILENPTEQQAMLVPPITDILQEVQNSPQNEKNDMFEMSLPSLANEEKADAPTLSEEGIKGKLNGVEITQGECASDELHFSTFHAREEQPLVKPIAEMPLSQVDLLAVPCDKEELCDNASLISMPQLVNGHAISSISLCADFKHVVHIANEVEERELLSSLNTLGYVQLDDFCELDNLEEKLFAKSDLPCPTNAIFHIFGEYDDRGIRLVHRVYICSDLEPPVHVDKTCKLERHPTVTPLPKSPPPPQPTVGWREARRDGGEQDDGEEGVGRWWHGAEMLTTAGPTGPGGDRAAALDKEVAAATARGKGICVGVATRRGWEEAPACRPPVSLSYLWVGDQGDDGVIFLEPGKTVAATRGEADGRRWWRASCSGGVVASPARFGAVMLASPTAANRWFLLRPARLPLPLALPAAHAPRRRQPRLCHRVPRRPRPSPRRRWRHWGWSQMGGAAAKALVVGKAFPGRGHARGIGMFVFGQPNRPTTFGQ

SEQ ID NO: 196029 - protein, 129 aa, Oryza sativa
  Clone ID: PAT_MRT4530_9191C.1.pep
MPDPASPGGGTPDLIGPNLVGCHIQPPRGQEVGGTLDLTAPNTVVAGSGIGHVISPTHEHPRPSASTSSSGCHDHRLLCPQEPVDASPSSSSGYRLFHPKLHLPPPSLLFNLQKTTTDGGSGGGGGPGG

SEQ ID NO: 196030 - protein, 96 aa, Oryza sativa
  Clone ID: PAT_MRT4530_91920C.1.pep
MGLSGKWQKNKRPYELADHKRHLTIFSQGAWGILLLGWCRRGEEPVWPAAAGQDGGVARGRTLAGLPIPLVSLPASISAHVRRPPYPMAATPPLSR

SEQ ID NO: 196031 - protein, 341 aa, Oryza sativa
  unsure (1)..(341): unsure at all Xaa locations
  Clone ID: PAT_MRT4530_91921C.1.pep
VGLGRYSCLWLGWVGNYVTSSFRIPYTWKDLKRYFRDVYVPMYYADILLNKLQCLKQDTKSVTSYYHDMHSCLLRCGLDECEEATXLRFLRGLNKKIQDMLACEKYRSLSHLLQLACNAESKIEXDMKKKHAMSLPPITNHLQEVRNHEKEERDMKEPPIPLFTLKFETPPSSEEDIKGKVNGTEINQGEQPLVEPNVGIPLSQVDLLAVPCDKEELCDNASLISMPQLVNEHAIPSVSLCADFKHAVHIPNEVEERKLLSSLNTLGYVQFDDFCALDNLKEKLFAKSDLPYPTNVIFHIFGEYNDLGIYFVHRVYICSDLELTVHVDKTYKLERNVIANQ

SEQ ID NO: 196032 - protein, 471 aa, Oryza sativa
  unsure (1)..(471): unsure at all Xaa locations
  Clone ID: PAT_MRT4530_91922C.1.pep
MATTDTSVAHIMDEQQDIKFESCKCRNPIRPPATLLTSNGHRICIRPPFSARIGLICTGKINNPRRGIRNIIGDSCAQHRHLRRDMRRDQHDHYEVSDDVLGKIKSALPYFEGNYDPRAYINWELAVDSEFQKHVLSEKQKVMCASSVLVKHASNDXKHLCRHNKIPQSWKDLKRYFRDVYVPMYYADILLNKLQCLKQDTITVTSYYHDMQACLLRCGLDECEEAKELRFLRGLNKEIQDMLDCQRYTSLSHLLXLACNAESKIEXDMKKQHAMFLSSITNHLQEVHNHEKEERDMKEPPIPLFTLKVEAPPSSEEDIKGKVNGTEINQGEQPLVEPNAGISLSQVDLLAVPYDKEELCDNASLISMTQLVNEHAISSISLCADFKHAVHIANEVEERKLLSSLNTLGYVQFDDFCELDNLKEKLFAKSDLPCPTNAIFHIFSKYNDRGIYLVHRVFICSDLEKHVIANR

SEQ ID NO: 196033 - protein, 441 aa, Oryza sativa
  unsure (1)..(441): unsure at all Xaa locations
  Clone ID: PAT_MRT4530_91923C.1.pep
MPTTDTTIDHVIYPQAEMELKSPAFWNPIRPPKIVLNSNGRQISIWPPFWAQLKKQRAALSVMGLWASNFVWDPSPRIRLICTGKINNPRRGVSIAKAQHNNIXYGCSRVVNVSIKSRRRLHVFGVVGTYENGIGLLPRFYFCSFQKFLRLYSKCLPRHRYIQTPLGCLVESVYITIPLALEVQNSPQNKKNNMLDMSLPSLANEEKADAPTLSXEGIKGKLNGAEIXKVSNFHADLEQTLVEPTSELPLSQVDLHSVPCDKEELCDSTSLIXIPQLVNEHATFNLDSPCTEXKHVIHTSNENDELQLQSSLNTLGYIMFDDSCELNCLKDKIFANSDLPCPRNVIFHIFGKYNGRGIYLVHKVYICSDMQPSIVVARKCKLETSVRTTDVTSSLFCFFSKDAALCEDMLRELPKLKPRMVFREEGEEDVTMPTMDTTIDH

SEQ ID NO: 196034 - protein, 101 aa, Oryza sativa
  Clone ID: PAT_MRT4530_91924C.1.pep
GRVPEIEVRVWERSVLVRVQCGNSRGLLVRLLSEVEELRLGITHTSVMPFPASTVIITITAKVEEGFNSTVDEIMRRLNSALLDQYNNGSVEETDQEIRRE

SEQ ID NO: 196035 - protein, 214 aa, Oryza sativa
  unsure (1)..(214): unsure at all Xaa locations
  Clone ID: PAT_MRT4530_91925C.1.pep
RFKAIPSHSRRRSTFEQYVRTRADEERKEKRAAQRAAVEAYKQLLEEASEDINSNKDYKEFKRKWGTDPRFEALDRKERDALFNEKVKSIEEKVQSVRNAVIAEFKSMLRESKDITSTSRWTKVKENFRSDARYKAMKHEEREVAFNEYIAELKSAEKEAEQAAKAKLDEQAKLKEREREMRKRKEREEQEMERVKLKIRRKEXVSSYQALLVE

SEQ ID NO: 196036 - protein, 1121 aa, Oryza sativa
  Clone ID: PAT_MRT4530_91926C.1.pep
MATPATAASDATNPEAAEVPSAAPASESEGPFDSGVVAAATTPAVVDSAVEGDAPAAPAPTSGSGPAAPSMPANPASPATPGPPRPQFAGSPAYASPPAPAFSYNVLPRPSPRPQVGSGAAQQQLASPPQKLHGSLMSQHNLVLPPFHNAMMAPSVAAAALQPPVPGQYFGNRPSFSYNVVSHANAGLPTGQQFQLDTGTNHAVQVSRFVPPSSLQPPAPMNLARPSSAFPGAGAMPPNPPGSIRLPFPGPPRPSINTFVASPQQAQPQASQLPSNSVYASTNFLLYAWGSSDVSTSRSDTRSVPEASPQTMQLSTGPPSTSTAGSPSITVQMPTNPSLPTRPEVFGAIGASVPGQPSTILSAPPSLLGRPMTPSASPFPQTSQSPTAFQQPGQQQLYPSYPSAHGVQPQPLWGYPPQPTGFQQPPFQSYPSGLLGPLGRPMVGSSSVTAYLPSIQPPGVSTTDRDSKELSSANPGSEQPTQQGSQNSDQLEDKRTTAIQDSDSWSAHKTEAGVVYYYNALTGESTYQKPPGYKGEPEKVAAQPVPVSWDKLAGTDWSIVTTSDGKKYYYDNKLKVSSWQLPPEVAELIKNAESGPLKGSSTSLQDAGTIGNKEEISIDIDTPAVQTGGRDSLPLRQTVAPASSSALDLIKKKLQDAGASSVPSPLATPSSASELNGSKTTDAAPMGHQVSISGEKSKDNSGDGNMSDSSSNSDDEEHGPSEEECTRQFKVEMLKERGVLPFSKWEKELPKIVFDPRFKAIPSHSRRRSTFEQYVRTRADEERKEKRAAQRAAVEAYKQLLEEASEGHTILIHKMQDINSNKDYKEFKRKWGTDPRFEALDRKERDALFNEQVKSIEEKVQSVRNAVIAEFKSMLRESKDITSTSRWTKVKENFRSDARYKAMKHEEREVAFNEYIAELKSAEKEAEQAAKAKLDEQAKLKEREREMRKRKEREEQEMERVKLKIRRKEAVSSYQALLVEIIKDPKASWTESKPRLEKDPQGRAVNPDLGKGDAEKLFRDHVKDLYERCVRDFRALLSEVITPEIAARTTDEGKTAINSWTEAKGLLRSDPRYNKLASKDRESIWRRYADDMKTKLKQSDMKERSDTDGKQRRSSDPPRRR

SEQ ID NO: 196037 - protein, 142 aa, Oryza sativa
  Clone ID: PAT_MRT4530_91927C.1.pep
METQSSWLSICAIYNECLWIFGPVARDEFSRSSATATASDHHACARSRKQDTGAREPGSISGHWRRPVGEGLVLTDSGGVFARVWWLDRTPLSTWPATGLPGFLALFLAEEQGLQSDVMEIGELPEAQYDGMGRKLLCDLGL

SEQ ID NO: 196038 - protein, 74 aa, Oryza sativa
  Clone ID: PAT_MRT4530_91928C.1.pep
AQLVNILRNKGFQPGTILKANGFRFTTERVTVNTGQDYLLMEPQIWIFRIQPNDKRNRVAYLDKGTFSPRTEEK

SEQ ID NO: 196039 - protein, 35 aa, Oryza sativa
  Clone ID: PAT_MRT4530_91929C.1.pep
FFFRRHLRMCLGFRTDIIRKTFTVHSRTQIGWNLF

SEQ ID NO: 196040 - protein, 265 aa, Oryza sativa
  Clone ID: PAT_MRT4530_9192C.1.pep
MAATLFSTALSPHLLPLPSTSSNPASSSLSFLSKPLLPALAVAGWPRRRTSPFVPVAVAVSEEVETEEDEEEEEEGSGGEEFSDDLRVFVGNLPFSVDSAQLAGLFEQAGSVEMVEVIYDKLTGRSRGFGFVTMSSVEEVEAAVEQFNGYILDGRSLRVNSGPPPPREQSSQRAPRGEANRVYVGNLSWGVDNAALANLFSGEGEVLEAKVIYDRESGRSRGFGFVTYGSAEEVENAVSNLDGADMDGRQIRVTVAESKPPRRQY

SEQ ID NO: 196041 - protein, 220 aa, Oryza sativa
  Clone ID: PAT_MRT4530_91930C.1.pep
GSPGLQVQADRLYLANNAFDGIVTPNLGRLQPLLELDLSNNNLQGSIPPELGNLKQLYILDLSSNKFSGAIPETLGQCQNLVILQMEQNVLTGNIPTTFTNLNSLSLLNLSHNALSGPLPAVLNDLKLLTKLDLSYNNFEGEIPRNGIFDNSTVVSLDGNAGLCGGAMTLRMRPCPVSHRAISVNRLIKILIPIFGFMSLILLIYFLLLGKKRSEEHHIR

SEQ ID NO: 196042 - protein, 87 aa, Oryza sativa
  unsure (1)..(87): unsure at all Xaa locations
  Clone ID: PAT_MRT4530_91931C.1.pep
RTEKLESRHMTWRAKSVETMKLLEHTYGAXDLETCTDTSLTPCATYYLTRVDSMYIIFYERKADKDIAAIDVKISNGHAHDVYADGH

SEQ ID NO: 196043 - protein, 63 aa, Oryza sativa
  Clone ID: PAT_MRT4530_91932C.1.pep
LTTIILPTIAFSICFIPILHYTPQSIYHLLTINNFIHITYHTNSLHCYAITFLFHFLCCSLLL

SEQ ID NO: 196044 - protein, 124 aa, Oryza sativa
  unsure (1)..(124): unsure at all Xaa locations
  Clone ID: PAT_MRT4530_91933C.1.pep
RRNIFLELMPKIXRFYVFYQVXKGRSLXVSAAAEGPXARVKLVGXRRXRRXXRYPDPXKPXSXXATTXYRYGRXXMTSPEEEELPPXXGRRRGGXPRRXEYXGGYRYVVXAXXXXFXWXGGXXA

SEQ ID NO: 196045 - protein, 45 aa, Oryza sativa
  Clone ID: PAT_MRT4530_91934C.1.pep
LIICCNMTNKQTNCQHILYSCYWLEVFRFHAILSSLSFLCTFFFS

SEQ ID NO: 196046 - protein, 44 aa, Oryza sativa
  Clone ID: PAT_MRT4530_91935C.1.pep
EQEFHSSVRSLYINHYTLVKIYNKKKTVQIYLLYFTIHLYNGLS

SEQ ID NO: 196047 - protein, 34 aa, Oryza sativa
  Clone ID: PAT_MRT4530_91936C.1.pep
MDSVGFTATAFSWNLGDDHGAAAQSEMHWIIGNG

SEQ ID NO: 196048 - protein, 112 aa, Oryza sativa
  Clone ID: PAT_MRT4530_91937C.1.pep
MYAATTASSAAAAGGASPRAPSRHSAPDSSAGVITPSPSRSNISNTRRSRSVSALRRWAACRCGCTTDAGARDAAALAVRTDEGGGGRSMLMERYLVFTNGNDDDTSRVLLE

SEQ ID NO: 196049 - protein, 89 aa, Oryza sativa
  Clone ID: PAT_MRT4530_91938C.1.pep
DEREWHIFFCDVSAFQLFDSSSRCDDQPAAIVGSTSDYSVCVYMKMNYFFVGTLISLSEMIMILATYLSCNSLESSFLSHEPCRSFSLV

SEQ ID NO: 196050 - protein, 168 aa, Oryza sativa
  Clone ID: PAT_MRT4530_91939C.1.pep
MVPHHPELLEVNLRRLSSRGGGVERPVEWDRGARGVVGHRRWSSWPSAKNCATTAAPSPAPRSLSPFFHHRFAPLATAASKGCDKRRTGGGGGNDIGLKPADELLPVGLVAAVDLVGGACCWCHCRACWTEPSPPNSAWSKSGKPTEAGGASARKGGVLVRKEERGAG

SEQ ID NO: 196051 - protein, 163 aa, Oryza sativa
  Clone ID: PAT_MRT4530_9193C.1.pep
MASDGASVMTGSGGRRHTLGSGDTRGSGRVHGSDRRKMEKDEGGEGVVYIGAARLDVAERGLKTAGDVGGDWRWLSAVFCGDSGGSGHEGGWRPVHAHAGRGGAWEKRRRGARLAAMAAVGGGLEVGGRADGWGPQVHLSAGGRERRPEGRRNRLSRGVRKKG

SEQ ID NO: 196052 - protein, 393 aa, Oryza sativa
  Clone ID: PAT_MRT4530_91940C.1.pep
MDDPGAADPGARPHHVSPGQPPVVPRSPTPLDLSSAAAAAAAASYRRLSPSLRPPAHPQARLPSPYPQIPSSSSSAAAGSSGHHARSLSQPLFFSLDSLPPLPYADLAAPPAIPPSPPSSSSDPPPPGLPPRKGGHRRSQSDIPFGFSHLSPPLPPPAPVKREAATAAEGCRSDGDDFALYDLVNSYMDLDGMEALNSSEERHEDRDSRASGTRTGSVADSSENEAESHSTPVERKDGGGKSRHCRSLSVDSFIEKLNFDESPKLPLPSPSGGLSRSGSGSLDGGAASLFGAEFANGEFTEAEKKKIMANERLAEIALTDPKRVKRILANRQSAARSKERKMRYIQKLEHKVQVLQTEASTLSHSLKCCRRTPWTSPQNNELKLGCSMDHSPV

SEQ ID NO: 196053 - protein, 631 aa, Oryza sativa
  Clone ID: PAT_MRT4530_91941C.1.pep
MRGPAGLPLPLVVAVALAAAAVMVVEARFVVEKNSLMVTSPTSLRGRHDSAIGNFGVPQYGGSMAGTVVYPKDNADACEAYDGDRHFRAKPGALPNFLLIDRGNCLFAKKVWNAQNAGASAVLVVDDKDEPLITMDLPREDDEAAKYIQNITIPSALIDKKFGEQLKKAIKDGEMVNVNLDWREAVPHPDDRVEYELWTNSNDECGPKCDMLMNFLKEFKGAAQLLEKGGYSQFTPHYITWYCPQAFVVSKQCKSQCINHGRYCAPDPEQDFSTGYEGKDVVVENLRQLCVFQVAKESKKPWIWWDYVTDFHIRCPMKDKKYNKKCAETVIKSLGLDVKKVDKCMGDPNADSDHPLLKMEQDAQIGKGSRGDVTILPTLVVNNRQYRGKLERKAVLKAICAGFEETTEPNVCLSDEMETNECLNDNGGCWQDKAANVTACRDTFRGRVCECPTFNGVQFKGDGYSNCEPAGPGKCLINHGGCWHETRNGKTFSACQESGNGKCQCPAGFRGDGVKKCEDINECKEKKACQCPECSCRDTWGDYECTCSGDLLYIKEHDTCISKTAVQGKAAWAAVWGILIVLVVVAAGSYVVYKYRLRSYMDSEIRAIMAQYMPLDSQGEVPNHTNDEEHH

SEQ ID NO: 196054 - protein, 59 aa, Oryza sativa
  Clone ID: PAT_MRT4530_91942C.1.pep
IWGLLRTWLGTPFPLPGDDDWEFADWIFEQKARTAAELFSDIKNEVAVWRETNILREVG

SEQ ID NO: 196055 - protein, 90 aa, Oryza sativa
  Clone ID: PAT_MRT4530_91943C.1.pep
PTHSYLQLILCAFLKNQRREQELLVDPSAPAEQKTSSGEPAHQLPQKWAHPITMPEAGCVLVATEVLDDDSIFERTVILLLRLGSRGTFD

SEQ ID NO: 196056 - protein, 149 aa, Oryza sativa
  Clone ID: PAT_MRT4530_91944C.1.pep
ECEEATELRFLRGHNKEIQDMLACEKYRSLSHLLQLACNAESKIEEDMKKKHAMSLPPITNHLQEVHNHENEERDMKEPLIPLFTLEFDAPSSSKEIIEGKLNGAEINQEVGFIYTGKINNPWRGVSIAKAQHNVSYGCSRIVNVSPKS

SEQ ID NO: 196057 - protein, 494 aa, Oryza sativa
  Clone ID: PAT_MRT4530_91945C.1.pep
MAGLSKRIREHRLLHRLQDMTTSPRDAYEVHHYNFARVESKLPFYDAVDNEFDKYDFSDAQMIKAASNKFTSSTLFWWSYVSNKPETWDEFKTMMRKRFVTSYYKCTLREKLEHLKQGDRTVVKYIHEFKVLLDNVTYNHIGHLFMFARSIESQIISNARKHEQCDLSPVSKSPISLCNDDVQTLEEQSFVSPVTNVLQGVQNIQQKEENGVLEKKEDEAPALSEEILQGKLNGAEINELNEHSISSVSLCADFKHIVHIVNEVEEHELLSSLNTYVWFDDFCELENLKEKLFAKSDLPCPTNAISYIFGEYNDRGIYLVHRVYICSDLEPSVHVHKTRKLERNVTANKIISSLACFDWKKQIVLNGLREEHHMEKPRTVFREEGEDDVTMATTDTTITHIMDEQEDMKIKSSKCWNPIRPPTTLLTSNGRRISIRPPFLAREYLMESSQSSLSNGSSLIAKFHLSRQQLKKQGVATPVMGLWACNFVWDALSL

SEQ ID NO: 196058 - protein, 652 aa, Oryza sativa
  unsure (1)..(652): unsure at all Xaa locations
  Clone ID: PAT_MRT4530_91946C.1.pep
MNPFRALVPAPLGALASNSTSSAATMDITVAHIINQEEHFKIRPSKFXNPIRAPATVLNSNGRQMCIRALFWVCEYLMESSRSRHSNGSNLIARFLLSHAQLMEQGATSPVMGLWACNFVWDTGPXWGPCGVHPKXVEDXPRILPSPXIAWNKVDLHRQDQQPTERCIDRXGATQQRLSSTHRKIGPTTALSVEWNSGFIRWYQSFRCSCVVRLEFRVLVTSSTTVIAAVVFLXVFGTYGNGIGSLPRFYFSSFQKFLSVSDLSHVFESPISLYNDDAQTNEEQSFVSPVANVLQGVQNIQQTEYNDVIEKKREKHEAPAISENSLQGKLNGAETNEGEYTQGELHISTFHAILEQPLVEPIAEMPLSQVDLIIVPCDKEELCNNTSLISMPQLVNENAISSVSLCADFKHVVHIANDVEECKLITSLNTLGYVQFDDFCELDNLEEKLFAKSDLPCPANAIFHIFGEYNDRGIYLVHRVFICSYLEKHVVANHTISSFSSFDWMKQVILNGLCEEHHIEKPRTVFREEWEDDVTMATMDTTVAHIMDQEEHFKIRPSKFWNPIRPPATVMNSNGRQMCIRAPFWVREYLMESIRSRHSNRSNLTAKFLLSHAQLMEQGATSPVMGLWACNFVWDPXPKWGPCGVRPKPGGG

SEQ ID NO: 196059 - protein, 469 aa, Oryza sativa
  unsure (1)..(469): unsure at all Xaa locations
  Clone ID: PAT_MRT4530_91947C.1.pep
MRKSFVFLYYKRTLLEKLQHLKQGDKTVREYFHNFKISITYSGLKESNENTMTRFFRGLNSDVQAGLINVTYNHIGHLFMLACSVESNILKNPREKQAMLVPPITDILQGAQNIHEEKSNRIEVPSPSLTKEEEKTDAATSSEQRTTGNLNGAAINQEEQPLVEPIAEMPLSQVDLLAVPCDKEELCDNASFISMPQLVNEHAISSVSLCANFKHVVHIANEVQERELLSSLNTLGYVQFDDFCELDNLKKKLFAKSDLPCPTSAIFHIFGESDDRGIYLVHRVYICSDLEPPIHVDKTCKLEXNVIANQIVSSLPCFDXKKQVIVNGLRKEHHMEKPRTVFREEGEDDVTMATTDATIAHIMDEQEDIKIKSSKCWNPIRPPTTLLTSNGRRICIRPPFSDREYLMKSSWSPLSNGSSLIAKFHLIEPQLKQQGIGLICTGKINNSRRAVSIAKAQYNVSYGRLERVC

SEQ ID NO: 196060 - protein, 74 aa, Oryza sativa
  Clone ID: PAT_MRT4530_91948C.1.pep
IILDIGSPEEMDEKPLVLAQAQVIELPFYKLSTQFAHLDQSKNYLLYCERGVMSKLQALYLKEKGYQNVKVFNL

SEQ ID NO: 196061 - protein, 111 aa, Oryza sativa
  Clone ID: PAT_MRT4530_91949C.1.pep
QEKNNTCANHRFRQPVLGSSLAVINQKIQREQLHLKNSLVIMQKYIPLVLKLTTKTTPLLSHPTSSGCWAWHCRWRRCSPLHPPGSFPAAASSAAKTCIPGAIQADAGSTR

SEQ ID NO: 196062 - protein, 1016 aa, Oryza sativa
  Clone ID: PAT_MRT4530_9194C.1.pep
MEPQLTPGAVQAIAEHPDGTGTIQPVLQVVDVRPVTTKNAPPTPKPAERFRMMLSDGVNTQQSMLATALNPLVKDATLRPGTVVQLTDFMCNTIQGKRSNSHSSLYVNMGDSEKVLRKMRFYLCHVSSNEILSLWGSIVSSCPMSTNIQPANMFQLATNLLARIIIVVKLDVLQNDCIVIGNPKHYEPKSLTKEQDPNLQASVAQTNNGTYSGGASMLGPSVAPRAEQAASNSSYGGPYNSAQGMLGSSIGRTVEPGPANVSAVGSYGAISAQNTTNANMMQPTSQLNIMNANTMQPTSQLNTMNANTMQPTSQLSSLNPNQNQRFAAPASGGVFGPPGNAYGQPSRPSYQQPPPVYMNRGPASRNDSATRIIPITALNPYQPKWTIKARVTAKSDIRHWSNARSSGTVFSFDLLDAQGGEIRAQCWKESADKFFGQIEVGRVYLISRGSLKPAQKKYNTLNHDYEITLDIGLSTVEVCSDDDNSIPRLQYNFRQISELENMANETIVDLLGVVTSVSPSATIMRKIGTETRKRSIQLKDLSGRSIEVTLWGNFCDAEGQQLQLQCDSGSNPIIAFKGARVGDFNGKSVSTIGSTQLIINPDFPEVERLRQWYMTEGKTAPCISLSREMLNMGRTDARKTIAQIKDENLGRLEKPDWITVKAAISHVTTESFCYPACPKLLPVGRQCNKKAINNGDGMWHCDRCDESFQNPEYRYMLRFQIQDHTGSTYASAFDEAGEQIFGRKAGELFSIRNVDQDDAQFAEIIEGVRWHLYLFKLKVKEETYNDEQSLKCTAVKVEKLDPSKESNVLLGAIDNLLLDPKGQSDLAPNAGFTDPVGGHGAPTSSNAYAMNTGGVNQFGQQASISAGMSTPLAATRNLQTCSICGANGHSAQICHVGADMDMQETSAGGSSMGNYNSIAGNGSSECYKCKQPGHYARDCPGQSTGGLECFKCKQPGHFSRDCPVQSTGGSECFKCKQPGHFARDCPGQSTGAQHQTYGNNVAASRGYNRQSFVGGY

SEQ ID NO: 196063 - protein, 181 aa, Oryza sativa
  unsure (1)..(181): unsure at all Xaa locations
  Clone ID: PAT_MRT4530_91950C.1.pep
MERTQREEDSRGVDSDCRAAPTSDGRHDFMRTPIWVCKYFMESLSSLLSNGSSHMSIYVLKRPQFFLAARVSARPSVCLYXETPTYRVYSIPICNSDXFYFVFACFFDLLAGIRLICTGKINNPRRGVSIAKAQHNISYDCSRVVNVSLKSXLSTTHRKIGQTTALSVEWNSGFIIYKHAY

SEQ ID NO: 196064 - protein, 55 aa, Oryza sativa
  Clone ID: PAT_MRT4530_91951C.1.pep
RAPALVLSKRSKGKDGRVMATDQEEDGATEEEDARKGIPFLLSSQEENIASDILQ

SEQ ID NO: 196065 - protein, 514 aa, Oryza sativa
  Clone ID: PAT_MRT4530_91952C.1.pep
MAGLRKGIREHRLLHLRRDMTTSPRDAYEVHDYNFEQVASKLPFYDGKYDSVAYIDWELAVDNEFDIYDFSDAQMIKAASNKFTSSALFWWTYVSNKPETWDELKTMMRKHFVTSYYKCTLREKLEHLKQGDRTVREYIHEFKEDQHIQEKENGILEKKEDEAPVMSEESSQGKLNGAKRNEGEYSQGELHLSTFHAIVEQLLVESIAKLPLSQVDLLAVPCDKEELCDNASLISMPQLVNEHAIPVVNTNCADFKHVVHIANRVEERELTSSLNTLGYVQFADFHELDNLKEKLFAKSDLPGPSNANFHLFGEYNDRGIYLVHRVYICSDLEPPVHVDKTCKLERNVIANKIISSLFCCDWKKQVVLNGLHEEHHMEKLRMVFREEGEDDVTMATIDTTVVHIKIKPSKFCNPVQPPTTVSTSNGRQICMRAPFWVHEYLMESSRSHLSNGSNFIAKFHPSRPKSQKESAASPIMGLWACNFVWDPGPSRAHVGNKVDLHRQDQQPTERCIDR

SEQ ID NO: 196066 - protein, 77 aa, Oryza sativa
  Clone ID: PAT_MRT4530_91953C.1.pep
LIKFSWISMKILSKTLINLFFFYALKQLCVLAHFRSIIRSFEIIWSILKNKLNKDYEKISFFIYIKKNNSANFSSTV

SEQ ID NO: 196067 - protein, 667 aa, Oryza sativa
  Clone ID: PAT_MRT4530_91954C.1.pep
MAGLRKGKQDGHAQRQHLHLRRDMTTSSRDAYEVHDYNFAQVACKLPVYDGKYDSAAYINWELAVEKQFDEYDFSNAQMIKAASNKCTGSASFWWHTVGNKLETWDECKILMRKRFVFSYYRRALLEKWEHLKQGDKTVREYFYDFKICITYSGLQESNENTMTRFFRGLNFNIQAGLVNVTYNHIGQLFMLACIVERKILENPMEQQDMLVPPITDVLQEVQKSLQNEKNDMFEMSLPSLANEEKADAATLSEESSQGKLNGAERNEGEYSQGELHLSTFHAIVEQPLVESITELPLSQVDLLAVPCDKEELCDNVSLISMPQLVNEHVSSTISLCADSKHVVHIANEVEERELLSSLNTLGYVQFDDFCELDNLKEKLFAKSDLPCPTNAIFHIFGEYNDRGIFLVYRVYICSDLEHLVVPDKICKLERHVTANHIVSSLSCFDCKKQVVFSGLREEHHMEKPRTVFCEEGEDDVTMATMDTTIAHIMNQQEDIKIKSSKCWNPIRPPITLLTSNGCRICIRPPFSAREYLMESSWSPLSNGSSLIAKFHLIEPQLKQQGAASPIMGLWACNFVWDPGPGGAHVGCAPARWSTIKSSMCCNLIRPRVTLLTSNGPQIYIRAPFWARIGFICTGKISNPRRGVSIAKAQHNVSYGCSRIVNVSPKS

SEQ ID NO: 196068 - protein, 58 aa, Oryza sativa
  Clone ID: PAT_MRT4530_91955C.1.pep
SSALAPGTGPVDDPPRGLKREFWPPGETGLHCFTNGFLDLTTGVACPPGMMRTSSFTD

SEQ ID NO: 196069 - protein, 1001 aa, Oryza sativa
  Clone ID: PAT_MRT4530_91956C.1.pep
MATTDATIAHIMDEQEDIKIKNKVDLHRQDQQPMERVYIYSDLELPVHVDKTCKLEKNVIANQIVSSLPCFGWKKQVVVNGLRKEHHMEKPRTVFREEGEDDVTMATTDATIAHIMDEQEDIEIKYSKCWNPIRPPTTLLTSNGHRICIRPPFSARIRLICTGKINNPWRVDFPPPPPLPPMDATVIAPPTTYSRSHERRCRGAPGGSGNLLTMELEEGGWIAEKERKEGGAATIQGDAESRVTSLVWARSGANGRLLSSSVDGSVAEWDLFHLRQKTVLDSVGVPVWQMAIEPSVDLMDSENKGSKVTANGHANGRTDSDSSSVDDGENTDDEDDSANTSLPYRANELQRLALACDDGSVRFYNVPESGALTYYRSLPRVSGRMLSVAWSNDAKFIFSGSSDGLIRCWDSTSFYEKYRITAGLGGAGSGNELCIWSLLFLRCGTLVSGDSSGSVQFWDSRHGTLLQAHTYHKGDVNALATVPGQNRVFSAGSDGQVILYKISKDELVADKEVAKEQVRKWVYVGYVRSHTHDVRALTMAVPICREDALPEEKTKKIRRREKPLEFSYHKWAHLGVPMLISGGDDTKLFAYSAREFTQFAPHNFCPAPQRPLINLARESIVNGDSVMLVQSANWLDVLLVVVQNKLTPSTSSRGDATVRHLARLKSKGSRKIISSATSTNGTMLAYSDCVKPCLFALRHKGGKKFTLDKLELPKGLLNSQCMLFSIDSSSLILAGRDGKIYAFVYSLLFLKANVLHFAKQVVDIATREISNVFQPMRKMDGASKEPPVTKMFLSADGQWLAAVNCSGDIYIFNLEVQRQHWFIPRMNDGSVTSGGFCPKNNALVITTSKNEVYVFDVEAKQLGDWSKRNTHHLPRRFQEFPGEVIGLSFPPLSSSSVVVYSARAMCFIDFGLPVVQDGQLPNGVVAEKIDSQKGSNKKLKRKAREEELRQEIRNNFDFFAFKDPVLFVGHLSDNSVLMVEKRWMDVVEGFGAPVHRHIYGT

SEQ ID NO: 196070 - protein, 42 aa, Oryza sativa
  Clone ID: PAT_MRT4530_91957C.1.pep
FGRKRGKPDGANGAGGKRARESESFQTGVGSKSKPCTKFFRL

SEQ ID NO: 196071 - protein, 58 aa, Oryza sativa
  Clone ID: PAT_MRT4530_91958C.1.pep
AMTDLGSNPNQGTPSNFYMGRLDTGTPPRTPRVSQPFEQNTPRPFCHGCGGQAGCPWA

SEQ ID NO: 196072 - protein, 950 aa, Oryza sativa
  unsure (1)..(950): unsure at all Xaa locations
  Clone ID: PAT_MRT4530_91959C.1.pep
MPRPRGRKRAAAAAEEEDAATRGRGKRVKASPKPETEAEYFPDKRNLEDLWLSAFPVGTEWENIDKIKEFNWNFENLEKALEEGGELYEKTVYLFGSTEPQLLGVNGESKIVLIPIVVAVDCPFPPSDKIGINSVQRENEEILPMKAMKMAWVPYFPLEDRLSRIDSLKTKIFTLGCTQRRSALRHLKTERVKLFDYCMPYYMPLNPPENEDDTVINILYPFEPPIFCEFNWEMDDYEDFADEKVKEEGLPEDEREKMKEFLKEKVRERKRELKQAKEARKKAIDDMDPKIKEAFENIQFYKFYPVKTLDTPDVSNVKARKVDLHRQDQQPTESYHNSPKDRANNSLECREELRVHQVVSELSLLGLRTGKRDGHAQRQHLHHQRDIATSSRITYEVHDNDLARVKSKLPGFDGKYDSAAYVNWKLPVEKQFDEYDFCNAQMIKAASNKCTGSASFWWHTVGNKLETWDECKILMRKRFVFSYYRHALLEKFEHLKQGDKTVREYFHDFKICITYSDLQESNENTITRFFRGLNSNIQVGLVNVTYNHIGQLFMLACNVERKILENPTEQQAMLVPPITDVLQEVQNSPQNEKNDMFEMSLPSLANEEKANAPTLSEEGIKGKLNGAEITQVEQTLVEPTSELPLSQVDLHSVPCDKEELCDSTSLISIPQLVNEHATFNLDSPCTEFKYVIHTSSENDELQLQSSLNTLGYVMFDDSCELNCLKDKIFAHSDXPSPRNVIFHIFGDYNDLGIYSVHRVYICSDLEHPVHVDKTCKLEKXVIANQIVSSLPCFDWKKQVVVNGLRKEHYMEKPRTVFRKEGEDDVTMATTYATIAHIMDEQEDIEIKYSKCWNLIRPPTTLLTSNGHRICIRPPFSAREYLMESSQSPLSNGSSLIPEFHLVWPESQAQGIRLICTGKINNPRRGVSIAKAQHNVLYGCSRIVNRGTIDR

SEQ ID NO: 196073 - protein, 122 aa, Oryza sativa
  Clone ID: PAT_MRT4530_9195C.1.pep
MGLDENRIPPPPPWIRRRRLAAAANGERFELRRNGGDPRESLLEFLRSRTRWLRACVVVVSAYDAEVDEVTHAAVNSCLTLVHGLHHCAVTTTEGLGSSRRGKQIASISTSSRMKSTGNWMD

SEQ ID NO: 196074 - protein, 65 aa, Oryza sativa
  Clone ID: PAT_MRT4530_91960C.1.pep
MAQHSRRTPCMRWEGGSEGRRGGGEGKGEADATVGGGAAAWSVNKIRIKLTGTLASNQDLDLHRS

SEQ ID NO: 196075 - protein, 233 aa, Oryza sativa
  Clone ID: PAT_MRT4530_91962C.1.pep
RDCSVSLLLSFVAPSKAVPTLPHSNQIRVMNTRCSKERSQGSEASSNTLDLKSFGDIAGVHQGYHCAQRVLGVTRGQCQDDASKEGNGAKWRRRRHASPWPGKAFASGFPSKPHTTILHNDHRRTTTPSLQHPSSVYHPAGQAGNTEDELFTAKPLPACCRKPLRSPMAASHLMTRSPPPACSLRSTSTASRRRTSGQGRVSGQHHLAHHRAAASPWLPASPSSYAPSGHEAE

SEQ ID NO: 196076 - protein, 43 aa, Oryza sativa
  Clone ID: PAT_MRT4530_91963C.1.pep
RASLKFKCPWLHACMVIRSVQQAELSLACINPVSFMIKIKECR

SEQ ID NO: 196077 - protein, 550 aa, Oryza sativa
  unsure (1)..(550): unsure at all Xaa locations
  Clone ID: PAT_MRT4530_91964C.1.pep
VAGYRSVACCSSLSYFIFLKYVYSWLIVCCXNETPPPPCSLAGSPGPKEPSPPALPVIGNLHQLGRGRHHRALRELARRHGPLFQLRLGSVRALVVSSAPMAEAVLRHQDHVFCGRPQQRTARGTLYGCRDVAFSPYGERWRRLRRVAVVRLLSARRVDSFRALREEEVASFVNRIRAASGGGVVNLTELIVGLTHAVVSRAAFGKKLGGVDPAKVRETIGELADLLETIAVSDMFPRLRWVDWATGLDARTKRTAAKLDEVLEMALRDHEQSRGDDDDGGGGDGEPRDLMDDLLSMANDGGGDHGHKLDRIDVKGLILVNQIIRLNFFHVAXQDMFIAGTDTIYKSIEWTMAELIKNPAEMAKVQAEVRHVAAAAHGDEDEDTVAVVREEQLGKMTLLRAAMKEAMRLHPPVPLLIPREAIEDTVLHGHRVAAGTRVMINAWAIGRDEAAWEGAAEFRPGRFAGGGDAAGVEYYGGGDFRFVPFGAGRRGCPGVAFGTRLAELAVANMACWFEWELPDGQDVESFEVVESSGLSPGLINPLVLAAKPLK

SEQ ID NO: 196078 - protein, 534 aa, Oryza sativa
  unsure (1)..(534): unsure at all Xaa locations
  Clone ID: PAT_MRT4530_91965C.1.pep
MAAVQLDSGLLIGFLFLATCLVVAVRSYLRSGGADGGRGGAAITSPPALPVIGNLHQLGRGRHHRALRELARRHGPLFQLRLGSVRALVVSSASMAEAVLRHQDHVFCGRPQQHTARGTLYGCRDVAFSPYGERWRRLRRVAVVHLLSARRVDSFRALREEEVASFVNRIRAASGGGGGVVNLTELIVGLTHAVVSRAAFGKKLGGVEPAKVRETVGELADLLGTIAVSDMFPRLRWVDWATGLDARTKRTAAKLDEVLEMVLRDHEPSRGDDDDDDGDGEARDLMDDLLSMANGGDDHGYKLDRIDVKGLLILVXDMFAAGTDTVYKSIEXTMAELIKNPAEMAKVQAEVRHVVAAAHGGEGDEDALGKMTLLRAAMKEAMRLHPPLPLLIPREAIQDTVLHGHRVAAGTRVMINAWAIGRDEAAWEDAGEFRPGRFADGGDNAGVEYYGGGGDFRFMPFGAGRRGCPGMAFATRLAELVVANMACWFEWELPDGQDVQSFEPSRSSSREVCRLGSSSGKIGNHVYVVQTTRM

SEQ ID NO: 196079 - protein, 52 aa, Oryza sativa
  Clone ID: PAT_MRT4530_91966C.1.pep
TEPAPAHCHLPETKEIFSTCFSAKQSHKPVDIICLQFLSAPKHSLWIMICKD

SEQ ID NO: 196080 - protein, 75 aa, Oryza sativa
  Clone ID: PAT_MRT4530_91967C.1.pep
STTSPRGKEKLEFDRGPVVATVLVASCIAHLQSIVAVLPEFTAQTNCVVHVHRDNQSWATWVPQVAREALMPLVA

SEQ ID NO: 196081 - protein, 106 aa, Oryza sativa
  Clone ID: PAT_MRT4530_91968C.1.pep
AGDAAARAAMALCMRKGRTVQLYGPNQSTRHAPAVAWRVSAEIVVVGVRERTTRTCKQLRQTKKKDRHAGSRARTPVGSIYQVSWQMKRRYMLRQSQVAKYSSDII

SEQ ID NO: 196082 - protein, 357 aa, Oryza sativa
  Clone ID: PAT_MRT4530_91969C.1.pep
SCSLQGAQLTASERFRVAQSELLLVGPSNSGASSPGSSVSIDPLQTKRRRISHEVAQASAMEEVVVGGKERKRPRGALVGVGGGGASAATAAAWRTSRVARAAAGGKDRHSKVVTSRGLRDRRVRLSVPTAIAFYDIQDRLGVDQPSKAIEWLIRAAAAAIDALPSLDCSLALPAAASSPPPPAADDAEVSTSETSKSSVLSLANAPCDNGGGAFAELLHCSNTNGSKPLQQQQQATLAYYAAAQSAHMAAPMSFEVMAMPPHLAFSQEQQQHATVAAFDRGTLQSNASLWPPPPQPPPSQHPFLLQRFAAAPAEVAGLPFFLAGGVGGAAAAAPAATTNGGERRLQLWDFKEERKT

SEQ ID NO: 196083 - protein, 62 aa, Oryza sativa
  Clone ID: PAT_MRT4530_9196C.1.pep
LIQKRLIFFNQSFFRNSRFLNTRPFFKFMATNKKIRISIKRIKNVETTRNAPPIFLIKPRII

SEQ ID NO: 196084 - protein, 68 aa, Oryza sativa
  Clone ID: PAT_MRT4530_91970C.1.pep
SPVAGCHPPCSGGRSLTSSVVEAGCGGGRSPLPLPLAAVGCTSLPPSIVIKHPPTALGHRRPPCVLPP

SEQ ID NO: 196085 - protein, 79 aa, Oryza sativa
  Clone ID: PAT_MRT4530_91971C.1.pep
MERAATEPGRLPDLPRRWIEPFMRVMAMSYRYYLSYCWMNDNTTRDALKIKKGGSHVVTTNKPKESFAMGKRRLANKPL

SEQ ID NO: 196086 - protein, 63 aa, Oryza sativa
  Clone ID: PAT_MRT4530_91972C.1.pep
NGYRSAKHYISTYSFLNSLQKYPLVSLFWFTASTIVKSFFQIRTNCKIYLEESHISMQRATNP

SEQ ID NO: 196087 - protein, 542 aa, Oryza sativa
  unsure (1)..(542): unsure at all Xaa locations
  Clone ID: PAT_MRT4530_91973C.1.pep
MEDDIEEGVAESSGPSPRAAAAAAGLGSGGGGGGGSVHGSPDIRNVIYERLVAIRNEEAISNPSSFRVELDRHFLRLPESYLIDLDVSKAEQVLLHRRILADCADPEKRPIFHARYIGVDSGSTPTENGNGGGFLPINLRDDEFTESEPYERMMEDLSLERGKGVDDFEASSARRDSKFVRVHEIIFSSIDKXPKLLNGFCLDVFVVDGWDTEETDGLLQKLIEAEASSHGSLSNPTNLSQSEKVLELQEKIGDSEFDRSLLQIGEKIASGSSGDLYRGTYLGVDVAVKFLRSEHVNDSSKVEFLQEIMILNEVMSRSVDHENVVQFYGACTKHRKYLIVTEYMPGGNLYDFLHKQNNTLELPVVLRIAIGISKGMDYLHQNNIIHRDLKTANLLIGSGQVVKIADFGVSRLRSQGGEMTAETGTYRWMAPEVINHKPYDHKADVFSFAIVLWELVTTKIPYENLTPLQAALGVRQGMRMEIPPKVHPRLSKLIERCWDENPHVRPLFSEITVELEDILRHVLVSKTGSRHPKAKIQKKSAR

SEQ ID NO: 196088 - protein, 175 aa, Oryza sativa
  Clone ID: PAT_MRT4530_91974C.1.pep
CSHAYVWSSPATSETKPPPPRLLTAKTAMEGSSASQAKALFKATLIGLAILSMVTWVPHMYSCIKMFLVSVPSAASTLATPRCLFIFSNIIVIFLASELKLSEGESFGESPIRTNHGSDAFIRYRVEAFTPATKSNDVIVHHVVEEQVSTVIVHDDSPAQLDQCEQVVALSTMFM

SEQ ID NO: 196089 - protein, 288 aa, Oryza sativa
  Clone ID: PAT_MRT4530_91975C.1.pep
MTLAAAAEAPAPTHAFAIAAEEVAMEPLSTATAPAAMEEESSSSGGGGGVGERRSRFRRICVYCGSAKGKKPSYQDAAVDLGKELVERGIDLVYGGGSIGLMGLVSHAVHAGGRHVIGIIPKSLMPREVTGEPVGEVRAVSGMHERKAEMARFADAFIALPGGYGTLEELLEVITWAQLGIHKKPIWFTLFEYSQTANGMAIGGSYTVGLLNVDGFYNPLLSFIDLAVNEGFITEEARRIIISAPTAKELVMKLEDYVPEYSIGLVWEDQNQKQNNLVPELDSGITSS

SEQ ID NO: 196090 - protein, 78 aa, Oryza sativa
  Clone ID: PAT_MRT4530_91976C.1.pep
IQCTLGCYILAWLVHQVLRQSMHPSLALRKTIANCQYKYANNSRTVRIQDYNKWKSTNEPIPTHQSICRRYSFDSSAL

SEQ ID NO: 196091 - protein, 555 aa, Oryza sativa
  unsure (1)..(555): unsure at all Xaa locations
  Clone ID: PAT_MRT4530_91977C.1.pep
MGSVAAEEVVVFRSKLPDIEIDNSMTLQEYCFARMAEVGARPCLIDGQTGESYTYAEVESASRRAAAGLRRMGVGKGDVVMSLLRNCPEFAFSFLGAARLGAATTTANPFYTPHEVHRQAEAAGARVIVTEACAVEKVREFAAERGVPVVTVDGAFDGCVEFREVLAAEELDADADVHPDDVVALPYSSGTTGLPKGVMLTHRSLITSVAQQVDGENPNLYFSKDDVILCLLPLFHIYSLNSVLLAGLRAGSTIVIMRKFDLGALVDLVRKHNITIAPFVPPIVVEIAKSPRVTAEDLASIRMVMSGAAPMGKDLQDAFMAKIPNAVLGQGYGMTEAGPVLAMCLAFAKEPFEVKSGSCGTVVRNAELKIVDPDTGTSLGRNQSGEICIRGEQIMKGYLNDPEATKNTIDEDGWLHTGDIGFVDDDDEIFIVDRLKEIIKYKGFQVPPAXELEALLITHPEIKDAAVVSMKDDLAGEVPVAFIVRTEGSEITEDEIKKFVAKEVVFYKRINKVFFTDSIPKNPSGKILRKDLRARLAAGIPDAVAAAAADAPKSS

SEQ ID NO: 196092 - protein, 590 aa, Oryza sativa
  unsure (1)..(590): unsure at all Xaa locations
  Clone ID: PAT_MRT4530_91978C.1.pep
MAGLHKGKQDGHAQRQHLHLRRDMTTSSRDAYEVHDYNFAQVACKLPVYDGKYDSAAYINWELAVEKQFDEYDFSNAQMIKAASNKCTGSASFWWHTVGNKLETWDECKILMRKRFVFSYYRRALLEKWEHLKQGDKTVREYFHDFKICITYSGLQESNENTMTRFFRGLNFNIQAGLVNVTYNHIGQLFMLACIVERKILENPTEQQDMLVPPITDVLQEVQKSLQNEKNDMFEMSLPSLANEEKADAATXLKESSQGKLNGAERNEVEQPLVESIAELPLSQVDLLAVPCDKEELCDNVSLISMPQLVNEHVSSTISLCADSKHVVHITNEVEERELLSSLNTLGYVQFDDFCELDNLKEKLFDKSVLPCPTNAIFHIFGEYNDRGIFLVHRVYICSDLEHLVVPDKICKLERHVTANHIVSSLSCFNCKKQVVFSGLREEHHMEKPRTVFCEEGEDDVTMATMDTTIAHIMNQQEDIKIKSSMCCNLIRPRVTLLTSNGRQIYIRAPFWAREYLMESSRSPPSNGSSPISEFYLVWPQSQKQGTGLICTGKINNPRRGVSIAKAQHNVSASSSARVREEKQSVGQRG

SEQ ID NO: 196093 - protein, 43 aa, Oryza sativa
  Clone ID: PAT_MRT4530_91979C.1.pep
MSGITVPEIVITVTTIIGIHLIVTQENLEACWAGPGVRPNAGN

SEQ ID NO: 196094 - protein, 772 aa, Oryza sativa
  Clone ID: PAT_MRT4530_9197C.1.pep
MAEEVYVASIDQGTTSTRFIVYDRQRQARRVASARVQAALPGAWVLWLIENVDAVKNAVRAGDALFGTIDTWLIWNLTGGIGGTDRDGNKVFGHHVTDCSNASRTMLMNLKALDWDKPTLETLGIPAEILPKIISNSERIGVVANGFPLAGVPIAGCLGDQHAAMLGQLCQKGEAKSTYGTGAFILLNTGEEPTQSSHGLLSTIAYKLGPSAPTNYALEGSIAIAGAAVQWLRDSLGIISTAADIEKLADTVQDSGGIYFVPAFNGLFAPWWRDDARGICIGITRFTNKGHIARAVLESMCFQVNDVLSSMHKDAGEAGEVKSAEGEFLLRVDGGATVNNLLMQIQADLLGSPVVRPADIETTALGAAYAAGLAVGVWSKEQIFAGLHKENTTVFRPKLDEATGGREQTPAGQPGSVQQAAASKRVGGAAAERRATVAIHHGGDGSTRTPTVPWIESTDAGGGRGGRSDLPPSSPTEKLDILPLPIFLSPPPPANMWEEARLCEEKGKRRRYARRCSGHRRRQEKDEAAVLVKREHPGRAVAANAARRERFDRMTASDSAAAACHLWSAFDSMTRRKDPLDGLKLYSGDEHYWSHAWCSRSDSRRCRCLPRPGSGSSCSASLTAAYVISPVTSPSGRFDGSTTVTVEYMTGRGGERANVGHSGGDGVVEAKRWSSLVTVTRSLPCNHSLRILYLLMPARSDSGDTTTTSLRGNSLGKENRNNPELHSTTQTLTTHAHKPYPYEHLEHLRRLGRQILERLTKSPQAPRCPQRR

SEQ ID NO: 196095 - protein, 1386 aa, Oryza sativa
  Clone ID: PAT_MRT4530_91980C.1.pep
MTKPPSKTEVEPSNVMPVTLDDFEGEDRKAMEEYINELTKEALMRATTRTRQGVIIKPEPRPKLAPDVVSNDEVSQSIQQQIASTIDSSMANFKDRLDVMFKDKVDGFLRSRLGSLMNNYTLKDKAYTTANQPPIDQTGSKTDGTALTAGPTGPDGRSDCDTAVGPIGQTAGQTGYYPGGQTGSQAGPTAHHDAGQTGPWAGQTGAIVPIQAIDPMTNASYLYHFKTFDPPISTATSSPQVPPHIPNAYNDVSRGYPPDTRQGQYNHIVPQTQPIRPPNPPPNQQGPNNMEDMISDIMRNRFGIETRNRARTYKKPYPDYYDDVSFPRNYRVPEFAKFSGEDVSPLRERLDGQQFLDVSQLMQRALAQESRVKDNRKLARPFDKKPNVNVVDYPEAIDSEEEGDNDIYVAEWSWTNKNKPFVCSNLMPTPRKDRQSERNDVTMATTDATIAHIMDEQEDIKIKSSKCWNPIRPPTTLLTSNGCQICIRPPFLAREYLMESSWSPLSNGSSLIAKFHLIEPQLKQQGAASPIMGLWACNFVWDPGPGIGLICTGKISNPRRAYPELHIFDYSRTASVCQGIDTSNLHWGAWLSRWIRKIIGDSCAQHRHLRRDMRRDQHDHYEEVSNHEKEERDMKEPPVPLITLKAEAPPLSEEGIKGKLNGAEQPLVEPTAGIPLSQVDLLAVLCDKEELCDNASLISMPQLVNEHAISSVSLCADFKHVVHIANEVQERELLSSLNTLGYVQFDDFCELDNLKKKLFAKSDLPCPTTAIFHIFGESDDRGIYLVHRVYICSDLEPPIHVDKTCKLERNVIANQIVSSLPCFDWKKQVVVNGLRKEHHMEKPRTVFREEGEDDVTMAITDATIAHIMDEQEDIKIKSSKCWNPIRPPTTLLTSNGCRICIRPPFSACEYLMESSWSPLSNGSSLIAKFHLIEPQLKQQGAASPIMGLWACNFVWDPGPGIGLICTGKISNPRRGICKIIGDSCAQHRHLRRDMRRDQHDHYEEVHNHEKEERDMKEPPVPLITLKVEAPPLSEEGIKGKLNGAEINKAEQPLVEPTAGIPLSQVDLLAVLCDKEELCDNASLIISIPQLVNEHAISSVSLCADFKHVVHIANEVQERELLSSLNTLGYVQFDDFCELDNLKKKLFAKSDLPCPTTAIFHIFGESDDRGIYLVHRVYICSDLEPPIHVDKTCKLERNVIANQIVSSLPCFDWKKQVVVNGLRKEHHMEKPRTVFREEGEDDVTMATTDATIAHIMDEQEDIKIKSSKCWNPIRPPTTLLTSNGCRICIRPPFSAREYLMESSWSPLSNGSSLIAKFHLIEPQLKQQGAASPIMGLWACNFVWDPGPGIGLICTGKISNPRRGVSIAKAQHNVSYGCSRIVNVSPKS

SEQ ID NO: 196096 - protein, 663 aa, Oryza sativa
  unsure (1)..(663): unsure at all Xaa locations
  Clone ID: PAT_MRT4530_91981C.1.pep
MEKPRTVFCEEGEDDVTMATTDTSVAHIMDEQQDIKFEYSKCQNPIRPPATLLTSNGHRICIRPPFSANEYLMESFRSPLSNGSSLISEFHLVWPESHAQGAASPIMGLWACNFIWDPGPXWGPCGVRPSQVEHDPRHPXVVLPPLFICRNRVDLHRQDQQPTERCIDRXGATQRLVCTTHRKIGPTTALSVERNSGFIRWYQSFRCSRLVRLEFRVLVTFCTTVVAATVWIRKIIGDSCAQHRHLRRDMRRDQHXTIMRYTSLSHLLQLACNAESKIEEDMKKKHAMSLPPITNYLQEVRNHEKEERDMKEPPIPLFTLKFETPPSSKEDIQGKVNGTEINQGECIVNEVNLSTFHAKVEQPLVEPNAGIPLSQVDLLAVPCDKEELCDNASLISMPQLVNEHAIPSVSLCADFKHAVHIANEVEERKLLSSLNTLGYVQFDDFCELDNLKEKLFAKSDLPCPTNAISHIFGKYNDRGIYLVHRVFICSDLEKHVIANHTTSSFSSFDWMKQVILNGLYEEHHMEKPRTVFCEEGEDDVTMATTDTSVAHIMDEQQDIKFEYSKCQNPIRPPAILLTSNGRRICIRPPFSAREYLMESFRSPLSNGSSLISEFHLVWPESHAQGAASPIMGLWACNFIWDPGPXWGPCGVRPSQVEHDPRHP

SEQ ID NO: 196097 - protein, 543 aa, Oryza sativa
  Clone ID: PAT_MRT4530_91982C.1.pep
MADPRLLEPTTVDLGRADPTMGSNDGGGGGVGSAAIGEGVARSGGGGFWCGESPEELEKKKKKKKKKKKKKKKKRRSTTTTTTTTARQEDTVRVNIETMLEHLTTPAARLGDGYSIYRVPANVDRKHYEPRLVSVGPYHRSKHHLSAMEDRKRLYLLRFLDDGGESGHRRGLLLQDCIDRVRELEPRARACYFESPATGDDGEDDDGDMFVEMLLLDGCFVVQFFIQWFSGVADPIFNVGWNLPLLHTDLLMLENQIPYFILLALYDAYTHDGDGDLDRPARRPKPSLTSIITAYFSQKEGRQPAATETAQLQEEDDIDHLLHLYHSTFVKPPDHLPARRHRHGGGGSRPPRTIRCAKELAMHGVRFVPKVGTSNILDVAFHDGVFEIPRVAVDDSTCTRFMNLAAFEQCRGGDAETPAAGKHLTSYVVLMDYLINTAEDVVILERADVMENNLANEEAAAAFFNQLRVCSYIDYDDHYLAPVYRDVDAFCRRKWPKYKAKFRRDYLNSPWAIVGFCFATTFAVVTFFNTIVNILKTFFHVLH

SEQ ID NO: 196098 - protein, 549 aa, Oryza sativa
  Clone ID: PAT_MRT4530_91983C.1.pep
MMRKRFVTSYYKCTLREKLEHLKQADRTVRDYIHEFKVCIIYSGLKECNENTTRRFFNGLNSEIQVLLDNVTYNHIGHLFMLARSIESQIISKARMHDQCDLSPLSESPIYLCNDDVQTLEEQSFVSPVTNVLQVDQHIKEKENGILEKKEDEAPAMSEESSQGKLNGAERNEGEYSQGELHLSTFHAIVEQPLVESIAELPLSQVDLLAVPCDKEELCDNVSLISMPQLVNEHVSSTISLCADSKHVVHIANEVEERELLSSLNTLGYVQFDDFCELDNLKEKLFAKSDLPCPTNAIFHIFGEYNDRGIFLVHRVYICSDLEHLVVPDKICKLERHVTANHIVSSLSCFDCKKHVVFNGLREEHNMEKLRTVFREEGEDDVTMATMDTTIAHIMNQQEDIKIKSSMCCNLIRPRVTLLTSNGRQIYIRAPFWAREYLMESSRSPPSNGSSLISEIYLVWPQSQNQARVSARPSVCLFFGTPTYHSYLTPICNSDCFYLVLACFFDLLAGIRLICTGKINNPRRGVSIAKAQRNVLYGCSRVVNVSSKS

SEQ ID NO: 196099 - protein, 524 aa, Oryza sativa
  unsure (1)..(524): unsure at all Xaa locations
  Clone ID: PAT_MRT4530_91984C.1.pep
MATTDTSVAHIMDEQQDIKFESSKCQNPIRPPATLLTSNGRRSSIRPPFSAREYLMESSRSPLSNASSLIAKFHLSRQQLKKQCAVTPVMGLWACNLIWDPGPGGAHVGNRVDLHWQDQQPTESXATHRKIGPITALSVERNSGFIRWYQSFRCSXICKIIGDSCAQHRHLRRDMRRDQHDHYEEVRNHEKEERDMKEPPIPLFTLKFETPPSSKEDIQGKVNGTEINQGECIVNEVNLSTFHAKVEQPLVEPNAGIPLSQVDLLAVPCDKEELCDNASLISMPQLVNEHAIPTVSLCADFKHVVHIANEVEERELLSSLNTLGYVQFDDFCELDNLKKKLFTKSDLPCPTTAIFHIFGESDDRGIYLVHRDYICSDLEPPIHVDKTCKLERNVIPNKIISSLSCFDWKKQVVLNGLREEHHMEKPRTVFCEEGEDDVTTATTDTTIAHIMDEXDDNKIKCSTCXNPIRPLATQLTSNGHRICIRSPFSACEYLMESPRSPLSNGSNLITKFYPSHPWMNKQGA

SEQ ID NO: 196100 - protein, 123 aa, Oryza sativa
  Clone ID: PAT_MRT4530_91985C.1.pep
MDGDLYGCRPNDLLMGRHIPTSTSAGGRRDMGTWLSADDMISVRRVTNQSFLSTMRQLNNMHICPSSHNILPVMVRMKPGIYLPRTNLPSLGGNTLAPFGNERLESLVLTGWGVVCVRPPVAT

SEQ ID NO: 196101 - protein, 557 aa, Oryza sativa
  unsure (1)..(557): unsure at all Xaa locations
  Clone ID: PAT_MRT4530_91986C.1.pep
MEKSRMVFREEGEDDVTKATMDATIAHIMDEQEDIEIKSSKCWNLIRPPTTLLTSNGHRICIRPPFSAQSQAQGAASPIMGLWACNFIWDPSSGIRLICTGKINNPRRGVSIAKAQHNVLYGCSRIVNVSPKSRRCHRVSVVVGTYENGIGSLPRFYFCSFXKFLSPYSKCLPRHRYIQPLLGCLIESVYVTIPLALEVQNSPQNEKNDMFEMSLPSLANEEKANAPTLSEEGIKGKLNGAEITQDEQTLVEPTSELPLSQVDLHSVPCDKEELCDSTSLISIPQLVNEHATFNLDSPCTEFKYYVIHTSGENDELQLQSSLNTLGYFMFDGSCELNCLKDKIFAHSDLPCPRNVIFHIFGDYNDLGIYFVHRVYICSDLELPVHVDKTCKLEKNVLANQIVSSLPCFDWKKQVVVNGLRKEHHMEKPRTVFHDEGEDDVTMATTDATIAHIMDEQEDIEIKYSKCWNPIRPPITLLTSNGHRIYIRPPFSAQSQEQGAASPIMGLWACNFIWDPGSGIGLICTGKINNPRRGVSIAKAQHNVSYGCSRIVNVSPKS

SEQ ID NO: 196102 - protein, 443 aa, Oryza sativa
  Clone ID: PAT_MRT4530_91987C.1.pep
MAGIRKIIGDSCAQHRHLRRDMRRDQHDHYEVSDDVLGKIKSALPYFEGNYDPRAYINWELAVDSEFQKHVLSEKQKEVRNHEKEERDMKEPPIPLFTPKFETPPSSKEDIQGKVNDTEINQGECIVNEVNLSTFHAKVEQPLVEPNAGIPLSQVDLLAVPCDKEELCDNASLISMPQLVNEHAIPSVSLCADFKHAVHIANEVEERKLLSSLNTLGYVQFNDFCELDNLKEKLFSKSDLPSPTNAIFHIFGKYNDRGIYLVHRVFICSDLEKHVIANHTTSSFSSFDWMKQVILNGLYKEHHMEKPRTVFREEGEDDVTMATTDTSVAHIMDEQQDIKFESSKCQNPIRPPATLLTSNGRRSSIRPPFSAREYLMESSRSPLSNASSLIAKFHLSRQQLKKQGIGLICTGKISNPRRGVSIAKAQHNVSYGCSRIVNVSPKS

SEQ ID NO: 196103 - protein, 71 aa, Oryza sativa
  unsure (1)..(71): unsure at all Xaa locations
  Clone ID: PAT_MRT4530_91988C.1.pep
GARLFPAALPWLVIMGESDVPLPSWWYYGFNRNPRLVNFPVSQWCTPLLXRAQIXSLPXLLWEFGSKKKKK

SEQ ID NO: 196104 - protein, 852 aa, Oryza sativa
  Clone ID: PAT_MRT4530_91989C.1.pep
MAGLRKGIREHRLLHLRRDMTTSPNDAYEVHDYNFEQVASKLLFYDGKYDSVAYIDWELAVDNEFDIYDFSDAQMIKAASNKFTSSALFWWTYVSNKPETWDELKTMMRKRFVTSYYKCTLREKLEHLKQGDRTVREYIHEFKVCIIYSGLKECNENTTRRFFNGLNSEIQVLLDNVTYNHIGHLFMLARSIESQIISKARMHDQCDLSPISESPIYLCNGDVQTLEEQSFVSPVTNVLQEDQHIQEKENGILEKKEDEAPAMSEESSQGKLNGAERNEGEYSQGELHLSTFHAIVEQPLVESIAELPLSQVDLLAIPCDKEELCDNVSLISMPQLVNEHVSSTISLCADSKHVVHIANEVEERELLSSLNTLGYVQFDDFCKLDNLKEKLFAKSDLPCPTNAIFHIFGEYNDRGIFLVHRVYICSDLEHLVVLDKICKLERHVTANHIVSSLSCFDCKKQVVFRGLREEHHMEKPRTVFREEGEDDVTMATMDTTIAHIMNQQEDIKIKSSMCCNLIRPRVTLLISNGRQIYIRAPFWAREYLMESSRSPPSNGSSLISEFYLVWLQSQKQGAASPVLGQWACNFVWDPGPCGAHVGNRVDLHRQDQQPTERMGRRSRGGGVPRLLGTAHRGVPARRRRRWRGGGRGGGAGPGIDDESRWRRRRQRGPGGGDDSRGGGGVDDKEPAEEEEVPAAVLAAAAVGGGGGGAGPGVDDESRWRRRRRRGPGGGDDSRGGGGVDDEEPAEEEEVSAAVLVAAVGGGGGGCGGKKEPADKSRWWRQLPTWRKEEPGRGGARSATGGGEDAGPIEEENAAPVGRRGVGSSGGGEEKARMDLTPAVKVRFSLAEDSVGR

SEQ ID NO: 196105 - protein, 332 aa, Oryza sativa
  unsure (1)..(332): unsure at all Xaa locations
  Clone ID: PAT_MRT4530_9198C.1.pep
MAGGEPMRQQPLAGDGFFWFLPAPKPTTSSPFIAFLLLPHRSTHATPPVMEAEKWWRGMEKRREEVRIEEEDESSGWVPRADREYDGKHDGDGMIDTFAMAWIKLTPFEKGERVKKVFSNSENYRLNGNCYVHFVMFSTLGGCFNNGDSGYDCAIMWCGDGGVEEAGEGDSGAICGDGGIHDATAGWWWSVASAAVMGDALVSEMCLHRAKIDAVVRMECERMHDGLEQARRGSARCWCAWRWRWLQWLREKEAELDAAHRHVVELEELLRHAATESQAXCGLACSNEAVAAGIRLTFDHLLLRNAPAQCFGDSDALAVVADNASTLPTASK

SEQ ID NO: 196106 - protein, 642 aa, Oryza sativa
  Clone ID: PAT_MRT4530_91990C.1.pep
MATMDTSVAHIMDEQQDIKFESSKCQNPIRPPATLLTSNGRRSSIRPPFSARLICTGKISNPRRLSLLGICKIIGDSCAQHRHLRRDMRRDQHDHYEVSDDVLGKIKSALPYFEGNYDPRAYINWELAVDSEFQKHVLSEKQKVMCASSVLIKHASNDWKHLCRHNKIPQSWKDLKRYFRDVYVPMYYADILFNKLQCLKQDTRTVTSYYHDMQACLLRCGLDECEEAKELRFLCGLNKEIQDMLDCQRYTSLSHLLQLACNAESKIEEDMKKKHAMSLPPITNYLQEVRNHEKEERDMKEPPIPLFTLKFETPPSSKEDIQGKVNGTEINQVEQPLVEPNAGIPLSQVDLLAVPCDKEELCDNASLISMPQLVNEHAIPSVSLCADFKHAVHIVNEVEERKLLSSLNTLGYVQFDDFGELDNLKEKLFAKSDLPCLTNAIFHIFGKYNDRGIYLVHRVFICLDLEKHVIANHTISSFSSFDWMKQVILNGLYEEHHMEKPRTVFREEGEDDVTMATTDTSVAHIMDEQQDIKFESSKCQNPIRPPATLLTSNGRRSSIRPPFSAREYLMESSRSPLSNASSLIAKFHLSRQQLKKQGAVTPVMGLWACNLIWDPGPGGAHVGNRVDLHRQDQQPTERCIDR

SEQ ID NO: 196107 - protein, 368 aa, Oryza sativa
  unsure (1)..(368): unsure at all Xaa locations
  Clone ID: PAT_MRT4530_91991C.1.pep
EVHNHEKEERDMKEPPVPLITLKVEAPPLSKEGIKGKLNGAEINKAEQPLVEPTAEIPLSQIDLFAVPCDKEELCDNASLISMPQLVNEHAIPTVNSYCTDFKHVVHIANEVEERELRSSLNTLGYVQFDDFCELDNFKEKLFAKSDLPCPTNAIFHIFGEYNDRGIFLVHRVYICSDLEHLVVPDKICKLERHVTANHIVSSLSCFDCKKQVVFSGLREEHHMEKPRTFFCEEGEDDVTMATMDTTIAHIMNQQEDIKIKSSMCCNLIRPRVTLLTSNGRQIYIRAPFWARDLISEIYLVWPQSQNQGAASPVLGQWACNFVWDPGPXIGLICTGQINNPRRGVLIAKAQHNVSYGCSRIVNVFPKS

SEQ ID NO: 196108 - protein, 756 aa, Oryza sativa
  unsure (1)..(756): unsure at all Xaa locations
  Clone ID: PAT_MRT4530_91992C.1.pep
MDGDRSRRSAAAITRPPSHGGPAWRRMIAWIQLLKVFVQRYGEVARWRTAFLLFLALLAERGLRRAYLSWKESRLRPRAAAAVTLQAAFRGMAARRELSLRRRAARAAAAALIQARWRARAAAREHAAAVICQCAWRRRAARRRLARLRIEQERAAEACRLREMVDVLQQAVEDAEVRVIAEREAAKKAIAEAPPVIKEIVVQVVDTDKVDSLAAEVARLKDLLGAEMKATFDAKKAVAEAELRNEKLXARLLGVXEVKNRQLQESLKRMEMKASDLEEENQKLRGAVASVPYVRLPSNVNRDDPDLEPTPENEDENENEKAVYCEVKPMIVDRGVDIHENNSQLPGLNDPEAEKQQQELLIKCISEDLGFSIGRPIAAYLIYRCLIHWKSFEEDRTTVFDRIIQKISAAIEARDNNETLAYWLSNSCTLLLLLQKTLKINGAAALARQRRRASPLKTPQENQAPNHPDRSPVPDGRLVGGLGEVCQVEAKYPALAFKQQLTALLEKVYGIIRHNLKKELSPLLGLCIQAPRTFVVSPRGSGAQGTDLAQQASMAHWQSIIKILTNSLNVLKSNYVPPFLICKLFTQLFSFINVQLFNSNGEYVKAGLDELEHWCFWLTEEYAGSSWDELKHIRQAVALLILEEKHSKSLKEITDEYCPALSMQQLYRISTMYCDDKYGTLGIPPEVVSSMRTKMVQQGSNSPSTQDDINSFLLDDDFSIPFSIDDIAKLMVHIDIADMDLPPLIQENKGSPHLMP

SEQ ID NO: 196109 - protein, 86 aa, Oryza sativa
  Clone ID: PAT_MRT4530_91993C.1.pep
IFPPYPTVISSSPLAHCPSTIRFGRGKFQLGKNMYVSYIYLRMALTGAKTKKRKKERTPTCCRLNPHMPLHNSARRFIFRGPATMC

SEQ ID NO: 196110 - protein, 788 aa, Oryza sativa
  Clone ID: PAT_MRT4530_91994C.1.pep
MVEPQPPPVAATVPVRGLKCRGGDAAAEPAMAGTPNRGQERGGEEGEEEEKAVLRRGLAAARARRKAGPITPSPSWKLEASPPRPEEPVADSSAAAAAAGAMGRRSSAVAASARQLGATLWEIRDVIKVAGAGRRIRRRGRRGGVAGDDDEADRGLKSELQHAHARVQELLQERRRYHYEIDSLVRQVSEDKMTQKSKDQEKVKAALRSLQEEIEDERHLRKHSESLHRKLKKELSEMKSAFVKAVKDLEKEKKATHLLENLCDEFAFGIRNYEEEVRLLKQKHIKQYEHKFDKSVVHISEAWLDERMQMQNADPKATLAERISITERLSSEIHSFLNTRRSSKPKDDKLYISNEKQDASLCRQSLESVHLHGATSAPRLAEDDNDNSVASDLHCFELSMHGHTIQNNDLIGTRQRVTSCMYSPMRRLEFSNGIPVEGSRISTMSPCSMKDKARPNGIREQLNASTPEISPCNDAKNAPRCAQDETVMTQVSQRLHDDLLKIKSEAPQHAYLGQKSNDHHSRAGKAGGAARPDESIRVFPNQHKKEMRMAGCGGGGLAASGSAALRGYGIEGPASRGSGPDNDGGRSGQRQRRCREVGRPIRHRRGLRAMGPVEAAPTTTVGSGVADPAPVRMAGGRDTRRLGTARLGTKPAGRPWRAAAARYRQRRQAAAWEAAASDTNAAAHGRSGGGAAAVGERSGRKRGGSSPASTAAGAKDEGGGNDRRRWRGEKISPAREEKRAPALFGGNQAAAEVRTGSVSATAAMARRGGGSSGGGGKRRRWRRAARAR

SEQ ID NO: 196111 - protein, 129 aa, Oryza sativa
  unsure (1)..(129): unsure at all Xaa locations
  Clone ID: PAT_MRT4530_91995C.1.pep
GAPTLVKRALVQVDAAPFQQWGLPPYGVEIGRKKKAPFSKKDAFXGPKGGASPGGAKKSPPVVRKLXKGQQTRPLGSPLEEQFGSGRVLACISSRAGQCGRADGDLLEGKELGFFIKKLPRKKGKGAAA

SEQ ID NO: 196112 - protein, 292 aa, Oryza sativa
  Clone ID: PAT_MRT4530_91996C.1.pep
MALLGDALRQAFMPRRAYAALRDEERALPRLRRPLAAAAGACVAAAVAAAAGVSLGIVFPAEPAERPFCRERRMLEALPAAASSREEEPEAYRYRGGAFYMTTAEAADFYWMVVFVPSALLFAVSSAYLVSGISVAYAAPRRHPLICVVENNFCASKRVFAVIFGLMAIILGSTLLALGSSCSVPLFWCYEITAWGLVILYAGTAFFLRRKAAVILDEGDYTPHNVGLEMLETTIEVTPEMQRRINDGFKSWMGPSTLSSDDEEEASDDYIEHNVPIPTASVQVRQENDLES

SEQ ID NO: 196113 - protein, 163 aa, Oryza sativa
  unsure (1)..(163): unsure at all Xaa locations
  Clone ID: PAT_MRT4530_91997C.1.pep
SGAGISPGGGELTFFAANWLQAAGPEGMGDRPRGAGRGRGRXRGVRTGTGTYRAGAARLGSGAYRAGLARDTHPHAGHRTVALTRTTRRGRGLRTQRSARDASSPTDRPSSVRHPSSQTSSXLQRDPSGMVGNTXTLDITSTCTEVVTSQLHNLQPAITTGLS

SEQ ID NO: 196114 - protein, 77 aa, Oryza sativa
  Clone ID: PAT_MRT4530_91998C.1.pep
VAHFCSMCGPKSCSMKITEDIRKYADEHGYRIVEEAVIPGMNAMSAEFLAARKTISGEQHGEAGGEIYVPESYTARK

SEQ ID NO: 196115 - protein, 352 aa, Oryza sativa
  Clone ID: PAT_MRT4530_91999C.1.pep
MGGSREAMPSGPVSDPAGGRSLPEAVLTWEELQVEMGRLLEAGARGIGREISEARSETAAANARAERLVRELAEAREDLTKMRELVAGNERQRKGLEDRMSELGNNLFEIRGSLRVTYTGLHQLAEECGIKDANDEDVQQRGQPKSLAIIPVLEFEPHVSPDVEDQTLDAELEMATTTSIDLEDALATQDRRIQYWKTKFEVAELERTMLVVKKEQAVETLRGREVWFASYLKSCCTSMARVCRELRVVRADPGESAAGYIWWLNGACAQLDGIGKCIDEALKQECHRVSRYTGGHVLACLRDHRPRLDLEFLHEGFARSRRTPAEIDHLARSMSPLAEKVFQSMDWHWPSW

SEQ ID NO: 196116 - protein, 136 aa, Oryza sativa
  unsure (1)..(136): unsure at all Xaa locations
  Clone ID: PAT_MRT4530_9199C.1.pep
GTKHAYAPMANXLXXNXLVFSKXKGXSGXXXXKKXRFXXXGIQSXKPTFQXVQPINGEPFIXNLEXPXXSNXLVPGYSQTPGVRTPSAALAHQSLPRTLVGLRAHGRSQQPTQRPRQARPSSLPHMYGPPSRGDSR

SEQ ID NO: 196117 - protein, 88 aa, Oryza sativa
  Clone ID: PAT_MRT4530_919C.1.pep
TNIPLWATFGPKQRKNRGPPEGSGALSSTLPRPPSPRNPLRRFSPAAFLLRLGASHPPPPPPSPPPPPPPPPPPPQLGARPAQPAGGP

SEQ ID NO: 196118 - protein, 105 aa, Oryza sativa
  Clone ID: PAT_MRT4530_91C.1.pep
RRRRARCGGRRRPGSRRRRGRGGTAAGRRRRSSRTPRSGGARRAPRTRTGCAPPPRTPGRTPPSRRCSPAPPPRSPPRTSPPPATTSPPRLGSGGGREMQRPAEA

SEQ ID NO: 196119 - protein, 76 aa, Oryza sativa
  unsure (1)..(76): unsure at all Xaa locations
  Clone ID: PAT_MRT4530_92000C.1.pep
LXKXGIHXFLPXTTDCRHSERLXAXXADXIXEHXFAXXKVVLRTAXDXVSXVEXSAMVVVVVXGLSLPVADGVXAS

SEQ ID NO: 196120 - protein, 405 aa, Oryza sativa
  Clone ID: PAT_MRT4530_92001C.1.pep
MAGNSCAETFPALSDDHLISALTYSTADHHDLVDAAPAVASQPNEDVWDGPCTATGAACEPCSLTLHFLRNTCGLSEDEAAAAAARVRLRSTKKAHAIVALFRGIGFSAADIARLVTSNPSLLSYRADATLMPKIEFFRRELGLTDAEIRRLVLANPYRVLRYSLKRCIRPNYLILRDLLGSDKNVTAAVLQSTDLIHGDVRGILLPKIKILQDYGATNDVIVKLVTTHPRALMHRASRFEESLAAMKELGVRPSSGMFPYSFGLFARLHPRKWKGRMDNFLSLGWTKEQVIEAFVRHPYCMSVSNDKVKLIWQFLAKKLRWTTDYVARSPMVLSFSYDKRILPRCTVLNLLASRGIFNRDIKTSHLVLGEKKFKEKYVTPYQDEIPEVLEAYSSVAESRVPVYK

SEQ ID NO: 196121 - protein, 341 aa, Oryza sativa
  Clone ID: PAT_MRT4530_92002C.1.pep
MSPSSSSSSTGPMGVAVSPEVEAALARGGAVVALESTIICHGMPYPKNLQTAMEVEAVVRENGAVPATIAILNGVPHVGLSGEQLKSLAVSGRQFQKTARRDIAHVVASGGNGATTVSATMFFAHKVGIPIFVTGGIGGVHRNGEQTMDISSDLTELGKTPVTVISAGVKSILDIPRTLEYLETQGVTVAAYKTNEFPAFFTEVSGCKVPCRVDSPEECAKIIYANKNLHLGSGILIAVPIPKEHAASGNAIESAIQKALKEAENFSLAYSDIALVKNNALVGAKIAVALSDLHQRVTNSKDFGGLPYRVHVQRQARSETWGILFILTMASVCSIALIINE

SEQ ID NO: 196122 - protein, 96 aa, Oryza sativa
  Clone ID: PAT_MRT4530_92003C.1.pep
WNPAATCFGRVVPTQCGRLHGCRQRISFLSGQVPAGLKIKRLRLVSFIAGSDSSCFVWKVVCARVGLFFCRSILFKIEGFFFKSTHTNLWISYRHA

SEQ ID NO: 196123 - protein, 512 aa, Oryza sativa
  Clone ID: PAT_MRT4530_92004C.1.pep
MAVVFLQIVSLGSQMQRQPCRQAPPVLSLPLPACRLASHPSGTLRPWRRRRNRCQSPELRLLARGNTSLFCTCAPGKNFPVGHPSQIAPVHTLSSCAPGKNFPRSSSGAASSALALALVRPAWRALSPPGVFLGAGDFPETIEEFLQYGSMKCIAFNRRGTLLAVLPAFLSDNGNLPAPNTRNKFSDGSPPFTPTAATFDKYGDLIYVGNSKGEILIIDSKSIKVHAVIPIPGGTVVKDIVFSRDGRYLLTNSNDRVIRVYDNLLPVKGSGEEIEKISSNNISYESHYEKLKANGASCLAISCELLDAIAKIPWKAPCFSGDSEWIVGASASKGEHRLCIWNRSGRLVKILEGPKEALIDIAWHPVDPTIVSVSVAGLAYIWAKEHVENWSAFAPDFVELEENEEYVEREDEFDLNAYVEKAEEQLVNEDEYVDIETYDKNSTFSDLDDSSSTTMELIYLAAIPIPDTPDEQPDKCLGSSSKLEDSNHSDSPSSLDAVQNGQAIPPASSPME

SEQ ID NO: 196124 - protein, 50 aa, Oryza sativa
  Clone ID: PAT_MRT4530_92005C.1.pep
KMAVVCLLLLSAGHLMAYAAAERPDTGDYSAEVMILKDLIKMYYDEANSI

SEQ ID NO: 196125 - protein, 570 aa, Oryza sativa
  Clone ID: PAT_MRT4530_92006C.1.pep
MNVPIVDPLQGDFPETIEEFLQYGSMKCIAFNRRGTLLAAGCANGTCVIWDFETRGIARELHDKDCTAPITSVAWSKYGHHLLASATDKSLTLWHVVNEKKIARITLQQTPLSVRLHPGGPSTPSICLACPLSSAPILVDLNTGSTTVLPAFLSDNGNLPAPNTRNKFSDGSPPFTPTAATFDKYGDLIYVGNSKGEILIIDSKSIKVHAVIPIPGGTVVKDIVFSRDGRYLLTNSNDRVIRVYDNLLPVKGSGEEIEKISSNNISYESHYEKLKANGASCLAISCELLDAIAKIPWKAPCFSGDSEWIVGASASKGEHRLCIWNRSGRLVKILEGPKEALIDIAWHPVDPTIVSVSVAGLAYIWAKEHVENWSAFAPDFVELEENEEYVEREDEFDLNAYVEKAEEQLVNEDEYVDIETYDKNSTFSDLDDSSSTTMELIYLAAIPIPDTPDEQPDKCLGSSSKLEDSNHSDSPSSLDAVQNGQAIPPASSPMEVDNSTAEEPAEAVNSKRRRRLSAKGLELQQAEKGKKPTTKNKSNGKSPGSNGKQLEPANGNSSAVDDEATEDDEI

SEQ ID NO: 196126 - protein, 244 aa, Oryza sativa
  Clone ID: PAT_MRT4530_92007C.1.pep
MAAEMEKRRTGWTRRAPGATTAQQMVFRVEAARVLSRGGEEEEEGADSELLAKADWGFWAPNHRVHGSKTRTNQLCQNLAAPRSTKAKLQGCNHAGTVVCCPKPRPARIVRLTRRRHWLHHALDARTVMNRMLWVRTAMNTMLVLAPSMSSALIPGRRSCSAVLSWLHVALAGSHEFTIRTARLLRTLAPCQDNYAEPSSTHQAASVPSCRAKATAPAPSRRTEQLATHAPSAAPNSPPTIRHS

SEQ ID NO: 196127 - protein, 61 aa, Oryza sativa
  Clone ID: PAT_MRT4530_92008C.1.pep
CVTYTTPTLNQIVNKLYIYKCLAPTFKILILQNYNCAFAITFTIFSLTLTFYPFFFRLFPL

SEQ ID NO: 196128 - protein, 109 aa, Oryza sativa
  Clone ID: PAT_MRT4530_92009C.1.pep
MAAEFPKDVRRGGTPAAVTRGRVEPDGRAASASGCLMRRSEGRRRPWRHLLKITSEEIQQVQQGFLTVQKFQVSTAILQIIIIQKMRKKLTVLKADKGIVLPFFCSKNF

SEQ ID NO: 196129 - protein, 885 aa, Oryza sativa
  unsure (1)..(885): unsure at all Xaa locations
  Clone ID: PAT_MRT4530_9200C.1.pep
MAEEVYVASIDQGTTSTRFIVYDRHAKPVASHQLEFKQHYPEAGWVEHDPMEIMESVKICMAKALDKAAADGHNMDVGLKAIGITNQRETTVMWSKSTGLPLYNAIVWMDARTSPICRRLESDLSGGRTHFVETCGLPISTYFSALKVLWLIENVDAVKNAVRAGDALFGTIDTWLIWNLTGGIGGTDRDGNKVFGHHVTDCSNASRTMLMNLKALDWDKPTLETLGIPAEILPKIISNSERIGVVANGFPLAGVPIAGCLGDQHAAMLGQLCQKGEAKSTYGTGAFILLNTGEEPTQSSHGLLSTIAYKLGPSAPTNYALEGSIAIAGAAVQWLRDSLGIISTAADIEKLADTVQDSGGIYFVPAFNGLFAPWWRDDARGICIGITRFTNKGHIARAVLESMCFQVNDVLSSMHKDAGEAGEVKSAEGEFLLRVDGGATVNNLLMQIQADLLGSPVVRPADIETTALGAAYAAGLAVGVWSKEQIFAGLHKENTRVFRPKLDEAXTGGREQTPASQPGSVQQAAASKRVGGAAVERRATVAIHHGGDGSTRTPTVPRIESTDAGGGRGGRSDLPPSSSPSEKLDILPLPIFLSPPPPANMWEEARLCEEKGKRRRCARRCSGHRRRQEKDEAAILVKCEHPGRAVAADAARRERFDRMAASDSAAAACHLWSAFDSMTWRKDPLDGLKLYSGDEHYWSHAWCSRSGSRRRRCSPRPGFGSSCSASLTAAYVISPVTSPPGRFDGSTTATVEYMTGRGGERANVGHSGGDGVVEAERWSSLVTVTRSLPCNHSLRILYLLMPARSDSGDTTTTSLRGNSLGKENRNNPELHSTTQTLITHAHSPLXTHARKPYPYEHLQHLRRLGRQILERMTKSPQALRCRRVR

SEQ ID NO: 196130 - protein, 52 aa, Oryza sativa
  unsure (1)..(52): unsure at all Xaa locations
  Clone ID: PAT_MRT4530_92010C.1.pep
VASVSLNILADILHHSKLEESRIERERDVILLEMVEVXGQYVDVIFDHLHAT

SEQ ID NO: 196131 - protein, 168 aa, Oryza sativa
  Clone ID: PAT_MRT4530_92011C.1.pep
MASSSSRLSCCLLVLAAAAMAATAQNSAQDFVDPHNAARADVGVGPVSWDDTVAAYAESYAAQRQGDCKLEHSDSGGKYGENIFWGSPGGDWTAASAVSAWVSEKQWYDHGSNSCSAPEGSSCGHYTQVVWRDSTAIGCARVVCDGDLGVFITCNYSPPGNFVGQSPY

SEQ ID NO: 196132 - protein, 350 aa, Oryza sativa
  Clone ID: PAT_MRT4530_92012C.1.pep
MRSKPILHGQVTQSLLLLSLGSSQRHDIRTARPTPNATRSRRDQGNAQPYPPPPPRGPGTTWVPQVSGTKYQAARGVEEATAKQLRPRPDRTPSIAIPVDSDASPRKNTPETVTSPLVNGEKSIFRDQVRGYSALGSPLRREVGNRHNIVSVTIVSTLSLSGVIPTEPLTWKLIKVWLPVNIIFVGMLITSMFSLKYINVAMLTILKNVANVLTASGETYFFKKQHDRQVWISLTLMLTLRHVMDSAKQATKSGNLNELSMVLLNNILSVPLGIILVLGFNEVEYLFETLVGSLNKIPLSIAGILLFKVRTSMENSFSILFGRLFFNNKGKGLLAGVFFARAKLLNNSQS

SEQ ID NO: 196133 - protein, 296 aa, Oryza sativa
  Clone ID: PAT_MRT4530_92013C.1.pep
MDGGGGGGGGGGVMAGPGVAGGGGGGGGGGVGGDVELVSKTLQFEHKLFYFDLKENPRGRYLKISEKTSSTRSTIIVPVAGVAWFLDLFDYYIRTDERDAFSKELRLDTKVFYFDIGENKRGRFLKVSEASVNRNRSTIIVPAGSSGEEGWEAFRNVLLEINNEASRLYVLPNHPNQQHLEPPERLPGLSDDVGAGFIAGHGSQSASGPEVEISGMGMSKVIRADQKRFFFDLGSNNRGHYLRISEVAGADRSSIILPLSGLKQFHEMVGHFVDIMKDRLEGMTGANVRTVESSQR

SEQ ID NO: 196134 - protein, 103 aa, Oryza sativa
  Clone ID: PAT_MRT4530_92014C.1.pep
RHAFQPLPYILFISNKLNLTRSYRMHTPLMDQPAALNGDEAPCMEMGPALYCASPNRPTEEGIGVLFEQPARQWATTQWQSGCLNQHKPGHRLQGTGEKDHLL

SEQ ID NO: 196135 - protein, 508 aa, Oryza sativa
  Clone ID: PAT_MRT4530_92015C.1.pep
MAGLCKGIREHRLLHLRRDMTTSPRDAYEVHDYNFEQVASKLPFYDGKYDSVAYIDWELAVDNEFDIYDFSDAQMIKAASNKFTSSALFWWTYVSNKPETWDELKTMMRKRFVTSYYKCTLREKLEHLKQGDRTVREYIHEFKACIIYSGLKECNENTTRRFFNGLNSEIQEDQHIQEKENGILEKKEDEAPAMSEESLQGKLNGAERNEGEYSQGELHLSTFHAIVEQPLVESIAELPLSQVDLLALPCDKEELCDNVSLISMPQLVNEHVSSTISLCADSKHVVHIANEVEERELLSSLNTLGYVQFDDFCELDNLKEKLFAKSDLPCPTNAIFHIFGEYNDRGIFLVHRVYICLDLEHLVVPDKICKLERHVTANHIVLSLSCFDCKKHVVFSGLREEHHMEKPRTVFCEEGEDDVTMSTMDMTIAHIMNQQKDIKIKSSMCCNLIRPRVTLLTSNGRQIYIRAPFWARIRLICTGKINNPRRGVSIAKAQHNVLLSQLTERSDQ

SEQ ID NO: 196136 - protein, 44 aa, Oryza sativa
  Clone ID: PAT_MRT4530_92016C.1.pep
MERTRRHLKRDLEAWRTSKGVQVKMEAQTKSTSSTFRSPGLVCS

SEQ ID NO: 196137 - protein, 1540 aa, Oryza sativa
  Clone ID: PAT_MRT4530_92017C.1.pep
MATTDATIAHIMDEQEDIEIKYSKCWNPIRPPTTLLTSNGHRICIRPPFSARIGLICTGKISNPRRGIRKIIGDSCAQHRHLRRDMRRDQHDHYEVSDDVLGKIKSALPYFEGDYDPRAYINWELAVDSEFQKHVLSEKQKVMCASSVLIKHASNDWKHLCRHNKIPQSWKDLKRYFRDVYVPMYYADILFNKLQCLKQDTRTVTSYYHDMQACLLRCGLDECEEAKELRFLCGLNKEIQDMLDCQRYTSLSHLLQLACNAESKIEEDMKKQHAMFLSSITNHLQEVHNHEKEERDMKEPPVPLITLKVEAPPLSEEGIKGKLNGAEINKAEQPLVEPTAEIPLSQIDLFAVPCDKEELCDNASLISMPQLVNEHAIPTVNSYCTDFKHVVHIANEVEERELRSSLNTLGYVQFDDFCELDNFKEKLFAKSDLPYPTNVIFHIFGEYNDLGIYFVHRVYICSDLEPPVHVDKICKLEKNVIANQIVSSLPCFDWKKQVVVNGLRKEHHMEKPRTVFREEGEDDVTMATTDATIAHIMDEQEDIEIKYSKCWNPIRPPTTLLTSNGHRICIRPPFSARIGLICTGKISNPRRGIRKIIGDSCAQHRHLRRDMRRDQHDHYEVSDEVLGKIKSALPYFEGDYDPRAYINWELAVDSEFQKHVLSEKQKVMCASSVLIKHASNDWKHLCRHNKIPQSWKDLKRYFRDVYVPMYYADILFNKLQCLKQDTRTVTSYYHDMQACLLRCGLDECEEAKEMRFLCGLNKEIQDMLDCQRYTSLSHLLQLACNAESKIEEDMKKQHTMFLSSITNHLQEVHNHEKEERDMKEPPVPLITLKVEAPPLSEEGIKGKLNGAEISKAEQPLVEPTAEIPLSQIDLFAVPCDKEELCDNASLVYMPQLVNEHAILTVNSYCTDFKHVVHIANEVEERELRSSLNTLGYVQFDDFCELDNLKEKLFAKSDLPYPTNVIFHIFGEYNDLGIYFVHRIYICSDLEPPVHVDKTCKLEKNVIANQIVSSLPCFDWKKQVVVNGLRKEHHMEKPRMVFHEEGEDDVTMATTDATIAHIMDEQEDIEIKYSKCWNPIRPPTTLLISNGHRICIRPPFSAREYLMESSRSPLSNGSSLFSEFYLVWPESQEQGIGLICTGKISNPRRGICKIIGDSCAQHRHLRRDTRRDQHDHYKEVHNHEKEERDMKEPPVPLITLKVEAPPLSEEGIKGKLNGAEINKAEQPLVEPTAEIPLSQIDLFAVPCDKEELCDNASLISMPQLVNEHAIPTVNSYCTDFKHVVHIANKIEERELRSSLNTLGYVQFDDFCELDNFKEKLFAKSDLPYPTNVIFHIFGEYNDLGIYFVHRVYICSDLEPPVHVDKICKLEKNVIANQIVSSLPSFDWKKQVVVNGLRKEHHMEKPRTVFREEGEDDVTMATTDATIAHIMDEQEDIEIKYSKCWNPIRPPTTLLISNGHRICIRPPFSAREYLMESSRSPLSNGSSLFSEFYLVWPESQEQGIWLICTGKISNPRRGVSIAKAQHNVSYGCSRIVNVSPKS

SEQ ID NO: 196138 - protein, 1599 aa, Oryza sativa
  Clone ID: PAT_MRT4530_92018C.1.pep
MAGIRKIIGDSCAQHRHLRRDMRRDQHDHYEVSDDVLGKIKSALPYFEGNYDPRAYINWELAVDSEFQKHVLSEKQKEVRNHEKEERDMKEPPIPLFTPKFETPPSSKEDIQGKVNDTEINQGECIVNEVNLSTFHAKVEQPLVEPNAGIPLSQVDLLAVPCDKEELCDNASLISMPQLVNEHAIPSVSLCADFKHAVHIANEVEERKLLSSLNTLGYVQFNDFCELDNLKEKLFSKSDLPSPTNAIFHIFGKYNDRGIYLVHRVFICSDLEKHVIANHTTSSFSSFDWMKQVILNGLYKEHHMEKPRTVFREEGEDDMTMATTDTSVAHIMDEQQDIKFESSKCQNPIRPPATLLTSNGRRSSIRPPFLAREYLMESSRSPLSNASSLVAKFHLSRQQLKKQGIGLICTGKINNPRRGLRKGKQDGHAQRQHLHLRRDMTTSSRDAYEVHDYNFAQVACKLPVYDGKYDSAAYINWELAVEKQFDEYDFSNAQMIKAASNKCTGSASFWWHTVGNKLETWDECKILMRKRFVFSYYRCALLEKWEHLKQGDKTVREYFHDFKICITYSGLQESNENTMTRFFRGLNFNIQAGLVNVTYNHIGQLFMLACIVERKILENPTEQQDMLVPPITDVLQEVQKSLQNEKNDMFEMSLPSLANEEKADAATLSEESSQGKLNGAERNEGEYSQGELHLSTFHAIVEQPLVESITELPLSQVDLLAVSCDKEELCDNVSLISMPQLVNEHVSSTISLCADSKHVVHIANEVEERELLSSLNTLGYVQFDDFCELDNLKEKLFAKSDLPCPTNAIFHIFGEYNDRGIFLVHRVYICSDLEHLVVLDKICKLERHVTANHIVSSLSCFDCKKQVVFSGLREEHHMEKPRTVFCEEGEDDVTMATMDTTIAHIMNQQEDIKIKSSMCCNLIRPRVTLLTSNGRQIYIRAPFWAREYLMKSSRSPPYNGSSLISEFYLVWPQSQKQGIRLICTGKINNPQRVIINSPKDRAKNSLECREELRVHQVVSELSLLGIRKIIGDSCAQHRHLRRDMRRDQHDHYEVSDDVLGKIKSALPYFEGNYDPRAYINWELAVDSEFQKHVLSEKQKVMCASSVLIKHASNDWKHLCRHNKIPQSWKDLKRYFRDVYVPMYYADIVFNKLQCLKQDTRTVTSYYHDMQACLLRCGLDECEEAKELRFLRGLNKEIQDMLDCQRYTSLSHLLQLACNAESKIEERDIKEPPIPLFTLKVEAPPSSEEDIKGKVNGTKINHGECIVNEVNLSTFHTKVEQPLVESNAGIPLSQVDLLAVPCDKEELCDNASLISMPQLMNEHAISSVSLCADFKHVVHIANEVEERELLSSLNTLGYVQFDDFCELDNLKEKLFAKSDLSCPTNAIFHIFGEYNDRGIFLVHRVYICSDLEHLVVPDKICKLERHVTANHIVSSLSCFACKKQVVFSGLREEHHMEKPRTVFREEGEDDVTMATMDTTIAHIMNQQEDIKIKSSMWCNLIRPRVTLLTSNGRRICIRLPFLAREYLMESSWSPLSNGSSLIAKFHLIEPQLKQQGATSPIMGLWACNFVWDPGPSGAHVGNKVDLHRQDQQPTERCIDR

SEQ ID NO: 196139 - protein, 280 aa, Oryza sativa
  Clone ID: PAT_MRT4530_92019C.1.pep
MATPAAEKPDGVEIREVWEDNLEAEFAVIREIVDDFPYVAMDTEFPGVVCRPLGTFKSNADFNYATLKANVDMLKLIQLGLTFSNEHGGLPSLGPEGRPCVWQFNFRGFDPRTDVAAADSIDLLRRSGIDFTRHSADGADARRFAELLMSSGVVMNSEVRWVTFHSGYDFGYLLKLLTGTYLPDTITGFFDLIRIYFPVVYDIKHLMRFCNSLHGGLNKLAELLDVERVGICHQAGSDSLLTALSFKKLKEAYFNGLTEKYAGVLYGLGTEGGETSSAAH

SEQ ID NO: 196140 - protein, 83 aa, Oryza sativa
  Clone ID: PAT_MRT4530_9201C.1.pep
METLASHRRGPCVLSSPDADFLTGGSVTDVSTRERGCARFHRDEALPVSCIPRIASATMRAAEHPLLLGVVHQAPSAGQGDKQ

SEQ ID NO: 196141 - protein, 163 aa, Oryza sativa
  Clone ID: PAT_MRT4530_92020C.1.pep
MSTAISASRGVLLDLDGDDNINCATCAEEEEVTGAGEKELKAQIMKYIRDNITSVCVAAVIEEAAASSSERGRRWAARLTASSRVGDIRVVPAERCGCDGGISANHHNLARAAGIRPIKKGQAASAQTLLEASSMIADSSSSSQPKAVAVAQDTIEFSEPSGR

SEQ ID NO: 196142 - protein, 1037 aa, Oryza sativa
  Clone ID: PAT_MRT4530_92021C.1.pep
MIKAASNKFTSSALFWWTYVSNKPETWDELKTMMRKRFVTSYYKCTLREKLEHLKQGDRTVREYIHEFKVCIIYSGLKECNENTMTRFFRGLNSNIQAGLVNVTYNHIGQLFMLARSIESQIISKARMHDQCDLSPISESPIYLCNDDVQTLEEQSFISPITNVLQEDQHIQEKENGILEKKEDEAPAMSEESSQGKLNGAERNEGEYSQGELHLSTFHAIVEQPLVESIAELPLSQVDLLVVPCDKEELCDNASLISMPQLVNEHAIPVVNTNCADFKHVVHIANRVEERELTSSLNTLSYIQFADFHELDNLKEKLFAKSDLPCPSNAIFHLFGEYNDRGIYLVHRVYICSDLELPVHVDKTYKLERNVIANQIVSSLPCFDWKKQVVVNGLRKEHHMEKPRTVFREEGEDDVTIATTDATIAHIMDEQEDIEITSSKSWNPIRPPTTLLTSNGRRICIRPPFSARIGLICTGKISNPRRELSLLGIRKIIGDSCAQHRHLRRDMRRDQHDHYEVSDDVLGKIKSALPYFEGDYDPRAYINWELAVDSEFQKHVLSEKQKVMCASSVLIKHASNDWKHLCRHNKIPQSWKDLKRYFRDVYVSMYYADILFNKLQCLKQDTRTVTSYYHDMQACLLRCGLDECEEAKELRFLCGLNKEIQDMLDCQRYTSLSHLLQLACNAESKIEEDMKKQHAMFLSSITNHLQEVHNHEKEERDMKEPPVPLITLKVEAPPLSEEGIKGKLNGAEINKAEQPLVEPTAEIPLSQIDLFAVPCDKEELCDNASLISMPQLVNEHAIPTVNSYCTDFKHVVHIANEVEERELRSSLNTMGYVQFDDFCELDNFKEKLFAKSDLPYPTNVLFHIFGEYNDLGIYFVHRVYICSDLEPPVHVDKICKLEKNVIANQIVSSLPCFDWKKQVVVNGLRKEHHMEKPRTVFREEGEDDVTMATTDATIAHIMDEQEDIEIKYSKCWNPIRPPTTLLTSNGHRICIRPPFSARIGLICTGKISNPRRGVSIAKAQHNVSYGCSRIVNVSPKS

SEQ ID NO: 196143 - protein, 47 aa, Oryza sativa
  Clone ID: PAT_MRT4530_92022C.1.pep
ARGHPSLPQKQALHAFNISLASSDPSSSITTVLSRRERKLIREFIYS

SEQ ID NO: 196144 - protein, 77 aa, Oryza sativa
  unsure (1)..(77): unsure at all Xaa locations
  Clone ID: PAT_MRT4530_92023C.1.pep
HLSLFPYASSLLNSHTGNHLVFRATTVYAIDNAYRKSMEQARTLKYNMGXELGAFTPRYQHQAYPGFSYESNNQALE

SEQ ID NO: 196145 - protein, 69 aa, Oryza sativa
  unsure (1)..(69): unsure at all Xaa locations
  Clone ID: PAT_MRT4530_92024C.1.pep
SSGARRRRGAAPARRRRPPPRRAPPSWPSPAPASSXPAPPAASPPPPPPPPPSRSAPPPSAPRFLAAAR

SEQ ID NO: 196146 - protein, 518 aa, Oryza sativa
  unsure (1)..(518): unsure at all Xaa locations
  Clone ID: PAT_MRT4530_92025C.1.pep
MAGKGEGPAIGIDLGTTYSCVGVWQHDRVEIIANDQGNRTTPSYVGFTDSERLIGDAAKNQVAMNPINTVFDAKRLIGRRFSDASVQSDIKLWPFKVIAGPGDXPMIVVQYKGEEKQFAAEEISSMVLIKMREIAEAYLGTTIKNAVVTVPAYFNDSQRQATKDAGVIAGLNVMRIINEPTAAAIAYGLDKKATSVGEKNVLIFDLGGGTFDVFPPTIEKGFFRVKPPVVATHFVVKFLPLRKTKKDIXGNPRXFRKFRTACKRXKRTLSSTAQXTIEIDSLYEGIDFYSTITRARFEELNMDLFRKCMEPVEKCLRDAKMDKSSVHDVVLVGGSTRIPRVQQLLQDFFNGKELCKNINPDEAVAYGAAVQAAILSGEGNEKVQDLLLLDVTPLSLGLETAGGVMTVLIPRNTTIPTKKEQVFSTYSDNQPGVLIQVYEGERTRTRDNNLLGKFELSGIPPAPRGVPQITVCFDIDANGILNVSAEDKTTGQKNKITITNDKGRLSKEEIEKMVQEAE

SEQ ID NO: 196147 - protein, 68 aa, Oryza sativa
  Clone ID: PAT_MRT4530_92026C.1.pep
FFKKFPREKKFLKKSFKTALCTDGSQTVKLVVISTGGKPFLPHWSWAFGQAGHVLGPANFFLTSTNGG

SEQ ID NO: 196148 - protein, 669 aa, Oryza sativa
  Clone ID: PAT_MRT4530_92027C.1.pep
MLKQLYWQMSVISPRETSASMAGKGEGPAIGIDLGTTYSCVGVWQHDRVEIIANDQGNRTTPSYVGFTDSERLIGDAAKNQVAMNPINTVFDAKRLIGRRFSDASVQSDIKLWPFKVIAGPGDKPMIVVQYKGEEKQFAAEEISSMVLIKMREIAEAYLGTTIKNAVVTVPAYFNDSQRQATKDAGVIAGLNVMRIINEPTAAAIAYGLDKKATSVGEKNVLIFDLGGGTFDVSLLTIEEGIFEVKATAGDTHLGGEDFDNRMVNHFVQEFKRKNKKDITGNPRALRRLRTACERAKRTLSSTAQTTIEIDSLYEGIDFYSTITRARFEELNMDLFRKCMEPVEKCLRDAKMDKSSVHDVVLVGGSTRIPRVQQLLQDFFNGKELCKNINPDEAVAYGAAVQAAILSGEGNEKVQDLLLLDVTPLSLGLETAGGVMTVLIPRNTTIPTKKEQVFSTYSDNQPGVLIQVYEGERTRTRDNNLLGKFELSGIPPAPRGVPQITVCFDIDANGILNVSAEDKTTGQKNKITITNDKGRLSKEEIEKMVQEAEKYKSEDEEHKKKVESKNALENYAYNMRNTIKDEKIASKLPAADKKKIEDAIDQAIQWLDGNQLAEADEFDDKMKELEGICNPIIAKMYQGAGADMAGGMDEDDAPPAGGSGAGPKIEEVD

SEQ ID NO: 196149 - protein, 84 aa, Oryza sativa
  Clone ID: PAT_MRT4530_92028C.1.pep
FLISDNLFGSSLQQFPVIECKQSNLRRFGSLHKWMNKMKSKSLRIAQGKRFVACRGCNQDIKVLGDSELILQPVVQKLRLPLTH

SEQ ID NO: 196150 - protein, 558 aa, Oryza sativa
  Clone ID: PAT_MRT4530_92029C.1.pep
MASSSSNAATSNLFQGHPVSEKLGKTNHALWKAQVTAGVRGARLYGHLTGVTPKPDEEITVTEGGKEVKKPNSAYADWEAQDQQVLGYLLSSVTRDVLVQVATYETAAEVWGIIEQMYTSDSRARSINTRIALATTKRGNMTITEYFTKMKTLKDEMQAGGKPLDDEDFLQYIITGVGPEFSEVVSVVCARVESISIGELYSQLLNFETRKVLYNGAQDTGGFANVANRGGFGGHGGSNVCRGGGAQRGRGRGGNQGGRGGGPGGRGRGRGYAGPDLRPTCQVCFMKGHTAPECWHRFDDNYVNDQKHVAAATYAGYGVDTNWYIDTGAIDHINGELDKLTMKEKYEGSDQIHTASGASMDIRHIGSTIVHAPNNQKIHLKNVLYVPQAKKNLVSVHRLVDDNSAFLELHRDYFSLKDRVTRKTLLKGRSWRRLYPLPKSSLKQACSVEKLSLARWHSHFAHPSSSIVKQVDNKFHLPCSSLAMFEKFQEFQVMVERMFDRKILAMQTDWGDGAPEFSAAEDPVSDPGDDSLEQSAERYGDEAFEFSQHVEKVYRKGI

SEQ ID NO: 196151 - protein, 108 aa, Oryza sativa
  Clone ID: PAT_MRT4530_9202C.1.pep
MQASPYCSTVTIFALDYNKYTRRRLVGEVYASLTLSLSSNSWLQPWQRQHKAPAVTMLHSSNGNMMVLCALPCFVLSFTDSFRDKEGNARYRFVAFKGLWGHRQSSTS

SEQ ID NO: 196152 - protein, 145 aa, Oryza sativa
  unsure (1)..(145): unsure at all Xaa locations
  Clone ID: PAT_MRT4530_92030C.1.pep
QXWEPKHLKEYMGGASRIRVELQAILVMFLLLPLPFLPRVFAAGSSGGNSGELVAGGRETRRKPPAIRSPRFLSGGVPANPGGGHDPPAILVMSLLLPPPFLPCVLAGAGPGGELVAGEEKHQGRVPAVNTILLSLPDAATMDKG

SEQ ID NO: 196153 - protein, 67 aa, Oryza sativa
  Clone ID: PAT_MRT4530_92031C.1.pep
MAASDDGESSATVPSRDAVARRRPHGENLTHETARLCGVAALTCRIYFFKHSKNSASKTTPTVNKIK

SEQ ID NO: 196154 - protein, 132 aa, Oryza sativa
  Clone ID: PAT_MRT4530_92032C.1.pep
MSHGLHTDVGYDCGAGLQKSPSSSAADARRDRSREQRQRMKSKKTSPKEKIIERRGTQAGRGRRRESKQRQQQAGSSASRAAASAAAACMRHELKGESPTPTTPHSLPACSVLRCIYGENEKRVYWSRLPKS

SEQ ID NO: 196155 - protein, 166 aa, Oryza sativa
  unsure (1)..(166): unsure at all Xaa locations
  Clone ID: PAT_MRT4530_92033C.1.pep
RHQRGKGWRRQAVPTRHRLXRALAHGGPSPXTGEGRFTTWRTRGDHAGGRMDGGGGGGGTRPARTGGSSRPXAMARRRHGTGGDRRTAVAWWRLCSGATRRKEREKRRGRPHRRGPTGVEGDDGERRRGTMEGGRRAADRAAAMAELTGGRGGWGSGDGQRRSSGG

SEQ ID NO: 196156 - protein, 63 aa, Oryza sativa
  Clone ID: PAT_MRT4530_92034C.1.pep
MRMKEPKSSHSKEVKSSTNGERTVVFLGQRARLGKRKPAKEGLRNLAWEGYQPPNREEMGGGG

SEQ ID NO: 196157 - protein, 81 aa, Oryza sativa
  Clone ID: PAT_MRT4530_92035C.1.pep
IIAEATGVTFSSIENEVTIQDGRVRAVHRWPCRSSATGVCVTTVKFGRYKSHVDEEDGRAAAVDVGEIYADEGRSFPAVRH

SEQ ID NO: 196158 - protein, 149 aa, Oryza sativa
  Clone ID: PAT_MRT4530_92036C.1.pep
NSISKVLWMATLHPTSLPNWNRMRISVNIITQNRAKSLRRLLASLRNACYVGDEVPISFSMDSYIDAATLNAVNSFDWPHGGKTLQRRIIQGGLIRVQRAAWWPAQIARLASLYYSHIYIYIYIYIYIYIYIYIYIYQPVTRSANLSTL

SEQ ID NO: 196159 - protein, 732 aa, Oryza sativa
  Clone ID: PAT_MRT4530_92037C.1.pep
MSSSASPSVTPSAEYAEVSSHWLDPFSSHEIDFPFSHRVFFFPIPLDLLHLSNLVAIPSLSHENHYFLGPIGNLDPTDFIIGETNRIPFRLANPNLGHWKNTFKSWPSLEKPTPEKSWTTWYQGVSASKKVHWDEIGIGQALALTIANSAKGEPLMTAATYFWSNTINAFMFNQGPMTPTLIDITMITGLDVTSSANPMSMNTKNQFDFRTKSIGGWSGYVAAYMGKGPVTPREHVAFLLMWLEKFLFCGSSCGPTTNWQFVAEALESKRQFPLGKILLGYLYQMLNSASAKIAVDSIVGAGGPWWLLQAWLNLMVMKVVNRPAVTEAEFPRLEPIVEDDGEERTHRRCMSYEEYASTPADAGAKLSAELLKDWFCSFYEGFQKDARIQCRGEISSTLMMDRLLNLQGPPLGSIENIELAGFKSKNFDRWWGEWKLHLFHQSASMYMTYLFPDVVPKTIDSSPPHQSNNGRDIEYAPGLIPNGGRLSLSVIGYHAPKVSTLVQGIIREPTDAAKKRKTRSSAVGTLTLAPKKKAKSKKSKPTDDMPALDPSIEQALDEGDIEDDVDQATAEILADLFSFDIRDYLDEAEEDTSSKALAPLSDDVKKTLEDISRRLEASSLDSLVVNCGSIRTRLYEIQALIPDKLADILTPAVYLEQHQFKLEKAKLRLAERREHKDIESTIQANRQLFHEEKTKLDQLSKGLIKSNIDRLEARKIELLAQLEECNAELDME

SEQ ID NO: 196160 - protein, 632 aa, Oryza sativa
  unsure (1)..(632): unsure at all Xaa locations
  Clone ID: PAT_MRT4530_92038C.1.pep
MSSSASPSAAPSAEYAEHLSNLIAIPNLSHENHYFLGPNGNLDPTDFIIGETNRIPFRLANPNLGHWKNTFKSWPSLEKPTSEKSWTTWYQCVSASKKVHWDEIGIGQALALTITNSAKDEPPMAAATYFWSNTINAFLFNQGPMTPTLIDIIMITGLDVTSSANYHCGPTTNWQFVAEALESKKQFPLGKILLGYLYQMLNNASAKIAVGSIVGAGGPWWLLQTWLNLIVMKVVNRPSITETEFPRLEPIVEDDGEERTHCRCMSYGEYASTPADAGAKLSAELLKDWFCSFYEGFQKDAQVWFPYEDSADLELPSDFRFEDINHERYQTSREVFTAAISPCILHVGIHQGRNIQVSYEFYHPVSSARQLGLGQLPIGLFFADKIQCRGEISSTLMMDRLLNLQGPPLGSIDNIELAGFKSRNFDRWWCEWKLHLFHQSASMYMTDLFPDVVPKTIDSSPPHQSNSSRDIEYAPADLFSFDIRDYLDEAEEDTSSKALAPLSDDVKKTLEDISHRLEASSLDSLVVNCGPIRTRLHEIQALIPDELADILTPTVYLEQHQFKLEKAKLRLAERRERKDIEATIQANRQLVHEEKTKXFDQLSKGSIKSNIDRLEARKIELMAQLEECNAEL

SEQ ID NO: 196161 - protein, 59 aa, Oryza sativa
  Clone ID: PAT_MRT4530_92039C.1.pep
KRIMYIVYDTSKLTSAESMEKHVITHVMTIHRQRRAAPLTEECRLSRTPPCAAVNKVSE

SEQ ID NO: 196162 - protein, 509 aa, Oryza sativa
  Clone ID: PAT_MRT4530_9203C.1.pep
MGILSRLPTGQRATTLLDLMIIRAFHSKILRRFSLGTAIGFRIKKGTLTDTPAILVFVARKVHRKWLSPTQCLPAHLEGPGGVWCDVDVVEFSYYGAPAPTPKEQLYDELVDGLRGSDPSIGSGSQVASLETYGTLGAIVKSRTGNKQVGFLTNRHVAVDLDYPNQKMFHPLPPNLGPGVYLGAVERATSFITDDVWYGIYAGTNPETFVRADGAFIPFADDYDITSVNTSVKGVGVIGDVKAIDLQSPISSLIGRQVVKVGRSSGLTTGTVVAYALEYNDEKGICFFTDFLVVGENQQTFDLEGDSGSLIILTGKDGEKPQPIGIIWGGTANRGRLKLKSGQGPENWTSGVDLGRLLDLLELDLITTSEGLQEALEEQRIILAAAAAAANSTAGESSPVAGPQENEKVDKIYEPLGINIQQLPRDNSATSTGPDEFHVDTVEGVTNVEERQFLIGMSPAREGQEANGDLNNLAELENSPEDICFSLHLGEREPKRLRSDSSLDIDLQK

SEQ ID NO: 196163 - protein, 476 aa, Oryza sativa
  Clone ID: PAT_MRT4530_92040C.1.pep
MAMEGEEREGAWALRAAMSVWNRLGRSRRELALGARVQSATGRREDDAGGRKRGKGGMGRGARPFLLWEKEEGSGGVTAEGGGLCLRPLAACTRGGGAEAMTTAMTAGRRLPGDFILDQISARSNVIFRQLICRAIGRVCRDLFPDVVPKTIDSSPPHQSNSGRDIEYAPGLIPNGGGLSPTVIGYHAPKVSTLLQGAIREPTDATKKRKTRSSAVSTLILAPKKKAKSRKIKPTDDLPALDPSIEQALDEEDIEDDVDQAAAEVLADLFSFDIRDYLNEAEEDTSSKALAPLSDDVKKTLEDISHRLEASSLDSLVVNCGPIRTRLHEIQALIPDELADILTPVVYLEQHQFKLEKAKLRLAERRERKDIEATIQANRQLVHEEKTKLDQLSKGPIKSNIDRLEARKIELLAQLEECNTELDMEQKKLADFPMSIEEQKAKLKLAIKNVTDLTKCLKVIPGTDAQDAQAIEVEQI

SEQ ID NO: 196164 - protein, 217 aa, Oryza sativa
  unsure (1)..(217): unsure at all Xaa locations
  Clone ID: PAT_MRT4530_92041C.1.pep
QASRAALLGTRPPGRGGRGGGGGSFDAGEGEGARLLRWRRVSCVSDKSGGGGESLLQASRIFFLAILSPVRHSYRRIRVWXISASMYWSVSYTSRSGRAPPLGSAGPNPSFTTSLHTSIDLEYSRYQPRRELVLVHSPAGAPXLLTPQVDVRLHACRLYLGVPPPSVGVAAPCPGGLLPSSAACQPPRRHPRPACRPPRPACRPPHLLPLHSSRLFP

SEQ ID NO: 196165 - protein, 1274 aa, Oryza sativa
  Clone ID: PAT_MRT4530_92042C.1.pep
MAEYLVGPLLSKVLEKASSFLVDMYKVMDGMEDQRETLERLLPAILDVIQDAEEKKNHRSGLVCAWLKSLKKVSYEAIDVFDEFKYESLWREAKKKGHRNHTMLGMDSVSLFPSRNPIVFRYRMGKKLRKIVEKIKELVSEMNSFGLVHQQETPKQWRKTDSIMVDFDKDIVIRSRDEEKKKIIRILLDKANNTDLTVLPIVGMGGLGKTTFAQLIYNDPEIEKHFPLRRWCCVSDVFDVVTIANNICMSTERDREKALQDLQKEVGGKKYLIVLDDVWERDYDKWGKLKTCLKKGGMGSAVLTTTRDAEVARIMVTGEVEVHNLENLGEIYMKEIILRRALTLPNNDEHFGILCKIVHRCHGSPLGAKAFGSMLSTRTTMQEWNDVLTKSNICNEGEDKIFPILRLSYDDLPSHMKQCFAFCAIFPKDYEIDVETLIQLWLAHDFIPLQEEDHLETVAQNIFKELVWRSFFQDVNKISQREENVYRSQLRDRTTCKIHDLMHDISQSVMGKECLSIIGSSNLKNLMREHPLYHVLIPYTSIALPDDFMGNEAPALRTLLFRGYYGNVSTSHLFKYNSLQLRALELPRREELPIRPRHLQHLRYLNLSDNSNIHELPADISTMYNLQTLNLSDCYNLVRLPKDMKYMTSLRHLYTNGCSKLKCMPPDLGQLTSLQTLTYFIVGASASCSTLREVHSLNLSGELELRGLENVSQEQAKAANLGRKEKLTHLSLEWSGEYHAEEPDYPEKVLDALKPHHGLHMLKVVSYKGTNFPTWMTDLSVLENLTELHLEGCTMCEEFPQFIHFKFLQVLYLIKLDKLQSLCCEEARDGKVQIFPALKEVKLIDLERFESWVETEGKQENKPTFPLLEEVEISNCPKLSSLPEAPKLKVLKLNENKAELSLPLLKSRYMSQLSKLKLDVLDKEAILQLDQIHESSLSNMELRHCNFFFSTIPSEPIIGIWKWFRQLVYLEIKSSDVLIYWPEEEFLCLVSLKMLAIFGCVNLIGRTTLVKGEPTRCATDQFLPCLTSLSICCCDNLRELFVLPPSVTHIHVSGCRNFEFIWGKGDIESENVHVEHHDTFTSSEHCNDLEYRSVPEQSSSAVNHPLPCLEMIHISFNDKMVELQNLPPSLTSLEFHSCPKLQSLSGQLHALKFLDIRCCNKLESLNCLGDLPSLERLCLVSCKRLASLACGPESYSSLSTIAIRYCPAMNMKPLYERLRPRLDILKERDLSHAHAKCPYGGVIHFSLGTEHKRPTLWDPKSWKYAIPGCRWLQV

SEQ ID NO: 196166 - protein, 327 aa, Oryza sativa
  unsure (1)..(327): unsure at all Xaa locations
  Clone ID: PAT_MRT4530_92043C.1.pep
LRGEKYTQGPSTCHRDTKSLLSFSRILSLSHFSLTLPFSSQASRAALLGRRPPGRGGGGSGSGGCDAGEGEGARPLRWRRASCXDKSGGGGASLLRASRVFFLAMLSPISASMYWSVSYTSRSGSAPPLGSAAGPNPSFMTSLHTSIDLEYSRQSRTISAXEPRRELVHVHPPAGDRMRRRDRRWLWAFAGAPRPGSTKTVRAQIIEQCTXSPSCTXLRKLAGADHGAPQFRVFCIQPRGXLLYPQVDVRLHARRLHPGVPPPSVGVHQPRPGGLLPGSASNAAYLRREGKXRQMRKGENRGKIEEADVAQADMWGPRGSHADSAAT

SEQ ID NO: 196167 - protein, 325 aa, Oryza sativa
  Clone ID: PAT_MRT4530_92044C.1.pep
MRVERVADLPVAMHQPTLLPVGSSSIATADTYEMNMQVGYRASRAALLGTRPPGRGGRGGGGGSFDAGEGEGARLLRWRRVSCVSDKSGGGGESLLQASRIFFLAILSPISASMYWSVSYTSRSGRAPPLGSAGPNPSFTTSLHTSIDLEYSRYQPRRELVLVHSPAGPHMRRRDRRWLWAFAGAPRTGSTKTVRAQIIEQCTASPSCTLRKLALGALQLAEADHGAPRVRVFCIQPRGERLLHPQVDVRLHACRLYLGVPPPSVGVAAPCPGGLLPSSAACLRREGKGEREMRKGENRGKREEADVGQADICNSCGSHADSAAT

SEQ ID NO: 196168 - protein, 261 aa, Oryza sativa
  Clone ID: PAT_MRT4530_92045C.1.pep
MYELPPRFNAEIVRDCRLYSRSMDVCKLVMNDGFGPAALPSGGALPERDVYDTDQYMLALIYHARMRRYECLTGESMARKKTRDARSKLAPPPPDLSDTTLAAIGADVRPRLLPHRSRRCRFLPHLAPGASSPAAPPGLPEKRREERKECKCALLGEEGIEINVGVEVVIDGVLNEGVDVLAIPEEGREKEGDNEGGDWGSGERHATARKEQLEEEGSVGRGLAGREALNDNMRRSIIYHLLTANLMLVNLIISSIWLVGS

SEQ ID NO: 196169 - protein, 121 aa, Oryza sativa
  Clone ID: PAT_MRT4530_92046C.1.pep
MRLSITSLVAVLPAVILAVPAPGVSNQHAAPLIRARSPGKAIPGKYIAKFKESATDAALNKALGSHKAGHVYRAKGLKGFSGALDADSLEAIRQLPEVEFVEEDALFTAYPIVTQTGAPWH

SEQ ID NO: 196170 - protein, 342 aa, Oryza sativa
  Clone ID: PAT_MRT4530_92047C.1.pep
MAAPAPPAPPPRPPFKVRIRIKPARAARAEEDAGKQEERLPMDHPLSTTTTTKRRPEGEESSGAASQPAPERVNPTGTTTPAARAAASCCVNEEALASSSHAGGRDDGASAIKKCKDGEGRQEDAKNAQESSGMTSPAVHSARATSPAPPPSRTKKETPVRAHAAVRDDDATPPRAIKSCKNGERGQEKDAESAQGCARTRSPPVRSARATTPAASPSRSKKETPVRAHAAVRGDDATPPRAIKKCKSDERRQEKDGESAGQCATTSSPRVQPSPTPSPAPAARPDPSAAENSLREAIERARPHMRRDIARQREAARREIASMVRTVEFNDPFISPEDVNKP

SEQ ID NO: 196171 - protein, 179 aa, Oryza sativa
  unsure (1)..(179): unsure at all Xaa locations
  Clone ID: PAT_MRT4530_92048C.1.pep
TPGPRLGQCGAHAVXLLPHMRATKRCPIAFTXGDGVYVMEAAAPEPAXMRGAEHCFEALVHGLPRRRRGVAPPSSRTGTGVPHGAALRSRPRRRRRAARVAAHAVVRDSQIWVXTERHGTFTFDTASGACPRXGDWALPFRGRAEHXPEHSLWFGFSPHHDGHSXASDLTATPPSLRHT

SEQ ID NO: 196172 - protein, 170 aa, Oryza sativa
  Clone ID: PAT_MRT4530_92049C.1.pep
MWLLPKEEVDWILAQCNEPICARFRELKRANPSLVPSPEEKDEYTMLLYECTRESYEDEAKYAKFQDWVRGEYARKGFVEVDYDYFAKREEAIWLNEEAREEVLGHWSDRHHPSHTDLDDEDWKLKMWRLPKEEVDWILSQFNEPVCAWFRELKRANPSTSTDPSICDGP

SEQ ID NO: 196173 - protein, 388 aa, Oryza sativa
  Clone ID: PAT_MRT4530_9204C.1.pep
MLAVVGAALLVVLYARLVSRVFRAARRRWRRRRRRRLLMIPGSPADDSFATFTTYDNYYHTFSPYGLDDAAIKSLPSAQYLKSSAMAARGGGGGGGADTAARDCAVCLLEFADGDELRALPLCAHAFHADCIDVWLRAHASCPLCRAAVALPPPVASPLRAARRVRPSLDDLLFFHPVPQPPHAAADPLRRAGGDHPGKPGPQPPSILAAARRASAAAAASSRLRCGDPEALLSPDRLSRATLQVTAPPREEGGHGLALLLWLPLRRPALPRRGLQGGLLAATALPGEKAQPTTRRMLPRRAKGRRSGVRLRCWWREQEESIVTRRKGLVGTDEDHSDTLIALQHPPVYTLGTDSTEDYLHFDVKDAPFEVHRIDRGGEVTYHGPGQA

SEQ ID NO: 196174 - protein, 52 aa, Oryza sativa
  Clone ID: PAT_MRT4530_92050C.1.pep
IGIDIFIQIGYHPDVSTGSHTSDAVTLFFSRVVLLYVVQLQLTQKISQRERR

SEQ ID NO: 196175 - protein, 142 aa, Oryza sativa
  Clone ID: PAT_MRT4530_92051C.1.pep
DEPAIGIPYHPAAAGAQGGYYYAPDPYAAGMPPPNAIYAGAPKGVPLQQTMFRDTPAPFHCQACGAAAVSSLRSKPSLASVVACMMPFMMGVCFLCPSMDCLWHKYHYCPSCGEKVAEFKKSDPCLVVDPTRWSEPSFAVPA

SEQ ID NO: 196176 - protein, 97 aa, Oryza sativa
  Clone ID: PAT_MRT4530_92052C.1.pep
MVEEVEGRGEGARELAGDMATWGKWSAVSARAARARSGQVDQIRAMRSSSSSNPSGSGGSSSRHPNEPQRRPFTTATADDPSTTAVDVALPPPALLS

SEQ ID NO: 196177 - protein, 199 aa, Oryza sativa
  Clone ID: PAT_MRT4530_92053C.1.pep
MAAKAAFPAPAGDEPAIGIPYHPAAAGAQGGYYYAPDPYAAGMPPPNAIYAGAPKGVPLQQTMFRDTPAPFHCQACGAAAVSSLRSEDTIFFPVHGRSKPSLASVVACMMPFMMGVCFLCPSMDCLWHKYHYCPSCGEKVAEFKKSDPCLVVDPTRWSEPSFAVPALYFRRKRVKFFGGRSNARVAKRDKSESTCAHTA

SEQ ID NO: 196178 - protein, 117 aa, Oryza sativa
  Clone ID: PAT_MRT4530_92054C.1.pep
MQVQASRAVRRDAADVRQPLTAHKFFHSRSAAGSIHRGLVAHETRTSLYRLGGVTLTRAHAHAGFTMCGGATGACSKCPRVEMRYALSGAFVSGPYRSYRRFATLESRLNLHTIHAR

SEQ ID NO: 196179 - protein, 100 aa, Oryza sativa
  Clone ID: PAT_MRT4530_92055C.1.pep
GRDGFPHSVCFLFLHLVLSCFKLLYYIQCLYYIYILLTPSLHSVTSAGAMFTVNTSHILLLNVATERCMLPPPYYLWEFDSGDRLLAGIELVFPAYAAPA

SEQ ID NO: 196180 - protein, 656 aa, Oryza sativa
  Clone ID: PAT_MRT4530_92056C.1.pep
MPGLHVVSFLVVLLLQLMPGLHVVSFLVVLLLQLRSSGMHLVASELFWGNTLPNGDIYVGSFDGLVPHGPGKYMWTDGALYDGEWDKSKMTGRGLIQWPSGASYEGDFRGGFIDGAGTFKGVDGSVYKGSWRMNKKHGMGTMVYSNSDTYEGFWNEGLPDEFGKYTWADGNVYIGRWKSGKMNGSGVMQWINGDTLDCNWLNGLAHGKGYCKYASGACYIGTWDRGLKDGHGTFYQPGSKIPCNLEVSDCLTSHDGTSASSSSNEKITIGLLFLLQKLCKNWRLRRFLHRPRRISNGTTPVFDDNSGSHLCQDVSSKSFSADDQCLQDSEVDKDSVYEREYVQGVLIMEQPKNEDSRMSESGIAQENNWEKQAKGPMETIYKGHRSYYLMLNLQLGIRNLREMFHIDAADYMMSICGGDSLKELSSPGKSGSIFYLSQDERFVIKTLRKTELKILLKMLPKYYNHVKAYDNTLITKFFGVHRITLKPGRKVRFVVMGNMFCTELRIHRSVALHHEETISSKGFLLVAADEPGPAVRGSHIRGSMVRAAEGGYEEVDLVLPGTGRFRVQLGVNMPARARKVQEDVNVEVENRDTIEEYDVVLYLGIIDILQEYNVSKRVEHAVKSLKFDPLSISAVDPNLYSRRFISFLEKVFPEQD

SEQ ID NO: 196181 - protein, 116 aa, Oryza sativa
  unsure (1)..(116): unsure at all Xaa locations
  Clone ID: PAT_MRT4530_92057C.1.pep
MVCLRVYGRFRHKLRKSIMESTDRKSPTRIELGRHCIVPSPMSPSPTWKPIDLXILKGPPGGSXASNLTANTSTTTYEAEVYRSQVAGXSSRINSTTISSVSAHPYTLYIRSTGIP

SEQ ID NO: 196182 - protein, 86 aa, Oryza sativa
  Clone ID: PAT_MRT4530_92058C.1.pep
RVVVVATNAGHARSRWQHNIHQSSYDRPSGPAAHRKDPVASPGSKEIRPFGKHKSKSKLRELDQQVILWMAIQHVTLTLDETHDIS

SEQ ID NO: 196183 - protein, 459 aa, Oryza sativa
  unsure (1)..(459): unsure at all Xaa locations
  Clone ID: PAT_MRT4530_92059C.1.pep
MLRNAGDGVGITTFGKREQDPSDIMDEANVASSFHLMSKTVQGFADDKYPAYKDRHKLATEREKVIKEKAEKARVQRYGGVNSSGIVPSPRSALPPKLAQIKEKAPTANAESSDQPSDNQNNPLVVTQLKLANIEKRAPRVPRPPPAPSATANTASALSPPPPRPPGAPPPPPPPGKPGGPPPPPPPPGSLPRNLAGGDKVHRAPEXVEVYSDEAGEARVQREGGINNQGIFLGHLLVKADVETQGDFVESLANEVRAASFVNIDDVVAFVNWLDEELSFLVDERAVXKHFDWPESKTDALREAAFEYQDLLKLEHKVSSFXDDPXLACEEALKKMYSLLEKVEQSVYALLRTRDMAISRYREYGLPVDWLSDSGVVGKIKLASVQLAKKYMKRVATELDTLQGTEKEPNREFLLLQGVRFAFRVHQFAGGFDEESMKAFEELRSKMSTQTSAPQNSDV

SEQ ID NO: 196184 - protein, 506 aa, Oryza sativa
  Clone ID: PAT_MRT4530_9205C.1.pep
MESPLSHPAMVALSLLLLVALYLARRAVLGKKRRYPPVAGTMFHQLLNFGRLLEYHTELSRKYRTFRMLTPTCNYVYTVEPANVEHILKTNFANYGKGPMTHDVLEDLLGDGIFNVDGGMWRQQRKVASLEFSTRVLRDYSSAVFRDTAAELAGILERGPAAKGRERVDMQDLLMRATLDSFFRVGFGVNLGVLSGSSKEGLVFARAFDDASEQVLFRFFDLLWKVKRFLNISSEATMKQSIRTINDFVYSIIDRKIEQMSREQHEFAKKEDILSRFLLEREKDPGCFDNKYIRDIILNFVIAGRDTTAGTLSWFLYAVCKNQRVQDKIAREVRDATTGDRDVGVQDFSSFLTEDAINKMQYLHAALTETLRLYPGVPLDVKYCFSDDTLPDGHAVKKGDMVNYQPYPMGRMKFLWGDDAEEFKPERWLDDSGMFVAESPFKFTAFQAGPRICLGKEFAYRQMKIVSAVLLYFFRFEMWDDDATVGYRPMLTLKMDGPFYLRALAR

SEQ ID NO: 196185 - protein, 762 aa, Oryza sativa
  unsure (1)..(762): unsure at all Xaa locations
  Clone ID: PAT_MRT4530_92060C.1.pep
LHRNRSPLENHGITLDEKDEVQLGRPRWIMMVKVWTLKMSISERQEERKKLQDDVARVKGAKRELEAARKKMKELQRQIQMEANQTKGQLLLLKNQVIALKSKEEEAAIKDAEVQRKLKKLKELEVEVVELRRKNKELLYEKRDLIVKLDAAQGKITERIALTKTPRMRNWLSRCTIEKDLGRRGGKKVADPIEPTVAKAELSKNIKESDVVSHAREEINKLRHANEDLTKQVEGLQMNRFSEVEELVYLRWVNACLRYELRNYQAPSEKISARDLNKTLSPKSRERAKLLMLEYAGSERGQGDTDLETASSAPSSPRSEDFDNVSVDSSSSRYSFFGKRPNLMQKLKKWGRGKDDGSSLASPTQSFTSDSPKSASQKPKGPLEALMLRNAGDGMGITTFGKREQDPSDIMDEANVASSFHLMSKTVQGFADDKYPAYKDRHKLATEREKAIKEKAEKARVQRYGGVNSSGIVPSPRSALPPKLAQIKEKAPTANAESSDQPSDNQNNPLVVTQLKLANIEKRAPRVPRPPPAPSATANTASALPPPPPRPPGAPPPPPPPGKPGGPPPPPPRPGSLPRNLAGGDKVHRAPEVVEFYQSLMKREAKKDTTSLGSTTSSVSDVRSNMIGEIENRSTFLLAVKVDVETQGDFVESLANEVRAASFVNIDDVVAFVNWLDEELSFLVDERAVLKHFDWPESKTDALREAAFEYQDLLKLEHKVSSFTDDPKLACEEALKKMYSLLETDMAISRYREYXIPVDCCL

SEQ ID NO: 196186 - protein, 301 aa, Oryza sativa
  Clone ID: PAT_MRT4530_92061C.1.pep
RGQLAVGATPLRGPASRPRSSTQRRAAAGGESGARLGPGAAAAGRLGSGVGPAGSGSALGPDRPSRLRDSPAARSPPVESRGIRWWSWEKPRRDNSGFEKLRRGNRQTALALASRRRPPRRRAKPAFPAGAAGGCPTLVTPVDPTPTADAAHIFGYYCPRAEVRPIYAHDCKNRPDHRANGKNQDLQPLRFTDERTRHMAFRQYRPNRRSKKLRRFGGGSEFLYYYCYAAATNGFHWLQSHTSNPPGADLSLANATHYAVVVTTTTALYATNLVSFADRSAIRRRRTFTLLLVNPFVGVAR

SEQ ID NO: 196187 - protein, 434 aa, Oryza sativa
  Clone ID: PAT_MRT4530_92062C.1.pep
MYDVAGERWSGGCGGHHRRLMGASSSSAPAPAGEDDAGKSGSSKDAMKIMVSVLVVVIFCTLLYCVYCWRWRKRNAVRRAQMERLRPMSSSDLPLMDLASIHAATDSFSKANKLGEGGFGPVYRGVLPGGGAEIAVKRLSARSRQGAAEFRNEVELIAKLQHRNLVRLLGWCAERDEKLLVYEFLPNGSLDAFLFNEGKSAQLGWATRHNIIVGIARGLLYLHEDSLLKVVHRDLKASNVLLDDKMSPKISDFGMAKIFEDECNEVNTGRVVGTYGYMAPEFALEGVYSVKSDVFSFGVLLLEILSGQRNGALYLEEHQQSLIQDAWKLWTEGLAAEFMDPALGRGYAAEEAWRCYHVGLLCVQEDADARPTMSNVLLALISDHMNLPEPSRPPMFTRLRRALLLAPPLMTTKTDSTASPVSVNDVSITVIEPR

SEQ ID NO: 196188 - protein, 138 aa, Oryza sativa
  Clone ID: PAT_MRT4530_92063C.1.pep
FCVFFFFGFFFFFFFFFFFFFLGTHGGISRRFVFGASKTPNQWPNKLGLVNWKPPFWFPIPPFFGDINFWPLVGKNNGWGGGQNPKCFFFKAPKVLGEKIRGPPAHRKEKTSGWCFFLAKLLGGGTGGPRLLKLQTGG

SEQ ID NO: 196189 - protein, 100 aa, Oryza sativa
  Clone ID: PAT_MRT4530_92064C.1.pep
GQGGQGGGARKLVCPVNSRRDSSWFGPRRGVLSLAWGGWDSCSCFEMDPNAVGSRLERTRACCWVALPGVSPPPIWFVLVHTNVAVLFMSVNTQWVPPKN

SEQ ID NO: 196190 - protein, 60 aa, Oryza sativa
  Clone ID: PAT_MRT4530_92065C.1.pep
MAFRFPRGHASDRDAATSDGCCGFYRSPQSNPTRRPQLAPLCDRSYAARRGMPFQPLEVR

SEQ ID NO: 196191 - protein, 159 aa, Oryza sativa
  Clone ID: PAT_MRT4530_92066C.1.pep
MAAPLRRSLPSLGRTLLSPSPAPARMLSAAASDALVEIKPGEIGMVSGIPEEHLRRKVVIYSPARTASQQGSGKVGRWKINFVSTQKWENPLMGWTSTGDPYANVGEAGLTFDSADSAKAFAEKHGWDYVVRKRHTPLLKAKSYAENFKWRGPPKAEQA

SEQ ID NO: 196192 - protein, 200 aa, Oryza sativa
  Clone ID: PAT_MRT4530_92067C.1.pep
MAAPLRRSLPSLGRTLLSPSPAPARMLSAAASDALVEIKPGEIGMVSGIPEEHLRRKVRCFADLTSDLCSGDRLASPRGSVWESLEMSRTWEECAALQVVIYSPARTASQQGSGKVGRWKINFVSTQKWENPLMGWTSTGDPYANVGEAGLTFDSADSAKAFAEKHGWDYVVRKRHTPLLKAKSYAENFKWRGPPKAEQA

SEQ ID NO: 196193 - protein, 404 aa, Oryza sativa
  Clone ID: PAT_MRT4530_92068C.1.pep
MARRGGGQTYGFPIYCASWLPLAHILNPPPPVEEGDADADAGAASSESPATPPPPPPLMAALGGGGGEGRSGVPNALVVAALDTSAGAAAAAALSPDPVLRMGTEEQVPYRMGVHPRGDGVLCAFPNGCRLFRWESQEGEGPDNIALRADQEALTELSDAGLQLAVSFSGEGSILATGGEDGHLRVFKWPSMDSILEEPDTKTSVKDLTFSSDEHFLAVNRSSGPCRVWDLKSAEVVANLPREAGEIFGFCRFSNQTDNSQILFVTAMQGDYGKIISWNTTSWTRIGSNKITREAISAFAVSPDCTLLAIGTIEGSIIVLSSKNMRSLVTVKKAHLGIITTLAFSQDSRTLLSTSFDSTARVTSIGSPKSRGISIWTMILVIILAILAYYYMQHKEDLLARFLH

SEQ ID NO: 196194 - protein, 897 aa, Oryza sativa
  unsure (1)..(897): unsure at all Xaa locations
  Clone ID: PAT_MRT4530_92069C.1.pep
MWLFWRSRNRFSLEELRYLTDQLQKVHIVYEANKDFVVEALRSIAELMIYGDQHDPSYFEFFMEKQIMGEFARILRISKLSRVSLQLLQTMSIMIQNLRNEHSIFELYMLYETQSCNRFSLYYMQDEVISFPLYVEALKFAFHEDSMIRVAIRTLTLNVYHDRSFLSVGDESVNRFVSRAPLSDYFSDMVNHFQKQCIDLDKLVVRSVRNADSAVPTASVEDAIVQIEDTLYYFSDVMSSGIPDLGRFITENILQLLVFRFLLPSLQRQSTMVISTGNGDKAVVCSMLYISKHDVHDIRCVDDSVVIIITKELDESMLDALGILPQRKQHKKLLLQALVGEDLAERQLFSSSSGLADDSICSDFDMYVRKLQDKYGLKCHHPRQMTSKFHRYQVLDALVALFCRSNVSADVRLVGGWLFRQLLPHGEEEFTAFHLKWLKDSHKDYSIKLLDESGGCWRDLLVPIVKEAWKNCKKGDSSIAIAERIYEMVKEMWPQRFTSVIIVLMYKVYNYFGVCKVPYRPTFVCHTEYQTSKCSLKYFEHYQQCSSILLLAVDLQKMRRTPKHNTHPNADEILYQSPSIEISTDHKQPRERTEMNANIRHDKTCAITESLMLSRSWLARWTVNGARYESPRQVLSHGGMVSWQCCGAVWCGLSVMVPTHAASRHIWLGPSAVLRSLNLSHVESNDQGFVLQRQVILFCLGETLTDQPPIFSPTDLPVNNRATLAGFDGSVPKPGLEVNLVDAVPCRIAFERGKERPFCFLALSNGTSGWILVXEYLPLKEKSGLVRVSAPLAVSDPRIDEMHANWXDLRIRPCRVPFLDTEKYKGKPRKYLVDGRWTLAFRDEQSCKEPETMVIEEMKLHQGAVGEQLKLLLEFDMPEDGLQHPCSSHETTSDDGS

SEQ ID NO: 196195 - protein, 509 aa, Oryza sativa
  unsure (1)..(509): unsure at all Xaa locations
  Clone ID: PAT_MRT4530_9206C.1.pep
MLAVVGAALLVVLYARLVSRVFRAARRRWRRRRRRRLLMIPGSPADDSFATFTTYDNYYHTFSPYGLDDAAIKSLPSAQYLKSSAMAARGGGGGGGADTAARDCAVCLLEFADGDELRALPLCAHAFHADCIDVWLRAHASCPLCRAAVALPPPVASPLRAARRVRPSLDDXSSSTPSRNHPTPPPTPPPRRRRINPGKARNPVGPRDDFLLKRSYSFGFERHLLAVEAPSTASPPWRYRLNIGGGGGGADGPNRGGRSSFWSKRWPSPFGGGGGAAAASRVFSFRSYRSAAAKSSPFSRRRGGTGPGGATAPGGGFFMSLASEPPSILAAARRASAAAAASSRLRCGDPEALLSPDRLSRATLQVTAPPREEGGHGLALLLWLPLRRPALPRRGLQGGLLAATALPGEKAQPTTRRMLPRRAKGRRSGVRLRCWWREQEESIVTRRKGLVGTDEDHSDTLIALQHPPVYTLGTDSTEDYLHFDVKDAPFEVHRIDRGGEVTYHGPGQA

SEQ ID NO: 196196 - protein, 309 aa, Oryza sativa
  Clone ID: PAT_MRT4530_92070C.1.pep
MAAAATVLVVCSTALASAATPPKPSSMVVITPTKQGGVGKRNSAFTCEDTRRRRPKCMATCPDRCRTKCLVLCPTCKTFCLCDFYPGVSCGDPRFTGGDGNNFYFHGKKDRDFCLLSDAALHALGVLFGDRHHRLALAAARAARWDPAADHLELTFDDDRVDLPRHDGARWSPPGAPALSVTRTAPANGVVVKLRGVFRIVASAVPITREESRAHNYGVADDDCLVHLDLGFKFEALTDDVHGVLGQTYRSDYVNTLNVTSNMPVMGGAANFLTTGLFATDCAVARFAKPATAAAAGAGISLVTDAKYV

SEQ ID NO: 196197 - protein, 330 aa, Oryza sativa
  Clone ID: PAT_MRT4530_92071C.1.pep
MAAAAAVLVVCAAALASAATPPKPSSMVVITPTKQGGVGKRNSAFTCEDTRRRRPKCMATCPDRCRTKCLVLCPTCKTFCLCDFYPGVSCGDPRFTGGDGNNFYFHGKKDRDFCLLSDAALHVNAHFIGKRNAAMSRDFTWIQALGVLFGARHHRLALAAARAARWDPAADHLELTFDDDRVDLPRHDGARWSPPGAPALSVTRTAPANGVVVELRGVFRIVASAVPITREESRAHNYGVADDDCLVHLDLGFKFEALTDDVHGVLGQTYRSDYVNTLNVTSNMPVMGGAANFLTTGLFATDCAVARFAKPATAAAAGAGISLVTDAKYV

SEQ ID NO: 196198 - protein, 147 aa, Oryza sativa
  Clone ID: PAT_MRT4530_92072C.1.pep
MAEQFNYLRVLLTEHTTANDRPDVRNSKYSSDILKTSHLYLVQRSELPPCLNWKFIWNNKAPLKVQFFAWLLAKDRLPMKKNLCKKNIVSTPAWCSTYFVSGVFGIIVMVWSSGMRKLPCVGWFTLDQGLAPDVGSSSPRVAGAFTD

SEQ ID NO: 196199 - protein, 68 aa, Oryza sativa
  unsure (1)..(68): unsure at all Xaa locations
  Clone ID: PAT_MRT4530_92073C.1.pep
CYTGKYLISSWFGMVYXWFEDRTVQPGWLSRMVGPMQQGMLYSVGLILFNYLTVLLNSQMFAKCCFCK

SEQ ID NO: 196200 - protein, 95 aa, Oryza sativa
  Clone ID: PAT_MRT4530_92074C.1.pep
AATVNGLVFFPVALALPVPIDRDRDFGLFPARQPSPLNKRQDSDPMDGAGASTSNVSGMSVPEESNEEDKPGPTVPKLGVPKPPPGRKSHESSKE

SEQ ID NO: 196201 - protein, 61 aa, Oryza sativa
  unsure (1)..(61): unsure at all Xaa locations
  Clone ID: PAT_MRT4530_92075C.1.pep
NSWKTCHPLSWLGASSCRHQRKEILHKEAEREEKRKSRXKPMPPSCKANKESKNPPDAKHP

SEQ ID NO: 196202 - protein, 48 aa, Oryza sativa
  Clone ID: PAT_MRT4530_92076C.1.pep
QRGGLTNAWSINYPAALDCISCHASFLYVYQFMWASKIMLYMYCLILC

SEQ ID NO: 196203 - protein, 61 aa, Oryza sativa
  Clone ID: PAT_MRT4530_92077C.1.pep
AATRPSSYRTGLGSPQWKPSVSLQESWIRTSGCLRSSMVTRHKGRRMPTFNKATEEVEEDL

SEQ ID NO: 196204 - protein, 396 aa, Oryza sativa
  Clone ID: PAT_MRT4530_92078C.1.pep
MDFSGGGGRGDPARWLEIAGKLLAARDLVGCKRLAERAVDAEPLLPGADELLAVADVLLASQRLLPSGRPDPIAVLHLQPNPDPAEVKRSYRRLSNLLSSNPRPGADAALRCVQEAFAHLSDSSANPAPALAPPPAPASGGDASAAAADAFWTACPYCCHVYQYQRALMGRALRCPGAGCRRAFVATEIPAAPPIVPGTDMYYCAWGFYPMGFPKAADLSTNWKPFCPMYPWNLSSPQQAPADAGNVSKQNVESNGGNVNINVNTPPSNAQPANKSGASSGVGVGPSRGRIKKTTARKKVGGGFKKNASGGVESGIEPSLLGPDSWNGVAESGSMVGARGININEVAKGTDGSSMMHFGGDEEIGFDLDVDATDAILGNLQHLPFLRDDDNARRLF

SEQ ID NO: 196205 - protein, 280 aa, Oryza sativa
  Clone ID: PAT_MRT4530_92079C.1.pep
MAPARPFALLFLAVTVGFVLLTAADDSANATATTTTAMAPSSSTDDAAPPVWLKAHATFYGGADASGTMGGACGYGDLYSQGYGTRNAALSTALFNDGASCGQCYKIACDRKRAPQWCRPGVTVTITATNFCPPNWDLPSDNGGWCNPPRPHFDMAQPAWEKIGIYRAGIIPVIYQRVPCVKKGGVRFTINGHDYFNLVLVTNVATTGLIKSMDVMGSNSTDWLPMVRNWGANWHSLSYLTGQMLSFRVTNMDGQTLVFRNIVPSGWKFGQTFASKLQFK

SEQ ID NO: 196206 - protein, 72 aa, Oryza sativa
  Clone ID: PAT_MRT4530_9207C.1.pep
VERRVEGSREPKKIDHGEAMWSSPSVSICLLGKNPKLEIHRIICSQTLAHLLNNPILLLLLTGSDSPNPISL

SEQ ID NO: 196207 - protein, 71 aa, Oryza sativa
  Clone ID: PAT_MRT4530_92080C.1.pep
MAESGALQLGVKHARHPNQPGARRAPASLKRVEPGFHDRSRSDANLYLCSKDVYLICFYAAPTKDRRSYED

SEQ ID NO: 196208 - protein, 105 aa, Oryza sativa
  unsure (1)..(105): unsure at all Xaa locations
  Clone ID: PAT_MRT4530_92081C.1.pep
MAGPDVEYRCFVGGLIWATNNRSLEAAFSTXYRKILDFKIITPLQTGRSRGLGFATFSSEQSMRDGIEGMNGKALDSRNITVNEAQSRRSCGRCRGYSGRSGRYC

SEQ ID NO: 196209 - protein, 278 aa, Oryza sativa
  Clone ID: PAT_MRT4530_92082C.1.pep
MEGHKSGMEAVAVAIPPLHTGESNHRIDSNVSSQCHADPAELSDETQQQSLWHLGLRKIIPSSVPLLKKVSAEFFGTFILIFTVLSTIIMDEQHKSIETLLGIATSAGLAVTVLVLSLIHISGCHLNPAISIAMAVFGHLPSAHLLPYISSQILGAVAASFAVKGLYHPVNPGIVTVPNVGTVEAFFVEFIITFFLLFIITALATDPNAVKELIAVAVGATVMMNILVAGPSTGASMNPARTIGAAIATGRYTQIWVYLVATPLGAIAGTGAYVAIKL

SEQ ID NO: 196210 - protein, 365 aa, Oryza sativa
  unsure (1)..(365): unsure at all Xaa locations
  Clone ID: PAT_MRT4530_92083C.1.pep
AGRREEDDDAGRNGWRTAAASSGANHGDTGESEXHREPDGGGLRRRQPAARKEGNGDGATGVRFERARASTRLQESVSSVGLDGSSPRKAGDGRLLPSAGGDGGEPTASGGVAWGGANXLLGRAPAPPAHATAVVGGRETEGTAMARWSEGEWERERKGGCLGLIGGQWRSRSELALGARGQNDDRGHDAGGXKRKGKKEGRKGACPLPLWEKKEGERAMRQMEEELCLHSLEACTXEWRGQVDDDGDDGGAVWKGAATGRQTRAQARQVLTASAIGRSATTVRXARAGSNGTAIWAASAGETTRGSESRERWRKKRXASSLSRSVPERRTCLARAGEDGGERRDGLRGNGPGRRDRPTNSREAK

SEQ ID NO: 196211 - protein, 442 aa, Oryza sativa
  unsure (1)..(442): unsure at all Xaa locations
  Clone ID: PAT_MRT4530_92084C.1.pep
MRLPGDARLALLLARRRALPSSSPAASASPFHGSRAHGARWGDAFRAAAPAWRSPFSSPTSARLFHGTRPVAARDYYDVLGVSRNASQGEIKKAYYALAKKLHPDTNKGDSDAERKFQEVQRAYETLKDDQKRSLYDQVGPDQYEKASAGGGPGGAYEGGFGNPFEDIFGGGGGGGGMNDFFRNIFREREFSGHDAKVALEISFMEAVQGCTKTINFQTAVTCDTCXGAGVPPGTKPETCLACRGSGFIFMQTGPFRMQSTCTQCGGSGKTVKEFCKSCKGRKVVPGTKNIRLNIVPGTDDGDVIKLVRSGGADPDGGSPGDLYVTLKVREDPVFRREKGDIHVDAVLNVTQAILGGTVQVPTLSGDVVLKVKPGTQPGQKVVLRGKGIKTRNSSYYGDQYVHFNVNIPANLTPRQRVLIEEFAKEEQAEEEKDAKAAGASG

SEQ ID NO: 196212 - protein, 228 aa, Oryza sativa
  unsure (1)..(228): unsure at all Xaa locations
  Clone ID: PAT_MRT4530_92085C.1.pep
AGSIVRGPGXSPRVSDSVHGREGLRGAGELVFADAAHRWCTRWTGRRRAQAQPAGSPWTTRVQENGSEERLTEVKPTWPVAELAPTWRLCGSHAGRREEDDDAGRNGWRTAAASSGANHGDTGESEHTGRLHGTRGDEPMDWIRRKEPDGGGLRRRQPAARKEGNGDGATGVRFERARASTRLQESVSSVGLDGSSPRKAGDGRLLPSAGGDGGEPTASGGVAWGGAN

SEQ ID NO: 196213 - protein, 119 aa, Oryza sativa
  unsure (1)..(119): unsure at all Xaa locations
  Clone ID: PAT_MRT4530_92086C.1.pep
GAHMNESLYNEQEQTMRREVRVSPLDALRXVLDHHLTYLYSFQTIFHRPGALXYRCNADNSCVTQVNXCRCTSILRMVRKYQESMPMPLLQSMLPQPQWQTTPAMFRRINSGATGSYHQ

SEQ ID NO: 196214 - protein, 44 aa, Oryza sativa
  Clone ID: PAT_MRT4530_92087C.1.pep
VGLSAYVGRPYWEVRERSTRRPWPPYGSRRTWYALGLAVLPRAV

SEQ ID NO: 196215 - protein, 44 aa, Oryza sativa
  unsure (1)..(44): unsure at all Xaa locations
  Clone ID: PAT_MRT4530_92088C.1.pep
IIKLELTXIFRPIGGKYQIFRVINLARKCSGSVLKITYRINNGF

SEQ ID NO: 196216 - protein, 157 aa, Oryza sativa
  Clone ID: PAT_MRT4530_92089C.1.pep
MKKSILSSLVLGLSVLSVPAMSQAVLPTILGGQALPSLASMIKRVRPAVVSIAIEGTTKVENAQYKRELPEELQFFFGPDIFGERVPRNFRGQGSGAIINAEKGYVITNNHVIKDAEKITIKLEDGREFKAKLIGSDALSDVALVQIENPKNLTELK

SEQ ID NO: 196217 - protein, 234 aa, Oryza sativa
  unsure (1)..(234): unsure at all Xaa locations
  Clone ID: PAT_MRT4530_9208C.1.pep
GTRKLFWDKYEKAKXCYGKLWNGAYFNYDDGDNIMSASIHADQLAGQWYAKACGLFPIVDKDKAESALEKIYSFNVMKFKDGKRGAMNGMWPDGTVDMSAMQSREIWPGVTYALAATMIQEGMVEKGFKTAEGIYHAAWSPEGLGYSFQTPEAWNNDDEYRSLCYMRPLAIWAIQWALSNPKLHKQTADIPQDSFPKNQFSYARIAKLLHLPEDESPKSFLRVIYEIVRNRYRS

SEQ ID NO: 196218 - protein, 51 aa, Oryza sativa
  Clone ID: PAT_MRT4530_92090C.1.pep
TFCLANGLQKRFLHLIFGPVDNRLCRLIRLEQMSTPNNGLPLSCWKQTIED

SEQ ID NO: 196219 - protein, 762 aa, Oryza sativa
  Clone ID: PAT_MRT4530_92091C.1.pep
MSSSASPSGAPIAEYAENHYFLGPIGNLDPTDFITGETNRIPFRLSNPNLGHWKNTFKSWPSLEKPTPDRSWSTWYQRVSASKKVHWDEIGIGQALALTIANSAKDEPLMAAATYFWSNTINAFLFNQGPMTPTLIDITMITGLDVTSSANPMSMNTKNQFDFKTKSIGCWSGYVAAYMGQGSVTPREHVAFLLMWLEKFLFCGSSCGPTTNWQFVAEALESKKEFPLGKILLGYLYQMLNNTSARIAVGSAVGAGGPWWLLQTWLNLMVMKVVNRPSVTEAEFPLPEPIVGDDGEECTHRSFYEGFKKDTRIWFPYEESADLELPSDFRFEDINHEKFQKSREVLIAAISPCILPVGIHQGRNIQTTESSPPHQSNSGKNIEYASGLIPNGGGLSPPVIGYYAPKTSTLLHGLTREPADAGPKRKTRSSAVSTSILAPKKKAKFKKTKPTDKPADDLPTLDPSIEQALDEEIIEDEVDQAAAEVSDTERTPSASPKQTLPTPSAPVHFSRKKKTAVKKKSAATTSKPAPPPSPPPSPFIQQSSSDQTPSAAGSHHVEEEEQPTAPAILALADLFSFNIRDYLDEGEEDTTSKALAPLSDDARLHEIQALIPDELADILTPAVYLEQHQFKLEKAKLRLVERRECKNIEATIQASRQLVHEEKSKLDQLSEGPIKSNIDRLEAHKIDLLAQLEECNAELDMERKKLADLPKSIEEQKARLKSAIKHVAELTKSLKVIPRTDAQDAQAIEEVEQIRQKAISAI

SEQ ID NO: 196220 - protein, 159 aa, Oryza sativa
  unsure (1)..(159): unsure at all Xaa locations
  Clone ID: PAT_MRT4530_92092C.1.pep
REEKEWKRMRKKEGGKGEKRRGRVKSKKKRKRGRRKGERKEMRKNGKEEVRKVRKGREEKGKKEGRRKRRKKRRRRREGRRGKEKERGEKRKRRKXREKEEGKGKKKRKKRKEEREEGEMKEKRRKKEEEVKRKKKKGENDKRNQEVTLIEHELSSRGT

SEQ ID NO: 196221 - protein, 106 aa, Oryza sativa
  Clone ID: PAT_MRT4530_92093C.1.pep
MPPIHRTASSPQFGIVTPCGIRVADATGRGSRSAVSPCTGWLLLPSSSLLRSGGRGSTTALETTMIFVAENATAPDGGEGDVIFTVWRNVDGARQGVLGARMSADW

SEQ ID NO: 196222 - protein, 900 aa, Oryza sativa
  unsure (1)..(900): unsure at all Xaa locations
  Clone ID: PAT_MRT4530_92094C.1.pep
MSSSASPSGAPIAEYAEHLSHQVAIPSLSHQNHYFLGPIGNLDPTDFITGETNRIPFRLSNPNLGHWKNTFKSWPSLEKPTPDRSWSTWYQRVSASKKVHWDEIGIGQALALTIANSAKDEPLMAAATYFWSNTINAFLFNQGPMTPTLIDITMITGLDVTSSANPMSMNTKNQFDFKTKSIGCWSGYVAAYMGQGSVTPREHVAFLLMWLEKFLFCGSSCGPTTNWQFVAEALESKKEFPLGKILLGYLYQMLNNTSARIAVGSAVGAGGPWWLLQTWLNLMVMKVVNRPSVTEAEFPLPEPIVGDDGEECTHRRCTXYGEYASTPTDAGAKLSAELLKDWFCSFYEGFKKDTRIWFPYEESADLELPSDFRFEDINHEKFQKSREVLIAAISPCILPVGIHQGRNIQVSYEFYHPMSSARQLGLGQLPIGLFFADKIQCRGQITSALMMDRLLNLSGPPLGSIENIELAGFRSKNFDRWWGEXKLHLFHQSATMYMTDLSPDVIPXTTESSPPHQSNSGKNIEYASGLIPNGGGLSXPPVIGYYAPKTSTLLHGLTREPADAGPKRKTRSSAVSTSILAPKKKAKFKKTKPTDKPADDLPTLDPSIEQALDEEIIEDEVDQAAAEVSDTERTPSASPKQTLPTPSAPVHFSRKKKTAVKKKSAATTSKPAPPPSPPPSPFIQQSSSDQTPSAAGSHHVEEEEQPTAPAILALADLFSFNIRDYLDEGEEDTTSKALAPLSDDVKKTQGNELADILTPAVYLEQHQFKLEKAKLRLVERRECKNIEATIQASRQLVHEEKSKLDQLSEGPIKSNIDRLEAHKIDLLAQLEECNAELDMERKKLADLPKSIEEQKARLKSAIKHVAELTKSLKVIPRTDAQDAQAIEEVEQIRQKAISAI

SEQ ID NO: 196223 - protein, 80 aa, Oryza sativa
  unsure (1)..(80): unsure at all Xaa locations
  Clone ID: PAT_MRT4530_92095C.1.pep
MGEYCGATPEEDPAMALVTPLPATTTITMAAANKQPHFXYYGCFDRYSTKQVFDNLHGNISLDPIWGIHNLHSSPRDLRS

SEQ ID NO: 196224 - protein, 699 aa, Oryza sativa
  Clone ID: PAT_MRT4530_92096C.1.pep
MPSPPPPPQPSPPELPISEHEDEIMAAVEANPVVVVIGETGSGKSTQLSQILHRRGYTRRGAIAVTQPRRVAAVSVSRRVAQELSVPLGDEVGYAIRFEDRTSEKTCIKYLTDGVLLRESLSDPELKQYSVIILDEAHERSLNTDILLGLMKRLIKDRASDLKVLITSATLDGLKVSKFFSGCPVLNIPGTLFPVEKFYSTTAAANYSVAGSGAKANIHVKESPGDVLIFMTGKDDIDKMVSKLEERIQNLEEGSCMDALVLPLHGSLPPEQQVRVFAPAPPNCRRFIVATNVAETSLTVDGVVFVIDCGYVKQRQYNPSSGMYSLDVVQISRVQADQRAGRAGRTRPGKCYRLYPISIYQKEFLEATIPEIQRSSLAGSVLYLKSLDLPDINILKFDFLDPPSRESLEDALRQLYLIDAIDENGQITDVGRIMAELPLEPSLSRTLIEANELGCLSQALTVAAVLSAEITFRSTRSKDMEGKRKRQELPDGSGWGDHIQLLQIFESWDRTGYDPRWCSDHELQVRGMKFSKDVRNQLSQIIQKIAKAKKERKSDPDYRKLRRALCVGYGNQLAERMLHHNGYHTVGYRAQLVHPFSVLEGDEYGKLPVYVVYHELINTTRPFMRNVSAVDQSWVKPILKKLERLDMNKLSGSSGSKDPEPLEDKQVSSPKKAMDVKQSDVDSKIQAARERYLARKGKK

SEQ ID NO: 196225 - protein, 37 aa, Oryza sativa
  Clone ID: PAT_MRT4530_92097C.1.pep
KQKQLYLLTRRRINTKSAFINSAYTPRVTKGGTDKQN

SEQ ID NO: 196226 - protein, 119 aa, Oryza sativa
  unsure (1)..(119): unsure at all Xaa locations
  Clone ID: PAT_MRT4530_92098C.1.pep
XXXFSKNNMSQYSMMNNNMSNNSSPXGNGNAVSSASDXXXGGQGKAGSSSPDLRXGEXGQSHHGAPTAGPNDLRRSSSGGLRPRCFVAEGPIGSTAQTRRHQIQEGGARCRRSTPYAPR

SEQ ID NO: 196227 - protein, 740 aa, Oryza sativa
  Clone ID: PAT_MRT4530_92099C.1.pep
MAQPRRNEEDVLVGFTVDEILRRTEGQMDARMLDSNIGMISMVVHYFVLLPLVDTSLLTYALKASRGSFNRISSLPDVHLHDIVSHLPAKDSPLTKPITERNHAQPPAKTLAHLPPTPPSSFLLLPSSALPSLLPSAAAAAASNREEEKMVKKSKKSKSKRVTLRQKHKVLRKVKEHHRKKRKEAKKEGKSHRKKVEKDPGIPNEWPFKEQELKALEARRAQALQELELKKEARKERARKRKLGLLEDEDIANLASAASAQGSEFAEKDAAKENASLDVVKSQDHSERAFYKELVKVIEASDVILEVLDARDPLGTRCIDMEKMVRKADPSKRIVLLLNKIDLVPKESVEKWLTYLREEMPTVAFKCNTQEQRTKLGWKSSKIDKSSNIPQSSDCLGAENLIKLLKNYSRSHELKLAITVGIVGLPNVGKSSLINSLKRSRVVNVGSTPGVTRSMQEVQLDKKVKLLDCPGVVMLKSSNSGVSVALRNCKRVEKMEDPISPVKEILDLCPHEKLLSLYRVPTFTSVDDFLQKVATLRGKLKKGGIVDVEAAARIVLHDWNEGKIPYFTVPPKRDAVDDSDAVIISETGKEFNIDEIYKAESSYIGGLKSLEEFRHIEIPSNAPPQIDEEMLEDGKKQNEPAQENHDESMSDANEREGAKTASASTQNDKLYTAEGILDPRKRKAEKKRRKANKFSVLTDMDADYDFKVDYQMKDALAEEGNDGGDEEPKEADPMTGVDDA

SEQ ID NO: 196228 - protein, 86 aa, Oryza sativa
  unsure (1)..(86): unsure at all Xaa locations
  Clone ID: PAT_MRT4530_9209C.1.pep
MNIALLAKWIFKLESPDQSLCTSLLRNKYXQEGGVFQCRAEEGSQFWKXVLSTRDWVKLGTESLVGDGRHSLFFEGCLGSPSFKKH

SEQ ID NO: 196229 - protein, 121 aa, Oryza sativa
  Clone ID: PAT_MRT4530_920C.1.pep
MAKANRSVEHGTMRSSSTEKMASEGPDPAAAAADPRHTPRRREAFPARCAASSHRRRAAAGVFGPATAIPASTRFSAAARRLQVSASASLFFIFLLGLLCVSSRGLDARRGDRGDIGVGVR

SEQ ID NO: 196230 - protein, 152 aa, Oryza sativa
  Clone ID: PAT_MRT4530_92100C.1.pep
MSQTNWEADKMLDVYIYDYFMKRNLQATAKAFQAEGKVSSDPVAIDAPGGFLFEWWSVFWDIFIARTNEKHSDVAASYIETQHMKAREQQQQQQQQPPQQRQQQPQHIQMQQMLLQRAAQQQQQQQQQQQQQQQQQQQQQQQQQRRDGTHLL

SEQ ID NO: 196231 - protein, 898 aa, Oryza sativa
  unsure (1)..(898): unsure at all Xaa locations
  Clone ID: PAT_MRT4530_92101C.1.pep
MPEVGFYNVVISRRWKLEQWLDVYIYDYFMKRNLQATAKAFQAEGKVSSDPVAIDAPGGFLFEWWSVFWDIFIARTNEKHSDVAASYIEIHHKQTQHMKAREQQQQQQQQPPQQRQQQPQHIQMQQMLLQRAAQQQQQQQQQQQQQQQQQQQQQQQQQQQRRDGTHLLNGTASGLPGNNPLMRQNQSTANVMATKMYEERLKLPSQRDGLDEVSIKQRYGENAGQLLDSNEALLKASASGQSSGYLLNLXIKQILHGTVGGLSGSLQQVQSRSPQIPGPAQSIKTEMNPILTPRSAGPEGSFIGVQGSNQAGNNLTLKGWPLTGLEQLRSGLLQQKSFVQNQQQLQQQIHFLTPQQQQQLMLQAQQNMASPTSSDVDSRRLRMMLNNRNVGQTNSGGDIIPNIGSPSLSGGDVDILIKKKIAQQQQLLQQQSNSQQHPQLQQPAVSSQQSQSSNQFLQQEKPGIGTMPVDGGMPNSFGGVDQTTKKRKKPGSSSGRANSSGTANTAGPSPSSAPSTPSTHTPGDAMSMPQLQQNGGSAKPLVMFGSDGAGSLTSPANALADVDRLLEDGSLDENVESFLSQDDMDPRDSLGRSMDASKGFGFAEVAKARASATKVTCCHFSSDGKLLATGGHDKKVLLWCTEPALKPTSSLEEHSALITDVRFSPSMSRLATSSFDKTVRVWDADNTSYSLRTFTGHSASVMSLDFHPNKEDMICSCDGDGEVRSWSINNGSCLTFVKVFKGGATQMRFQPQKGKYLAAASEKAIYILDGETQLACRNPLQGHTKNIHSLCWDSTGDNLASVSEDSVRIWSFAPGHDGEFVNELSCSGNKFQSCVFHPSYPYLLVIGCYESLELWDIREKNAMTVHSAHDGLVAALAASSATGKVASVSHDRFVKLWK

SEQ ID NO: 196232 - protein, 298 aa, Oryza sativa
  Clone ID: PAT_MRT4530_92102C.1.pep
MAHARAQAIRALLARCSTECPRRAAASSCIRRASLPYCSPGSYPRSLLPAVRAAGADWTRSLASRAQGGAGAGEAGAEEGEAQEWMAEWEEEEEEEEDVEPEIGDGGDGGGVALRGVEWGKRALAAAEEVLGEHFGDDVAMFAFKVSPKGYVYVRLDKLTNRYGCPGIEEIESFNKLYKQKLDELIEQGEIPLDLAIEARAERLLKVPKDLDRFKDMAMRVQYLVEGDDVVPKQILQKDGIFLLESVDIQAEHCIWKLADVKENRAAAGKGRPLNRKKRDWRLQTSFQAVKKATLYLD

SEQ ID NO: 196233 - protein, 52 aa, Oryza sativa
  Clone ID: PAT_MRT4530_92103C.1.pep
MATMTTRGLRIGGGSPYPLARSVGEHQIRRLALPIHRDDDHDIKCVEDDSDL

SEQ ID NO: 196234 - protein, 99 aa, Oryza sativa
  Clone ID: PAT_MRT4530_92104C.1.pep
MDAAAGGAPPRPAAGIRVRVPLVESVSCYCRVDGGLKTVVSARKFVPGAKLCMQPDIKPNKRKSRSSHKERCRTQAPLLPGLPDDLAITCLMRVPRLEH

SEQ ID NO: 196235 - protein, 512 aa, Oryza sativa
  Clone ID: PAT_MRT4530_92105C.1.pep
MDAAAGGAPPRPAAGIRVRVPLYMTGQTYQGGSCRGVSGSAANPLIGQNKWVSLVATYTPRRVTSCGFVSLMLFHIQVESVSCYCGFVSLMLFHIQVESVSCYCRVDGGLKTVVSARKFVPGAKLCMQPDIKPNKRKSRSSHKERCRTQAPLLPGLPDDLAITCLMRVPRLEHTNLRLVCKRWNRLLSGNYYYSLRKKLGMAEEWVFVFKRDRDRKISWHAFDPVHQVWKSLPPVPAEYSEAVGFGCAVLSGCYLYLFGGKDPVRGSMRRVVFYNARINKWLRAPDMLQKRHCFGSCVINNRLYVAGGECEGIQRTLRSAEFYDPNRNRWSYISEMSTGMVPFIGVVYDGKWFLKGLDSHRQVVSEVYMPTSNVWSVTADEMVTGWRNPSICFNGRLYSAECRDGCKLRVYDRDTRSWTRFMDSRRHLGNSRAFEAAALVSLNGKICIIRNNMSITLVDVSNTPTVIEINNAHMWDVFARKGQHRSFIANLWFTIAGRNFKTHIIHCQVLQV

SEQ ID NO: 196236 - protein, 54 aa, Oryza sativa
  Clone ID: PAT_MRT4530_92106C.1.pep
ASYTSTSNASLRALSITTRISCGADGTGGERHVSPPSLPLRLPDARQARRRRST

SEQ ID NO: 196237 - protein, 42 aa, Oryza sativa
  Clone ID: PAT_MRT4530_92107C.1.pep
MDGAVGEPPSMADATILVHDIGCNFMGSNRNSAAVETCVLGG

SEQ ID NO: 196238 - protein, 266 aa, Oryza sativa
  Clone ID: PAT_MRT4530_92108C.1.pep
MGVVSDGVMIAPAAGDSPVAVAGSIRAATTTHHHTPRLRKLDAPLDSDPAADPSRRRSSSNRHGAPPPPVPMSTSSGADSSPPVSGLDYDDTALTLALPGSSSSSSSTADPERKRAAHADHADAKPPSPKARAVGWPPVRAYRRNALREDSARAKLVKVAVDGAPYLRKVDLAAHAGYAPLLRALHGMFASCLAVRGGGGGDGEGTKLVDLVTGAEYVPTYEDKDGDWMLVGDVPWKMFVESCKRIRLMKSSEAVNLCKNLRSNPL

SEQ ID NO: 196239 - protein, 673 aa, Oryza sativa
  Clone ID: PAT_MRT4530_92109C.1.pep
MPPILPRPGLKMEDSPCYVCGKIGHFARLCPNRQNMGGQTSYQKPSTTGFIKKNPPIIKSGHNLGRGQVHHIKAEEAQQDPNILMDIILGMDWLAKNNGLINCATREVILTDEQGMNTRIIVKSNLSMEQHMTDICMLKPKEEVPVVQEYFDVFPEELSSLPPDREIEFIIELLPGMAPISKRPYRMPINELEELKKQIAKLQEKGFIRPSSSAWGALVLFVKKKDGSLRMCVDYRALNEVAIKNKYPLPRIDDLFDQLKGASVFSKIDLRSAYHQLKIRQEAFGLTNAPAYFMNLMNKIFMEYLDQFVVVFIDDILIYSKNKEEHKQHLRMMDLNLRQRRWLELIKDYNLEILYHPGKANVVADALSRKANCNLQQEIISEQLQAEMLKLNLGIIKFEELNTLELKPTLMDQIKEHQKEHSEIQTFKERKVQGKAADITEDLEGIFWYGDRIVVPQSGNLRKVILKEAHDSAYSLHPGSTKMYHDLKDLYWWPNMKRHIAEYVALCHVCQQVKAEHQKPTGLLQPLQIPEWKWDEIGMDFITGLPKTSTGYDSIWVIIDRLTKTARFIPVKTTYTGAQVAELYMTRIKLHYELGSYLDFSTAFHPQIGGQTERLNHTLEDMLTACGLDFAASWDKCLPYAEFSYNNNYQASLKMSPHEALYGRKCRTPLIWT

SEQ ID NO: 196240 - protein, 455 aa, Oryza sativa
  Clone ID: PAT_MRT4530_9210C.1.pep
MLRAARPRRAGALLLAAAAAASSSGALAYDRRGGDGDGDGDGEAFSTTTTAVRISASSPLRRALSSAASGILPGGSAHLLPSPLPLGEEDLNVYSLRAGFSFLNFFTSASNWSAGFPTQNSFASASVPPTNLSNQSSDGNSDDSKCCPGCINRNTIAKAAAAVGPAVVNISSTQETHGWVLEKSIGSGTIIDPDGTILTCAHVVLDFQSTKPILRGKVSVTLQDGREFEGTVLNADRHSDIAVVKIKSKTPLPSANLGSSSKLRPGLERIRTSTLITLKLLFDELDFLFKFGILKDEKGNSGGPLVNLDGEIVGVNVMKVWAADGLSFAVPIDSIVKIVENFKKNGRVVRPWLGLKMLDLNPMIIAQLKERSSSFPDVKNGVLVPMVTPGSPAEHAGFRPGDVVVEFDGKLVESIKEIIDIMGDKVGVPFKVLVKRANNVTVSLTVIPEEADSSR

SEQ ID NO: 196241 - protein, 962 aa, Oryza sativa
  Clone ID: PAT_MRT4530_92110C.1.pep
MDAEDWLRAIEKKLTLVRTNEQEKITFATHQLEGPANEWWEAYQASIEDPTHIITWMEFTTAFRDAFIPTAVIRMKKNEFRRLRQGFMTGQEYLNKFTQLARYTASDIQDEKEKIERFIEGLHDELQGSMISQDHENFQSLVNKVVRLENDRRMVEGLRKRRMNLQRQSPTRSSLQVRRPYPFKPSLPNPKPGMPPILPRPGLKMEDSPCYVCGNIGHFARLCPNRQNMGGQTSYQKPSTTGFIKKNPPIIKSGPNIRRGQVHHIKAEEAQQDPNILMDIYMRIPKEEVPVVQEYLDIFPEELSSLPLDREIEFIIELLPGTTPISKRSYRMPINELEELKKQIAELQEKGFIRPSSSPWGAPVLFVKKKDGSLRMCVDYRVLNEVTIKNKYPLPRIDDLFDQLKGASIFSKIDLRSGYHQLKIRQEDIPKTAFVIRYGLYEFTVMAFGLTNAPAYFMNLMNKIFMEYLDQFVVVFIDDILIYSKNEEEHKQHLRLVLEKLRQHQLYAKLSKCEFWLDQVAFLGHIITKEGVAVDPQKIKAVMEWKTPTSVSEIRSFLGLAGYYRRFIKDFSAIAKPMTRLLKKDMKFERTPECQSSFQRLKHKLTTTPVLILPNIQKDFEIYCDASRQGLGCVLMQEDLNLRQRRWLELIKDYNLEILYHPGKANVVDDALSRKAYCNLQQEIISEQLQAEMLKLNLGIIKYGELSTLELKPTLMDQIKEYHKEDSEIQTFKEWKVHGKAADITEDLEGILWYGNRIIVPQSGNLRKIILKEAHDSPYSLHPGSTKMYHDLKDLYWWPNMKQHIAEYVALCHVCQQVKAEHQKPIGLLQPLQIPEWKWDEIGMDFITGLPKTSTGYDSIWVIIDRLTKTARFIPVKTTYTGAQLAELYMTRIVCLHGVPKTIISDRGTQFTSHFWQKQHYELGSYLDFSTTFHPQTGGQTKRLNQTLEDIIRACALDFAAS

SEQ ID NO: 196242 - protein, 64 aa, Oryza sativa
  Clone ID: PAT_MRT4530_92111C.1.pep
TLGFFFLKKSLASFYLYRFYPSPASYPSPRRATRRERSAVKGKGVGRLMMLELSFLPYGGALGH

SEQ ID NO: 196243 - protein, 504 aa, Oryza sativa
  unsure (1)..(504): unsure at all Xaa locations
  Clone ID: PAT_MRT4530_92112C.1.pep
MNTRIIVKSNLSMEQHMTDICMLKPKEEVPVVQEYFDVFPEELSSLPPDRGIEFIIELLPGMAPISKRPYRMPINELEELKKQIAKLQEKGFIRPSSSAWGALVLFVKKKDGSLRMCVDYRALNEVAIKNKYPLPRIDDLFDQLKGASVFSKIDLRSAYHQLKIRQEAFGLTNAPAYFMNLMNKIFMEYLDQFVVVFIDDILIYSKNKEEHKQHLRMMDLNLRQRRWLELIKDYNLEILYHPGKANVVADALSRKANYNLQQEIISEQLQAEMLKLNLGIIKFEELNTLELKPTLMDQIKEHQKDXSEIQTFKERKVQGKAADITEDLEGIFXYVALCHVCQQVKAEHQKPTGLLQPLQIPEWKWDEIGMDFITGLPKTSTGYDSIWVIIDRLTKTARFIPVKTTYTGAQLAELYMTRIKLHYELGSYLDFSTAFHPQIGGQTERLNQTLEDMLTACGLDFAASWDKCLPYADFSYNNNYQASLKMSPHEALYGRKCRTPLIWT

SEQ ID NO: 196244 - protein, 208 aa, Oryza sativa
  unsure (1)..(208): unsure at all Xaa locations
  Clone ID: PAT_MRT4530_92113C.1.pep
GCHGHRHRPLSVNRPRRRRSCLLRPRADALSRHSPGLTLIAKEEFEWIKKEYTVHEQVVFGKIKEGAIMAIEHPGCALQKXRSYLIQRVRRIFVSKETLLSGIQAGVNHMRQTVNLVSNESQKLLHWICCLLVSGKKGVPFKSGNCLILNLTYNELCPIGLKSILNQLPRAHASEFQSEISGLASQVKKEKRVLNNTLTKIANYGVPI

SEQ ID NO: 196245 - protein, 855 aa, Oryza sativa
  unsure (1)..(855): unsure at all Xaa locations
  Clone ID: PAT_MRT4530_92114C.1.pep
MEALVGKYTPCLAKGRQAVGIHLAFGDAFIPTAVIRMKKNEFRRLRQGFMTVQEYLNKFTQLARYAASDIQDEKEKIERFIEGLRDELRGPMISQDHKNFQSLVNKVVRLENDRRMVEGLRKRRMNLQRQSPTRSSLQVRRPYPFKPFLPNARPGMPPILPRPGLKMEDSPCYVCGKIGHFARLCPNRQNMGGQTSYQKPSTTGFIKKNPPIIKSGPNLGRGQVHHIKAEEAQQDPNILMGASHSFLSAKASWNQSLPKDNLDKAMLIHSPGGTILVSSICRNVPIKLGDQIFLIDLMVLPTQTIDITLGMDWLAKNNGLINCATREVILTDEQGINTRIIVKPNLSMEHYMTDICMLIPKEEVPVVQEYLDIFPEELSSLPPDQEIEFIIELLPGTAPISKRPYRMPINELEELRKQIAELQEKGASIFSKIDLRSGYHQLKIRQEDIPKTAFVTRYGLYEFTVMAFGLTNAPAYFMNLMNKIFMDYLDQFVVVFIDDILIYSKNEEEHKQHLRLVLEKLRQHQLYAKFSKCEFWLDQVAFLGHIITKEGVVVDPEKIKVVMEWRTQTSVPEIRSFLGLAGYYRRFIKDFSAIAKPMTRLLKKDRKFEWTPECQSSFQRLKHKLTTTPVLILPDIQKDFEIYCDASRQGLGCVLMQEGKVVAYASRQLRPHEDNYPTHDLELAAVVHALKIWRHYLIGNHCKIYTDHKSLKYIFTQTDLNLRQRRWLELIKDYNLEILYHPGKANVVADALSRKAYCNLQQEIILEQLQAKMLKLNLGIIKFGELNTLELKPTLMDQIKEHQKEDSKIQTFKERKVQGKAAYITEDMEEILWYGNXIIVPQSGNLRKIILKEAH

SEQ ID NO: 196246 - protein, 181 aa, Oryza sativa
  unsure (1)..(181): unsure at all Xaa locations
  Clone ID: PAT_MRT4530_92115C.1.pep
PTRPPTRPLTLNAKEEFEWLKKEYTVHEQVVFGKIKEGAIMAIEHPGIAAGSTAIAGIVLFKRPRSYLIQRVRRIFVSKETLLSGIQAGVNHMRQTVNLVSNESQKLLDRAATAEKRFQKGWNTLREEGRAIQSELNQISDIEKQAVGLKSILNQLPRAHAXSEFQSEISGLASQVKKEKR

SEQ ID NO: 196247 - protein, 267 aa, Oryza sativa
  unsure (1)..(267): unsure at all Xaa locations
  Clone ID: PAT_MRT4530_92116C.1.pep
SIEDPTHIITWMEFTTTFRDAFIPTAVIRMKKNEFRRLRQGFMTVQEYLIKFTQLARYAASDIQDEKEKIERFIEGLRDELRGPMISQDHENFQSLVNKVVRLENDRRMVEGLPKRRMNLQXQSLTRGSLQVRRPYPFKASLPNARPGMPPILPRPGLKMEDSPCYVCGKIGHFARLCPNRQNMGGQTSYQKPSTTGFIKKNPPIIKSGHNLGRGQVHHIKAEEAQQDPNILMGMFTINSKPVTILFDSGASHSFLSAKANWNQSLP

SEQ ID NO: 196248 - protein, 92 aa, Oryza sativa
  unsure (1)..(92): unsure at all Xaa locations
  Clone ID: PAT_MRT4530_92117C.1.pep
LFTVCVFIGYISGQWTQDEYQNLFDLVNLDLRVKAHQEYDAGNRKLRDNIAWXAISDKLXTXNHKNCCLKWSXXLASXXVRKGIWADTDDYR

SEQ ID NO: 196249 - protein, 40 aa, Oryza sativa
  Clone ID: PAT_MRT4530_92118C.1.pep
YAVHIASTYLQFKDNIIRTLLFQSIVNHTSNMKNYHRLPK

SEQ ID NO: 196250 - protein, 108 aa, Oryza sativa
  Clone ID: PAT_MRT4530_92119C.1.pep
MRPGVIRPDRRRRRWNGGTTGFGGWVGALCGRPDLVPPGDSQRLKGCVWTLGGTAVRAGGVRRRLGISADTGGSIADSPSTTTAPGPPFVRALHADVALLRGPSPVQP

SEQ ID NO: 196251 - protein, 89 aa, Oryza sativa
  unsure (1)..(89): unsure at all Xaa locations
  Clone ID: PAT_MRT4530_9211C.1.pep
CSTSDPVATRPTHETFSYLLSLLCCMQCLCAVDPLAKYRQSTTAHSIXTGYPAVSRRTDSIGTPLATTRSLKTPSCTHVPHSAGNTIPT

SEQ ID NO: 196252 - protein, 153 aa, Oryza sativa
  Clone ID: PAT_MRT4530_92120C.1.pep
MEAQMEAMPEIVVIAVSHLEHSLIDSLIYWRFGVDESDEDASSDRHRGMRMDIDDMSYEELLALGETIGTVSTGLPEDELSNCLKRIHYVPSASTSHEDGDIKCIICQEEYLPAEEVAEMACKHYYHLACIQQWLRQKNWCPICKSVGSATKH

SEQ ID NO: 196253 - protein, 205 aa, Oryza sativa
  unsure (1)..(205): unsure at all Xaa locations
  Clone ID: PAT_MRT4530_92121C.1.pep
MSMEDTDDVPQLLTDDDLDLVDRREKQTYQMLKNRSFAHTRAYDPELLRKTVQGHTLKHGADVTLVFFQPGCRNEILLPNPGYHLYNCYALTIPLQTIEESRAGATHRSNRRMAADEQEDSTYSPPGHAYESGWKSARDASGWAQALRHSTGGSAXAECRQFXWQMPHEVRWGHTNSAGSSGVPPTSSWWCSSSSRWDNSPSKDT

SEQ ID NO: 196254 - protein, 126 aa, Oryza sativa
  unsure (1)..(126): unsure at all Xaa locations
  Clone ID: PAT_MRT4530_92122C.1.pep
SIYFXSNYTITXGRHGAIHSLSDDPLTLCSSVPASTGDFKFLQCVSRYARHPVIVSLVHHVLLGLAPIRRACGAAVVVLAARSRRGVGAGHEHHQPHQRHSHEQLRELAVVIRHCHSQDRDIDEHC

SEQ ID NO: 196255 - protein, 76 aa, Oryza sativa
  Clone ID: PAT_MRT4530_92123C.1.pep
LYRWRVGGAVQTVRSGLSRTRTPLTRPTLRTVSRDGHFSRHTYRRAAYSARWLRSRDFPRARTRVTRVAATHEHES

SEQ ID NO: 196256 - protein, 131 aa, Oryza sativa
  Clone ID: PAT_MRT4530_92124C.1.pep
LGVCKRWKLRLRASPISHGGCARAVAFSLHTKNRIFPREETRGDSRPPRRQRRHSARLHRRPSPRVGAAAPLGPAARRQIWPPRSPGPGAAAVTPPGPATAAAARRQIWPPRRPGPSVGAAAPLGPAVVAH

SEQ ID NO: 196257 - protein, 312 aa, Oryza sativa
  Clone ID: PAT_MRT4530_92125C.1.pep
MEAEAETTVAVTTGGEGEIVRGRKLLSHGKVFVGGVPLGTSESELRAHFSRFGTVAFVGAPKNKQTGAARGFAFVQFVNPDDAAAAIAAGPDRNVIRGTTMDIKLAQLKPSAGGPQLSPGDQKRKIFVGGLPVSATEKKLKEYFNKFGEVNRAIVVIDLNTKMPRGFGFIQFASEESTARALKKDKHFLCGQWVEVSLAMPKQQNAASGTSKLSVQARPFYPTTSSNFTTAANYPDVVNIVPMVTPMNCVISNAFNPHIGFEVPGMILSDGVSNSVSANYSYQNPYLGGGGVQPQGSAVYLQAAHYYSGVMM

SEQ ID NO: 196258 - protein, 539 aa, Oryza sativa
  Clone ID: PAT_MRT4530_92126C.1.pep
MLLPRKDGRMDGWIEDRREIKKRKGPLGEEMAPGKEEERCGGCRDGVGRVLLLERRFFHAKTNQYKTSRAIQPPSSSSSSPRQEGPGTNGGNRAAAAAVVQHGAPTAARWAWGGCPTAIEEDERTEEEEPRAPLVSPRAGPRGARRLAGDPPACPHARPTTPPRIVLVLVLRPQRPAPAAAYTRALKKERNHARGSGKCADDMLAEAKHRCRVPNCRSAGFPFHGFHLSVEIFNHLPYLDVCALNIDRHIFSSRTAEIELRILSSNYHPASWLGRRLKHTDTMLRRSARRMQEMEAATASESHLPWWLCPSPAHDCCRCTMHTAHSGPWVGRSYTVLTAQLPSLATSSSGLGGTHTRARGERGEGRGSRRAGGGGDSGGGEEEVGATVVAVPAGQSATANLRSSLARSLHGLGEEERRRPREETRGDSRPPRRQRRHSARLHRRPSPRVGAAAPLGPAARRQIWPPRSPGPGAAAVTPPGPATAAAARRQIWPPRRPGPSVGAAAPLGPAVVAHGELRPSRDRGRGKASVVEERGRGKS

SEQ ID NO: 196259 - protein, 72 aa, Oryza sativa
  Clone ID: PAT_MRT4530_92127C.1.pep
SSGLLCKQSDGVVYLDKNLPKPDYSTCARLTFFFLKARFLFTIHRVSVAALLPFAQDTLRLSGLSWKFHPNL

SEQ ID NO: 196260 - protein, 196 aa, Oryza sativa
  Clone ID: PAT_MRT4530_92128C.1.pep
MALMFIKSHTAQEIIGGIVDSDNAKTYLANIQENFKSSSKNYASTIISKMLSSTYNGTMVHVSNSLQGFSTVRKNVVRQQRVILDPLALQLMLKKVLMKIMMKVMSINRIMRHRMKKKYPKEDAQRHVNNDENQQLRRSQQVRKFAIPDYHEVYMSEDIGKVDGPTSFKEAISSKNSSKWFEEMEDELKCGISRSS

SEQ ID NO: 196261 - protein, 103 aa, Oryza sativa
  Clone ID: PAT_MRT4530_92129C.1.pep
VLRPPSPADAAAHRCQLLRPPPPATPPPLSRPPHLRLQRLRAVVPIAARFGHLRTSHRPALPPPVPAVVASALPETSPPDPRRIWRPRPLPPVPANLCRHPPK

SEQ ID NO: 196262 - protein, 35 aa, Oryza sativa
  Clone ID: PAT_MRT4530_9212C.1.pep
MGKFDQLGGPGGVVDGERQVSNGDATAAVWMGNDR

SEQ ID NO: 196263 - protein, 136 aa, Oryza sativa
  unsure (1)..(136): unsure at all Xaa locations
  Clone ID: PAT_MRT4530_92130C.1.pep
MNCNFSSNLFEQEAGGRGFPWGSGHATDVIADSTTXVHSADHVTSRHRRLQSXECTPQASVLACCADAVALCTTCDAEVHSANPLAQRHXRVPVLPLPVASGLIXAEAAHGSEEDEVNSWLLLSRGSDDRGCTLVL

SEQ ID NO: 196264 - protein, 997 aa, Oryza sativa
  unsure (1)..(997): unsure at all Xaa locations
  Clone ID: PAT_MRT4530_92131C.1.pep
LAKKGNTNSEEISNVDESFYTEFSLNTWWVDSGTMVHVSNSLQGFSTVRKVAKGEQNLRVADRAEIDVTAVRDLTLRLPSGYNLILNNAVFAPSIKRNLISLQRXDYECHFKKRTCYIXFDNKVMGLAFVRDKLYFFSLDDTVMNATNVCNDKAETSSKLWHYFLGHISRGRIERIIKEEILLYLDFSYADHCIDCIKGKFTNTIKKGATRSTSXKKIMIVPFRYDYSRYDYIYPXINDRSESLEKFKIFRTKQEDQHNAKIKVVRSDRGGEYYGKHAPFGQIXGPFALYLXQHGIVAQYLCPXEPQQNGVAGXHNRTLMDMVRSMLNHSTPSSKLWIEGLKTTTHIINRIPSKSVPKISYELWIGRKPTLNYLRVWDCRAKVRIFNPQLKKLDXKTMSHHFIGYPEISKGYQFYCLDHIAKFVETRHVVFLENNEVESSQHKEINLEEIKTNVPIMKIQENXYSIYQTCAIECSAPTTSNSGPSGPTTDVEESVDENNDESNXINRIMRHRMKKKYPKEDAQRHVNNDENQQLRRSQQVRKFAIPDYHEVYMSEDIGKVDGPTSFKEAISSKNSSKWFEEMEDELKCXSVEVPXGGKTIGCKWAYKTKLDSKGNIERFKARLVDKCFFLRRXGIDYNDTFSPVSKKDSFRYILALVAHHNLELHQMDAXTAFLNGDLNENVYMAKPEGFVVEGKXHLACKLNKSIYGLKEASRQWYLKFDEVIKXFGLKENVMDNYIYMKNKSGKFIILVLYVDDILLASSDKNLLRESKENLSSKFDMKYLGXASYVLGMEIQIDRSKGLLGLSQESYISRVLERYNMSKCSTTPAPIIKGDKFGXSKXPTNDLETKEMKTKPHALTVXSDLAFVTRMLGRFLSNLGLDHWKGVKKVLHYLXGTKHYMLTYKRSDKLVILDYSDIDFVGCLGTKKSTSGYIFTLVGXAISWKSSMXTIIVSSTMXGRICGXYHVTGHAVWFKNFIPKLRVVDSIAKPLAITSEAK

SEQ ID NO: 196265 - protein, 66 aa, Oryza sativa
  Clone ID: PAT_MRT4530_92132C.1.pep
APTLTPTRPICCCLLCLWISTSTKSKIQSSGTSLKLTLFWPLTFLGCYWLHVLDLVVNRGSFFTTY

SEQ ID NO: 196266 - protein, 160 aa, Oryza sativa
  Clone ID: PAT_MRT4530_92133C.1.pep
MSVTLHTNLGDIKCEVFCDQAPRTAENFLALCASGYYDGTIFHRNIKGFMIQGGDPTGTGKGGTSIWGKKFADEFRESLKHNARGVMSMANSGPNTNGSQFFITYAKQPHLNGHYTVFAKVIHGFEVLDLMEKAQTGPGDRPLAEIRLNRVTIHANPLAN

SEQ ID NO: 196267 - protein, 54 aa, Oryza sativa
  unsure (1)..(54): unsure at all Xaa locations
  Clone ID: PAT_MRT4530_92134C.1.pep
MARRHHHPVSVKGRRERRRXGSGVRRAAAPAETLSDGDGGDLTTRSAASPPLLW

SEQ ID NO: 196268 - protein, 118 aa, Oryza sativa
  Clone ID: PAT_MRT4530_92135C.1.pep
IEPSRSSLPSAGSGGRGGSGRRRAAARSPPPDLAGVEAAGDGGLPPLRRIWQEGRRRATAGSSALPSARSGGRGGGRQRRAPSPPPDPAGGEAAGGGALPSAGSGRRGGGVRRWVAVP

SEQ ID NO: 196269 - protein, 34 aa, Oryza sativa
  Clone ID: PAT_MRT4530_92136C.1.pep
GVHEKRLLDGDAGINPPSNDDHTTTSTCCFVLAT

SEQ ID NO: 196270 - protein, 34 aa, Oryza sativa
  unsure (1)..(34): unsure at all Xaa locations
  Clone ID: PAT_MRT4530_92137C.1.pep
MSRERGSLPPPLGGXRAEWRGPGDDDGDDGGALV

SEQ ID NO: 196271 - protein, 95 aa, Oryza sativa
  unsure (1)..(95): unsure at all Xaa locations
  Clone ID: PAT_MRT4530_92138C.1.pep
MDDRGGSFVAVRRISQGLDRSNTCHSSSAEFVTGSTAWLGRGLSCVCAQRRESDARPSFDLTPAQEECLQRLQNRIDIPYDGSIPEHQDALKAXW

SEQ ID NO: 196272 - protein, 254 aa, Oryza sativa
  unsure (1)..(254): unsure at all Xaa locations
  Clone ID: PAT_MRT4530_92139C.1.pep
RPPRQGEVGDVLERGGDDAGVRERHGAVGGAVSRGRRRRRRGRRALDEDILATHVHQHDVNKGDNLRRTSHDENKDSVNQVERLFLSKNDHAFHCPITRIRTRKIQQEMNSLFAQLNPNISENFILSKCSXFVLLRFTTEDMITTPRKMSYIEDDKGYAEXESTHILPAAIYANEKIIYAATSQLPRLVXPSQSKXDGCMAYMVGKRTKSSFQCNKPHLDSIFQXRSWTILLKATXELKGCARTRENSEHSHLC

SEQ ID NO: 196273 - protein, 76 aa, Oryza sativa
  Clone ID: PAT_MRT4530_9213C.1.pep
MSRRDERGRGRLTMAEAAAERRRGGGGGGGGGGASEGWKRETTAQEKHLYRGETKPREQNPNGPSLGEKVRVTASC

SEQ ID NO: 196274 - protein, 46 aa, Oryza sativa
  Clone ID: PAT_MRT4530_92140C.1.pep
ANVISVCLILALFVADPVNSKECFLMVNLLTKPYSIYVTKLKKKKK

SEQ ID NO: 196275 - protein, 561 aa, Oryza sativa
  unsure (1)..(561): unsure at all Xaa locations
  Clone ID: PAT_MRT4530_92141C.1.pep
MELGKEALVGVSMDHMRSSMQRGGLPPEMLEVGMELMRVLVGDSIPDPPVSTLPRLAPAAAARAPADGVDRISRLPDELLRDVVSRLPARDGARTAALSTRWRGVWHSVPLALVDAHLAPQGRGGGGVVAAVSRVLAAHPGPFRCAHLTTTSMEAHRGEVARWLEALAAKGVQDLVFVNRPWPLDLRLPAALFACSSLTRLHVGVWRLPDTRAVPRGAAFPHLREMVLSCVVMEDRDLAFLLDRSPALEKLAIITCQDGARVRLTSRSLRILQVCLTVVNYVDVVDAPRLERLMLWMTSKHRSCLSSMVKIRNAPKLRSLGFMEPGMHELEIGSTIIQAGMKLSPSTVVPSVKILALEVKFTVRYEARMLPSFLKCFPNVETLHIHSAVEDEPTGKSKLNLKVXWQDAGPIECVQHHIKKVIMREFRGTKSELTFLKFVAERARKLERMVVVVTNGCFCSSGCQGDTQAQMETLMASAKWASEGSKLVAFENPHSQVGTPAWSFQFAFNFDWSDPFDYGYDQASLGEPVSKRKATELKSLGNKAVEKKDYLSATGFYSQRL

SEQ ID NO: 196276 - protein, 122 aa, Oryza sativa
  Clone ID: PAT_MRT4530_92142C.1.pep
MAELDLELAGDKRWLVWGDPNRSPTGLGGPSDGSYIFVRGVTGGGIASRIAPKLTRDQGIEDRRRRPELEKMTPISLLDSPIHEFGRNDDKNPTAVIVVRSKAFVGTVAFPLNHCIEWDEIR

SEQ ID NO: 196277 - protein, 61 aa, Oryza sativa
  Clone ID: PAT_MRT4530_92143C.1.pep
EVIKRPPRAKLDRSAPPFALGIHGVHLASSSASFSSLASSSNYYSINCFFLILLLLLITDA

SEQ ID NO: 196278 - protein, 58 aa, Oryza sativa
  Clone ID: PAT_MRT4530_92144C.1.pep
ILSLHRLSPNEDRSAIHQSISQLGVLLLHCSTIYGSCNLISHRIYSEVRKRNRRHKIS

SEQ ID NO: 196279 - protein, 626 aa, Oryza sativa
  Clone ID: PAT_MRT4530_92145C.1.pep
MASMEGLIGLMNRIQRACTALGDHGGGEGANLPTLWESLPTIAVVGGQSSGKSSVLESIVGRDFLPRGSALVRQEIADETDRVTGKTKQISPVPIHLSIYSPNVVNLTLIDLPGLTKVAVEGQPESVVHDIENMVRSYVEKPNCIILAISPANQDIATSDAIKLSKEVDPSGERTFGVLTKLDLMDKGTNALDVLEGRAYRLQYPWVGIVNRSQADINRKVDMIVAREKEREYFENSPDYAHLASKMGSVYLAKLLSQHLEAVIKARIPSITSLINKTIDELESELDTIGKEVAADPGAQLYTILELCRAFDRVFKEHLDGGRSGGDKIYGVFDHKLPAAFRKLPFDRYLSVQNVKKVVSEADGYQPHLIAPEQGYRRLVEAGLAYFKGPAEATVDAVHVVLRDLVRKSIGETEPLRRFPTLQAAIATAANEALERFREDGRSTALRLVDMEAYLTVEFFRKLPQDPDSGSKVGNNTNESNGSGSGSVTVDRYGDGHYRNIASNVSQYIKMVGDQLLHKIPKAVVHCQVREAKRSLLNHFYVHIGKKEASQFGHLLDEDPAMLERRQQCWKRLELYKSARDEIDSVAWTREITKAEKCIKRKRKSAKKKKEKQQQQQQQQKSVSPK

SEQ ID NO: 196280 - protein, 24 aa, Oryza sativa
  Clone ID: PAT_MRT4530_92146C.1.pep
FFFFFFFFFFFFFFFFFFFFFLLN

SEQ ID NO: 196281 - protein, 56 aa, Oryza sativa
  Clone ID: PAT_MRT4530_92147C.1.pep
YLVLSRHALAPSTASAAGAFSAVGSSSAGFFAAGLGSTLAPSSVVSPSMPSSAWAP

SEQ ID NO: 196282 - protein, 1285 aa, Oryza sativa
  Clone ID: PAT_MRT4530_92148C.1.pep
MPLVPLSRDGGAAARLPMLARTNYPDWALLMRVSLQAQGLWVAIDPGYAEYREDRAALSAILQAIPREMLRGLAKHDMAKAAWDAIKTMRVSVDRVREAKEQGFRRQFESMRFKEGETPEEFAMRLTAVVADIRDMGGVMEDEHVNKKLLRVVPKKYKPVAISLEQLLDIKTMALEELVGWLSTIDSYSDDEEASGSGKLYLTEEQWEARAKQKEQEGAAANKGRGCAGAQYRLGKVTGQCRKPRRQRRAEANLAQAEEEPTLLMAHVMGVSLAGEAALGRTPRVQEVHLMEKKVVLDREDVREEEKTGEWFLDTGATNHMTGARSAFAELDTGVVGMVKFGDGSVIDIQGRGTVVFQCKNGDHRSLEAVYYIPKLRKNIISVGRLDARGYDAHIWHGVFTLRDSDGMLLAKVNRDSSYLYVLKLNLANPICMAASGTEMAWRWHARFGHLNFQALRRLAQGGMVRGLPPIDHVDQLCDGCLAGKQRRTPFPEEAKYRAQTALELVHGDLCGPISPATPGGRKYFLLLVDDISRHMWIRLLSDKHEAAAAIKQFQAGVEMESNRKLMALRTDHGGEFTSVEFMEYYADRGVKRQLTAPYSPQQNGVVERRNQIVVAAARSMLKAAGMPVHFWGEAVVAAVYVLNRSPTKSLDGVTPYEAWHGRRPTVEHLRVFGCVGHVKTAKPNLKKLDDRGTRMVFIGYEQGSKAYRMYDPVARLTEQATGSTSPSTPVAVSAGEEAFGPASSLPPGMEFCSPPSDASEGTDEAPRRYRTVANTLATTTPILDFDYDDQCLMATEEPASFAEAEKESCWRKAMIEEMNSIEGNKTWTLTELPPGVKPIGLKWVFKIKRDASGAIIKYKARLVAKGYVQQFGVDYGEVFAPVARMETVRMLIALAAQSGWEIHHMDVKSAFLNGELEEDVYVVQPPGFVDEGNPAKVLKLRKSLYGLKQAPRAWNAKLDESLNSLNFVRSATEHAVYTRGSGSSRLIVGVYVDDLLITGASVIEVEKFKKQMQKMFSMSDLGLLSYYLGMEVCQGKGSVTICQAAYAEKIVAKAGMEGCNTAQVPMETRLKLSKEDLAFSVGYVSRFMEAPTTEHWAAVKHILRYVNGTLKLGCKFEKNGGGFQLTGYSDSDMAGDISDRKSTTGVLFKLGNNLISWQSQKQKVVALSSCEAEYIAATTAACQGVWLSRLLGELMLEDPSCAVLKIDNKSAIDLCKNPVLHDRSKHIDTRYHFIRECVEQRKIKVEHVCSEDQLADILTKPLGKIQFQELCKKMGLVKVQAHQD

SEQ ID NO: 196283 - protein, 166 aa, Oryza sativa
  Clone ID: PAT_MRT4530_92149C.1.pep
MKLTEAETAPAVLFLTAAGVSTLLDRAIAAPASAGLGAAADDSEVTMWALVAGRGGKGAIFNADPSVRFPPLPLLPFTSGHRHMSPPHASCCRHRPLPPQAGAGADPLCELPSAPAPAPYLHEPALPRVPCRHRAPPPPPTSTSWRRRGFPADTECRRHNSPARET

SEQ ID NO: 196284 - protein, 1441 aa, Oryza sativa
  Clone ID: PAT_MRT4530_9214C.1.pep
MATPPESLSPAAAAVEDDWEEARGLLYEAYNELQGLAAELGGAAAPAPAVVVVGHQTDGKSALVEALMGFQFNHVGGGTKTRRPVALHLRFNPRCHAPRCRLLAGSGAGDDEDEEAGVAGRAMPLADIQAYIEAENMRLENDPSQFSEKEIIIRIEYKHCPNLTIIDTPGLILPAPGRKNRVCRWFLTGGLSLFHISASGRVGSCHEAVFRSNEEFKKAISLRELEDVASLEDKLGRGLTKEEKNRIGVSNLRLFLEELLRKRYIESVPLIIPLLEKEHRGATRKLREVNQEISDLDEAKMKEKARLFHDSFLSKLSLLLKGMVVAPPDRFGETLINERINGGTFTGSENFLIPNKLMPNAGMRLYGGAQYHRAMAEFRLVVGSIRCPPITREEIVNACGVEDIHDGTNYSRTACVLAVAKARDTFEPYLHQVIIHNEETDSDICFSVGEFQQKDGENCSSHDVLVKRCQSCQFDRVCMNLLSNHVVKEFSVVSKCMEDLVSTTRYVTWSLHNKFNCFLLMPIVDKLPALLREDLESAFEDDLDSIFDVTQLRHSLGQRKRDLEIELKRIKRLKEKFAEINKKLNSLQVRQYYPTPPLSLPRKPWWLAPRIGHRQERGVVDDMTGGDKDHRRGGSGGGKETFLRSLDRVPSGLHIDADFPSDDDDDDDDEEVRVSFASTMGDHKMYSFRHHQAAVLEEEEEDDDDDEFSKYDMDEDMSIQERRRRLHQGLGLASSRDLALRRHSTRRRLFRNAMAKRDLPTAAVPPTTPPPAAAAVAAAPVDKGRTDDGGGKDRDDATKNQESSKEVAVVAAPKDAAPASNTQTGVQLGLEEIEKFIGNTPIVKHLMRRGQSQHHSGQLASPSGGAPPKAEKPAGGKKKGGWLKNIKSVAIGFIDSGGNSKSTTSTTTSSAGANATSSSSSSASSTERLKVHQSGKSCKELTGLYMCQEIMAHEGSIWSIKFSTDGRWLASAGEDHVVRIWQVVEANSPACLPNDGHSGPLPPHPPGAAPADGTSSSSTPALSQLSKKSVKGKSGRDTLPEHLVVPDKVFALADQPACVLEGHQDDVLDLTWSKTDQLLSSSMDKTVRLWDTTTKACLKVFAHNDYVTCIQFNPADDRFFISGSLDAKVRLWSIPDRQVVDWTDLNEMVTAASYTPDGQGAIIGSHKGSCRFYKTTDCKLDQEAQIDIETKKRKSQAKKITGFQLLKFKSLARTWPNCSSWPWPWTPQFAPGNPSEVLVTSADSQIRVFDGVTMVQKFRGFKNTSSQISAAYTSDGRYVVCPSEDSHVYLWRAARGAPPAAAAIGSIGGIGMKPKTWCTIRSFENFYCKDVSAAVPWPLAPSGAGGDGSTSGSSPSRRQGGVSCTDDVCSMPAKSGELGSAGTPLTHSGQLGSPAPEGGKGGADGNAWGLVVVTASLQGEIRVYQNFGMPFRIRGQGNLFY

SEQ ID NO: 196285 - protein, 90 aa, Oryza sativa
  Clone ID: PAT_MRT4530_92150C.1.pep
GCDKVTTTRSRIEPKPLQHATRRAGKGEEEIDQDGPPPIYRSTKGRRVRMRHAHLDRPIAWKTAAAAAAAAGDDRYLSVPSGNQISAAPL

SEQ ID NO: 196286 - protein, 197 aa, Oryza sativa
  Clone ID: PAT_MRT4530_92151C.1.pep
METKAEAAGGGGEKKAASVAPRDAGDAPSSPRAAVGGEQQSSAAAASSGDGVAAAANVDRSGGVAAAGEAEEDEDDEQRAVERFYALVANVRAMRGMYRSSGDGASADSATGGNAGGGGERKRARRADQPWRPVFRMEDFADDVAGGAATTTTRSDDGARAPPIEIEDLQLVFDLEDSLFLDVEAGGVEPLMELGSL

SEQ ID NO: 196287 - protein, 142 aa, Oryza sativa
  unsure (1)..(142): unsure at all Xaa locations
  Clone ID: PAT_MRT4530_92152C.1.pep
LSLLDTHSGYNQVPIAEEDINKTAFRCPGXRVGAYEWRVMXGLKNAGATYRRTMNSIFQGMVRRELVVYIDDIVIIPQPEEQHLLNLRKAFXYKFQMNPLKCAFGVSAGNFLVFLVRQKGIEKIKYKLMVCKINVLLDFVYP

SEQ ID NO: 196288 - protein, 607 aa, Oryza sativa
  Clone ID: PAT_MRT4530_92153C.1.pep
MAAVAGSASAGANGSAAAHRVGAPTNPMATALLTDQYQFSMAYAYWKAGKHADRAVFDLYFRKNPFGGEFTVFAGLEECIKFIANFKFTEDDILFLQSVMPMCEDAFFDYLRKTDCSDVEVYSIPEGSVVFPKVPLMRVEGPVAVVQLLETPFVNLINYASLVTTNAARHRHVAGKSKVLLEFGLRRAQGPDGAISASKYCFMGGFDATSNVLAGNLFGIPLRGTHSHAYVSSYMLADSLCGVFGETNQSELAAFASYALAFPTNFLALVDTYDVMRSGIPNFCAVALALHDLGYKASGIRLDSGDLAYLSIEARKVFRTLEKEFNVPAFGKMIITASNDLNEETIDALNKQGHEVDSFGIGTYLVTCYSQAALGCVFKLVEINSRPRIKLSEDVAKCHDGFQVSIPCKKRCFRLYGKEGYPLVDIMMRESEPSPKAGERILCRHPFLESKRAYVVPQHVEELLQCYWPGTSNKPRVELPSLEEIRGRCMQQLEKLRPDHIRRLNPTPYKVIDSETKAAKHWYNIRTPYSELKLEQNKNVVAPCVGSYSLMLSKFAIHQRKVELCCKKIKKIVSSWAQPYRIFAPQFLLVQTSYQYRDRPTYLTVHP

SEQ ID NO: 196289 - protein, 859 aa, Oryza sativa
  unsure (1)..(859): unsure at all Xaa locations
  Clone ID: PAT_MRT4530_92154C.1.pep
STSKLFSPHFKEAFXSLLMSQVGKQIVLGTLEDNFKADMLLSLSRLASKSVLLFGDQVELLLLFLEHESSHCMKTVSLKCLCFMFHGSICHFPVLRTVFGTLLQLIDDDDFPLDCKRDAFTVLQKIVCGKAPIVHFVDTSELSKLVLAAESSLHSSSWEMQXTRSHQNMITQEGSSLTYNGCQGITSNFLSTXCLIKELARLDDSDCSKVSVANVESFQTYSAREVLGTSNDIKPETASVMASHMGADFDKLKFDPTEFSSKKEVFIVRNIILSTLKFANTCHNMLSKTPGASCNLYDRIKELIECVQQNASQYCSTYEFFHLIMCACISWYACKTRDGNQESGDPTEQPDIFSSPSIWLTQELCAIRITKMLFRKQRYWDAYMSAMYCCREGLWFVVSFVFRKLADDFGSGSFSFWFKSLLLISAGEIEMKLLLFPSAIIKLVSELKTDCDLHESFYCVETNVDSSLAGSSELHGSQAKITDICSKTFLATDHLLSNTSSSHELFFQRWFISLRASFLEILADFLGILTAHLTDQRDESHHDAIGDHSSVPREHNNSQLLALVNCSLRLSELAHSYDLLAVSHGDMDRQSFSSIARLAFMCSLLAFCIAFSVDFSKDSYRLCKFAVAYFLRLRGDTKGIATGEDSVSPLHGGMQFLSSILQRVMELPFVLPKYFFRVRPCFGAELHIYDSNPENRDGISVPSGLQLSLTLCLQWKCVLGVTLISRSYSKLYCVLAASSASCCLDATGTRSKEFEIHKKTAGMVGLNTKLMQYIEDDLRKKREKKRKKVRVEEKEMVTAFARFEASDSGMGFSSYLLDVSEFPQGSYKMKWHACCIDKDGAYYSLLPLNDGAAFSVRKS

SEQ ID NO: 196290 - protein, 1106 aa, Oryza sativa
  Clone ID: PAT_MRT4530_92155C.1.pep
MDKLPAASSAMQWSIDLDRALRSRHPATRLRAVDAVAPRLRELGASPPAAVPPAVASALGVLPSEPRLFAHTILLRLATHFATADNAVRARILRALLLLGLDGSLPMTMACVAAEPQHQVAVLARVKAAYDAGCPRARALALRMFGCLAHLAHHSLHLRSLILSTFSSSNALQVGKQIVLGTLEDNFKADMLLSLSRLASKSVVLFCNQVELLLLFLEHESSHCMKTVSLKCLCFMFHGSICHFPVLKTVFGTLLQLIDDDDFPLDCKRDAFMVLQKIVCGKAPIVHLVNTCELSKLVLAAESSLHSSSWEMQGTALKVIAGTLCFLQQTRSHQNMITQEGSSLTYNGCQGITSNFLSTVENAEDKFVHKICLIKELARLDDSDCSEVSVANVESFQTNSAREVLDTSNDIVKPVSASMKASHMGTDFDKLKFDPAEFSSKKEVSIVHNIILWTLKFANSCHNMLSKTPSASCNLYDSIKELIECVQQNTSLYCSTYESFHLVMCACISWYACKTRDVNQESGDSKEQPDIFFSPSVWLTQELCAIRITKMLFRNQRYWDAYRSAMYCCREGLWFAASSVFRKLADDFGSGSFSFWFKSLLLISAGEIEMKLLLFPSAIIKLVNELKTDCDLHENFYWVETNVDSSLADSSELHGSQAKITDICSRTFLATDPLLSNTSSSHELFFQRWFISLRASFLEILADFLGILTADLTDQRDESHHDAIGDHSSVPREHNNSQLLALVNRSLGLSELAHSYDLLAVSHGDMDHQSFSSIARLAFMCSLLAFCIAFSVDFSKVHSSVEPCRLPERFSHASVVQDLHERVDRTDSQIVSQLQQLMPICCDEVHSIQIVTRMNCSGILEKDSYRLCKFAVAYLLRLRGDTRGIATGEDSVSPLHEGMQFLSNILQRVMELPFVLPKYFFRVRPCFGAELHLYDSNPENRDGISVPSSFQLSLTLCLQWKCVLERSDIDISKLYCVLAASSASSCLDVTGTRSKQFEIRKKTAGMVGLNTKLMQFVQDDLGKKREKKRRKKVHVEQKDMVTAFARFEASDSGVGFSSCLLDVSEFPQGSYKMKWHACCIDKDGAYYSLLPLNDGAAFSVRSSPMQ

SEQ ID NO: 196291 - protein, 86 aa, Oryza sativa
  Clone ID: PAT_MRT4530_92156C.1.pep
LFNQHKKGAGRACGPSRHTLPLGTNGTHIFFSPLVTLLHGSPRTIALIKNLIGKTDRGRRGKQEEWWVGVPIIISQVLRANPSFAP

SEQ ID NO: 196292 - protein, 64 aa, Oryza sativa
  unsure (1)..(64): unsure at all Xaa locations
  Clone ID: PAT_MRT4530_92157C.1.pep
MALPKGMDDDGWERQRMKSERKKDENTAAEWNHTYGMRAXEPVDTGFQTSEDCRLYDNSAEYRE

SEQ ID NO: 196293 - protein, 155 aa, Oryza sativa
  Clone ID: PAT_MRT4530_92158C.1.pep
MAAAGPSPRRRSLFGVMEVVFAGVGTPVRGGGEVSRLGGGRSGVAVAGSGKPSDFRRWRRLLRRVGGDGSRSGAWAESVLAAAAGSGGRRPALTVAAVSEVEEFLAGDMVDTEVLGSPDSNSQLLFRPARIGDIDACGCRFLLGGVVLWTLSPFG

SEQ ID NO: 196294 - protein, 87 aa, Oryza sativa
  Clone ID: PAT_MRT4530_92159C.1.pep
DIPLKPLRELGIHGHAFVSAGNLAKLTEPDLRKFPLAEFLQTFRSSAGFGVVVPTRLFRIEVNYCHILKQFDYDLGKAGIQLNFSSP

SEQ ID NO: 196295 - protein, 1588 aa, Oryza sativa
  unsure (1)..(1588): unsure at all Xaa locations
  Clone ID: PAT_MRT4530_9215C.1.pep
MATPPESLPAGAAALEDDGEEARRLLLEAYNEAQGLPAEFGGAAAPAPALEVGCNQTYFKSVLVEDLLGALLSHVGGAAKAGRLVALHVRFHPRCPAWRXRILAGSCAGSDANEEAGVARREMPLADIQAYIEAENMRLENDPSQFSEKEIIIRIEYKHCPNLTIIDTPGLILPAPGRKNRVLQSQACAVETLVRAKIKHKETIILCLEDCSDWSNATTRRVVMQVDPDLARTVLVSTKLDTKILQFARASDVEVFLHPPTCALDGSLLGDYPFFTSVPSGRVGSCHEAVFRSNEEFKKAISLRELEDVASLEDKLGRGLTKEEKNRIGVSNLRLFLEELLRKRYIESVPLIIPLLEKEHRGATRKLREVNQEISDLDEAKMKEKARLFHDSFLSKLSLLLKGMVVAPPDRFGETLINERINGGTFTGSENFLIPNKLMPNAGMRLYGGAQYHRAMAEFRLVVGSIRCPPITREEIVNACGVEDIHDGTNYSRTACVLAVAKARDTFEPYLHQVIIHNEETDSDICFSVGEFQQKDGENCSSHDVLVKRVKAAFDRFAESTEQSCRERCMEDLVSTTRYVTWSLHNKFNCFLLMPIVDKLPALLREDLESAFEDDLDSIFDVTQLRHSLGQRKRDLEIELKRIKRLKEKFAEINKKLNSLQVRQYYPTPPLSLPRKPWWLAPRIGHRQERGVVDDMTGGDKDHRRGGSGGGKETFLRSLDRVPSGLHIDADFPSDDDDDDDDEEVRVSFASTMGDHKMYSFRHHQAAVLEEEEEDDDDDEFSKYDMDEDMSIQERRRRLHQGLGLASSRDLALRRHSTRKRMVDIPRSVSKMPPLPSPAAASAAAAAAAPTTAAAAAAAPAPRPSARDMLMQRPAKPITRRRSDGCLAARDGGSSGKPPPPSSPSVRRVRSLPARHAGCDDVSLVEKFRNAMAKRDLPTAAVPPTTPPPAAAAAAAAPVDKGRTDDGGGKDRDDATKNQESSKEVAVVAAPKDAAPASNTQTGVQLGLEEIEKFIGNTPIVKHLMRRGQSQHHSGQLASPSGGAPPKAEKPAGGKKKGGWLKNIKSVAIGFIDSGGNSKSTTSTTTSSAGANATSSSSSSASSTERLKVHQSGKSCKELTGLYMCQEIMAHEGSIWSIKFSTDGRWWRRTPRRACRTTATRAPSRRIPPGAAPADGTSSSSTPALSQLSKKSVKGKSGRDTLPEHLVVPDKVFALADQPACVLEGHQDDVLDLTWSKTDQLLSSSMDKTVRLWDTTTKACLKVFAHNDYVTCIQFNPADDRFFISGSLDAKVRLWSIPDRQVVDWTDLNEMVTAASYTPDGQGAIIGSHKGSCRFYKTTDCKLDQEAQIDIETKKRKSQAKKITGFQLLKFKSLARTWPNCSSWPWPWTPQFAPGNPSEVLVTSADSQIRVFDGVTMVQKFRGALAAAMDEKISALIENQRDQLMVVVSVVDVRFQEHEQPDLGGVHVGRANFYCKDVSAAVPWPLAPSGAGGDGSTSGSSPSRRQGGVSCTDDVCSMPAKSGELGSAGTPLTHSGQLGSPAPGGGKGGADGNAWGLVVVTASLQGEIRVYQNFGMPFRIRGQGNLFY

SEQ ID NO: 196296 - protein, 46 aa, Oryza sativa
  Clone ID: PAT_MRT4530_92160C.1.pep
MVGSDCDVVVTKRARVPCAATGARPRVVFAGHAIPPELTLYYVLPC

SEQ ID NO: 196297 - protein, 658 aa, Oryza sativa
  Clone ID: PAT_MRT4530_92161C.1.pep
MMTRRQDAYYRYPTTSTIVASAPMPTGHHVLRIDGYSLTKAKFAAGEECDESCSFVVGGHAWRIRYYPNGAVVSGSGGFVSLMLSLDHQPGAALPAAVVKARFAFSLLDMDGEPVPSRTYASDGVVSFSANSSSTFGAERFIGHGELEASGHLTGDRLAFRCDVTVVKRDGPPTMSTLCPVEHDMFRCLLDTGDDADVAFRAAGGETIAAHRRVLERRAPELAKLCRRRGGASCFMGLVGRHIDVGDMDAAAFKALLHFVYTDTLPETMAPREVPAMAPQLIAAARKYGLDWERLRLLCEDKAWGWRVDDTSMDTTAAAAPATGDDPKRSQRPPRASFTAAAASLFRHPASPAGRKVSTTPARPRRLAPFPSPPLPQAGGGALYVVFPVAGGGAPSPATSSYHSFSFAPVASTGPPPAPDPAGGNALYFRMVGAKATLYCYKIGVFSPHVLSISVVATYTQLLFLARKGVAMRAFESFTGRHDDRRLAFIKDGVELRAGLPPGPAGTVRTVRLPSFFFHTEPLKSQCRPWPPPPPVGDPESGGLRRRLLSLLDGTDVTFRVGGEAFAAHSSVVAAWSPVLSPPPPPTPLAVAATAAAVFDAETMPAGPAAQDDDGVPAAAMAQQLIVAADRFCLDRLETMRLRLLCEELLTTGDNLLV

SEQ ID NO: 196298 - protein, 329 aa, Oryza sativa
  Clone ID: PAT_MRT4530_92162C.1.pep
MDMAHERDASSEEEVMGGDLRRGPWTVEEDLLLVNYIAAHGEGRWNSLARSAGLKRTGKSCRLRWLNYLRPDLRRGNITPQEQLLILELHSRWGNRWSKIAQHLPGRTDNEIKNYWRTRVQKHAKQLKCDVNSQQFKDVMRYLWMPRLVERIQAAAAGQQQQQEGGTDTPPLSWQHGGSDGLYESPELPAPDASCWPAEYCAAAGGAQSGGTPAPELSSTTAGSSSLSTDSGAGAQPSWPTQADGAEWFTTACDASSATGGVAMRDTELELAQPPCQGGQTWTTSESSLPGLTFPDLAVADFEIGGFDVDSFWTSMEDDQLWCPTQAAV

SEQ ID NO: 196299 - protein, 218 aa, Oryza sativa
  Clone ID: PAT_MRT4530_92163C.1.pep
MDGNSGGSGGHARRPLAAGGGGGLLRAATSTTKGTAIGVGVSGASVTATARASIASTAAAAMKGTSARRLGSSLVNHQSSAGWCGGPLTRGSPAGAGTGDGIHPTISAGPGPGEKSGSGGGGVLAQPAPLPTLLSYFLSAPWANKAAARCSSSSSFSFIYPWQVQPPIALPDGASRSAAASPPVCAASSVAPGGGSDGLVVATMRFLTAAMVSLSWRR

SEQ ID NO: 196300 - protein, 55 aa, Oryza sativa
  Clone ID: PAT_MRT4530_92164C.1.pep
DLHQCRIHISDFRVSREEKELGDNSKLCTRHELGSSSTFGILKHVGHDMKWNLFQ

SEQ ID NO: 196301 - protein, 99 aa, Oryza sativa
  Clone ID: PAT_MRT4530_92165C.1.pep
MANLFLVIIARTDCFSANDKPVLVVVAGHTNMYLYTEPETYRDDNRAKRLPPSAYNQKTYANYIRFLRLMRLNGTDKWSLYEVDVTYTGARTDEAVNRY

SEQ ID NO: 196302 - protein, 221 aa, Oryza sativa
  Clone ID: PAT_MRT4530_92166C.1.pep
MDGNSGGSGGHARRPLAAGGGGGLLRAATSTTKGTAIGVGVSGASVTATARASIASTAAAAMKGTSAVAAREAHPRRQRQRCPVPSHLSIVVPRQRRLGSSLVNHQSSAGWCGGPLTRGSPAGAGTGDGIHPTISAGPGPGEKSGSGAGGVLAQPAPLPTLLSYFLSAPWATKRPRDARPHPLSPLSIPGKSSRPSHSRTARAGPPRHRPRPLTKYFYSDY

SEQ ID NO: 196303 - protein, 1006 aa, Oryza sativa
  Clone ID: PAT_MRT4530_92167C.1.pep
MPSSVRHPAAARHRYPLTCDGPKGKLVTGESVTSFASNPSLMDRRWIYYAHRSSTEYREGVTEFVTFADNDRKSRMSMHMLCPCRDCKNEQMIVDSDEVHAHLIMNGFMKKYTCCTKHGEQEAPDVAAEDLLDQDAENTAAAREGMFVPSPLGGETIYLDTQCLSTMLHDIEDVKDNDRDFEKFSKLVEDCQMPLYDGYKSKHSKLSCVLELMKLKASNGWSDKSFTKLLELLKDLLPEGNNLPQTTYEAKQVLCPLGLKVRRIHACPNDCILYYKEYADLDVCPVCGASRYKRAKSEGEGSKSKRGGPAKVVWYLPIAERMKRMFANMEQAKLVRWHAEERKVDSMLRHPADSVQWRTIDRIYQEFSNDPRNMRFAMCTDGINPFGDLSSRHGKWACSECMEETRCKWLKHSHKTVYMGHRRFLPRYHPYRNMRKNFNGHRDIAGPPAELTGTEVHNLVMGITNEFGKKRKVGKTKEKSTSKEKTEEHVEKQKTKERSMWKKKSIFWRLPYWKDLEVRHYIDLMHVEKNVCESLMGLLLNPACYTLSKEEKIDLLTCLSGIKVPSGYSSRISRLVSLQDLKLVGMKSHDCHVLITQLLPVEIRNILPPKVRHTIQRLCSFFHAIGQKIIDPEGLDELQAELVRTLCHLEMYFPPTFFDIMEHLPVHLVRQTKCCGPAFMTQMYPCERYLGILKGYVWNRSHPEGSIIESYTTEEVIDFCVDYMSETSSIGLPRSHHEGRLDGVGTVGRKTIRLDRKVYDKAHFTVLQHMTEVVPYVDERLAVLRQENPGRSESWVRNKHMSSFNEWLKNRIARLQNLSSETLQWLSQGPKWSATTWQGYDINGYTFHTVKQDSKCTMQNSGLRIEAASDGGRRDQYYGRVEQILELDYLKFKVPLFRCRWVDLRNVKVDNEGFTTVNLANNAYKDEPFVLAKQVVQVFYIVDPCNKKLHVVREEKRRIVGLDNIADEDDYNQHVHGIGQEIPLEEEEEEDEVQYARVDHEEGLFL

SEQ ID NO: 196304 - protein, 279 aa, Oryza sativa
  Clone ID: PAT_MRT4530_92168C.1.pep
MGLLLNPGTTKDGLNARRDLEDMGVRSELHPITTESGRVYLPPACYTRSKEEKIDLLTCLSGIKVLSGYSSRISRLVSLQDLKLVGMKSHDCHVLITQLLPVAIRNILPPKVRHTIQRLCSFFHAIDQKIIDPEGLDELQAELVKTLCHLEMYFPPTFFDIMEHLPVHLVRQTKYCGPAFMMQMYPCERYMGILKGYVRNRSHPEGSIIESYTTEEVIDFCVDYMSETSSIGLPRSHQEGRLDGVGTIGRKTIRLDRKGPECTATTWQGYDINGYTFHT

SEQ ID NO: 196305 - protein, 121 aa, Oryza sativa
  Clone ID: PAT_MRT4530_92169C.1.pep
YIQVLPVAACRNPEERNNTTLNMVDPRDVISSWFVTLREDVYVLIRIESLVSFVTVAFILMFTMDIYRARSRGSGTMSTLDKVDRISDRIVLYLLGTMQAAPFSNELFPVWSIVLVSLHAS

SEQ ID NO: 196306 - protein, 133 aa, Oryza sativa
  unsure (1)..(133): unsure at all Xaa locations
  Clone ID: PAT_MRT4530_9216C.1.pep
MATPPESLSPAAAAVEDDWEEARGLLYEAYNELQGLAADXAARRRRASVVVVGHQTDGKSALVEALMGFQFNHVGGGTKTRRPVALHLRFNPRCHAPRCRLLAGSGAGDDEDEEAGVAGRAMPLADIQEVLWC

SEQ ID NO: 196307 - protein, 507 aa, Oryza sativa
  Clone ID: PAT_MRT4530_92170C.1.pep
MVVVPVHQQQVGTLDRMVLPKSCPTIWIAMPSGMKRNRHTVTDSVSKSSATAATCRPSAGRSRGPGRSLPRAALKISAAPRARLVGDSALSPSRVLRPCRVPASLAAVRRANGLTTAHGPLTCPCRHGTARRSLGPCLGRGVGTWAGTARPAIGVVPNGPCPSGPCRRRARAVLGRAARLARYKQPGGEIVGECEYRGEVVLVTPSSAMPRRSLYLSNLDDQRFLRFSIKYLYVFPPSAAVAADALRAALAKALVHYYPLAGRLRHHADDKLVLDCNAEGALFAEAFLPTLTAADFLRAGATAKPHKSWRKLLYRVHAATFVAVPPLVVQMIEDKDEVHAHLIMNGFMKKYTCWTKHGEQEAPDVAAEEVLDQDVENTAAAREGMFVPSPLGGETIDLDTQCLSTMLHDIEDAEDNDRDYEKFSKLVEDCQMPLYDGCKSKHSKLSCVLELMKLKASNGWAVTGDLTCDGPRVLGPSQVVLPVTAPRLAPVTGDLTCDGHIVGARHR

SEQ ID NO: 196308 - protein, 497 aa, Oryza sativa
  unsure (1)..(497): unsure at all Xaa locations
  Clone ID: PAT_MRT4530_92171C.1.pep
MDRSWMYHVHRSSIEYREGVNEFVTFAENDRKSRMSMYILCPCRDCKNEKMILDSSEVYSHLITNGFMKKYICWTKHGEQEAPDATAEEVLDQDVENTAAAREGMFVPSPLGGETIDLDTQFLSTMLHDIEDAEDNDRDFEKFKGNNLPQMTYEAKQVLCPLGLEEYADLDVCSVYGASRYKRAKSEGEGSTTKDGLNARRDLEDIGVHSELHPITKESGRVYLPPACYTLSKEEKIDLLTCLSGIKVPSGYSSRISRCDTRSSGCACDTXIQRLCVRHTIQRLCSFFHAIGQKIIDSEGLDELQAEIVVXFPVGLDEHLSVHLVRQTKCCGPVFMTQMYPCERYLGILKGYVRNRSHPEGSIIESYTTKEVINFCVDYMSETFSIGLPRSHHEGRLDGVGTIGRKIVRLDRKVYDKAHFKGPEWSATTWQGYDINGYTFHTVKQDSKYTVQNSGLRIEAASDGDRHDQYYGRVEKILELDYLKFKVSLFRCRWVNQ

SEQ ID NO: 196309 - protein, 969 aa, Oryza sativa
  Clone ID: PAT_MRT4530_92172C.1.pep
MAMSSRTGGTPQKPDHPPTRCRSQVKMDRRWMYYAHHSSTEYREGVTEFVTFADNDRKSRMSMHMLCPCRDCKNEQMIEDKDEVHAHLIMNGFMKKYTYWTKHGEQEAPDVAAEEVLDQDVENTAAAREGMFIPSPLGGETIDLDTQCLSTMLHDIEDAEDNDRDYEKFSKLVEDCQMPLYDGCKSKHSKLSCMLELMKLKTSNGWNTLTWMSALSVGHQDTNEQRVKVKEEFSDDPRNMRFAMCTDGINPFGDLSSRHSTWPVLLVNYNLPPWLCFKRKYIMLAMLIQGPRQPGNDIDVFLEPIIDDFERLWNEGTRTWDAYAQEYFNLHAMLFCTINDYPALGNLSGQTVKGKWACSECMEETRSKWLKHSHKTVYMGHRRFLPRYHPYRNMRKNFNGHRDTAGPPTELTGTEVHNLVMGITNEFGKKRKVGKRKEKSTSKEKTEEHVEKQKTKERSMWKKKSIFWRLPYWKDLEVRHCIDLMHVEKNVCESLMGLLLNPGTTKDGLNARRDLEDMGVRSELHPITTESGRVYLPPACYTLSKEEKIDLLTCLSGIKVPSGYSSRISRLVSLQDLKLVGMKSHDCHVLITQLLPVAIRNILPPKVRHTIQRLCSFFHAIGQKIIDPEGLDELQAELVRTLCHLEMYFPPTFFDIMEHLPVHLVRQTKCCGPAFMTQMYPCERDLGILKGYVGTRSHPEGSIIESSTTEEAIEFCVDYMSETSSIGLPRSHHEGRLDGVGTVGRKTIRLDRKVYDKAHFTVLQHMTEVVPYVDEHLAVIRQENPGRSESWGPEWSATTWQGYDINGYTFHTVKQDSKCTVQNSGLRIEAASDGGRRDQYYGKVEQILELDYLKFKVPLFRCRWVDLRNVKVDNEGFTTVNLANNAYKDEPFVLAKQVVQVFYIVDPCNKKLHVVREGKRRIVGLDNIADEDDYNQHVHGIGQEIPLEEEEEEDEVQYARVDHEEGLFL

SEQ ID NO: 196310 - protein, 907 aa, Oryza sativa
  Clone ID: PAT_MRT4530_92173C.1.pep
MARPTAMRPDRYIHAVFFPMDRRWMYYAHCSSTEYREGVTEFVTFADNDRKSRMSMHMLCPCRDCKNEQMIEDKDEVHAHLIMNGFMKKYTCWTKHGEQEAPDIAAEEVLDQDVEKTAAAREGMFVPSPLGGETIDLDTQCLSTMLHDIEDAEDNDRDFEKFSKLVEDCQMPLYDGCKSKHSKLSCVLELMKLKACNGWSDKSFTELLELLKDLLPEGNNLPQTTYEAKQVLCPLGLEEYADLDVCPICGASRYKRAKSEGEESKSKRGGPGKVVWYLPIAEHMKRMFANKEQAKLVRWHAEERKVDTMLRHPADSVQWRTIDRIYQEFSNDPRNMRFAMCTDGINPFGDLSSRHSTWPVLLVNYNLPPWLCFKRKYIMLAMLIQGPRQPGNDIDVFLEPIIDDFERLWNEGTRTWDAYAQERFLPRYHPYRNMRKNFNGHKDTAGPPAELTGIEVHNLVMGITNEFGKKRKIGKRKEKSTSKEKTEEHVEKQKTKERSMWKKKSIFWRLPYWKDLEVRHCIDLMHVEKNVCESLMGLLLNPGTTKDGLNARRDLEDMGVRSELHPITTESGRVYLPPACYTLSKEEKIDLLTCLSGIKLLPVAIRNILPPKVRHTIQRLCSFFDAIGQKIIDPEGLDELKAELVRTICHLEMYFPPTFFDIMEHLPVHLVRQTKCCGSAFMTQMYPCERYLGILKGYVRNRSHPEGSIIESYTTEEVIEFCVDYMSETSSIGLPRSHHEGRLDGVGTVGRKTIRLDRKVYDKAHFTGLEWSATTWQGYDINGYTFHTVKQDSKCTVQNSGLRIEAASDVDNEGFTTVNLANNAYKDEPFVLAKQVVQVFYIVDPCNKKLHVVREGKRRIVGLDNIADEDDCNQHVHGIGQEIPLEEEEEEDEVQYARVDHEEGLFL

SEQ ID NO: 196311 - protein, 76 aa, Oryza sativa
  Clone ID: PAT_MRT4530_92174C.1.pep
MVTPAIANWPVTVPEAQTDAIGGGAGGWMGGGGGEIEGGEMQGGLTKKRAEECVIEFTALDVIKFTERKEKIKTLS

SEQ ID NO: 196312 - protein, 398 aa, Oryza sativa
  unsure (1)..(398): unsure at all Xaa locations
  Clone ID: PAT_MRT4530_92175C.1.pep
MGIFWSKAEPPPPMVLVPPLFDYPPIAARTRMSVPAYELMFGKLSLRTLFEDYFDRAGNMSXRVMLKPLEDPHVDLISTVSAAADKIDGTQVXAGLAHNLLSRMLQVRSCAYHPKYRVGAFGTFPLLMGNREISFFRVRSEDYGVMGVRYGSENLSFGSSFVPFPGSAELPSGAWXNKHLMPYTDWKNWNCAISYGVGLTSPLSPSFIFSLELARSTELLXFIASFYQHMVVQRRVKNPFEDDQIVGITNYIDFGLELATRIDKDKPSESANNSLFQFAASWQANKNFLFKGKLGPSKSSVALAFKSWWRPSFTFSVTAVNDHLKGTRSYGFGIRVEDLRQPSYQRADPNYVMLTPSKEHLAPGVLREYGKRPMFQAEVDSGNYDHLPTELKPISKIF

SEQ ID NO: 196313 - protein, 781 aa, Oryza sativa
  Clone ID: PAT_MRT4530_92176C.1.pep
MGDPVVGSTAATDPAVGSGGCRGGSNGGDCKNEQMIEDKDEVHAHLIMNGFMKKYTCWTKHGEQEAPDVAAEEVLDQDVENTAAAREGMFVPSPLGGETIDLDTQCLSTMLHDIEDAEDNDRDYEKFSKLVEDCQMPLYDGCKSKHSKNMRKNFNGHRDTAGPPTELTGTEVHNLVMGITNEFGKKRKVGKRKEKSTSKEKTEEHVEKQKTKERSMWKKKSIFWRLPYWKDLEVRHCIDLMHVEKNVCESLMGLLLNPGTTKDGLNARRDLEDMGVRSELHPITTESGRVYLPPACYTLSKEEKIDLLTCLSGIKVPSGYSSRISRLVSLQDLKLVGMKSHDCHVLITQLLPVAIRNILPPKVRHTIQRLCSFFHAIGQKIIDPEGLDELQAELVRTLCHLEMYFPPTFFDIMEHLPVHLVRQTKCCGPAFMTQMYPCERYLGILKGYVRNRSHPEGSIIESYTTEEAIEFCVDYMSETSSIGLPRSHHEGRLDGVGTVGRKTIRLDRKVYDKAHFTVLQHMTEVVPYVDEHLAVIRQENPGRSESWVRNKHMSSFNEWLKNRIARLQNLPSETLQWLSQGPEWSATTWQGYDINGYTFHTVKQDSKCTVQNSGLRIEAASDGGRRDQYYGRVEQILELDYLKFKVPLFRCRWVDLRNVKVDNEAFTTVNLANNAYKDEPFVLAKQVVQVFYIVDPCNKKLHVVREGKRRIVGLDNIADEDDYNQHVHGIGQEIPLEEEEEEDEVQYARPSQVTSPVTAQSAGPVTGGLTCDGSTVGARHR

SEQ ID NO: 196314 - protein, 1877 aa, Oryza sativa
  Clone ID: PAT_MRT4530_92177C.1.pep
MAGYIDGTKEEPPATIITKKDDKDVRVTNPAHTEWVAQEQQVLSYLLLSLSRDVLIQVVSIPTAVGVWDAISGMFASHSRARVMNTRMALTATKKGNLKVAEYVAKMRGLADDMASAGKKLDDDDIVSDILAGLDDDFDPVVSAVAQRSEPISVGELFSQLVTFEQRLELRQGGIQSSTNSASRGGNGGGRGHGQPNQGQNLNRGRGGQGRGRGGFTNNQGGDHPKCQLCDKLGHTVVKCYKRFDASFTGEEKSAAAATSSYGVGTNWYIDTGATDHITSDLDKLTVREKYNGGDQVHTASGSAYAQMPLKFWDEAFLTEHLLNPSRDEHVDQYVINSSTNPAHESPVDVATSADAAAEISGRTGQILEQNTHGFLLGGRPGHSAAPNTHAAPDDAATSDATAAHHPGDIGAAAGSSLSRSPSTSHSSSRVSDSAPEPASPPRGDDSLAVPIDGGSSEPLSDSSSSRSSMATNSTANNSTTSSEAALTQPQRPATRLQQGIRKPKVYTDGTVRWANLITAESEPDTLNDALNSKNWKLAMDNEFLALQKNKTWHLVPPTKGKNIIDCKWVYKIKQKADGTIDRYKARLVAKGFKQRYEIDYEDTFSPVVKAATIRLVLSVAVTRGWSLRQLDVQNAFLYGVLEEEVYMRQPPGSYKELESKRVQTLETLFLFLSSTSSGLLPPLSPAPPFLSGQVASSSQSATDALLKGLEADFALKDLGDLHYFLGIEVQRTDDGLTMRQERYATNLLQRVGMTNCKSVTSPLSVLEKLSITSGEQLGPLDSTRYRNVVGALQYLTLTRPDISFSVNKVCQFLHAPTTTTHWSAVKRILRAFSDTDWAGCLDDRRSTGGFAVFLGKNLISWSARKQATVSRSSTEAEYKSLANATAKMDRRWMYYAHRSSTEYREGVTEFVTFADNDRKSRMSMHMLCPCRDCKNEQMIEDKDEVHAHLIMNGFMKKYTCWTKHGEQEAPDDAAEEVLDQDVENTAAAREGMFVPSPLGGETIDLDTQCLSTMLHDIEDAEDNDRDYEKFSKLVEDCQMPLYDGCKSKHSKLSCVLELMKLKASNGWSDKSFTELLELLKDLLPEGNNLPQTTYEAKQVLCPLGLEEYADLDVCPICGGSRYKRAKSEGEGSKSKRGGPAKVVWYLPIAERMKRMFANKEQAKLVRWHAEERKVDTMLRHPADSVQWRTIDRIYQEFSNDPRNMRFAMCTDGINPFGDLSSRHSTWPVLLVNYNLPPWLCFKRKYIMLAMLIQGPRQPGNDIDVFLEPIIDDFERLWNEGTRTWDAYAQEYFNLHAMLFCTINDYPALGNLSGQTVKGKWACSECMEETRSKWLKHSHKTVYMGHRRFLPRYHPYRNMRTNFNGHRDTAGPPTELTGTEKNVCESLMGLLLNPGTTKDGLNARRDLEDMGVRSELHPITTESGRVYLPPACYTLSKEEKIDLLTCLSGIKVPSGYSSRISRLVSLQDLKLVGMKSHDCHVLITQLLPVAIRNILPPKKIIDPEGLDELQAELVRTLCHLEMYFPPTFFDIMEHLPVHLVRQTKCCGPAFMTQMYPCERYLGILKGYVRNRSHPEGSIIESYTTEEAIEFCVDYMSETSSIGLPRSHHEGRLDGVGTVGRKTIRLDRKVYDKAHFTVLQHMTEVVPYVDEHLAVIRQENPGRSESWVRNKHMSSFNEWLKNRIARLQNLPSETLQWLSQGPEWSATTWQGYDINGYTFHTVKQDSKCTVQNSGLRIEATSDGGRRDQYYGRVEQILELDYLKFKVPLFRCRWVDLRNVKVDNEGFTTVNLANNAYKDEPFVLAKQVVQVFYIVDPCNKKLHVVREGKRRIVGLDNIADEDDYNQHVHGIGQEIPLEEEEEEDEVQYARVDHEEGLFL

SEQ ID NO: 196315 - protein, 69 aa, Oryza sativa
  Clone ID: PAT_MRT4530_92178C.1.pep
VRHWKQSGFGKEIDSKNRVCISCEGIGWSLHRLRWIGQRTADIADFVEDSCKIVSRINQRTTQGLPRCE

SEQ ID NO: 196316 - protein, 387 aa, Oryza sativa
  unsure (1)..(387): unsure at all Xaa locations
  Clone ID: PAT_MRT4530_92179C.1.pep
MLKKKSIFWRLPYWKDLEVHHCIDLMHVEKNVCESLMGLLLNPGTTKDGLNARQDLEDMGVRSELHPITTESGRVYLPPACYTLSKEEKIDLLTCLSGIKVPSGYSSRISRLISLQDLKLVGMKSHDCHVLITQLLPVAIRNILPPKVRHTIQRLCSFFHAIGQKIIDPEGLDELQAELVRTLCHLEMYFPPTFFDIMEHLPVHLVRQTKCCGPAFMTQMYPCERYLGILKGYVRNRSHPEGXIIESYTTEEVIDFCVDYMSETSSIGLPRSHHEGRLDGVGXDLRNVKVDNEGFTTVNLANNAYKDEPFVLAKQVVQVFYIVDPCNKKLHVVREGKRRIVGLENIADEDDYNQHVHGIGQEIPLEEEEEEDEVQYARVDHEEGLFL

SEQ ID NO: 196317 - protein, 122 aa, Oryza sativa
  Clone ID: PAT_MRT4530_9217C.1.pep
CMRIVPTSGVILFLQSGVLRLVLTLTTCVVLRLCCTRRGACLLRCHFAVACRLFHCLAGQLSVHLRCSGGHVAADRRGSAGEVGSVVQQTEGRALPHGGRRRRRRAAGDGEAGAVVRSGRVG

SEQ ID NO: 196318 - protein, 272 aa, Oryza sativa
  Clone ID: PAT_MRT4530_92180C.1.pep
MKALSAADSAASPATKITIPYYSAAAGAGEAGPPFGKGRYKVWALAAIALLALWSMSAASASLRWSSGRFLLAATASEDLDAPLLDDLDSLEAFEAAYEELAGDDMQVRDAAISEIARMSAHRLELEQPVNEEQPEGQAREDVALDKEKGRRSSSPSLTEQQLILAIAGSNGGANKFTGEEVLAARPWEGEGEEEEKEKKSPPPVAVAAVHRYRSHRRHLRTATGAAACWEGGGEGADGGGGGRGSWRMRSRQDLQKMARHMSTEKAGTRGC

SEQ ID NO: 196319 - protein, 1033 aa, Oryza sativa
  Clone ID: PAT_MRT4530_92181C.1.pep
MTQSNKFEDLNGRFASLGTGMTQRVCPITLYHYARTLHLLRHTSDGPMNWSQMTVTFDGSLGLPSSVGHPAVARHRYPLTCDGPEGKAVTGEEVTGFPPYPSLMDRRWIYYAHRSSTEYREGVTEFVIFADNDRKSRMSMYMLCPCRDYKNEQMIKDSDEVHAHLIMNGFMKKYTCWTKHGQQEAPDVAAEEVLDQDVENTAAAREGMFVPSPLGGETIDLDTQYLSTMLHDIEDAEDNDRDFEKFKGNNLPQTTYEAKQVLCPLGLEEYADLDVCSICEASRYKRAKSEGEGSKSKRGGPAKVVWYLPIAERMKRMFVNKEQAKLVRWHAEERKVDSMLRHPTDSVQWRTIDKIYQEFSNDPRNMRFAMCTDDINPFGDLSSRHSTWPVLLVNYNLPPWLCFKRNYIMLAMLIQGSRQPGNDIDVFLEPIIDDFERLWNEGTQTWDAYAQEYFNLHAMLFCTINDYSALGNLSGQTVKGKWACSECMEETRSKWLKHSHKTVYMGHRRFLPRYHLYRNMKKNFNGHRDIAGPPAELTGTEVHNLVMGITNEFGKKRKVGKTKEKSTSKEKTKEHVEKQKIKERSMWKKKSIFWRLPYWKDLEVRYCIDLMHVEKNVCESLMGLLLNPGTTKDGLNARRDLEEMGVRSELHPITTESGRVYLPPACYTLSKEEKIDLLTCLSGIKVPSGYSSRISRLVSLQDLKLVGMKSHDCHVLITQLLPVAIRNILPPKMYPCERYMGILKGYVRNRSHPEGSIIESYTTEEIIDFCVDYMSETFSIRLPRSHHEGRLDGVGTVGRKTVRLDQKVYDKAHFTVLQHMTEVVSYVDEHLAVLRQENPGRSESWVRNKNTSSFNEWLKNRIARLQNLSSETLQWLSQGPEWSATTWQGYDINGYTFHTVKQDSKCTVQNSGLRIEAASDGGRRDQYYGRVEKILELDFLKFKVPLFRCRWVDLRNVKVDNEGFTTVNLANNAYKDEPFVLAKQVVQVFYIVDPCNKKLHVVREGKRRIVGLDNIADEDDYNQHVHGIGQEIP

SEQ ID NO: 196320 - protein, 666 aa, Oryza sativa
  Clone ID: PAT_MRT4530_92182C.1.pep
MASGAVVEPDGRGKCRVENGACTTEADLVQAWPSLASGGGCGRGDTGARRDDGVVLLVGGTRLERSASGEGHEAAETAEGRRRRVRVGGAGWGASAGGGGRRGMLTLLPKRMTDPCIVQELFTVLHSSATFDSPILRCRSAAGARVTALPLIAATTFSRLPITVLICIAALALVVRFISRDAAAVHEPVAAAPTSDDDSIGGGGLSFILCIAALAFISGDATIVHEPVAAAAAPSSDEADSIDGGGGGFSLPLVRRRSTTTTTMIDVAKKEIQLATAIAAGDKKLLVPLYGRPQGGSTYLVQLRIGTPTDRISPRYVLFDTGSDLSWTQCEPCTNCSSFTPYPPHDPSKSRTFRRLSCFDPMCELCTAVVDGGGGSAGCLFRRRYGDGGAVSGELVSDVFHFGAAGDGGGYQLERDVAFGCAHVEDSKSVRGYSTGILALGIGKPSFVTQLGVDRFSYCIPASEITDDDDDDDDDEERSASFLRFGSHARMTGKRAPFKQDGSGYAVRLKSVVYQHGGRLNQQQPVPVYVAGEEAAAAMPMLVDSGTTLLWLPGSVFYPLQRRIEEDISLTRRYDLTHPSLYCYLGNMTDVEAVSVTLGFGGGADLELFGTSLFFTDENLTEDWVCLAVAAGNRAILGVYPQRNINVGYDLSTMEIAFDRDQCDRV

SEQ ID NO: 196321 - protein, 78 aa, Oryza sativa
  Clone ID: PAT_MRT4530_92183C.1.pep
HKKVTQGVHTCICTFKSTTTFTNHLPFGFITNHAYLQKKNCENFRMFFMPVLIPTMVISIITIALTYDLHNKHNACTH

SEQ ID NO: 196322 - protein, 86 aa, Oryza sativa
  Clone ID: PAT_MRT4530_92184C.1.pep
WQEHNGQNGGYLAVRSSELRRLNRRHQTTAIEARRLDRRIYTGQIRKFRHSQTGANTPGEVSSYSSFTQNHKLKNSPAFRLDSKKL

SEQ ID NO: 196323 - protein, 472 aa, Oryza sativa
  Clone ID: PAT_MRT4530_92185C.1.pep
MHLLASSSSIPMATTRATSTLLLLLLLVSATWAASAPTTSRARNVITHVKGFQGRLPFHLETGYVEVDNTDTVELFYYFIQSERSPADDPLILWITGGPGCSALSGLLFEIGPLKFDVAGYTEGFPQLFYFQDSWTKVSNVIFLDAPVGTGFSYAREEQGYNVTLTQTGQQLVVFLTKWLGDHPEFASNPLYIGGDSYSGYTVPVTALQIANDDDARARLNLKGYLVGNAATDVKYDSGGKVPFMHGMGLISDEMYEAARSSCRGDYVSTPTNADCANALQAISMATFAINPVHILEPICGFALRGRAMPETTMDQRLRLGLPVECRDNGYRLSYLWADDPEVRATLGIHEGSIASWSRCTALPLFRHDVDSAIPYHAELTQRGYRALVYNGDHDLDMTFVGTQQWIRTLGYNVVTAWRPWYSNRQVAGFTTVYDHNLTFATVKGGGHTAPEYRPKECLDMLDRWTSPAGEL

SEQ ID NO: 196324 - protein, 515 aa, Oryza sativa
  Clone ID: PAT_MRT4530_92186C.1.pep
VAILKQKTDLLKEVDNLRGELQQVRDDRDHKLAEIHSLLADVSTYKEMTGKSVAELDNAMTRSTALEETCSSQAERIKTLELQLASANEKLKRSDLTTMETMTEYEKQKRMLEDLQLRLEEAEQQILDGENLRKRLHNTILVLSLKLFLVFCVSSVVAKTLALQELKGNIRVFCRVRPLLPNESGAVAYPKSGENLGRGIELTHNAQMYSFTFDKVFEQSASQEDVFIEISQLVQSALDGYKVCIFAYGQTGSGKTYTMMGNPELHDQKGLIPRSLEQIFQTSQALISQGWKYKMQASMLEIYNEAIRDLLATNRTTVQDGGASKYSIKHDANGNTHVSDLTIVDVSSINEVSSLLKRAAQSRSVGRTQMNEESSRSHCVFTLRIFGVNEGTDQQVQGVLNLIDLAGSERLNKSGATGDRLKETQAINKSLSCLSDVIFSIAKKEEHVPFRNSKLTYLLQPCLGGDSKTLMFVNLSPEVSSTGESICSLRFAARVNSCEIGIPRRQTQVRSLAQG

SEQ ID NO: 196325 - protein, 52 aa, Oryza sativa
  Clone ID: PAT_MRT4530_92187C.1.pep
HIVRGPISPSSTWRSTDPRYKRDPRSQVTGRSSRANSTTVSSISPSSFIPFV

SEQ ID NO: 196326 - protein, 60 aa, Oryza sativa
  Clone ID: PAT_MRT4530_92188C.1.pep
MYLSAIFADISITQQIIDDQNMGNPRSQGRRGGLGRMLKEHKARLYIIRRCVVMLLCNRD

SEQ ID NO: 196327 - protein, 138 aa, Oryza sativa
  Clone ID: PAT_MRT4530_92189C.1.pep
MSSDCDKTLHITPSDQSHHTSGFALAPSKQRAGPPHATLPIPACGAAGADTWAPHVSGQRGRGLGRMDNPDRGPGPIQRPRPAAAEIKGRQPTGGGAQRQRPGRTAIGGGGASRTGLELVGEGENERGRGVLTELMQR

SEQ ID NO: 196328 - protein, 50 aa, Oryza sativa
  Clone ID: PAT_MRT4530_9218C.1.pep
KNIVVFGIIIVKNVKCIKENIPVCVLYKSIFSTKTLISCPPQMNICDVSV

SEQ ID NO: 196329 - protein, 225 aa, Oryza sativa
  Clone ID: PAT_MRT4530_92190C.1.pep
MSEAMFRFMSKNGAGDGCGGGGGGGGGGVALEVTVLSAESLRLPPPSYYSLIPRRLRPYVTVSSAASACSTDVAAAASGEHSWNDTLVVPVGAEFLESRGGGGVHVAVYSEPACRLVGGATPLGWCRIPAADVLDGLRPPRALRRLSYSLRCPRTGGPARGVVHLAVRVLGDLVPPPPPQHAPSTPPAQPGWCRVAMGIPVSGTSAAVVGMPAWAAWGGEAAASR

SEQ ID NO: 196330 - protein, 96 aa, Oryza sativa
  unsure (1)..(96): unsure at all Xaa locations
  Clone ID: PAT_MRT4530_92191C.1.pep
MGAATMALSAPALDGQAAAKVFGEGRITMRKSCANAKPAAWISPMYGPHRXVLYLGPVSGKRASYLTEEFPGDYRWDTVGLFCDPGTFGKNAELEG

SEQ ID NO: 196331 - protein, 80 aa, Oryza sativa
  Clone ID: PAT_MRT4530_92192C.1.pep
VSGGGEGGLGGVGGQEAGGGASGGGGVGGGRLARAEAEAEARLEVSPAEAAEVETTAAVGPRPLPLPPSSATAPSLAPVG

SEQ ID NO: 196332 - protein, 131 aa, Oryza sativa
  Clone ID: PAT_MRT4530_92193C.1.pep
SGWSKLAGIPVPLVRSAMVACGYGHHHQDRLDDAAIKSLPLAMAARRCGWQVRRGHVLALVINVDTDDEVRAAHQLARLVVVDARHLGPVRPHPLLPCLRRHITAELAVLGEDAPRATEDEVDQRLPQHEH

SEQ ID NO: 196333 - protein, 245 aa, Oryza sativa
  Clone ID: PAT_MRT4530_92194C.1.pep
MQLHGAAARSGLGAVARRRAHIKQRAHPLLVKGAASRQIKQQHIQIQTSKKDRAARNTSTQLIKKDTRQYGNEVLLYYIIHGFGPPPTASRIGRPSGYAVPMMSTKGVAITKDILHREEEANQVFGRALCNCSLVLEYDYVDYFFFIMADDKNRNNDGNNNSSLSATVATTAPSPYKKSGKILTITKVVVRDGDENLEISLNRTQTQVTEPNLLLFFYGGGWNTLSAGIPLPSVEQQQTVIACDS

SEQ ID NO: 196334 - protein, 1030 aa, Oryza sativa
  Clone ID: PAT_MRT4530_92195C.1.pep
MNYTHRCLHSHKLPLLILLIAIVVILIQPYSIHAAANSSNTTIRCLTSQSSALLQLKSSFHDASRLSSWQPDTDCCRWEGVTCRMASGHVVVLDLSDGYLQSNGLHPALFNLTLLTNLALSGNDFMGAQLPDSGFERLSKLVSLDLSATNFAGQIPIGIGNLSNMLALDLSHNPNLYLTEPSFQTFIANLSNLRELYLDEMDLSSSGATWSSDVAASAPQIQILSFMSCGLSGFIDPSFSRLRSLTMINVRLNVISGMVPEFFANFSFLTILELSGNAFEGQFPTKIFQLKRLQFIDLYWNNKLCVQLPEFLPGSRLEVLDLILTNRSNAIPASVVNLKYLKHLGLTTVEASMNSDILLIRELHWLEVLRLYGGSGQGKLVSFSWIGSLKHLTYLELGNYNFSGLMPSSIINLTNLTSLTLYNCSMSGPIPSWIGNLIQLNNLNFRNNNLNGTIPKSIFALPALQSLYLDSNQLSGHLEDIPVPLSSSVYDIDLSNNWLHGPIPKSFFCLPNLEYLNLESNHLTGIVELRPFWRLRSLYFLGFSNNKLSVIDGEDSPSQYLPKIQHLGLACCNLTKLPRILRHLYDILELDLSSNKIGGVIPGWIWEIWKDTLGSLDLSNNAFTSLENSPSLVTFTHLSHLNLSFNRLQGEIPIPAISLPYGVVVLDYSNNGFSSILRTFGRYLNKVAYINLSKNKLKGYVPISICSMKKLQFLYLSDNNFSGFVPSCLVEGRSLRVLNLRGNKFNGMLPKGIKEGCKLETIDLNSNQIEGRLPRTLSNCKSLELLDVSNNHILDLFPLWLGNLPKLRVLVLRSNQLYGTIKGLHNSDLTRDHFSSLQILDLANNTLSGQLPPKWFEKLKSMMANVDDGQVLEHQTNFSQGFIYRDIITITYKGFDMTFNRMLTTFKAIDFSNNSFVGVIPGTIGSLVSLHGLNMSHNNFTGAIPQQLGNLAQLESLDLSWNQLSGVIPHELTFLTSLSWLNLSNNNLTGRIPQSNQFLSFSNSSFEGQRGNLLYLLEISLNLLCFGFGK

SEQ ID NO: 196335 - protein, 193 aa, Oryza sativa
  Clone ID: PAT_MRT4530_92196C.1.pep
FRVLPYGVRPSLSRRDTTNLRRLARGLPPHFALGRSRQLQGLAAAMVKLWEKSSIAKIALKRGVQLTTSERMAEDIKKLTGGVMLSRNNDFMVFYRGKDFLSPELAEKLLERERWAKSLQDEEQARLNAASSFSSRTEAPVEPTVAGTLGETLEANSKYGNKLDENYENKMTRTVEAARHADLVRKLEWKLQL

SEQ ID NO: 196336 - protein, 549 aa, Oryza sativa
  Clone ID: PAT_MRT4530_92197C.1.pep
MKLKTSNGWSDKSFTELLELLKDLLPKGNNLPQTTYEAKYKRAKSESEGSKPKMGGPAKVVWYLPIVERMKRMSANKEQAKLSSQYMASSAWLCFKRKYIMLAMLIQGPRQPGNDIDVFLEPIIDDFERLWNEGTQTWDAYAQEYFKLHAIMFCTINDYPALGNLSGQTVKGKWAYSECMEETRSKWLKHSYKTVYMGHRRFLPRYHPYRNMRKNFNGNKDTTGPSAELTGTEKIIDPEGLDELQAEIVRTLCHLEIYFPPTFFDIMEHLPVHLVRQTKCFGSAFMTQMYPCERYLGILKGYVWNRSHPEGTIIESYTTEEVINFCVDYMSKTSSIGLPRSPHEGRLDGVGTIGRKIVRLDRKVYDKAHFTGLEWSATTWQGYVINGYTFHTVKQDSKCTVQNSGLRIEAASDGGRRDQYYGRVEEILEVDYLKFKVPLFRCRCVDLRNEKVDNEGFTTVNLANNAYKDEPFILAKQVVQVFYIVDPCNKKLRVVHEGKRRIVGLDNIADEDDYNQHVHGIGQEIPLEEEEEEDDVQHARVDYEEGLFL

SEQ ID NO: 196337 - protein, 203 aa, Oryza sativa
  Clone ID: PAT_MRT4530_92198C.1.pep
SSSSPTVSAVHRRLHRPSPPPPSPLWTSSSPTQLIPTSAIIHQAEPYSISRPSSTLLGFTGCSHPAISVHFFFFFCSESDLVIQIISKTPEGWKLCAELRWCNEEWIKESCEGRVYREMMDGPAHRQGSASLDRFQKNMEKKEKRPVGIFEAYAEARKNGKDGEDYCTDRVKAPEKYSVAVSVLLNIPSVGFFSRAALTTQDV

SEQ ID NO: 196338 - protein, 178 aa, Oryza sativa
  Clone ID: PAT_MRT4530_92199C.1.pep
MNGFMKKYTCWTKHGEQEAPDVAAEELLDQDVENTATAREGMFVPSPLGGEIIDLDTQCLSTMLHDIEDAEDNDRDFEKFSKLVEDCQMPLYNGCKLKHKGNNLPQTTYEAKQVLCPLGLEEYADLDVCPVCGASRYKRAKSEGEGSKSKRGSPAKVVWYLRIAERMKRMFANKNKLS

SEQ ID NO: 196339 - protein, 460 aa, Oryza sativa
  Clone ID: PAT_MRT4530_9219C.1.pep
MSSSSPSLLSRRSTAELELPVPPEFRCPISLELMRDPVVGPTGITYDRAGIEAWLLAAGAGKTAAASSTCPVTKGDLRADDLVPNHALRRVIQAWCVANRCRGVERIPTPRVPVTPAQAGEVLGEVEAAARAGDAARCVAAVREVGRLARESDRDRRCLASAGAARALAAAVASFPAASDSASASSVLLDDVLAALVLVMPLDEEAIVAIGSSAASVALLANVAKHGDLQRRLQAVVVIREIVALSSCCSRNGGAATAIDLSDNLDGIIEVLVNTIRDPISPQATKASLVAAYHLALADGHAAARLAEAGLVPSLVELLIDGDRSTAEKALAALDATLASEAGRARAQADALAVPVLVKKMFRVSDTATELVVSALHRICKKWHDGDDDEVGSPAARRSAVVEAVQVGAFQKVMMLLQVGCRDATKEKATELLKLMIKYETRGGAHCIDAMDFRGLKRVS

SEQ ID NO: 196340 - protein, 33 aa, Oryza sativa
  Clone ID: PAT_MRT4530_921C.1.pep
FFLVPTSHLIQHMTKRCEIILHVNVVTPCQPHF

SEQ ID NO: 196341 - protein, 837 aa, Oryza sativa
  Clone ID: PAT_MRT4530_92200C.1.pep
MDRRWMYYAHRSSTEYREGVTEFVTFADNDRKSRMSMHMLCPCRDCKNEQMIEDKDETKHGEQEAPDVAAEEVLDQDVENTAAAREGMFVPSPLSGETIDLDTQCLSTMLHDIEDAEDNDRDYEKFSKLVEDCQMPLYDGCKSKHSKLSCMLELMKLKASNGWSDKSFTELLELLKDLLPEGNNLPQTTYEAKQVLCPLGLEEYADLDVCPICGASRYKRAKSEGEGRPRQPGNDIDVFLEPIIDDFERLWNEGTRTWDAYAQEYFNLHAMLFCTINDYPALGNLSGQTVKGKWACSECMEETRSKWLKHSHKTVYMGHRRFLPRYHPYRNMRKNFNGHRDTAGPPTELIETEVHNLVMGITNEFGKKRKVGKRKEKSTSKEKTEEHMEKQKTKERSMWKKKSIFWRLPYWKDLEVRHCIDLMHVEKNLLPVAIRNILPPKVRHTIQRLCSFFHAIGQKIIDPEGLDELQAELVRTLCHLEMYFPPTFFDIMEHLPVHLVRQTKCCGLAFMTQMYPCERYLGILKGYVRNRSHPEGSIIESYTTEEAIEFCVDYMSETSSIGLPRSHHEGRLDGVGTVGRKTIRLDRKVYDKAHFTVLQHMTEVVPYVDEHLAVIRQENPGRSESWVRNKHMSSFNEWLKNRIARLQNLSSETLQWLSQGPEWSATTWQGYDINGYTFHTVKQDSKCTVQNSGLRIEAASDGGRRDQYYGKVEQILELDYLKFKVLLFRCRWVDLRNVKVDNEGFTTVNLANNAYKDEPFVLAKQVVQVFYIVDPCNKKLHVVREGKRRIVGLDNIANEDDYNQHVHGIGQEIPLEEEEEEDEVQYARVDHEEGLFL

SEQ ID NO: 196342 - protein, 64 aa, Oryza sativa
  Clone ID: PAT_MRT4530_92201C.1.pep
TALHGSLGVTATPTMHSRLRGVFAGAKTAHIAHQTTLTNNICGQPITSELWTQLVSSAVPECYK

SEQ ID NO: 196343 - protein, 54 aa, Oryza sativa
  Clone ID: PAT_MRT4530_92202C.1.pep
MQRKVSAEAMSETVEVGSASPGPVPAFREPQERPGGRGLGVPRYAPRALALLCP

SEQ ID NO: 196344 - protein, 1100 aa, Oryza sativa
  Clone ID: PAT_MRT4530_92203C.1.pep
MGPTYHAPLSLPLSSLSHSLSLTLPLALSPAAQTGDAAAEAAAGDADAVAVVAGDEAAVSAVATTSRHPSSRGQMEAMDRRWMYYAHRSSTEYREGVTEFVTFADNDRKSRMSMHMLCPCRDCKNEQMIEDKDEVHAHLIMNGFMKKYTCWTKHGEQEAPDVAAEEVLDQDVENTAAAREGMFVPSPLGGETIDLDTQCLSTMLHDIEDAEDNDRDYEKFSKLVEDCQMPLYDGCKSKHSKLSCVLELMKLKASNGWSDKSFTELLELLKDLLPEGNNLPQTTYEAKQVLCPLGLEEYADLDVCPICGASGYKRAKSEGEGSKSKRGGPAKVVWYLPIAERMKRMFANKEQAKLVRWHAEERKVDTMLRHPADSVQWRTIDRIYQEFSNDPRNMRFAMCTDGINPFGDLSSRHSTWPVLLVNYNLPPWLCFKRKYIMLAMLIQGPRQPGNDIDVFLEPIIDDFEKLWNEGTRTWDAYAQERFLPRYHPYRNMRKNFNGHRDTAGPPTELTGTEVHNLVMGITNEFGKKRKVGKRKEKSTSKEKTEEHVEKQKTKERSMWKKKSIFWRLPYWKDLEVRHCIDLMHVEKNVCESLMGLLLNPGTTKDGLNARRDLEDMGVRSELHPITTESGRVYLPPACYTLSKEEKIDLLTCLSGIKVPSGYSSRISRLVSLQDLKLVGMKSHDCHVLITQLLPVAIRNILPPKVRHTIQRLCSFFHAIGQKIIDPEGLDELQAELVRTLCHLEMYFPPTFFDIMEHLPVHLVRQTKCCGPAFMTQMYPCERYLGILKGYVRNRSHPEGSIIESYTTEEAIEFCVDYMSETSSIGLPRSHHEGRLDGVGTVGRKTIRLDRKVYDKAHFTVLQHMTEVVPYVDEHLAVIRQENPGRSESWVRNKHMSSFNEWLKNRIARLQNLPSETLQWLSQGPEWSATTWQGYDINGYTFHTVKQDSKCTVQNSGLRIEAASDGGRRDQYYGRVEQILELDYLKFKVPLFRCRWVDLRNVKVDNEAFTTVNLANNAYKDEPFVLAKQVVQVFYIVDPCNKKLHVVREGKRRIVGLDNIADEDDYNQHVHGIGQEIPLEEEEEEDEVQYARVDHEEGLFL

SEQ ID NO: 196345 - protein, 249 aa, Oryza sativa
  Clone ID: PAT_MRT4530_92204C.1.pep
MTVTFAVIGGASGHGPSQMDRRWMYYAHCSSTEYREGVTEFVTFAKNDRKSRMSMHMLCLCRNCKNEQMIVNSDEVHAHLIMNGFMKKYTCWTKHGEQEAPDIAAEEVLDQDVENTAAAREGMFVPSPLGGETIYLDTQCLSTMLHDIEDAEDNDRDFEKFSILEYADLDVCPVCGASRYKRANSEGEGRSRQPGNDIDVFLEPIIDDFERLWNEGTRTWDAYAQEYFNLHAMLFCTINDYPALGNLSG

SEQ ID NO: 196346 - protein, 427 aa, Oryza sativa
  unsure (1)..(427): unsure at all Xaa locations
  Clone ID: PAT_MRT4530_92205C.1.pep
MNRSWMYHVHRSSTEYREGVTEFVTFAENDRKSRMSIYILCPCRDCKNEKMILDSXEEHSHLITKGFIKKYTCWTKHXAQEAPDAAAEEVLDQNVENTAAAREGMFVPSPLGGETIDLDTQCLSTMLHDIEDAEDNDRDFEKFSKLVXDCQMPLYGGCKSNHNKLSCVLELMKFQASNGWSDKSFTXLLELLKDLLPEGNNLPQTTYEAKQVLCPLSLEVRGIHACPNDCILYYKEYADLDVCPVCGASRYKRAKSEXGEGSKSNRGGPAKVVWYLLIAERMKRMFTNKEQAKLVRWHAEERKVDSMLRYLADSVQWRTINRIYQEFLKDPRNMRFAMCTDGINPFGDLSSRHSRWPVLLVNYNIPPXLCFKRKYIMLAMLIQGPRQPGNDIDVFLEPIIDDFERLWNEGTRTWDAYAQEYFNLHIC

SEQ ID NO: 196347 - protein, 784 aa, Oryza sativa
  Clone ID: PAT_MRT4530_92206C.1.pep
MARGGGGGCCPPMDLMRSEAMQLVQVIIPTESAHLTVSYLGELGLLQLKDLNADKSPFQRTYAAQIKRCGEMARKLRFFKEQMSKAGISTSAQLTEISLDFDDLEAGEFFYSAQRSAAAQQREMEANQSGESSLESPLLEQDTLTDASKQVKLGSLSGLVPKEKAMAFERILFRATRGNIFLRQESVDEPVTDPVSGEKVAKNAFVIFYSGDRAKAKILKICDAFNANRYPFPEDVARQLHAVQEVSAKISELKATIDMGLAHRDNILKNIASEFENWNRLANKEKIIYHTLNMLSVDVTKKCLVGEGWSPVFATTQIQDALQRATLDSKSQVGSIFQVLNTTESPPTYFQTNKFTSAFQEIVDAYGIAKYQEANPGVFTIVTFPFLFAVMFGDWGHGICILVSTLYLIIREKKFASQKLGDIMEMMFGGRYVIIMMALFSIYTGLIYNEFFSVPFELFGKSAYACRDPSCGDAATEGLLKVRRTYPFGVDPVWHGSRSELPFLNSLKMKMSILLGVAQMNLGIVISYFNAKFFRNSVNVWYQFIPQLIFLNSLFGYLSMLIIIKWSTGAKADLYHTMIYMFLSPTDELGENQLFPGQKTVQLVLLLLALVSVPWMLIPKPFFLKMEHERRHQGQQYAMLQSTDDSVVAEMGHHNGSNHHEEFEFSEVFVHQLIHTIEFVLGAVSNTASYLRLWALSLAHSELSSVFYDKVLLLAFGYNNILIRIAGITIFICATVGVLLVMETLSAFLHALRLHWVEFQNKFYEGDGYKFAPFSFALISEEED

SEQ ID NO: 196348 - protein, 1053 aa, Oryza sativa
  Clone ID: PAT_MRT4530_92207C.1.pep
MPSPMDRRWMYYAHRSSTEYREGVTEFVTFADNDRKSRMSMHMLCPCRDCKNEQMIEDKDEVHAHLIMNGFMKKYTCWTKHGEQEAPDVAAEEVLDQDVENTAAAREGMFVPSPLGGETIDLDTQCLSTMLHDIEDAEDNDRDYEKFSKLVEDCQMPLYDGCKSKHSKLSCVLELMKLKASNGWSDKSFTELLELLKDLLPEGNNLPQTTYEAKQVLCPLGLEVRRIHACPNDCILYYKEYADLDVCPICGASRYKRAKSEGEGSKSKRGGPAKVVWYLPIAERMKRMFANKEQAKLVRWHAEERKVDTMLRHPADSVQWRTIDRIYQEFSNDPRNMRFAMCTDGINPFGDLSSRHSTWPVLLVNYNLPPWLCFKRKYIMLAMLIQGPRQPGNDIDVFLEPIIDDFERLWNEGTRTWDAYAQEYFNLHAMLFCTINDYPALGNLSGQTVKGKWACSKCMEETRSKWLKHSHKTVYMGHRRFLPRYHPYRNMRKNFNGHRDTAGPPTELTGTEVHNLVMGITNEFGKKRKVGKRKEKSTSKEKTEEHVEKQKTKERSMWKKKSIFWRLPYWKDLEVRHCIDLMHVEKNVCESLMGLLLNPGTTKDGLNARRDLEDMGVRSELHPITTESGRVYLPPACYTLSKEEKIDLLTCLSGIKVPSGYSSRISRLVSLQDLKLVGMKSHDCHVLITQLLPVAIRNILPPKVRHTIQRLCSFFHAIGQKIIDPEGLDELQAELVPGILKGYVRNRSHPEGSIIESYTTEEAIEFCVDYMSETSSIGLPRSHHEGRLDGVGTVGRKTIRLDRKVYDKAHFTVLQHMTEVVPYVDEHLAVIRQENPGRSESWVRNKDMSSFNEWLKNRIARLQNLSSETLQWLSQGPEWSATTWQGYDINGYTFHTVKQDSKCTVQNSGLRIEAASDGGRRDQYYGKVEQILELDYLKFKVPLFRCRWVDLRNVKVDNEGFTTVNLANNAYKDEPFVLAKQVVQVFYIVDPCNKKLHVVREGKRRIVGLDNIADEDDYNQHVHGIGQEIPLEEEEEEDEVQYARVDHEEGLFL

SEQ ID NO: 196349 - protein, 820 aa, Oryza sativa
  Clone ID: PAT_MRT4530_92208C.1.pep
MARGGGGGCCPPMDLMRSEAMQLVQVIIPTESAHLTVSYLGELGLLQLKDLNADKSPFQRTYAAQIKRCGEMARKLRFFKEQMSKAGISTSAQLTEISLDFDDLEIKLGELEAELAEVNANNEKLKRTYNELLEYSTVLQKAGEFFYSAQRSAAAQQREMEANQSGESSLESPLLEQDTLTDASKQVKLGSLSGLVPKEKAMAFERILFRATRGNIFLRQESVDEPVTDPVSGEKVAKNAFVIFYSGDRAKAKILKICDAFNANRYPFPEDVARQLHAVQEVSAKISELKATIDMGLAHRDNILKNIASEFENWNRLANKEKIIYHTLNMLSVDVTKKCLVGEGWSPVFATTQIQDALQRATLDSKSQVGSIFQVLNTTESPPTYFQTNKFTSAFQEIVDAYGIAKYQEANPGVFTIVTFPFLFAVMFGDWGHGICILVSTLYLIIREKKFASQKLGDIMEMMFGGRYVIIMMALFSIYTGLIYNEFFSVPFELFGKSAYACRDPSCGDAATEGLLKVRRTYPFGVDPVWHGSRSELPFLNSLKMKMSILLGVAQMNLGIVISYFNAKFFRNSVNVWYQFIPQLIFLNSLFGYLSMLIIIKWSTGAKADLYHTMIYMFLSPTDELGENQLFPGQKTVQLVLLLLALVSVPWMLIPKPFFLKMEHERRHQGQQYAMLQSTDDSVVAEMGHHNGSNHHEEFEFSEVFVHQLIHTIEFVLGAVSNTASYLRLWALSLAHSELSSVFYDKVLLLAFGYNNILIRIAGITIFICATVGVLLVMETLSAFLHALRLHWVEFQNKFYEGDGYKFAPFSFALISEEED

SEQ ID NO: 196350 - protein, 2151 aa, Oryza sativa
  Clone ID: PAT_MRT4530_92209C.1.pep
MEAAGAGEAVAMTAAATGALGPVIEKLGDLLRNEHMAALEGSRGDIEFIKSELEPLRSLLLRIWDKEDRLDAACKEWMAEARMLSYDMEDAIDGFRFMLAVEAAAATSPFEGMRNQVQELVNRCCEKQWITEAIIDADAPAALSSSPSLPRKNASELVEVDEKKAELIKLLKHKERVCIHGSAGMGKTTLAGLAYQAVSEQFDCRTFVSVCPSQSMMHVLTSITSEVIASAIIKAISDKQRELTVNNNTAPTTQGTGEADEQCLIDSILELLTYRRQVTDSSAPVAGTGIADGAKTDGSALPTTDTATLASTGIADTKTDGSSVALAGTGGIGDAKTESAPHAATGADNTKKALIDRISTRFVTNKRKLNASAQLAGAGVDDDKQYLVNIVLKLLGEKRKVTDCAPVAGTTDVEDDEQYLVDILSQFLADQRYLVIVDDIWHCQQWEVIRKSLVKNDRGSRIIMTTRVNSVVEKCCKDDHAVVCEVTALSMDAAVALSEKIFNVHTAPSDKKSCSSIAKLSGRMPLAIICISAAVAQLLSPPSATNRFDVALCQALKGFAEIPCMKPLVESLVLGYHCLPPHLKTCLLECSIYTPNQRFERDDLIRIWMDEGFADEEQAPGYFEELVKWGYISISPAEGRRHSRVAEYEISAVVLAFLRFQAEEHGFVASAGYFSNIESLCGRRHSRISVQGGLGSWVVSRLDFSCMRTLVVFGRASLIPFDRLSHLRVLHLDEEDTSLEGAADLYNFPDLGDDDLVDICELLLLRYVKLKGCKITMLPPQIGQLKLLETLDVRGTGVRELPREIGELQRLKTLNVSNTAVTQVPKEIGKLHMLKTLDVSDTNVRELPAEIRELENLETLDVSNTMVAKLPREIRALQLLKTLHVSGIDVTETELAEEIGQLQHLETLDVSNTKVAKLPMEIWNLQQLKTLNISNTNVRELPWEAGQRSNSISVVAGNKDSPKVVNLLEGAVDNYGHICSRENISITLFDRFGSSWEPIPVARFKIPGKHISLPDWLNKETLSDISSLEINLWKLREDDLKILQEMPKLQVLALRVEVLPRTAITGAGFSRLESFCVDCRVPRLSFQSEAMPVLKHLQFKFYAFRATKQEPMGIVHLSSLRSVDFRCASGYTTDAPGIREIINQVRKEAKEHRNRITLCINTKEIVHDIVAGSTGTAGSSAGVALMGDDKKPIDGTSKEGVMIQRVIREVKLKARALWHAIKKAGADPQDEMMALDALCSAVQSEMMTVTFDGSLGLPSSVGHPAVARHRYPLTCDGPEGKAVTGRLIPLTGNSIEARQSSLFTNRLGGQGGDFLLKFKMDRRWMYYAHRSSTEYREGVTEFVIFADNDRKSRMSMHMLCPCRDCKNEQMIEDSDEVHAHLIMNGFMKKYICWTKHGEQEAPDVTAEEVLDQDVENTAGAVAREGMFVPSPLGGETIDLDTQCLSTMLHDIEDAKDNNRDFEKFRIRCLDVCPVCGASRYKREKSEGEGSKSKRGGPAKVVWYLPIAERMKRMFANKEQAKLVRWHAEERKVDSMLRHLADLVQWRTIDKIYQEFSNEPRNMRFTMCTDDINPFGDLSSRHSTWPVLLVNYNLPPWLCFKRKYIMLAMLIQGLRQPGNDIDVFLEPIIDDFERLWNDGTRTWDAYAQEYFNLHAMLFCTINDYLALGNLSGQTVKGKWACSECMEETRSKWLKHSHKTVYMGRRRFLPRYHPYRNMKKNFKGHRDTVGPPAELTGTEVHNLVMGITNKFGKKRKVGKTKEKSTSKEKTEEHVEKQKTKERSMNILPPKVRHTIQRLYSFFHAIGQKIIDPEGLDELQAELVRTLCHLEMYFSPTFFDIMEHLPVHLVRQTKCCGLAFMTQMYPCERYLGILKGYVRNRSHPEGSIIESYTTEEVIDFCVDYMSETSSIGLPRSHHEGRLDGVGTVGRKTVRLDWKVYDKAHFTVLQHMTNVVLYIDEHLAVLRQENPGRSESWGPEWSATTWQGYDINGYTFHTVKQDSKCTVQNSGLRIEAASDGGRRVQYYGRVEQILELDYLKFKVPLFHCRWVDLRNVKVDNEGFTTVNLANNAYKDEPFVLAKQVVQVFYIVDPCNKKLHVVREGKRRIVGLDNIADEDDYNQHVHGIGQEIPLEEEEEEDDVQYARVDHEEGLFL

SEQ ID NO: 196351 - protein, 120 aa, Oryza sativa
  unsure (1)..(120): unsure at all Xaa locations
  Clone ID: PAT_MRT4530_9220C.1.pep
SQLLLFYIAPRLNLXHDKXLXCSESPCVDGHRRCVPLRAKRGSWRTRTAACCRAPPPPPQLEKGASRCPRRTGWVVMHAAAAXVTRRSFLGLVRLRRRAWRRRRRRTAGKRRVVQPCLLG

SEQ ID NO: 196352 - protein, 91 aa, Oryza sativa
  Clone ID: PAT_MRT4530_92210C.1.pep
MRCQILFVYLHMVTRCKAVSASQRHKGQWTCQYWLLGKNEISFKDPVASGLSPPAGSLPFFFSAETVLLFASTLTRNIPLLAYPAWSTRKM

SEQ ID NO: 196353 - protein, 1039 aa, Oryza sativa
  Clone ID: PAT_MRT4530_92211C.1.pep
MDRRWMYYAHRSSTEYREGVTEFVTFADNDRKSRMSMHMLCPCRDCKNEQMIEDKDEVHAHLIMNGFMKKYTCWTKHGEQEAPDVAAEEVLDQDVENTAAAREGMFVPSPLGGETIDLDTQCLSTMLHDIEDAEDNDRDYEKFSKLVEDCQMPLYDGCKSKHSKLSCVLELMKLKASNGWSDKSFTELLELLKDLLPEGNNLPQTTYEAKQVLCPLGPEVRRIHACPNDCILYYKEYADLDVCPICGGSRYKRAKSEGEGSKSKRGGPAKVVWYLPIAERMKRMFANKEQAKLVRWHAEERKVDTMLRHPADSVQWRTIDRIYQEFSNDPRNMRFAMCTDGINPFGDLSSRHSTWSVLLVNYNLPPWLCFKRKYIMLAMIIQGPRQPGNDIDVFLEPIIDDFERLWNEGTRTWDAYAQEYFNLHAMLFCTINDYPALGNLSGQTVKGKWACSECMEETRSKWLKHSHKTVYMGHRRFLPRYHPYRNMRKNFNGHRDTAGPPTELTGTEVHNLVMGITNEFGKKRKVGKRKEKSTSKEKTEEHVEKQKTKERSMWKKKSIFWRLPYWKDLEVRHCIDLMHVEKNVCESLMGLLLNPGTTKDGLNARRDLEDMGVRSELHPITTESGRVYLPPACYTLSKEEKIDLLTCLSGIKVPSGYSSRISRFVSLQDLKLVGMKSHDCHVLITQLLPVAIRNILPPKVRHTIQRLCSFFHAIGQKIIDPEGLDELQAELVRTLCHLEMYFPPTFFDIMEHLPVHLVRQTKCCGPAFMTQMYPCERYLGILKGYVRNRSHPEGSIIESYTTEEAIEFCVDYMSETSSIGLPRSHHEGRLDGVGTVGRKTIRLDRKVYDKAHFTVLQHMTEVVPYVDEHLAVIRQENPGRSESWQDSKCTVQNSGLRIEAASDGGRRDQYYGRVEQILELDYLKFKVPLFRCRWVDLRNVKVDNEGFTTVNLANNAYKDEPFVLAKQVVQVFYIVDPCNKKLHVVREGKRRIVGLDNIADEDDYNQHVHGIGQEIPLEEEEEEDEVQYARVDHEEGLFL

SEQ ID NO: 196354 - protein, 1028 aa, Oryza sativa
  Clone ID: PAT_MRT4530_92212C.1.pep
MDRRWMYYAHRSSTEYREGVTEFVTFADNDRKSRMSMHMLCPCRDCKNEQMIEDKDEVHAHLIMNGFMKKYTCWTKHGEQEAPDVAAEEVLDQDVENTAAAREGMFVPSPLGGETIDLDTQCLSTMLHDIEDAEDNDRDYEKFSKLVEDCQMPLYDGCKSKHSKLSCVLELMKLKAKGNNLPQTTYEAKQVLCPLGLEEYADLDVCPICGASRYKRAKSEGEGSKSKRGGPAKVVWYLPIAERMKRMFANKEQAKLVRWHAEERKVDTMLRHPADSVQWRTIDRIYQEFSNDPRNMRFAMCTDGINPFGDLSSRHSTWPVLLVNYNLPPWLCFKRKYIMLAMLIQEPRQPGNDIDVFLEPIIDDFERLWNEGTRTWDAYAQEYFNLHAMLFCTINDYPALGNLSGQTVKGKWACSECMEETRSKWLKHSHKTVYMGHRRFLPRYHPYRNMRKNFNGHRDTAGPPTELTGTEVHNLVMGITNEFGKKRKVGKRKEKSTSKEKTEEHVEKQKTKERSMWKKKSIFWRLPYWKDLEVRHCIDLMHVEKNVCESLMGLLLKPGTTKDGLNARRDLEDMGVRSELHPITTESGRVYLPPACYTLSKEEKIDLLTCLSGIKVPSGYSSRISRLVSLQDLKLVGMKSHDCHVLITQLLPVAIRNILPPKVRHTIQRLCSFFHAIGQKIIDPEGLDELQAELVRTLCHLEMYFPPTFFDIMEHLPVHLVRQTKCCGPAFMTQMYPCERYLGILKGYVRNRSHPEGSIIESYTTEEAIEFCVDYMSETSSIGLPRSHHEGRLDGVGTVGRKTIRLDRKVYDKAHFTVLQHMTEVVPYVDEHLAVIRQENPGRSESWVRNKHMSSFNEWLKNRIARLQNLSSETLQWLSQGPEWSATTWQGYDINGYTFHTVKQDSKCTVQNSGLRIEAASDGGRRDQYYVDNEGFTTVNLANNAYKDEPFVLAKQVVQVFYIVDPCNKKLHVVREGKRRIVGLDNIADEDDYNQHVHGIGQEIPLEEEEEEDEVQYARVDHEEGLFL

SEQ ID NO: 196355 - protein, 83 aa, Oryza sativa
  Clone ID: PAT_MRT4530_92213C.1.pep
IKSKVHHRSLNLYRCVIPVPKLANRPFRSSNLFDCVIPVSKLADHSFRSSNLFNYVTPVPKLGFEYHLGQIGRSKDFIFKNNL

SEQ ID NO: 196356 - protein, 77 aa, Oryza sativa
  Clone ID: PAT_MRT4530_92214C.1.pep
EASSPSLEVFYSRCYSTGSIKKNTSFQHLQIEFRAATRWNSGTTYLCVRNAVTRYTKLFDKMLCLEKKNITSIHHQT

SEQ ID NO: 196357 - protein, 456 aa, Oryza sativa
  Clone ID: PAT_MRT4530_92215C.1.pep
MAVVVPTLAVCVVAAALLWLWRQRKRRRKNSPPPANNDSDQYSSDGQRQHGTADLERAVTGGGPRRYQFHELAAATRDFAEEEKLGQGGFGNVYLGRLAVGTGGGEDHQEVAVKKFSMDSMSQGRREFEAEVRIISQLRHRNLVQLHGWCDSRKGLLLVYELVAGGSLDKHIYNTDRILTWPERYKIIMGLGAALRYLHQEWEQCILHGDIKPSNIMVDSSYNTKLGDFGLARLVDHGKAWQATRSVLGTAGYIDPEFVNTRRPSTESDVYSFGVVLLEIVCAKPPVVLQENEPSFVLLRWVWNLYSQNAILDAVDERLRVVGVVRDERQMERVLVVGLWCAHPDLSERPSIARAMNVLQSDDARLPDLSPQMYKSKASPPPRDVAVGVDYGGVSTGWVVKIIDKKCRAFLWTEHPYQADLKAPIERSVSNMFAASTFFVPGNNVLILFWTDQWIE

SEQ ID NO: 196358 - protein, 103 aa, Oryza sativa
  unsure (1)..(103): unsure at all Xaa locations
  Clone ID: PAT_MRT4530_92216C.1.pep
YNVDWDXXGVTXLNXLAAHPPFXXWXNSEXARTDXPSQQLLSXNGEMAXRYVKIPRQIFVSAHFLTNPKSAKSLIYNPVNCSSGNPLKEWTPSSKGAEFYGLR

SEQ ID NO: 196359 - protein, 220 aa, Oryza sativa
  Clone ID: PAT_MRT4530_92217C.1.pep
MALDGKPPVPPPSTPPMDSWACGGRRSKRRGGGGGSSGSSGSSGGGGGGESEEEYLAACLLMLAHGVRDEAEVVGVAAATAKPQHGYECSVCGKVYGSYQALGGHKTSHRKPPSPAAEPAAGEEPSSGGVAGEAKVHRCSICLRTFPSGQALGGHKRLHYEGGAVGDAVKEKNSLKTKAAVATAVLKDFDLNLPAAATTAGDEAESSPPEAKRARLLLLV

SEQ ID NO: 196360 - protein, 154 aa, Oryza sativa
  Clone ID: PAT_MRT4530_92218C.1.pep
MAGRCRSGEGASERGDACRNGTASCGGGGGGGEQKRAGGAAARSRGGGRERRRRRDAAGNERSRNGAAAAAAAPPNTAALISHRHRWLAGASSSSGREANSTGEGGNGKDGGAAECASTSLLAATGCVTVTIGDGVEGVRNEERDRRRLPTSET

SEQ ID NO: 196361 - protein, 53 aa, Oryza sativa
  unsure (1)..(53): unsure at all Xaa locations
  Clone ID: PAT_MRT4530_92219C.1.pep
AAACLLVPVVSVLAATAXTMAQYHHQDQWSTPGPXLSAGMGYPMYPSRVAGRW

SEQ ID NO: 196362 - protein, 39 aa, Oryza sativa
  Clone ID: PAT_MRT4530_92220C.1.pep
RFKCSWYYLSRLRTVMKGLEIAGLIWDSAVFRMVLSSLF

SEQ ID NO: 196363 - protein, 78 aa, Oryza sativa
  Clone ID: PAT_MRT4530_92221C.1.pep
TAVSFLFYVLFFFFFCRSIGTDEPSKLNFKVEDGTHEQPHEKTRMLWAGGEYTAALQIPNTREWNTALKRCSYMTAAI

SEQ ID NO: 196364 - protein, 463 aa, Oryza sativa
  Clone ID: PAT_MRT4530_92222C.1.pep
MRHAALLGVGFALCLLRAQAQPYDYPTAKPSTTWANTDAALRHHVAYTDGSVARAALLRLNPARLGPSFAFGFFCTNHRAGAPCADFLLGVAVVYCNSGAGITAVTTGIPQVVWSANRAAPVGDGATAELTADGDLVLRSPGGKVLWSAGAAGRGVSGMSINSDGNLVLFDGSNRTVWQSFDHPTDTLVVGQSLKQGARLTANASFDNSSEGRIYLAVADDGLAAYVDAKPPQRYYVLGYSKNAGAYAAYTNGSLAVLDRPGGQQLATVQLPAVAAGTVQYMRLEHDGHLRLYEWRSNGMRWEATGDVLHPYPGDCAYPTVCGAYGVCTDMQCSCPDAANFRAVDFRRPNRGCVPTSPPAPPATCRSRRARHRLVSLRDTAYFNSHDTSMRTLERVGEAACKAACLGDCACMAAQFVYGFDPNDGFCYLQSEVLSLETMQPEVFHYNSSMHIKIAQGRLPRRF

SEQ ID NO: 196365 - protein, 134 aa, Oryza sativa
  Clone ID: PAT_MRT4530_92223C.1.pep
MAARRRQRPSSSPPLPPEHSPLPSVIVATARARTADPKIACDRSAAAKSPASGSTAAALPTAKLRRCSPPHHRIRRHRVPTATGPRCLPPLERAVVITTGAPKDGGSSSPEGGVTGREARASMDRQRRTRARTM

SEQ ID NO: 196366 - protein, 136 aa, Oryza sativa
  Clone ID: PAT_MRT4530_92224C.1.pep
MARSMRTCLHSGRLALLAILVSGGIVLQILACALYNNWWPMLTVLMYLILPMPLIFFLGSNSPSMMSNDGDTWVSFTKFLTGASIVGSIAIPSILKHAGVIGWGALTMELSSFLVFGVAILWLIQMNSEDEYSSAF

SEQ ID NO: 196367 - protein, 132 aa, Oryza sativa
  unsure (1)..(132): unsure at all Xaa locations
  Clone ID: PAT_MRT4530_92225C.1.pep
IXXXKKXXKKXXNLTKXPKTQKPPRGXXVPNXPXNXSXYNXLXXILXRXVXXKPRXXPXXXXXXHIPXSPTGVXFQKRPXPXRPXQXXXTTXNEXXGXXXXSIFCXNPXXIXVKSXPFFNPIGXKSAKIPXL

SEQ ID NO: 196368 - protein, 432 aa, Oryza sativa
  unsure (1)..(432): unsure at all Xaa locations
  Clone ID: PAT_MRT4530_92226C.1.pep
SCIQVGIGWRRRWLWRLLVVVAVAAVVSCAVAADEGSVVEVWPMPATASKGGQTLHVSRELRMTAEGSKYADGEAILKDAFQRMVTLIELDHVINGSSQGLPLLAGVNVVVHLPGDELNFGVDESYNLSVPATGSPIYAQIEAQTVFGALHALETFSQLCNFDFASRLMELQSAPWSITDMPRFPYRGLLIDTSRHYLPVPVIKSVIDSMTYSKLNVLHWHIVDEQSFPIEIPSYPKLWNGAYSYSERYTMDDAIDIVQYAERRGVNVLAEIDVPGHALSWGVGYPSLWPSATCKEPLDVSSESTFQVINGILGXWYLDHLEVTWDGFYMNEPLRNIKNPAQQKLVLGGEVCMWAEHIDASDIQQTIWPRAAAAAERLWTPFEKLSKEWEIAALSARLARFRCLLNHRGIAAGPVTGYGRFAPREPSSCLKA

SEQ ID NO: 196369 - protein, 63 aa, Oryza sativa
  unsure (1)..(63): unsure at all Xaa locations
  Clone ID: PAT_MRT4530_92227C.1.pep
IGLFNLSFSFLLSDAXRGIHPKKNHKPKKTPDPRQKILKTHPLDKEKNPRSTTSYTIRRGAPK

SEQ ID NO: 196370 - protein, 59 aa, Oryza sativa
  Clone ID: PAT_MRT4530_92228C.1.pep
PEPGTYTLGALTADIGLGGHHIRCAIVADSTGAVGHELLCGDAPIHHDVLPDAHEAETG

SEQ ID NO: 196371 - protein, 48 aa, Oryza sativa
  Clone ID: PAT_MRT4530_92229C.1.pep
MVIIAPTRQGCVHATFPFVKMRYPVFMFTGMNDLTLVALSSKATHGAG

SEQ ID NO: 196372 - protein, 62 aa, Oryza sativa
  Clone ID: PAT_MRT4530_9222C.1.pep
KRLKTNHLREFLNLGPSPVNYTGGQRTMLVHAYGHVNFSAVGHNAYEGGADALQRVYLGTEL

SEQ ID NO: 196373 - protein, 1119 aa, Oryza sativa
  Clone ID: PAT_MRT4530_92230C.1.pep
MGPTPDPYTSDGIPVTGKRIEAVRGDGPPPVTAFISGPSQMDRRWMYYAHRSSTEYREGVTEFVTFADNDRKSRMSMHMLCPCRDCKNEQMIEDKDEVHAHLIMNGFMKKYTCWTKHGEQEAPDVAAEEVLDQDVENTAAAREGMFVPSPLGGETIDLDTQCLSTMLHDIEDAEDNDRDYEKFSKLVEDCQMPLYDGCKSKHSKLLCVLELMKLKASNGWSDKSFTELLELLKDLLPEGNNLPQTTYEAKQVLCPLGLEEYADLDVCPICGASRYKRAKSEGEGSKSKRGGPAKVVWYLPIAERMKRMFANKEQAKLVRWHAEERKVDTMLRHPADSVQWRTIDRIYQEFSNDPRNMRFAMCTDGINPFGDLSSRHSTWPVLLVNYNLPPWLCFKRKYIMLAMLIQGPRQPGNDIDVFLEPIIDDFERLWNEGTRTWDAYAQEYFNLHAMLFCTINDYPALGNLSGQTVKGKWACSECMEETRSKWLKHSHKTVYMGHRRFLPRYHPYRNMRKNFNGHRDTAGPPTELTGTEVHNLVMGITNEFGKKRKVGKRKEKSTSKEKTEEHVEKQKTKERSMWKKKSIFWRLPYWKDLEVRHCIDLMHVEKNVCESLMGLLLNPGTTKDGLNARRDLEDMGVRSELHPITTESGRVYLPPACYTLSKEEKIDLLTCLSGIKVPSGYSSRISRLVSLQDLKLVGMKSHDCHVLITQLLPVAIRNILPPKVRHTIQRLCSFFHAIGQKIIDPEGLDELQAELVRTLCHLEMYFPPTFFDIMEHLPVHLVRQTKCCGPAFMTQMYPCERYLGILKGYVRNRSHPEGSIIESYTTEEAIEFCVDYMSETSSIGLPRSHHEGRLDGVGTVGRKTIRLDRKVYDKAHFTVLQHMTEVVPYVDEHLAVIRQENPGRSESWVRNKHMSSFNEWLKNRIARLQNLPSETLQWLSQGPEWSATTWQGYDINGYTFHTVKQDSKCTVQNSGLRIEAASDGGRRDQYYGRVEQILELDYLKFKVPLFRCRWVDLRNVKVDNEAFTTVNLANNAYKDEPFVLAKQVVQVFYIVDPCNKKLHVVREGKRRIVGLDNIADEDDYNQHVHGIGQEIPLEEEEEEDEVQYARVDHEEGLFL

SEQ ID NO: 196374 - protein, 58 aa, Oryza sativa
  Clone ID: PAT_MRT4530_92231C.1.pep
MACVIGALKSAVLAHVGRVVVAARGGSQQHRESQAVQQADVLITKPDYQRGEDLKNIE

SEQ ID NO: 196375 - protein, 940 aa, Oryza sativa
  Clone ID: PAT_MRT4530_92232C.1.pep
MDRRWMYYAHRSSTEYREGVTEFVTFADNDRKSRMSMHMLCPCRDCKNEQMIEDKDETKHGEQEAPDVAAEEVLDQDVENTAAAREGMFVPSPLSGETIDLDTQCLSTMLHDIEDAEDNDRDYEKFSKLVEDCQMPLYDGCKSKHSKLSCMLELMKLKASNGWSDKSFTELLELLKDLLPEGNNLPQTTYEAKQVLCPLGLEEYADLDVCPICGASRYKRAKSEGEGRPRQPGNDIDVFLEPIIDDFERLWNEGTRTWDAYAQEYFNLHAMLFCTINDYPALGNLSGQTVKGKWACSECMEETRSKWLKHSHKTVYMGHRRFLPRYHPYRNMRKNFNGHRDTAGPPTELIETEVHNLVMGITNEFGKKRKVGKRKEKSTSKEKTEEHMEKQKTKERSMWKKKSIFWRLPYWKDLEVRHCIDLMHVEKNVCESLMGLLLNPGTTKDGLNARRDLEDMGVRSELHPITTESGRVYLPPACYALSKEEKIDLLTCLSGIKVPSGYSSRISRLVSLQDLKLVGMKSHDCHVLITQLLPVAIRNILPPKVRHTIQRLCSFFHAIGQKIIDPEGLDELQAELVRTLCHLEMYFPPTFFDIMEHLPVHLVRQTKCCGLAFMTQMYPCERYLGILKGYVRNRSHPEGSIIESYTTEEAIEFCVDYMSETSSIGLPRSHHEGRLDGVGTVGRKTIRLDRKVYDKAHFTVLQHMTEVVPYVDEHLAVIRQENPGRSESWVRNKHMSSFNEWLKNRIARLQNLSSETLQWLSQGPEWSATTWQGYDINGYTFHTVKQDSKCTVQNSGLRIEAASDGGRRDQYYGKVEQILELDYLKFKVLLFRCRWVDLRNVKVDNEGFTTVNLANNAYKDEPFVLAKQVVQVFYIVDPCNKKLHVVREGKRRIVGLDNIANEDDYNQHVHGIGQEIPLEEEEEEDEVQYARVDHEEGLFL

SEQ ID NO: 196376 - protein, 222 aa, Oryza sativa
  Clone ID: PAT_MRT4530_92233C.1.pep
MGMKKRRRLLGDDDDDFALNEGLYMALECGALTAGHPDADRLVRAWLAVSRRRHALVRRLVGLLEDSYGDGSDGDGSSWPWNRAAHRHCPLDSSINSCAATTIRQGFLAAATAAYHPDPTAQASFLASCKSMIGSSSDLARRLQSGLDERATPHLMRRSARLSGPRLVAVCDRSQTGQIAAGAGVLTPGVGMSVPVEMGVHRKSGQAGQETCALLVKGHFRL

SEQ ID NO: 196377 - protein, 80 aa, Oryza sativa
  unsure (1)..(80): unsure at all Xaa locations
  Clone ID: PAT_MRT4530_92234C.1.pep
XLQSAXAXWIXIMGSVIPPLCQGXXXGKXXCWXFXSPLXXFRXLXGXLPLKKPPPPXXYXHXXPXXFXKKKKKKKKKKKK

SEQ ID NO: 196378 - protein, 135 aa, Oryza sativa
  Clone ID: PAT_MRT4530_92235C.1.pep
MRSMMRLMICCLLVSAGVGGIAGEGNSEVVLLLQRVKPVLRREGGNAQLATWTASTPLCLWRGLRQIPGGRCTSPIVVPAAASQSPRLEDVLPLHHVTEPVAGRVEERRWRRRAEAGGDPEAGAAALPFSHVALV

SEQ ID NO: 196379 - protein, 299 aa, Oryza sativa
  Clone ID: PAT_MRT4530_92236C.1.pep
MTVTFDGSLCLPSSVGHPAVARHRYPLTCDGPEGKAITGGGPPPVTDFFYGPSQMDRRWMYYAHRSSTEYREGVTEFITFADNDRKSRMSMHMLCPCRDCKNEQMIEDSDEVHAYLIMNGFMKKYTCWSKHGEQEAPDVAGDEVLDQDVENTAAAREGMFVPSPLGGETIDLDTQCLSTMLHDIEDAEDNDRDFEKFSKLVEDCQMPLYDGCKSKHNKLSCVLELMKLKASNGWSDKSFTELLELLKDLLPEGNNLLQTTYEAKQVLYPLGLEVRRIHACPNDCILYYKEYADLDVCPV

SEQ ID NO: 196380 - protein, 529 aa, Oryza sativa
  Clone ID: PAT_MRT4530_92237C.1.pep
MGCHVGPYGGAQWLGLAGRSIPLTGNSIEALPVKVHCSQIGWEGKGGDFLLKFKMDRRWMYYAHRSSTEYREGVTEFVTFADNDRKSRMSMHMLCPCRDCKNEQMIVDSDETKHGEQEAPDIAAEEVLDQDVENTAVTREGMFVPSPLGGETIDLDTQCLSTMLHDIEDAEDNDRDFEKFSKLVEDCQMPLYDGCKSKHSKLSCVLELMKLKASNGWSDKSFTELLELLKDLLPEGNNLPQTTYEAKQVLCPLGLEEYADLDVCPICGASRYKRAKSEGEGSKSKRGGPTKVVWYLPIAERMKRMFANKEQAKLVRWHAEERKVDSMLRHPADSVQWRTIDRIYQKFSNDPRDMCFAMCTDGINPFGDLSSRHSTWPVLLVNYNLPPWLCFKRKYIMLAMLIQGPRQPGNDIDVFLEPIIDDFERLWNEGTRTWDAYAQEYFNLHAMLFCTINDYPALGNLSGQTVKGKWACSECMEETRSKWLKHSHKTVYMGHRRFLPRSAALLSTTASTYSPAPSPPSPASSPPTP

SEQ ID NO: 196381 - protein, 110 aa, Oryza sativa
  unsure (1)..(110): unsure at all Xaa locations
  Clone ID: PAT_MRT4530_92238C.1.pep
MEMRLEYGSRVLLSWNKFHHRSLNLYRCVIPIPKLANRPFKSFDCVIPVPKLADHSFRSSNLFSCVTPVSKLGFEYHLGQIFRDRDDTVEQVXGPKRSICEFRDRDDTAV

SEQ ID NO: 196382 - protein, 1051 aa, Oryza sativa
  Clone ID: PAT_MRT4530_92239C.1.pep
MDRRWMYYAHRSSTEYREGVTEFVTFADNDRKSRMSMHMLCPCRDCKNEQMIEDKDEVHAHLIMNGFMKKYTCWTKHGEQEAPDVAAEEVLDQDVENTAAAREGMFVPSPLGGETIDLDTQCLSTMLHDIEDAEDNDRDYEKFSKLVEDCQMPLYDGCKSKHSKLSCVLELMKLKASNGWSDKSFTELLELLKDLLPEGNNLPQTTYEAKQVLCPLGLEFRRIHACPNDCILYYKEYADLDVCPICGGSRYIRAKSEGEGSKSKRGGPAKVVWYLPTAERMKRMFANKEQAKLVRWHAEERKVDTMLRHPADSVQWRTIDRIYQEFSNDPRNMRFAMCTDGINPFGDLSSRHSTWPVLLVNYNLPPWLCFKRKYIMLAMLIQGPRQPGNDIDVFLEPIIDDFERLWNEGTRTWDAYAQEYFNLHAMLFCTINDYPALGNLSGQTVKGKWACSECMEETRSKWLKHSHKTVYMGHRRFLPRKVGKRKEKSTSKEKTEEHVEKQKTKERSMWKKKSIFWRLPYWKDLEVRHCIDLMHVEKNVCESLMGLLLNPGTTKDGLNARRDLEDMGVRSELHPITTESGRVYLPPACYTLSKEEKIDLLTCLSGIKVPSGYSSRISRLVSLQDLKLVGMKSHDCHVLITQLLPVAIRNILPPKVRHTIQRLCSFFHAIGQKIIDPEGLDELQGEVVRTLCHLEMYFPPTFFDIMEHLPVHLVRQTKCCGPAFMTQMYPCERYLGILKGYVRNRSHPEGSIIESYTTEEAIEFCVDYMSETSSIGLPRSHHEGRLDGVGTVGRKTIRLDRKVYDKAHFTVLQHMTEVVPYVDEHLAVIRQENPGRSESWVRNKHMSSFNEWLKNRIARLQNLSSETLQWLSQGPEWSATTWQGYDINVYTFHTVKQDSKCTVQNSGLRIEAASDGGRRDQYYGRVEQILELDYLKFKVPLFRCRWVDLRNVKVDNEGFTTVNLANNAYKDEPFVLAKQVVQVFYIVDPCNKKLHVVREGKRRIVGLDNIADEDDYNQHVHGIGQEIPLEEEEEEDEVQYARVDHEEGLFL

SEQ ID NO: 196383 - protein, 216 aa, Oryza sativa
  Clone ID: PAT_MRT4530_9223C.1.pep
MGGGQRTPLRGGTGRGGGSGREWCSTWRWERLNVLTAGREMCGTATTAHPLADEELPLADAVAPETAVAAPEAQDGGGEGEVTATSDGFTVQDHDDDDAGAAAGCLAHQDSISSPSHIFLLHKKLHQKCDGANFTSYGGYGKLDMMRQWRHRIWCSVSWEHWIRRRDEGDQKDGSADGAGSGVTLLGSPRSDSGSEGDKRSDSGGGRSGAVVLMTF

SEQ ID NO: 196384 - protein, 1090 aa, Oryza sativa
  Clone ID: PAT_MRT4530_92240C.1.pep
MGSHHRPTAGQCSLVQPPRLITCLLLLLLLLLLSSPLTLPCSASSAVITHLPGFHGRLPFYLETGYIGVEEKTGTELFYYFVESERNPDTDPLVLWLVGGPRCSGFCGVVYEEEAVRGDGPPPVTAFISSPSQMDRRWMYYAHRSSTEYREGVTEFVTFADNDRKSRMSMHMLCPCRDCKNEQMIEDKDEVHAHLIMNGFMKKYTCWTKHGEQEAPDVAAEEVLDQDVENTAAAREGMFVPSPLGGETIDLDTQCLSTMLHDIEDAEDNDRDYEKFSKLVEDCQMPLYDGCKSKHSKLSCVLELMKLKASNGWSDKSFTELLELLKDLLPEGNNLPQTTYEAKQVLCPLGLEEYADLDVCPICGASRYKRAKSEGEGRPRQPGNDIDVFLEPIIDDFERLWNEGTRTWDAYAQEYFNLHAMLFCTINDYPALGNLSGQTVKGKWACSECMEETRSKWLKHSHKTVYMGHRRFLPRYHPYRNMRKNFNGHRDTAGPPTELTGTEVHNLVMGITNEFGKKRKVGKRKEKSTSKEKTEEHVEKQKTKERSMWKKKSIFWRLPYWKDLEVRHCIDLMHVEKNVCESLMGLLLNPGTTKDGLNARRDLEDMGVRSELHPITTESGRVYLPPACYTLSKEEKIDLLTCLSGIKVPSGYSSRISKLVSLQDLKLVGMKSHDCHVLITQLLPVAIRNILPPKVRHTIQRLCSFFHAIGQKIIDPEGLDELQAELVRTLCHLEMYFPPTFFDIMEHLPVHLVRQTKCCGPAFMTQMYPCERYLGILKGYVRNRSHPEGSIIESYTTEEAIEFCVDYMSETSSIGLPRSHHEGRLDGVGTVGRKTIRLDRKVYDKAHFTVLQHMTEVVPYVDEHLAVIRQENPGRSESWVRNKHMSSFNEWLKNRIARLQNLPSETLQWLSQGPEWSATTWQGYDINGYTFHTVKQDSKCTVQNSGLRIEAASDGGRRDQYYGRVEQILELDYLKFKVPLFRCRWVDLRNVKVDNEAFTTVNLANNAYKDEPFVLAKQVVQVFYIVDPCNKKLHVVREGKRRIVGLDNIADEDDYNQHVHGIGQEIPLEEEEEEDEVQYARVDHEEGLFL

SEQ ID NO: 196385 - protein, 137 aa, Oryza sativa
  Clone ID: PAT_MRT4530_92241C.1.pep
RNASKQTSEMSKRHNAILPVTVLKRHPPTPQKLPGMHLSLFRPMLARTLWLTIMVLDRNCQTRNPTPEGYLCCCGNALSFLERACSITTKKVTILFFFYFSCWGLILASTATWLARKHFAQAVALLALVSQVSCGWF

SEQ ID NO: 196386 - protein, 1080 aa, Oryza sativa
  unsure (1)..(1080): unsure at all Xaa locations
  Clone ID: PAT_MRT4530_92242C.1.pep
MDRRWMYYAHRSSTEYREGVTEFVTFADNDRKSRMSMHMLCPCRDCKNEQMIEDKDEVHAHLIMNGFMKKYTCWTKHGEQEAPDVAAEEVLDQDVENTAAAREGMFVPSPLGGETIDLDTQCLSTMLHDIEDAEDNDRDYEKFSKLVEDCQMPLYDGCKSKHSKLSCVLELMKLKASNGWSDKSFTELLELLKDLLPEGNNLPQTTYEAKQVLCPLGLEVRRIHACPNDCILYYKEYADLDVCPICGASRYKRAKSEGEGSKSKRGGPAKVVWYLPIAERMKRMFANKEQAKLVRWHAEERKVDTMLRHPADSVQWRKIDRIYQEFSNDPRNMRFAMCTDGINPFGDLSSRHSTWPVLLVNYNLPPWLCFKRKYIMLAMLIQGPRQPGNDIDVFLEPIIDDFERLWNEGTRTWDAYAQEYFNLHAMLFCTINHYPALGNLSGQTVKGKWACSECMEETRSKWLKHSHKXRNMRKNFNGHRDTVGPPTELTGTEVHNLVMGITNEFGKKRKVGKRKEKSTSKEKTEEHVEKQKTKERSMWKKKSIFWRLPYWKDLEVRHCIDLMHVEKNVCESLMGLLLNPGTTKDGLNARRDLEDMGVRSELHPITTESGRVYLPPAWYTLSKEEKIDLLTCLSGIKVPSGYSSRISRLVSLQDLKLVGMKSHDCHVLITQLLPVAIRNILPPKVRHTIQRLCSFFHAIGQKIIDPEGLDELQAELVRTLCHLEMYFPPTFFDIMEHLPVHLVRQTKCCGPAFMTQMYPCERYLGILKGYVRNRSHPEGSIIESYTTEEAIEFCVDYMSETSSIGLPRSHHEGRLDGVGTVGRKTIRLDRKVYDKAHFTVLQHMTEVVPYVDEHLAVIRQENPGRSESWVRNKHMSSFNEWLKNRIARLQNLPSETLQWLSQGPEWSATTWQGYDINGYTFHTVKQDSKCTVQNSGLRIEAASDGGRRDQYYGRVEQILELDYLKFKVPLFRCRWVDLRNVKVDNEGFTTVNLANNAYKDEPFVLAKQVVQVFYIVDPCNKKLHVVREGKRRIVGLDNIADEDDYNQHVHGIGQEIPLEEEEEEDEVQYARVDHEEGLFL

SEQ ID NO: 196387 - protein, 128 aa, Oryza sativa
  unsure (1)..(128): unsure at all Xaa locations
  Clone ID: PAT_MRT4530_92243C.1.pep
KRVSFVGEPTAVGARRLDRRPPPPCAAFSPPPPPPPPPPRRDPPSXPRPCPRAPPLRPSHPXAPPYPPARRTPPPTVGPPXAPPPGQDPAPRRRPPLPPPPVRDPQHRAAPSLHVGFCNQAALLFEIN

SEQ ID NO: 196388 - protein, 564 aa, Oryza sativa
  unsure (1)..(564): unsure at all Xaa locations
  Clone ID: PAT_MRT4530_92244C.1.pep
MSKEKTEEHVEKQKTKERSMWKKKSIFWRLPYXKDLKVRHCIDLMHVEKNICESLMRLLLNLGTTKDGLNARRDLEEMGVRSELHPITTEFGRVYLPPACYTLSKEENIDLLTCLSGIKVPSGYSSRISRLVSLQDLKLVGMKSHDCHVLITXLLPVAIRNILPPKLRHTIQRLCSFFHAIGQKIIDPEGLDELQAELVRTLCHLEMYFPPTFFDIMEHLPVHLVRQTKCYGPAFMTQMYPCERYLGILKGYVWNRSHPEGSIIESYTTEEVIDFCVDYMSETSSIGLPRSHHEGRLDGIGTVGRKKXLLGRIRRYDKAHFMVLQHXMTEVVPYVDEHLAVLRQENLGRSESWVRNKHMSSFNEWLKNRIAKLPNLSSQTLQWLSQGPEWSATTWQGYDINGYTFHTVKQDSKCTVQNSGLRIEAPSDGGRRDQYYGRVEQILELDYLXFKVLLFRCQWVNLRNVKVDNEGFTTVNLANNAYKDEPFVLAKQVVQVFYIVDPCNKKLHVVREGKRRIVGLDNIADEDNYNQHVHGIGQKIPLEEEEEEDDVXYARVDHEEGLFL

SEQ ID NO: 196389 - protein, 1161 aa, Oryza sativa
  Clone ID: PAT_MRT4530_92245C.1.pep
MEGKRTTTSMVIMWLVILSLTVDSATATQRDNVTGEPSGRGPSQVCWVYKYPQTANCFSSRPLYCSQIGWEGNGGDFLLKFKMDRRWMYYAHRSSTEYREGVTKFVTFADNDRKSRMSMHMLCPCRDCKNEQMIEDKDEVHAHLIMNGFMKKYTCWTKHGEQEAPDVTAEEVLDQDVENTAAAREGMFVPSPLGGETIDLDTQCLSTMLHDIEDAEDNDRDYEKFSKLVEDCQMPLYDGCKSKHSKLSCVLELMKLKASNGWSDKSFTELLELLKDLLPEGNNLPQTTYEAKQVLCPLGLEEYADLDVCPICGASRYKRAKSEGEGSKSKRGGPTKVVWYLPIAERMKRMFANKEQAKLVRWHAEERKVDTMLRHPADSVQWRTIDRIYQEFSNDPRNMRFAMCTDGINPFGDLSSRHSTWPVLLVNYNLPPWLCFKRKYIMLAMLIQGPRQPGNDIDVFLEPIIDDFERLWNEGTRTWDAYAQEYFNLHKMLFCTINDYPSLGNLSGQTVKGKWACSECMEETRRKWLKHSHKTVYMGHRRFLPRCHPYRNMRKNFNGHRDTAGPPTELTGTEVHNLVMGITNEFGKKRKVGKRKEKSTSKEKTEEHVEKQKTKERSMWKKKSIFWRLPYWKDLEVRHCIDLMHVEKNVCESLMGILLNPGTTKDGLNTRRDLEDMGVRSELHPITTESGRVYLPPACYTLSKEEKIDLLTCLSGIKVPSGYSSRISRLVSLQDLKLVGMKSHDCHVLITQLLPVAIRNILPPKVRHTIQRLCSFFHAIGQKIIDPEGLDELQAELVRTLCHLEMYFPPTFFDIMEHLPVHLVRQTKCCGPAFMTQMYPCERYLGILKGYVRNRSHPEGSIIESYTTEEAIEFCVDYMSETSSIGLPRSHHEGRLDGVGTVGRKTIRLDRKVYDKAHFTVLQHMTEVVPYVDEHLVVIRQENLGRSESWVRNKHMSSFNEWLKNRITRLQNLSSETLQWLSQGPEWSATTWQGYDINGYTFHTVKQDSKCTVQNSGLRIEAASDGGRRDQYYGKVEQILELDYLKFKVPLFHCRWVDLCNVKVDNEGFTTVNLANNAYKDEPFVLAKQVVQVFYIVDPCNKKLHVVREGKRRIVGVENIADEDDYNQHVHGIGQEIPLEEEEEEDEVQYARVDHEEGLFL

SEQ ID NO: 196390 - protein, 64 aa, Oryza sativa
  Clone ID: PAT_MRT4530_92246C.1.pep
FFFFFFGHAVQSSMVLLYSWATRFHLLTQVPSCGSGFGVPTSPRELPRSYRTKKQQDKKTRGQP

SEQ ID NO: 196391 - protein, 520 aa, Oryza sativa
  Clone ID: PAT_MRT4530_92247C.1.pep
MRRYSPPYRSPPRRGYGGRGRSPPRRGYGGRKEQGSGSLLVRNIPLSCRAEDLRVPFERFGPVRDVYLPKDYYTGEPRGFAFVEFVDPYDASEAQYHMNRQVVFGREITVVLAAESRKRPEEMRSRARVRGYSDHEGRRSSHYGRSRSRSRSRSPRYRGRPRSRSYSPAPRRRDDYSASPQRKDTHRAKSPRRQPKEHEVDKKRRSYSPANKDGDRRDADNGYEKRSPPADSDGSPPHRRSPRQSSGSPPGSRSSFDYSIIGDYPFPYHCEQLLLSFTISFSEDVSLFGERDITRCLLHRCCAVPLPQASPPQYAPSWSALPKGSIGKGMAIRKNTGLLSGTSSVVPKIKGGWEFMTSRNGVIFDNKLVSSPLQVITLVTQWLRTWAILHKPGLRDTIAVRPGVSSVEMYHLGVFDRVLIKLPLSKKKIGNGCKHRQIRFTEKFFLSDIVVHKLVLYWHCSGIIEAQQLAGSATIPCNQKNKVGTVQFKNRFFSTKIIRQGLSPRVEKSGIARGIARENF

SEQ ID NO: 196392 - protein, 42 aa, Oryza sativa
  Clone ID: PAT_MRT4530_92248C.1.pep
TLFLPCYSQYLLVASIKFVLVFHPQCLDYYNQNNLFSSSGFV

SEQ ID NO: 196393 - protein, 154 aa, Oryza sativa
  unsure (1)..(154): unsure at all Xaa locations
  Clone ID: PAT_MRT4530_92249C.1.pep
WXXXXXEXXSGSYDNXTXXXHHXSXWGXXXXXXPGXSXXXXPXXXXXXRXXXPXVGDGNQWRQXXXXXLXHXCRXXXXRXHLSSXDXQXACXFPXWXGDSLXPKRXPXRLTXXFGPSXKVXXNXXXXSPSCTSLKGYTPXLXCPPXXPXNLRKX

SEQ ID NO: 196394 - protein, 167 aa, Oryza sativa
  Clone ID: PAT_MRT4530_9224C.1.pep
MASSRASASCALFLALNLLLFAITTACPSCGSGGGGGHGHYGGGGSSGGGGGYGGGSGGYGGGGSSGGGYGGGGGSSTSGWYGKCPTDALKLGVCANVLDLIKAKAGVPATEPCCPLLNGLVDLEAAVCLCTAIKANVLGINLNLPIHLSLILNFCGKGVPTGFMCS

SEQ ID NO: 196395 - protein, 83 aa, Oryza sativa
  Clone ID: PAT_MRT4530_92250C.1.pep
MPLPAAVVPTAAAVAPTAAIVLRRERPGEREKEREEEEEGKERDDDISLHFAVTALSTMEQNVGLICYLSSRVSAVEKNSISI

SEQ ID NO: 196396 - protein, 77 aa, Oryza sativa
  Clone ID: PAT_MRT4530_92251C.1.pep
HSGSTSNVPIYNGHIVYFLALINFGLGTLNHSNKLKPTILGLFASITFQPRGFKTQTLVTLSQHSTSFSSAHSNVYP

SEQ ID NO: 196397 - protein, 415 aa, Oryza sativa
  Clone ID: PAT_MRT4530_92252C.1.pep
MADNDIMAALPEDVLLQVLSRVGNVKSLFMLAATCRRFTDRAFLRDLWGGQRAGDLLGFFFHRQRNSASTFGFLPAPPLRPHPLQLRRRAPDGAPRHPPDAAFPLQRLVRGDQPPPRPLQPYHQRAPRSPASEGPLQPWFLRRHQLRHHLLRRPRREAAAAIFRPLHVLAAARHHQAQEHQDRVPPLVLRHAQQLGRARRVPGSPPLLPGGRGIIVIRRRPPRRGALAVHRPRRERHPRRLPVQELSVEVGGTATATPRVSMTKLPVLDGGTPTPLLCVGGDGELTIVCVFIMHVRVWKQQRRGDGDGDGAAAWRRDVIWMPTEVSNYPKSYTMAHGLGRRGSVAMMYSSTGAVFVLDLDKKVMEKAMDCLLPLRMDHSLDRPPVPYEMDLVEFFLLQLGGLWLYAAEVIYRIIN

SEQ ID NO: 196398 - protein, 494 aa, Oryza sativa
  Clone ID: PAT_MRT4530_92253C.1.pep
MSWVAATVALLLTTAVILTALQKRKISSPAAAAPPVVRGAGLVRFARAMARDGPLEAIREQQAKLGSVFTAIAPFGLFKVTFLIGPEVSSHFYLAPESEMGQGSIYRFTVPLFGPEVGYAVDPDTRAEQMRLFWDVLKPRSIEARVGAMAEEVQNYFSRWGEQGTVDLKKELEQVLMLIASRCLLGREVRESMVDEVYELFRDLDNGLHLISTMLPYLPTPAHRRRDRARQRLGEIFTEVIRSRRNSGTADNGDDVLQRLIDGRYKDERDLTDVEVVGLLVALVFAGKHSSSSVSTWTGINLLSHPNHLVAVIAEQDRLMASRARTDDDHDRVNYDTVQEMTTLHRCIKEALRLHPPAVAMFRQARKHFTVQTKEGKEYTIPGGHTVMSTILVNHHMPNVYKDPHVFDPSRFARGRGEDKAAGPFSFLAFGAGRHSCAGESFAYTQIKVIWSHLLRNFELKMVSPFPETSWRMVTPEPKGTVMISYRRRNLTCK

SEQ ID NO: 196399 - protein, 56 aa, Oryza sativa
  Clone ID: PAT_MRT4530_92254C.1.pep
DDGLQRITWKRTNRKKRDIPLDSEAAQSSKMLKGDELAGSVFKYAYKGVSVKMLIE

SEQ ID NO: 196400 - protein, 47 aa, Oryza sativa
  Clone ID: PAT_MRT4530_92255C.1.pep
EHLSHIRQLNHSYRKLDPSGPVRIPVTQVRPGPNRCFSFSENLGFHS

SEQ ID NO: 196401 - protein, 229 aa, Oryza sativa
  Clone ID: PAT_MRT4530_92256C.1.pep
MAKAAEKLVVEVVAAHNLMPKDGQGSSSAYVEVEFEHQRRRTRARPKELNPVWNERLVFAVADPDDLPYRAIDVGVYNDRAASGGVAGGGGAAPHGRNFLGKVRVPAAGVPAPGEEVVPQLFTLEKRSLFSHIRGEITLKIYRTNSGEVVVKSKPEKPVKAVVSGPEVVAAPPVTGPKKQQQQQPVVAVQPSPPQPEAPMDFLPSPVPLLMKPGMLVVPYSVSDRFFVP

SEQ ID NO: 196402 - protein, 311 aa, Oryza sativa
  Clone ID: PAT_MRT4530_92257C.1.pep
MAAMVVHGVQSGDSKPSSPPTSPPPAQARHATPRRGQGRAHKAAAAAAAAAAAAAAKASLHLTMLSAANGGGVHHDHRGDYPPDQRYGNGGEEARQQQPSWQPPRDQVTHHPRGRRAHRSGPLEWTAAVVFTVLAVVVLVAAVAVLVVVLLLQPRAPYLAIRSARLDDLVYDQQGALEAALSLGVAAENGNARSGATFSDFELRLVFHRVVIAILRADPFDVPPKGSLPLGYVVRSSGIPLDSSGMAAMEAALADGVVPFTVSGQASTRWKVGGLVPFKYWTRLRCDLRFFWPNGTAVDLSCSSKPKSKSS

SEQ ID NO: 196403 - protein, 109 aa, Oryza sativa
  Clone ID: PAT_MRT4530_92258C.1.pep
SYASNSRANVPASIRPCNNPVFQGGWALLAFQGDLKKISRGFSSVLSLRSWSDLLQSYVVVLFKFSRPVIHACSGDGLRSIVVQPICSIPAPFWSNLKCKYVTHGCLTT

SEQ ID NO: 196404 - protein, 1347 aa, Oryza sativa
  Clone ID: PAT_MRT4530_92259C.1.pep
MTITFDGSYGMPSSVRHPAAARHGYPLTCDGLKGKAVTGETVMGFPTRHWYPLTCDGPRHYKPSQMDCSWMYHVHRSSTEYREGVTEFVTFAENDRKSRMSMYILCPCRDYKNEKMNLDSSEAHSHLITNGFMKKYTCWTKHGEQEAPDVAAEEVLDQDVENTAAAREGMFVPSPLGGETIDLDTQCLSTMLHDIEDAEDNDRDYEKFSKLVEDCQMPLYDGCKSKHSKLSCVLELMKLKASNGWSDKSFTELLELLKDLLPEGNNLPQTTYEAKQVLCPLGLEDLEVRHCIDLMHVEKNVCESLMGLLLNPGTTKDGLNARRDLEDMGVRSELHPITTESGRVYLPPACYTLSKEEKIDLLTCLSGIKVPSGYSSRISRLVSLQDLKLVGMKSHDCHVLITELLPVAIRNILPPKVRHTIQRLCSFFHAIGQKIIDPEGLDELQAELVRTLCHLEMYFPPTFFDIMEHLPVHLVRQTKCCGPAFMTQMYPCERYLGILKGYVRNRSHPEGSIIESYTTEEAIEFCVDYMSETSSIGLPRSHHEGRLDGVGTVGRKTIRLDRKVYDKAHFTVLQHMTEVVPYVDEHLAVIRHENPGRSESWVRNKHMSSFNEWLKNRIARLQNLSSETLQCLSQGPEWSATTWQGYDINGYTFHTVKQDSKCTVQNSGLRIEATSDGGRRDQYYGKVEQILELDYLKFKIPLFRCRWVDLRNVKVDNEGFTTVNLANNAYKDEPFVLAKQVVQVFYIVDPCNKKLHVVREGKRRIVGLDNIADEDDYNQHVHGIGQEIPLEEEEEEDEVQYARPSQVTSPVTAQSVGPVTGGITCDGSTVGARHRLPSSPFDCGLQARAPPPIDSRPRVVLRQRSVQGEISVRGADLESGEDSSDSVTSDAGSAKAAPDDVLHIAHALCKVCAKSPRAVIDFVRRVSPATVGRSIDWDVVREEESCKMGDGRSRWTDMEVRVFLESCLEEMAAFTITSNSPKPQAWQNLIHKMYTKCKKKVNKAQLEYIWGQCKKRNDPLKHIDLHHAVFSGHTVVGNHSAVAGAAPQAPQGAVQWQTIDMAQLAAAYRPPPPTPPPTAADRGKGKRPAANTTASGSSSKKSRSDSAGLALERIADIREQSYQSRVAQMEAEKSMGLDACMELVENDGHEIGGSVWYAACALFRDPFTCKCFVRIKDAARRLEFIRTGGTGQSSGGTWAVTGDLTVGARHRSGTHSHSTLISRPPPRPYRPLRYPLRPPLHRRLDLSTAALAAAKSADLSAAHPLRRPSRRRPAPPPPQSISTAISTVASTSPPPSSPPPPRPLRRPPLHRRLDLSAAISAALSTLYTALCTAAASLTLSTAAGTSS

SEQ ID NO: 196405 - protein, 99 aa, Oryza sativa
  Clone ID: PAT_MRT4530_9225C.1.pep
SRVVIGVIQTWFSTSGIIFFLGECLVSWQSVKQQVVALSSCEAEYMAASAASTQALWLARLLSDLLGRDTGAVELRVDSKSALAMAKNIVFHERSNHIR

SEQ ID NO: 196406 - protein, 1516 aa, Oryza sativa
  Clone ID: PAT_MRT4530_92260C.1.pep
MARLLYPHSHRAYRNAMATQAPQSEYAGSDESQQKADAEIWSGRTPARMPTQLERFEVEDPFATMAGSAAATCRRCVGSINTPKLPTAFHPDHCTAHTSVGRARGAIFLLKFKMDRRWMYYAHRSSTEYREGVTEFVTFADNDRKSRMSMHMLCPCRDCKNEQMIEDKDEVHAHLIMNGFMKKYTCWTKHGEQEAPDVAAEEVLDQDVENTAAAREGMFVPSPLGGETIDLDTQCLSTMLHDIEDAEDNDRDYEKFSKLVEDCQMPLYDGCKSKHSKLSCVLELMKLKASNGWSDKSFTELLELLKDLLPEGNNLPQTTYEAKQVLCPLGLEVRRIHACPNDCILYYKEYADLDVCPICGASRYKRAKSEGEGSKSKRGGPAKVVWYLPIAERMKRMFANKEQAKLVRWHAEERKVDTMLRHPADSVQWRTIDRIYQEFSNDPRNMRFAMCTDGINPFGDLSSRHSTWPVLLVNYNLPPWLCFKRKYIMLAMLIQGPRQPGNDIDVFLEPIIDDFERLWNEGTRTWDAYAQEYFNLHAMLFCTINDYPALGNLSGQTVKGKWACSECMEETRSKWLKHSHKTVYMGHRRFLPRYHPYRNMRKNFNGHRDTAGPPTELTGTEVHNLVMGITNEFGKKRKVGKRKEKSTSKEKTEEHVEKQKTKERSMWKKKSIFWRLPYWKDLEVRHCIDLMHVEKNVCESLMGLLLNPGTTKDGLNARRDLEDMGVRSELHPITTESGRVYLPPACYTLSKEEKIDLLTCLSGIKVPSGYSSRISRLVSLQDLKLVGMKSHDCHVLITQLLPVAIRNILPPKVRHTIQRLCSFFHAIGQKIIDPEGLDELQAELVRTLCHLEMYFPPTFFDIMEHLPVHLVRQTKCCGPAFMTQMYPCERYLGILKGYVRNRSHPEGSIIESYTTEEAIEFCVDYMSETSSIGLPRSHHEGRLDGVGTVGRKTIRLDRKVYDKAHFTVLQHMTEVVPYVDEHLAVIRQENPGRSESWVRNKHMSSFNEWLKNRIARLQNLSSETLQWLSQGPEWSATTWQGYDINGYTFHTVKQDSKCTVQNSGLRIEAASDGGRRDQYYGRVEQILELDYLKFKVPLFRCRWVDLRNVKVDNEGFTTVNLANNAYKDEPFVLAKQVVQVFYIVDPCNKKLHVVREGKRRIVGLDNIADEDDYNQHVHGIGQEIPLEEEEEEDEVQYARPCPPQSILVRASSCGSGRFKVLKIGGKWKSSTPVELSASSSRGVKAGRRARCEAASSLAACVLVLSASRVRQCWPEESHQGIQAGGVEESLFQAERVRGPMETTAKKRKRERDLLSIQEEGTIVQSPQTGEISVRGADLESGEDSSDSVTSDAGSAKAAPDDVLHIAHALCKVCAKSPRAVIDFVRRVSPATVGRSIDWDVVREEESCKMGDGRSRWTDMEVRVFLESCLEEMAAFTITSNSPKPQAWQNLIHKMYTKCKKKVNKAQLEYIWGQCKKRYNRWVWLESHASGLGRDPHTSAIVADDEWWESKNAFCEV

SEQ ID NO: 196407 - protein, 878 aa, Oryza sativa
  unsure (1)..(878): unsure at all Xaa locations
  Clone ID: PAT_MRT4530_92261C.1.pep
MDRRWMNYAHRSSTEYREGVTEFVTFADNDRKSRMSKHMLCPCRDCKNEQMIEDKDEVHAHLIMNGFMKKYTCWTKHGEQEAPDVAAEEVLDQDVENTAAAREGMFVPSPLGGETIDLDTQCLSTMLHDIEDAEDNDRDYEKFSKLVEDCQMPLYDGCKSKHSKLSCVLELMKLKASNGWSDKSFTELLELLKDLLPEGNNLPQTTYEAKQVLCPLGLEVRRIHACPNDCILYYKEYADLDVCPICGGSRYKRAKSEGEGSKSKRGGPAKVVWYLPTAERMKRMFANKEQAKLVRWHAEERKVDTMLRHPADSVQWRTIDRIYQEFSNDPRNMRFAMCTDGINPFGDLSSRHSTWPVLLVNYNLPXWLCFKRKYIMLAMLIQGPRQPGNXDIDVFLEPIIDDFERLWNEGTRTWDAYAQEYFNLHAMLFCTINEYPALGNLSGQTVKGKWACSECMEETRSKWLKHSHKTVYMGHRRFLPSVRHTIQRLCSFFHAIGQKIIDPEGLDELQAELVRTLYHLEMYFPPTFFDIMEHLPVHLVRQIKCCGPAFMTQMYPCERYLGILKGYVRNRSHPEGSIIESYTTEEAIEFCVDYMSETSSIGLPRSHHEGRLDGVGTVGRKTIRLGRKVYDKAHFTVLQHMTEVVPYVDEHLAVIRQENPGRSESWVRNKHMSSFNEWLKNRIARLQNLSSETLQWLSQGPEWSATTWQGYNINGYTFHTVKQDSKCTVQNSGLRIETASDGGRRDQYYGRVEQILELDYLKFKVPLFRCRWVDLRNVKVDNEGFTTVNLANNAYKDEPFVLAKQVVQVFYIVDPCNKKLHVVREGKRRIVGLDNIADEDDYNQXHVHGIGQEIPLEEEEEEDEVQYARVDHEEGLFL

SEQ ID NO: 196408 - protein, 56 aa, Oryza sativa
  Clone ID: PAT_MRT4530_92262C.1.pep
GKKKTFKLQKFWTAKKKFLDDTLEGEKPGGVFLGEKFHLKKFKGEGLGQKPGQKKG

SEQ ID NO: 196409 - protein, 375 aa, Oryza sativa
  Clone ID: PAT_MRT4530_92263C.1.pep
MNVNVEHDFHMVGGEGEISYAKNSRVQAKAMIEAKFVLDKAIRELYATLLANIMVVADLGCSSGQNTLHFVSEVINIFTKHQNNLGQSDTVDLQFFLNDLPGNDFNHLFRILNTFTFKGASNHKGDILPAYHIYGAPGSYYTRLFPPQAVHLFHSSLSLHWRSQVPEQLNGKQKSYLNEENIYITKTTPLHVVKLFQEQFIKDVSLFLKLRHEELVDGGRMVLTIYGRKSEDPYSGDVNDIFGLLGKSLQSLVAEGLVEKEKLDSFNLPVYGPSVGELEEIVNRVNLFDMDHMHLFECNWDPYDDSQGDIVHDSALSGINVANCVRAVTEPLIASHFGEGILSALFTDYAHRVASHLEKEKTKFAWIVISLKKRC

SEQ ID NO: 196410 - protein, 229 aa, Oryza sativa
  Clone ID: PAT_MRT4530_92264C.1.pep
MASRARQLKVILAVIMHVLTWCNWCSSVVWPRQPRRDSWLSDSTRDNKIRCKVEGWYLNLFFFRATKAIRARTVGQMRHGLGAWEDPKQVNGPRRRAWGWEEKKAARGGARDEQWRSQDFKVGYSRLSVEPLAASTPRGCRPPNRPDCLSLAEWRAPPAARRGNSLPLRGSAVQFSPPVAASPRRRLGFGNGERREGAEPGRDGSWRESERGPSGRVVAKWINRGSTDV

SEQ ID NO: 196411 - protein, 95 aa, Oryza sativa
  unsure (1)..(95): unsure at all Xaa locations
  Clone ID: PAT_MRT4530_92265C.1.pep
PPILNPIPGGGPLGPFVPAPPKKPMHILKKQGPPPPFXPKGPPHANPGGLGPIMGGPAPIKTKPPSFCQKPPRLGSYNALYAPDKEVTVFSTKSL

SEQ ID NO: 196412 - protein, 142 aa, Oryza sativa
  Clone ID: PAT_MRT4530_92266C.1.pep
MPTRENAFSRTGYNPAPKYFVPIGQQSLISVDIELISNKVKQQRGRDVVDMTLAVDAGFAAAGGSMPDVSRSVVGIALVFVAAVAIVAFVVFNCADGKGSSGGRKRPSYGGGGGCGGGGGGCGGGGGCGGGGGGCGGGGGGC

SEQ ID NO: 196413 - protein, 62 aa, Oryza sativa
  Clone ID: PAT_MRT4530_92267C.1.pep
MRPDSDEKGLDLARDARSGGVAPSLPRSQAKVWFRRPCSSQSLVREGVVSEALLVPITRALK

SEQ ID NO: 196414 - protein, 83 aa, Oryza sativa
  Clone ID: PAT_MRT4530_92268C.1.pep
MGHLSSRPIFSRLPVSAIADPSISPSRAWSPCKISDLGGMIARRRRRDLGEDFILAGVFPPEFSFKFNLGGSLFGKEADRWRE

SEQ ID NO: 196415 - protein, 103 aa, Oryza sativa
  unsure (1)..(103): unsure at all Xaa locations
  Clone ID: PAT_MRT4530_92269C.1.pep
FANKFPPNPWXPKXPHHRXFLPXPPXPPRXNXGXQKKPXAXGNPXKXXPGETPSSTGXPPPXPPXGQXPEFPPPPVXKSPPNPPPPPETQXWXLPPSPXNSEM

SEQ ID NO: 196416 - protein, 409 aa, Oryza sativa
  Clone ID: PAT_MRT4530_9226C.1.pep
MGCFLSCFRGAGSDPAGSLRDPLVRESRIGEAFLDDETKVEASGTLDGDRGNGGSVDEELWREANYLKSCGAIGETPPEMLKGSNQITEEETNGELKGAAVSEENLSEGFNCDEHSALKHEQSDSPHPTPLVLRGDMQTPGTLNTAYKESLRSGKRARTNKQFIYPVLRPIENKLQWMELRDDSSPILSFNPPKRRYLSTDCSAKPQESITNSMATQTARITPASFSFHDITAGQDQGVISPEEHKSENDSRKLLDDADQLKYNADSERKGVASLSCWLKPPSSAGGSQSDTEGKVVKQRCYENSVFTDLPIFTASGLNWDNDKPTPVLPKVWDGNGIPNTTTKYKEDQKVSWHATPFEERLMKVLSDEKPHHQRSPAYALIILCNLLLLEITTNIDIMILAPGKSAES

SEQ ID NO: 196417 - protein, 65 aa, Oryza sativa
  Clone ID: PAT_MRT4530_92270C.1.pep
GKTSPGSFTPKTFEKRGFYHYIYPGGGGEEPKKKKGIKGPERLLFFLKSPPGARRRSPITYYAPP

SEQ ID NO: 196418 - protein, 110 aa, Oryza sativa
  Clone ID: PAT_MRT4530_92271C.1.pep
MVAHATINNGRCDAAPAAAAKSRPAVMPPPASNHGAACKNSGSNKERRRMRRCVEVRRKMEALRRLVPGGGGGEDSGEELLFRAADYIARLQVQVKVMQLMVDVLEQTKD

SEQ ID NO: 196419 - protein, 157 aa, Oryza sativa
  unsure (1)..(157): unsure at all Xaa locations
  Clone ID: PAT_MRT4530_92272C.1.pep
NPNDADRSHLPPPSIAVCPLPRHRTARLPLSRSPTAPLPDSAPARATPETAPPSALPSLSAAAPSSASPXLPSPPARPPPIPIACPPPGFTSPPTPXPRCSAPPIPAAQSPLVARSPPTPSPPPSPMPPDQRRPPGQSPPHPESRPPTTPSRCGLRH

SEQ ID NO: 196420 - protein, 876 aa, Oryza sativa
  unsure (1)..(876): unsure at all Xaa locations
  Clone ID: PAT_MRT4530_92273C.1.pep
MSSSADPSSAPTAEYVEHLSHQVAVPNITDEHXFFLGPIGNLDPTEFINGETNRTPFRFANPDLTLWKNTFKSWPSAEKSWAAWYIRVSASKLTHGDKISISQALALTMADMAKDELMITATTYFWSSTMNTFLFSQGPMTPTLLDVTMITSLDITSSANPISLNTTYTNEFKIRSIGGWSGFFAKNMGTGSVGPREHATLLMMWLEKFLFCGSSCGPTANXQHIAENLVEKKQFPLGKYLLGYLYQTLNTAITKIASGLPIGTGGPWWLLXIWLNLHTMKVANWLPLQDAKFPRFEPTIDDDGEEITTRRCMSFREATYISTASKLSAEPFREWFHNFYDRFPRNARIWFAYEGFGTFEWPNDFRFDEINSEEYEKSREVFSTAISTCIIPVSIHRGKNIQISYEFYHPTSAARQLGMGQLQISLFFADKIXSRGEITSALMTDRLLNIPXPPLGRXVDRWWIEWKKYLLHQSPSMYLTDLFPEAVPQTTESSPPXRSESGIDIQYAPGLLPNRGGLTPPVISYHXPKTSTLLHGLPCVPIAPIAGKKKRTKSAARKKPNKQKVAADDQPTIDPDVEEFLEDEVAEVVDYAADIVSEIREQTPPTDPPAPQRTPSPPVRPTYKPRVCICCHARKFTSSKKPQVTTPPSPTPISEASEHTQLAAGSHHMEEEEEVMAPAPAVLADMFSFDIRQFMDKEEATTSTALVPLADDVKATLLDKLDDAITPATYLEQHRLKLEKAKXRIADRHERRDLEATIQVSRASINEEKAKLDELEASPSSTQASINRLNARRIAILAEVEQCSAQIALEEQKLADLPKAIEDQKSKLKASVKHLTDLTKSLKMIPRTDAADAQIIDEVDQIRQRAISAIPKYVSR

SEQ ID NO: 196421 - protein, 40 aa, Oryza sativa
  Clone ID: PAT_MRT4530_92274C.1.pep
PKVHNAQSSKFLKLGIFKCFFWKLQPFFQFRADIPSSGKG

SEQ ID NO: 196422 - protein, 434 aa, Oryza sativa
  Clone ID: PAT_MRT4530_92275C.1.pep
MAKDELMITATTYFWSSTMNTFLFSQGPMTPTLLDVTMITSLDITSSANPISLNTTYTNEFKIRSIGGWSDAKFPRFEPTIDDDGEEITTRRCMSFREATYISTASKLSAEPFREWFHNFYDRFPRNARIWFAYEGFGTFEWPNDFRFDEINSEEYEKSRERPIDPDVEEFLEDEVAEVVDYAADIVSEIREQTPPTDPPAPQRTPSPPVRPTYKPRARDITVTGDLGHGGENGGHQRDEHDAGNSLRGGTTTNNDRRRPTTRLKRRRARLDGVGGASATSGNNGGVDGLLLGAAMPREVAAQARHSPTPISEASEHTQLAAGSHHMEEEEEVMAPAPAIPVLADMFSFDIRQFMDKEEATTSTALVPLADDVKATLLDISKRLEGSLETLVTSCGSIRDRFHEFHDKIPDKLDDAITPATYLEQHRLKLEKAK

SEQ ID NO: 196423 - protein, 431 aa, Oryza sativa
  unsure (1)..(431): unsure at all Xaa locations
  Clone ID: PAT_MRT4530_92276C.1.pep
MGGQHRALEAQPANAPQPPGDGRLEGRGLLGLLPHSIDESVNGLPAHPRVHADTGWRGRHDGLRPQPGRRQVDLYSFQGXLKNAGKERYRLIYRQSHQTAPHFSTHGRYPVGELWDRAQNCCGRFLAHDGKSVLVVAHNTVNPALLDSSLGFGTVHFRILLHSNCGASVLDFAPQAGGGPPAVCLNRLNQTTNSPFASGSTXWRKTSTSITLASQGATQNSAEIGVSGMGYAPLNMLGIIQSQKTAELLLDQKVNGILCSPQLAAFDTSRSLPSGSSSGDENGGGGDESGTTTPPPPPPPPCSSTPPTPSRPPEPPPPPTPCSMEYKSLEGLWNQSKAAWPALLNELQDDTSERILVVVGHPGINLALICRCLDLTMDYMSSFHLDDGSISVIDFPDGPKGRGVVRCTNYTAHLGRWSIPITRTMETDEEF

SEQ ID NO: 196424 - protein, 536 aa, Oryza sativa
  Clone ID: PAT_MRT4530_92277C.1.pep
MATPGLDDDSLQQLRSRATQLLLKENWTEYIAVCSLIIEAFDAAAACKDRRVLCSTLAHRADARARLGDAPGALADCDAALAADPAHPGALLSKGAVLRGLGRYSRAAECFRAALAVSGTDEVREMVEQCKRLDAQARSGAVDLSEWVLAGFSGKCPDLAEHVGAVEVRRSAHGGRGVFAVKNIEAGANLVISKAVAIGRGVIPDAADSGEKMVVWKDLVDKVLDAAEKCPRTASLIYTLSTGEEPEDELPIPDMAHFKQETEELDDGTAMAPKASLDVDKILKVLDVNCLTEDAAPSANLLGSNGVVNCGVGLWILPAFINHSCHPNARRTHVGDHAIVHASRDIKAGEEITFAYFDVLTPASKRREAARAWGLECQCDRCRFEASDAIVGQELTKLENELVNGRGGDMGALVVRLEERMRKSMVKERRKAFLRASFWSAYSALFDSDKLVRKWGRRVPGEAAVAESVAGAIGGNESVLRAMLRGADNGNGCGNRLEVEDKVVRIGRATYGRVVKRQAMRALFRLTLDADSNKSL

SEQ ID NO: 196425 - protein, 366 aa, Oryza sativa
  Clone ID: PAT_MRT4530_92278C.1.pep
DAWAEIIWADRDDDLIPDSDLREIDLYSFQGLLKNEGKERYGVIYRQWQKNAANFSIDGHYPVRELWDRAQNCWERILAHEGKSVLVVAHNAVNQALVASSLGLGTEYFRILLQSNCGASVLDFTPQAGGGPPAVCLNRLNQTPNSPVASGSSAGRKTSKRIILACQGATQNSAEIGVSGMGYAPLNMLGIIQSQKTAELLLDQKVNGILCSPQVAAFDTATTICEVQEAADCLGADCVPRYVEMKKLLELEIDDAFQTKQKSFGEIAQSGWLGSMEYKTLEGLWNQSKAAWQALLNELQDDTSERILVVVGHPGINLALICRCLDLTMDYMSSFHLDDGSISVIEFPDGPKRRGVVRCTNYTAHL

SEQ ID NO: 196426 - protein, 132 aa, Oryza sativa
  Clone ID: PAT_MRT4530_92279C.1.pep
PPFFFFFLVRNGVSHIPCLHHFNDKAKVTGKNGNKEKKKLMGRKKKNVCMYVYVRAREKKNERGCRERGRKARESSQNKGVKQKEERRKTKQSPDSSPNRPYAFSSSSSSSPSLLSCFFLLSLVVQLSSFFS

SEQ ID NO: 196427 - protein, 231 aa, Oryza sativa
  Clone ID: PAT_MRT4530_9227C.1.pep
RACCLSSVTALQSYKEALINDDETKVAEIEDFLFSIEEEKNSLLSKISTLGAELTTERDRILRISADFDNYRKRVEREKLSLMTNVQGEVIESLLPVLDNFERAKTQIKVETEQETKINDSYQSIYKQFIDILNSLGVEDVETVGKPFDPMLHEAIMREESVEYEEGVILQEFRKGFKLGERLLRPAMVKVSAGPGPEKPVYDDPAMVEDSVAPQKVKEAEDDGFDDDNAE

SEQ ID NO: 196428 - protein, 253 aa, Oryza sativa
  Clone ID: PAT_MRT4530_92280C.1.pep
MTALACLAGKAISWSSGVKAAAGCGLGLLPQWRGVFRSVRMESGSSQGGRGALIVLEGLDRSGKSSQCARLLSFLQGKGCQAEGWRFPDRGTSVGQMISAYLANESELDDRTIHLLFSANRWEKRALMERKLLGGTTLIVDRYSYSGVAFSAAKGLDIEWCKAPENGLIAPDLVVYLDVQPEKAAERGGYGGERYEKIEFQKKVGEHYHSLRDSTWKVVDGSLPMEVVEEQLKELAMSCILECQSKQLASLAW

SEQ ID NO: 196429 - protein, 146 aa, Oryza sativa
  Clone ID: PAT_MRT4530_92281C.1.pep
LPTSPPRGYDARTDARTTTTHRRRRYARTTTTTTTHARTHDDEQHHDHDHDPTLTSPPTPSHVWKNGGKRRVEVEPPRPGNRNLRDHVMTLVLCWSVRTLTTTRTGYVEQPYAWALNRHGYCRGSKKNFFYNRQTRGPATAGGPTA

SEQ ID NO: 196430 - protein, 70 aa, Oryza sativa
  Clone ID: PAT_MRT4530_92282C.1.pep
TLVSPVKNPREPARKKKTPPIGGEKIKNPNPQNDGKKPPFGGPPTKKKGGGPPPGKRKTNNSRKKKTPPR

SEQ ID NO: 196431 - protein, 112 aa, Oryza sativa
  unsure (1)..(112): unsure at all Xaa locations
  Clone ID: PAT_MRT4530_92283C.1.pep
AQSLLCTKRQLTQPQECTWGGGQARGGAASTHMGRAQEVGTATPCGTRPTRSTSLAGSAQRRRKAPPRTPGVRLIWEGPRPLVRGGVESPPYPDVGGAPCSGXWSGKALPTL

SEQ ID NO: 196432 - protein, 152 aa, Oryza sativa
  unsure (1)..(152): unsure at all Xaa locations
  Clone ID: PAT_MRT4530_92284C.1.pep
RQALRAHXQHRLFSGTWDVTQGMSDKVFTINVTSEDPIWYYCAVQGHCQNGMVGAINAPTSGQRSFSNFAKAAEDSEDSVAPRSTGGGEIATATGTMAASGTSEPTGTSTETGASSTESAGANAGLEARGEIRWGLMTAGMAMAGLFGGLMM

SEQ ID NO: 196433 - protein, 116 aa, Oryza sativa
  Clone ID: PAT_MRT4530_92285C.1.pep
MPCGYGVPIISTLMLSTSDDEEAKGSSLSLGCLAMSYPALSIDDDDVVYLLCNSANRDCDMGGVMIALDVRKKEIQGAAKLDGKKNTLFSMRCYLATAISKHPTPTADTRVGQPKE

SEQ ID NO: 196434 - protein, 191 aa, Oryza sativa
  unsure (1)..(191): unsure at all Xaa locations
  Clone ID: PAT_MRT4530_92286C.1.pep
GGSSSPNAKQPHPSNLGGGKIPGPGSLPASIGGVRRFIGSVSASEIEQSEDYTCIIARGPNPKTTHIXDCILEPQTMDASASAAAMDVTEAPTESYWVVKCDAGAAPASGGGGGGGGGNFLSSCFTCKKKLEGNDIYIYRGETFFCGANSDLELLKSSNKLLHCSSXVSSPRSSCSSLHEDIFMAGMFVAT

SEQ ID NO: 196435 - protein, 344 aa, Oryza sativa
  Clone ID: PAT_MRT4530_92287C.1.pep
MAISAAAAAAAALSFPRALPSPLQPRRHRHRRRSAEPPACAHSERGVTFDPGSAFYRSDSAAGRDLAVLAATLHRRAAGPSAPFLCLDAMCGCGVRALRYLAQVGADFVWANDASEALRPVIVGNLSRFERAPDRRWAVSHLDATRLLSERYLRREYFDVIDVDSFGGDAAYIRAALLALRIGGLLYLTSTDWRSARGYGSRSSLSSYGAYIRPVPYPNEDPDSITGVGPLWTGPLHDTTFLTEMLSLATEWGWANTIENGVSLEKLLDTMIEESDSRLPPGYIRLDEIASRAKVNSPPLGTLINSLRKEGYAACRSHIGANAIKTNCPIECCLDVAQEIRNLR

SEQ ID NO: 196436 - protein, 56 aa, Oryza sativa
  unsure (1)..(56): unsure at all Xaa locations
  Clone ID: PAT_MRT4530_92288C.1.pep
SGSPGCRLVSALADALLDSVPMVXAITGQVPRRMIXAPDAFQETPIVEVTLLHHQC

SEQ ID NO: 196437 - protein, 116 aa, Oryza sativa
  Clone ID: PAT_MRT4530_92289C.1.pep
RRVLAYLNQDMSGYSPGGKLTIYPDYVDTGLTAYVRRIAQASAGVAPSSSSCGYGCSDHASARSNGFPAAYVGDEPIGTSATWIHSSNDSIDRIQWPTILRHAKFVINYLVEASYL

SEQ ID NO: 196438 - protein, 518 aa, Oryza sativa
  Clone ID: PAT_MRT4530_9228C.1.pep
MAIESWLTKVRSAIISSKPSPSSSSSSSWRSKTVGILALEVATLMSKLVHLWRSLADAALARLRHHLINLDGVRKLVSHHDAALLALACAELTDALRVAAHSVAALATRCADPFLRDFADAFADFADTGRDPHRWVSTWKDMDTRAHKMDKQVAATSALRTAMEDLADAEHGLRKLLQTSSSRRLSATNISLAAEQQQLIFAKKQEVKHLKQTSLWSSTFDAVVSSLARAAFTILARIKLVFGAAHDHRPTTTPLHRSLTLSSAVHPSSVDVQVQPPVSRKSMSMDMGMGEALYLERQRQSGLLERSAAALVPPPGTLGAAALAPRYAWVIISIERMARSPRLVGAEERDELYGMLTASVRAQLRARLSGTVAAAEPGLAGQWRAAVGGILEWLAPMAHATVRWQAERSLEQQRKTTREMETQTLVVQTLQMAERGKVEAAVAELLVGLNYLCRFHKEITTCRTPQRPCGGGALPSAGSSGRRLRFGSGSGTLPFRFVFPIRFNLYDGIPDGILGADN

SEQ ID NO: 196439 - protein, 313 aa, Oryza sativa
  Clone ID: PAT_MRT4530_92290C.1.pep
MEFNKVVSSYRAASPAPVGMARGGGGPASRVEFVPSSRRARLAATNNSVTPVTKEEKQRIDQSEILTLDNIRTSLVRQEDSIIFSLLERAQFCYNADIYDKNAFHVDGFDGSLVEFMVRETEKLHQQVGRYKSPDEHPFFPEDLPEPLLPPLQYPKVLHPIADSININKEIWKMYFDELLPRLVKEGSDGNYGSSALCDTICLQALSKRIHYGKFVAEAKFQESPEAYMPAIIAQDCDQLMHLLTYETVERAIEHRVEAKAKIFGQEVDLGAEDNGAPPMYKIRPSLVAELYSYRIMPLTKEVQVAYLLRRLD

SEQ ID NO: 196440 - protein, 91 aa, Oryza sativa
  Clone ID: PAT_MRT4530_92291C.1.pep
QWKGEIRSNQGHVTASAGVFKIQSFLFILTRNSLCHAVYIIVTAWNELCSSLCVSCVTTKHPAVMSLFILIFQLSTLEILTSAVSSILTLQ

SEQ ID NO: 196441 - protein, 95 aa, Oryza sativa
  Clone ID: PAT_MRT4530_92292C.1.pep
MSLNPLFITRIDFSDVAWTRRHRGQGGERSYIDSLSGLDAYKSLSIIDDLKPKNIGAFADLVAGLGFLSRCIFGRCNATSSSTTTSLLDGFLFLR

SEQ ID NO: 196442 - protein, 342 aa, Oryza sativa
  Clone ID: PAT_MRT4530_92293C.1.pep
MEVESRYVAVRHHVEGLPSEDDFEVKAARVRWWPESGEVLVRNLYLSVDPYQLNRMKRRSASHLAVDGIVPGERIDAYGAGEVVASACEEYKEGDVVAGVLGWEDYTLFRPSPGVLMSKLAASDDLPLSHHLSALGTSGMTAYAGLYEVGRPEAGEKVFVSAASGSVGSLVGQFAKLAGCYVVGCAGTNAKVDLLKNKLGFDDAFNYKDEPDMKSALKRYFPDGIDIYFDNVGGETLEAALANMNTYGRVALCGVISEYTDAGHRAVPDLLEVIYKRITIRGFFAWDFLTRFAEFTGVISDWIRQGKVQVIEDISDGLESVPSAFAALFSGDNIGKKMVKLA

SEQ ID NO: 196443 - protein, 111 aa, Oryza sativa
  Clone ID: PAT_MRT4530_92294C.1.pep
YLCFYLQLFSKTSNNYISFIFKALESNHLNRPALLVNLSKAFGLLVGLVLIWLPLPSSCGPPFTLDGVVDDSPLGVVSPIVVCSCGPPGSFSILFICASAAFLITVSRTRG

SEQ ID NO: 196444 - protein, 81 aa, Oryza sativa
  Clone ID: PAT_MRT4530_92295C.1.pep
AIWHVKSYLAEAAKVEAVSCNQVGIRVRLRLRERYCRVTCGSQDTVMDSWSPSLSTHLNIQIKQLVSIFFFGKSRSAHSFK

SEQ ID NO: 196445 - protein, 130 aa, Oryza sativa
  unsure (1)..(130): unsure at all Xaa locations
  Clone ID: PAT_MRT4530_92296C.1.pep
QAAPPPSSPGVTDRWGPPVGSSPNLPPPAPXPPRRNRRRRTHSSAFPAPTPRRPCPRHVAAPSPRVFRPRSRTRGAGFDFESPPPXSLSSPTSPAKSGRLPATPAPARASASPVFAASLVFRRRPLPPLR

SEQ ID NO: 196446 - protein, 174 aa, Oryza sativa
  Clone ID: PAT_MRT4530_92297C.1.pep
MRVWGQIVDKRAKSGAADVDSDTAVDLRLRRHIGTEPNLSTQIARNPNPFFFSPSRSIATTPTSGIHARSNQLLARIRLLSTCMFVICNNKMQIIVKTLTGITITLEVRPSDTIDDVKAKIQDKVGIRSDQQHLVDVSAGSKQLDDGGSTLADYDIHDESTLHLVQVLLGDCRN

SEQ ID NO: 196447 - protein, 128 aa, Oryza sativa
  Clone ID: PAT_MRT4530_92298C.1.pep
MDGSVPRRQIRADPAAGGQETGEAPVASGREASAGDVPAAATRDDLRRVGALWRPKFSTAVSEAAAIGLLLVFICHLRGVECAGASTASSEHDGRTHLDPHPGATTTASPRQWLLAGRKGLGVGGSSP

SEQ ID NO: 196448 - protein, 254 aa, Oryza sativa
  unsure (1)..(254): unsure at all Xaa locations
  Clone ID: PAT_MRT4530_92299C.1.pep
WPPPPPPPPPRLPLRRRRTSPAASSGSTTRSSRPPPPPPSSPXPLSPAAAPPAPPLPRLPLLPPRPPLPPPPXSPPPPPAEATPPPPPPPPPPERAVPEAADTPPPPPPPTAPTPTPPELPSVFVETEFASSWAAKGRALEVIHEEFEAEWGPEEMGLTWTSDSDSDSYSGSDDDVDDYRDGDGMIEIELEEDNLIEIDISKCRFLSFCGELEVSAFCHFCGEFERLAASVLVVGASLAAPPASCSASASACSS

SEQ ID NO: 196449 - protein, 38 aa, Oryza sativa
  Clone ID: PAT_MRT4530_9229C.1.pep
MKHAADGADFINEFFQVKQGCIILISGLPAHHWSEANL

SEQ ID NO: 196450 - protein, 85 aa, Oryza sativa
  unsure (1)..(85): unsure at all Xaa locations
  Clone ID: PAT_MRT4530_922C.1.pep
AREKIIYSWSVENFLEXGGGATKTXRRGQRAARPGGDGDGDGDDTALSSGRHLVSSEHAAFPLLPSSCKARVRVFFSSPFPVVAA

SEQ ID NO: 196451 - protein, 51 aa, Oryza sativa
  Clone ID: PAT_MRT4530_92300C.1.pep
MGGVGDTAAAGAQGQQRVVGRLYNTLIIQWLPEWHPNRPSMVIYKAKYPKK

SEQ ID NO: 196452 - protein, 81 aa, Oryza sativa
  Clone ID: PAT_MRT4530_92301C.1.pep
MRLWLLIPLVLCLPTLIPSEDYLDVTIVARGAATIAFTSNVFICATLDWWPSQKCTSDQRPWGHACILNQYLTNPLLAKAI

SEQ ID NO: 196453 - protein, 1529 aa, Oryza sativa
  Clone ID: PAT_MRT4530_92302C.1.pep
MSQFHPTQHGGDSDFQVWQQQMMYKQLQEFQRQQQVQQLDHGARMQPSFGQFQAPAKPLPTDQLSAMTNEMPNNESTAYAWSHQLHGSSDPGLASNSQMLNPSSNTNWEQYGGAPGVANFVNGSMFSNTPIQPMRPMGLAAHQMNPSLYPINTTSRDGSGNQHSQFLGIPTDPRNAMARAAAHQSEKASMQFSSLMSEQGPSSSMQNFLGKVGDNIKVGTPVPVNHLQHGVQHQDFHGRPNQVDFQAGLREKSTMQVESGNGGASLDPTEEKFLFGNDEDSNWGALLRGGNDHGSSMDNDNFGGALPSLQSGSWSALMQEALQSTTSDNSPKEEWSGLSFQKQEQIIANNSTLQSHDQNKFSALSGANLENQRPSSASSYGDGTMHNPNFAGFQHAARTPYEQRDRMQHDSSNATGTNHQSTAGVNNGYFQQSMKQKQSDDYSRQEQMNASNGIWAHQKPEMPRNNSHSSGGHATPPSAHGFWMSQQNSIDHNISRESGSTQNDWKSKAPLVQDINSTPNVFNNDGSFWKSSGGNANSVHRPQQMKPDISTMQMPNDSSDGKSTSAMGSNMPTLNQDQYQSIIGRTGEHVGQNHNMGRKGPEITGSLGRGAEQKSNDHNQDYLNVLPTERQGHGSNHGQHVSSDFATRRHPFFAGKESQNLGQSGQQAMGSYMLQNHAMDNSGMNIRHSSGNPVPNQFPSQSHQLHNNLKPRFIPSSQASSNMASVNEKMLMREEQFKSRHVPNSSSSPPFGGSDAGLPQNRAVQNSQHMLQLLHKVDNSTDSNAAADMPNSSPDNTGTVQQQLNQSSLQGFGLRLAPPSQRQLTPGHVWSTRADVDGKQPEHSTKGEDQTQPSAASQSLPPGHPSSQPTPFNSSEIDSTGQQTGQFHQFGSGQQYPVSESRSGSVAMPQQGSSATVFKNVWTNISAQRLAGVQPNKITPNILQSMMFPNSAADTNLWGSQKADDQGQRASTPSDVATSSTNSQNQETKQGGDSDAGLASSEMVNLDSTGATMSRESIQKHSSDGNFAMHVSSLARLHQQGIMNPKQGENPAANFQAMKTSQNTAIGLHGSPTPSNIQQQNYSLLHQMQAMRHVDVDPANIAGKKLKSPETGSDASQVDWKSGQRFAHGTNNSVRSSVDNIGNANVPGPFPADMKMLSFAPRNNEDRGPSIPSQFPSREPPSQGMAVAAQTEQQTQVQPANASSDLIERSERPRINPQMAPSWFERYGNHRNGQNLSMFNLQKTPVPPYNVQKPSWNMDNNSAEQRIDSGQSVKPGHYISSKKMEVSVPSSIMQRRPKKRKSAESDLVSWHKLIEHPKTLRNMSTTEMDWAWAANRLMEKAEDDAENLEDVPVNYLWRKRLRLTTRLIQQILPAIPAKVLKAQAASAYEGVTYNIAMFTLGDACNMASYNSRTLTDHENNSSEQTNAKKMEDRLSKVVEVFTGRIKKMENDFVSLNKRSSMLDVQLECQDLERISIVNRLGRFHGRNHAAGVEASSASEMIPRRIFPERHVMSFAVPGNLPEGVYCLSL

SEQ ID NO: 196454 - protein, 1486 aa, Oryza sativa
  Clone ID: PAT_MRT4530_92303C.1.pep
MSQFHPTQHGGDSDFQVWQQQMMYKQLQEFQRQQQVQQLDHGARMQPSFGQFQAPAKPLPTDQLSAMTNEMPNNESTAYAWSHQLHGSSDPGLASNSQMLNPSSNTNWEQYGGAPGVANFVNGSMFSNTPIQPMRPMGLAAHQMNPSLYPINTTSRDGSGNQHSQFLGIPTDPRNAMARAAAHQSEKASMQFSSLMSEQGPSSSMQNFLGKVGDNIKVGTPVPVNHLQHGVQHQDFHGRPNQVDFQAGLREKSTMQVESGNGGASLDPTEEKFLFGNDEDSNWGALLRGGNDHGSSMDNDNFGGALPSLQSGSWSALMQEALQSTTSDNSPKEEWSGLSFQKQEQIIANNSTLQSHDQNKFSALSGANLENQRPSSAPSYGVNNGYFQQSMKQKQSDDYSRQEQMNASNGIWAHQKPEMPRNNSHSSGGHATPPSAHGFWMSQQNSIDHNISRESGSTQNDWKSKAPLVQDINSTPNVFNNDGSFWKSSGGNANSVHRPQQMKPDISTMQMPNDSSDGKSTSAMGSNMPTLNQDQYQSIIGRTGEHVGQNHNMGRKGPEITGSLGRGAEQKSNDHNQDYLNVLPTERQGHGSNHGQHVSSDFATRRHPFFAGKESQNLGQSGQQAMGSYMLQNHAMDNSGMNIRHSSGNPVPNQFPSQSHQLHNNLKPRFIPSSQASSNMASVNEKMLMREEQFKSRHVPNSSSSPPFGGSDAGLPQNRAVQNSQHMLQLLHKVDNSTDSNAAADMPNSSPDNTGTVQQQLNQSSLQGFGLRLAPPSQRQLTPGHVWSTRADVDGKQPEHSTKGEDQTQPSAASQSLPPGHPSSQPTPFNSSEIDSTGQQTGQFHQFGSGQQYPVSESRSGSVAMPQQGSSATVFKNVWTNISAQRLAGVQPNKITPNILQSMMFPNSAADTNLWGSQKADDQGQRASTPSDVATSSTNSQNQETKQGGDSDAGLASSEMVNLDSTGATMSRESIQKHSSDGNFAMHVSSLARLHQQGIMNPKQGENPAANFQAMKTSQNTAIGLHGSPTPSNIQQQNYSLLHQMQAMRHVDVDPANIAGKKLKSPETGSDASQVDWKSGQRFAHGTNNSVRSSVDNIGNANVPGPFPADMKMLSFAPRNNEDRGPSIPSQFPSREPPSQGMAVAAQTEQQTQVQPANASSDLIERSERPRINPQMAPSWFERYGNHRNGQNLSMFNLQKTPVPPYNVQKPSWNMDNNSAEQRIDSGQSVKPGHYISSKKMEVSVPSSIMQRRPKKRKSAESDLVSWHKLIEHPKTLRNMSTTEMDWAWAANRLMEKAEDDAENLEDVPVNYLWRKRLRLTTRLIQQILPAIPAKVLKAQAASAYEGVTYNIAMFTLGDACNMASYNSRTLTDHENNSSEQTNAKKMEDRLSKVVEVFTGRIKKMENDFVSLNKRSSMLDVQLECQDLERISIVNRLGRFHGRNHAAGVEASSASEMIPRRIFPERHVMSFAVPGNLPEGVYCLSL

SEQ ID NO: 196455 - protein, 96 aa, Oryza sativa
  Clone ID: PAT_MRT4530_92304C.1.pep
APRRRTRPGYPSPASPPPATSCLAGTSGSSSPSSPPAPTSPRTARGTGARTPSPSTPRRRRCSGISGSRRRRRRRPAHPPSSSSPSSARIHCRRRR

SEQ ID NO: 196456 - protein, 201 aa, Oryza sativa
  Clone ID: PAT_MRT4530_92305C.1.pep
MDGEEDSEWMMMDVGGKGGKGGGGGGAADRKKRFSEEQIKSLESMFATQTKLEPRQKLQLARELGLQPRQLEKLAEMLQEPRGKYGDNAGDDARSGGVAGMKKEEFVGAGGAATLYSSAEGGGTTTTTTAKLMPHFGSDDVDAGLFLRPSSQHHPPPPHAGAGFTSSEPAADHQSFNFHSSWPSSTEQTCSSTPWWEFESE

SEQ ID NO: 196457 - protein, 86 aa, Oryza sativa
  Clone ID: PAT_MRT4530_92306C.1.pep
GEKKTPKMGGAGKPQRGTRENLDPFKNKKKGTARLLKKKWDKGWLGNRKWGTNKKKNPWVLEGPMLLKKKKTPGGKKFFFFQKFMP

SEQ ID NO: 196458 - protein, 95 aa, Oryza sativa
  Clone ID: PAT_MRT4530_92307C.1.pep
MDISRTNEVYTSCGPVVEMSWHRAGVLLLGAQSCLPVPGVPAVGGVGSGGESGETVPSLHHGKLCDASGCCGGVAQLLRCGKQYGANGCYGETAH

SEQ ID NO: 196459 - protein, 76 aa, Oryza sativa
  unsure (1)..(76): unsure at all Xaa locations
  Clone ID: PAT_MRT4530_92308C.1.pep
RSSSSRPPHTEPRQWTILLPCQAPLQSPPKVRRSPHGASVTRCSPPHRXLLIHIPNATSSLPYPXAGATTSISPDP

SEQ ID NO: 196460 - protein, 75 aa, Oryza sativa
  Clone ID: PAT_MRT4530_92309C.1.pep
MERMDDGLREEDGVAYEQHVGWVSWSEATGPEISTTDAAATVCSRLLGLEVVNEEGCSRQYHIGRGLSIMSRQCG

SEQ ID NO: 196461 - protein, 248 aa, Oryza sativa
  Clone ID: PAT_MRT4530_9230C.1.pep
MEQLFVDDPAFASSMSSLEADIFSGAGQLPSSPWLDLDLDDDVQDLSMAPTTANAVSSGYGSGGSGSHRKLSHNAYERDRRKQLNELYSSLRALLPDADHTKKLSIPTTVSRVLKYIPELQKQVENLERKKKELTTTSTTNCKPGVLGSQLMSEGMAPIVSATCINDMEIMVQVSLLSNVAGSVLPLSKCIKVLENEGLHFISSSTSSGFGNRTFYSIHLQRSEGTINEECPAFCERLEKVVRNKAKL

SEQ ID NO: 196462 - protein, 216 aa, Oryza sativa
  unsure (1)..(216): unsure at all Xaa locations
  Clone ID: PAT_MRT4530_92310C.1.pep
TNFISSCLCKIKXVYDSYSVMNNWHLXLLVLIFGDYWRSGFGDDWICRCXIGAARDLGPVRPDMGCWLEXMHVVGEDSXHMMEILCAYEMRSRIWKESKFGMFGXVKFVSCTGRFPRXIRTSCMSLVHGFRLSTSCINREGASNRRDTSGQTGGSRVVRPAAVSGDGSXSRQFDRXSSPVRPTASRRSDQRVYFGRTVFRRNLGLNTSLHISKRLI

SEQ ID NO: 196463 - protein, 135 aa, Oryza sativa
  unsure (1)..(135): unsure at all Xaa locations
  Clone ID: PAT_MRT4530_92311C.1.pep
HWRPGRSTAWRDHRGAXSGQFDGGRLTAVPMCRGAAERRRSSTGQQHQHRGEAPACGGQAAVPVGLSSRVRQLERWLDRRKSTGGRVRRRXPPVSNSLVAALDDSVVSHVLAESGFCRRDIKLTILRPAPPGSAH

SEQ ID NO: 196464 - protein, 317 aa, Oryza sativa
  Clone ID: PAT_MRT4530_92312C.1.pep
MSSTGEQSQAKAEAEEAVELVLFQVAECYVSLIPSSTAATPPTDEIWNLYSCAQARTFPFLRKSPTCSRKLHATPSPYLYFPRLLTHHAPEPVGPVPRRSTERTNHKQTREPVKRCENALVVDRRVIHVADSFLELSHPLQGSRLDIDLPGHLDRIFWGVKKRAEELRYLDDSYIIDLIAEACLAQKESGAKIKSAFFEQGLNKLSFNEKANSKEAPVSLKLPPPPPSPVSPTDSGIAASPFKAEFPSQDQPAADTGADTTPFKAEFPSSHEQPAADNVASSPPPKAEAAPQEQPTAAEKAPQESVDDDFGDFQAAG

SEQ ID NO: 196465 - protein, 40 aa, Oryza sativa
  Clone ID: PAT_MRT4530_92313C.1.pep
LIFYSRGLISRGCPRLFATPFFLSPCAPRLVNTPPRKRVG

SEQ ID NO: 196466 - protein, 1387 aa, Oryza sativa
  Clone ID: PAT_MRT4530_92314C.1.pep
MADLVLGLAKTTVEGTVTMARSAMEEEEKLHKTVQRDLLVISDEFEMMHSFLNDAKGRVTDNVTRTLVRQVRNTALDVEDCIETIVYLDSKPHWWRRMILPWCMPSAAPGKDLDAAVANIEQLKARVEAMGHRNLRYNRIGDSGHKPEEQAHQQAVANAMAPTDAAKQSRQVDLVMLINRKGGQARHMLAPFPRSYFMAPSLTAGGGGGDEDDDDDDDNNNNEDDDDNGDCYHDCCEEQLKVEKEVLQVISVWGTGSDLEMMSIKKAYDDTETMKSFNCRAWVKMVHPFHPIEFIRSLLAQFHKNVCPEQDNTVKILDLMVATDDVLIEEFKQQLSQKFLVVLEDVTTMVDWEAVRGYLPDKKNGSCIVVHTRHHGIACSCVGHPYRVSELEKFSADYSVRVVFKEVPAGSGEGTVNEETAHEREKSGPSCFGRDTDLSWLHSLTRLGGVVSVWGMSGVGKSFLIRQFFNNYMRQSSKNTVTRNPYYDKKKFGWVDVPRPRPFDLRDLSKSLHSELNPAFKDEVMSTIKDPIQQCREYLQREENWPYLIVIDGLQSKEEWDSIRRNMDFKFNTSSGKSNRSGEKVGNVVIIITNEESVANYCATKNNNVWNVKGLEVTGAIKLFDQRWGNLDEDFKGYFSLFFIREDVDLEVGDDEVGQEGGDGVNATDLGGNEDDIARELGGEEGLDVELPVEAELGAGADDHVGVAEEKEASEDGGADEAAVAGHEDLGTLVGEEGGVWTRKKEEQGRKVAANQRQRLWPWDWESEENKMLEIKHRNDETRHILLQKCGGLPKVICAVAESLSMVGDIKEEDNLVSKLAATRSLDDVFSWLLSYFRSCPDSLKPCILYLSIFPVNHTIRRRRLVRRWIAEGYFRDNKESTAEENGEGSFSKLIDLSMIQAPRTRVDGRRRMPLCQVNGFVREYIVSQLVEENLVFELEGHCRKNIQRTGRHLAIDNSWDRDRNVFESIDLSLLRSLTVFGKWETFIISDNMKLLRVLDLEDVSSGVTNVDVEKMVKLLPRLKFLSLRRCKQITRLPDSLGDLKQLQTLDIRHTSVIKLPKSIIKLEKLQYVRAGTAKHQQASEAAENPSMAAAPAMMSRPCIATPGSRFSKLGLGLHCRHGSHSGVKVPRGIGKLSSLHTLGVVNIQACGEDGILEDLKNLTQLHKLGVSGINRKNSEKLFSVILRLAHLESLSLKMQANQDNEAAGCMADISSPLEKLQSLKLYGLVDRLPSWIMQMCLQLPRLEKLDLQMKTLPQQELDFILTLKYLRSLRLRLAEFQDGELRFGWTIAQRSTSWIIDILEIVCNSSLQAVKFGSKIHVKILKIRCYSVSSSLQFSGLESMETLKEVWLSGSYELGFKQQLETELKGNENEPILELEKPSSST

SEQ ID NO: 196467 - protein, 57 aa, Oryza sativa
  Clone ID: PAT_MRT4530_92315C.1.pep
MAPLLQSRDEKEMESRDHPDHPLEPPVGAAMVTLTRWSSDGAGYGEERREGRGRDAA

SEQ ID NO: 196468 - protein, 92 aa, Oryza sativa
  Clone ID: PAT_MRT4530_92316C.1.pep
LSGRSSPWSASNESNYNHRWGRLVPVLIKVLTPYLASKNIRSSLITTRVIDSPVVCVRHIMGCLSSTYSIVPFFRTREPLNDKKKNSRPHCR

SEQ ID NO: 196469 - protein, 142 aa, Oryza sativa
  Clone ID: PAT_MRT4530_92317C.1.pep
IQRPPSLGAAWRQRERRQHADPPASALRSGGGGLRQAGASGYDGGGCGDDDDGGCNDLPCRVLKATAAAGSIQEVAAATAPSKKRRLLLRPRRKGEGPRNGGGFFVHDHTESRRRRGRPRSSRWRRGVAAERHRDEATKASR

SEQ ID NO: 196470 - protein, 130 aa, Oryza sativa
  Clone ID: PAT_MRT4530_92318C.1.pep
LVFLFFVVFFFFFFCYFIFVSTLFFCQSSLVSLSLGEKAAQKLGDGGRPRPGRPNRAYTTHRGAGTKYRGGAAKKTPWGLERHTKGLLKRHGGCPKTRTSMVKKGGGGPPNKGGRKPLKPGGPHDQKGGG

SEQ ID NO: 196471 - protein, 113 aa, Oryza sativa
  Clone ID: PAT_MRT4530_92319C.1.pep
MAAPAAKERRRAQASIHSWASFQAVFVIGSKAHVCIDRSQREAVEKTPSPACSCFDRAYVHPIDRSIDPSRCRCGCALSRGLRGATRGRCRHRQGDIVPRISGAGERQHGSSQ

SEQ ID NO: 196472 - protein, 1078 aa, Oryza sativa
  Clone ID: PAT_MRT4530_9231C.1.pep
MEMNRPCQVDGRWWSFATRAVVLRVGMMGRADRYSGDGLRSLTGPIGGSRRREDVVGWLLALFPDLPLPPPPEATDEDLRAALATGRLLCALLRRLCPGALLDDASTDNVGRFRAAVERMGVAKFSASDLERGQMTAVVNCILALKDRFGSRGGDDHRNPGFLTRCDSEGGRKRVESKLQRMLTSPIMSGIPGVDKLTIATDFVMVFQLKQGGYADQLGGKYSDLLKSTSLDNAPTQSLLGVFNSILDESIERKNGQIPYRIACLLRKVILEIERRISTQAGHIRNMEKDKFGDKGQLAVEDMERLMKYQDDVVRLMKENEDLVRLLREKEDMVRLLKEKEDMVRLLKEKEGMINLKTVKAEETQRIEDEDKYRIIKEKDDALDRLVKEKEEMIRLLKEKDDVVRLMKEKEDLLNLEKGEVEGTTKMTDDNKDRLIKEKNDVVLRLTEEKEEMVRLLKEKEDIIRLMKEKEDMVYLEKGEVEDRKQMTDDIKDKLIKEKDDIVFRLTKEKEEIIKLLEEKEDIIILMKEKEDMVNLGKGEDEDRKQMADDNKDRLIKEKDDIVVRLTKEKEEIIKEKDDIVVRLTKEKEEIIKLLEEKEDIISLMKQKEDMFMSIKEKENKAELKKIADEDAARSIKDKAEIMRLMKEKEDGNNTILKLKKESETLRSSYEESCRLLESKKEDVARLLTDKENNDSIISELKKELEETKRLHEAHNAVFKDIQPLIRSVLDGYNVCIFAYGQTGSGKTYTMMGPEKATEKEWGVNYRALNDLFNISHDRRDTITYELGVQMIEIYNEQIRDLLGSGIQNTIQPNGLAVPDATMCPVTSTSHVIELMQTGHDNRAMSATALNERSSRSHSVVTIHVRGQDLKTGNTLRGALHLVDLAGSERVDRSAVTGDRLKEAQHINKSLAALGDVNPDVSSYTETLSTLKFAERVSGVELGVARSNKEGKEGKDVKELMDQLSLLKDTISKKDEEIDRLQLLNSSTRLKPTRQADSVLKHSSSSPGITSLGKGTSVGSGAASDLDNFSDTSDRQSEAGSMLSVDPEISGLADVDSDGRLSDASDGISMGAEADSSD

SEQ ID NO: 196473 - protein, 415 aa, Oryza sativa
  unsure (1)..(415): unsure at all Xaa locations
  Clone ID: PAT_MRT4530_92320C.1.pep
MAEMGAAAAAAVPVIPEDVVIEILARVPDPTSLFRCAAACKRWLRLIADQALLRRRWPPGTRVPSLLGFFAQRHQIQANAXGSSPSSSRPARRRSSQRRAGAQAKPLAARGGLLLVRVLPSPSPAPQNALHLCVCNLLTGSHDVLPPLPMDCFEKDGARGYAILTAADHRVSRNPSGGYNTFFQVLLLSIHHGNHQVYLHRFSSAAASAAAAAVIFEISWSTPRNCSEQIRGYVWGPSGNRVAAVSHGGAHWLFSWGEESLYTLDVSIDTDNIGATNIPIDPPPTVFHQSWLYVSVDERLSLLYLCDNKLHIWTKLETQESGRLLWNCTQSICVGVKMGLFGTESLSTVCIGEESGTMLTLYLSDPNSAYVLDLPSGSITSVDDWKRWFNYMTAVSFEINWHSFFLTRLGDFWYA

SEQ ID NO: 196474 - protein, 82 aa, Oryza sativa
  Clone ID: PAT_MRT4530_92321C.1.pep
TKEDIKGSYNLISLHDAHRAFETGRGKTDLVSMRFDQLMHRDALYLGTTREDILSIEKTPRQLQIDRPSDRLQLSLSEAALH

SEQ ID NO: 196475 - protein, 288 aa, Oryza sativa
  unsure (1)..(288): unsure at all Xaa locations
  Clone ID: PAT_MRT4530_92322C.1.pep
MPCPAASLSPPARSRRKGGRGAATGLPPPPSPSSQIWRGGREGGERPPAALRLTMRPAAGLPHPPSGQIWRGGREGSCRRPPRAGPPCAAVCLCLAIKASVLGDGVKLEDVAVDLPLLVNYCGRNVPEGFKVRARRSPSTTSAKFRRQPATRDGGARADPRHSSRLPWSDGLLPKLLGVIFKQLNCLVDRIGFTAVYRPWRTAAAFVNALHCGLPWLLLPSHDTSSYFSLYSDSXGFTRHLSLLEGVWDTCLCGAHDGGWVTVAVDPXRGEDSRPAVNVFTGVRVIHN

SEQ ID NO: 196476 - protein, 64 aa, Oryza sativa
  Clone ID: PAT_MRT4530_92323C.1.pep
ISREFHIWFPPCFFGNPEDQRRKPGLSFPNYPRWAALIRSTNHSYAFRGLKPYMDYLHRTLFTF

SEQ ID NO: 196477 - protein, 74 aa, Oryza sativa
  Clone ID: PAT_MRT4530_92324C.1.pep
MANGYTHPWPNACRKSSPANEPALWVTSGFGQRVTSGFGQDLAQGGVDQGDGTAWLERQLEVEREVERGDGSRA

SEQ ID NO: 196478 - protein, 69 aa, Oryza sativa
  unsure (1)..(69): unsure at all Xaa locations
  Clone ID: PAT_MRT4530_92325C.1.pep
FQAIPKVDSXEGXXQNXRGARXXPXRRPPRYPXXRXRRRRWWREGEEGEHAARGGVSEDNVTVGALLLT

SEQ ID NO: 196479 - protein, 143 aa, Oryza sativa
  Clone ID: PAT_MRT4530_92326C.1.pep
GETPPARGYKGRKEGGPHNPPGWAIFGKGPWGRPLFLLTPPEKGGFSPTGLIWGNPRFFHARVFKTPAREKQQGVPNPKVFICRPGELKLGPLKSAPPLFLAPFFNFFFFYIWSPFFFFFFFFFFFFFFFFFFFFFFFFFFFF

SEQ ID NO: 196480 - protein, 180 aa, Oryza sativa
  Clone ID: PAT_MRT4530_92327C.1.pep
MAAEFRRRGDDPDDVYGTVARVLSYIHYTLPSPPVSATTRLCALTPHDVVDRISTLPDELLSKVVSHLPVKDVARTTAGARYGALCRSRRMSSPPRRTAAGSPPIHRPLRRRPAPWPAWPVPPSSLTSGPVDGCPIAWCSLPEPPHHLLGPSSSTSYALSRCKQKRRHRGCGIGRLRHQP

SEQ ID NO: 196481 - protein, 109 aa, Oryza sativa
  Clone ID: PAT_MRT4530_92328C.1.pep
MAVDAMFGSVAVALLAVVVAAAALRRWRRRRRRGGGRPLPGPVALPVVGHLHLFRRPLHRTLARLAARHGAAVMGLRFGSRRVAVVSSAPAAEECLGPHDLAFANRRGP

SEQ ID NO: 196482 - protein, 33 aa, Oryza sativa
  Clone ID: PAT_MRT4530_92329C.1.pep
LKQNVHLWGVISKGDVHSLNLINEVWLTAINKP

SEQ ID NO: 196483 - protein, 58 aa, Oryza sativa
  unsure (1)..(58): unsure at all Xaa locations
  Clone ID: PAT_MRT4530_9232C.1.pep
KKNIGGAPKYLFGKFKALXFFVGESKHNKGGLVFAYXKGGAPDPPFLYFFYGVKEVKF

SEQ ID NO: 196484 - protein, 100 aa, Oryza sativa
  Clone ID: PAT_MRT4530_92330C.1.pep
SRLLQPRRHLRPRLRVVKCCAGRVSPSSKDHRRRRSLAGRLHRPRAVSAAPVRRCRSHASSRGGKDPSSRCPVLVLSVSPHARRVVVDPGTHVPVSVVVH

SEQ ID NO: 196485 - protein, 120 aa, Oryza sativa
  Clone ID: PAT_MRT4530_92331C.1.pep
RTCQRDVRGADAPVGGQGEGRGGARRGARRAQLRLLVRGAAARLRPPPLNPSIEPFNHPTRGKLLPKDSTFGFSPSSFFLFLFLASFVNALIERVDFFCFLFGREGVGRSRLEPVNYSTG

SEQ ID NO: 196486 - protein, 56 aa, Oryza sativa
  Clone ID: PAT_MRT4530_92332C.1.pep
MACGCAPAPPGPLRRFAWATGQPHRSTGRGATRTRRRERCVRVPQRILTDYGGKVV

SEQ ID NO: 196487 - protein, 105 aa, Oryza sativa
  unsure (1)..(105): unsure at all Xaa locations
  Clone ID: PAT_MRT4530_92333C.1.pep
AGGGGAXLXTPXAAXVSAPAARAPRXXRIWXFXLXFWERXRRRXXLFPPGTXEXTRXXTXPXGLVEEAGGEPHXPPGGLVHSLXXXCXESGAGFYXSCRILQPRG

SEQ ID NO: 196488 - protein, 692 aa, Oryza sativa
  Clone ID: PAT_MRT4530_92334C.1.pep
MSKPADQPPPSDMEVDAAAEEKPLVRFSINVLELMREAQMQHGLRHGDYTRYSELGILHSTVDLALKGKCNVYRRCEKSKMSIIFLTPPFKCNDAVTLHLKGCGRVGADDDDERQHTCGGRDWRQARNNHDEWVVTATDDDVHDLQEILYRTSQKVIQVSQVSAWPWLFPSPSKSIYYYRHICRFRKAVKWATLFSHLCSLKGDSRTSLEAEAYASYMKGTLLFEQEKNIEAAMTNFKNTRAVYEELGKYGSIENQLLCRQRIEEVEPMIGFCSRKLGGSALQAHELLDLEKEGPAYDLFKAKIEVRGQMGAVLSETRSQQAASMTEFSWLGRRFPITNAKTRVSILKAQQLEKDLNGANTESVPADKKLGIFDKIFSAYHDARSCIRNDLASAGNAENIRDELNGLDKAVSAVLGFRTIERNQLLVSIAKSKFTKHRDEKNEKITKPEELVRLYDLLIQNTTDLTDLISSGRDKNKEENTFIQEYELKSLAFRAERCFYLAKSYSSAGKRAESYALFCHARSITDSALQQLTNSPDKWVWNSGRNSGGNGHNRSISFVAAMIAGTIYWQRKALVQDLKALSDSCRSNSFIEHATGIMEEENVPERLSKGVSTLSLGERKQAFLLDMLESYESALGESNTKTPCRIARFPPPFQSVPCNPIVLDMAYNAIEFPNIENRMKKEKKGLLSRFWG

SEQ ID NO: 196489 - protein, 453 aa, Oryza sativa
  Clone ID: PAT_MRT4530_92335C.1.pep
MATKVVDKLTVAASPPADGGVLPLTFFDVPWIFTGPVERVFLYTYPHAVEHLAAHLLPSLASSLSAALHRFYPLLGRVRPCSSGGGGGGYEFCSTGGDADRVELTVAESGDDFEELAGGGPMDVGRLYSLVPRLPRPEEGSSELAAVQVTVFPGKGLAVGVSIHHVACDDSSFMHFVKTWAANCRVASGGDVDAVPPPPPPFLDRGVVADPNGLAAKTLDQMRQLANSGPPPPPPSGPPPKLFMASFTLTRDSIDKLKQRVTASGGGGVHCSAFTVACAYAWTCLARVDATSAARERAHLLFSVECRRRLTPPVPQEYLGNCLRPCFVEVDTAGLLGSGADGVVTAAVAIGAAIRGLDDGVLDGADGWFQKIVSLMPHRPMSIGGSPRYGVYDTDFGLGRPAKVELLSIDKTPGTVSMAEARDGHGGIEIGVALPEADMARFSSCFADGLKQL

SEQ ID NO: 196490 - protein, 83 aa, Oryza sativa
  unsure (1)..(83): unsure at all Xaa locations
  Clone ID: PAT_MRT4530_92336C.1.pep
PTHRXLLAMAVAARPPPWRASWSYASQPWRGSTARXRTPRPXRRRXXXTXPRKPSNXADCLXYXTXGKXXPSRPSNHXXGEXK

SEQ ID NO: 196491 - protein, 131 aa, Oryza sativa
  Clone ID: PAT_MRT4530_92337C.1.pep
SPPKSKQDPAGMALAREGTAALGLDSRFVSKVFRRDPKWDRSREEQVISRAHRMGATRPKFVETWAMRGTIEEQMLKLLQDSNACRQMVNKGTSSPDNEGARPPRSLHDFAESSYLAQLSFVKGFDPAEKL

SEQ ID NO: 196492 - protein, 76 aa, Oryza sativa
  Clone ID: PAT_MRT4530_92338C.1.pep
MSRRGDWVYENNGGTCVAIAGADYCVVAADTRLSVGYNILTRDHSKICELLYTTWFYSIAIKEWFVRMIHWDMNIG

SEQ ID NO: 196493 - protein, 65 aa, Oryza sativa
  unsure (1)..(65): unsure at all Xaa locations
  Clone ID: PAT_MRT4530_92339C.1.pep
LLNQGRIGQIMIADDMLLVAFIGFLLSMIGLXFIVSITVIMGWVLLTVTFILCGAFLLMDNGVAD

SEQ ID NO: 196494 - protein, 718 aa, Oryza sativa
  Clone ID: PAT_MRT4530_9233C.1.pep
MEKDKFGDKGQLAVEDMERLMKYQDDVVRLMKENEDLVRLLREKEDMVRLLKEKEDMVRLLKEKEGMINLKTVKAEETQRIEDEDKYRIIKEKDDALDRLVREGEEMIRLLKEKDDVVRLMKEKEDLLNLEKGEVEGTTKMTDDNKDRLIKEKNDVVLRLTEEKEEMVRLLKEKEDIIRLMKEKEDMVYLEKGEVEDRKQMTDDIKDKLIKEKDDIVFRLTKEKEEIIKLLEEKEDIIILMKEKEDMVNLGKGEDEDRKQMADDNKDRLIKEKDDIVVRLTKEKEEIIKEKDDIVVRLTKEKEEIIKLLEEKEDIISLMKQKEDMFMSIKEKENKAELKKIADEDAARSIKDKAEIMRLMKEKEDGNNTILKLKKESETLRSSYEESCRLLESKKEDVARLLTDKENNDSIISELKKELEETKRLHEAHSQQLETKAAQVSKELEQRIEEVKLMLDDSTKRRIELEELSETRIQFWKKKEVVIDQFVSLQVQNVQDLKLSSVSVRHEILNCQNKWSEELAGLGKSLKVVTNTAEKYHGALAENRKLFNEIQELKGNIRVYCRIRPFRPGEDDKSSSVEYIGDNGELVLSNPTKQGKEGGKNFTFNKVFGPITTQDAVFKDIQPLIRSVLDGYNVCIFAYGQTGSGKTYTMMGPEKATEKEWGVNYRALNDLFNISHDRRDTITYELGVQMIEIYNEQIRDLLGSGGVQKKYPFPPDLH

SEQ ID NO: 196495 - protein, 210 aa, Oryza sativa
  unsure (1)..(210): unsure at all Xaa locations
  Clone ID: PAT_MRT4530_92340C.1.pep
IFFGFLADTYWEKYWVIIIFLSIYNHGMLIPTISASILVHLHLFGIHCVAVYHGLYLVSFGTGGIKFCTSAFRADQFDLADLLETNKKCSSXFFNCYYFLINIGSQLSAIVLLXAWDNIGWGXQILMSLCIAVFVAGRRVYKXNKPDEESLVKSXFPMIFASVRNXHLQLSDDSSTLHELPLTTESNFKTHHTSEFRYLNCHQIQAAACW

SEQ ID NO: 196496 - protein, 80 aa, Oryza sativa
  Clone ID: PAT_MRT4530_92342C.1.pep
MAPIDRAVVFFYWRAPFGHTPVTKWQSKRTLPLCRNLANVTNSDAHRVPLTPPYKEQWSTGDQGLPYRLGRDYHHPAVVR

SEQ ID NO: 196497 - protein, 686 aa, Oryza sativa
  Clone ID: PAT_MRT4530_92343C.1.pep
MRAAWRPASGRRVALAAMVVLSVVVAAAMADDLAGDARALLAFRDAVGRHVAWNGSDPGGACSWTGVTCEGGRVAVLRLPGAALAGRVPEGTLGNLTALHTLSLRLNALAGALPGDLTSAAALRNVFLNGNRLSGEFPRAFLALQGLVRLAIGGNDLSGSIPPALGNLTRLKVLLLENNRFSGEIPDLKQPLQQFNVSFNQLNGSIPATLRTMPRSAFLGTGLCGGPLGPCPGEVSPSPAPGEQPVSPTPANNGDKGGNGGESGKKSKKLSGGAIAGIAIGSAVGAALLLFLLICLCCRSGRTKTRSMEMPPPPSSAPAVVAAGRKPPEMTSAAAVAPMATVGNPHAPLGQSTSGKKLIFFGSAAAVAPFDLEDLLRASAEVLGKGAFGTTYKAVLESGATVAVKRLKDVTLTEPEFRDRIADIGELQHEFIVPLRAYYYSKDEKLLVYDFMPMGSLSAVLHGNRGSGRTPLNWETRSSIALAAARGVEYIHSTSSSASHGNIKSSNVLLNKSYQARLSDNGLSALVGPSSAPSRASGYRAPEVTDPRRVSQKADVYSFGVLLLELLTGKAPSQAALNDEGVDLPRWVQSVVRSEWTAEVFDMELLRYQNVEEQMVQLLQLAIDCVAQVPDARPSMPHVVLRIEEIKKSSERLEGRDPQQQASNLEAGDDQTSKPESAEGLNPFAP

SEQ ID NO: 196498 - protein, 60 aa, Oryza sativa
  unsure (1)..(60): unsure at all Xaa locations
  Clone ID: PAT_MRT4530_92344C.1.pep
LRSTTLLKRGXNNSKTEYNHRTQQATPMMQTCKGIQGQFVAICIKAVVKHFIEKKGKTVD

SEQ ID NO: 196499 - protein, 125 aa, Oryza sativa
  Clone ID: PAT_MRT4530_92345C.1.pep
PARPGSRLPPSLNPQKNTDSKRQRRRRDARAMGVTKEDVEAAITSSLSPSSLVVTDTSGGCGASYEIEVVSEKFEGKRLLERHRMVNTALAPHMAEIHAVSIKKALTPAQAQPQPEPAADKAPQA

SEQ ID NO: 196500 - protein, 90 aa, Oryza sativa
  Clone ID: PAT_MRT4530_92346C.1.pep
MGDSQYSFSLTTLSPLGKLVQIEHAPPDVGSGQTSLGIKAANGVVIATEKKLPSILVDETSVQKIHALTPYIGVVYSGMGPDSRVLVRKR

SEQ ID NO: 196501 - protein, 99 aa, Oryza sativa
  unsure (1)..(99): unsure at all Xaa locations
  Clone ID: PAT_MRT4530_92347C.1.pep
AXLAVGLAPGRXXXXAPCXXXRLAXXXPLLWXXXXLGAAAVXAGAXFRAPVXPXWPAPFPLSRSSSPPPRLPCPPPLLFWCVLLRVLCWFFPPAFVPPP

SEQ ID NO: 196502 - protein, 521 aa, Oryza sativa
  Clone ID: PAT_MRT4530_92348C.1.pep
MSTEALLAGGGGGGGGGEVKRRVSIDDALAWHAGEFGRWQLRHFVLVSSAWLLEALHTMVIIFADREPAMVCAAGDGRCGDRCAGAGAAAGTGWEWASGRASSTVSEWGLVCGERYKVGLVQAIFFAGCMIGAGVFGHLSDSFLGRKGSLQVVCVLNGVFGMLTAMAPNYWAYAALRLLTGFSAGSVGLCSFVLATEPVGPSRRGAAGMSTFYFFSGGIAALAGIAALFPTSWRMLYVVTSLPSLVFVVAVLPFVSESPRWYLVRRRADDAMRVVRAIASSNGRSIPDDVSLKLDDEGDDDNGAGAGKVVDSSASASGSIIDVFRSRTTRFRLVLSVVINLLASVVYYGLSLNVVNLKTNLYVSVLVNSLAEMPAYLLTALLLDRFGRKPLAIGTMLLSGISCSAGSLIAGAGAMRVARLACGVVGIFGMAATYNLLFIYTAELFPTAVRNAALGCTSQASQMGAILAPLVVVLGERVPFALFGVSGLVGGFLVFCLPETKNKPMYDTMAGLEEGEKTLLK

SEQ ID NO: 196503 - protein, 257 aa, Oryza sativa
  Clone ID: PAT_MRT4530_92349C.1.pep
SVTCITMTSEDGDISALLSEPSIPEEQPEASEFDDVVPAILESIKSSEKAFKPSPEEAAWADSCFVQTSELSDSDWGAMKHALLNALEKPTEIPNNTSEIVHEEGSHAILEVKPHSLPAEIVSQHDDMQMEQKENNDYDTGTTEASEVANVIRGTNEHGKQMDGYTARPEDGDELSSSEVLEQTESRETIFKVWDLDVPFSDEDELELIKDLKKLLKDNPQESEFRPPSGTAKTLSQIAVDDLVADLSDLSLQQTDE

SEQ ID NO: 196504 - protein, 147 aa, Oryza sativa
  unsure (1)..(147): unsure at all Xaa locations
  Clone ID: PAT_MRT4530_9234C.1.pep
FFFFFFLIIYYLYLFXHRQQQQCREGCHTQSGLIYXMGVGAHXVADKHPTFITNRGGEATYXPHTHTLTTPNQPAGPEGXRQHNNLFXPPHHFIXSHHTHSYVAQNQGVGGLXEGGAQHTLFITLSXFGQLSPHSAAXWWTPHKTTN

SEQ ID NO: 196505 - protein, 103 aa, Oryza sativa
  Clone ID: PAT_MRT4530_92350C.1.pep
MAERDDAVRTAEHQVMRATADAHEEHGGGAAIDASCDHHHLSIHEEEVNMVAGAWIRPPQSLHEEEVVKMEVTLLADNAHLDAASSELSRGGGLDPASLELAQ

SEQ ID NO: 196506 - protein, 44 aa, Oryza sativa
  Clone ID: PAT_MRT4530_92351C.1.pep
MAAASFDGAGVGALLSGSLQPDTAIPYQCRNRNNLVDPKGKKIR

SEQ ID NO: 196507 - protein, 113 aa, Oryza sativa
  Clone ID: PAT_MRT4530_92352C.1.pep
MAKAGGGMIWATAEDLARSRPVVLSLYRQILRALNSPALPLGHAARLAKKAECRAIFIFAAEERSIHNIRDLLDAARHTLGLLHRGRSRGSKLTYACMRRHSSSIVSPNHSCL

SEQ ID NO: 196508 - protein, 559 aa, Oryza sativa
  Clone ID: PAT_MRT4530_92353C.1.pep
MPAVKKDDVRTHRPVGMRKGRWVLGDITEVLDRNSWRLGKIAKVLKDDYFVIREHEKLQQNYGFTFRTMKSYREIILLEYCEVSSPAKPPFSLVSGASRCRIRRRRLLPGPLSDPEEDAPPYGSVVLGGTFDRLHDGHRRLLKASADLARDRIVVGVCTGPMLAKKEYAELIEPVEKRMKAVEDYIKSVKPELVVQVEPIEDPYGPSIIDDKLDAIIVSKETLNGGFAVNRKREEKGLPLLKVEVVDLLSGGAEGEKLSSSALRKLEAEKANQQEGAASKELMRYNSLLDFCSSVVHGPLHIDQEAFWFYRFLSIVYDHVINPGHWTEDMRDDALEPAELYHHGLKVVDVGGGTGFTTLGIVKHVDNENVTLLDQSPHQLEKARQKVALNGVNIIEGDAEDLPYPTDTFDRYVSAGSIEYWPDPQRGIREAYRVLKLGGVACLIGPVHPTFWLSRFFADMWMLFPKEEEYIEWFQKAGFQDVKIKRIGPKWYRGVRRHGLIMGCSVTGVKRSSGDSPLQLGPKAEDVEKPVNPFTFIFRFVMGTICASYYVLALVYDRS

SEQ ID NO: 196509 - protein, 49 aa, Oryza sativa
  Clone ID: PAT_MRT4530_92354C.1.pep
TSGCLQHDVGYGDGATCWGKLVNAPHPPVRADPEHEGPDAWVQPVQFRA

SEQ ID NO: 196510 - protein, 67 aa, Oryza sativa
  Clone ID: PAT_MRT4530_92355C.1.pep
DISPAHYLLAHPTGENGTSRQSQGGKRHALIALCLMPNQYRSKNIHHSAIGARLIIWNGDIIPLWEL

SEQ ID NO: 196511 - protein, 112 aa, Oryza sativa
  unsure (1)..(112): unsure at all Xaa locations
  Clone ID: PAT_MRT4530_92356C.1.pep
RAPRGGCSFFALKPPPASRVSPRAGKISFFXRAFPGDVVANAFCFSREEVWGLRPPRGVGFGVFPPGPAPKGSPGIFGGAYPRNVLLGLGLLGGVFHLFFTHKRGPVVAALL

SEQ ID NO: 196512 - protein, 60 aa, Oryza sativa
  Clone ID: PAT_MRT4530_92357C.1.pep
MASGTGSRGKAAQEHGSHGVAPAHGRARPPVIPAATFLLTLPIEEYAYVRTSVGAKARRP

SEQ ID NO: 196513 - protein, 39 aa, Oryza sativa
  Clone ID: PAT_MRT4530_92358C.1.pep
HILQRSPSPAYVPVTRPNSNSTPVTLNIIFAPTRPRVHA

SEQ ID NO: 196514 - protein, 92 aa, Oryza sativa
  Clone ID: PAT_MRT4530_92359C.1.pep
MSSELNPQLASLGHMGVEFPAHLLKLPRLKVTGQRLARTGRCQPYIRAGEGGGREGVPGQFNLYVLDLGESATEDHRTMTKTVSGISDVDEG

SEQ ID NO: 196515 - protein, 132 aa, Oryza sativa
  Clone ID: PAT_MRT4530_9235C.1.pep
PAILTNTSSPSTHYAAQLAFHAPISSFPQTPKKTEPNQVAKKKSGGENTQHPLASIPGTCLFLKTARAHSSPGMTALRPLIFSGPNLSSYHLRPLTALGSMETNSLNRNKKAGCRTTRRPSSSPNHSHHSRK

SEQ ID NO: 196516 - protein, 122 aa, Oryza sativa
  unsure (1)..(122): unsure at all Xaa locations
  Clone ID: PAT_MRT4530_92360C.1.pep
MAEKFTNRLHIFNGVDYDLWKKKMESYATSQSCDIXIKVVQCYEILARIDTPAHKIDFENNCKARNIILNGISHYDFDRVPFVATTNEIFERFNCYRTIVTNDEKCWSKVASQCLPSLGARS

SEQ ID NO: 196517 - protein, 122 aa, Oryza sativa
  Clone ID: PAT_MRT4530_92361C.1.pep
MEAAAGAGAGLAEAANGGIESSAADPSTSGTASRLSVHRIAGGGKAADIILWKRGRVTIGVIFGATMAWWLFEKSGLSFLTVCSDVLLNLNVVQFIRIKVAGLLNKQPRPLPELVYQRNGLA

SEQ ID NO: 196518 - protein, 289 aa, Oryza sativa
  Clone ID: PAT_MRT4530_92362C.1.pep
MENNSPLSKKLKLNNEHADSAVPHQASPATAGNVTVCDPPAKRNILSSVSHSTPAAVADLSMNKPPQWFVQFFADFENRQEARIESLLDKKLGDLTFKVADHEEKIKCLSFEVDNMKDAVQALQIENGKLESKLDDLENRSRRNNLVVFGIQESDNKEDCRKVIQDFMRFAEVPEDVIKDIQRCHRTPSFRPQVKENSQQYPRRIHLGFGAYTAKERARKACIKKLKATTSLYQDHKVFVAEDLSQRVLQLRKAKAGSFKRLKEEGKRPFFVFPDKLCHRNPDGKMIIA

SEQ ID NO: 196519 - protein, 35 aa, Oryza sativa
  Clone ID: PAT_MRT4530_92363C.1.pep
APPHGIIGPALRSCSCLRCLHEPTPLVLASHQATH

SEQ ID NO: 196520 - protein, 112 aa, Oryza sativa
  Clone ID: PAT_MRT4530_92364C.1.pep
MLMERLKDSYAVTNHWVDLFFGDDQASRAVVSVLQTYKRAATPTAENSVGTGFADTFLVAKHDFCLHNGRTVNKKRKPQMNMSLAVRACDKSLDGSFFGLEAAAEEEAPDML

SEQ ID NO: 196521 - protein, 105 aa, Oryza sativa
  unsure (1)..(105): unsure at all Xaa locations
  Clone ID: PAT_MRT4530_92365C.1.pep
GRGRGRHLLLXLRLRRRVRVLLLEEHXPAARXEERAGRRRGRRGKRHGGLALVAVEERXRXRVGGGRRRRRGRRGHGSSSRSLSAWSLRPLAXPIYCXXXIHRRX

SEQ ID NO: 196522 - protein, 56 aa, Oryza sativa
  Clone ID: PAT_MRT4530_92366C.1.pep
GRGVSLPIQSKDVAHAHSLGLHSSITSCYYPRARRSDATLDRARSAGTRKAVVDLM

SEQ ID NO: 196523 - protein, 164 aa, Oryza sativa
  Clone ID: PAT_MRT4530_92367C.1.pep
MGEGGGILGEAAYLETAAQAVVVLDPGGGGGEAVAKRSRRSAVVGDPGVGEVRVEEVGEVDGRTAERTIGGEGGGGGGGGEGGDGGREGSGDGGGEGGGEVEAATVKMAVERTAEMAAERAAEMAAERAEERLRRRRWRWRWRGRRRWRQRGQRRWRRRGRRRG

SEQ ID NO: 196524 - protein, 170 aa, Oryza sativa
  unsure (1)..(170): unsure at all Xaa locations
  Clone ID: PAT_MRT4530_92368C.1.pep
MQFIHQKKGGIGEGGGILGEAAYLETAAQAVVVLDPGGGGGEAVAKRSRRSAVVGDPGVGEVRVEEVGEVDGRTAERTIGGEGGGGGGGGEGGDGGREGSGDGGGEGGGEVEAATVKMAVERTAEMAAERAAEMAAERAEESGDGGGEGGXRLRRRRWRWRWRGRRRSRE

SEQ ID NO: 196525 - protein, 87 aa, Oryza sativa
  unsure (1)..(87): unsure at all Xaa locations
  Clone ID: PAT_MRT4530_92369C.1.pep
MFPSAGSGRRRRLPLAPASCPPLRFCRRPDHEDRERGRECLAAAVLAAXQRRGGRGEERGRGGTACXSPPASPPGQGDRARWLVLIL

SEQ ID NO: 196526 - protein, 80 aa, Oryza sativa
  Clone ID: PAT_MRT4530_9236C.1.pep
MDVPGEDVDDRGETDGDDSRARHRGAVRRPTLCPRQHRFCVTPGIEGVRHDGRGGLLASSPQLANIIDVVWVRSCGTEKG

SEQ ID NO: 196527 - protein, 426 aa, Oryza sativa
  Clone ID: PAT_MRT4530_92370C.1.pep
MANLQPHPLWFIPPGQHLHPAGPNHRRRVDTVNFIPTPMRHEDFVLAIVHPALPEDLWDEHRAEISGFFEQVSHVRVAASFPHPNVVALFQIDSPDQRDALVLGLPINYDGNHEGPVDPNVEDAPAWQFGNEQQQHNQQNPNWGAWEDNQGGNQVDEHLMPLVPQLLIDLQASSASSLSTYPSASSASIADSAVSISTDEQALTSPDKSIVVHKDSVHADLYNYLCERFPHTMFDKHFTQDSSFWAALSIGPYMPGESSSSRQHLGYSQGMESELPVLMLTHLVIVPPVVHVLPAPVKSPKIRIDTPITTVGLRRSSRLSALNDGHKDEFLTQPDPNQGIGKPRGKSVKKLKQVAKEVGLLFSGCDLQDSDFEEGSTTEDASGAPADCSCLFCKKMAVDLCGASAQEVSQIDLLKTRAPNESDGNN

SEQ ID NO: 196528 - protein, 287 aa, Oryza sativa
  Clone ID: PAT_MRT4530_92371C.1.pep
MASPRAQLSRQKGVGSVDVRIEQSYQGCGAGQKINFESDYISLWELKQEVAALVMPTRELTATSFINPILKVDQNKHKIDEKSVSDIHDKYWLANIINRAYLLAIFSSNFCAVIFLSMEAMQEQHSKRSILGTEAAEDDSLMKSYMLLLSANADSGNLTRSFALPQPMWDYSTISPFTHWCPSLNPSPPLQQSPPSHIGVPQPFTAPSPCIDPTEQAHGPSARTVIQLDDVARFRNQRQYNSSQSYMLIKDGWKLQSHFLMLIIDCRLQASLLEGLSSCQGNRCESA

SEQ ID NO: 196529 - protein, 56 aa, Oryza sativa
  Clone ID: PAT_MRT4530_92372C.1.pep
LQRARANSKIVEENKNLPKEQRKPLLKRVAAQPRPGYTLKLSNIVDVVPPEFVETA

SEQ ID NO: 196530 - protein, 233 aa, Oryza sativa
  unsure (1)..(233): unsure at all Xaa locations
  Clone ID: PAT_MRT4530_92373C.1.pep
MSSVVFASARLNATNQSYLPVPITLATAYKMQHGDSLRLKTSHGLKIKIKIKEVASTLYMTTXWKEFAEATGLETGETILFWMSSQSKARVMILNRQCLIRCPVKTPSTTSSDKNRSLSPSDQLTRASTFDHASSSKSVPFLRNGTGSNKRXLADTSFCHQIKLTAELKSYIKEIADCLEESNKFYVVRMNRTFMEQDRVYFATEFSKKYIVNLVRGKTANIRVQIAGRPSTT

SEQ ID NO: 196531 - protein, 87 aa, Oryza sativa
  Clone ID: PAT_MRT4530_92374C.1.pep
MARGAEGARRLACRRRAAMRAYMGCYKHLEHLVHKPREARCSMTTVYVPVFGSAPSWTMEEVVCSMPRMAEASERQRVVSANESMAA

SEQ ID NO: 196532 - protein, 31 aa, Oryza sativa
  Clone ID: PAT_MRT4530_92375C.1.pep
VGCGRVHPIIENILDKCGVVAPNDVGLITRH

SEQ ID NO: 196533 - protein, 64 aa, Oryza sativa
  Clone ID: PAT_MRT4530_92376C.1.pep
MEDLLDTEIGKHDYDWLLTPPGSPHAPILEVVEKAPSSDQQQVISCQCKHFLCLFATYNSKQED

SEQ ID NO: 196534 - protein, 35 aa, Oryza sativa
  Clone ID: PAT_MRT4530_92377C.1.pep
MSQLTLTGGPLAVVQRGKLPRRTLVATSASRAWRN

SEQ ID NO: 196535 - protein, 124 aa, Oryza sativa
  unsure (1)..(124): unsure at all Xaa locations
  Clone ID: PAT_MRT4530_92378C.1.pep
MCQLSLWVIPATTANHWILQQRQPSSLDHAHGIRGSPPHIAAPLSRQPPTRAHTHHAPSLPLPPFPAPPPTAAPPPAPLPDRREPPXRPPPPNTNLAAQSRVPIPSVVRPPACSPSPSPGPLHR

SEQ ID NO: 196536 - protein, 237 aa, Oryza sativa
  Clone ID: PAT_MRT4530_92379C.1.pep
MSTSTIAKTTSAQNSRPSTPTSRPRIMSNSSSSTSSAASRPSSSSGRTSTISRTSSSTSTVPSVSRSSSRSSTPSVGRIFGSNNITSIGRPVTSNGRSSAPSSAPSSRPSSPNSRARAPVRPLDIPDFPSETPPNLRTKLPQRPLSAGRARPGVGLGPKSAPNAEQVRSAPVKKMTVPAITRSKFPDAPSRVSSLTNGHQSRQSEGSAVEGQHTKPLRSITGTDNGFGRTISRKSLD

SEQ ID NO: 196537 - protein, 146 aa, Oryza sativa
  unsure (1)..(146): unsure at all Xaa locations
  Clone ID: PAT_MRT4530_9237C.1.pep
WCCRHCSRRGRVSGDFPTNQRRRRGRGCTYEAEREDGAAGRHSGEEGEAAGCRPAPEREKEKAGRGGVATGRRGRRLKRXNAKSWFHFIGEEREPATGGAGNGGGVCGRRPWKVAGVGASVPGDWGHESRGNXGGKREEGKGINSP

SEQ ID NO: 196538 - protein, 80 aa, Oryza sativa
  Clone ID: PAT_MRT4530_92380C.1.pep
MASPGLLASSPSPLCGLGGGVIIRKSGAGSGIALALQLRRSGAATMSQVLSLPSPSHSQMHIRSVVDALPSTDSRLHHGT

SEQ ID NO: 196539 - protein, 225 aa, Oryza sativa
  Clone ID: PAT_MRT4530_92381C.1.pep
MEDLLDTEIGKHDYDWLLTPPGSPHAPILEVVEKAPSSDDIRQNLGGIRGASLFPPSIRSAGAKVRSARMSDPAHLSLNGDCHFTDNGSINGHFSGDSNGTLSNNGGSSTGSPDRESIGTKETLSELDLYTTARYEALLLREDITNTNWLHNVDDKSDQSPVFDHRFEPLPEPFGAYEGLYSEAAGGPYEKLYWSLLLGFPAITVLKMKRGKKSKNAPIGTLFSG

SEQ ID NO: 196540 - protein, 137 aa, Oryza sativa
  Clone ID: PAT_MRT4530_92382C.1.pep
MVMLEEAVEEGILPSRDLIGWRGATGEEFPTLNTDDIMVFLPFFRFGLGLPPYNGHAPGVKDCWYTLPSRDEMDQVRGVLRGVRLLIDAGLTCNFVTWRIQPLKSRVHPVWEYLGKDDPTRESNELIDKDQASERLN

SEQ ID NO: 196541 - protein, 579 aa, Oryza sativa
  Clone ID: PAT_MRT4530_92383C.1.pep
MEDLLDTEIGKHDYDWLLTPPGSPLAPPPGGGEKAPSSDAPKRITTRSSSTTRASRLSIPETENGHSTVPTRPARSNSVSRPSVQSTLISSNNRSSVVNASISSVCSPPTTPSKRTSTLSSSKPSVPASRQVPTRPSTPTKTRPCTPVKPRPSTPVKPRPSTPNKTRPSTPVKTRSSVPNTMSTSTIAKTTSAQNSRPSTPTSRPRIMSNSSSSTSSAASRPSSSSGRTSTISRTSSSTSTVPSVSRSSSRSSTPTRQPITRSSAPLAGHSPSVGRIFGSNNITSIGRPVTSNGRSSAPSSAPSSRPSSPNSRARAPVRPLDIPDFPSETPPNLRTKLPQRPLSAGRARPGVGLGPKSAPNAEQVRSAPVKKMTVPAITRSKFPDAPSRVSSLTNGHQSRQSEGSAVEGQHTKPLRSITGTDNGFGRTISRKSLDMAIKHMDIRQNLGGIRGASLFPPSIRSAGAKVRSARMSDPAHLSLNGDCHFTDNGSINGHFSGDSNGTLSNNGGSSTGSPDRESIGTKETLSELDLYTTARYEALLLREDITNTNWLHNVDDKSDQSPVFDHRFEPLPEPFGPL

SEQ ID NO: 196542 - protein, 604 aa, Oryza sativa
  Clone ID: PAT_MRT4530_92384C.1.pep
MEVPELVKLAFARVQRVEPEHVGKIFGVMLLREPDEDELVQLAYGPEATLLAKIEDTKAALTVIYARCSAAAAHGPPGGGGVGVGGGGGYHQQPQQLFSRPPVPACGGVRHHYSPAAAAAAAFGYQVQSPQYWPDSPPAPPTKAAQQEFAPPGLVVDASAEGPYPLRGGQHVLDDNNFGGGYYYPAGEDAFPNGGGGGGGSPARARRSNGLSTRRPCHYFSKGICKNGQNCHYSHHQVYQDALAGAAINGDVYNHQPGGVTPGSLETLEMEITELLNSRRGQPVSIASLPTLYGEKYGKGLQADGYLTESQRHGKAGYSLTRLLSRLNKIRVIERPHGQHSVVLAEDAAKYMDFRGGGGGGGGDTGSVPASSHQIYLTFPAESTFAEDDVANYFGQYGPVRDVRIPCQERRMFGFVSFQSPETVSTILMRRNPHFICGSRVLVKPYREKSKCVDRTCVDNIKSMVPYCPPRFFEFDQELYTAEYDASRLMRKQLAEKREMLLEMERRRATVRRLESMPPQFAYFDCSIEDASPLHSLQDDSKQLDLMNPSLASPDPLEIVSNSQAPPTQAGNIYDDHESNQIELLPESPFAASAPAGNSISTII

SEQ ID NO: 196543 - protein, 420 aa, Oryza sativa
  Clone ID: PAT_MRT4530_92385C.1.pep
MVMLEEAVEEGILPSRDLIGWRGATGEEFPTLNTDDIMVFLPFFRFGLGLPADDFLRGLLHFYGLPPYNGHAPGVKDCWYTLPSRDEMDQVRGVLRGVRLLIDAGLTCNFVTWRIQPLKSRVHPVWEYLGKDDPTRESNELIDKDQASESKKWPEGAVTFISNPPLLGTSSKRRVDDPPSSSCSFKHVASKQPRTPGGQPVGPSRQRMPTAPLLRPLSSRVKRPPPGWIGAARAGTSGPEVAGQTTGDLGELGGDMTAATTKDATDQGTDGGIGGGGFVSYKRDIACAYASSPFSVASFSPVSFSSASLLHGLLLHRVLSRLHTTDPGRSRLARMRKSWKKFRVGSARCCRPSMSRPSKLPGSGGGKKGFDDAADKADCTTMYEAGLVLLEKMQKIVNRSTAKSEALRSVFDNITEIEQI

SEQ ID NO: 196544 - protein, 40 aa, Oryza sativa
  Clone ID: PAT_MRT4530_92386C.1.pep
MEDNSARLPARLYGWCPYRNIYVVVEYHPQATADLNIVWV

SEQ ID NO: 196545 - protein, 73 aa, Oryza sativa
  Clone ID: PAT_MRT4530_92387C.1.pep
MALLPLRRRHRLLAVVQLAVALWLAATSGYRCKLVVDGGHTPLHGRAGARSRCRRSARGRVAFGHRPLPDSLS

SEQ ID NO: 196546 - protein, 640 aa, Oryza sativa
  Clone ID: PAT_MRT4530_92388C.1.pep
MSSSLPSPLLFLLLLLPFPAAVRSQPAAAPAPQQQCPLNFTALRPFLAQPLPPDDSARCLLAVQSVRLLLALHLAATGSFVLPANSSCLPPLRAELPFALPSPSACGLQGLDALLASPGCANVSTLGDFDAAVPPSSRADMNASCNRDLTPVPDCTSCTTSLSKAAAAYLLPGSPNDGGNNVTGCVQYPFIYAGAAASPRGADDPATANCLYLLKVNSASKASSSVPGWVYGVVFGCVAMVLLVAAAAASWFLVRRRRRRAAAAALAKAAADSRSKRSQAMESISASTTLVQFTYDEIKAATGGFARESIIGRGGFGNVYKGVLPDGAEVAVKRFKNCSAAGDAAFAHEVEVVASVRHVNLVAIRGYCIATTEREGHQRMIVCDLMHNGSLHDHLFGAGECQMTWPVRQRIAIGMARGLAYLHRGAQPAIIHRDIKASNILLDDDFEAMVADFGLAKFAPEGMTHVSTRVAGTLGYVAPEYALYGQLTEKSDVYSFGVVLLELLSGKRAFISLGEGQNFVLSEWAWLLVRRGKTVDVIQEGMVEPGPTEVMEKYVLVAALCTHPQLHARPTMDQVVKILEADSASGPLIIPERPLPVVANLAEIERSASSSGSGQLFSPSGFRSFTHINEDAALESPKEE

SEQ ID NO: 196547 - protein, 375 aa, Oryza sativa
  Clone ID: PAT_MRT4530_92389C.1.pep
MEGEHHHHHQDHHQGHFQAFSLQPKDPPVLFPFVISRRSSSSSPSDSTTLSYGSDHHLTQQQQHQHQAMLEPQNMIGGSSAGIFATPFPTVKSIRDDMIERSQFDPYDTEKLQASCGLAKVVAGGKWSAVPAAKMKITRKMGEPSSGVTGGAATTVAPKKPRRRPAQAYEDHGHGGAMGQAFGVIRVCSDCNTTKTPLWRSGPCGPKSLCNACGIRQRKARRAMMASGLPASPNAAGPKAAAHSGAAAVAAAQPKVKKEKRADVDRSSLPFKKRCKVVQVEDHQTLPAATNAAAAAAMEETAESATVAPPPAPTTRGGTLVDSIGLSWSKTHAAATASCSFRPSPVAPGFAAAVQDEITDAAMLLMTLSCGLVRS

SEQ ID NO: 196548 - protein, 502 aa, Oryza sativa
  Clone ID: PAT_MRT4530_9238C.1.pep
MPTDHRPLSHVAAWVCDKPTTVRLPPRRPPPQGPAWPLASFGSSTPRAEGRRATSSSSWVVKSTLSDSSSHPGASPAGTVAVGTGHSALAPNALVLNDATTATGGGGGSSEPVVIPDEEDGEFTGEVEPVAKRQKKCTSKVWDYFIKYTDKAKNKVTGVEEQQRQQELQVKGEVQTFRYDPEVSLEKWYIAVIMHEYPFSMVDHVYFNEFIHSLRPSFEFKCRITTSKAILEIFEVRKRILYDELKSVSSRISTTMDMWTSNQNKAYMCITAHWIDENWLMQKRILKFIHIDGKHTGTRLANAFVKGVMSMNIEKKLFALTLDNASSNDKCAREVVIELNKLFNISKVPPLMCDGAFFHKIYPDKYEEEFKRVLAAIDKFFRAYKSCVARSSKPTAAGSSENSQPHGNTSLGHNEIEKFLYDDAAANKEDDINELDVYMKEKPIRWVDPTVLVCTKDWIRASRKGPFKDKIAIILDELDVQIEDKDGAKTDNDEEGQATNSV

SEQ ID NO: 196549 - protein, 92 aa, Oryza sativa
  Clone ID: PAT_MRT4530_92390C.1.pep
VRTVTNVGDQHDAVYKAFLEPPAGIEMAVEPPELVFSKDKKDQSFKVTFKATRKVHGDYTFGSLAWHDGGSHWVRIPIAVRNVIEEIYSNIS

SEQ ID NO: 196550 - protein, 176 aa, Oryza sativa
  Clone ID: PAT_MRT4530_92391C.1.pep
LLPPRHYPRLCLAAARAGRRKPRGRKNGGSGGFLFLRDRRVGAHDPDQLRGDDSCSDAGMELALEGLAAGVEEERDSVDGEVGQGDNGKVSLPDLASATRSGLLGVRHAHEPPLRCGCVDREARTWRRCSCHIQPSPIWIRPPRCGRATPKPPTVVCGCVEAATRTWRWQGEAGRV

SEQ ID NO: 196551 - protein, 1579 aa, Oryza sativa
  unsure (1)..(1579): unsure at all Xaa locations
  Clone ID: PAT_MRT4530_92392C.1.pep
MGRKKRTLNTAAAAANPTPPSPPAAGHPDAAAADGGAAVRAVCEKALAALQRGNHAKALRVVKDAVGKHGEGSPLLLRAXGTVLARYAAVLDKPVFRARHQRLALEAARKAVELAPDSIELAHFHAMLLYEIASDTTGYEAASSECNRGMAIQSPTDPAPHSLRLPAPDVEQVKAELSNLLQRSNMTSISLWVKNMNMGYTPEDKVRVFPIRRGGADDSSEVRLLPAAPAPRRPNEIKKANKTPEERRKEIEVRLAAMRLMEQQKHNATSASSSTSQSQSPGDEAPSSSCQSSVSGHRADRRKGGSRKAAASPVSGRMNQVREFWATVPMDRRLAFLSTSISELKSHYATAMHKEKDAASLVSDVLNEAIRFATRSGKWEFLVCGRCEEHFADAESHVHHAMEEHVGVLPPRLNDVVPEEIDDAWAEKLTGSTWRPVDATAALKILEEELADNVGSDRDKDSMSSDIWSTKDKSDTSDSSTSPHNEECESFGAVTREGDRKWPLSDDEERANILERIHSLFKILVKHKNLSLSHLNKVLHITMEELRKMHSASLLLNHSLDESPLCICFLDVSSLRKVLKFLQELMQASGLNDRNTDKDEEVADKDSFPKNRSNLEKVTLDSDSSLLILDGQAFEMRSDRDNVVADPFLSWLYTGPSVEEQLLDWNHMLDVRSDQCTHILHELEKEFSALQNSYEQKHDQLSSEEGLLAVDSLLCEEQRRRDDVDPYPFQGYEELLKKRQEQLELNAEELFSGCRSELHAISTILREVKTAPFRYDETFSGMTSNHRDYDGTEEDEWGFYDFEHSNDSVVQLVVSRLKEHVAMELNKIDARIMRISAVIEQLKLKLGPASVLDYRTIILPLLKSFLRTHLEELVDKDARERSDAASEAFLAELALDAKRNANKVSDTKQSHDKSKDKKKVKDSRKSKDLKDLSWSDQYLVRPDSVDEETSEQSLSTSDNYLNDQEEFRNRLRLEAEERKLEETLEYQRWIEEEAKKKHLAEQHRRTSPGSDGSACLRTDVNLNGDQDKHHCAQNNSHTHLEGINFGDFRFSEVPLQEEHSILRSCDSDLLQTKEKNHNEVHNGLGYPGTRPIASSDVDLIKPTVKVNGVWKNVEYTKATLKANGVGKNAENTKVPTIPSTQKSRRSTSQAHKKYIQGVTGTFPVDDGDDDTRPSIRQSGSPVSRWSSSGKAVDTANHSYQDTKQNQLPLLSYSHRVHGAHSAGRENSSSEKVDSSAIPSTNLYIEDDKRFKADLERAVLQSLGTSNEKEVYGTGLKNAAGEYNCFLNVIIQSLWHLKRFRDGFLKTSSLHKHVEDPCAVCALYDIFTDLSKASEEQGEAVAPTSLRIALSKSYPNSKFFQEGQMNDASEVLGVIFECLHKSYTSRADCQVKSHEINYIGSWDCASSSCIAHCLFGMDILERMNCQSCRLESRRLKYTSFFHNINASSLRTAKDMFPDHSFDDLLKIVIMNDHLACDPEDVLGWQNNKESVDDISGTLAGISTEIDISTFYRGLDQGSKHSLVSVVCYYGQHYHCFAFEDGQWVMYDDQTVKVVGNWDDVLVMCKKGHLQPQVLFFEAAK

SEQ ID NO: 196552 - protein, 109 aa, Oryza sativa
  Clone ID: PAT_MRT4530_92393C.1.pep
HNINARSLRTPKVLFPDHSFDDLLKIVIMNDHLACDPEDGGCGKPNHIHHILSSPPHVFTVVLGWQNNKESVDDISGTLAGISTEIDISTFYRGLDQGSKHSLVSVVCL

SEQ ID NO: 196553 - protein, 155 aa, Oryza sativa
  Clone ID: PAT_MRT4530_92394C.1.pep
MPTGRLSGNITQDWEPVVLRRTKPKAADLKSTRAVNQAMRTGAPVETVRKAAAGTNKAAAGAAAPARKLDESTEPAGLGRVGAEVRGAIQKARVAKGWSQAELAKRINERAQVVQEYESGKAVPVQAVLAKMERALEVKLRGKAVGAPAAPAGAK

SEQ ID NO: 196554 - protein, 369 aa, Oryza sativa
  unsure (1)..(369): unsure at all Xaa locations
  Clone ID: PAT_MRT4530_92395C.1.pep
APLHPLLPPPHRRRAPPRGDGSTPGCPTPTGGNPPAIRLVPGPPAVPPPPPPPPSPPLHAARGAIPPSPPTXPPPSRPPPPPLNPGSPYAALLTPPPPPRKRYPPPHRRPAPPPAKGTPPNPAMTPPTTPPPXPPYTPPSPASDPTPPPPXNSTPPTAPRSPRPLPPPPPSPEHDTPSSHPQPTPPHPPPPLPPPSSPPPPLPPPPPARPPHAPPQPPPPYSAALAAASPPRSPXPHPPSPVPGKPPPPPPPPRRRPPRSHGEPRPSPSSSPPGSGLAPRTPTPASSPTSPPPAAPRSARPPRPRRPRAAWRRPPPPPPAPRPATTPPLPPSLAPTLPISPSPAXTPPKGIGPPPPEAGPTDPHALYVA

SEQ ID NO: 196555 - protein, 99 aa, Oryza sativa
  Clone ID: PAT_MRT4530_92396C.1.pep
VDAGCWRPSRRRKAAGCSGDDGDAEAEGEDEGSSHFCPPRGDESPAQTRPTRAASQSGAARGGELEGDPAEVLSSSSSAAGDDDDDPFLPAGFVSTRPS

SEQ ID NO: 196556 - protein, 147 aa, Oryza sativa
  unsure (1)..(147): unsure at all Xaa locations
  Clone ID: PAT_MRT4530_92397C.1.pep
KFIRKPSGDEAGREEGVVVVVSGGXGGRRRHCVGKVGQPSAGSPSSSPPLAAPLWLAALVGSGVRRGVIAPGREEAGAPLVLXALGLGVTVVPAAACRFCAFGMDADSPRRPATGMAVNLLLGSSSRLLALSGLGLTPHLAVPPRRH

SEQ ID NO: 196557 - protein, 114 aa, Oryza sativa
  unsure (1)..(114): unsure at all Xaa locations
  Clone ID: PAT_MRT4530_92398C.1.pep
RPYLLQVGAGCQRPSRRCKTAGRSGDDGDAEAEGEDKGSSRFFLPRGNDSPAHTRPTRAASQSGAARGGELEGDPAEGWPTSPXSAVVVLLAAGDDDDDPILPASFVSAWPSSQ

SEQ ID NO: 196558 - protein, 161 aa, Oryza sativa
  unsure (1)..(161): unsure at all Xaa locations
  Clone ID: PAT_MRT4530_92399C.1.pep
PSGDEAGREEGVVVVVSGGXGGRRRHCVGKVGQPSAGSPSSSPPLAAPLWLAALVGSGVRRGVIAPGREEAGAPLVLGPRPGVTVVPAAGWRFCAFGMDADSPRRPATVPSDTPQVSGLIPWYQGLIPRYHPVSWVLGIRYRSISSWYLRYQVLGTNRYLR

SEQ ID NO: 196559 - protein, 890 aa, Oryza sativa
  Clone ID: PAT_MRT4530_9239C.1.pep
MEALVGQMDSSPTRKRPTGQHNRQQPAHIQKAHQTKCQAQTLAFTSQFRLGQNAGRQTARQHRAARRMRASRLQHRRRAFAVRRPPSGYAATPTDHRPLSHVAAWVCDKPTTVRLPPRRPPPQGPAWPLASFGSSTPRAEGRRATSSSSWVVKSTLSDSSSHPGASPAGTVAVGTGHSALAPNALVLNDATTATGGGGGSSELVVIPDEEDGEFTGEVEPVAKRQKKCTSKVWDYFIKYTDKAKNKVTGVEEQQRKAKCKKCGRVFGAETVNGTKHLWNHLNRIHSLKQGQQELQVKGEVQTFRYDPEVSLEKWYIAVIMHEYPFSMVDHVYFNEFIHSLRPSFEFKCRITTSKAILEIFEVRKRILYDELKSVSSRISTTMDMWTSNQNKAYMCITAHWIDENWLMQKRILKFIHIDGKHTGTRLANAFVKGVMSMNIEKKLFALTLDNASSNDKCAREVVIELNKLFNISKVPPLMCDGAFFHVRCLCHILNLVAQDGLKIIAHTIQNIRTTIGIVKNSTLQWEEFQKCAVECDLNNNSGLPLDVPTRWNSTYDMLKQAIYYKGAFERLLFLDEDRYQRCASSAEEWGMAESLCNCLEKFNDATLLFSGCLYPTANLFWWKFCEIKLALREWCASADVSIASMAVAMQLKYDKYWDKSNLALAVACFLDPRYKQKLMIFFLQKIYPDKYEEEFKRVLAAIDNFFRAYKSCVARSSKPTAAGSSENSQPHGNTSLGHNEIEKFLYDDAAANKEDDINELDVYMKEKPIRWVDPTGEGVEFDILAWWKNNQMTFPILSTLARDVMAVQISTVASESAFSAGGRVVGPFRSSLHPEMIEALVCTKDWIRASRKGPFKDKIATILDELDVQIEDKDGAKTDNDEEGQATNSV

SEQ ID NO: 196560 - protein, 68 aa, Oryza sativa
  Clone ID: PAT_MRT4530_923C.1.pep
MGVGRSARDRSARLGRLRVFTLFFNDYSGRVAGSGAPELTAARSYSHKIMLDERKQEESERTTQIWTL

SEQ ID NO: 196561 - protein, 82 aa, Oryza sativa
  unsure (1)..(82): unsure at all Xaa locations
  Clone ID: PAT_MRT4530_92400C.1.pep
THYKTPARGVXYWGGTHSYLGVAYPYLQHGHVTHSPHQQLGAWSPDSGSTRSAASTQNVGGSWSVAGAHRACNHSVLHVSLA

SEQ ID NO: 196562 - protein, 56 aa, Oryza sativa
  Clone ID: PAT_MRT4530_92401C.1.pep
LSFLCPWIKSLFTTASVFVVQLVGGVSIGCELQYCHRGVTSFNIKVTKEEISCSWW

SEQ ID NO: 196563 - protein, 52 aa, Oryza sativa
  Clone ID: PAT_MRT4530_92402C.1.pep
KKTKLKASRGASKIGTWLSHDRYNLINPRYIEKKKKAKKNVRKRETKKRALL

SEQ ID NO: 196564 - protein, 677 aa, Oryza sativa
  Clone ID: PAT_MRT4530_92403C.1.pep
MLVLLLLLAAAVSSPAPAAGDGGGALPVLNPISSFCNTTAARRTYLPNSTFEANLNGLFAVLSRNASASGYAAGAFGAAPDTAYGLLLCRGDFTGNDCSAARLASSFQQAASSCLYSKDVAVYYDQYQLRYSDQDFLAGAGAGAANEPETAAFNMNNVSDAGDVAAFDALVAELVNAVADRASNATRRYAAGKAGFAPEAMTVYAIAQCTPDLSPPQCRGCLAGIIDQMPKWFSGRVGGRILGVRCDFRYEKDPFFKIPNDMVVLSPLPDPSSQGSSSSGGLWIVAIVVPVAVLLLGFLGCFLWIRRRRRRVINMAGTVSVPTMSMEMEQVLKLWRIEESGSEFSLYDFDQIADATDNFSDACKLGQGGFGPVYKGQLPDGLEIAIKRLSSCSVQGLMEFKTEIQLIAKLQHTNLVRLLGCCVQADEKMLIYEYMHNKSLDCFIFDTEKGAMLNWDKRFRIIDGIAQGLLYLHKHSRLRVIHRDLKASNILLDREMNPKISDFGMARIFCSNVTEANTTRVVGTHGYIAPEYASEGLFSIKSDVFSFGVLLLEIISGKRTAGFYQYGKFFNLTGYAYQLWQEGQWHELVDQALGEDFPAMEVMKCVQVALLCVQDSADDRPNMSDVIAMLGSEGVTMPEPRQPAYFNVRISSLAVSSSSFGESYCMSNVTLMEEDGR

SEQ ID NO: 196565 - protein, 1093 aa, Oryza sativa
  Clone ID: PAT_MRT4530_92404C.1.pep
MADDVSKRCSPEEEVIADILFALPRGPRPVLLRRRGEINRTGGDSTRDGDSAEKSRTGRGHEIRGRAGGVEAEAARGGYSREDLATKGGSVGSRDGGGEAFQSKREGALRYRCTIEDLSTSKGPGGGGGYDYELVGRGGVAAAERDTRCRYSVQDLSTVGKSGGMYDGGNGPGFKEGAQETVDCVQGFKTHPELGLPANDSGTDTETVDVSVSEELIRLQTTISKPKTNTATDDSADDSAAEIEAFDVSEELIRFQTVVSKPWDAIWREAPLVFCDSFLCPTGDRSGLSQSELKDAVASILLNHKGVVSYFRIDSSRSLNLQTLETWFNILSEKKVKEMVLFNCSGPQKLIEFPMDILDGSQVEVLRICFFKIPEVYAFDLSKLHLLDFSYCKFDTEHLLHFVEACPNIRELHLGYYDGNVRIRSDKLEIFQVWCSTMKSVNIEHAPELRKLTIAAFPGKYSSSLSVRVINSLYLEHITCNISNQWITINGSNIQTDDKVLLNVRKLYIGLSMSKRRQREQLSNILNCLTHLEDLTIWRMDTVANNEDYDAALEDWSPKLRVKTCLKSLQICKMEGYQGGKLESDFASAVLVRANRLKRLIIESDKEDVFKKAVGILQKKCKLCDIPILWQSTDFQKEPDNLLASPCFCSKSIGNGESTLFWEDRWNGLQTLVAYVLDNCKLSFLLVMLVFASLVGNRYFDRELAMSINERLVKCAAQLLYGNVGFKAGEVRIDCDENRGVVVMVLDALTRYQWVPDTHLAKSLKVQKKKLCLILEFLEKQMFVRRCEVKAKTGRNVSNTATTAGVSAIPRNEKVKSKHPKWYCCINYAKICSVVRYHIMQMEANLKSQLENTNTVDKYTCPNCGKSFSAFDVKDLVSCTDGNFYCESCKHELVACSEYGNYNEREGRSANLLDFLENMKEKLRPLKTKLDLLEDLPAPDFGSTPDFKGTYNISDWSRTSVPLPEPTNGDDSFSSPCAKDDESDAGVSELKILPSWLIRKGMKLKQAHLSNSSTVCGEGGTNIQEEYMKAYYEAIQKRQEDRIRHSGQSSVPGGPSVSSERPMGVKRQKLCNDINNNALECQGEEPPGDTFRT

SEQ ID NO: 196566 - protein, 199 aa, Oryza sativa
  unsure (1)..(199): unsure at all Xaa locations
  Clone ID: PAT_MRT4530_92405C.1.pep
RRQSQDDLCRKKSQLDAVRSRPKPPPSPNSLLPGVNRANSCRTSPLPRVEPGLAPTRRQTFSPMVKSSLRHILEPNRSFASSFTSSHRAKHCRPCSALVLTAEKFFRPQSVVSAYLAVSPPTHQINPSAATRRRRRTLATSPPRPQPXLSPSIAVNGERLEVEEEKRERXLTGLEESSDILDNISQSQDIEQGKLLFYL

SEQ ID NO: 196567 - protein, 77 aa, Oryza sativa
  Clone ID: PAT_MRT4530_92406C.1.pep
PPLLPAAHPADEAFRRLAPFLPDILCIANGDTSPILSSKPVSEFLTRSGTSGGERKHAAAVPPSRHRRCLIPSRWHC

SEQ ID NO: 196568 - protein, 56 aa, Oryza sativa
  Clone ID: PAT_MRT4530_92407C.1.pep
PLGPPGFALFVSGFGFGGICSGLPFSPGSQLVRLLPFKSPPIRGLGPRGPRFWFPN

SEQ ID NO: 196569 - protein, 133 aa, Oryza sativa
  Clone ID: PAT_MRT4530_92408C.1.pep
MSSEFGLDRGGKGMKTSGGELASSHVRCAAAARGKMVGALGGKRRPSRFSSDEIGATAFTQGTANGGRRAKAAGHTRVIALPKCGGLRRRDVLCTRVARQRQKRAREAMVLEGCGPQGPSLDFAKIWVEIGPL

SEQ ID NO: 196570 - protein, 111 aa, Oryza sativa
  Clone ID: PAT_MRT4530_92409C.1.pep
HKYSFMCIYIHIYIYIYMYVYMCVCMYVCMYVCMYVCMYVCMYICMYVFIYVCMYVCMYVCMYVCMYVCMYVCMYIYIYIYIYIYIYIYIYINKFTIYIYIYIYIYIYICV

SEQ ID NO: 196571 - protein, 382 aa, Oryza sativa
  Clone ID: PAT_MRT4530_9240C.1.pep
MRGRLLADGGGAVVPLHWSRELYNVASFTIGTPPQPASAFIDVGGLLVWTQCSQCSSSSCFNQELPPFDPTKSSTYRPEPCGTALCEFFPASIRNCSGDVCAYEASTQLFEHTSGKIGTDAVAIGTATAASVAFGCVMASDIKLMDGGPSGFVGLARTPLSLVAQMNVTAFSHCLAPHDGGGGKNSRLFLGAAAKLAGGGKSAAMTTPFVKSSPDDIKSLYYLINLEGIKAGDEAIITVPQSGRTVLLQTFSPVSFLVDGVYQDLKKAVTAAVGGPTATPPEQFQSIFDLCFKRGGVSGAPDVVLTFQGAAALTVPPTNYLLDVGDDTVCVAIASSARLNSTEVAGMSILGGLQQQNVHFLYDLEKETLSFEAADCSSLSPN

SEQ ID NO: 196572 - protein, 138 aa, Oryza sativa
  Clone ID: PAT_MRT4530_92410C.1.pep
MADTKTAPAVTLRTRKFMTNRLLSRKQFVLEVLHPGRANVSKADLKEKLAKLYEVKDSNCIFVFKFRTHFGGGKSTGFGLIYDNLDAAKKYEPKYRLIRNGLATKVEKSRKQMKERKNRAKKIRGVKKTKAGDAGKKK

SEQ ID NO: 196573 - protein, 96 aa, Oryza sativa
  Clone ID: PAT_MRT4530_92411C.1.pep
MARSWARSTAPRRSGCSITVSKTSHFSPGDGFAAYDHRTGLQAVELRSISPRRGRLRTGSAGHASASTPRKRLHRVTVAEVHRASTIKQLRHHLAN

SEQ ID NO: 196574 - protein, 138 aa, Oryza sativa
  Clone ID: PAT_MRT4530_92412C.1.pep
MSESKAAAAVTLRTRKFMTNRLLSRKQFVLEVLHPGRANVSKADLKEKLAKLYEVKDSNCIFVFKFRTHFGGGKSTGFGLIYDNLDAAKKYEPKYRLIRNGLATKVEKSRKQMKERKNRAKKIRGVKKTKAGDAGKKK

SEQ ID NO: 196575 - protein, 75 aa, Oryza sativa
  unsure (1)..(75): unsure at all Xaa locations
  Clone ID: PAT_MRT4530_92413C.1.pep
XVXRXHIHCRVCCNLGVDIYIARARARGRTHATVVSRPRSRATLVPWCWPXSWYNVIKXFICMRGAXXVESASTX

SEQ ID NO: 196576 - protein, 48 aa, Oryza sativa
  Clone ID: PAT_MRT4530_92414C.1.pep
ARTIERCSWPASLTICQRCPVTATAASTASWQNAGFRNHGTGSLKLHR

SEQ ID NO: 196577 - protein, 242 aa, Oryza sativa
  Clone ID: PAT_MRT4530_92415C.1.pep
MSNLTTKTYTGRPETIPSDDTEELKAQPKATYMQNGRQTDNSTHTHQADKRLWPQPLTCGPHTATPVNTGGRRRYVTTGPHRPTYGAPFDVDNVVPDRSAPMQSHPRNTRHAHPGDGDDSRRRVWPHGASGVRRGADDPNPKQAKHLLVSPTQASDPPRIFCKRVGRRPHVSTSFACSERLISSTYTCNYYCSITLNGDMQLYSTPADDLSTSFKLSNQLSDRPTNLYTLSLYCSTDDVPAA

SEQ ID NO: 196578 - protein, 169 aa, Oryza sativa
  Clone ID: PAT_MRT4530_92416C.1.pep
MRTSPEISARLFVGRVAPGTGKAELRRHFKVYGDVADIWLRHDRPFAFVQFIQPAHAARALADKDHFINGRKVYIRVAQPTKSSGGLLMKCPSTFASEFVGLDGRVFFFSFVVDKSDEANKAVHGNISSTRLASETTSARFCGYCQRAVTPGGNCDGLVHTDACLIYQE

SEQ ID NO: 196579 - protein, 89 aa, Oryza sativa
  unsure (1)..(89): unsure at all Xaa locations
  Clone ID: PAT_MRT4530_92417C.1.pep
TIFYSFWGFLTSLRLTPLVVRSQMLQNSFIINNVTIHLHNKXISSTHASLAKDKFCNVLGHPLSKCXWTYFISFQIHSRFARICRNISQ

SEQ ID NO: 196580 - protein, 267 aa, Oryza sativa
  Clone ID: PAT_MRT4530_92418C.1.pep
MDVAADATAWPPGWSLVRGYFSPATLFLLLNVVIGTIALTSRASHRRRQHHHDEHYKAQHHHDHHDEPQRCHDQYAPPPPAPLERTSSVMERLRSFGLYRFRSGDFPPEYNLSAAGANAICDESEKQQAQYTRSRSEPAARPAPPPVEKRGKAENAAAAGAARAKVAVKKSSSSEVRKLERAPAQAQRQVLQVQRAQPPPPRAPAPAPARAVKSAAREEVETAQVGLATASSVDARADDFINKFREQLQLQRLNSLLNYNEMLNRGT

SEQ ID NO: 196581 - protein, 60 aa, Oryza sativa
  unsure (1)..(60): unsure at all Xaa locations
  Clone ID: PAT_MRT4530_92419C.1.pep
PDATVQPVVXGHALNAKVFFFQKKRRKIFRRPKGPRQELPKLGIPPLEGIDKSGAPPVAA

SEQ ID NO: 196582 - protein, 28 aa, Oryza sativa
  Clone ID: PAT_MRT4530_9241C.1.pep
FTPRVRHVCCKLTLAKYINWFLSFYRRK

SEQ ID NO: 196583 - protein, 69 aa, Oryza sativa
  Clone ID: PAT_MRT4530_92420C.1.pep
MWRGRCRSIRIWPWGGGGRRSAYDDAGSVAFGHRQCRNHFDWRPGTLGWDTHYELAFLHQVASDFEEPI

SEQ ID NO: 196584 - protein, 141 aa, Oryza sativa
  Clone ID: PAT_MRT4530_92421C.1.pep
MASIQTASNQATASKQPQGGDAVAQAKETVPPAWQLCPRPAPGEVAGVNRALSRRHGSFRLDDGDERVCARRDRRLFPRCRCLRIPRCRRCSRLHRIPHRRGVTGAATVSEPARENNPVKSGKRPQRERRPNVRVSGPEWA

SEQ ID NO: 196585 - protein, 80 aa, Oryza sativa
  Clone ID: PAT_MRT4530_92422C.1.pep
RRSAQTRRAAPRSRRPRCRSARLRRRPRIPAAPAPPPARHRPWVENTADFISRWSWCTQGYSCSCDRWIELTFHFIALLS

SEQ ID NO: 196586 - protein, 55 aa, Oryza sativa
  Clone ID: PAT_MRT4530_92423C.1.pep
ALADFSLICLMKKNLILDLNSENPCSFTIRGFLRAVPTYLPLWKLYIVSEKVHSV

SEQ ID NO: 196587 - protein, 46 aa, Oryza sativa
  unsure (1)..(46): unsure at all Xaa locations
  Clone ID: PAT_MRT4530_92424C.1.pep
WSRPFLGLLQACNTIYWLDFLSGCKLTPLEDYDXSXPISCXLSYLK

SEQ ID NO: 196588 - protein, 180 aa, Oryza sativa
  unsure (1)..(180): unsure at all Xaa locations
  Clone ID: PAT_MRT4530_92425C.1.pep
PSSRRRRLPNRRRRPPVAAGAALQRIGAVGSAAACAPRRRHVCTTWCAAPSRSAVDRPPRVTAIWGPHVGAAPSLSPGFIYCAINQLSSLIACLYCLLCMSXLDSGFPDAPVYFEIVXRVPLTAEQGKSCLSLEHVDPILQMFYCKGGRDGVGRPLRRPLSLPDSPRHERGLPVAHWGRG

SEQ ID NO: 196589 - protein, 265 aa, Oryza sativa
  Clone ID: PAT_MRT4530_92426C.1.pep
MEAAAAVTRLSFVPLAAAARPLLAGFMRPRVFASISSSSSSSPFSGGGGGHFFGGGGGRGRGGGGGGGGEEYGAGAAAAASAAAAVVLGETETADADVILLRVGPEVTSATVDFEKKTAAVWTTPEAKATKDWRKQLGEKLSHHLSTCGFQSHLLGSWCHSPQMKKNLILDLNSENPCSFTIRGFLRAVPTYLPLWKLYIVSEKPLTTTRPRDYAQILIQEIEKFLLDLRFKYRSRIRSLYIVTTDINEHILSIMKADEFATEFI

SEQ ID NO: 196590 - protein, 459 aa, Oryza sativa
  Clone ID: PAT_MRT4530_92427C.1.pep
MASSPAPPGHHDERHESTSSSADDDEITAAAEASPEQGGGGGGGRGTGGSGSAATEGDQKGKGKVVEGSQEAAKKDKVDSQLKKFIRRSFLAVSEGFKKKLSDRQGKQLDEASTSNSPPHVDHKKIPMEEAVYHYFGDIHNVLRLSKRERESVIIMRLVPLHSHYSALRPVYRDGESFYRSFIFSYLEQIVDRVDIGEEDRLLAAVRELARRAEHFQWASEFPRRREAFEKLIEKIKGWKRMLQYPTLRVRFLKRYNRGEFLLEFFSSYDTTDDSEKNTLSSCCFNVILIHGSDICILHSVLSVFAFLRLAAAIWMCSPDHITMYAPGVIGPGEGRSLEDWCSTQVIPPRVYADEVAVRALAAALQVFIRVEAPEYGGRQDSYYIARDRPRVTLLRMDSQYDIVYPLSPELIHQRAKRGGASRFYCCIGGDSNLQRLSQQQEERGGGAGLSGLIMHSEL

SEQ ID NO: 196591 - protein, 174 aa, Oryza sativa
  unsure (1)..(174): unsure at all Xaa locations
  Clone ID: PAT_MRT4530_92428C.1.pep
MAAQFCFVAENSDLFFLETLRIIWCXKTAWSPDKLRTTYPVRHGVRINYARLIRFGYAEWRSCKHPDQASXYLYISRAAASTQYTXNQSMVCLLFCTAPSLLVYSIPLVGVHRRSGEQVSGTFTFNVLNREKAAIRFLESALRNCSLFDHNGSSSSSLACCTSSSMPATASPSC

SEQ ID NO: 196592 - protein, 438 aa, Oryza sativa
  Clone ID: PAT_MRT4530_92429C.1.pep
MRLLNHPHIVRFHEAIAGGDGGGHVYIVMELATQGQLYDYVTQLGRLREDDARRIFQQIISGAEYCHHNMVVHRDLKLENILMDSEMNVKIVDFGFSKFFRHNKVLSASCGSREYAAPELLAGRKYVGPPVDVWSCGVILYILFCGRLPFDSADVSELHRIIKRGEFSIPPYVPDDARDLISSMLIVRPDKRLTITEIDAETVDKVVGHGFERRYLVESLENRVENEATVAYNLILNKKFDAPTRYVWTIDVYQEAGQSNTTGAAEATGSSAAGEPPVAVAGEDDGRNNGWALGGVEFHECPREAMRAIAAALRETGVVYAHDDDDRGRYGKLLCARFAGAAGVRRIIRSYLAATDDAPSSSSSAGGGSGRGEAGHGGGAPVDDAVLESLSAAVFFEIQLYKSEGEGNYLMDLKRLSGPQLQYLNICSELSSKLRAIN

SEQ ID NO: 196593 - protein, 303 aa, Oryza sativa
  Clone ID: PAT_MRT4530_9242C.1.pep
MAALSSASLLPPPSTFVPVLSPLRKPPPQHLAIRGSPHRRRGRRLSLAASSAASPDLEKEPSQSPSPSPQEKSPGDLSAVAESVKVLKEAAKTRKVPSPELLAALAKIKKAKLDTSTFFETLGGTQSPGRTWMLIFTAKGRLEKGQYFPVTAVQRFDAAMVVGLLGWSGAVEQQKPNSTLVVHFLGVALLTPLPKMEDLNRLAQFRFQGKRIENGVYLGPVGSLTFEGRLSWKKKILAFIFERVRIKVGPFGPLEISLGGGNDGREPSTKDPFFVWFYVDEEIAVAQGRGGGVAYWCRCKRVP

SEQ ID NO: 196594 - protein, 115 aa, Oryza sativa
  unsure (1)..(115): unsure at all Xaa locations
  Clone ID: PAT_MRT4530_92430C.1.pep
MKLIYDYLKDYLTDNFSHTAEDXTTIMESDGXENDYAXMELVWSQGSNKDMTELIDRGRXKLASLPSGGGSVAAAAAAPAGARAGRAAAGAAKKEDTAPQTEESDDDMCLTQARH

SEQ ID NO: 196595 - protein, 87 aa, Oryza sativa
  Clone ID: PAT_MRT4530_92431C.1.pep
MALSLMASRATTVCPLQGLKSTAGMPVARRSGNSSLCNVSNGGRIRCMQAWPIEDIKKFETLCYLSPITVEDLLKHIEYLLRSKWVP

SEQ ID NO: 196596 - protein, 73 aa, Oryza sativa
  Clone ID: PAT_MRT4530_92432C.1.pep
TTRRQDSGKDFALPSAAAAPPTCAFYEQAWWFIDHACMVFIPYDVLCVLCIPLVHIYSPSIYWGLKLCVKGMC

SEQ ID NO: 196597 - protein, 270 aa, Oryza sativa
  unsure (1)..(270): unsure at all Xaa locations
  Clone ID: PAT_MRT4530_92433C.1.pep
MQQCCCSQLAAASASRGSRVGVRVAVRVANSTISFLVREHMIISSLDRGKAVKSKSNELTLTIRSRRDIFWWIQCKQPQVTTYGGLGVRLQVPTYPHLWRPKRSRHAAFNVACSVLNRSVTGRITDGTGGSRRRRDGGWARAGSGRPAVAGWRRPGAGWRQPDPARGEAAGWRTAGGGPARAGGMEAGRRRPRPPLPQIRPEGKRRDGWPAGGGMGGRPSRLMTPTGTKDXLVPVGVINRDGRPPIPPPAGHPSHRFPSGRIWGRGGPRR

SEQ ID NO: 196598 - protein, 137 aa, Oryza sativa
  Clone ID: PAT_MRT4530_92434C.1.pep
SQVDALEELIQILNMKEHFRTCKAEPNVHWMDYSFQATIRYNLSPEEVASYEVVDSSTSSISSSARGFCGKFLDPHLPLPSTSSTPPKSTRSGPIRSGKKTHTPEKNPPQKTTNQSISGCTKVSFEARLGAAGRREV

SEQ ID NO: 196599 - protein, 69 aa, Oryza sativa
  Clone ID: PAT_MRT4530_92435C.1.pep
PTRPPTRPPTRPPTRPKLFNNLWCCNKYMFCIFPHWLNMLSCHYGSGQANMLHFLLTQFYIYQILSVGV

SEQ ID NO: 196600 - protein, 70 aa, Oryza sativa
  Clone ID: PAT_MRT4530_92436C.1.pep
LRKKKKKKKKKKKKKKKKKKKKKKKKKKKKKKKKKKKKKKKKKKKKKKKKKKKKKKKKKKKKKKKKGGAI

SEQ ID NO: 196601 - protein, 444 aa, Oryza sativa
  Clone ID: PAT_MRT4530_92437C.1.pep
MDTSASTSPPPPRSVLSTIEDKMSPGVLLIIAILAVVFFLFGLLNLLIQNLLRMRRARRRRRRVGDGGGGVGMGSPTAFQGQLQQLFHLHDAGVDQTFIDALPVFVYRAVVGAGLRKDDPFDCAVCLCEFAGDDKLRLLPTCGHAFHVPCIDAWLLSHSTCPICRGSVLAAAAAADDDDDSSASTPVARRVLDSESLGETFANNGGGDSEGSSPKAAAAEEEEVVEVKLGKLKCIDGNGNAGDLAVVKGTTTSNDGDIGGGGRGDLGQRRCFSMGSYEYVMDEHAALRVAVRTPKRRPPARSRSRRRLALSECDFAGSASKKGAWEAAVIEAASADAAAARLNRDSFSVSKIWMTSATRKEDVRTAAELAGGGRRAASFRWPAMAEASKKHGGINDERRDVEAGGNGDSSLADERPSLARTALQYIVGGGGGGRQQSSRVGSHS

SEQ ID NO: 196602 - protein, 292 aa, Oryza sativa
  Clone ID: PAT_MRT4530_92438C.1.pep
MAAAAPSPPPVAALEQMSRTKMFGGHNLRFRHHSATLGCPMTFSVFLPPSPASDLPVLYWLSGLTCNDENFVTKAGAQRAAAAHGIALVAPDTSPRGLNIEGEADSWDFGVGAGFYLNATNEKWKNWRMYDYVVKELPKVLSDNFEQLNTSRASIFGHSMGGHGALTIYLKNTDKYKSVSAFSPVVNPINCPWGQKAFSNYLGPAKSDWKEYDATCLIKKCNKISTPILIDQGEDDKFLAKQLLPRNFEEACKAVGAPLTLRMQPGYDHSYFFIATFIDDHIAHHSQFLKSA

SEQ ID NO: 196603 - protein, 175 aa, Oryza sativa
  Clone ID: PAT_MRT4530_92439C.1.pep
RQPYSLSPTIKDSMAVLVARQGRELQRYTSAGGRIVVGCIPYRVRSGGEMEVLVITSQKGHGMMFPKGGWELDESMDEAARREALEEAGVRGDTETSLGCWYYKSRRRRYDTTYEGFMFPLRVTDELLQWPEMSSRKRTWATVQQAMDGCQHGWMREALERLVSRHATNKLQSAL

SEQ ID NO: 196604 - protein, 124 aa, Oryza sativa
  Clone ID: PAT_MRT4530_9243C.1.pep
MVPYGMALRITSEAPCQGLTANAGMPEVRRYDNFSLGNVSDEQRIRCVQLLAIEGIKKAETIAYLPPLTEEDLLKHIEYLLCKKWWPCSWYSKARSCYRGNHRSPGCYDGRYWSMRKLPMFGRT

SEQ ID NO: 196605 - protein, 141 aa, Oryza sativa
  Clone ID: PAT_MRT4530_92440C.1.pep
MAVLVARQGRELQRYTSAGGRIVVGCIPYRVRSGGEMEVLVITSQKGHGMMFPKGGWELDESMDEAARREALEEAGVRGDTETSLGCWYYKSRRYDTTYEGFMFPLRVTDELLQWPEMSSRKRTWATVQHAMDGCQHGWMR

SEQ ID NO: 196606 - protein, 106 aa, Oryza sativa
  Clone ID: PAT_MRT4530_92441C.1.pep
MNLRDAEELAPARNHARRRLIPRRIHRVVEELAPTRNRARRCAILRRIRWVAEELAPARTRDSEADSSGCGGAHAGEESRFVGLRRSSRRRGIAHGRAIPEEDSSG

SEQ ID NO: 196607 - protein, 62 aa, Oryza sativa
  Clone ID: PAT_MRT4530_92442C.1.pep
GVYAIELGAKRVPLLLVGEYLYSHPPKLAVGGEIPQSLCSAGLTGGMWPVRLCYSATDRKLA

SEQ ID NO: 196608 - protein, 121 aa, Oryza sativa
  Clone ID: PAT_MRT4530_92443C.1.pep
MGKARRRAMVGGMDPKGLTSCLISSPSNRSLLDASRPTSILSYGARMPAIYGALQSSVNPQQSQLPSQVTQVGTAAGARLAPHVGGGIRAGADKTAQEEAFCHLFVVEDLSVPLLPDFPND

SEQ ID NO: 196609 - protein, 129 aa, Oryza sativa
  Clone ID: PAT_MRT4530_92444C.1.pep
MGTILYPRRVWVFKWEYLDIVGVGMGQENPMGQEGELDAGADWWRDLDGLLTADGELERGAMLNADPVQGGVSEGRARCSVGRCSVGQGLDHRPAAAHSRSWSPEALLICGSELELDGRCRDFYKSGPM

SEQ ID NO: 196610 - protein, 122 aa, Oryza sativa
  Clone ID: PAT_MRT4530_92445C.1.pep
GCEGIIGILLDVEIRPILGYEEGNTGFLSCIAVKVYHLLHVGLGINFHFSDADPKAVAVDAIILQLPTKSREIHAIIKKELSAVLLPVHVFWIEGKVILSEVLLLKVKPSCIFLLKHKQVWV

SEQ ID NO: 196611 - protein, 217 aa, Oryza sativa
  Clone ID: PAT_MRT4530_92446C.1.pep
FLSCDISLPLAFRVDRLLHYPTPTQPSPPQDCTTLATNKKVPELVVECKLYIDGIQFGLPVSTRLESSGPPYFWNEVMTLTAKYRDLTSLSQLAFTVWDMSSGEDGNIVGGATIFLFNNKKQLKTGRQKLRLWPQKEADGRVPTTTPGKVPKTERGEIERLERLVNKHERGQIQHVEWLDRLFFRAMDKAKEKCERTENLYPSLVVEFCSFEHRVVF

SEQ ID NO: 196612 - protein, 203 aa, Oryza sativa
  Clone ID: PAT_MRT4530_92447C.1.pep
MPPRRGIEVRQAVGDGAAPRWRMSLLENTFSSFLQSIGGGVAADGAAARAVFGEGSLFSPFLFGKFFDPADAFPLWEFEPEVLLAALRRGARTTVDWAETDSEYYLRADIPGGRKCDVEVSGDDAMRVVDVSGLWRAAPPPPPPDGRDWRAGRWWEHGFVRRVELPEDADWRKVEAFFDDGEGLLEIKVPKSGDAHQAAAATA

SEQ ID NO: 196613 - protein, 112 aa, Oryza sativa
  unsure (1)..(112): unsure at all Xaa locations
  Clone ID: PAT_MRT4530_92448C.1.pep
LSPRRPLHLHLHCAMAASTTLALYHPKTLAAXAAASPRPDGPAPXPSRSHMPLTPSXPXRGSTHXXXRGRRGXCVVDFXNRLXXEVSSRHERYXRVEELFRVSXXKDKNXYC

SEQ ID NO: 196614 - protein, 107 aa, Oryza sativa
  Clone ID: PAT_MRT4530_92449C.1.pep
MGEEAAKQMAEAPGKIESMRKWVIDHKLRAVGCLWLTGISSSIAYNWSRPNMKTSVKIIHARLHAQALTLAALVGSAMVEYYDAKYGTSGPKVDKYTSQYLAHSHKD

SEQ ID NO: 196615 - protein, 268 aa, Oryza sativa
  Clone ID: PAT_MRT4530_9244C.1.pep
MAKPDTTGLFDLRELSDRLLTARLEFRERQEHLATRRSLLSRRRRRAPLPPVPPAPPLASCRPRMATPRRGRQDHAPRLVAPGTALLMQTDLASFGTKPLACDPTSLPKLPPSKEYNAKLRGKEAIRQNTTAIGGKGSMSVKPGRNEPSKAAPAQDAIGGGDHQRVSGAPEERGGSSCRGGGAAVTLETGRTRVESRSAVPSSSAGAAPATAGPMPASAGAAKRERGLEPTMGEREGERRGAGDGRSEASSRRRRRSAPRLLGGCHTR

SEQ ID NO: 196616 - protein, 775 aa, Oryza sativa
  Clone ID: PAT_MRT4530_92450C.1.pep
MDLDKSTSTNASLKKLQDDGALPGRGTMEREPGGIEPEPILGRMVLVEDYILCGFLPPPSELLLLVLNLYGLSLLHLNPNSIAFLSIFSYLCEAYIGVKPFIDLFRFYYELRWMEPKKVSRCVGFRLRNGLKSRYIPFQCPSSRSKWRARWFYLQIEHSDPVFVVPEEQPDKISEWTAKPALTPPLQSFIDIIDDLRVRGLSGYEVAADFIGRRIQLLQAQAHPAFDYSRPEDATRVSPRGLNNETVERRIGQVMISGPTTVSNIPVPLCEKGKADREAAINALPLTDVIELLADHQAAASLKEGVAKEASDIAVAAATTSGNNVPKKGRKFSSVLGNRRKAPTPSASDASPPPKRRQRLVTLGEKAAWSKAAQDGSGATSNVSPVVASTDIVVTVRDREATLSGPAGGLAPARGPPVDALTWGELQAEMERILQAGARSVGREIEEARAAAVSAIQRAEQLARDLSKTREDLLKMRELVAGNERQRQGLKHRMSELENNLSEIRGSLRVSYTGLHQLTGECSVTTTIPTTPDEFSLTSSLAELAAAMEEIPSKHAAGIGEETSNGIYTRGCHVLADVDVEDVQQRGQPESPVVVPALALEPYVQRDDIDQSLSGEADMAMTFLGWTKSEVAKLKRTMVEVKKDQAVEALQGCEVWFNSYLRSCCMAMAGVCRELRVPRGNPEESAAGYISWLNGACAQLEGIGKRIDEALKQEFRRSSRYARGHVLACIRDHRPQRHLEFLHEGFSHSRRTPTEIDNLAKSMEPLAEKVFQSMD

SEQ ID NO: 196617 - protein, 348 aa, Oryza sativa
  Clone ID: PAT_MRT4530_92451C.1.pep
MASTRRRRAGGVPMAVIRLGVAAIVVLGAGVIGGARAQLRMGFYDESCPAAERIVGEYVRQHVGRVPTVAAALLRLHYHDCFVRGCDASILLNSTGNGGAAEKDAAPNQTLRGFDLIDRVKGLVEAACPGVVSCADVLALAARDAVAAIGGPSWRVPTGRRDGTVSSMQEALAEIPSPAMSFPELAGLFATKGLSVRDLVWLSGAHTIGIAHCSSFADRLYNGGGGAGNANGNNTDPPPLDAAYAANLRERKCRTAGDGVVEMDPGSHLTFDLGYYRAVLRHRGLLRSDAALVTDAAARADIAGAVASPPEVFFQVFGRSMATLGAVQVKTGSDGEIRRNCAVVNSGH

SEQ ID NO: 196618 - protein, 67 aa, Oryza sativa
  Clone ID: PAT_MRT4530_92452C.1.pep
RKGGPRIGPKKGKGKKFQGGDETMNPILFSIRQQNTYEPQDGDFWKGGAPATPPGLGNLNGRTPNLE

SEQ ID NO: 196619 - protein, 635 aa, Oryza sativa
  Clone ID: PAT_MRT4530_92453C.1.pep
MPASSVSGGSGPGGVSPEAIIEWLQDEMGYPSAPPAPDQLRKICRGNMLPVWSFLLRRVRSERTVSTARKNILVHGVAARRAREGGAGAGAGAGGDAAAREAEARERDLAAEEAERLRGVVRRQRKELRARIAEVAREEAERKRVLGERSNARHKQVMLEAYEQQCDEACKIFAEYQRRLHQFVNQARDVRRSSIGAGGPADAVEDMQLQSEREELYSTVKSNRLSDDLVETSRERSIRKACETLAGDMIEMIRSSFPAFEGSGINSSSQLDAAKLGIDLDGEIPQDVKAVALDSLKNPSLLLQSIITYTSRMKILIHKETDKIDIRADAELLRYKYENEQVIDAASTDASSPLPYQVYGNGKTGSELSTRGTYDQLLERQKEHVQQFLATEDALNKAAEAKAKSQKLLQRLHGTSDAAGSKKMPTGNTSQNMTNSRHLELDVWAKEREVAGLKASLNTLTSEVQRLYKLCAEWKEAEDSLKKKWKKIEEFDARRSELECIYNALLRANMEASTFWEQQPLSARGYASRTIIPACNAVVDMSTNSRDLIERELSAFGQSLDNSLCRLPATPQALLEALGSNGATGSEAVAAAEKHAALLTARAGARDPSAVPSICRISTALGYNSAKSTASIADV

SEQ ID NO: 196620 - protein, 480 aa, Oryza sativa
  Clone ID: PAT_MRT4530_92454C.1.pep
MEVVVSAIAGDVVNRFISFLIKKYESQENLERKMERLQNLLLKVHMIVEEAEGRHITNSKMLLQFKKIVDAMYQGYHVLDIIKNSILCKSRPEEQVSSANTISAPTCYVNPFRTSQSSTIRHDQLKSTLDSLETIVSSMTEFVYLLGGCERMSPRPYDTYLYFDNFMFGRQVEKQQVINILLQENLPPFAPTVLPIIGPSRVGKRTLVAHVCNNEIVRSHFSSILHLNGENIMKMECETFTERRDLVVVEFTADTDDDNWKKFYASCTNMGRGSKIIIVSRIEKISRFGTVRPIHLNSLSHEEYSYLFKVLAFGSTNPEEHPQLVSIANELTVLLGGSFITANVFADIFRKNQNVHLWLHVLKKYRNTVLKNFSEFSEHPKLLLEKEHLIDITKLASSSSPLRLMPPHCEGYGSKRRLTKVMFSDLIADSIVVPKEDFELVAWESRIPPYRRFVNIVLYCDDEKNFQHADSLHKKRQKNT

SEQ ID NO: 196621 - protein, 144 aa, Oryza sativa
  Clone ID: PAT_MRT4530_92455C.1.pep
MGPGASKETPTQQQKPAESVSTPPECQERSTQAEAKTTSPSPAASPKPTEVLKPGSKQSGENIEESRACEFSDIEALLDGGTNPETGLSLDSPTFSNATQEDHVDSHLPENDEACTESKFDTGREESSPQDFGSRYITSKHIIR

SEQ ID NO: 196622 - protein, 231 aa, Oryza sativa
  Clone ID: PAT_MRT4530_92456C.1.pep
MEPAAAAAGPGKAGHHNADAFHAVAAGGVAPPAETTRWSSLAATAASLVAVGLGGAALLVWWALAFHPANARLWMVPAGLVLLGTPILAWLSLCLSAGPCAAVRDAPVRVTMLENVAGGRGFRRPRPTSEVVAGGLVLRCHAPRRSLLLAVASSAATPHAGLVAGGHILHCPRSAPCRISSLEAASSAIRSHATPGTRHWQPRPPPSTPHAAPELVQQYACFDRDVVEWIR

SEQ ID NO: 196623 - protein, 71 aa, Oryza sativa
  Clone ID: PAT_MRT4530_92457C.1.pep
SFWRRPGEAIGMLSVLIPCISHMHIAFLQKPGLSICKNLLCMRWDIIPRFIPYVHTHANFISFIHISSRIF

SEQ ID NO: 196624 - protein, 352 aa, Oryza sativa
  Clone ID: PAT_MRT4530_92458C.1.pep
MPSAVSSPPQRESILRPYCVPWTRGSVATAAVAKAAPFRGEQNHKQVASVANPLVKHCVRLRLSSAYRRSCRRILLVGLIPILEMCSFEFSTIETLLLLDGIELPEELYGFSGNVVYVSAAVMKKVSGMQSVDSTEAIAIIHMPKYFRDLDSDQGGAVLDEWLGSAKRILVLDGIQDPGNLGTLIRSACAFRWDGVFLLPACCDPFNEKALRAARGASLQLPVVSGNWSDLHALMAKSDMKMLAGHPESSSNGSERTHVLSKELADSLMSESVCLVLGSEGNGLSADTLQACELVNIPMQALPLALEYSSFNQTRWSFINTSLLEQARSVVLVHKLMNPSISPSIYYVELKC

SEQ ID NO: 196625 - protein, 75 aa, Oryza sativa
  Clone ID: PAT_MRT4530_92459C.1.pep
MGIRCRCSQRKEGESNDVIPSTIATRREDAEERLEVEEKCTCGCEVGQGSSAAVAEEEVTTLRGGGGIAVGQLWE

SEQ ID NO: 196626 - protein, 133 aa, Oryza sativa
  Clone ID: PAT_MRT4530_9245C.1.pep
GGSSCRGGGAAVTLETGRTRVEVGPKGREKRWRTRSGDDPRHQRAEGRPRRPPRPPPLVRVGAPCRPSPPAPRPPPPAPCPHPPVPQRGREALSRRWERERVRGVEPVTGGRRRRAGGGVGQLLASSVDATRG

SEQ ID NO: 196627 - protein, 79 aa, Oryza sativa
  Clone ID: PAT_MRT4530_92460C.1.pep
GEWRRRAQLPTAATDGERRRGTAGAAARPKAVAHAGRGEKGGGGSPHQRGGATGAENKGGGDDWRQPNGGRGRRVRESL

SEQ ID NO: 196628 - protein, 61 aa, Oryza sativa
  Clone ID: PAT_MRT4530_92461C.1.pep
PDTIFPRGTSLWPIITPKLLKRPPYRENPGDGLQGDRSRKLPGYDPPRFPISGCKFGEVPN

SEQ ID NO: 196629 - protein, 99 aa, Oryza sativa
  Clone ID: PAT_MRT4530_92462C.1.pep
MTGGRCAVGHVRSSLALPPSDLTCSPLSLTSLGEAVSEGGCRGGRRLGHGDAVVKKRRRRFVSGLVDDGLWATAHRWRTAVASTEKDGAAASVRWGRLG

SEQ ID NO: 196630 - protein, 121 aa, Oryza sativa
  unsure (1)..(121): unsure at all Xaa locations
  Clone ID: PAT_MRT4530_92463C.1.pep
MGFDGDCYAVSGGGLRENGELSYGYASAPAKRASMEDFYQTRIDGVDGQTIGLSGVFXDXHGGSRANEYVKQDLFSSLIKHAKFMRDIKSAIAVTYNHTDSEFLRAERSHTRDAGSTDSTA

SEQ ID NO: 196631 - protein, 132 aa, Oryza sativa
  Clone ID: PAT_MRT4530_92464C.1.pep
RRYINGLKNDEYKFDFFPPRFFPIDSGGSPGFHKIQGTGPGFIPENLDRSIIDEVVTVSSEESITMARRLAKEEGLLVGISSGANVSACIKIAAREENKGKMIVTMLPSGGERYMNSDLFADVREECANMTF

SEQ ID NO: 196632 - protein, 229 aa, Oryza sativa
  Clone ID: PAT_MRT4530_92465C.1.pep
MSAQATVDYRSSCETLKVAPILYPLQDPRNSTNDAVDNTVVTILPNLPTAVAPAAFLGWRGAALQQQRVAATATERVAATEGERAAVHGGGGGGRRCGSGTGKRVAAVLSGTCGSNIEKLGDDGSSSRDLIDGGYDRGDVGNGGSNAGTSVMVDPTAETLATCGSGGGEVGYLSDGNPWRQFILAGIVLGFLECTLFWVGRRRQNPPAARRSAGYPRSPVPPSPARPLP

SEQ ID NO: 196633 - protein, 96 aa, Oryza sativa
  unsure (1)..(96): unsure at all Xaa locations
  Clone ID: PAT_MRT4530_92466C.1.pep
NINQHTNMEFSGTKKKIPNXGSMLCKFAHYSRNLKELGVDLIDIVQRFWAXXXSGMTDFKNLSFNPTKAGEAAXLPEKKSWTSFLPSSXSGVPXAP

SEQ ID NO: 196634 - protein, 43 aa, Oryza sativa
  Clone ID: PAT_MRT4530_92467C.1.pep
FTRPFQCEIFFSCCLAERQRLLYHCPPPNCQLQDLLIKIIRPI

SEQ ID NO: 196635 - protein, 140 aa, Oryza sativa
  Clone ID: PAT_MRT4530_92468C.1.pep
PRVRPGVRPRIPTSNEVVFTLAGSKTLVLTLWPASLVGAFAFVPSARYLRSTMKRIGRLERFLAEAVLLYAAAAHSDCASDSSRWVGRPGLRHPAGAQRQAGLDVPPGERHTGRRDPRTTQYQRRKVGVGHQHPAHHDGR

SEQ ID NO: 196636 - protein, 91 aa, Oryza sativa
  Clone ID: PAT_MRT4530_92469C.1.pep
TGHRRPFFLWFLIFHAPRTRPRRRSGSMAKHRGHPINYTPCQIGSTQRHRRPQRTNETKMLPIPKKKGRAKPPQSTQGWWGKTPQIPRGGG

SEQ ID NO: 196637 - protein, 98 aa, Oryza sativa
  Clone ID: PAT_MRT4530_9246C.1.pep
MNGAVLLQMLLLLLLAARAQQQQQVTQARTDPKEVAALDAILGRWGKTTSPLWKMADEPCYGVAVDDSTDLDGNPKNNPGIKCDCSYINGTVCHITQL

SEQ ID NO: 196638 - protein, 150 aa, Oryza sativa
  Clone ID: PAT_MRT4530_92470C.1.pep
YSPSYGYYCNYLPFNSTSAITFVVLSSTLMVITALCGIVIYFYRSNMLIQSTRLLILESILFGCLMQYVSVFLLLGPITSTINCVLWVWVFSIGFVLVIAGLLTRIAHIRALNKPKIRLQIKTITLIFAWFDRLHGDLQVLGYLGAILAS

SEQ ID NO: 196639 - protein, 154 aa, Oryza sativa
  Clone ID: PAT_MRT4530_92471C.1.pep
MDHSEQSVHAAAHDMALIERHQPWEMLDGMALSIIDDAGHGDAAAAGGGVLAILDMIVARLGAAIGLEEALLAMARTSSYEGPKVDEILRVRNALDEIRSEMDLPALMRRLLHKRRGVTEITTCRPAAGAGAAATEQDQADETERLMKKMRLKC

SEQ ID NO: 196640 - protein, 257 aa, Oryza sativa
  Clone ID: PAT_MRT4530_92472C.1.pep
MDHSEQSVHAAAHDMALIERHQPWEMLDGMALSIIDDAYAAALGIVGRGEEGYHGGVVEISAADPGSPMLTVHASRAHCLVALNDSPRGGGDSLVCAYRRYTSPKQKWRPRHRLGRASVSVSPGTLYLSRADGGAAAAVPRGHGDAAAAGGGVLAILDMIVARLGAAIGLEEALLAMARTSSYEGPKVDEILRVRNALDEIRSEMDLPALMRRLLHKRRGVTEITTCRPAAGAGAAATEQDQADETERLMKKMRLKC

SEQ ID NO: 196641 - protein, 64 aa, Oryza sativa
  unsure (1)..(64): unsure at all Xaa locations
  Clone ID: PAT_MRT4530_92473C.1.pep
MAPSVMASSATTXVPXQGLKSTVXMXVAXRYXNSXFGNVSNGGRXXCMXXGRLKGXKKFETLYY

SEQ ID NO: 196642 - protein, 78 aa, Oryza sativa
  Clone ID: PAT_MRT4530_92474C.1.pep
ADLMEVGWSNLPMHVSIHHGTRVRPRQDLRVGLVRVCMPGVRVHELPRIHLGEVISQASCIRGWLDPAATKCRLLFLH

SEQ ID NO: 196643 - protein, 133 aa, Oryza sativa
  unsure (1)..(133): unsure at all Xaa locations
  Clone ID: PAT_MRT4530_92475C.1.pep
CCFLSGRCVHRASPPPWLPRPTSLTISTSSATSAATDSATVSSSTSTVAPVFVNPYVTIAVKSHVPISLELRNPNXDAAWEQADCCLCSXLFGSVADDVLDLAMEPNQSAQDLWITIDNLFQANKEPRAIYLH

SEQ ID NO: 196644 - protein, 666 aa, Oryza sativa
  unsure (1)..(666): unsure at all Xaa locations
  Clone ID: PAT_MRT4530_92476C.1.pep
MSTSSATFAATDSATVSSSTSTVAPVFVNPYATITVKSHVPISLELRNPNYNKWKAFFRSMCGKFGLLDLLDAAPLTNPDATWEQADCCLRNWLFGSVADDVLDLAMEPDQSARDLWIAIDNLFQANKEPRTIYLHHEFHSMTQGDLSVADYCQRMKTAADALRDVGHPVTESLLVLNLLRGVNSRFTSTADTIASAPVLSSFTSVRNTLVLKELCNANSVQVQSENALVTANTTYSNCARGTCISSVSGGQHKNRAGGGNAVSTKGKNDARNNIRNSGPRXAAPWMCFLPWAGQQQPWRSPSAGILGPYPQAHTAFAGPYSSPPPAGSVQPAWDQTGLVAVLNQMTIHSPNSWVLNTGATSHMSSTDGILVTRLPNSHTYITVGNGPSIPVDKNGTSFLPIGTTRFDLRHVLVAXPLVRNLLSVRQFTRDNKCSIEFDEFGFSIKDPRTRRVILHCNSHGELYTLLAAAPSIAAQCNLATSSTLWHRLLGHPGPIAITTLQHLSAIPRSKTNNSLCHACQLGKHTRLPFNKSTSSTSSPFELVHCDVWTSPVMSISGFKFYLVMVEDFTHXKWTFSLRHKSHVHRHIREFVEYAHTQVRXXLKCFQXDNGTEFGYRCSKIITPAHNYIAHVLFGGERFFLGRIVEGLLFGLFHAGGLWSLWALNT

SEQ ID NO: 196645 - protein, 117 aa, Oryza sativa
  unsure (1)..(117): unsure at all Xaa locations
  Clone ID: PAT_MRT4530_92477C.1.pep
TIGRVCMADPADGGVTWSYVHETALPTPNSGIDGVKMKDGRVLLAYNTXPRGTLKVAVSMDDGDSWNDVMTLEDTEGMEFSYPAVIQTMDDLIHITYTYNRTQIKHVVLQPSGIVRW

SEQ ID NO: 196646 - protein, 81 aa, Oryza sativa
  unsure (1)..(81): unsure at all Xaa locations
  Clone ID: PAT_MRT4530_92478C.1.pep
QLRRRHLIPPASDTVDPTGAXTAAATMXCAGEEAAWXGRRRXGGVGVQWRRRCSPWLTSACSRSPTWKXSXPPXPTRWTRG

SEQ ID NO: 196647 - protein, 107 aa, Oryza sativa
  unsure (1)..(107): unsure at all Xaa locations
  Clone ID: PAT_MRT4530_92479C.1.pep
MEAAGLRLRALGLCRGNRGAFPAAHGGGGGRLHPRRPRLAGAFCSLATTGNGAAAAVGPVGSGAEVARAKRMLHVVLVSPLIPGNTGSIARTCAASAVGLXHLVGPL

SEQ ID NO: 196648 - protein, 82 aa, Oryza sativa
  unsure (1)..(82): unsure at all Xaa locations
  Clone ID: PAT_MRT4530_9247C.1.pep
YREXVHGXKQXGVCEIKQRRXVVQQETNLKHLDIKXISNKNSRVIIVTNNENSLXMXXVLXTLSLFQIIRXEHQLILIRIVF

SEQ ID NO: 196649 - protein, 323 aa, Oryza sativa
  Clone ID: PAT_MRT4530_92480C.1.pep
MGAETGEPSSFLSLSAAFSYGIASMAMVFVNKAILMQYAHSMTLLTLQQIATALIIHFGQILGVSKRKDFSMATGRKLLPLSIFYNANVAFALASLKGVNIPMYIAIKRLTPLAVLVAGCLRGKGKPPTQVSLSVICTAAGVLIAALGDFSFDLYGYSMALTSVFFQTMYLILVEKSGAEDGLSSVELMFYNSVLSLPFLFFIIIATGEFPYSLSVLSEKTASLTFSAILLVSLVMGIVLNFTMFWCTIVNSALTTTIVGVLKGVGSTTLGFVLLGGVEVHTLNVTGLVINTFGGVWYSYAKYMQKRKMPKRIAPDVEAHPHK

SEQ ID NO: 196650 - protein, 97 aa, Oryza sativa
  Clone ID: PAT_MRT4530_92481C.1.pep
MTAIVPLCTWGALGSNHAQLTEIQAREETLDSIMRETEEERQAALIASSVLDEALGNIRLQYEAHADDLVQRVEDASGVLDAAAAYERWASEVDASL

SEQ ID NO: 196651 - protein, 46 aa, Oryza sativa
  Clone ID: PAT_MRT4530_92482C.1.pep
MASRRILCHLHVMAMTPRGTAAKMETPRSKKQIEEWRLESSGVVDD

SEQ ID NO: 196652 - protein, 123 aa, Oryza sativa
  Clone ID: PAT_MRT4530_92483C.1.pep
MARFRRIRHGIATVGRETGGPFIGHDLMTAIDRGGGDGALGAPRCRRSGAPGVFRRDGDGTPGVVRNDGGYPIVDVRARALSSSAAYHECEFRILKSAFRWNDTADIAGDAAIVEFLALSWKE

SEQ ID NO: 196653 - protein, 249 aa, Oryza sativa
  Clone ID: PAT_MRT4530_92484C.1.pep
TRGEATEPKRAMAGGVVIGVAPPAAAEEPEPHVERLPADLLAHVLSLLPSFHDLSMAGGVSRRWRRAVERSLAGRRRMSFAGQRTGDDSTARFVRAAVNLRDLDISRSCWGCQITDQGLIRISTADCVKNLTSISLWGLAGITDNGVIQLVSRAHSLQHLNIGGTFITDESLYAVAKSCINLKSIIVWSCRHVTEAGLVALVGGCRRLECINVGGMRVPPESFAGLLAIRPALQIRSIPQILNANVQVS

SEQ ID NO: 196654 - protein, 47 aa, Oryza sativa
  Clone ID: PAT_MRT4530_92485C.1.pep
RVGIIILLFFHLSQIQLNTYFILFSKLKFVDRPTYIIIFIAKKQNLL

SEQ ID NO: 196655 - protein, 265 aa, Oryza sativa
  unsure (1)..(265): unsure at all Xaa locations
  Clone ID: PAT_MRT4530_92486C.1.pep
HRRANARCGGVTDVVWRRRIRRRRGRIRPPHGWIRRLHAGAGRSKPLSGGNDGRWRQRRLAVXWRLAAASGGGRRARRXRWRRRLAAAGERPACAETRPTAVEDAVTVGSGGRGGGGSGGRGGGRRRRPRWRRQRRTRWRRQRRPARGGRSGGRNRGWHAREARPRKACGQPGVAAACGCISGVGAGLDGAKGTGGGGSSSSLPIGTLTLSSPGFSFGQIWRGGRRVVERRGPGPALRDGGSRKSADGGASVRCGGSLVIGRTES

SEQ ID NO: 196656 - protein, 69 aa, Oryza sativa
  Clone ID: PAT_MRT4530_92487C.1.pep
MAEFSWLTALGSMFLTTLLTVMFSYKDPELMPLGIKIVVWAMATATTCGGFYAFFIHEEKQPQYMAVPA

SEQ ID NO: 196657 - protein, 233 aa, Oryza sativa
  Clone ID: PAT_MRT4530_92488C.1.pep
MSAVRSYDDAFLRQLHQSVAPSIVQLAVFNAKSTQIPCHLGTGLVLCVTPNYIGVITSISCDPKDGFRVVARFGDQEDLETEVVRTSSLLSALVVRGCNVQAIPCIPTSFHEGDLPEADVVFCIGCFSIVKEQIMTAGIISYLMHASVCEFEKELRGEQQMSALIEKYDSEKTSASKKRKGRGVSSSQMSRSPVKRKAGGSSSSRRERGVASSQMSSLPAKRKAGGSSSSRAI

SEQ ID NO: 196658 - protein, 71 aa, Oryza sativa
  Clone ID: PAT_MRT4530_92489C.1.pep
INTIPLEYSRVKCYNGISVRLRINSVTMIYQEYFCTIAENYISSNVVKKYQHRGQMGKKTGCRVCPRPPRS

SEQ ID NO: 196659 - protein, 173 aa, Oryza sativa
  Clone ID: PAT_MRT4530_9248C.1.pep
MSPCDNEKLEKGIVRGLVLAACAPWSGASRRLLLVRKDGDEATTAVEEKNVAVLCALTGLRGGVLSQFTKNRVNQSREHSEWSLRKVEALQRTSNVSAGVPSKHNHMEEQERVAPYGGDGFQVHEECLHKPTLGITGGREVGKKVVISLVARSPPLAMPSCASVVGLAMTLAI

SEQ ID NO: 196660 - protein, 256 aa, Oryza sativa
  unsure (1)..(256): unsure at all Xaa locations
  Clone ID: PAT_MRT4530_92490C.1.pep
MSRARPMFMINDNPVDTLLSHASSKGLSVLSYRVALQALAKTMQKDLNTIAAKVDTTKTASLXFMLTETICSLNRQKDYWFSSAXIVDEIDSWEEHFDKISIEERSKTDEETLFNVEGIKISKKYSKNPESCRKEYIVLTIILAAEGKLKFPQIRSADDLRLVLGMLNGIHASEIKGVQILWTPQEEDDALSEERLLKDYPYLRPLKQVLIGESKQLLLGESKFKQILFGESEEKQLLLGEPKEPSVQEDPNNTKG

SEQ ID NO: 196661 - protein, 96 aa, Oryza sativa
  Clone ID: PAT_MRT4530_92491C.1.pep
MGGLWVAAALLLSAPRLLSLSPGLPPVAHGLLLSAEAGRNLLSVVATSGLLLFAAGRREPGAGSGCRDDGGVWIGRRDNGGGRRGGSDDFSTVAGG

SEQ ID NO: 196662 - protein, 239 aa, Oryza sativa
  Clone ID: PAT_MRT4530_92492C.1.pep
MHRSPFCTWPAAERGRWQREREREAIDATAAAGEEESLSLPKAMGLLRCRKSCCLHWMNYLSPDLKCSNFTDDNDELTIKLHALLGNKYLLRLALLVFLVLIDWFCRWNTHIKRKLMSQGIDPQTHQPVSAGTSVAAASELTTTASTVGFPSLQAPAPEAAVRVLDLPRAGPRVEAEDVVERGGGGGGHVVRRDDGGRRGEGGRERRRRGVEARGGRRRGVRRGRRRRGTEREEAGGGQ

SEQ ID NO: 196663 - protein, 68 aa, Oryza sativa
  Clone ID: PAT_MRT4530_92493C.1.pep
MAAGNPGYRSWCSGARHERCEGGGEAHPNGWNGEETTTAMRKRMMPARVDVGDGAPRLAKLNEGVAEG

SEQ ID NO: 196664 - protein, 227 aa, Oryza sativa
  Clone ID: PAT_MRT4530_92494C.1.pep
MKKAKVVLAQPAARAPPSPLLPRAPGHSRGGGVGGGEEAYRARAKYKNLLQDYKELLEETEAKKKRLQMEKLKKQRLLAEVKFLRKRYKSMSENPSQTFVYRVKNPALPPTLRQPGWSHGEEYHTVRAIGSSSKGPSAHRRLNAAPRASPVIDLNEACEPSSEEMEELHGYQEPVRVGRVMRYPMEGDFAAGPSDAKMAAFWDVRNAASSRAGKRKISWQDQLALRV

SEQ ID NO: 196665 - protein, 410 aa, Oryza sativa
  unsure (1)..(410): unsure at all Xaa locations
  Clone ID: PAT_MRT4530_92495C.1.pep
MVMAIAAPIDISPLIVSSSRDKSLLVWDITNLSSCSCPPPQLAPSPTARPPPRAARRRPPPSTAARAAARSQSAPARRSSLAHHRPPPLAPLPTASPPPRAARRQPTAVHRRWRRRSQPVRPRAPLTASPPPSSAARAAAHRQSGPARRSPPAHRQSAPTRRSRSPSPHPPTHPPRGAPCSPGEDSCTWPSPCTPLPRHQRRRHGCAPAPSAAAATAAPSPPAEPTPPXLLHVRLTSPAKKPTPNPSSRIPTSPRPLHSSTPGAADPSPAPASRSPSXPSPPLEALPSRLTVSITPARPRQIPGSPPVASSSHTPTLPICSSPPLSAPASTTPPSSLGSLMSSPSPRTPRPPPPPPPXPCLPDPPPLPPSSATARRTRPHFLPLPPLPRLADLSPLNLAPVPPSPRSLPP

SEQ ID NO: 196666 - protein, 52 aa, Oryza sativa
  Clone ID: PAT_MRT4530_92496C.1.pep
TNTCDAGLDLRGTRDKGHFSYYQAASRIEDVCKGLSAQTFGKGAQGGLLHTL

SEQ ID NO: 196667 - protein, 100 aa, Oryza sativa
  unsure (1)..(100): unsure at all Xaa locations
  Clone ID: PAT_MRT4530_92497C.1.pep
QSEQTGDGATTCLCWRQRTPRPPPPPPPRRAXPDPPPLPPSSATARRTRPHFLPLPPLPRLADLSPLNLAPVPPSPRSLPPRAPSLPRAPYVRLQPPPLA

SEQ ID NO: 196668 - protein, 308 aa, Oryza sativa
  Clone ID: PAT_MRT4530_92498C.1.pep
MDEEYGALMRNNTWHLVPATQGRNLIDCKWVYKIKRKADGTIDRYKARLVAKGFKQRYGIDYEETFSPVVKAATIRLILSLAVSNGWSLRQLDVQNAFLHGVLEEDVYMRQPPGYEDKSKLDYVCKLDKALYGLKQAPRAWFSRLSMKLQNLGFQPSKADASLFFYKKGTISIFVLIYVDDIIVASSCEKATSALLQDLKEEFALKDLGALHYFLGIEVNKVHDGIILTQEKYATDLLKRVGMHGCKEINTPLSTTDKLLAKEAVKRILRYLKGSLGLGLRICKSDSTLDVQMIASPLEGLQYSWELI

SEQ ID NO: 196669 - protein, 105 aa, Oryza sativa
  unsure (1)..(105): unsure at all Xaa locations
  Clone ID: PAT_MRT4530_92499C.1.pep
RRARGPQDAPDKEKEGGPKRAQXXRGKDTESPPPPNARAGNHRQTGDPAGRAPQGRQKAPQEGRSADRERAEGADPRGGQKGPRRPPRARTAHRPRTGRRVEAGN

SEQ ID NO: 196670 - protein, 370 aa, Oryza sativa
  unsure (1)..(370): unsure at all Xaa locations
  Clone ID: PAT_MRT4530_9249C.1.pep
MAAKSLREIRRAAAAGIGSRRCFSGDAAAAAAAAAGVAEGKVGGGAGKEVNLFTAINQALHIALDTDPRSYVFGEDVGFGGVFRCTTGLADRFGRNRVFNTPLCEQGIAGFAVGLAAMGNRAIAEIQFADYIFPAFDQIVNEAAKFRYRSGNEFNCGGLTIRSPYGAVGHGGHYHSQSPEAFFCHVPGLKVIIPRSPREAKGLLLASIRDPXPVVFFEPKWLYRLAVEEVPEEDYMLPLSEAEVIRKGSDITLIGWGAQLAVLEEACEDAAKDGISCELIDLRTLIPWDKETVEASVSKTGKLLVSHEAPITGGFGAEIAASITERCFQRLEAPVARVCGLDTPFPLVYETFYMPTKNKVLDAIKATVNY

SEQ ID NO: 196671 - protein, 426 aa, Oryza sativa
  unsure (1)..(426): unsure at all Xaa locations
  Clone ID: PAT_MRT4530_924C.1.pep
SKLGVVRDVVPAPYGERPRQLXRKLLTQELLTAARVRSFRRVREVEVARLVRDVSAPAASGAAVNLTGMGARLINDIVLRCSVGSRCRHREEYLAALHAMVRQTSGLSIADLFPLSKLASMVAMGPRSALANRKKMERIIEQIIQERKDQMETDTGGDQAAAVESKSCSLDDLLRLQKEGGPPIPITNQVIVVLLMNIFAGGSDTSSTTLTRTMAKLIRSLRVMAKVQAKLRQAFQGKSTITEDDIGKLSYFKMVIKESLRLHCPAPFLIPRKCHETSKIMGYDVPKGTSIFVNMWAICRDSKYWENAKEFMPERRRICPGINLGLANIELALANLLYHFDWKLPNGMLHKDLDMREALELLAAKHTSLNVCPVSKIASSTAAADPFKDHRRQCPLRGYPLPTSPDARTAVYQPPGREEPRRISVA

SEQ ID NO: 196672 - protein, 152 aa, Oryza sativa
  Clone ID: PAT_MRT4530_92500C.1.pep
PGRPASGVGGGEEACRARAKYKNLLQDYKELLEETEAQKKRLQMEKLKKQRLLAEVKSLRKRYKSMSENPSQTFVYRVKNPALPPTLRQPGWSHGEEYHTVRAIGSSSKGPSAHRRLNAAPRASPVIDLNEACEPIFANSVKFRYLKKLFCG

SEQ ID NO: 196673 - protein, 370 aa, Oryza sativa
  unsure (1)..(370): unsure at all Xaa locations
  Clone ID: PAT_MRT4530_92501C.1.pep
MEFVNQKFIRIAQYGMALDDKNWKGAIDEEYGALMRNNTWHLVPATQGHNLIDCKWVYKIKRKADGTIDRYKARLVAKGFKQRYGIDYEETFSPVVKAATIRLILSLAVSNGWSLRQLDVQNAFLHGVLEEDVYMRQPPGYEDKSKLDYVCKLDKALYGLKQAPRAWFSRLSMKLQNLGFQXAPSKANASLFFYKKGTISIFVLIYVDDIIVASSCEKATSALLQDLKEEFALKDLGALHYFLGIEVNKVHDGIILTQEKYATDLLKRVGMHGCKEINTPLSTTDKLLMKEGEPLAAEDSTRYRSIVGALQYLTLTRPDIAFPTAVKRILRYLKGSLGLGLRICKSDSTLXCPDDRKSTGGFAVFLGANM

SEQ ID NO: 196674 - protein, 63 aa, Oryza sativa
  Clone ID: PAT_MRT4530_92502C.1.pep
TPHDHHDEVGDGDEASRGEVRGNRSGRGAAAGRVVCQRPPPWLLSVDTPTAADGDPNQKWVEK

SEQ ID NO: 196675 - protein, 146 aa, Oryza sativa
  Clone ID: PAT_MRT4530_92503C.1.pep
LAMKKAAAGGMAPLPPSSSPPSCKAGGGGGSPRWSLLHGGGGEWGVVVRRNVVKSSSLLLLVFSTFFVFSVLRSSQTSLVPPPPPAAAGPGEPALAQSGHDVAGDDGGEHVAVAINNVAAETQSTPDDISLPSTNLLGAAVSQHQQ

SEQ ID NO: 196676 - protein, 576 aa, Oryza sativa
  unsure (1)..(576): unsure at all Xaa locations
  Clone ID: PAT_MRT4530_92504C.1.pep
MEISPNSAAATAAATAAAPASSSTSSPSAPKRLTTTLRILCPSSRASALRGASRDLHVDQPPVGDEAVLSISGPDAPAVAVRAWERVVGHRVGGDEAAGEEEREVPGVVGCRMLAASGQVGCVLGKGGKTVERMRQESGAQIRVFRNRDQLPPWAAPVDELIHISGNFSAVRKALLLVTTCLQDNPRPDASNFPPGRFGPPGPVGIDPHSQRGYLPPSMPDYHARNYSSNMAAPGPRFFVEQEIVFRMICLNEMVGSIIGKGGSTIRALQSETGASIKIIEPNSDSEERVIVISAHENSEMMHSPAQDAVLRVHSRISESSMDKSSAVTARLLVPSQHIGCLLGKGGSIIAEMRKITGAGIRIFGNEQIPRCAQRNDELVQVTGSFQSIQDALLHITGRIRDVIIPMKPHPGGADRPMGPFDMVDHRPPPPHSMEHMGADRMPYSYGCEQGGGPRPFLDQPSPSAWAPEAPNSEAPRNMPETVPPADFRKGAVAGTNQVATPSNATEVIIPRKYIGFICGANGSDLAEIKXGATITVHHPKPGDANALVIICGDPDQTKKAQSLLHAFIFCGLYQT

SEQ ID NO: 196677 - protein, 98 aa, Oryza sativa
  Clone ID: PAT_MRT4530_92505C.1.pep
ATQLAIAAAKCILFLKFAYRARIKWSIRKRLPPSISSSIYTRNLKFHRISSSSSSRRRDIRIITFLPVGKKKYKSNLQMFQGSLSFREVEEEPSLAMA

SEQ ID NO: 196678 - protein, 454 aa, Oryza sativa
  Clone ID: PAT_MRT4530_92506C.1.pep
MSSGGGGGDDYKREESVALMVIVSLAALSLLSLVAAFAYYCYITRKVSRRLHSLDLPKHHRRSSSSSPPPMPPPLPPPPPSANAPTLGKESPSSNSASDGAAAAVVVGGERGAVQVFSYRQLHAATGGFGRAHVVGQGSFGAVYRGVLPDGRKVAVKLMDRPGKQGEEEFEMEVELLSRLRSPYLLGLIGHCSEGGHRLLVYEFMANGGLQEHLYPNGAFEKIETFSIYLVKQRPIFDKNIGHPICRRAHFSRQLISHKADIVGSCGGISKLDWPTRMRIALEAAKGLEYLHERVNPPVIHRDFKSSNILLDKDFRARVSDFGLAKLGSDRAGGHVSTRVLGTQGYVAPDYGVVLLELLTGRVPVDMKRPPGEGVLVNWALPMLTDREKVVQILDPALEGQYSLKDAVQVAAIAAMCVQQEADYRPLMADVVQSLVPLVKNRSTPKTCNPSVQA

SEQ ID NO: 196679 - protein, 73 aa, Oryza sativa
  Clone ID: PAT_MRT4530_92507C.1.pep
RSWGRTLMPWEDFRMTRFHPNYHPWKPIKGAEKLSYMRLMILAILAMEVVFLLSLLITHVKPGQAHGVIATHP

SEQ ID NO: 196680 - protein, 48 aa, Oryza sativa
  unsure (1)..(48): unsure at all Xaa locations
  Clone ID: PAT_MRT4530_92508C.1.pep
TRGRTRGLADQVLVIFSRLMRTLASHVARMSELTMXHVXHLFQRPSPQ

SEQ ID NO: 196681 - protein, 95 aa, Oryza sativa
  Clone ID: PAT_MRT4530_92509C.1.pep
PPPLSTLSLSILLASSLPLLATSTPLHRPSSLPPPANSLCTSRTHLDQGVSHVRAKPKPPASGGQQENSISASSLPPLALAPLSSTQLVSQPPQL

SEQ ID NO: 196682 - protein, 226 aa, Oryza sativa
  unsure (1)..(226): unsure at all Xaa locations
  Clone ID: PAT_MRT4530_9250C.1.pep
MEKAAGFLSSLLGGGEEVPPEPAATVRSILIYPIKSCRGISVPQAPITSTGFRWDRQWVVVNSKGRAYTQRVEPKLALVEVEMPPEAFAEEWRPTADSYLVGRAPGMDPLKIPLSAEQAIINDVSVWEWSGSAYDEGAEAAEWFSSYFGNPSRLVRFKEGSEIRPTNPDYAQGYKIMFTDCFPFLMASPGSLDALNEVLXRPVPMNRFSXTFLVDGCXPYSEDLWK

SEQ ID NO: 196683 - protein, 179 aa, Oryza sativa
  unsure (1)..(179): unsure at all Xaa locations
  Clone ID: PAT_MRT4530_92510C.1.pep
GGGGGGEEERERDDGGAGAGRGEPRDGRDTRATYALRPDGXATVDVLNETWTSSGKRDYIKGTAYKADPASDEAKLKVKFYLPPFLPVIPVVGDYWVLYVDDDYQYALVGEPRRKDLWILCRQTSMDDEVYGRLLEKAKEEGYDVEKLRKTPQDDPPPESDAAPTDTKGTWWFKSLFGK

SEQ ID NO: 196684 - protein, 109 aa, Oryza sativa
  unsure (1)..(109): unsure at all Xaa locations
  Clone ID: PAT_MRT4530_92511C.1.pep
DVCEVKRVSSLYRGSYDGCGRGIVRSALQPSLGCNPGHPXAKTWIQRRQDWFDXTTRFGRTWGWPNPAQFRLVASSIAPLRGLVNFGLIHRVNSXFLAHSYISLVLYIV

SEQ ID NO: 196685 - protein, 195 aa, Oryza sativa
  Clone ID: PAT_MRT4530_92512C.1.pep
MAAAAVEKKSGSEMTVVRGLDVARYMGRWYEIASLPNFFQPRDGRDTRATYALRPDGATVDVLNETWTSSGKRDYIKGTAYKADPASDEAKLKVKFYLPPFLPVIPVVGDYWVLYVDDDYQYALVGEPRRKDLWILCRQTSMDDEVYGRLLEKAKEEGYDVEKLRKTPQDDPPPESDAAPTDTKGTWWFKSLFGK

SEQ ID NO: 196686 - protein, 387 aa, Oryza sativa
  unsure (1)..(387): unsure at all Xaa locations
  Clone ID: PAT_MRT4530_92513C.1.pep
MAMEAGAPRGAAATTSGGGGGAPEAGAELGSSGAPVTWGRVWRAGQEAAAHALLLCFTALLALKLDGLFRGSWWVLFTPLWLFHAVIARCRFSLPAPSSPQSCQMASCHSIVATPLLVAFELLLCVYLEGHDEPFIDLKLVFLPLLALEIITLVDNFRMCGALMPGHGETMTDEAIWERLPGTPSNAKFFPLRAVFLPILLLQVTTVSFAIWIFFERLVTKLRAKKITDGYISFSSKIDELFMMMQHGSRLIAWWSIDEDSKEEQAHLCYANNSGYSTFCSYPPEMVKEMPKKVLDKEVXKTQDKILGAIXMAKLSPLQCDKLKNALILCRICFERDICIVLLPCRHYVLCEACSDKCRSCPICRVSIENKLPVCDAMSSADSISDT

SEQ ID NO: 196687 - protein, 99 aa, Oryza sativa
  unsure (1)..(99): unsure at all Xaa locations
  Clone ID: PAT_MRT4530_92514C.1.pep
MLWLPXAVSLLLSSSLHVXGDVXGVASLSVRRYDGIFSFGDSXADTGNNPVVFXWYSIFAXYPSLRSPSSAPTAATGRRSSFVTLGCVGARLGKRSSQR

SEQ ID NO: 196688 - protein, 88 aa, Oryza sativa
  Clone ID: PAT_MRT4530_92515C.1.pep
NTVNDLYLSTFVASHFTLHPHQQKHNQHLYNLHMIHIHTTIKLTDLPAFEPPVLHLHKHTNKYELKFGYKSALQFYTNAKISHVLPLS

SEQ ID NO: 196689 - protein, 1822 aa, Oryza sativa
  unsure (1)..(1822): unsure at all Xaa locations
  Clone ID: PAT_MRT4530_92516C.1.pep
MAERAVAHSLSPNASGDDGEQNPRRRARTPPSPSRRNLGRGEALGEVGGSATSPPAGDGGGRRDGARRRLDYGDGSTPQGALQAAGALLRHPPVVPDPETPARRWLDDVADLVMTAQQRLGAGGRPSAPEASGAAAAGSTSSRRRARRAAAVTRRSSAIPSSTPPTQEDERGGSDARLDIERQRDDRRAAHATEGAFSSGAPLRFRPTITEKYDGSVNPAEFLQIYTTGIEAAGGDDRVMANFFPMALKGQARGWLMNLPPASVHSWEDLCQQFTTNFQGTYPRPGEKADLHAEQRGYDESLRSYIQRFCQVRNTIPCIPAHAVIYAFRGGVRHNRMLEKIASKEPQTTAQLFELADRVARKEEAWTWNSSGSGVAAPAAPESAARSGRRDRRRKKKSARSDDEGHVLAVEGASRAPRKGRPASDKKKEAGAPSRERPTGKWCTVHNTSLHDLADCRAVKSLAERTRKWEEEKRQERRXGKAPAAPAGNRRXPEATIATVDGGACAHASRRSLKAMKRELLAAAPTHEATRRAWWSEVALTFDQTDHPPCVARGGQIAMVVSPTVCNVKLGCVLIDGGAALNILSPAAFDAIKAPGMVLRPSQPIIGVTPGHTWPLGHIDLPVTFGGSANFRMERVDFDVADLSLPYNAVLGRPALVKFMAAVHYAYLQMKMPGPGGPITVHGDLKVALACMEQRAYHLAAASKPTGGDERLGTSVPAAPRQRMVTCDEVPEDALVSFLRANADVFAWRPADMPGVPREVIEHRLAVRPGARPVRQKVWRQAPERQAFIREEVARLLEAGFIREVIHPEWLANPVVVPKANGKLRMCIDYTDLNKNAGPTFQRTTRISLGSQIGRNVEAYVDDLVVKTRNQETLLSDLAETFESLRSARIKLNPDKCVFGVPAGKLLGFLVSARGIEANPEKIRAIERMRPPSKLRDVQYVTGYMATLSRFISRLGEKALPLFKLLKRSGPFTWTEEAERAFTQLKAYLSSPPVLVVPEPDEPLLLYLAATPHVVSAALIVERDEDNPHSAHPHPVSTRPGREQGREAPEPNGGPRPPTAGAGPPPACPTVPGAPNPQDGPGATAGRPRLSPSDPEVVGTEAECAPRGLSDKERPRDAAPGEEDRPRRKVQRPVYFVSEALRDAKTRYPQAQKMLYAILMASRKLRHYFQAHWVTVVTSYPLGQILHNREGTGRVSQALADFVAEWTPAPEPVSAPEATSDSSQLPHTAYWVMQFDGSLSLQGAGAGVTLTSPSGDVLRYLVRLDFRATNNMAEYEGLLAGLRVAAGLGIRRLLVLGDSQLVVNQVCKEYRCSDPQMDAYVRQVRRMERHFDGIELRHVPRWDNAVADELSRLASSRAQTPPGAFEERLAQPSARPDPLGETDAPERPPRPVGVQASGPEGSAPNSPRLIAWITEIQAYLADKTLPEYREGGERVRRISKRYVLVEGTLYRRAANEVLLKCIPREQGVELLADVHEGECGAHSASRTLVGNAFRQGFYWPTALNDAVDLVRRCRACQFHARQTHQPAQALQTIPLSWPFAVWGLDILGPFRRAPGGFEYLYVAVDKFTKWPEAYPVIKIDRHSVLKFIRGITARFGVPNRIITDNGTQFTSELFGDYCEDMGIKLCFASPAHPRSNGQVERANAEILKGLKTKTFNILRKHGDSWIEKLPAVLWANRTTPSRATRETPFFLVYGAEAVLPSKLTLRSPRVSMYCEADQDQLRRDDLDYLEERRRRAALRAARYQQSLRRYHQRHVRARSLCVDDLVLRRVQTRAGLSKLSPMWEGPYRVIGVPRPGSVRLATGDGTELPNPWNIEHLRRFYP

SEQ ID NO: 196690 - protein, 156 aa, Oryza sativa
  Clone ID: PAT_MRT4530_92517C.1.pep
MAPTFLALPLPPWHTRTNVEIAGLRRKKPVKPKPKDCGRFVRFYQSLETGREENSSGEATTSRNSEINQHIEYDLVFARQLQAMDNLTIETPADEDDDISCVPSPSDSETDEPAEGNNEELSYMYIRFHMHTAIRDAHKACKVAAAIPAILSCKLR

SEQ ID NO: 196691 - protein, 1842 aa, Oryza sativa
  Clone ID: PAT_MRT4530_92518C.1.pep
MAERAVAHSLSPNASGDDGEQNPRRRARTPPSPSRRNLGRGEALGEVGGSATSPPAGDGGGRRDGARRRLDYGDGSTPQGALQAAGALLRHPPVVPDPETPARRWLDDVADLVMTAQQRLGAGGRPSAPEASGAAAAGSTSSRRRARRAAAVTRRSSAIPSSTPPTQEDERGGSDARLDIERQRDDRRAAHATEGAFSSGAPLRFRPTITEKYDGSVNPAEFLQIYTTGIEAAGGDDRVMANFFPMALKGQARGWLMNLPPASVHSWEDLCQQFTTNFQGTYPRPGEKADLHAEQRGYDESLRSYIQRFCQVRNTIPCIPAHAVIYAFRGGVRHNRMLEKIASKEPQTTAQLFELADRVARKEEAWTWNSSGSGVAAPAAPESAARSGRRDRRRKKKSARSDDEGHVLAVEGASRAPRKGRPASDKKKEAGAPSRERPTGKWCTVHNTSLHDLADCRAVKSLAERTRKWEEEKRQERREGKAPAAPAGNRRGEAKQKAPGEDIDDGDYDLGLKAMKRELLAAAPTHEATRRAWWSEVALTFDQTDHPPCVARGGQIAMVVSPTVCNVKLGCVLIDGGAALNILSPAAFDAIKAPGMVLRPSQPIIGVTPGHTWPLGHIDLPVTFGGSANFRMERVDFDVADLSLPYNAVLGRPALVKFMAAVHYAYLQMKMPGPGGPITVHGDLKVALACMEQRAYHLAAASKPTGGDERLGTSVPAAPRQRMVTCDEVPEDALVSFLRANADVFAWRPADMPGVPREVIEHRLAVRPGARPVRQKVWRQAPERQAFIREEVARLLEAGFIREVIHPEWLANPVVVPKANGKLRMCIDYTDLNKNAGPTFQRTTRISLGSQIGRNVEAYVDDLVVKTRNQETLLSDLAETFESLRSARIKLNPDKCVFGVPAGKLLGFLVSARGIEANPEKIRAIERMRPPSKLRDVQYVTGYMATLSRFISRLGEKALPLFKLLKRSGPFTWTEEAERAFTQLKAYLSSPPVLVVPEPDEPLLLYLAATPHVVSAALIVERDEDNPHSAHPHPVSTRPGREQGREAPEPNGGPRPPTAGAGPPPACPTVPGAPNPQDGPGATAGRPRLSPSDPEVVGTEAECAPRGLSDKERPRDAAPGEEDRPRRKVQRPVYFVSEALRDAKTRYPQAQKMLYAILMASRKLRHYFQAHWVTVVTSYPLGQILHNREGTGRVVRWAIELSEFDLRFEPRRAIKSQALADFVAEWTPAPEPVSAPEATSDSSQLPHTAYWVMQFDGSLSLQGAGAGVTLTSPSGDVLRYLVRLDFRATNNMAEYEGLLAGLRVAAGLGIRRLLVLGDSQLVVNQVCKEYRCSDPQMDAYVRQVRRMERHFDGIELRHVPRWDNAVADELSRLASSRAQTPPGAFEERLAQPSARPDPLGETDAPERPPRPVGVQASGPEGSAPNSPRLIAWITEIQAYLADKTLPEYREGGERVRRISKRYVLVEGTLYRRAANEVLLKCIPREQGVELLADVHEGECGAHSASRTLVGNAFRQGFYWPTALNDAVDLVRRCRACQFHARQTHQPAQALQTIPLSWPFAVWGLDILGPFRRAPGGFEYLYVAVDKFTKWPEAYPVIKIDRHSVLKFIRGITARFGVPNRIITDNGTQFTSELFGDYCEDMGIKLCFASPAHPRSNGQVERANAEILKGLKTKTFNILRKHGDSWIEKLPAVLWANRTTPSRATRETPFFLVYGAEAVLPSKLTLRSPRVSMYCEADQDQLRRDDLDYLEERRRRAALRAARYQQSLRRYHQRHVRARSLCVDDLVLRRVQTRAGLSKLSPMWEGPYRVIGVPRPGSVRLATGDGTELPNPWNIEHLRRFYP

SEQ ID NO: 196692 - protein, 155 aa, Oryza sativa
  unsure (1)..(155): unsure at all Xaa locations
  Clone ID: PAT_MRT4530_92519C.1.pep
GVHGKVGACVHGVHGEEPDGVHRLLNHLRRCRLPSARSSPRRGRRETGCADMGGGHGGGGGRSHSRTRRQARWELASPWGARCSRXLPATAAPATRSLAATSYRLRCARSHAASCRLPRAHSPLLPLHLADAATPPDAVLAISAATDAVPCASEI

SEQ ID NO: 196693 - protein, 137 aa, Oryza sativa
  unsure (1)..(137): unsure at all Xaa locations
  Clone ID: PAT_MRT4530_9251C.1.pep
NKHTPGACCYLFLDSFPTVQKKTLKEYLATSICESTYQKHSNRTPAPDRVIDHQFHCHPADQVGRASPPFLSPLAGAGGCAAPALAVPVFIVFLPSLSGYPWPNLLPPGRERRRRAEAAPRIAPAHGLVQPRXXPKX

SEQ ID NO: 196694 - protein, 212 aa, Oryza sativa
  unsure (1)..(212): unsure at all Xaa locations
  Clone ID: PAT_MRT4530_92520C.1.pep
MPQRGRRGAWRGRMPRRGRRGAWRGRREMGYTARAQGDGVHGKVGACVHGVHGEEPDGVHRLLNHLRRCRLPSARSSPRRGRRETGCADMGGGHGGGGGRSHSRTRRQARWELASPWGARCSRXLPATAALATVATPLGRRCHSAGRRPRYLRRDRRRPVRLNRPSSSTAPPLPRRLINSAQDHLSPFTSLPEHRQDHRRLCRPRPRLRCAW

SEQ ID NO: 196695 - protein, 47 aa, Oryza sativa
  Clone ID: PAT_MRT4530_92521C.1.pep
GLHRLNKGPNVHWVWDWAQTYMAIPIASLSYQVVVYTFDIAFPCKYP

SEQ ID NO: 196696 - protein, 111 aa, Oryza sativa
  Clone ID: PAT_MRT4530_92522C.1.pep
MWKGAIGQGRNFKGKTAEDKKRQNVGELVEGPLHEVDIANKLKCARLEGRAEQEVKIVGNSRLIWLASLEIPPPLHLPAPPVHKDPSMAVTGGVDPVLTSPFTRIRQPLYP

SEQ ID NO: 196697 - protein, 249 aa, Oryza sativa
  Clone ID: PAT_MRT4530_92523C.1.pep
MGRGPVQLRRIENKINRQVTFSKRRNGLLKKAHEISVLCDADVALIVFSTKGKLYEFSSHSSMEGILERYQRYSFDERAVLEPNTEDQENWGDEYGILKSKLDALQKSQRQLLGEQLDTLTTKELQQLEHQLEYSLKHIRSKKNQLLFESISELQKKEKSLKNQNNVLQKLMETEKEKNNAIINTNREEQNGATPSTSSPTPVTAPDPIPTTNNSQSQPRGSGESEAQPSPAQAGNSKLPPWMLRTSHT

SEQ ID NO: 196698 - protein, 268 aa, Oryza sativa
  Clone ID: PAT_MRT4530_92524C.1.pep
MGRGPVQLRRIENKINRQVTFSKRRNGLLKKAHEISVLCDADVALIVFSTKGKLYEFSSHSSMEGILERYQRYSFDERAVLEPNTEDQENWGDEYGILKSKLDALQKSQRQLLGEQLDTLTIKELQQLEHQLEYSLKHIRSKKNQLLFESISELQKKEKSLKNQNNVLQKITTKAVLEVKPFCLHSSEQLMETEKEKNNAIINTNREEQNGATPSTSSPTPVTAPDPIPTTNNSQSQPRGSGESEAQPSPAQAGNSKLPPWMLRTSHT

SEQ ID NO: 196699 - protein, 53 aa, Oryza sativa
  Clone ID: PAT_MRT4530_92525C.1.pep
ARPTGMLHLAHHTLHTGKGDPGIAIHLDINCGAPDLNVLALEATNKCALVLRT

SEQ ID NO: 196700 - protein, 47 aa, Oryza sativa
  Clone ID: PAT_MRT4530_92526C.1.pep
VEGLKGWVWIFWGFTGVRIGILRRFSWFLKVEANNGCCNFFFVKVKI

SEQ ID NO: 196701 - protein, 120 aa, Oryza sativa
  Clone ID: PAT_MRT4530_92527C.1.pep
MSKTHKANYSEYVLAKAIWVETQYATWEKQQEEIEQTKELINRLGAGVNAGRVWSEQKDICETEVKETKTRIFIQVRAPELSGLTRSRQQGSLPPRVRTRQNQRQREIPTAGLCCFRIGH

SEQ ID NO: 196702 - protein, 46 aa, Oryza sativa
  Clone ID: PAT_MRT4530_92528C.1.pep
FSRVSGSLCYLTSLNCACDQSELVTQWVLAVDAVMAALFVGGGSGG

SEQ ID NO: 196703 - protein, 66 aa, Oryza sativa
  Clone ID: PAT_MRT4530_92529C.1.pep
MATSSMNCMRDQAHESDGSTPVDQMEWNWQGVAPRFGLLTMQQQFDETVNGNPAKPDGCMDVPARP

SEQ ID NO: 196704 - protein, 81 aa, Oryza sativa
  Clone ID: PAT_MRT4530_9252C.1.pep
KLGAWAGFWTFVIAKIIDKTMGLKITTEEEEKGLDLVEHGEFAYHNLWLVGREAHYDFEDPLVINEHTELLMPNDMIKKDI

SEQ ID NO: 196705 - protein, 135 aa, Oryza sativa
  Clone ID: PAT_MRT4530_92530C.1.pep
GKRVPQFERDIGGPKGGNRWEKGGLSEAKFQFTTKIWVGARKQTSNPPITKKKKTDGLGPQGGGPLAQNKPALILVLGGTRVFWPPQLDPKKSKPPFFFIHRGKKSFRFPGTKHNSGFGKLAGGPQSPKNRGKTP

SEQ ID NO: 196706 - protein, 60 aa, Oryza sativa
  unsure (1)..(60): unsure at all Xaa locations
  Clone ID: PAT_MRT4530_92531C.1.pep
MGAETVAIKVGMXCLGCTGAMRRVLTXKWTACXTFDINMEQNKVTQKGTVKPKNIFQTVS

SEQ ID NO: 196707 - protein, 124 aa, Oryza sativa
  Clone ID: PAT_MRT4530_92532C.1.pep
GRCLFWIYPFRLAVARFAILARRGVRCDDDRRRRDGSPRTCCGTTPSRRPAPTPCSDAFASTPTAAPAAFLSRPDTGRCDGGRPVDDAGRGGGGSREGDAHHHDQTPLGVPEVGEDRRHDAAGL

SEQ ID NO: 196708 - protein, 82 aa, Oryza sativa
  Clone ID: PAT_MRT4530_92533C.1.pep
IQSEYNRIQTIVHLRFNLITGGGPKHGFLRNTHTINQSINPSRESKRVGRDHACSGSRRRRPEGIRYPGKHDKKNSVVFSIR

SEQ ID NO: 196709 - protein, 114 aa, Oryza sativa
  Clone ID: PAT_MRT4530_92534C.1.pep
LHQPMYRNQMLPVHRYGCCKRDFRDDLHACTQAMAAMAQSHCPSPPAVAAGGQGDGRRPPPAAVVVAVPAAVGEGMPPPRMGGRGREAAAAGAEPAAPAHHVAQLPSSHQTHSN

SEQ ID NO: 196710 - protein, 170 aa, Oryza sativa
  unsure (1)..(170): unsure at all Xaa locations
  Clone ID: PAT_MRT4530_92535C.1.pep
GGDGEPAPALVTTTTRSGGGEFFSSPLRIHHRXEAVNGETVSRHRRRRLLPPXLAPAPGPPPPPPPSFRVPAPASPPPPSPPSFRAPQLPPPXLPPSLHEPARPIAPSVRRHRNSPLRQPPLPLPPSAPSERRXAASRRPIGAGLPIRGGEERRGEEKREKRELTGGSHM

SEQ ID NO: 196711 - protein, 84 aa, Oryza sativa
  Clone ID: PAT_MRT4530_92536C.1.pep
LNKWRTGIGESPTVGATPMLAQIGEYVSELHRGNLRDMCSICFTGPCVQQADFLIFFDQLLHQLSSSVHTLWEKRDGVRYDWHD

SEQ ID NO: 196712 - protein, 65 aa, Oryza sativa
  Clone ID: PAT_MRT4530_92537C.1.pep
NSFTLVLRQEEPVCRTISVCTGMQSSTLAGLLATQFLGSSQAVPAACSVVIMAIFGLTLASYWGN

SEQ ID NO: 196713 - protein, 104 aa, Oryza sativa
  Clone ID: PAT_MRT4530_92538C.1.pep
GELVKPKWWWPQKVQNFGGGFRGPWVHPGISGRALGGVQFFLLGGVLKVGGNKGKRCSRGKMLFLQNFTKKKGREVKGVKRGGLKGGLTPINWVGLNCRFSRGK

SEQ ID NO: 196714 - protein, 76 aa, Oryza sativa
  Clone ID: PAT_MRT4530_92539C.1.pep
MEGRKGISGGGGWEVGHPPGKEGDVVSPPPPRATGRVGRPRQKVGGVPHFRGMDVTGLRGVGGTTSSMGEEIGGTG

SEQ ID NO: 196715 - protein, 384 aa, Oryza sativa
  Clone ID: PAT_MRT4530_9253C.1.pep
MIAFAAQILAFCLLLLLLLLLQLQTTMAGDSSFSGVFDHGSHGVTLVKVDEAPRKCSSAAAAKKTDDDTAPAGGAPPKPLLVAAPCDAGVYPVVVFLHGYLAYNSFYSQLFEHVASHGFVVVGPQLFLGCELILSNNFDAKMLYTMSGPDTTDEINSAAAVINWLAAGGLTSKLPPNVRADATKISISGHSRGGKVAFALALGHANVSLRGGAGGATIAALVAVDPVDGFAAGKQTPPPILTYGGANSLRVPAPVMVIGTGLGGLARAAPLLPACAPPGVSHGEFYGECAAPACHLVARDYGHTDMMDDVTPGARGLATRAVCRSGGARAPMRRFFGGAMVAFVKRWVEGEPELLDCVRARPETAPVVLSAVEFRDEAIANHSY

SEQ ID NO: 196716 - protein, 53 aa, Oryza sativa
  Clone ID: PAT_MRT4530_92540C.1.pep
MDERDGGCDLLLGPQHQRGISFQYQSGGSSCRPRDGAQCILRDRARQRQVEVD

SEQ ID NO: 196717 - protein, 95 aa, Oryza sativa
  Clone ID: PAT_MRT4530_92541C.1.pep
TSPAKSGWGGSRPCPPLPSPAPPPPSGLRGRGPPRPPPIRRVPSSEPVSPRAPLRFHYFSPPSFSPSRVRCYPPRARRCLRPTPPPATMRRRRSP

SEQ ID NO: 196718 - protein, 331 aa, Oryza sativa
  Clone ID: PAT_MRT4530_92542C.1.pep
MALPRAGAAALLHDFYAAAKKLLERLNAKLPGASMSLADCYSIVMELIEHPQKYGLNRTAFVFWDAYHTSDAANQVIADRLYADMVSASAVQGNGNATTASTRAPRVVVDGGTPRRLQSLERPRDWTEEAAPQCHVALPEGSEARAGAPGGGAFVIFEVLSSAGVVFVASLRNVRGPPKLQPCLTEKYDDGADPSESLQICTAIIEEAGGGDRVMANVFPMALRGQAQAAGFGPTGWLRCPARLNCGRGLLALEFFGSHTRAKAHGSLTSFAKWSQASLKGSEPRVGSPLRAKEIGRKPEVGRRPLLPRDWMEEAALQCHVALPRGGSGPR

SEQ ID NO: 196719 - protein, 74 aa, Oryza sativa
  Clone ID: PAT_MRT4530_92543C.1.pep
GHQRAHKKQTNFITKGTHTGQPRGIHQAQDQGSAGHPPIWPGGARQPGELTQGTILTMGFNKVEMEQARVVRGA

SEQ ID NO: 196720 - protein, 116 aa, Oryza sativa
  unsure (1)..(116): unsure at all Xaa locations
  Clone ID: PAT_MRT4530_92544C.1.pep
MGGGRRRGARRRLGAAARLLLGDGRAARSHALRVEALTASHPLKFFTIYGLWLXPQYSYGGXPSCCRPTTFDVNKVPTMQGPSAPAARRTEDDEGWRRHAARGEGRPCVGGVRRTA

SEQ ID NO: 196721 - protein, 857 aa, Oryza sativa
  Clone ID: PAT_MRT4530_92545C.1.pep
MSPPVAGAASSGDGPPGRPPRELYTIPASSGWFQWDEIHETERRALPEFFGGAGGSGFGTASRNPRIYREYRDYIISRYREDTSRRLTFTEVRKALVGDVTLLRKLFAFLDSSGLINFSASPSRPEAQQQQRQTEAEARREAPGGLQVRPRPLLESSAEEKGGRGKENWFCLPPLTSYSDVFGEWAPGMAPICGLCGMECRDGNAQILKDGFKVCSKCYANNDNKGEANIHPGDKKERIDNHSSSAWTDAETLLLLEGVLKHGDDWDLIAQHVRTKNKSECIARLIQLPFGEHMLGTVNGKLDNRLHKIQTTDGKVNKSTVKESSSQPTETVDDMQIDGNEDGADKSVEEHPTKHRRLFSSIDITVSLMEQLAHLTTSTSPDVVAAAADAAIKALGNENPQARRAFQLSEKEYQTRAFSSNHARQRDYCSDDVGGGDRDVEMHGHPDQEEREMELLMASIIETQLKKIQYKIKHFEELELIMDQEYATLQQMKSSLVDEWQKQSQQFGVWRIGAILNRLGFDRTAGMESHRRAPPFFPNAERRRRQPKTPPSSPPGLSVSPNLARHLSSPRPPPPDAQFTGALMAKKGKAAAAEAAAPDAGVSGPQGGGGEKEGSFLLGSPTWEDAGGGRWRCKETGHELPEREKEAYGRSRACRLALIDQAVARKKPPLNAFKPHPEHKSKLICNITGDIINKSEEHIWKHINGKRFLNKLEKLEEKMASGEMAEGEAEQSNEGENKTKSRKKKDKKKAAVVNPSLPREPKPEIDDSDNSDDPDFWVPPVGSRWDDDDGKDRWTSSPVKDKDDAAEDEDGDDDGDDMADKDDKETREIASRTKRLSVEAVGPSSFASRKKKTKKEQ

SEQ ID NO: 196722 - protein, 81 aa, Oryza sativa
  Clone ID: PAT_MRT4530_92546C.1.pep
MNPLIAAASVIAAGLAVGLASIGPGVGQGTAAGQAVEGIARQPEAEGKIRGTLLLSLAFMEALTIYGLVVALALLFANPFV

SEQ ID NO: 196723 - protein, 83 aa, Oryza sativa
  Clone ID: PAT_MRT4530_92547C.1.pep
MMIDQPMQKHKTSTVIATYLAAYRIRRPYEMLLDGGWAYVICGGDGVFSLADEKYSDYASGRRRPSVDEAPEGGTKEDAHGIG

SEQ ID NO: 196724 - protein, 91 aa, Oryza sativa
  Clone ID: PAT_MRT4530_92548C.1.pep
WVFYFFGVFYSFFSLVEQADLINKSQHHNLWVRSRTGTKKPTAGTGLTLMAKLGHTPRRATRILPSIRATDEHQGDRGHTRTLYWRDPHGR

SEQ ID NO: 196725 - protein, 139 aa, Oryza sativa
  Clone ID: PAT_MRT4530_92549C.1.pep
GGINKPRNRPQIGGVTTHMKQWGQKSRGKGVYTERIFTIYTGHASINPFYREKPRGQGAGSGRGKGAHEHAHGGLGVGKEEAGAPRPRGDLREKTITNLTLGGFPFVLSSVAHPGVGRRGPPPAHLGELPQPNSNQARH

SEQ ID NO: 196726 - protein, 111 aa, Oryza sativa
  unsure (1)..(111): unsure at all Xaa locations
  Clone ID: PAT_MRT4530_9254C.1.pep
WWVVSRWFEVWIVVLMAIKDRFVSYCCETLTVPTTSXHGQQLDTLYSKAHCGVPNYEVPEINPWGSLGSPYLGXNGVIMIQESCASLSXVMRGVLSQLQKWRRVQHGVDDP

SEQ ID NO: 196727 - protein, 115 aa, Oryza sativa
  Clone ID: PAT_MRT4530_92550C.1.pep
MEDIGQRKRGKGAKSKSSGVGTERDKRRNQSVSHQPVTGLALLGATGKEGATVPHKCSCNLRETRSTEQHHISSSSRAVALAQQQPLGGSCQSIKIMYAVTPCKAYSAGRAREIS

SEQ ID NO: 196728 - protein, 652 aa, Oryza sativa
  Clone ID: PAT_MRT4530_92551C.1.pep
MPNVPEQSNVPVEHVTDQEIQFGEGSENTAQNDHSSAANIEGDAPDLDATEDPEDIFPGSSDPEGGFQPSPVHTPALSFPDDEEIGETGGLTSLQQGEQSHAATSSSSHHDGGSGSPLTGGSSAPDTAVAEPARPVTRLQRGEPQNLDEALTDKNWKDAMDAEFTALLENKTWHLIPPSHGKNVIDCKWVYKIKRKSDGSLDRYKARLVAKGFKQRYGIDYEDTFSPVVKAATIRTVLSIAVSRGWCLRQLDVQNAFLHGYLEEEVYMRQPPGYENKSKPNYICKLDKALYGLKQAPRAWYSRLSTKLISLGFQASKADTSLFFYNKGGVTIFVLIYVDDIIVASSRQKAVSALLADLSQEFALKDLGDLHYFLGIEVSTAGDDILLKQEKYAYDLLKRASMLDCKPVSTPLSVSEKLSAHSGTALGETDATRYRSIVGALQYLTLTRPDISFAVNKVCQFLHSPTIDHWMAVKRILRYVKFSVDLGLKISRSSSTLVSAFSDADWAGSIDDRRSTGGFAVFLGSNLVSWSARKQATVSRSSTEAEYKAVANATAEVMWVQALLKELGIDSPETACMWCDNLGATYLAVNPVFHARTKHIEIDYHFVRERVARKQLEIKFISSGDQVTDGFTKPLGAPQLRNFRYNLNLDKL

SEQ ID NO: 196729 - protein, 123 aa, Oryza sativa
  Clone ID: PAT_MRT4530_92552C.1.pep
ICSYPTCQPLVHHFSFPHSHLSPPTNFFDLPPFHTDTTIYIFLDASTNNTSLAESHLNEGSTSLLPLYIETLIWDLSTTQCLFPLSFPSVVATVYSALFCNGQDPLLSMNPSLNFIWRSHSEV

SEQ ID NO: 196730 - protein, 42 aa, Oryza sativa
  Clone ID: PAT_MRT4530_92553C.1.pep
ACIHRGYRSGGRALFILARALRPLIMMKKTSTCLALAITGST

SEQ ID NO: 196731 - protein, 783 aa, Oryza sativa
  unsure (1)..(783): unsure at all Xaa locations
  Clone ID: PAT_MRT4530_92554C.1.pep
SSRFFAIRDQVTKXSLLRGPCRNGLYPLPTSSLATSKQVLGAIKPTMSRWHSRLGHPSLAIVQKVVSSNNLPCLGDVNESGVCNACQQAKSHQLPYPKSFSVSNNPLELVFSDVWGPAPTSVGGRKYYVSFIDDFSKFTWIYLLKSKAEVFLKFQEFQQRVERLFNRKIISMQTDWGGEYEKLHSFFTKIGISHHVSCPYAHQQNGSAERKHRHIVEVGLALLSHASMPLKFWDEAFLAAAYLINRTPSKVIQYTTPLERLLDQKPNYSALRTFGCACWPNLRPYNKHKLQFRSKQCAFLGYSNIHKGFKCLDISTGRVYISRDVVFDENIFPFERRCTGSRCRSDPEGGFQPSPVHTPALSFPDDEEIGETGGLTSLQQGEQSHAATSPSSHHDGGSDSPLTGGSSAPDTAVVEPARPVTHLQRGIRKQKVYTDGTVRYGMLTTTGEPQNLDEALTDKNWKDAMDAEFTALLENKTWHLIPPSHGKNVIDCKWVYKIKRKSDGSLDRYKARLVAKGFKQRYDLSQEFALKDLGDLHYFLGIEVSTAEKLSAHSGTALGETDATRYRSIVGALQYLTLTRPDISFAVNKVCQFLHSPTIDHWMAVKRILRYVKFSVDLGLKISRSSSTLVSAFLDADWAGIDDRRSTGGFAVFLGSNLVSWSARKQATVSRSSTEAEYKAVANATAEVMWVQALLKELGINSPETACMWCDNLGATYLAVNPVFHARTKHIEIDYHFVRERVARKQLEIKFISSGDQVADGFTKPLGAPQLRNFRYNLNLDKL

SEQ ID NO: 196732 - protein, 1640 aa, Oryza sativa
  Clone ID: PAT_MRT4530_92555C.1.pep
MNVLCVSNKKKKQLNGEDWSWNNLNTLCWAIGSISGSMVEEQENRFLVMVIRDLLNLCEITKGKDNKAVIASNIMYVVGQYPRFLRAHWKFLKTVVNKLFEFMHEMHPGVQDMACDTFLKIVQKCKRKFVTQQVGENEPFVSELLSSLATTIGDLEPHQIHTFYESVGHMIQAESDNTKRDEYLKRLMSLPNQKWAEIIGQASQSIDILKNQDVIRSVLNILQTNTSVASSLGPHFFPQISLIFLDMLTVYRMYSELVSSTIAEGGPFASRTSFVKLLRSVKRETLKLIETFVDKAEDLPHIGKQFVPPMMDPILADYARNVPDARESEVLSLFATIINKYKGEMLEDVPRIFEAVFQCTLEMITKNFEDYPEHRLKFFSLLRAIGTHCFQALIQLSSQQLKLVIDSINWAFRHTERNIAETGLSLLLEILKNFQASGFQNQFYKTYFLNIEQEIFAVLTDTFHKPGFKLHVLVLQHLFCVVDGLTEPLWDASSVPYQYTDNAMFVRDYTIKLLGSSFPNMTPTEVTKFVDGLLSSKHDLPSFKNHIRDFLVQSKEFSAQDNKDLYAEEAAAQRERERQRMLAIPGLIAPSELQDEMLLRLLFYDAVCYVRDRGAWISPCICIKDILTQVVNLETAAATWRVITTMLSSQSRARALNTRLALSTTRKGDLSVTEYIGKMKTLADEMSSAGKPLDDEEMMSYILPGLDDDYEPVVSTLVGKAEAVPVAEIYTQLLSFESRAKLRQQANGSSVNSARRGGKGGGGGFSNNVNTGNTGAFRGRGGGRGDRGGRGRGNGGGARFSNKPRSTCQLCGKIGHVVADCWYRYDENFIPDSKTAAAASYGVDTNWYMDTGATDHITGELDKLTTHEKYNGKEQIHTASGAGMDIKHVGHSIIHTPICNIQLKNILHVLKAEKNLISAHRLAVDNHAFVEVHPRFFAIKDQVTKNLLLRGPCRNGLYPLPTSSLATSKQVLGAIKPTMSRWHSRLGHPSLAIVQKVVSSNNLPCLGDVNESGVCNACQQAKSHQLPYPKSFSVSNNPLELVFSDVWGPAPTSVGGRKYYVSFIDDFSKFTWIYLLKSKAEVFLKFQEFQQRVERLFNRKIISMQTDWGGEYEKLHSFFTKIGISHHVSCPYAHQQNGSAERKHRHIVEVGLALLSHASMPLKFWDEAFLAAAYLINRTPSKQGEQSHAATSPSSHHDGGSDSPLTGGSSAPDTAVVEPARPVTHLQRGIRKQKVYTDGTVRYGMLTTTGEPQNLDEALTDKNWKDAMDAEFTALLENKTWHLIPPSHGKNVIDCKWVYKIKRKSDGSLDRYKARLVAKGFKQRYGIDYEDTFSPVVKAATIRTVLSIAVSRGWCLRQLDVQNAFLHGYLEEEIEGSICFAGRFESRICTQRFGGSALLPWNREKLSAHSGTALGETDATRYRSIVGALQYLTLTRPDISFAVNKVCQFLHSPTIDHWMAVKRILRYVKFSVDLGLKISRSSSTLVSAFLDADWAGSIDDRRSTGGFAVFLGSNLVSWSARKQATVSRSSTEAEYKAVANATAEVMWVQALLKELGINSPETACMWCDNLGATYLAVNPVFHARTKHIEIDYHFVRERVARKQLEIKFISSGDQVADGFTKPLGAPQLRNFRYNLNLNKL

SEQ ID NO: 196733 - protein, 2047 aa, Oryza sativa
  Clone ID: PAT_MRT4530_92557C.1.pep
MAEKLRDLSQPIDVPLLDATVAAFYGTGSKEERNAADQILRDLQNNPDMWLQVVHILQNSHNLNTKFFALQVLESVIKYRWNALPTEQRDGIKNYISDVIVQLSSNEASFRQERLYVNKLNIILVQLLSEEIFDFSRGEMTQQKIKELKSSLNSEFRLIHELCLYVLSATQRPELIRATLATLHAFLSWIPVGFIFESPLLETLLKFFPMAAYRNLTLQCLTEVAALQFGDFYNVQYVKMYTIFMMQLQAILPPGTIPDAYANGSSEEQAFIQNLALFFTSFFKNHMRILEASPENRAALLLGLEYLIGISYVDDTEVFKVCLDYWNVFVLELFEAHNQMEPAASVNMMGLQAQMLPGVDGTITAVQQRRQLYSGPLSKLRMLMICRMAKPEEVLIVEDENGNIVRETMKDNDVLVQYKIMRETLIYLSHLDHEDTEQQMLKKLSKQLNGEDWSWNNLNTLCWAIGSISGSMVEEQENRFLVMVIRDLLNLCEITKGKDNKAVIASNIMYVVGQYPRFLRAHWKFLKTVVNKLFEFMHEMHPGVQDMACDTFLKIVQKCKRKFVTQQVGENEPFVSELLSSLATTIGDLEPHQIHTFYESVGHMIQAESDNTKRDEYLKRLMSLPNQKWAEIIGQASQSIDILKNQDVIRSVLNILQTNTSVASSLGPHFFPQISLIFLDMLTVYRMYSELVSSTIAEGGPFASRTSFVKLLRSVKRETLKLIETFVDKAEDLPHIGKQFVPPMMDPILADYARNVPDARESEVLSLFATIINKYKGEMLEDVPRIFEAVFQCTLEMITKNFEDYPEHRLKFFSLLRAIGTHCFQALIQLSSQQLKLVIDSINWAFRHTERNIAETGLSLLLEILKNFQASGFQNQFYKTYFLNIEQEIFAVLTDTFHKPGFKLHVLVLQHLFCVLSCASVAIIDLTTFPAQVTKFVDGLLSSKHDLPSFKNHIRDFLVQSKEFSAQDNKDLYAEEAAAQRERERQRMLAIPGLIAPSELQDEMLLPLLFYDAVCYVRDRGAWISPCICIKDILTQVVNLETAAATWRVITTMLSSQSRARALNTRLALSTTRKGDLSVTEYIGKMKTLADEMSSAGKPLDDEEMMSYILPGLDDDYEPVVSTLVGKAEAVPVAEIYTQLLSFESRAKLRQQANGSSVNSARRGGKGGGGGFSNNVNTGNTGAFRGRGGGRGDRGGRGRGNGGGARFSNKPRSTCQLCGKIGHVVADCWYRYDENFIPDSKTAAAASYGVDTNWYMDTGATDHITGELDKLTTHEKYNGKEQIHTASGAGMDIKHVGHSIIHTPICNIQLKNILHVPKAEKNLISAHRLAVDNHAFVEVHPRFFAIKDQVTKNLLLRGPCRNGLYPLPTSSLATSKQVLGAIKPTMSRWHSRLGHPSLAIVQKVVSSNNLPCLGDVNESGVCNACQQAKSHQLPYPKSFSVSNNPLELVFSDVWGPAPTSVGGRKYYVSFIDDFSKFTWIYLLKSKAEVFLKFQEFQQRVERLFNRKIISMQTDWGGEYEKLHSFFTKIGISHHVSCPYAHQQNGSAERKHRHIVEVGLALLSHASMPLKFWDEAFLAAAYLINRTPSKQGEQSHAATSPSSHHDGGSDSPLTGGSSAPDTAVVEPARPVTHLQRGIRKQKVYTDGTVRYGMLTTTGEPQNLDEALTDKNWKDAMDAEFTALLENKTWHLIPPSHGKNVIDCKWVYKIKRKSDGSLDRYKARLVAKGFKQRYGIDYEDTFSPVVKAATIRTVLSIAVSRGWCLRQLDVQNAFLHGYLEEEIEGSICFAGRFESRICTQRFGGSALLPWNREKLSAHSGTALGETDATRYRSIVGALQYLTLTRPDISFAVNKVCQFLHSPTIDHWMAVKRILRYVKFSVDLGLKISRSSSTLVSAFLDADWAGSIDDRRSTGGFAVFLGSNLVSWSARKQATVSRSSTEAEYKAVANATAEVMWVQALLKELGINSPETACMWCDNLGATYLAVNPVFHARTKHIEIDYHFVRERVARKQLEIKFISSGDQVADGFTKPLGAPQLRNFRYNLNLDKL

SEQ ID NO: 196734 - protein, 1445 aa, Oryza sativa
  Clone ID: PAT_MRT4530_92558C.1.pep
MASSSNSTTNPLSGQVVPEKLTRNNFLLWKTQILPIIRGARMEGYLTGATRAPSAAIDVKEGDKVITKINPAYEEWVVVDQQVLGFLLASVSKDILTQVVNLETAAATWRVITTMLSSQSRARALNTQLALLTTRKGDLSVTEYIGKMKTLADEMSSAGKPLDDEEMMSYILAGLDDDYEPVVSTLVGKAEAVPVAEIYTQLLSFESRAKLRQQANGSSVNSARRGGKGGGGGFSNNVNTGNTSTFRGRGGGRGDRGGRGRGNGGGARFSNKPRPTCQLCGKIGHVVADCWYRYDENFIPDSKTAAAASYGVDTNWYMDTRATDHITGELDKLTTHEKYNGKEQIHTASGAGMDIKHIGHFYYLYPHTQKSGEKNPLWGLKLKKNLISAHRLAVDNHAFVEVHPRFFAIKDQVTKNLLLRGPCRNGLYPLPTSSFATSKQVLGAIKPTMSRWHSRLGHPSLAIVQKVVSRNNLPCLGDVNESGVCNACQQAKSHQLPYPKSFSVSNNPLELVFSDVWGPAPTSIGGRKYYVSFIDDFSKFTWIYLLKSKAEVFLKFQEFQQRVERLFNRKIISMQTDWGGEYEKLHSFFTKIGISHHVSCPYAHQQNGSAERKHRHIVEVGLALLSHASMPLKFWDEAFLAAAYLINRTPSKVIQYTTPLERLLDQKPNYSALRTFGCACWPNLRPYNKHKLQFRSKQCAFLGYSNIHKGFQCLDISTGRVYISRDVVFDENIFPFERLHANAGARLRSEILLLPSSLYQNIATNGVEHNDRMPNVPEQSNVPVEHVTDQEIQFGEGSENTAQNDHSSAANIEGDAPDLDATEDPEDIFPGSSDPEGGFQPSPVHTPALSFPDDEEIGETGGLTSLQQGEQSHAATSSSSHHDGGSGSPLTGGSSAPDTAVAEPARPVTRLQRGIRKQKVYTDGTVRYGMLTTTGEPQNLDEALTDKNWKDAMDAEFTALLENKTWHLIPPSHGKNVIDCKWVYKIKRKSDGSLDRYKARLVAKGFKQRYGIDYEDTFSPVVKAATIRTVLSIAVSRGWCLRQLDVQNAFLHGYLEEEVYMRQPPGYENKSKPNYICKLDKALYGLKQAPRAWYSRLSTKLISLGFQASKADTSLFFYNKGGVTIFVLIYVDDIIVASSRQKAVSALLADLSQEFALKDLGDLHYFLGIEVSTAGDDILLKQEKYAYDLLKRASMLDCKPVSTPLSVSEKLSAHSGTALGETDATRYRSIVGALQYLTLTRPDISFAVNKVCQFLHSPTIDHWMAVKRILRYVKFSVDLGLKISRSSSTLVSAFSDADWAGSIDDRRSTGGFAVFLGSNLVSWSARKQATVSRSSTEAEYKAVANATAEVMWVQALLKELGIDSPETACMWCDNLGATYLAVNPVFHARTKHIEIDYHFVRERVARKQLEIKFISSGDQVTDGFTKPLGAPQLRNFRYNLNLDKL

SEQ ID NO: 196735 - protein, 704 aa, Oryza sativa
  Clone ID: PAT_MRT4530_92559C.1.pep
MRGAARLLLPLVVLLLHAARGSAGSTGGGGNGSCTQSCGRMRVPYPFGFSRGCTVQLGCDDASGTAWLGGTRGLGLLVSNVTPRAIVLTLPPNCSRPLNESLDALFTDNYAPTAQNALVVSSCDPQAAARLSNCSIPPEAYLEKSCNSIRCVLPSTKANVDGTNVTDPFLNRSEMRRLGSDCRGLVSASIYSNTAGPALQLTALELDWWVQGRCGCSSHAICDGFTPPSTQKEAFRCECQEGFEGDGYTAGAGCRRVPKCNPSKYLSGSCGKLVQIGLLVAGVFFGAMVMGITCLVYHLLRRRSAALRSQKSTKRLLSEASCTVPFYTYREIDRATNGFAEDQRLGTGAYGTVYAGRLSNNRLVAVKRIKQRDNAGLDRVMNEVKLVSSVSHRNLVRLLGCCIEHGQQILVYEFMPNGTLAQHLQRERGPAVPWTVRLRIAVETAKAIAYLHSEVHPPIYHRDIKSSNILLDHEYNSKVADFGLSRMGMTSVDSSHISTAPQGTPGYVDPQYHQNFHLSDKSDVYSFGVVLVEIITAMKAVDFSRVGSEVNLAQLAVDRIGKGSLDDIVDPYLDPHRDAWTLTSIHKVAELAFRCLAFHSEMRPSMAEVADELEQIQVSGWAPSTDDATFMSTTSSLCSSAPSRCTDKSWGTAKSKRQAAANAVVKQETTKCAVADSPVSVQERWFSDRSSPSSNSLLRNSSLN

SEQ ID NO: 196736 - protein, 137 aa, Oryza sativa
  Clone ID: PAT_MRT4530_9255C.1.pep
MPLPRLLPSAKLPKTTAASIGYSGRLLPLARPLFQLDPPSGLGEVATNELRHRLDHLSGQIRHVGLRRLLSPRGLKEAATAVWAQGAPRLPPLRGLGVAKGRDRKGKRIREREEDVRPAAAPPSAVNARATLLATAT

SEQ ID NO: 196737 - protein, 130 aa, Oryza sativa
  unsure (1)..(130): unsure at all Xaa locations
  Clone ID: PAT_MRT4530_92560C.1.pep
MEKTRTTRIVSILVFLVLLVQGDTYEYKYKTPYEERGHGQHRHHKATSQYKHTYAKTSCXISTSEISLGKPHMVPTGTKERNLVLSLISPGKNSRRKTTLLSTTGWFHXPPCRQXIDRLPQTLYWCDYGE

SEQ ID NO: 196738 - protein, 98 aa, Oryza sativa
  unsure (1)..(98): unsure at all Xaa locations
  Clone ID: PAT_MRT4530_92561C.1.pep
AGRARSTPXQGPTPDPPPXPLCRSRASHRRSRRRSPRXGSTSPGLSRASRHRSRRCRRRRRRRGQPRWRGRRRGRPRQRGQRRVRPQRRLRRRGRSGS

SEQ ID NO: 196739 - protein, 56 aa, Oryza sativa
  Clone ID: PAT_MRT4530_92562C.1.pep
RCHKEGSHKQHRSPAAKATSKPCIIEKHLLFDYAGFACSFRCIIEKQMFFKTRHTN

SEQ ID NO: 196740 - protein, 54 aa, Oryza sativa
  Clone ID: PAT_MRT4530_92563C.1.pep
EDHNMNGISCSSIFLWEVNKFSWSIQHSSEFFYPSYFFFPKIKHCKPVLNTFLQ

SEQ ID NO: 196741 - protein, 145 aa, Oryza sativa
  unsure (1)..(145): unsure at all Xaa locations
  Clone ID: PAT_MRT4530_92564C.1.pep
PRHGKYMACCLMYRGDVVPKDVNAAVATIKTKRTIQFVDWCPTGFKCGINYQPPSVVPGGDLAKVQRAVCMISNSTSVVEVFSRIDIKFDLMYSKRAFVHWYVGEGMEEGEFSEAREDLAALEKDYEEVGSEFDDGDEGDXGDEY

SEQ ID NO: 196742 - protein, 227 aa, Oryza sativa
  Clone ID: PAT_MRT4530_92565C.1.pep
LFPGPEGEAHYQGNKSGHPRSLGGFQPSFVRRGGLLVWVGTRQLGRTLAATGRDADSAEVGGGEDEHHGEVDHFWRAEGASAPPPSGVVAAAAAPEKGEKGGWIWRKRKRWRWEGVGMNRSCRRAPLLPHCRVSQLQLPPPGAGLRRAAGHRRGAAALLSPASPWVYFFHKSLVKLHHATSSGVSASPSLIPNTGFAASDGGRSRSNNRAAVVVGGKPSSSPPPLPP

SEQ ID NO: 196743 - protein, 67 aa, Oryza sativa
  Clone ID: PAT_MRT4530_92566C.1.pep
LGEEEAKNILEVLKKNIDIFTWSPDEVGGVSTNFIMHHLAVKPDAKPREQKLHKMSTDHQEAAKPEV

SEQ ID NO: 196744 - protein, 138 aa, Oryza sativa
  Clone ID: PAT_MRT4530_92567C.1.pep
FYRRTPTTVIVRESHVERMGSIQDVAYEILNVLEFNSTRKRQSVVCRFPNGRLVLYCKGADNVVYDLLADGNNDIKKISREHLEQFGSAGLRTLCLAYRDLSREQYESWNEKFIQAKSSLRDRDKKLDEVAELIEKDL

SEQ ID NO: 196745 - protein, 367 aa, Oryza sativa
  unsure (1)..(367): unsure at all Xaa locations
  Clone ID: PAT_MRT4530_92568C.1.pep
MQRQGELTGKIANKEPQTLEHLLRIIDGYARGKEDSKRRQAIQAEYDKASIAAAQAQVQAQXDCTGKAVMAVKEVQALRKEFDAQQAGSHQHLFSRKSGRTCIAHTTGDPRTPPXQCRNIRQHGNAQDPRPQQGAAVEAPHEAAQEQAPPAEQCHDVQRXAPRYLNQQISFGPEDAEGVLFPHQDPLVISAEVAGFEVRRILVDGGSSADVIFAEAYAKMGLPTLALTQAPASLRGFGGEAVQVLGQVQLVVAFGTSENRRKEQILFDAVDIPYNYNAIFCRTTLNKFDAISHHNYLKLKMPDRRRRSHKACLAGGDLGKEEAENILEVLKKNIDIFAWSPDEVGGVLTDLIMHHLAVKPDDKPRKQ

SEQ ID NO: 196746 - protein, 399 aa, Oryza sativa
  Clone ID: PAT_MRT4530_92569C.1.pep
MAIEEVQALRKEFDAQQAVSNQQPVRKKRGNAQDPRLQQGAAVEAPREAAQEQAPPVEQRQDIQLGVIQVITRADPPVQQSKRQKKMQLRTVHNITAAGQGALREVQVLGQVQLVVAFGTSENRRVEQILFDVVDIPYNYNAIFGRAILNKFEAISHHNYLKLKMPGPTGVIVVKGLQPSTASKGDLAAINSEEEAKNILEVLKKNIDIFTWSPDEVGDLNKVCPKDDFPLPRIDQLVDSTADCELMSFLDAYSGYHRIHMNPADIPRQPSSRSSPVAVSAALVQETEPGQKPVYFISEALQGAKTRYIEMEKIAYALVMASRKLKHYFQARKVTVPSQYPLGEVLRGKEITGRLSKWAAELSPFDLHFVARTAIKSQVLADFVAEWTLAFAPEPEPVE

SEQ ID NO: 196747 - protein, 249 aa, Oryza sativa
  Clone ID: PAT_MRT4530_9256C.1.pep
MTKDETLLVFTLVVSSVSVFLFGILLFMVLISATRDFRERTKSKLVKIMIWAGIVVITFAIAVRIYPIFIFLLKERIKPLVEALYDKLPWIWEVSLSRYWDRLIDFLDRYLWACAQRIQTGIRKQKGEFVVTFSCRVKKRLYARAIEVGIHLSLLSNLFWILKTTLAVGYRLLWVLYYIISFEGFLGSFRLYLVYFGFYCLLFSGKWLRTSEDRGERQAQISGILLRGMLIECAFSVLCLEEDSNLHAL

SEQ ID NO: 196748 - protein, 61 aa, Oryza sativa
  Clone ID: PAT_MRT4530_92570C.1.pep
LSPVPNLGSLASSAPRSYFFLFFLFLSVRFFFLFLFFFFPRIKRGFILISRKTGQYIAAQL

SEQ ID NO: 196749 - protein, 1719 aa, Oryza sativa
  unsure (1)..(1719): unsure at all Xaa locations
  Clone ID: PAT_MRT4530_92571C.1.pep
MEAMRQNMTRLQDMLRQMQEQHQAYETARQAKVTSAPILRYSAGYIPPQAXPQASTQALPPQAIQAPVYFAGQPSAATVHPTPHVQPQVRPVVAKVHPGQMSQAMAEGASALQAQLQAFLXQLNQPHNISSTGSSARPEGNTSQVRLQQCCSSTNHLTTGTDTKLWNKPGVEPGRHGLDPAFVRSIHGGTPGIAVRGRSAEHCGATTHASHDFTLRHAISTDKRAFGTYEEPKMQQHLLGIRQRPGESIREYMRRFSQARCQVQDITEASVINAASAGLLGGELTRKITNKEPQTLEHLLRIIDGYARGEEDSKRRQAIXAEYDKASITTAQAQVQAQVAEPAPLTVRQPQLANQGQPPRPSQAPMTWRKFRNDRTGKAVMAIEEVQALRKEFDAQQAVSNQQPVRKKVRKDLYCAFHGRSSHTTEXAXNIRQRGNAQDPRLQQGAAVEAPREAAQEQAPPVEQRQDIQLGVIQVITRADPPVQQSKRQKKMQLRTVHNITAAGQGALRYLNXHISFGPEDAEGVLFPHQDPLVISVEVAGFEVRRILVDGGSSTDVIFAEAYAKMGLPTLALTXAPASLRGFGGREVQVLGQVQLVVAFGTSENRRVEQILFDVVDIPYNYNAIFGRAILNKFEAISHHNYLKLKMPGPTGVIVVKGLQPSTASKGDLAAINRXVHNVEAEPHDHAKRMPKSAPHGKVIKMQVDDADPTNFXQLGGDLGEEEAKNILEVLKKNIDIFTWSPDEVGGVSTNFIMHHLAVKPDAKPREQKLHKMSTDHQEAAKPEVXKLLKAGVIXEIDHPEWLANPFLVRKSNGKWRMCIDFTDLNKVCPKDDFPLPRIDQLVDSTADCELMSFLDAYSGYHRIHMNPADXPKTAFITLFDTFCHLRMPFSLRNAGATFARLVYKVVYKQLGRNVEAYVDDIIVTSRKAFDHASDLXETFDNLRAAGMKQNPEKCVFGVRAGKLLGFLVSERGIEANPEKIDAIQQMKPLSSVREVQKLTGXIAALSRFLSKAAERGLPFFETLRGTGKFSWTPECQVAFDXLKQYLQSPPALVSPAPRSELLLYLAASPVAVSAALVQETEPGQKPVYFISEALQGAKTRYIEMEKIAYALVMASRKLKHYFQARKVTVPSQYPLGEVLRGKEITGRLSKWAAELSPFDLHFVARTAIKSQVLADFVAEWTLFDTTNNMAEYEAVLLGLRKAKAFGVRRLLIRTDSKLVASHVDKSFEAKEEGMKRYLEAVRSMEKCFTGITVEHLPRGQNEEADTLAKSAVCGGPHSSGIFFEVLYAPSVPTESLDIMAIDQAKLGEDPEDWRTPFVKYLKNCXLPQDEAEAKRLQLRATKYKLVSGQLYRSGVLQPLLRCISFAEGEEMAKEIHQGLCGAHQATRTVASKVFRLGVYWPTVLKVCVEQTKRCGSCQRHSRSQTAPQYELQPIAPVWPFARWGIDIIGPFPMARNGYKFAIVAVKYFSCWIKAEPLGAITLATVXKFVWKNIVCRFGVPKEFITDNGKQFDSDKFREMCEGLNLEIRFASVAHPQSNGAAKRTNGKILEALKKRLEGAAKGKWPDEMLSVLWALRTTPTRPTKFSLFMLLYGDEAMTPTELGANSPRXMFSGGEDGREVSLELLEGVRVEALEHMRKYATSTSATYNKKVRPTELLLSHLVLRKKANPVAVGKLELKXEGPYLIKHRSRIGSFRLATLEGKEFDHSWNAASLKRFYV

SEQ ID NO: 196750 - protein, 308 aa, Oryza sativa
  unsure (1)..(308): unsure at all Xaa locations
  Clone ID: PAT_MRT4530_92572C.1.pep
MEAALPEDLLANVLGRLPPCSLAVSRCVRKDWRALIDNRRLLRADLLPLRLDAFFFKGQILTSHPYFFSSRSTARRIGGRLDFLDTFNDEDLQIMDHCNGLLLFFERLANPATRQWMHLPTFPMSPCVTLGLRTGFCLVFCVPLVPENIFYRSSDNLDPDSNSSVDQESLEWPLSSRCTTHVFSSRKWRWEERSFVRQQGVEPANETIADLQFHPQQFQRRALYLKGEIYVQCKNNSLMRITLSNDKYQMIKSPVESKIDDGNGVLQLGKSEKGVXLCVAYEDNNFPQFQVWLLNKSSSCGGQVEWAL

SEQ ID NO: 196751 - protein, 104 aa, Oryza sativa
  Clone ID: PAT_MRT4530_92573C.1.pep
SAIRVFKSSDYKFNLNSFPGCVLCSHASVVLGRLVVQTELGPTNGPFKFTWVITRNSKPIIIQFKGPRFSLMLITYQLKFEFSILNLKLILRFSHRSLFFNLCF

SEQ ID NO: 196752 - protein, 151 aa, Oryza sativa
  Clone ID: PAT_MRT4530_92574C.1.pep
FCSAVGQRQPAPTVTRAENARENEHKNTMNSGVFWRCVETFQHFLCFFFLLFSTESKNVGSSRATRSVRTKRTSSSTCARPSKSQSCTRLLISSQEDVSRHASCSLEEQLASRDNDTRSRRALPPPPSTRSPRRRRNHFRTRGRTRGRTRG

SEQ ID NO: 196753 - protein, 59 aa, Oryza sativa
  Clone ID: PAT_MRT4530_92575C.1.pep
KGKITNPGGKKGAKKLTGLKKGFQPPLIYRGGPIKIQWGGGQKNGAQVQMGRVPTQFFG

SEQ ID NO: 196754 - protein, 124 aa, Oryza sativa
  Clone ID: PAT_MRT4530_92576C.1.pep
VGSSRATRSVRTKRTSSSTCARPSKSQSCTRLENRREQAKKLGEEKLTNRKQMKEPINELAQVLQLTSYSLQMLATRSKGSFVEKTFLISSQEDVSRHASCSLEEQLQAMETLISICMNKSLPS

SEQ ID NO: 196755 - protein, 107 aa, Oryza sativa
  Clone ID: PAT_MRT4530_92577C.1.pep
MVGRGFGGHLHVEDDETNPTVLTTTTTDVGRRPATKGAAAAARLDRRRRATAAGGEGGRAAGLPHSSAHLLAAAASGGDGRSGAAARLASAGGGKRTKRRGSDSTAH

SEQ ID NO: 196756 - protein, 87 aa, Oryza sativa
  Clone ID: PAT_MRT4530_92578C.1.pep
SSQCFMILIASQVRLLHNTNWRRRLPGGGGQALQRCSGSPGRPSFSARVPHVCLDRVPRNLRRCVRRLEPGDIGPQPRVRSDLLEYP

SEQ ID NO: 196757 - protein, 237 aa, Oryza sativa
  Clone ID: PAT_MRT4530_92579C.1.pep
MSGSDTSGSVHVDEHGHGHGKASSSYDGAGAPAPAPAPFQGHRKAGSGSSDVPFLLRSGGSGGDGLRRCLGLIDFVLRVAAFGPTLAAAISIGTSDERLSVFTNYFQFRARFDDFPAFEFFIVANAIAAGYMVLSLPFSAATIMSSKATGVKLLLLICDTIMVGLLTAAASAAAAMVYVAHEGNLRANWVPICLQFHGFCQRTSGAVIASFLAVFVLMVLIVMAAFTMPRRTHHTAS

SEQ ID NO: 196758 - protein, 36 aa, Oryza sativa
  Clone ID: PAT_MRT4530_9257C.1.pep
EESARGVILLHFYQLWAQEVSQGLIVFISVCPLNDR

SEQ ID NO: 196759 - protein, 83 aa, Oryza sativa
  Clone ID: PAT_MRT4530_92580C.1.pep
EAWVFFFFFFIVFFFFFFFFFYQKVHCLIVLSLEIHHLLTQIIHIVFRKERHHFILDGFLKNLRKVWNSDLPKKQKPAPGSNR

SEQ ID NO: 196760 - protein, 161 aa, Oryza sativa
  Clone ID: PAT_MRT4530_92581C.1.pep
MELAADAIGVVYSSGSTTRLLISDTLRTPGRTIRNFVVGCSLMSVYQQSSGLTGFSCGVPSVPSQLGLTKFFYFLLARRFDDNATASDELILGGAGGKDDNVRMQYIPLARSASTRPLCSVYYYLALIAITVRRKSVQLPKRAFVAEELEEAPLSRRRDSA

SEQ ID NO: 196761 - protein, 192 aa, Oryza sativa
  Clone ID: PAT_MRT4530_92582C.1.pep
MDGQDLTEDLWSPVRTFVSGTSIEEKKKLPPLDDDGRIGLELMPPSALASPMQRIWIRSRSNLSCASQMDELGEKKNKDNKILKVGDIDSITPSTRIKQRVARLHQGQNARARRAKRKRKQRLSEQRCGPDTCRCNNCDRNVQRAGARTNYFLSFKMKLFFKIGTDIKKVGAYESSSPVLLEYDSWHGFPRY

SEQ ID NO: 196762 - protein, 54 aa, Oryza sativa
  Clone ID: PAT_MRT4530_92583C.1.pep
YAFNINISFRRLVGSMFRKWSKIVCCPLKRSNYFWLHRLVYSWNNPNDIFVYEK

SEQ ID NO: 196763 - protein, 159 aa, Oryza sativa
  unsure (1)..(159): unsure at all Xaa locations
  Clone ID: PAT_MRT4530_92584C.1.pep
FFFFWRNSFLLISMRAGEYEQTWQLXPRGIGTPGPKAFAGLCGLQIIVASQHPSXGQHRVASRQLSPAVQHRCPAGIGLLFAHHLGHICGTVPCIWHLCSPVGSNPIIFHWLAVRPSGFQHQLGLGEAQHSVQGSAAGAVXPSMHDICLSRPRAPIRTS

SEQ ID NO: 196764 - protein, 117 aa, Oryza sativa
  Clone ID: PAT_MRT4530_92585C.1.pep
PNTGGVHGPNSFHASTSATSRVKPMVCISTLKTSFSPDGSPIISASRHGSEYSWKVRSGKVPLWGTPDSEPPLIRCAPGTLMFLPASLKLSCWDPDPFKLGSFTVSKKFSWSQLLFV

SEQ ID NO: 196765 - protein, 120 aa, Oryza sativa
  unsure (1)..(120): unsure at all Xaa locations
  Clone ID: PAT_MRT4530_92586C.1.pep
MWYSASPPRSSLPLPMPMTTPLPXPAPSPEAEASPPSPPTEASPPPLAPPPSVTSSPPPPAAGPLMPPPPPPPSVTSSPPPPPLPPPPPPPAASPPPPPPSPPPPSPVKSSPPPPPAWSP

SEQ ID NO: 196766 - protein, 73 aa, Oryza sativa
  Clone ID: PAT_MRT4530_92587C.1.pep
RKRSMKIQGGRKERKDIQSGEEKIRKARTDKGNGEKRGREERVETWRRTTTSASCASGKPRLRLLAWSATKPL

SEQ ID NO: 196767 - protein, 267 aa, Oryza sativa
  Clone ID: PAT_MRT4530_92588C.1.pep
PHRERKRREQRWGERQEPRRWRKAGESARDVICGEEKRVRGREDDAAPAAPQRQGKSNREKGEPDDDVVSTYIVHVMPAHAPRRLPTHRASRRLTRGYASLVRGLLPRHIADPAPRLLYSYAHAATGFAARLTARQAAHLEAQPSIAAVVRDTAYQLHTTWSSDFLNLSPSFGLQAESNGAVDAVIGVIDTGIYPKDRASFAPDPSLPPTPPPTFRGSCVSSFRDSNASAYCNNKLVGAKTFYRGYEAQNGPIDERVQTKSPLDQES

SEQ ID NO: 196768 - protein, 164 aa, Oryza sativa
  unsure (1)..(164): unsure at all Xaa locations
  Clone ID: PAT_MRT4530_92589C.1.pep
GRNPSPRRRRYRGAAGSNAAETGGRPSWSPRRGSEESGQRRPAQVGGGGESPRSGTGDGEAGAGVIRPGGDGDDGEAGARRDGIDRNDDDIQIRAAAWMAEDASTVNRRPAGVGGCGGHELPRRWRPQRRSRQGRVXPRTLCRADDAATTLTTPAELDGDGTGG

SEQ ID NO: 196769 - protein, 99 aa, Oryza sativa
  Clone ID: PAT_MRT4530_9258C.1.pep
MSRRFVVPRRIDDVVEERERGSLPSFPILCRSPRGSPTDLVPRSYAAIIVAVSSSMPLTSRRSRRCPIELGFLRAICAAMERHLGVVAGVGEREGWWWP

SEQ ID NO: 196770 - protein, 129 aa, Oryza sativa
  Clone ID: PAT_MRT4530_92590C.1.pep
MPGRPNVPVEGPRHGPVNAGQSSSADHDARVGRSLPAVSCAGRGGGRCFRPGGARQKRRTRVEGSPARCARRKELAISGARVGSGRGPVARSLGARRPRRARGEELAGLDASRSRAREGSPAGRTREEG

SEQ ID NO: 196771 - protein, 240 aa, Oryza sativa
  unsure (1)..(240): unsure at all Xaa locations
  Clone ID: PAT_MRT4530_92591C.1.pep
GRPDLHQHPNVVGRPRRPLVVGLTWCEVAPTPPVPSPSSSAGVVKFVAASSARHRVRGNPSLPAPSLRPPPPGELMPTAAAYACRPAVSPSMHPPPSTLPPGSGXSSSLRSIPSRRAPASPSSPSPPGRMTPALASPSPVPLRGDSPPPPTCAGRRCPDSSLPLLGLHDGGPPVSAALLPAAPRHRRRGRTGSALTEHELPPPPPAIRLAAPAPSVGPMPLAPLIISQIKRRGQKIDPHA

SEQ ID NO: 196772 - protein, 122 aa, Oryza sativa
  unsure (1)..(122): unsure at all Xaa locations
  Clone ID: PAT_MRT4530_92592C.1.pep
SKPVVVMLIDEWMRTPLAAALAEELSSHPAPSPSTVAPSXSSGANSSVEDLLALIYFGSLFDVKLHTEFVATMLERAXEWDCCITYDYIRPCRLMPCCGPASHPVAYRSRHSSDHSGRGIFL

SEQ ID NO: 196773 - protein, 95 aa, Oryza sativa
  Clone ID: PAT_MRT4530_92593C.1.pep
RGARISFLNELQRFRLINLPILYNSEIYSLLHVLGKVKSAFQIQLADTYKDTMKFTHHIKSVIWERTTNHIFHYLTTILHQTIIQRINTQKMNKQ

SEQ ID NO: 196774 - protein, 58 aa, Oryza sativa
  Clone ID: PAT_MRT4530_92594C.1.pep
RCTLFIILYYFFYNFFLNFYIFFFIFFFLTIRTRNSPSFNLPLQACKSSTEGTKQSNT

SEQ ID NO: 196775 - protein, 182 aa, Oryza sativa
  unsure (1)..(182): unsure at all Xaa locations
  Clone ID: PAT_MRT4530_92595C.1.pep
MTSSMVAGSDCTLAGARAIGRDFGGHLHVEDDETNPMVLTNALNENRRRPAXRRRLGLTGGDGXLRRSAAKGRRRPGSLTAVRTQRRQRQVAATADAARRRGXSPAGGGSGLELVAAALRITGEDGRAGKRKRRTRGSYLXPWIGEIGLLPQGIDPGKTKLGSGDKLENEFNSHWLEKIPNL

SEQ ID NO: 196776 - protein, 336 aa, Oryza sativa
  unsure (1)..(336): unsure at all Xaa locations
  Clone ID: PAT_MRT4530_92596C.1.pep
MADSPSPRLDEEDAFGRDFNSSPSPTAPPARSGEKRPFGDLDDDDEDVFASKKGKTKVEESAPGAATGMILSLRERATRIIYINCKDNLASCQVEREAAKSEVQKWHSAFQNIPAVPAGTNPXLEKAKKREAAFIVTFAKREQEIAELKSAVRDLKTQLRPPSMQTRRLLLDPAIHEEFTRLKNLVEEKEKKIKELQDNVAAVNFTPSSKHGKMLMAKCRTLQEENEEIGAMASEGKIHELGMKIAVLKTRNNELRNQFNELYKHMDGLTNDVERSNEMVAILQDELETKDVELRRLKEMLAQKEATDENKIPQENDVAGDDIVAAAESQPIKVET

SEQ ID NO: 196777 - protein, 69 aa, Oryza sativa
  Clone ID: PAT_MRT4530_92597C.1.pep
MGWKGAQRWHGTARSGGPDITQRRKMLLRPTRAGRSSGRMLEEDNDDASDSWVGWAEPTREEDAEREET

SEQ ID NO: 196778 - protein, 37 aa, Oryza sativa
  Clone ID: PAT_MRT4530_92599C.1.pep
MDCMRWACQPAEKLYLLVNCRTEEVLCPRLPVEALPL

SEQ ID NO: 196779 - protein, 87 aa, Oryza sativa
  Clone ID: PAT_MRT4530_9259C.1.pep
LPRADRKLEQPSVKVKRPVACESPSRPVALTRSRTRCHIPRVNARPLKANNFYLGELEAWSPFARPPLRLTVSPSHRAHSLTRRTWS

SEQ ID NO: 196780 - protein, 112 aa, Oryza sativa
  Clone ID: PAT_MRT4530_925C.1.pep
WALSFSIDRALQQSTIKTLGGNTRERGEGAKALYRQVQGQVSGYPWYIPESCCGRRGCLSEPSRRVLQDLMCFWWSLKTRMYIVRMHIRVLGGIGYQASHSSGTDKSYRNNA

SEQ ID NO: 196781 - protein, 48 aa, Oryza sativa
  Clone ID: PAT_MRT4530_92600C.1.pep
RTHVVWARYAIVVLCQVHKRGASLPLSNCTTVQSSLPGSMCHSISRHA

SEQ ID NO: 196782 - protein, 618 aa, Oryza sativa
  Clone ID: PAT_MRT4530_92601C.1.pep
MLLRTMKLPLPAMAAVVALCAASYLLAVWTHPAPPLPASSLAAVPCNTRQPPAPAASKNDTALDFSIHHGASEEDAAEAGAPPSRRVPACDAGYSEHTPCEGQRWSLRQPRRRFAYRERHCPPPAERRRCLVPAPRGYRAPLRWPRSRDAAWYANAPHEELVTEKGVQNWIRRDGDVLRFPGGGTMFPHGADRYIDDIAAAAGITLGGGGAVRTALDTGCGVASWGAYLLSRDVLTMSFAPKDTHEAQVLFALERGVPAMLGIMATKRLPYPARAFDMAHCSRCLIPWSKYNGLYMIEVDRVLRPGGYWVLSGPPVNWERHFKGWKRTPEDLSSEQSAIEAIAKSLCWTKVQQMGDIAVWQKQINHVSCKASRNELGGLGFCNSNQDPDAGWYVNMEECITPLPEVSGPGDVAGGEVKRWPERLTSPPPRIAGGSLGSSVTVDTFIKDSEMWRRRVDRYKGVSGGLAEKGRYRNLLDMNAGLGGFAAALVDDPVWVMNVVPTAAVANTLGVIYERGLIGTYQDWCEAMSTYPRTYDLIHAYSLFTMYKDRCEMEDILLEMDRVLRPEGTVIFRDDVDVLVKIKNIADGMRWESRIVDHEDGPMQREKILVSVKSYWTA

SEQ ID NO: 196783 - protein, 130 aa, Oryza sativa
  unsure (1)..(130): unsure at all Xaa locations
  Clone ID: PAT_MRT4530_92602C.1.pep
ASGNRKLDSAYCXSKEKEDCGPVFLFFWVNGSGHFCGVAEXMIAPVDFDKSVPYXPHDKWCGQFPVTGHIIKDAPDNLLLHIILENNDNKPATNSRDTHEVKLAHGLPTLSILKDHEPETNILEDFDFYE

SEQ ID NO: 196784 - protein, 68 aa, Oryza sativa
  Clone ID: PAT_MRT4530_92603C.1.pep
NYSVSLPPVRFYFFSRPITDSPPCWPHWWVLWANQCFVSPVNDPLGPRLPFPLSSANLVKKTVCVCSF

SEQ ID NO: 196785 - protein, 102 aa, Oryza sativa
  unsure (1)..(102): unsure at all Xaa locations
  Clone ID: PAT_MRT4530_92604C.1.pep
WPANHHRNRRHRRQPPPPPPPSPSXHRQLPPSPDPPTSSPYPPPVPPPPQPPPAPPPPPSAPATPPPPPPPGNSPSPPPPPVPTAHHLAGVTNGSLRRRGGG

SEQ ID NO: 196786 - protein, 62 aa, Oryza sativa
  Clone ID: PAT_MRT4530_92605C.1.pep
TETVHFHKWFKSFTIVVQIHFPTVLHFFFNNGLGGGSQQQGKNWPRNQGIIPSQQDLQIGHL

SEQ ID NO: 196787 - protein, 243 aa, Oryza sativa
  unsure (1)..(243): unsure at all Xaa locations
  Clone ID: PAT_MRT4530_92606C.1.pep
LSLQRSGLGHCHISSRRRRCAYTRSPSPPPHVAAAADTPSAPSVVMACQPSPQQAPPSPXPPPPPPPSPPYPPPVPPPPQPPPAPPPPPSAPATRPPPWQIXPDTARIWPPPQPPRTAPPASEPAAPPDSSPTAAPTAECSALPPPPPPDEEAETRSNTRATXVAWVAAHDXPPRWPASKAAPPCRPGAGSPPPPPPPPGNSPSPPPPPVPTAHHLAGVTNGSLRRRGGGGGGRRRRRRGSCS

SEQ ID NO: 196788 - protein, 68 aa, Oryza sativa
  Clone ID: PAT_MRT4530_92607C.1.pep
PTRPPTRPKKKKKKKKKKKKKKKKKKKKKKKKKKKKKKKKKKKKKKKKKKKKNWGTNIGSKVKWGRHI

SEQ ID NO: 196789 - protein, 119 aa, Oryza sativa
  unsure (1)..(119): unsure at all Xaa locations
  Clone ID: PAT_MRT4530_92608C.1.pep
MTTMDKGRALPKFGEWDVKNPASAEGFTVIFQKARDDKKTTGXPGTPGWGYRRPSGAPTTTAATGPNSSPPRATSNTRRPSASRRSGHSAPGVDYLASAAAFSDEADRNYSQLPHQKYS

SEQ ID NO: 196790 - protein, 80 aa, Oryza sativa
  Clone ID: PAT_MRT4530_92609C.1.pep
LHFGCLGFNSSADTIMERILMSPIGHSDNVWMPKIIWMLRLFDARIQSSSSCLKMVFVQTNLVEELPVWQDMALAIPQFY

SEQ ID NO: 196791 - protein, 124 aa, Oryza sativa
  Clone ID: PAT_MRT4530_9260C.1.pep
PTSSDEAYEYIDTSDGLLLATPRANSLLMGFLPPLIHQRRTDSGLHDAKQRGYEGNLPRHAPAFYHDDVLQHVLTCLSQKLTVDDEHEMILNAGQDTLVRFHFDEHIEFTMQEMHLMLPYLVMT

SEQ ID NO: 196792 - protein, 459 aa, Oryza sativa
  unsure (1)..(459): unsure at all Xaa locations
  Clone ID: PAT_MRT4530_92610C.1.pep
MDRDWMSEPRTSASYKDGVAHFLSIAFRDVPDDAKVLCPCVNCRNRITQNYDRVKTHLRCAGILQSYTKWIHHGEKYDAPSLVFAPVSGNPRNIPISGAHKSNVVEVGDGRSDNMEGLLNTAFGREDSFESISSASIDDDGIYFESSYAEPNMVEDENNTFGDCHNGGEQDMFTRLLKDAKTKLYHGCDKFSRLSFLVNLYNLKCIHGWTQESFTALLGLQSDALPQEADLPKNCYEAKKIIRGLGLGYQKIHACHKDCVLFRGDKANQESCDVCGSSRWITDKNGYPVESKGKKKPAKVLRYFPLIPRIQRLFSTEQTSGEMRWHEEGHTKDGLLRHPADGEAWNDLNTRYPGFSADARNVRLGLASDGFNPFRNMSSKHSTWPVMLIPFNLPPWICMKQTSLILSMIIPGPHSPGNDIDVYLEPLLXELLQLWQGVETYDASARKKFSLRAALLWTL

SEQ ID NO: 196793 - protein, 71 aa, Oryza sativa
  Clone ID: PAT_MRT4530_92611C.1.pep
TASSPPRRPPPPRAAAPRLLAPPLPAVPRWSSPPPPRPPVAEPGLAAAVRRHPRPSRAKEQRRKKKAEPSR

SEQ ID NO: 196794 - protein, 40 aa, Oryza sativa
  Clone ID: PAT_MRT4530_92612C.1.pep
VNSPRETVNGAHCHLYSREAVGSGDGCPPPGSDGGVSGSR

SEQ ID NO: 196795 - protein, 56 aa, Oryza sativa
  Clone ID: PAT_MRT4530_92613C.1.pep
MDVDPGPWLLLGSCRVWPWPYCPWETHSMTSRGSAALAVPSCFSGKGRGEARGCDG

SEQ ID NO: 196796 - protein, 120 aa, Oryza sativa
  Clone ID: PAT_MRT4530_92614C.1.pep
HHQSSCKLPISFPQVAKQAVKSCVCPQPFPLLFCSTNHVLLCRFVAYISCDGSILWYGRRWLEIFSDAPVICETEWLNEDHIISMNLSISFNPVVVIKWWLFHVKNEFKVDWCFFIIREN

SEQ ID NO: 196797 - protein, 436 aa, Oryza sativa
  unsure (1)..(436): unsure at all Xaa locations
  Clone ID: PAT_MRT4530_92615C.1.pep
MELHRCSLLALLLAVTCSVAVAYDPLDPKGNITIKWDVISWTPDGYVAMVTMSNYQMYRQILAPGWTVGWSWAKKEVIWSIVGAQATEQGDCSKFKGGIPHSCKRTPAIVDLLPGVPYNQQIANCCKAGVVSAYGQDPAGSVSAFQVSVGLAGTTNKTVKLPTNFTLAGPGPGYTCGPATIVPSTVYLTPDRRRRTQALMTWTVTCTYSQQLASRYPTCCVSFSSFYNSTIVPCARCACGCGGGTECIMGDSKRALSAGVNTPRKDGAPLLQCTSHMCPIRVHWHVKLNYKDYWRAKIAITNFNYRMNYTQWTLVAQHPNLNNVTEVFSFQYKPLLPYGNINDTGMFYGLKFYNDLLMEAGPFGNVQSEVLMRKDYNTFTFSQGWAFPRKIYFNGDECKMPPPDSYPYLPNSAPXRAAAFGLKILLLFFLQAWKPV

SEQ ID NO: 196798 - protein, 85 aa, Oryza sativa
  Clone ID: PAT_MRT4530_92616C.1.pep
KEGNLRALLSTLQYILWPECGWQAVSLTDLITGAAVKKQYRKATLCIHPDKVQQKGANLQQKYTAEKVFDILKEAWNKFNSEELF

SEQ ID NO: 196799 - protein, 119 aa, Oryza sativa
  unsure (1)..(119): unsure at all Xaa locations
  Clone ID: PAT_MRT4530_92617C.1.pep
VYTCGPATIVPSTVYLTPDRRRRTXALMTWTVTCTYSQQLASRYPTCCVSFSSFYNSTIVPCARCACGGGTECIMGDSKRALSAGVNTPRKDGAPLLQCTSHMCPIRVHWHVKLNYKDY

SEQ ID NO: 196800 - protein, 129 aa, Oryza sativa
  Clone ID: PAT_MRT4530_92618C.1.pep
NYTQWTLVAQHPNLNNVTEVFSFQYKPLLPYGNINDTGMFYGLKFYNDLLMEAGPFGNVQSEVLMRKDYNTFTFSQGWAFPRKIYFNGDECKMPPPDSYPYLPNSAPIGPPRSVAAAASAILVVLLLVA

SEQ ID NO: 196801 - protein, 171 aa, Oryza sativa
  unsure (1)..(171): unsure at all Xaa locations
  Clone ID: PAT_MRT4530_92619C.1.pep
SRVGIRCDTYQVSDDSTHVLGDTCKVSCDTYQVSCDFYHVSCNTREVSCDTCQVSDDFYHVSCDTREVSCQVXMIYTYISRDTXELSDDTYQTRMATATAGDGRGGGGEGRRRWXGAGVATTVGDGRGGGGGRGRRRRXRARRRGMLTAAAAAVGDKVQLNVHATQAWFIF

SEQ ID NO: 196802 - protein, 92 aa, Oryza sativa
  Clone ID: PAT_MRT4530_9261C.1.pep
MAGGWLAEVVATAAAAPSPPPDPTGGEAASSPPLDPAPGELVGRRRRRDLVAATAAPSPCGDDGERGGRRWRRQCGGRWHGYLVISTMMKGS

SEQ ID NO: 196803 - protein, 498 aa, Oryza sativa
  Clone ID: PAT_MRT4530_92620C.1.pep
MAAAAVAADQKVVTMTSLREGCACAAPPAAAAPPMPKMAAAQRVVAELREACATPAARLAEVAAAMAGEMEAGLAVEGGSSEMKMIVSYVDSLPTGGEEGSYYALDLGGTNFRVLRVRLAGGGVAERVAREVPIPPGLMSGGGATSECLFGFIASALAEFVGEEEEEGGLDGGERELGFTFSFPVHQTSIASGTLIRWTKAFAVDDAIGEDVVAALQAAMSERGLDMRVSALINDTVGTLAAGSYYDEDVVAAVILGTGTNAAYVEDATAIAKLHPSQLPASNTMVINTEWGSFASPCLPLTEFDEALDQESLNPGEQTYEKLISGMYLGEIVRRVLLKISSRCPSLLGGAGELATPFVLRTPDVSAMHHDETPDLSIVGEKLERTLGIRGTSPEARRMVVEVCDIVATRAARLAAAGIVGILKKIGRVDGGEGRRRRSVVAVDGGLFEHYGKFRRCMESAVRELLGEAAAERVVVKLASDGSGLGAALVAAAHSQRA

SEQ ID NO: 196804 - protein, 35 aa, Oryza sativa
  Clone ID: PAT_MRT4530_92621C.1.pep
MERKSQSRSPCEDLKNITKDFQLMDRRLDKDTHMT

SEQ ID NO: 196805 - protein, 95 aa, Oryza sativa
  Clone ID: PAT_MRT4530_92622C.1.pep
MSPITERIISRRREREDSWISRPMYPDSPLMIASPASQRASRISQPPELDATQGEKGRERGRERQACGPHTSGGGGPGSVTPGVVGPAADEIRIW

SEQ ID NO: 196806 - protein, 145 aa, Oryza sativa
  Clone ID: PAT_MRT4530_92623C.1.pep
MISAKQKCQMDEALLEQPAILPAPEPEGTSLLTIVGFAFLTFNSAMAIYRSDRDAGAIAFVTFSYFDLLLLFYFLRLFERTEHGSRRRAQIKAAVWLLTTMLTAVFSYKVAAIMPLPVQVLVWAMAAATVLGGFYAFFLHSDTKA

SEQ ID NO: 196807 - protein, 54 aa, Oryza sativa
  unsure (1)..(54): unsure at all Xaa locations
  Clone ID: PAT_MRT4530_92624C.1.pep
MARPKARGFGPAKAWHXPSCWVMLGPMPRHGGLAXHSTDRGRHGGLARHGMVQW

SEQ ID NO: 196808 - protein, 118 aa, Oryza sativa
  Clone ID: PAT_MRT4530_92625C.1.pep
MCVTATALAATTTATSEQPDMARTCARRQRRQKKPAPPAEQSGAPAPVQGCAGSGRYWRPHASGTGGLRRPGCPNALGICDSACVAVSGCAESLCGPSLWEYPSFSYDPKNKEEQGRS

SEQ ID NO: 196809 - protein, 96 aa, Oryza sativa
  Clone ID: PAT_MRT4530_92626C.1.pep
TLASYCALYLYGEDALQDAHRNLRRIRRLLMAPYSRLREPLRWLWENLFDRHCCDYIGARAPGISRFMVFLTWGMATSVGMASPTLGGPMLGGGPL

SEQ ID NO: 196810 - protein, 92 aa, Oryza sativa
  unsure (1)..(92): unsure at all Xaa locations
  Clone ID: PAT_MRT4530_92627C.1.pep
KRFHHQQQQQQAQNSAQEELAPPISVLREFLKLIAWKKGFSQAHGDMATAQRARIEICLXLDHALIPHMNVAGGAAWLPYCVSVRLAMDGSH

SEQ ID NO: 196811 - protein, 100 aa, Oryza sativa
  Clone ID: PAT_MRT4530_92628C.1.pep
KRSISDLFLNLPSLQGLKPSSPRKRRRISESMESWSPLQAYSSDSQSRTSLTYGNILAERNNCVPATTYALVLLHVIRHCSLSIKHAQITAQMDSFAIPY

SEQ ID NO: 196812 - protein, 64 aa, Oryza sativa
  Clone ID: PAT_MRT4530_92629C.1.pep
MEEYGSGGCSVKSKTWNERKLCTKRGTCRAEGFDYGSCYPNRPRPSFIGRFFHAGSFVNQITHC

SEQ ID NO: 196813 - protein, 104 aa, Oryza sativa
  unsure (1)..(104): unsure at all Xaa locations
  Clone ID: PAT_MRT4530_9262C.1.pep
MAPHYRFRACGGTARSAASEPRKNEATARGHAVAEXARSGEPATAKLAMPSASSSAPSWEEEDGGVEPASGSAADAREEGRGRGTIALWPRRQNQRARHRQARH

SEQ ID NO: 196814 - protein, 284 aa, Oryza sativa
  Clone ID: PAT_MRT4530_92630C.1.pep
MKMKALLPVAAMLLLVSGQLAAPVTADGYVGQLAVFWGRHKEEGSLREACDTGRYNIVVITFYNVFGYQRGRYGLDFSGHPVAAVGADIKHCQSKGVQVLLSIGGQGGEYSLPSSQSASDVADNLWNAYLGGRRAGVPRPFGDAVVDGIDFFIDQGGADHYEQLARQLHGRGVLLTATVRCAYPDSRMEAALATGVFARIHVRIFGDDQCTMFPKDAWEKWAAAYPRCTVFLTVVASPEQDEGYMFQKDLYYGVQQFIDKEPNYGGIAIWDRYYDKKANYSGEG

SEQ ID NO: 196815 - protein, 1666 aa, Oryza sativa
  Clone ID: PAT_MRT4530_92631C.1.pep
MAEGELGQQTVELGAVVRRAAEESYLSLRELVEKSQDEGEGKGGAYGARQRSDSEKKIDLLKFIARTRQRMLHLHVLAKWCQQVPLVNYCQQLGSTLSSHETCFTQTADSLYFMHEGLQQARAPMFDIPSALEVMLTGNYQRLPLCIEDIGSQNKLSPDEEKRALQKLNASVRYKVLVTPRPKEVSNVSVADGIAVFRVDGEFKVLLTLGYRGHLDLWRILHLEVLVGDKGGPIKLEERRRFALGDDIERRMAVSENPFMVLYAILHELCISLAMDTIIRKTNVLRQGRWKDAIRSELVLDSTTGQTGSAPLMQLGQDGEYDLSGSRIPGLKINYWLDEKAGGSAESDSSPFIKIEARQDMQIKCQHSSFILDPLTDKEANLSLDLCCIDVEQLILRAIASNRHTRLLDIQRQLSKNVQISQSPKDVILKRDVEIAKDPVKKTEQKDFADCCGNEVLQVYEKSQGTLKIPKDILHGSDLMVMGFPQCANAYYLLMQLDKDFRPVFHLLETQSDANDKTNTNACTKEALRFNKIDIGQIQISKSESNTNMFDAKLHALQNIGNCDDVMENRLPIQSGIEPLPLLPACSPSFSSVVDEVFEYEHGALAVPNHSLPQTTLQSTSHPGSLSVGFQGVGTRANASIEGASSAYSGSKFSPGVGLNSYLPSNLRHVQSTNAFSSSTVTKSSSIKLPSSNSNHELSSLSSPTEHVIADGSKSLQLVPASKINGSINLITMGSDGASRKRSISDLFLNLPSLQGLKPSSPRKRRRISESMESWSPLQAYSSDSQSRTSLTYGNILAERNNCVPATTYASVLLHVIRHCSLSIKHAQITAQMDSLAIPYVEEVGLRSPSSNLWLRLPFARDDSWKHICLRLGKAGSMSWDVRINDPHFRELWELSTGSTTTSWGVGVRVANTSEMDSHISFDAEGVILTYSNVEPDSVQKLVSDLRRLANARSFARGMRRLIGVKLNDKLDDDQTSTDIKSQPVNKGNSDAADRLSEQMRKTFRIEAVGLMSLWFSYGTMPMVHFVVEWESAKGGCTMHVSPDQLWPHTKFLEDFVNGGEVASFLDCIRLTAGPLLALGGAIRPARMPVTVSSGYNSMPKQMNNIPTQGPLANGSSSTTMHHAPSPANVAATHLGSHNLHTAAMLSAAGRGGPGLVPSSLLPFDVSVVLRGPYWIRIIYRKKFSVDMRCFAGDQVWLQPATPPKGGPLVGGSLPCPQFRPFIMEHVAQGLNALEPSFMNATQAGAHLNSSAGTLQPAPNANRVNATQGIGMSRPASGVANHVAANLSRAGNAMLASSGLASGIGGASVRLTSGANLPVHVKGELNTAFIGLGDDGGYGGGWVPLAALKKVLRGILKYLGVLWLFAQLPELLKEILGSILKENEGALLNLDQEQPALRFYVGGYVFAVSVHRVQLLLQVLSVKRFHHQQQQQQAQNSAQEELAPPEINEICDYFSRRVASEPYDASRVASFITLLTLPISVLREFLKLIAWKKGFSQAHGDMATAQRARIEICLENHSGSVSDDITESTLAKSNVKYDRAHSSLEFALTFVLDHALIPHMNVAGGAAWLPYCVSVRLKYSFGESNHIAYLAMDGSHGGRACWLQYEDWERCKQKVARAVETVNGSVAVGESGQGRLRMVAEMIQKQLQLCLQQLRDGPLSAGSTAS

SEQ ID NO: 196816 - protein, 68 aa, Oryza sativa
  Clone ID: PAT_MRT4530_92632C.1.pep
TLKTRCNSVLSSLAPRSSCSSVQKPYVNLIYVNCLLLIRKSLVFTGQENCQIRYSIVTERTSLLSSVN

SEQ ID NO: 196817 - protein, 118 aa, Oryza sativa
  Clone ID: PAT_MRT4530_92633C.1.pep
MATTDTTITHIMDQQEVIKVKFSKRWNPIQPPASLLTSNSHQIYVRAPFSCREYLMENSRSLLSNGSTLISEFHLIWPQSQNQGVAPPIMGLWGCNFVWNNVDLYRQDQQPTERCIDL

SEQ ID NO: 196818 - protein, 192 aa, Oryza sativa
  unsure (1)..(192): unsure at all Xaa locations
  Clone ID: PAT_MRT4530_92634C.1.pep
MEVRGWRRQAVVELGMWLNDADEQRRLVARWGGFPVAIGENGAAAGLRQRAANAVAQAAWRGDVRSGSSGRPKSSRERRRTASRGGGGSGHGGAWERGGNGGGEPGDLFYGRGGGRSWLRGVESGGNRPATWATSWVKWSSNWRQKLGKSGGKCVGDGGEPISCGLGARARAGXPESAATWAATAVHGSFCS

SEQ ID NO: 196819 - protein, 137 aa, Oryza sativa
  Clone ID: PAT_MRT4530_92635C.1.pep
ELGVLRAPLIMVPDKKKRSATDLAVCSRVQLYLAHWTVRCARLDSGEKVALGKNCRRTAIIHRTVRWCTGLSSEPTVASATVGRAIRGRCVARSNGRQGSPDSVRCANCPGAATVVCARKAKEIGTEPSIVTVRWRT

SEQ ID NO: 196820 - protein, 1332 aa, Oryza sativa
  Clone ID: PAT_MRT4530_92636C.1.pep
MSSEDGNPRYTPPGRRGAAGGSGSSGAGNDGQIVMQQAPRETCVPLRYPVLTRTNYADWALLMRVNLQAQGLWAAVDPGYAEFREDRQAMAALLQAVPKEMLRPLSKKDTAKEVWDAIKTMRVGVDRVREAREQALRSQYEAIQFKDGETVEDFALRLHALVIDIRDMGGTLTDEHMLKKLLRVVPFHYHQLALSIEQMLDLKTMPLEELVGRLAAIESYKPEWTARMKKKEPQDTSPGKKGAGSSSSSKKQWRGKRGGQGCSGEGSSGKDGGAPAASRDRSSECRKPRRERRQEAHVAEAQEEPVLLLATASAMVTTAAPGTIVLDEPHAQLHVGRHEQLSPDRWFLDTGASNHMSGHREFFTDLDDTVRGVVRFGDGSVIDICGFGDVTLECYNGAHRIVSGVYYIPKLKSNLISLGQLDENGCAIHIDDGVMTIRDRARALVAKVTRTEGRSYLLDLKVAQPVCLVASCEEVPWLWHARYGHLNFDSLRRLAQGAMVRGLPDIEQVDRICDCCQIAKQRRAPFPSEAKYRATEPLELVHGDLCGPISPATPGGKRHLLLLVDDMSRYMWVVLLGTKDQAPAAIRDIQAKGVACDVTSPLPYSPQQNGVVERRNQTIVAMARSLLKAKEMPGRFWGEVVVTAVHILNRSPTRALDGLTPYEAWYGRRPNVHYFRTFGCVAYVKNVRPHLSKLEDRSKAMVFLGYEDGSKAYRVFDLVTNRVHVSRDVVFDEEAKWDWAATGTGDDEADPADIFSISYTFHSVLDDEQCSGARPDADEPQDAVTPAPRRYRTLANINETTSPVREFQYSGLCLLAADEPVSFTEAEVQACWRKAMIDEVKSIEENKTWSLVPLPAEHRPIGLKWVYKIKRDLVGSIVKYKARLVAKGYVQQHGIDFEEVFAPVARIETVRSLLALAAQEGWQVHHMDVKSAFLNGDLEEEVYVSQPLGFEVTGEEAKVYRLHKALYGLRQAPRAWYAKLDATLIKMGFEGSTSDPAVYKRNSEHSTLIVGVYVDDLVIIGSQVSVIQGFKVEMQKEFKMSDLGLLSFYLGIQVKQTATGIALNQSAYALNILKKNGMDGCNPCQVPMEARLRLSKESTNSLVDATQYRSLIGSLRYLANTRLDLAYAVGYLSRFMEKPATDHLAAAKHLLRYVAGTVGWGCWYGRKQSNIVPLTGYCDSDMGGDVDDRKSTTGVVFALGENIITWQSQKQKVVALSSCEAEYIAVTTAACQGIWLARLISEITGDEKKCVVLKVDNKSAISLCKNPLLNDRSKHIDTRFHFIRGYVEKKEIEVEYVRTEEQVADILTKSLGRVKFQELQGRLGMLEIQPQY

SEQ ID NO: 196821 - protein, 618 aa, Oryza sativa
  Clone ID: PAT_MRT4530_92637C.1.pep
MRPFGMLFLVLDVELLRSAGVRGGGGEGAGGECGTAQREGGAGATLRDGATEKDSAREKRAPRPGGTMRVRRDHAWVRRGLPALDSGAGTADYGPVRGVVRKRRDCGVAGDDGLAATQARWSASCGAARLGSALAVRDGAAPGVQQLAATRGRDGARGCRQRLAASSSRCSAVQGTADGQQFFVVMWPAQSCVCSVHATETNRVTARRASVRRRRTASAALQHAVIRIGTSSSPKMPPPMAMATPAASATLTLLLPASPPMRLRARRPPARTSRSRPLLLRASCAYALREGQSQRFHRLPCGLDLEVIAQQPPAPATGGGGAAARPPLVFVHGSFHAAWCWAEHWLPFFSSAGFPCYALSLRAQGESSVPPEKVAGTLEGMSGSGTELLHPKLAGAVLVCSVPPSGNSGLVWRYLLTKPVAAIKSTAIDITIMVIHTQKCICLLMLYQGLMKDSSKLPLFDLRKLNASLPVASVPNNTVNILVVGASSDFIVCQKKNGSKKRRVSIILLAVAVAVVPLAAAVAGNNNMQIVPTTSDQPAGGESTAVVAEALIISRPPWEGGGVAGGAQAMSECMEKTLYTGPCLEALCTAACILELNNGGHCRGGFLFFKKCSCFLCF

SEQ ID NO: 196822 - protein, 58 aa, Oryza sativa
  Clone ID: PAT_MRT4530_92638C.1.pep
MVQYSQRMLYRRHVGWQKGLNRGLESLGGGVSESATRSPPRASGGSTEAVAAARRAVG

SEQ ID NO: 196823 - protein, 34 aa, Oryza sativa
  Clone ID: PAT_MRT4530_92639C.1.pep
LEKVPSEEQGENNLCYKRRTLITNTKTDLHHTQH

SEQ ID NO: 196824 - protein, 196 aa, Oryza sativa
  Clone ID: PAT_MRT4530_9263C.1.pep
MAPHYRFRACGGTARSAASEPRKNEATARGHAVAELEPHPPPPLLPDADAREEGRGRGTAARSGEPATAKLAMPSASSSAPSWEEEDGGVEPASGSAADAREEGRGRGTIALWPRRQNQRARHRQARHAVGELVRTVVGEEDGSVEPASGSAVENPDPPPRWGARRQIWQMREGERWLKRERGKEGERIKKRGGRG

SEQ ID NO: 196825 - protein, 355 aa, Oryza sativa
  Clone ID: PAT_MRT4530_92640C.1.pep
MEGAIILHETLHEMHKRKKDGVILKLDFEKAYDKVDWKFLQQTLRMKGFEPRWCKWIDQVVRGGSVAVKVNDEIGNFFQTKKGLRQGDPLSPLLFNLVADMLAVLIQRTSEHDDTIHFMEHDLEDAKNLKLVLSAFKRFWEDCWLGNQSLEKRYPSLYNLVRNKNVVVAKVLERVPLNVSFRRAIIGDNLKAWHEIVANVVDINLRGQKDRFTWDASKNGTFTVNSMYKKLMFGNVIPRQSFIWKLRLLLKIKIFLWYLKEGVILTKDNLAKRRWKGSLRCCFCRSHEIIQHLFFDCPMVIFRGTHWARLWSLLLKEEDGNMLKNYCKVLEMRVLEFFSNYGWNFRGRIEAYTVV

SEQ ID NO: 196826 - protein, 415 aa, Oryza sativa
  Clone ID: PAT_MRT4530_92641C.1.pep
MEGAIILHETLHEMHKRKKDGVILKLDFEKAYDKVDWKFLQQTLRMKGFEPRWCKWIDQVVRGGSVAVKVNDEIGNFFQTKKGLRQGDPLSPLLFNLVADMLAVLIQRTSEHDDTILFMEHDLEDAKNLKLVLSAFERGGLAKLVWQNLLRKKYLAKKTIMQVQKQRGDSHFWTGLMGVKDTFSSFGSFKLQDGLQIRFWEDCWLGNQSLEKIYPSLYNLVRNKNVVVAKVLERVPLNVSFRRAIIGDNLKAWHEIVANVVDINLRGQKDRFTWDASKNGTFTVNSMYKKLMFGNVIPRQSFIWKLRLPLKIKIFLWYLKEGVILTKDNLAKRRWKGSLRCCFCRSHETIQYLFFDCPMVIFRGTHWARLWSLLLKEEDGNMLKNYCKVLEMRVLEFFSNYGWNFRGRIEAYTVV

SEQ ID NO: 196827 - protein, 593 aa, Oryza sativa
  Clone ID: PAT_MRT4530_92642C.1.pep
MEGAIILHETLHEMHKRKKDGVILKLDFEKAYDKVDWKFLQQTLRMKGFEPRWCKWIDQVVRGGSVAVKVNDEIGNFFQTKKGLRQGDPLSPLLFNLVADMLAVLIQRTSEHGKIHGVIPHLVDDGLSILQYADDTILFMEHDLEDAKNLKLVLSAFERLSGLKINFHKSELLCFGKAIEVEREYALLFGCKTGSYTLKYLGLPMHYRKLSNKDWKEVEERFQKRLGSWKGKLLSVGGRLVLINSVLSSLAMYMLSFFEVPKGIIKKLDYYRSRFFWQSDEHKKKYRLARWSVLCKPKECGGLGIQNLEVQNKCLLRGLAKLVWQNLLRKKYLAKKTIMQVQKQRGDSHFWTGLMGVKDTFSSFGSFKLQDGLQIRFWEDCWLGNQSLEKIYPSLYNLVRNKNVVVAKVLERVPLNVSFRRAIIGDNLKAWHEIVANVVDINLRGQKDRFTWDASKNGTFTVNSMYKKLMFGNVIPRQSFIWKLRLPLKIKIFLWYLKEGVILTKDNLAKRRWKGSLRCCFCRSHETIQYLFFDCPMVIFRGTHWARLWSLLLKEEDGNMLKNYCKVLEMRVLEFFSNYGWNFRGRIEAYTVV

SEQ ID NO: 196828 - protein, 97 aa, Oryza sativa
  Clone ID: PAT_MRT4530_92643C.1.pep
KGLGGLMNKKNRWLFGLVKNGDRGVVFPKKKKKKMGGGKKKKITPPKLFVCKHASLGNGSPKMGFWGRNIFFLLPALFRLSFYKFGKKGPIVFALAP

SEQ ID NO: 196829 - protein, 1432 aa, Oryza sativa
  Clone ID: PAT_MRT4530_92644C.1.pep
MDENRKLSDDMSKKMEPIHSNGEAGEDKTIIIEPESDANKLEVETDARHGICEAHKAHEYGTMENDLHEEASTTDDDSENDSYEYLLRESDNEQTSESDAGEGDNEAPLTDEEVETLITEFLDAESKAAQAQESLEKESLEKIESEVRLELSESLQGNELESAVSTEMKQYKKEWESELDDLETHIAVLLEQLDAAGVELPSLYKSIESQVPNVCETEAWKNRAHWAGYQVPEEANKSIRKADEYLQSCRPVRRKHGRLLEEGASGFLAGKIPVGDDGSAQCHEKSWNAFNELTKSKEYAESSFGSSNWASVYLASTPQEAAALGLQFPGVDEVEEIAEVEGAVSDIKGVDEIELSEVQRRKYRKVPEEDDAKMTKRLQRHLKERRTRHLHKENIGLASSSNGCFSVELAKRTREDDVEFDNKRSKTVIIESDDDMQTDSKPDSAPSENADEIIDLDIFPSQSPKLGDKVRPKPFKCTICTEMLNVPEVHRHPVLDVIICGSCRFLVIEKNRLEDPVSGGYCTWCVKSEQLQSCSSCKLLFCRNCLSKNFGEEGLSEARVAGWQCCCCLPSQLEHLISDCDKALGGVESSDPENDFAELSVLESNGPFSKHKMKKRIRRIMDDEELGEETKLKIAMEKARQEHLKSMQEQSASKLKSNNIGISLEAPSEVSEYVGDGHIVNLAREEDEAPVRIPSSISAKLKPHQYRITITLVMISVQLYLYCYRKLKYIMIFQVSGIRFMWENVIQSVKKVKSGDKGFGCILAHNMGLGKTFQVITFLYTVMRCIQLGLRTALIVTPVNVLHNWKKEFIKWCPAELKPLRVYMLEDVPRCRANIQYLLKKWRIKGGVLLIGYSSFRNLSLGRSARDKTVANEITNALQMWVLIQSIYICHNQCGPDILVCDEAHIIKNRRADTTQALKQMVDFVREGYLGSSHEFRNRFQNPIENGQHTNSTSDDVKIMNQRSHILYEQLKGFVQRMDMNVVKNDLPEKKVFVVTVKLSQLQRKLYRRFLDVNGFSSSAASEKSFQRSGFFAKYQTLALIWNHPGLLQMAKQKGNLRQEDVESFLMDESSSDDNIENYLPNGEKLRSRNDQLSKKSSDVVNEESNWWENLLDENAYKEADYSGKMVLLLDILSSCSELGDKALVFSQSLSTLDLVEFYLSKLQVNGKEGKYWKQGKDWYRIDGSTPSSERQNLVERYGQTKPVYAYRLMAHATMEEKIYKRQVTKEGLAARVVDRQQVSRTISKEEMLHLFEFGDEELLEQSGSTMNGHSKVGTEKPPTPNSSETTEHLPLDRLMVNLLHDHSRWIASYHEHETLLQENEEERLTKEEQDMAWLSYNKLLEVAPRKATHDAERKPSTVPTESSLIQPPKATSRSRQPQQPKITSNNQKKCNNLSHLLTLRSQGTKPGCSTSCKECGQDISWETLNRDGRSR

SEQ ID NO: 196830 - protein, 72 aa, Oryza sativa
  unsure (1)..(72): unsure at all Xaa locations
  Clone ID: PAT_MRT4530_92645C.1.pep
RFERMTQRLFGAPQKRASKPKKEKKXXXXGTKGSVLLNPPASGCYQGLNLNLVFGREKKTGLSFGGDQTPFV

SEQ ID NO: 196831 - protein, 99 aa, Oryza sativa
  Clone ID: PAT_MRT4530_92646C.1.pep
HSLPQPLFTTEAAVGMAVASGGRDSGVAAAAGTAMRRPSTGSCWTAATTISGQWGRRRRPSASGWARANEGGRCGGHLRSFPPLSLSLPFLSPFAALER

SEQ ID NO: 196832 - protein, 281 aa, Oryza sativa
  Clone ID: PAT_MRT4530_92647C.1.pep
LLLSAQQNASGVPQQFLDAKEAEIQQKKAEESRIAQEIQKKREKDGREQELEKQKLMDGDAGNSRLGPDRADAEEEKELDSKHSSRTKSRESLRSRSISLSPRGRRRSDSPRRRSASTSRNSISFGRQERSSRRSVSPRRSFSPRKRSPRSTPSMSRRRSPYSRRSPSVPRHRSPSPHRRSHIRRKSPPFVRQRSPSPHHRRSPGRAPRSPSPARHRSPRRRSSLDRHWSPSPGRRRPRSPSPGRRRPRSPSPGRRRPRSPSPGRRRPRSPSPGRRRPRSP

SEQ ID NO: 196833 - protein, 411 aa, Oryza sativa
  unsure (1)..(411): unsure at all Xaa locations
  Clone ID: PAT_MRT4530_92648C.1.pep
CRNSARGRRIWRDQPSLPPERRWASASPTSPPAWPAPRPPPPASGGHAPPPPRSSPLSSPRRGSXSGGGQPHWLVPSRGHVGHSHHHHHGEEVGGEASERIFRLGLAADVVLTVGKAVTGYLSGSTAIAADAAHSLSDIVLSGVALLSYKAAKAPRDKEHPYGHGKFESLGALGISSMLLVTAGGIAWHAFDVLQGVMSSAPDIIGNVSHAHHSHGSSGHHHGIDLEHPILALSVTAFAISVKEGLYWITKRAGEKEGSGLMKANAWHHRSDAISSVVALLGVGGSILGVPYLDPLAGLVVSGMILKAGVHTGYESVLELVDAAVDPSLLQPIKETILQVDGVKGCHRLRGRKAGTSLYLDVHIEVYPFLSVSAAHDIGETVRHQIQKSHNQVAEVFIHIGSLQPLNQNAL

SEQ ID NO: 196834 - protein, 243 aa, Oryza sativa
  unsure (1)..(243): unsure at all Xaa locations
  Clone ID: PAT_MRT4530_92649C.1.pep
MLRCHTPPQCRLGAGGAGAGVLLRQRSEVAVRCRAQQVSGVEAAAGTPAARAAVEGGERTSLAERLRLGSLLEDGLSYKESFIVRCYEVGINKTATVETIANLLQEVGCNHAQSVGFSTDGFATTTTMRKLGLIWVTNRMHIEIYKYPAWGDVVEIETWCQEDGKIGTRRDWILKDLANGEVIGRATSKWVMMNQNTRRLQRVSDDVRDEGFVHCPKTXRLAFXEENNGSLKKISVFTDPAQH

SEQ ID NO: 196835 - protein, 91 aa, Oryza sativa
  Clone ID: PAT_MRT4530_9264C.1.pep
THIGKNTLCNTATGLACSYKKPYTLTLHLPYLLYNPLMYKISAVSRYVFIAAQGSIKIFKAFFKPKILIPTAPSEITAPFFLNMNGKQIIA

SEQ ID NO: 196836 - protein, 400 aa, Oryza sativa
  Clone ID: PAT_MRT4530_92650C.1.pep
MLRCHTPPQCRLGAGGAGAGVLLRQRSEVAVRCRAQQVSGVEAAAGTPAARAAVEGGERTSLAERLRLGSLLEDGLSYKESFIVRCYEVGINKTATVETIANLLQVRPPPPMPGFLPVSQSYSSLVRFVLSVARFGVESSRIAKCAAATEVGCNHAQSVGFSTDGFATTTTMRKLGLIWVTNRMHIEIYKYPAWGDVVEIETWCQEDGKIGTRRDWILKDLANGEVIGRATSKWVMMNQNTRRLQRVSDDVRDEVFVHCPKTPRLAFPEENNGSLKKIPVLTDPAQHSRLGLVPRRADLDMNQHVNNVTYIGWVLESIPQDIIDTHELQTITLDYRRECQHDDIVDSLTYIEEGEEKSSNGSAFAAPHPEEQRQFLHCLRFAGNGNEINRGRTVWRKLAR

SEQ ID NO: 196837 - protein, 126 aa, Oryza sativa
  Clone ID: PAT_MRT4530_92651C.1.pep
MLAPNRLMSQRRGRRRRRHRRPQIRARSAGFIASTGKRKISPCEHDGDGHSQAGKMMRNSIPYLPEDILSRIHSFMSMREAARAACVSRAFLRSWRCHPNLIFNKDTIGLKRNVFGENFHGKIGRI

SEQ ID NO: 196838 - protein, 81 aa, Oryza sativa
  Clone ID: PAT_MRT4530_92652C.1.pep
TTMHKLTVFKIPTSIQTKLIRPTKERETTSPAIWLLTMTTYGNSRSVHYSHTQIMIPTQRCTYQLHLHINMHVRTSVSYMY

SEQ ID NO: 196839 - protein, 108 aa, Oryza sativa
  Clone ID: PAT_MRT4530_92653C.1.pep
MEPSPASSSSRRPIAAYRVQIRVLKAAINHTLSPPKYNILTSSRRNSPSWFKKHDNCQINDLPTIISPFLPYMHGRGSIVKSASAGQLDEFKDATFDMILRYFDQFDE

SEQ ID NO: 196840 - protein, 432 aa, Oryza sativa
  Clone ID: PAT_MRT4530_92654C.1.pep
MEEEKRLERIIKEIDSPISPGGGAALLAEDDDLVFPGFRFHPTDQELVGFYLTRKVEKKPFSIDIIKEIDIYKHDPWDLPKVSHGAVALQGSSSSSSLSTAAAAEKECGYFFCLRGRKYRNSIRPNRVTGSGFWKATGIDKPIYSSSLAAAAAAAGAGDCIGLKKSLVYYRGSAGKGTKTDWMMHEFRLPSSISDSDHLQDASETWTICRIFKRSMTYTKGRAAAAAASMNKRISHELQHIHHHQQQQFYYHEVVHDGHGHHHRRHLQHYAGSASMAAAAANIVDVIDHSSDAETTTRSHSHSQSHLVADIRHRQSPFMLDFHAGTASSSSSTAAGWSEVMSFSRDGGSSSGSSWDELGRIMDISTNSANNNYYFAPPPSPAGAARLLLERASPLPPPPAGAARLLLARTRRSRLTLPAAACFPARAAPRRR

SEQ ID NO: 196841 - protein, 110 aa, Oryza sativa
  unsure (1)..(110): unsure at all Xaa locations
  Clone ID: PAT_MRT4530_92655C.1.pep
ETLLGVERDTTQPAVVFKTELYTLTGVPPEREKTIAKGGKAEDDTDXGTVGVKDGXQELMRIGAADEIAKASEYGPDLEEDIPEEEHVAAQGTYAVLHTVTKTIKTQLFF

SEQ ID NO: 196842 - protein, 57 aa, Oryza sativa
  unsure (1)..(57): unsure at all Xaa locations
  Clone ID: PAT_MRT4530_92656C.1.pep
YEHAVNNNLKSTVNSIMAHYNEIFKIKGLAGKAYYFYELXVMWKTLVDICLMLIDVK

SEQ ID NO: 196843 - protein, 155 aa, Oryza sativa
  Clone ID: PAT_MRT4530_92657C.1.pep
MNSRPSSSTEYECGLCQGKKNNVFEENHAMLANKVEAGGAYRHTPNAWRFAYQPPSLQVTGDQPATSTAPQPEKQITIKDDNDDDHHINNVNIALNSYNYNMANESIFNSGLLHPNTQDYISGCKDLWYGPYEDDEKKDWLSSFELLVDELWKNK

SEQ ID NO: 196844 - protein, 76 aa, Oryza sativa
  unsure (1)..(76): unsure at all Xaa locations
  Clone ID: PAT_MRT4530_92658C.1.pep
KKSWIAYXDQSIENPTKDPPWQFSRLNASSCPGIRSEVYTTHFLVVSSFARCDEPSRKAGPMGTNERXARRKARLQ

SEQ ID NO: 196845 - protein, 130 aa, Oryza sativa
  unsure (1)..(130): unsure at all Xaa locations
  Clone ID: PAT_MRT4530_92659C.1.pep
HHVPPPGRRGRPKGLVYYEPHCVYDRSFLEKEALRADVVITPVVXQLLPANFTLVAGQEDAVELASLLRARYVVPMSNGDVDAKGLLTAVVATEGTVEAFKDMLADTLPEAQLLHPTPGVPLHIHLPHLT

SEQ ID NO: 196846 - protein, 52 aa, Oryza sativa
  Clone ID: PAT_MRT4530_9265C.1.pep
LGHEASAEKLELLACREWLTLDTEWVHMPVVLKTKGLIRSYALNSHKEKRFK

SEQ ID NO: 196847 - protein, 127 aa, Oryza sativa
  unsure (1)..(127): unsure at all Xaa locations
  Clone ID: PAT_MRT4530_92660C.1.pep
KLSGTWRLLWTTEHEQLFIVRNAPFFRTAAGDVFQVIDVPGGALNNVITFPPSGAFVVNGSIEIQPPQRVNFRFTRAMLRGSNWEVPFPPFGKGWFDTVYLDDDIRVAXDIRGDYLVVERAPYSWNG

SEQ ID NO: 196848 - protein, 170 aa, Oryza sativa
  unsure (1)..(170): unsure at all Xaa locations
  Clone ID: PAT_MRT4530_92661C.1.pep
MDSTILGFLDIRKPSLLPNSFPTRPPTRPRRCSDRSKMAVPLLTKKIVKKRVKQFKRPHSDRYIGLKTSWRRPKGIDSRVRRKFKGCTLMPNIGYGSDKKTRHYLPNKFKKFVVHNVSELELLMMHNRMYCAXNAHNVSTKKRXEIVERAAQLDIVVTNKLARLRSQEDE

SEQ ID NO: 196849 - protein, 65 aa, Oryza sativa
  Clone ID: PAT_MRT4530_92662C.1.pep
VFTYHAGLRLCVNSSTSGGDFDPGTGIDTYTTAYSKPKPSSTCTIVWMERHRLVLDPIALSQDGT

SEQ ID NO: 196850 - protein, 139 aa, Oryza sativa
  Clone ID: PAT_MRT4530_92663C.1.pep
MASSRALLVFALLLAAAFLVNCARQEPQPNEGPAADPNAGGGGGGGGDGSSGYDDGKVSKSGHRPQAKYYNGHRPQGKYGGHRPQGKYYGYSECGGGGDDGDCGGPCEHRRCEYGCCEGGYGGDRGHRCCDHGEFGGRH

SEQ ID NO: 196851 - protein, 220 aa, Oryza sativa
  unsure (1)..(220): unsure at all Xaa locations
  Clone ID: PAT_MRT4530_92664C.1.pep
MAALFEAAETAAIVAALTRVIADGGRGGGGAVCVPPPAPSLVVPPRAGTGGGRRVDVAREEEMVGVVSAGDHAGGASVAEAAAAVVVAAPATARRYRGVRRRPWGKWAAEIRDPRKAARVWLGTFRTTEDAARAYDAAVLRFXPGARAKLNFPEEASRPRRPWKGHDVDHMSCSPPSIANARFLGSWIFGPPPPSRSVAAATTTLLGGSHGSNGADNGRE

SEQ ID NO: 196852 - protein, 66 aa, Oryza sativa
  Clone ID: PAT_MRT4530_92665C.1.pep
MGGEARRDRALERSRAAVDGLAASSSAHTPPMSVGRDSGIPAAKPQWEWDGEEAEGGDGEVPSLYK

SEQ ID NO: 196853 - protein, 360 aa, Oryza sativa
  Clone ID: PAT_MRT4530_92666C.1.pep
MARVPVSRHLRVALLALLVVAVAAAAAARGDQPRRGHSMAARHERWMARFGRAYADAAEKARRMEVFAANAERVDAANRAGGDRTYTLGLNQFSDLTDDEFAQTHLGYSWAPPPPSHRHGHRAENGTAAAAADDTDVPDSVDWRARGAVTEVKNQRSCGSCWAFAAVAATEGLVQLATGNLVSLSEQQVLDCTGGANTCSGGDVSAALRYIAASGGLQTEAAYAYGGQQGACRAGGFAAPNSAAAVGGARWARLYGDEGALQALAAGQPVVVVVEASEPDFRHYRSGVYAGSAACGRRLNHAVTVVGYGAAADGGGEYWLVKNQWGTWWGEGGYMRVARGGAAGGNCGIATYAFYPTMDS

SEQ ID NO: 196854 - protein, 210 aa, Oryza sativa
  Clone ID: PAT_MRT4530_92667C.1.pep
MAAAAEEAGLGHPSRYVQLTRDQDAPADEDIRPGELNLPAHFPQLEQRRCCECGQQLPESYEAPADEPWTTGICGCAEDTESCWTGSFFPCVLFGHNVEALREDIPWTTPCTCHAVCVEGGIALAILTVIFPGIDPSTSILIGEGLDSPCDPCLVHCCLHWCANCQEHRERKGRLADNNANRNTIVNPPPMQEMSVVGNHPSITPENGAA

SEQ ID NO: 196855 - protein, 103 aa, Oryza sativa
  Clone ID: PAT_MRT4530_92668C.1.pep
KKPKNFPPLKSPLYIHFRPMPSFEKTQAVNSQSIGPSIRSKSTRKNFFQFHRPIFIFFRKLKEASHPTSNSFRVSLPPWLPTLKKDHSNLISVVNANENAFFF

SEQ ID NO: 196856 - protein, 278 aa, Oryza sativa
  unsure (1)..(278): unsure at all Xaa locations
  Clone ID: PAT_MRT4530_92669C.1.pep
MGKKLDFSTAYHPXTDGKHXRIHHILEDMLRTCVLDFEKTWDKSLPYAEFSYSSSYQSSLQMAPYEAFYXLKVQNXLLWDQTGEHHVFGTDILTEAKDKVKIIXKNQKVAQNRQKSYADNCRQDLAFEGGDYMYLXVTPLRGVRRFNTKGKLAPRYVGPYKILSRKGEVAYQLDLPASLGSVHDVFHVSQLKICLXVPTEQTYPTQIEIQEDLTYVDNPIKILDTLERHTRGRVIRFSKVQWRNHSEEEATWEREDELKLAHPHLFVSASESQGRDSL

SEQ ID NO: 196857 - protein, 130 aa, Oryza sativa
  Clone ID: PAT_MRT4530_9266C.1.pep
MSIHRVTSRIQLRHPSQLFITNINHDNDFTTISKLAYDFGVFKSHRYKERSICEDRESQLFITNINHDNDFTTISKLAYDFGVFKSHRYKERSICEDREAVSPVSIGHGVRNSLEVTDMKNNLNQANGRH

SEQ ID NO: 196858 - protein, 113 aa, Oryza sativa
  Clone ID: PAT_MRT4530_92670C.1.pep
MGSLAQTDPSVVLARENVSRSAARARISRGIDIHIPVRGAPRACGCRGRRVTALGEDFRARMSSRDICGDGEPVRVRASIARARCVQGLTVTVLAAVEAQPRITRCHSRKRTE

SEQ ID NO: 196859 - protein, 265 aa, Oryza sativa
  unsure (1)..(265): unsure at all Xaa locations
  Clone ID: PAT_MRT4530_92671C.1.pep
SSSREQERRSFYAPISSRCRRSSRRAPANRSSVPVAAGLTNNLWVFNIHGVLVVLSFSXFLFIWDTVLHVQLSPGVRLVWRXTADQRYSARXAYQAFFYGQHSFTCADLLXHAKNPAKCKFFLXFAFQQCSWTADLLQKRGIDSHSAFPFCAQDLETANHILLDHVFARQIWLXVLSPPSWAALSXPRGSWFQDWWPSSRACLPEHLRDSFDSLVLLVSWQLYERNSRVFDSVLSSVFVVLESIHSECHMWSLTGVAVFEDLLGV

SEQ ID NO: 196860 - protein, 93 aa, Oryza sativa
  unsure (1)..(93): unsure at all Xaa locations
  Clone ID: PAT_MRT4530_92672C.1.pep
LFFFKYXQKKXPQTTSQSVTYLAPDARVRHPQPEPASVFVCVTVVVCGLSPHLSQHKREEANAMLQLLGISDHTTKETYPERLAFANTIPSXT

SEQ ID NO: 196861 - protein, 209 aa, Oryza sativa
  unsure (1)..(209): unsure at all Xaa locations
  Clone ID: PAT_MRT4530_92673C.1.pep
KICPKRQLRCFSSPSPAPAPAXPELRRGTLPSSYRSPPPPRPLRDPXDAPPPIHLSAAAPSRPAKPPVCTADELHHAPVSGAGWRLALWRYRPPPHAPARNHPLMLLSGVGTNAIGFDLSPGASFARHMSNQGFDTWIVEVRGSGLSIRDHDNSASSPSGADDISNGTLALDKSSTLEVASVQSSGFSGIDYDDLGIVALDDPPLLMEM

SEQ ID NO: 196862 - protein, 604 aa, Oryza sativa
  Clone ID: PAT_MRT4530_92674C.1.pep
MPKTATPMLLQPISGAGAGARRSSAEGLSPPPTARLRRRVLCAIRADAPPPIHLSAAAPSRPAKPPVCTADELHHAPVSGAGWRLALWRYRPPPHAPARNHPLMLLSGVGTNAIGFDLSPGVSRDFSHCNSFSADVEFPRLKLNTEMVGSGGQSLGIIKINEVMLHLTHIIESKMRFKLQKNYRLQVMASFARHMSNQGFDTWIVEVRGSGLSIRDHDNSASSPSGAFDDISNGTLALDKSSTLEVASVQSSGFSGIDYDDLGIVALDDPPLLMEMTSFFDRISKLLEEASLNKNFHEITDKISVLSEMVESSAVIGPMREESLRLLKNFQEQIDSWEHFVATQMNLNSEYNWDFDHYLEEDIPTALLQVEYIRQHSRVKDGKLLAIGHSMGGILLYAMLSKYGFEGVPSNLAAIVTLASSVDYTTSNSSLKMLLPLVHPAQALNVPAVPLGTLLAAAYPWASGPPYLFSWLNHQISAQDMMHPELLSKLVFNNFCTVPAKVVLQLTTAFREGGLCNRTETFSYKDHLRYCQTPVLALAGDKDLICPPEAVYETVKLIPQHMVKYGVFGKPEGPHYAHYDLVGGRLATDEVYPCIIEFLSHHDQ

SEQ ID NO: 196863 - protein, 84 aa, Oryza sativa
  Clone ID: PAT_MRT4530_92675C.1.pep
MAVNRRSRGERCGAGRQGLGSGEGSTDQAPAVVLIKSSGSDAPMGRGGCVRWRAEEVAAQGKQRREESDRGFEVGWWAARKAQW

SEQ ID NO: 196864 - protein, 136 aa, Oryza sativa
  Clone ID: PAT_MRT4530_92676C.1.pep
TMGPINPAAGLEHYVESLMKRADVEFNVVVTQMNGNDYSSNSVHAFHIGKMRIKLRKGWSTKARESYSTTMKLCGSRGGGNAAATAVFWQARKGLSYTLAFETDRDRNAAIMLARKFASNCNITLTGPGDEVHAGS

SEQ ID NO: 196865 - protein, 53 aa, Oryza sativa
  Clone ID: PAT_MRT4530_92677C.1.pep
QHSGPSWQPYLDTHVEASPTTSTWMHHPSSSGRSPRVSRSPWGYPIHLKRMVP

SEQ ID NO: 196866 - protein, 576 aa, Oryza sativa
  Clone ID: PAT_MRT4530_92678C.1.pep
MELKGCRQDTSVESLVPVAPWMRVEHALHHLIKPNGQKRGCGIVSDSPATFMYLLKDCYLYGTDKATPKFKILQLQVKRVLNNDPQPGPFTYVVQCMYIVPLLGKTHAEGFSHMLISSLRHLKSVESVQKDFLDAKHLAARLILDIVASIVPHEERILIKLLEAYDIELRDMADALYGSELGDEDLVKAKEHLKQYVQCLMESESYVTAVNLITRFSIQCYDESFLTKLIENNHLEAAEKWAVFMGNEMICLIIQTYLDIKMLKRANELVKQHDLTEKFPDVNYLYKESVLKKLAEKGCWDIAEVRAKKETKLMEYLVYLAMEAGYMEKVEELCQRYSLEGYVNSLGNHKHQRYLSYINICSPAVPEEICCGSDYLDLKELILEDIIWVDEIDGLLNSISYIEACKIIGVDCEWKPNFEKGSKPNKVSIIQIASDKKAFIFDLIKLYEDDPKVLDSCFRRIMCSSNILKLELKCFQSYEMLLDIQKLFKGTTGGLSGLSKKILGAGLNKTRRNSNWEQRPLTQNQKEYAALDAVVLVHIFHHVKGQPQFGVTEGCKVEWKSHIVSRVKNSRSTLRF

SEQ ID NO: 196867 - protein, 147 aa, Oryza sativa
  Clone ID: PAT_MRT4530_92679C.1.pep
MVPAGAEDYYGPYYHGGGRHGGGGGPPHALLLMAVVLALAVAGPRVLGEGAGEAITAALTDMLSPVGLLLLPVSLVFVIRILSDDRSAAVLANVLAFGAGAPDAVHRVGGSPVGVVVVLFLVLMMVYYRPSWLLRGGAGAGGEGDGE

SEQ ID NO: 196868 - protein, 81 aa, Oryza sativa
  Clone ID: PAT_MRT4530_9267C.1.pep
RNISSFLRRASCWGASKRSSTSNGYSRPRSISTPATWKAISSLTNDLASNTNATAWNCLMDIYGKCGHIDSCPIVYETIIL

SEQ ID NO: 196869 - protein, 323 aa, Oryza sativa
  Clone ID: PAT_MRT4530_92680C.1.pep
MCGGGPDNHHAITVAADLPPPPPSVVAVEMAPPRGHRPGKEVEYNEEEEDDDDEYDGREFEEEFLRFSMMVDEEDDDGDDDDEVEVEIIAVVSPPHRPLVGARGTTSAVESVTNLQARTSPLPNPVVPQTGTKASKRGDSGAKAKPAAAKKRRSKHGFLGVHQRTYGRWSAEIRDNVIKGSRFWIGTFDTALDAALAYDAVSRRLYGLNAKTNFPAAAGEDDLPPPPPPAKPCSSTKRPKKCNTSGDLGAAAAPPQAVDTPAAAAAGVELTSLLCSVAAQAQEVSDGWEFIQELLLLGGGVSPLDYLNGQELAGAAVGDLWSF

SEQ ID NO: 196870 - protein, 234 aa, Oryza sativa
  Clone ID: PAT_MRT4530_92681C.1.pep
MSKIIHINIIHIRYDMLSSYGISSIFLCSVPAEAEKEGGVPTPKHVDWSGKNRLIIGRDSEVDKLFNLIKDRSHTNTPHVVSVWGIPGTGRTALVSNVYYRCYYDTQFDRQTTVNMPQPYNLRGFCRCLLVSGLDSGLSLIQRREDPIQQCREILHRDRCLVIIDEVHSKEDWDSITDANLITATSKSCIVVITTQESVAVHCAGANGLVCSITCLQATAASDLFQQYSFYPTI

SEQ ID NO: 196871 - protein, 63 aa, Oryza sativa
  Clone ID: PAT_MRT4530_92682C.1.pep
MRVLEDRCRDALGDCRPHLAPPPAIEDQCRDALGCWRHRAPPVLFALSPRDWFTESVIRFQLN

SEQ ID NO: 196872 - protein, 305 aa, Oryza sativa
  Clone ID: PAT_MRT4530_92683C.1.pep
RSSSLLARSPRRPARSTKAGSTRHRSPAATAWTSCPPCCTRRPRSPPLRGWPSSTSSRLSSAPPRRRRSAPPPRRRSPRGTPRRRSRRRRRRPSRWRRRGRPTRRARRRSGWRRWRWLAPTAGGGRGGGTSAARGRSRRPATVARGGSPCRRRGRAAARSAAGAPRATRRRRRGRRRSPGARRGRRRARRGRRGGRPTAGGLACRRRRVPPSSLSPLPPGTSGATATRRRRTRQGRRGAEGHPLRLPAPLPRLRRRGRHVPPVPSLPMCCRGCIFLAVVVASPSRRCGEPPPLPSPPRAPPPPSP

SEQ ID NO: 196873 - protein, 83 aa, Oryza sativa
  Clone ID: PAT_MRT4530_92684C.1.pep
TRLLLAMIAEVGELSELFMWKGEVAKGLPGWKESEKEHLGEELSDVLLYLIRLSDMCGVDLGDAATRKIVKNAVKYPAPSKST

SEQ ID NO: 196874 - protein, 92 aa, Oryza sativa
  Clone ID: PAT_MRT4530_92685C.1.pep
QLHFFISEISLQNFQNNTCKETIIFIQDSYRGVFVNEGEGEDQVPLTGSKMGTGTTGPPKGMSTTPPDTMFRGKFLGDGLRLTLGGFPTWGG

SEQ ID NO: 196875 - protein, 78 aa, Oryza sativa
  Clone ID: PAT_MRT4530_92686C.1.pep
PNPGGIDITECPLIFSPISSYPVEGALAHPYLASLHDISDEPVCSSPFSFDFEQHALSEEQMKDLIYQEGLAFNPDYQ

SEQ ID NO: 196876 - protein, 117 aa, Oryza sativa
  Clone ID: PAT_MRT4530_92687C.1.pep
MEGMWRKAKKALGAGLCVRLPAVAGDWEDGVSERRASDALSHDASSAAAAHVSAPNTPAAALPGAGPLRRSKSGTKSAKISGDIYADLGVDSEFEIGFCHSMANSRQGLILYSGIDL

SEQ ID NO: 196877 - protein, 71 aa, Oryza sativa
  Clone ID: PAT_MRT4530_92688C.1.pep
MGGGMEVHKNRWIEEWNAGRENLEFNFRWTRRSLAVVGLFGLAVPILVYKGIVREFHMQDEDAGRPPRKFL

SEQ ID NO: 196878 - protein, 470 aa, Oryza sativa
  Clone ID: PAT_MRT4530_92689C.1.pep
AGWILENQWDDGSWSIDGSISTANKDVLSSTLACVLALNKWNVGREHIRRGLSFIGRNFSIAMDDQAVAPIGFGITFPAMLTLANGSGLEVPVRQNDIDSLNHLREMKIQREAGNHSRGRKAYMAYLAEGFPGLLEWDEIMMFQRKNGSLFNCPSSTAGALANYHDDKALQYLQSLVNKFDGVVPTLYPLNIYCQLSMVDALENMGISQYFASEIKSILDMTYSSWLGRDEEIMLDVTTCAMAFRLLRMNGYDVSSDELSHVAGASGFRDSLQGYLNDRKSVLEVYKTSKHSISENDLILDSIGSWSGSLLKEMLCSNGIQGTPGREEIEFALKYPFYSTLERLVHRKNIVLFDAKGSQMLKTECMPVLHRQDSLALAVDDFCISQPNSQSDLNYLESWVKDNRLDQLHFARQKFTYCYLSGAATTSLPQAGLARAARARTAWLTAVIDDLFDVGGLEQEQENLLALMEK

SEQ ID NO: 196879 - protein, 32 aa, Oryza sativa
  Clone ID: PAT_MRT4530_9268C.1.pep
SADVSMQDAEAPRRLLNDTDLDLVSDRERQAI

SEQ ID NO: 196880 - protein, 206 aa, Oryza sativa
  Clone ID: PAT_MRT4530_92690C.1.pep
MARPSQLYLLSYNSVQALGWFVALLRLLPCLAPPSSVHSSYAVAGDLTWAILETIHAAIGHQILTLCSDNLKSLSTMANISQYYCCLPVPSFTALLMVFFPGDCCSPDQRLINPFYLFAPCRYTAFIPLYPIGVGPGEMWTMYQALPFVKERKLYSGFFGKFSMSYHSFLVAVLAVYPFLWMKLYLHVFKQRRSKLGKSGGAKKRA

SEQ ID NO: 196881 - protein, 110 aa, Oryza sativa
  Clone ID: PAT_MRT4530_92691C.1.pep
MVFFPGDCCSPDQRLINPFYLFAPCRYTAFIPLYPIGVGPGEMWTMYQALPFVKERKLYSGFFGKFSMSYHSFLVAVLAVYPFLWMKLYLHVFKQRRSKLGKSGGAKKRA

SEQ ID NO: 196882 - protein, 118 aa, Oryza sativa
  unsure (1)..(118): unsure at all Xaa locations
  Clone ID: PAT_MRT4530_92692C.1.pep
MDGRRWPLPVASFAPSHWRWSRRRLRSSLSPTSPTPPPRRRXFPTPTPPVAAQPPPLPPRRSRFPTPEPPGYGRTGTLAMRRGEPPLFTPPSSRPYAGAAAARRPVLRATIVVPHGSP

SEQ ID NO: 196883 - protein, 157 aa, Oryza sativa
  Clone ID: PAT_MRT4530_92693C.1.pep
PRVRPFRFDSIRFDACALRPGRDSPEFDCFLLVGGAMGELASSPPPAAVLPVVFVDGDQTVDLGTVTVQPSLGVRKLQAVVAPAAPTQERTILKRLPAMDLASLASTPSPAAAAMFGVWDYEAQLQELQRQREWYLMHTAAADPYFPLAPEREDPPF

SEQ ID NO: 196884 - protein, 86 aa, Oryza sativa
  Clone ID: PAT_MRT4530_92694C.1.pep
LPPPFPVFKKTKGSGFPKIPIQAYGYAFVTPPSRKKSVFRALPLFISGNWDRLPRDQALNLHCPRGEKPGAFRPRFWFAFYPAFLN

SEQ ID NO: 196885 - protein, 284 aa, Oryza sativa
  Clone ID: PAT_MRT4530_92695C.1.pep
MNKHGFPRVFRFVPDDLELLNILDDKLRGVPIDRADDAVDFHETRILDFHRPTSYRCPFFFSGDGLRAPGDCMRICGHLLLQHEEEEGGRGSLLRRISRLAASRPQSAPTPTTSSVSGAAARVSTADRVLDRMKLVRAARSGRWKSLGSCKKVGVRRRRRPEEHVFDGDKNPVVLERGHGGTGRRVRQDAVGARGSERPVESLRQLQLPLAGISPCRSTNTCGGHGAAIAHRAPARGRGPVTMMFMANQANVAPHRTQSSMSELHQEWHQTTSTPTMPRGGAEF

SEQ ID NO: 196886 - protein, 320 aa, Oryza sativa
  Clone ID: PAT_MRT4530_92696C.1.pep
MRTRLGIARLRARYLAGRCSFPQLGLGPAAPATTTSRSAPFPPNLALLRVIPRRRQHVHLSAAIPGKNPTQAPTSIAGFRPASRTQLCRTYTVHRKQNYRNDASSVFSQNMVLTLLLTCRMNSSVGSAGRIMEEVPNEGSDVLGERSMKEQQSDKDDVCVEREMEQVSSHDDDVLREASHDDDMLREVLLETGLFTGAMSIDQIDTGDGFEIQDDFGREDGETKDEGVQSQPAVPTVGMEFFSEKEAQDYYNRYAKNWGFGTKISSKKKAMSPRSIIDMSLLATLSAQARKRIQSQALAVGQKTARVWENPKATQESVTV

SEQ ID NO: 196887 - protein, 162 aa, Oryza sativa
  unsure (1)..(162): unsure at all Xaa locations
  Clone ID: PAT_MRT4530_92697C.1.pep
CGLHLYGCLVYXAYLGGFNFWASPFYFWAYFIGPNTASAVSPRSCEGNDYGGCVELRGPRLLRRAARAAAAATSASAVAGRSPYHSPLTDVKQKEKSKILPRLYTKTNARRCFHHASSCFFPAKPNPRARAAMTPGPSVDDYAQRLPPATVRAIGAAPPPSQ

SEQ ID NO: 196888 - protein, 166 aa, Oryza sativa
  unsure (1)..(166): unsure at all Xaa locations
  Clone ID: PAT_MRT4530_92698C.1.pep
MMCTRFPDLLKGXDKKRFWRSRDTNRPGFLNAHSLEPRNRSTTSPLVITRVETAQRPKYGDAAPGQILGVKLFGRFPLTRKEFGRGSKTIGNVXKERPNLSTYERPLLATSMCPVPAHVPCCVTIPGLHQPCAPCLRNCDTRARETARVGSDTILSRPAFPQAGPT

SEQ ID NO: 196889 - protein, 57 aa, Oryza sativa
  Clone ID: PAT_MRT4530_92699C.1.pep
IAGVKPASSEAPPRRRAGAAVRHPQRRNRPLRHRARAPGRSPSAGRLLAHRRRTRVA

SEQ ID NO: 196890 - protein, 432 aa, Oryza sativa
  Clone ID: PAT_MRT4530_9269C.1.pep
MSTLRCYFSLFLSLILLALLPRTLASDAFQAPRPILVRITKDTSTSLYTMSIRTGSRLVLDLGGPLLWSTCLAAHSTVPCRSDVCAAAAVQDNPWNCSSSTDGRGSDGGGGRGLCACSAYPYNPLNGQCARGDVTTTPMLANVTDGVNPLYPVAFPVHAACAPGALLGSLPSGAVGVAGLSGAPLSLPSQVAASLKVERKFALCLPGGGGTGAAIFGGGPFHLLVVPEEFGMVSNGLSYISYLRNPKNGGFYLDVVGIAVNHRGADVPPDSLALDAGTGHGGVMLSTVAPYTALRPDIYRAVIEAIDAELRLIARAPPSWPFERCYQRSAMWWTRVGPPLATVDLMLRSGGNWTFFGSNMIVQVNEETLCFAIVEMGPTPAMDESPAVIIGGFQLEDNLLVFDLEKGRLGSTGLLYWIRTTCSNFNFSWGTP

SEQ ID NO: 196891 - protein, 212 aa, Oryza sativa
  Clone ID: PAT_MRT4530_926C.1.pep
MPLKFLQIGSMPPRCIFRPSPVNFLTPCRLSTSPLKAPPNSTTSASRGMVSGLDFGLLNSSRPGPIRRGAAVKTGTRVFADSRTSTPPPSSRRLPRRTRPNRRRGCYLMQLDEGCLWLACRQLWDDGLGWKLDMTGCCCFKMNGPTTENDAGDSPAQKNGTFPDLKIDIDLVEPHHPLVAVPPGATVTTMTEAMMLEVMALGARRARAGGSY

SEQ ID NO: 196892 - protein, 60 aa, Oryza sativa
  unsure (1)..(60): unsure at all Xaa locations
  Clone ID: PAT_MRT4530_92700C.1.pep
FVGCRLVYSDLVFFVLXALISLPARRKNKRLFLDMSLTAFWGGSIDTRVHPRKXCGNRNV

SEQ ID NO: 196893 - protein, 229 aa, Oryza sativa
  unsure (1)..(229): unsure at all Xaa locations
  Clone ID: PAT_MRT4530_92701C.1.pep
MSRKLRNQFVSRLSMMAEDQLLQLGLLLQDQILTSQLDIRDMNGATGLLQTKQIYYAVCDXHRPVQLCNNWKFIWENKAPSKVQLFAWLLAKERLPTKLNLNKKKIVQLPLCDLCNGADETXNTLCIQCPFTIALCRLISVQINILTVKNMADLLLPLQIPIKHYWVFFLLCFWGLWNHRHDVVLRGKITYLRRLIVRCIDDATLWTERLIVEDMNAFSAWKEIISSSL

SEQ ID NO: 196894 - protein, 499 aa, Oryza sativa
  Clone ID: PAT_MRT4530_92702C.1.pep
MTMVASCAGWRVGRGGRSSEPVPAVVPVAVAPPPRGRGDDEELGDRCVDKTLGTAVIGVLEAFKSMVSGQHGRFHRVVVQNILKNLCAYAKPDSDCQYSMQKFSVDNISMALRTMYQTDNLIGEDMEAFLGLVLQFSKLLCETDFIEAVNGNGIGLRNFVQKLKLILKQANSHRTEASVHPGIRRSAIEQQTARRAWQENFKLSSGGVSVLEYEESLRSVASRALKLILGVGMKTVGNGRKNPLPFPFSFYFLENGIGMAYSETLAPSIYDAVPARFRNHRTVAEALLNKRWIQDITGALGMQAILEYLSLWPVMKSIQLSDQEDSLHWRWETSDTRQQIDFESEDFHILPTRPAARALGRAPTDRLGFSVSVLGRVGEPEHGGIGGGVGVGGPGGSSCAEVEEGADPGDAIPGLEEDVGGTELEDTGGEGEADHGAEAEGVGLPGGVAGGGGQAGGDPGGLGGEVGLSGAARRRRVLPRTPSPTGLRERGRVRERKRG

SEQ ID NO: 196895 - protein, 91 aa, Oryza sativa
  unsure (1)..(91): unsure at all Xaa locations
  Clone ID: PAT_MRT4530_92703C.1.pep
RGSRHHRRRRPIHADVAVHAAAASPMSAXLLXPSLPLLQWGGKEGXXRTAVAPLLRSDWEGGEEVIHRGGVERTXRIVEGXGVTQAXRXXP

SEQ ID NO: 196896 - protein, 678 aa, Oryza sativa
  Clone ID: PAT_MRT4530_92704C.1.pep
MSKKLLPIMATKSAKDLVGDSKALVAASDVVTSSAIAESYNDQIRPLLDAVDRLRHLKVTQEGIQLPTIVVVGDQSSGKSSVLESLAGISLPRGQGICTRVPLVMRLQDDPSADSPKLQLEYSNGRVVTTSEAKVADAINAATAEIAGSGKGISDAPITLVVRKRGVPDLTLVDLPGITRVPVQGQPDDIYDQIAKIIKEYIAPKESIILNVLSATVDFPTCESIRMSQQVDRTGERTLAVVTKADKAPEGLLEKVTMDDVNIGLGYVCVRNRIGEETYDQARIEEERLFKYHPLLSKIDKSMVGIPVLAQRLMQIQATIIAKCLPDIVKQINDRLSRHSSELDQMPPDLNNVADAVRAFFHIVKQVCASLEKVLVRGEFDEFPDDRHFHGTARIAEKMDGYKRRLPAECPKSSDDDAMFLMEEVRVLEETKGINLPNFLPRSAFLVLLKKKVETVMHVPHELVNEVWGYVEDVVMNILLKHSENFPQVQPSCRRAVQTLMDKARARSAQHVKELIEMELVSDYTANPDYMRTWTEIMEGHDSFMEAVEDGSKPARITLEGFGEVDVSHLRAHAGLAGQAFDLRARLTAYWRSIVLRLVDGLALHVLRVVKRLVEHDLEAELADELLGNKMAGVERMLAPSPSTGAKRERLKKSIVLLRQSKEVVANIMDRISAAGEV

SEQ ID NO: 196897 - protein, 51 aa, Oryza sativa
  Clone ID: PAT_MRT4530_92705C.1.pep
SCGQAKPMKGIDYPRWGRGHQSQYRTTRLGVQMTVKYHRRCFVTRKKKKGR

SEQ ID NO: 196898 - protein, 42 aa, Oryza sativa
  Clone ID: PAT_MRT4530_92706C.1.pep
PIYRECLLLGDGLIHLPSYIVPTIPNTITMRKRLHIMTRQKS

SEQ ID NO: 196899 - protein, 81 aa, Oryza sativa
  unsure (1)..(81): unsure at all Xaa locations
  Clone ID: PAT_MRT4530_92708C.1.pep
ISQVNTCPSPDEKXPTDLAACPFLGICSLKQXNILETLTQRSKLLVRLKNHHTEPFMEAAILDQMIGLGXSQYKLAGSSSS

SEQ ID NO: 196900 - protein, 129 aa, Oryza sativa
  unsure (1)..(129): unsure at all Xaa locations
  Clone ID: PAT_MRT4530_9270C.1.pep
FFFFFFHXXXXXLXTPXLLVSVSAFFFFFFFFIYDETTQHGYISTLALHIYFHLSLPPSVPHKRTETNTPTHIGAHKLNKASQDRTKARRALEKSSDRSSSSXPPQLITNSSNRXRTNDPASCKXGGRV

SEQ ID NO: 196901 - protein, 193 aa, Oryza sativa
  unsure (1)..(193): unsure at all Xaa locations
  Clone ID: PAT_MRT4530_92710C.1.pep
SLQRGTLYPHDITNLGHLAHISKAGTGSPYANERGLRPTAGXVPDHAVPGSLGVLPDTTPTNPLVPWHQGFPGXLVTQPGVFHFTYMVALVICSDVIPXRNQSFKATASRRFSDFKFEGDRRYSHRVHEYRGTTXWIQGNMVACLAQGLELHESSRNPCLEVNPVTATIRKQSKPKQGTKKKIILKLITSAIK

SEQ ID NO: 196902 - protein, 190 aa, Oryza sativa
  unsure (1)..(190): unsure at all Xaa locations
  Clone ID: PAT_MRT4530_92711C.1.pep
MASRVPSPPCAAARSGWAVPMVSVRPARSGVARGRAVVCAVIFRPCIDIHKGKVKQIVGSTLRDSSNDGTALVTNFESDKPPAEFANIYKEDELIGGHVIMLGADPASQAAAMEALHAYPXYVFSEGKMNIERLKQLVDLVGKHRLVLDLSCRKXDGRYAIVTDRWQKFSDXLXDEPTLKHXAAYADEFL

SEQ ID NO: 196903 - protein, 181 aa, Oryza sativa
  unsure (1)..(181): unsure at all Xaa locations
  Clone ID: PAT_MRT4530_92712C.1.pep
MASRVPSPPCAAARSGWAVPMVSVRPARSGVARGRAVVCAVIFRPCIDIHKGKVKQIVGSTLRDSSNDGTALVTNFESDKPPAEFANIYKEDELIGGHVIMLGADPASQAAAMEALHAYPGXVCXVGGGINLENAISYLNEGASHVIVTSHSCSEGKMNIERLSTCARSLDDALVLAGKVT

SEQ ID NO: 196904 - protein, 177 aa, Oryza sativa
  Clone ID: PAT_MRT4530_92713C.1.pep
MFFHIVLERNMQLHPRHFGPHLRDKLVSKLIKDVEGTCSGRHGFVVAITGVEDVGKGLIREGTGYVTFPVKYQCVVFRPFKGEILEAVVTMVNKMGFFAEAGPVQIFVSNHLIPDDMEFQSGDVPNYTTSDGSVKIQKDSEVRLKIIGTRVDATEIFCIGTIKDDFLGVISDPGAAV

SEQ ID NO: 196905 - protein, 499 aa, Oryza sativa
  Clone ID: PAT_MRT4530_92714C.1.pep
MVATIAVLTCMAYRRKHGIQRSATFVEDHRQQPPQPGDTSSPAIASPRATRFADDSRRPDRSLAAASSSPQPDGSTPDPVTQLYTSARGAKGNETKHGFWGVLAQQAIVMLDENGGTDDNHSVTSQSRWSYDRVRKPENPPLDIGCKIKTALEEGLTKVEGSSRTGDGVHGRKLHIRRKACSMDLRNSSMGLSSPEAMSPTMSDTESPQIKASRDVASAMAAKVKLLQRELKTVKADMAFSRERCAQLEEENRMLRDGKHDADEDLIRQQLETLLAEKARLANENTVYARENRFLREIVEFHQLNMQDVVDLDDEDMAGDGDGEEGDDDHQQYGCHLRAHEAAHGLWAGGGLGTPPQSPLGHAGRMGMSRSNSRAAESPTMRRSLKEENVDEPETPPTRRSLKEKADVDAPPETPPTRRSLKEADVDEPDTPPTRRSIKEDADDAPETPTTKQDIGSPETATTPARRSSNDDLGAAETTTPTRRSFKDDNGVTEMKNEH

SEQ ID NO: 196906 - protein, 60 aa, Oryza sativa
  Clone ID: PAT_MRT4530_92715C.1.pep
YRCSSQSFSVQNFWGFYPFFIFLSQLKLQEGFAVCSISLSCSFFFSGCCVTGFVNLFLSI

SEQ ID NO: 196907 - protein, 119 aa, Oryza sativa
  unsure (1)..(119): unsure at all Xaa locations
  Clone ID: PAT_MRT4530_92716C.1.pep
LYQKNLIFISPLLQCCPLISPCFSMRGLRFFKPKYQPLLXSHTLSYHTLFPNPKGFKLWRKWCLPFFSSEVDFCKLLIQKXCRVCVSLLFFRXIQAGPSLIAPFACXLLCGFCCNRIKM

SEQ ID NO: 196908 - protein, 95 aa, Oryza sativa
  unsure (1)..(95): unsure at all Xaa locations
  Clone ID: PAT_MRT4530_92717C.1.pep
GIHKVLKPEGIFVSITFGQPHFRRRFFEAPGFTWSVEWSTFGDGFHYFLXILKKGKRLLDSNGNQHTQPAAPSINMFHEELESEDYIFRTNVDEL

SEQ ID NO: 196909 - protein, 42 aa, Oryza sativa
  Clone ID: PAT_MRT4530_92718C.1.pep
TKLHLKNGKVLLQIVMLYFGVQFSSVKIGGFVGYILVKQDHN

SEQ ID NO: 196910 - protein, 795 aa, Oryza sativa
  Clone ID: PAT_MRT4530_92719C.1.pep
MAPFGDGGGGGGEEEKREGDAGWGWDPMRSGSAPPTMEGAAAAAASAVAQQEVEGVYGGGGGGGGGSFFSGMDGFGARLDEVGRRRGAAAQDHFGNSESLSNGAPGLHLNGTREFNGQQFGPTRVHSVGAMLDHSAVNVGSPWIQTKTDDADFHRHAENRFMPNMGKMNAFARRDLQSTYLSDSDLSNALSRVNLSNHLEYDERGLAKDLLDEMEMRNHDRHFSSKIANDCRSPLSGNALCTLGCEHLDVHSLPSYGDGLLRRQNSIMDSPYVSRNNNHHMKNVDRLSLADQLALMQLSNLDENNYHSNADMVNIINPLRNRRNITDLDLIRSRNHFLEELIAQRCLQEDNVFQSKSGPSYNDNILYHDGPRFPYSRMQRSGSHAYSHLRGIPYLGDQQSRMLSSSRRTPGRNMGSQIYQDNPVANCLDLSSLDLANRSGACPLELVNVVGHVMEVSMDQFGSRFIQQKLEVASADDREKIFPEILTNAIALTTDVFGNYVIQKFFEFATESQLSQLADQLRGHFLQLSFQMYGCRVVQKVIDVVDLERKISIVGELKNSVLRCISDQNGNHVIQKCIECVPEDHIPFVIEDILQKIYPLCTHQYGCRVIQRVLEHCHNPATQSAVMDEIVERAFDLTEDKFGNYVVQHVLEHGRPEERSSIIQKLSGQVVNLSQQKYASNVVEKCLSFGTPDEREGLIREIVSSGQTFQGLMKDQFGNYVVQRILQTCDDKFLVVILSSIKMHLNELKNYTFGKHIVARVEKLIITGENRVRMGSKTSQCQQSLSCTDVDANPF

SEQ ID NO: 196911 - protein, 62 aa, Oryza sativa
  Clone ID: PAT_MRT4530_9271C.1.pep
VGAIDSDQLGGAIIVLAAGLPPHVDSYCMTHWYLDQKPVYLYGDQQMEANNCGADRVETLRW

SEQ ID NO: 196912 - protein, 132 aa, Oryza sativa
  unsure (1)..(132): unsure at all Xaa locations
  Clone ID: PAT_MRT4530_92720C.1.pep
TPPAAAAVAELEAAEVDIAAAPLPSRPLRPAAKVFXEGRITIRRSAAXHXPXXGSPWYGADRVLYLGPLSGXPXXYLTGEFPGDYGWDTXGLSAXPETFXKNRELEVIHFRWAXLGALXXVFXSSLPNGLKF

SEQ ID NO: 196913 - protein, 71 aa, Oryza sativa
  Clone ID: PAT_MRT4530_92721C.1.pep
MSRRLRWGSTGEISPNTNREEEDHQMGLLRSYAHKWQLLLPSSQGARYWNLPGAHSGKEWDTPPRPLGKGD

SEQ ID NO: 196914 - protein, 41 aa, Oryza sativa
  Clone ID: PAT_MRT4530_92722C.1.pep
KFLLGKLMEVHGVHPKEDIGSKLDRPPEHEAMAGQEVLAGE

SEQ ID NO: 196915 - protein, 1081 aa, Oryza sativa
  Clone ID: PAT_MRT4530_92723C.1.pep
MRVPATNLDGGAADEVEFGLANPTAATARGGKVGNGLGAPDFAGDVGGFISIDCGLEADSSYLGDLTGLTYVPDGPYIDGGENQKVTTVYRNRWWGPDTRTLHTVRSFPSAKGQRNCYSLPTHIGSKYLVRLDFLYGNYDGMDNPSLKFNLTLGVKHWDTGTPFVSTVELRPLGILPYPAVMGNVSLSLYVRSNVGSSPDDDNLRQVVTDDYTSLLTGESPSLVKAADAGSASPDLVEAGYGVHRSAAEEAASGSRGRGCGGGEGVGGRIRGGVGGWEAREGAGGQIRLPGGQTWRHRQPGGEERRRWPDPASRWPDLATGGQEAATAWALKAGGRRRLEASPAEAAEMETAAAGGLSRLPTPRGPPPRPGSRAVLCDPAVPVPCGCLAVVWGVGGECGKAIVPSGNSMKLVFFSGQVDVLLRNHFVILHFADFQNNKSREFTVSIDNGVHSSPYSTPYLNGLSVTGSWSSDSEGKYNFTIAATAISALPPILNAYEVYGRIVHDNPTTFSQDFDAIMAIKYEYGIKKNWMGDPCFPHEYVWDGVKCSDAELVILYVPQYPKLNIKTLASSTDLAMVPELRGAPGHITNHWDHLQEPENRRFTYQELEKFTDNFKHLIGHGGFGHVYYGCLEDSTEVAIKMRSELSSHGLDQFLAEVQSLTKVHHRNLVCLVGYCWEKEHLALVYEYMSRGNLCDYLRGLDYLHKGCNLPIIHGDMKTNNILLGQNFKAKIADFGTHISAVAAGSMGYIDSEYYTTGRLTESSDVYSFGIVLLEITTGEPPIIPEKGHIVQRVKKKIVSGNISSVADAHLGGAYNVSSMWKVVNIAMMCTTDIATQRPKMADVVVQLKESLDLVEVQGDRGDKENLAKVTIGELPIIPGNGHIIQHMMQIVTGNITSVADERLGGSYIFNSMWKVLDAMMMCITDIASQRLMMSAVVLQLKENHELEEAHGDGEMQGKHCLDCINNGKLLLMLDEPTGVLLLLAYASSPSHGSPRFCSHRCDCRPNMWERLGVNGATNLRGGSDSLGGDASPAGGYGSAAPGPSDSMSGSGGNNSRHLQVWYLTMNHAIKIVQSSLMLACG

SEQ ID NO: 196916 - protein, 501 aa, Oryza sativa
  Clone ID: PAT_MRT4530_92724C.1.pep
MERKRRGWLERIKRLFVSEPKQKPKPDKKVKSKRWMFAGKLKTQHSFALPAPAPAVEEEQIRQAEDEQSKHAMAVALATAAAAEAAVAAAHAAAEVVRLTGKTAALAPAPATTTTPTPYGHEHAALMIQSVYRGYLARRALRALKGLVRLQALIRGQAVRRQTAATLRGLESLMKIQARQRARASSAAAAGGDHNAANSPAPDGMDALLRRGRELYYAAAAAVHEQQLSKGWDSSTLSKEEMSAMSRSREEAALKRVRALQYASLHQSEKVGVRRQPMSREEMETLNQRWSWLEEWVGSQPPFDKDIPVAHQSPSRDAAGAAMNDDERPPPPPVLRSRSRADRLACVGGDDDDADRQLGYSARRSFTRAGRRTPARDDDGGGAAAFPGYMASTASAKAKFRSMSTPKERSGAGAADAYSEQCFPFADRLLSPIPSMSPIPSIASDIVFARSSRPAAAQRSPRVKGPMTPTRSRSRRSPGRHSFGSEAALHQLQMEQYTPIR

SEQ ID NO: 196917 - protein, 178 aa, Oryza sativa
  Clone ID: PAT_MRT4530_92725C.1.pep
MESSGEAGGKRKSEEEDAGMDFIGAGRWRLKIFYGISLWAIGFISIDCGLEADSSYLGDLTGLTYVPDGPYIDGGENQKVTTVYRNRWWGPDTRTLHTVRSFPSAKGQRNCYSLPTHIGSKYLVRLDFLYGNYDGMDNPSLKFNLTLGVKHWDTVSIDTTDGNDGYNVHEAVFVAWAS

SEQ ID NO: 196918 - protein, 768 aa, Oryza sativa
  unsure (1)..(768): unsure at all Xaa locations
  Clone ID: PAT_MRT4530_92726C.1.pep
MTTSRMTRQRYPDDQYDRFWSTDEAHPLSTNISTQTTIQPSTEFAVPSPVLQKAIVPSGNSMKLVFFSGQVDVLLRNHFVILHFADFQNNKSREFTVSIDNGVHSSPYSTPYLNGLSVTGSWSSDSEGKYNFTIAATAISALPPILNAYEVYGRIVHDNPTTFSQDFDAIMAIKYEYGIKKNWMGDPCFPHEYVWDGVKCSDAXDLSNSELHGSISNSFTLFTALKYFXSSTDLAMVPELRGAPGHITNHWDHLQEPENRRFTYQELEKFTDNFKHLIGHGGFGHVYYGCLEDSTEVAIKMRSELSSHGLDQFLAEVQSLTKVHHRNLVCLVGYCWEKEHLALVYEYMSRGNLCDYLRGKIGMGENLNWKTRVRVALEAAQGLDYLHKGCNLPIIHGDMKTNNILLGQNFKAKIADFGTHISAVAAGSMGYIDSEYYTTGRLTESSDVYSFGIVLLEITTGEPPIIPEKGHIVQRVKKKIVSGNISSVADAHLGGAYNVSSMWKVVNIAMMCTTDIATQRPKMADVVVQLKESLDLVEVQGDRGDKENLAKVTIGELPIIPGNGHIIQHMMQIVTGNITSVADERLGGSYIFNSMWKVLDAMMMCITDIASQRLMMSAVVLQLKENHELEEAHGDGLLGKCILIMVINADYGGGDCAARVEQLALARPLGSPSFLCTSTLGFHCSHVRLTVSSKTLQRRRRWLYFVACVEDLAVPGVSVNGATNLRGGSDSLGGDASPAGGYGSAAPGPSDSMSGSGGNNSRHLQGPI

SEQ ID NO: 196919 - protein, 962 aa, Oryza sativa
  Clone ID: PAT_MRT4530_92727C.1.pep
MGGRTQPKSGSHTPLTLQPQLPPMSARAMLAPSRRCSATHRAWGERNTDYLLIHFEQGTAEHRLLLSVSVTCQRFEPTARQVEIKTFLCHFSLVHTIGFLSIDCGLEADDSYPDDLTGITYVPDGHYTDAGENHKVTTVYRNAWWGPDRTLYTVRSFPSAEGQRNCYSLPNDVRSKYLVRLKFLYGNYDGLDSSSLKFNLTLGVKHWDTVSIDTTDGNDGYNVHEAVFVAWASWAPVCLINIGQGTPFMSMVELRPLGILPYPAVMGNVSLSLYVRSNVGSSPDDDKLVRYPDDQYDRFWSTDEAHPLSTNISTQTTIQASTEFAVPSPVLQKAIVPSGNSMKLVFFSDQVDVLLHNHFVILHFADFQNNKSREFTVSIDNGVQSSPYSTPYLKGLSVTGGWSSNSEGKYNFTIAATATSALPPILNAYEVYGRIIHDNPTTFSQDFDAIMAIKYEYGIKKNWMGDPCFPPEFVWDGVKCSDAGDKIMRIISLDLSNSKLNGSISNFFTLFTALKYLNLSCNQLNGTIPDSLLKNNGSIDFSYESDGNMCKTHATPSLSRNTLAVSVVAPVLVLAILVLAYLIWRAKRKLNTSSTDLAMVPELMGAPGHITNHWDHLQKPENRRFTYQELEKFTENFKHLIGHGGFGHVYYGCLEDSTEVAVKMRSKLSSHGLNEFLAEVQSLTKVHHRNLVCLVGYCWEKEHLALVYEYMSRGNLCDYLRGKTGMGEILNWKTRVRVALEAAQGLDYLHKGCNLPIIHGDVKTNNILLGQNFKAKIADFGLSKTYHSDSQTHISAAAAGSMGYIDPEYYTTGRLTESSDVYSFGVVLLEITTGEPPIIPENGHIVQRVKQKIVSGNISSVADAHLGGAYNVSSMWKVVNIAMMCTTDIATQRPKMGDVVVQLKESLDLVEVHGDRGDMENLASDTMSSMSTFGPSARRACGYAASPAGAGPGLPGAPRRLR

SEQ ID NO: 196920 - protein, 54 aa, Oryza sativa
  Clone ID: PAT_MRT4530_92728C.1.pep
MAIIANDVSHFGFLAILSVSSVAGAAWMFCQWLGNSTDEQRVLFIFDPHFQVEP

SEQ ID NO: 196921 - protein, 358 aa, Oryza sativa
  Clone ID: PAT_MRT4530_92729C.1.pep
MASSRAAKRPKVDPSSSSSAPPPPPPPPQRGDDDYVPGNIVEIELCNFMTYDHLTCRPGPRLNLVVGPNGSGKSSLVCAIALALAADPAILGRASSVAAFVKRGEDSGHVKISLRGNTPDHKLCITRKVDTNNKSEWQLDGTTVPKKEVIDLIKKFNIQVNNLTQFLPQDRVCEFAKLTPIQLLEETEKAVGDPNLPIQHRQLIDRSKELKILQVAVKQKEQTLNNLKALNAELEKDVERVRQRDRLLKKAELMKKKLPWLKYDMKKKEYKEAQEKEKTEKKKMEEVAKIWEDSKGPVEYVSCSTGFNFSFIYKLISRGIFELRGLGICSDVLRYEDFLSKPFNLNGYIHVQPRGQFY

SEQ ID NO: 196922 - protein, 442 aa, Oryza sativa
  Clone ID: PAT_MRT4530_9272C.1.pep
MALHLQYVAVLLSVLTLFLATSDAVLNCSTTAGNNSSTFTVDPRRKSQNNVYQTPSPSSSPPRSNNQAPFVPAGNQQGSGFNTKSFSTKVVAGSITAAIAVVAGVVVLLVCFMRKRARFNHHRLNRKTEILIEMPMEEEVHNTRRFSYAHLLAATENFSDSRKIGQGAFGAVYKAQLMNWTTPVAVKRIMRVADHERAARDYDNEIKVISKLSHPNLVPFVGSCDENGELLLVYELIHNGTLDYHLHYANTILSWSRRYKIALGMASALNYMHGNHPRVLHRDIKPGNVMLDEEFNAKVGDFGLVRQVPIDKTSCPMTIFGSSRYIDPQYCSTGCISPASDIYGFGVVLLEIASGEIPQCLKGNGLVEKFRRLYYSNSLLDAVDRRLNGDFDEEQMKRVILIGLLCVQFDRHMRPSSKEVLGYLEGQLPVPQLHIKTCKQAK

SEQ ID NO: 196923 - protein, 139 aa, Oryza sativa
  Clone ID: PAT_MRT4530_92730C.1.pep
EHSCTPASHSQESLLKLGWALTNQVGFLPKQASKQAQGTQSLCADTASSTQPSSTFPATECLAQSEQPCLSSSHNSIHPLGAPIPLGSSSLWACHPIEPLAPITCVGQTWVSNPFPLDLAFPERQHVFPGSSPPPKGPD

SEQ ID NO: 196924 - protein, 294 aa, Oryza sativa
  unsure (1)..(294): unsure at all Xaa locations
  Clone ID: PAT_MRT4530_92731C.1.pep
NRPHEYTRQDETRSRGKPPHCIGRGRAGRRESHAPREESAPATQRSEYYYCKIKXVFDSYYVMKNXHMRLLVLIFGRFXRSDFGDDWIXQVMNMNSDNXGPIRPGRCCXSESMHVVGEDSIWHTMEILCAYGTRSRIWRESKFSTIXFVKFISCTERFPRXIRTSCTRLVRGFRLLTSDINREGVSDXQYRTIQTGGYTAVRPTTLTVGRGXARRFDQEINTGQTGSIGXSDQRINSGQTAVRGSGGCRRGHHPEKRRIANILTISFSGKEPTSHRSSSYQEENRGVVVARNTK

SEQ ID NO: 196925 - protein, 118 aa, Oryza sativa
  unsure (1)..(118): unsure at all Xaa locations
  Clone ID: PAT_MRT4530_92732C.1.pep
XPNXXXXLWPLXXXXGXGWFVXXIDGEVXAKXTXLXLXXXVXXXGXXXXGXXAALAGRALQXXXGGGGRLQLQLEVDGLGEAPLPGGAPSPXXRGVSITAAXXQAEPELGRLEGQVRR

SEQ ID NO: 196926 - protein, 190 aa, Oryza sativa
  Clone ID: PAT_MRT4530_92733C.1.pep
MAAAAATPRHHHRLLLLLFILFLAAGAAVPVSGAWDAKGKTLCSGRLLGLTDCGDEEPSAYEMLERFGFPRGILPEGVTGYTLRPSDGEFAVYLGTGECEFEVDGGYRLTYQGRITGRVAGGSITGLRGVTVRVFMMNWGIDRVVVADADHLVFYVGPLSQAFPVDGFEESPQCRCRHGGGAAVSGVAAM

SEQ ID NO: 196927 - protein, 81 aa, Oryza sativa
  Clone ID: PAT_MRT4530_92734C.1.pep
GGKIYGFKKIKKRTRVLLKTRGIFKGEKKRDTAPVKGGKKKVKYFKVPPNGKKSTIILGAKNLGETFGKTLIWKPKAGFLK

SEQ ID NO: 196928 - protein, 84 aa, Oryza sativa
  Clone ID: PAT_MRT4530_92735C.1.pep
MNNVADCPLISAVAARGGVGRADAARGGVGCAVAIRDVVDGADVYSPSSSDSTMNSVEIFCGVRKRAHEIRGEIFADSAVPNRA

SEQ ID NO: 196929 - protein, 97 aa, Oryza sativa
  Clone ID: PAT_MRT4530_92736C.1.pep
CHHPHSISSSTMFSRIQERWRPRHRIRVNRRRRAIFIGQLPQLHGFQINGEQAIPVTQEQDAGNDADDIQSMVVTSPPNHGEIAIAVETSPISTGQV

SEQ ID NO: 196930 - protein, 41 aa, Oryza sativa
  Clone ID: PAT_MRT4530_92737C.1.pep
ATKQLYFEFYPQGQKKCKLLQSTNIQEFKAHIESYEIQMVQ

SEQ ID NO: 196931 - protein, 415 aa, Oryza sativa
  Clone ID: PAT_MRT4530_92738C.1.pep
MEATASMLQARDWSSLPTDVLVLILERMRWSTHPSVVLVCQQWRSAVSLSPFYPAWITPLLLNTADIGTANIRSKWEVIAVYDPCRHDEGFKILDKLNSFGFKGEDSYLLESNQGELMVVLIERHGKMVHVVKLNEQRMEWEKYSLHGQKVFTGSQTTMMKKTKFNWMEIKVFFLRFIGMKLSMLTLLSVMTRRKTYFRSGSFSRRQCDWCHDQDDDSNVIGVNDLFVLDFIGAVIQYDNANDAGTEKRVHPRIPCPIYDVQTNQIEPLAEYQQHIILIIDQHNLAECLDYANMQVAGTCSCSWKHRQICALCRKDASVVGACLHGEAVPMATHGRNERVVLETDFYTARLTLSLATVTSNIISGTTPLDRLVCDLAKESAPNPNTSPAETENIICCYLLEESMQQIKLLYLVDG

SEQ ID NO: 196932 - protein, 213 aa, Oryza sativa
  Clone ID: PAT_MRT4530_92739C.1.pep
MILPGLKIKYARYPFEPGLKIIFSPGFYCIRDYCGNRPTDERCAWIRRAPPPASESSRPCPDQPRAAARARIRSPWPSGGQIRPPRLCGGRIHHACTRARALPGRGSRRPSRSPSSPSLIRRGFLRQQEEEERLEEDRSRCKLAAASENRLPAILIFYGRPLSVAASENRAIFNDGPLSVAPSENRFSLAVRNPSPLVTFLVAVFAYNRQRKL

SEQ ID NO: 196933 - protein, 668 aa, Oryza sativa
  Clone ID: PAT_MRT4530_9273C.1.pep
MEMEESSVGDITKLPSGTGSSGIRKLNDAAAAVDLELEVAGRQTMGDLSELTGETNPNEPSVLHLLEDYESSSESPRDVNAVGNTKSTRNNVGTEGRLPKAQTEKIPMEHVSLVTNHLRRAFTPELRDVRWPEKFRPGAIEKYDGSTNREEFFQVYSTILYVADADDNTLGTYKRHTIEDDLHALTQNAGESLRDYIRHFNECRNMIPEITDASVIRAFKSGVRDRHTNQELATRRITSARKLFEIIDMCAHADDALWRKEGNSKAGEEKKSTNKDAPESSKKRSRKSEKLKSSGEVLAAEKTDPPRRPNPQSDDSRKQWCPIHKTNNHATEDCFVFKKELAKQLAIERGKRVRVVETAEEAATNDSDSDFPEYDLHISHIFGGSTSWRRRRPVVFPSDAHPGKWSASEGDGEGGRNGGDKGSLSADYPKIATTPGMYPIVVEPTIRNIKVARVLVDGGSSINLLFASTLDAMGIPRSELTPTDQPFHGITPESSSKPLSKITLSVTFGQANNFQTEQITFDVAEFDTAYNAIIRRSALAKFMAASHYAYQVLKMPGPKGTITIQGNAKLAVQCDKRSLDMVEHTPNPPITTEHPKKVTKPNKTPKLDGAIKIIPLSSSNPDKTGGFPVAPSRFFPISPNSLVLPIAPAPCNHPPPPFPLLRPPLAAV

SEQ ID NO: 196934 - protein, 356 aa, Oryza sativa
  Clone ID: PAT_MRT4530_92740C.1.pep
MAKKKKRTGGGEQPKPASDVAEDKPAEDTSPDVQQPHLNAATTTAAPGTDDKDASTKADDPKKDAKEKEKKPAALPVVTAVLNVDMHCDGCAKRIRASIRHYPGVEGVAMEVDKGTMTVVGRFDAKKLRDRVANKTKKKVDLLPNNKKAGDDNDNKNNKANECDGKPADKKQQQQEDDGDEAGKEDKKKKKEKEEQDDQKKKKAKDNKKPVVPVPGTVVLKIGAVGLHCDGCMNRIRTKLFHIQGVEQVAMEMAKNQVTVTGTMDIKALPEKLRKKLRRPVDVVPPGKQKDKDGGKDKDKEKQDGGKDGGGGGKDAAAKALTAEKEAWKAAFYDQQALLATEFMLSDENPNACSIA

SEQ ID NO: 196935 - protein, 459 aa, Oryza sativa
  Clone ID: PAT_MRT4530_92741C.1.pep
MASWRRTAEESSWVVEVEKAVRSGGGTDGDPSAEEAAWWRRHSIYRVPACIKDLNRRAYQPQVVSLGPFHHGDPNLLPMEDHKRRALLHFLRRAAPRRRPLAEFAAAVADAAEQLVGTYQGLADEWRRGEPEKEKREAFLEMMVTDGCFLLEVMRTAAGWEVSDYADDDPVFSAHGLLYTVPYIRRDMIMIENQLPLLVLDKLVAVESGIQQQNEDYINRLVHNFLSPTAWPPVTGVGLALHPLDILRRSLLFGPAPSPRAPAPETAPTDDIIRSAEELYEAGIRFRRSPTSSLLDIRFHRGVLSLPAIAVDDTTEYMLLNLMAFERLHAGGCGGGGGNDVTAYVFFMDNMIDSPRDVALLAARRVVHNTLGSDKAVARMFSGLSRDVVLEPRSALDGVHREVNAYCRRRWHRWRANLVHTYFRSPWSLMSLAAAVFLLVLTVMQTVYTVLPFYQGGNN

SEQ ID NO: 196936 - protein, 179 aa, Oryza sativa
  Clone ID: PAT_MRT4530_92742C.1.pep
MALLRSLACFLFLLCSSFTFEAVNGRMYGGGDVVEEEEDDSSTVADGARGGAGGWPGYLYTRAVGRCTPQFWSSGAEQWPNIIPQEAAVSKVFGSRSIDRYGPRLTVLEATTRTDDNGSSSAFAKLVKQGSAALLNAYARKGFPLDSWEVKALLLEALVSEDAAAAQADRFEQANESCI

SEQ ID NO: 196937 - protein, 75 aa, Oryza sativa
  unsure (1)..(75): unsure at all Xaa locations
  Clone ID: PAT_MRT4530_92743C.1.pep
NRFPGVSPRAYTGPVLRAKGVGARGGLRGGGPGFLIYFPATGPGGGLLXVFRDFYLGCRTTAGATCSTGPGPFTA

SEQ ID NO: 196938 - protein, 163 aa, Oryza sativa
  unsure (1)..(163): unsure at all Xaa locations
  Clone ID: PAT_MRT4530_92744C.1.pep
RAAPVGCDHPVPIPAAEKIERHHPHPRIRGQDNGPAPAPPDGRTNHPEQATCDEGSSRWTPPPPRSTPPPPXPRRRPRSAPPPPILAAWPPPLPAPRPPSNRAAANPEPRCLRPSASPPPPICAAGHAWTKTASTTSARGLRSRRRVALPPLPLPASASTSTH

SEQ ID NO: 196939 - protein, 311 aa, Oryza sativa
  unsure (1)..(311): unsure at all Xaa locations
  Clone ID: PAT_MRT4530_92745C.1.pep
MKVSVVSRSGREVVRGGVELKDSAKVADLQDAIYAKTKKYYPARQRLTLPIQPGKSGKPVVLSAKASLSEYCEKGSGSLTVVFKDLGPQVFYSTLFFFEYLGPLLIYPMFYYLPVYKYFGYEGERVMHPVQTYAMYYWCFHYFKRIMETFXVHRFSHATSPVSNVFRNCAYYWTFGAYIAYIRATSALYTPXSELQMKIGFGFGILCQIANFYCHILLRNLRSPSGNGGYQIPRGFLFNIVTCANYTTEIYQWLGFNIATQTVAGYIFLVVAASIMTNWALGKHRRLKKLFDGKEGRPKYPRRWVILPPFL

SEQ ID NO: 196940 - protein, 70 aa, Oryza sativa
  Clone ID: PAT_MRT4530_92746C.1.pep
FWFFYMFLFLNQNIGGCICSSKRREASFLLSPLHRLKQSQITNLSSSSRENIQTQYPYTYLFLGKERAWA

SEQ ID NO: 196941 - protein, 336 aa, Oryza sativa
  Clone ID: PAT_MRT4530_92747C.1.pep
MKVSVVSRSGREVVRGGVELKDSPCRGEGLEFWFLGGGGGLRSRGKAKVADLQDAIYAKTKKYYPARQRLTLPIQPGKSGKPVVLSAKASLSEYCEKGSGSLTVVFKDLGPQVFYSTLFFFEYLGPLLIYPMFYYLPVYKYFGYEGERVMHPVQTYAMYYWCFHYFKRIMETFFVHRFSHATSPVSNVFRNCAYYWTFGAYIAYYCNHPLYTPVSELQMKIGFGFGILCQIANFYCHILLRNLRSPSGNGGYQIPRGFLFNIVTCANYTTEIYQWLGFNIATQTVAGYIFLVVAASIMTNWALGKHRRLKKASTLFDGKEGRPKYPRRWVILPPFL

SEQ ID NO: 196942 - protein, 84 aa, Oryza sativa
  Clone ID: PAT_MRT4530_92748C.1.pep
MAPMGAMGVEIEDGTESLVSEIFRTEHGQQQQCLCSVWRHPMVGNQLRHTTPRLGIAIVAFGIYLVNVATYNRLYRPSGDHHHH

SEQ ID NO: 196943 - protein, 134 aa, Oryza sativa
  Clone ID: PAT_MRT4530_92749C.1.pep
MELITACALLLIAVHIAIVISCPEPLAAVALVDVPLLYLCRYLLIIRRGVIIVSGAGAGGGRLRRFRLGAAMAIIYMAMSTLFFLRIAPLTPWWGALAAWVMILLIVEAIFAFFFPYRCCFNETEGDVQNNPHV

SEQ ID NO: 196944 - protein, 479 aa, Oryza sativa
  Clone ID: PAT_MRT4530_9274C.1.pep
MSRRKTSIALIANPQTRATTYKKRKAGLIKKAGELATLCDIPVAVVCAGPDGGAPTVWVSPEGGDAIERYRALPAEKRARHTHVAYLQEELDKERAKLARLRQKGRPGELDPPDAVLDGMSQDELQQLLASIDATLLATAKRREALGLLPGADDDADGGGRRRDADVAGTNSVGVHGYQHQEVHAPATCDPFHPYNAGVTLMQPGYNNAQYMGGHGAVDMSGYQLQMQMPGNGSNNHSRLAWGGFQPCNATFVQPVYGNLQCWYNNVVDGNGEPCDAIVPSAGDPYMDIAGNDVYGNQMQPAPAANGGWHDPGTWGYDGGEPCKAIVPSFGDPYMGIGVYGNQMQPAPAPAANGCWHNPAGTWGNDGEPCNAIVPSAGHPYIDIECDIDGNYIDTTVFDYQTTSTSDNFMDAPVQFIATGSDESIVTNVAGCDETEFSIDDLLQCSDASQHSSGLEELHYLSDLADGFDFGCNFDVLLD

SEQ ID NO: 196945 - protein, 61 aa, Oryza sativa
  Clone ID: PAT_MRT4530_92750C.1.pep
LDGWRLATLASDGGGWTGVSVAVAVAMMADGGGVRRRQRWYVEAGKGSGSGEGGVRVRARH

SEQ ID NO: 196946 - protein, 80 aa, Oryza sativa
  unsure (1)..(80): unsure at all Xaa locations
  Clone ID: PAT_MRT4530_92751C.1.pep
LGSQGLEVXRAQGLGCMGMSAFYGPSKPEPDXVALIHHAVPGEATVVDTFDIDGPHTNELLLGKALQGRLRDKVELATMF

SEQ ID NO: 196947 - protein, 140 aa, Oryza sativa
  Clone ID: PAT_MRT4530_92752C.1.pep
EARSWVSELFQILRSWLPNNCFSEYKTPPNRPINEPLYVHRMSSYLFGRERKVADIPIDHPSCSKQHAVLQYRLVEKEQPDGMMSKQVRPYLMDLGSTNGTFINENRIEPSRYYELFEKDTIKFGNSSREYVLLHENSKD

SEQ ID NO: 196948 - protein, 74 aa, Oryza sativa
  Clone ID: PAT_MRT4530_92753C.1.pep
KKSVWILTSIIIYSTKATWILVIVSCFKRLSFFVLVTDNHDLFLLIEKCNYCCFLLIFFGAVTGEALNELEISS

SEQ ID NO: 196949 - protein, 1000 aa, Oryza sativa
  Clone ID: PAT_MRT4530_92754C.1.pep
MESAVASAFLKAVMGRLFMALEKEYSKHKGLAQEAQSLQLDLRMIAAVMDDQLRAMGRATTADARTAVARLHAEEMLDLAHDVEECVDRFLHRLTCRQHRGGAGAGASSSSLVRRMAHELSKVQSRSSFADEIQRLKTRVREAQQRIIRMKPTLDVLAGGGGGGGQLTGAAGTSSTAPSCRASRIPVGIAEPVEELLSMLDEVDGEPEQMRVISVVGFGGSGKTTLVKAVYDDPRAKDRFSRRAWVTVGSSPSPETSNGMKGILRAVFQQVLPKDAMDADGQHLETSLKEYLKDKRYLIIIDDIGMDQWNIIRSTFEDNGTSSRIILTTTIQSVANMCSHGNGYVYQMNTLGEEDSKELAFPGFRSPELEQGSASLLGKCDGLPLALVSVSDYLKSSNEPTGELCAKLCRNLGSHLKEQDGHYSFSELRKVLLDNYDSFSGYPLSCLLYLGIFPNNRPLKKKVVIRRWLAEGYARTDSLRSEEDIADENFSKLIDRNIIQPVDTRNNSEVKTCKTHGIMHEFLLNKSLSQIFIAKSSRDHPRLGVNTNACHLSFHSGELTECVASDEELSRVRSLTVFGHAGDAICYVRRCKLIRVLDLQECSDLDDDHLKYICKLWHLKYLSFGSNISELPRSIDGLHCLETLDLRRTQIKFLPIEAIMLPHLAHLFGKFMLHEDDVKSVNKMSKLQKFFSSKKSNLQTLAGFITDESKGFLQHIGHMNKLRKVKIWFKHVEGSNNYIADLSRAIQEFTKAPIDRDTDRSLSLDSEECPENFLSSLDLETCSEGSKYALRSLKLNGELHKLPPFVNLLSGLTELCISSPMLTQVHLSTLINLNRLLYLKLVAYKLENFEIKHGAFPSLRRLCFVVKSVTSALPTIKHGALPNIISLQLLCQGPVGLSGIEIRHMKHLKEITINSGVVVQWEQAAKNHPNRPKVLFLRKVDPMESEERGRPCAIREQMKITVAQPTSSGDGLNSSLNKIRLSEPPSSRLEMPVRHMVDGH

SEQ ID NO: 196950 - protein, 96 aa, Oryza sativa
  Clone ID: PAT_MRT4530_92755C.1.pep
PTGWGLNERGPGSSLLKLGRDHDLLYLQCVEITTGSGMEGQERMHSASARRGTNIREDDGTGGRNDIRRFSRRKCHQCAGLWAWNDCYCQQTNARI

SEQ ID NO: 196951 - protein, 64 aa, Oryza sativa
  unsure (1)..(64): unsure at all Xaa locations
  Clone ID: PAT_MRT4530_92756C.1.pep
LCVASSGISGGIXPVPESTVVGPRVKGYKCVTVCVSYFVSDRLVMGRSNGVPXYXVFFFFFISI

SEQ ID NO: 196952 - protein, 907 aa, Oryza sativa
  Clone ID: PAT_MRT4530_92757C.1.pep
MTSREWMYSGWTRGKAPTNEWIDNTTQFLNRAFSMQEVVKDGTIKCPCAQCRNYFRHKRDTIELHLCKYGYKENYGIWTSHGERPVINDNDPGPSLIDHEGFGESDRMDNMLVDLASAQPPESSEEPAYYAKAFYRMVASADELIHENTTHSCLSAVARLLAMKSQYNMSVAHYDDVLGIIHEFLPPKSKLAKDFYRSKKLLEGLGMPYVKIDVCYNNCMLYYKEDEHKKKCDFCGTSRYENVQNKTPRKVLHYLPIKDRLQRLYAHEEIARLRQSHSRSQSGNMVHPCDGEAWQQFDKDFQDFAQDPRNVRLALATDGFTPYSLGAAPYSCWPVFITPLNFPPGEEIKEEMYACVDDMENFGKTHHWTHISCFWQLPYFDKLKLRHNIDLMHNEKNVAESIWNTCFDIQDNTKDNVKARKDLAEICSRPLLQLVSKGNGKWHKPRASFCIDRNDKTTILKWFQELKLPDGYAANIRRGVNLLQRKFFGLKSHDYHVFMERLLPVAFRGFIPESVWKCLAELSFFYRQLCAKELNKDTIRSLEENVAVLICKLEKIFPPGFFNPMQHLIIHLPYEARLGGPVQFRWNYPYESKYDKEQWKSRISPTPNQLRDLRLNGWKSGRGIRNGPNFFDWFRTECMKSSSIHNALRQMSYGFRSTVSTYGVYDINGYRFRSEKYESKKSGLTTTNSGVCVSCVGENNDVLEYYSIIKDILKISWEGSMNLELVLFDCYWFDPTSTGVWRTANMGLVEIKHMSRLSNFEPFVMASQVTQVYYLPYPCTTRRDLSEWWVVHHVNPRGYVQKVENTNNDSNPNDDQTQDVSFYQEDGLEGTFIIDLGADLGNMTPPILDEITNAKDLEFLEKQTQAEDNYDEDDNEEEEEEEEEEEEEEEDEEDEGTQPPAYDPNDF

SEQ ID NO: 196953 - protein, 363 aa, Oryza sativa
  Clone ID: PAT_MRT4530_92758C.1.pep
MAGGEAAAHRGGRRAAAAVSPPPDPVFCEMELPVADPGPVRAEGLLLQCPYCDSEAMHKLAQFLLPGLAAVCIDCTTGDLFRKPSVVAVDMRKEMVDYVTQRSETFISDSLIESEASQDQENEMPEDPFEIVSIFMDDFSSTKRNIIGHVSGWLMSDSREDKIDDFVQEMEMTRFWPLERREVIAEVLLKNVDLKTKYHCPEKYENEERLADHKAQCSFRPVTCPNDGCRAKVSVRCMQDHDSACLFKILTCEQNCEKRLLRRDMDRHCVTVCPMRPMKCPFGCDSSFPERNLEQHCSEFLQAHLHKLLKAIHKKGFTDEGLKDHALLLEKHDNDGKLAKSRDVRSLTNVVKNLEAKIKDDSS

SEQ ID NO: 196954 - protein, 1001 aa, Oryza sativa
  Clone ID: PAT_MRT4530_92759C.1.pep
MTSREWMYSGWTRGKALTNEWIDNTTQFLNRAFSMQEVVKDGTIKCPCAQCRNYFRHKRDTIELHLCKYGYKENYGIWTSHGERSVINDNDPGPSLIDHEGFGESDRMDNMLVDLASAQPPESSEEPAHYAKAFYRMVASADELIHENTTHSCLSAVARLLAMKSQYNMSVAHYDDVLGIIHEFLPPESKLVLDFYRSKKLLEGLGMPYVKIDVCYNNCMLYYKEDEHKEKCDFCGTSRYENGQNKTPRKVLRYLPIKDRLQRLYAHEEIARLLQSHSRSQSGNMVHPCDGEAWQQFDEDFQDFAQDPRNVRLALATDGFTPYSLGAAPYYCWPVFITPLNFPPGVCMRPEYTFLTLVIPGPEHPGKKISVLMQPLVDELLKLWEGVETWDASRKQNFTMKAIFLWSIHDFPAYGMFAGWSTHGRLACPICMGDSQSFQLRNGRKPCWFDCHRRFLPNEHEFRTQLNAFRKNTFMLDEPPRILTGEEIKEEMYACVDDTENFGKTHHWTHISCFWQLPYFDKLKLRHNIDLMHNEKNVAESIWNTCFDIQDKTKDNVKARKVLVEICSRPLLQLVSEGNGKWHKPEASFCIDRDDKTTILKWFQELKFPDGYAANIRRGVNLLQRKIFGLKSHDYHAFMERLLLVAFRGFIPESVWKCLAELSFFYRQLCAKELNKDTIRSLEENVAVLICKLEKIFPPGFFNPMQHLIIHLPYEARLGGPVQFRWNYPYERFIQKLRKKVRNKARVEGSIVEAYLVEETSNFLSLYFNPKVRSARNKMPRYDDVSTYGVYDINGYRFRSEKYESKKSGLTTTNSGVCVSCVGENNDVLEYYGIISWEGSMNLELVLFDCYWFDPTSTGVRRTDNLGLVEIKHTSRLSTFEPFVMASQVTQKAENTNNDSNPNDDQTQDVSFYQEDGLEGTFIIDLGADLGNMTPPILDEITNAKDLEFLEKQMQAEDNYDEDDNEDEEEEEEEEEEEEEEKENDEEDEGPQPPAYDPNDF

SEQ ID NO: 196955 - protein, 61 aa, Oryza sativa
  Clone ID: PAT_MRT4530_9275C.1.pep
VVVSNIWRFFMSVPCEKTRRGVSHPAPNHMVRDHGGGAVLSLIAILIYRSPARKKGFFSGN

SEQ ID NO: 196956 - protein, 162 aa, Oryza sativa
  unsure (1)..(162): unsure at all Xaa locations
  Clone ID: PAT_MRT4530_92760C.1.pep
MVDFFNKYDKEQWKSRISPTPNQLRDLRLNGWKSGRGIRNGPNFFDWFRTECMKSSSIHNALCQISYGFRSTVSTYGVYDINGYRFRSEKYESKKSGLTTTNSGVCVLCWXNNDVLEYYGIIKDILKISWEGNMNLGLVLFDWYWFDPTSTGVRGPDNLGFS

SEQ ID NO: 196957 - protein, 63 aa, Oryza sativa
  Clone ID: PAT_MRT4530_92761C.1.pep
VMLETYTEQLDSLIDQLSTCFWRTMQVCKLVPDAMFRLRLPLPSGQETSTERLPLLWFVLHTS

SEQ ID NO: 196958 - protein, 294 aa, Oryza sativa
  Clone ID: PAT_MRT4530_92762C.1.pep
SVAAMAKPTPAPRATPFLLAAVLSIVVVAASGAEARWYGGGGGGGYSPSPSPVSSIVSEQLYASLFLHKDDAACPARGFYTYASFVRAATRFPRFAATGCADARKREVAAFLAQISHETTGGWATAPDGPYAWGLCYKEEINPQSSYCDATDKQWPCYPGKSYHGRGPIQISWNFNYGPAGQALGFDGLRNPEIVANCSDIAFQTALWFWMTPRDTKPSCHQVMVGEYRPGPADVAANRTAGFGLVTNIVNGGLECNRAGDARVNNRIGFYRRYCQVLGVDVGPNLDCEHQQPF

SEQ ID NO: 196959 - protein, 123 aa, Oryza sativa
  unsure (1)..(123): unsure at all Xaa locations
  Clone ID: PAT_MRT4530_92763C.1.pep
RLPAEVHPPDQPSAASLSERSHASYYLSPSSPATXPPSPSPETPPSRPSYEPAAGGGGSAAXRXGGGXRPGGDGRXDXGGARGGGRGAAQRGGVGRRPGGDEREGGXGARGGAGEAPRPSICV

SEQ ID NO: 196960 - protein, 396 aa, Oryza sativa
  unsure (1)..(396): unsure at all Xaa locations
  Clone ID: PAT_MRT4530_92764C.1.pep
GPRKAMFVATICFSLGFVVAAIGVYQHNLWLLYLGNGXVLGGIGLGLGYIGPVSTLMKWFPDKPGMATGLAIMGFGGGAMLASPISVGLMNFFSSETSVGIAETFLVLSVFYFIFMMFGVFTIRLPHPTWKPKGFVEHKKADKLVSAYNVGVNQAMKTPQFWLLFSILCLNVTAGIGVLGQASVMIPELFSEVSVGKQAAIGTLAAAGFVGLLSLFNMAGRFFWSSISDKIGRKNLYSIFFLLGAVLYFIIPSIGESGNKVLFVIGFCVIISMYGGGFAAIPAYLRDLFGSYQVGAIHGRVLLAWSTAAVIXPVLVNYIRHMQIDSGVPAAQAYSVTMYIMAGLLFIGFFCNLGVKAVNQKHHHQLTIKEAAHSAKAADETVISDTYLVVEEVAQG

SEQ ID NO: 196961 - protein, 136 aa, Oryza sativa
  Clone ID: PAT_MRT4530_92765C.1.pep
MSAAGMLGARSRAPVDEVAFPSLQWTKHDGVKRGFSRRGKKSMERKRVDVERGLTSMEAFIFFTAGDEFLGDGGSRAMVARSELIHHPSPQIGDTPWRRTTTPWQLMAVAGKRRPAAVEAKALLRASLPDAGQHLN

SEQ ID NO: 196962 - protein, 66 aa, Oryza sativa
  Clone ID: PAT_MRT4530_92766C.1.pep
MAWPVVLLWAAGFAPRSSLRALRLAPLSVFRFAGGLSLGRRLARRFSGPLAGGRAGGVFVTFRIGA

SEQ ID NO: 196963 - protein, 1469 aa, Oryza sativa
  Clone ID: PAT_MRT4530_92767C.1.pep
MVKLDRSSLLRFLRELSQDGGLAASWQDGTDCCKWDGITCSQDSTVTDVSLASRSLQGRISPSLGNLPGLLRLNLSHNLLSGALPKELLSSSSLITIDVSFNRLDGDLDELPSSTPARPLQVLNISSNLLAGQFPSSTWVVMKNMVALNVSNNSFSGHIPANFCTNSPYLSVLELSYNQLSGSIPPGFGSCSRLRVLKAGHNNLSGTIPDEIFNATSLECLSFPNNDFQGTLEWANVVKLSKLATLDLGENNFSGNISESIGQLNRLEELHLNNNKMFGSIPSNLSNCTSLKIIDLNNNNFSGELIYVNFSNLPNLKTLDLMRNNFSGEIPESIYTCSNLTALRVSSNKLHGHSSNLTTLLIGHNFMNERMPDGSIDGFENLQQGKEAEDKITFTGIMEATNNFNREHIIGCGGYGLVYRAELPDGSKLAIKKLNGEMCLMEREFSAEVETLSMAQHDNLVPLLGYCIQGNSRLLIYSYMENGSLDDWLHNKDDGTSTILDWPRRLKIAKGASHGLSYIHNICKPRIVHRDIKSSNILLDKEFKAYIADFGLSRLILPNKTHVTTELVGTLGYIPPEYGQAWVATLKGDVYSFGVVLLELLTGRRPVPILSTSKELVPWVQEMISEGKQIEVLDSTLQGTGEGKRLHSDQASPGIVVEQFKGIAGARQRSGRSNPAAAAVAGGGRGDLPRRPPLLPRDQEHQGVEAAPEMLRQLQLKRAGIWCEPGSCTCSGLLAIVHIINSVDERSSLLQFLSGLSNDGGLAVSWRNAADCCKWEGVTCSADGTVTDVSLASKGLEGRISPSLGNLTGLLRLNLSHNSLSGGLPLELMASSSITVLDISFNHLKGEIHELPSSTPVRPLQVLNISSNSFTGQFPSATWEMMKNLVMLNASNNSFTGHIPSNFCSSSASLTALALCYNHLSGSIPPGFGNCLKLRVLKVGHNNLSGNLPGDLFNATSLEYLSFPNNELNGVINGTLIVNLRNLSTLDLEGNNITGWIPDSIGQLKRLQDLHLGDNNISGELPSALSNCTHLITINLKRNNFSGNLSNVNFSNLSNLKTLDLMGNKFEGTVPESIYSCTNLVALRLSSNNLQGQLSPKISNLKSLTFLSVGCNNLTNITNMLWILKDSRNLTTLLIGTNFYGEAMPEDNSIDGFQNLKVLSIANCSLSGNIPLWLSKLEKLEIFFNGDANANNKEEYHPFGSKGEIPQQLGNLTNLQVLDLSSNHLTEQAASISTKSHNKKAIFATAFGVFFGGIAVLLFLAYLLATVKGTDCITNNRSSENADVDATSHKSDSEQSLVIVSQNKGGKNKLTFADIVKATNNFDKENIIGCGGYGLVYKADLPDGTKLAIKKLFGEMCLMEREFTAEVEALSMAQHDNLVPLWGYCIQGNSRLLIYSYMENGSLDDWLHNRDDDASTFLDWPKRLKLPKEQAGDFLISMMPASHISSTVISSPAISYLTKNLKLMLLISG

SEQ ID NO: 196964 - protein, 84 aa, Oryza sativa
  unsure (1)..(84): unsure at all Xaa locations
  Clone ID: PAT_MRT4530_92768C.1.pep
GEGTRDNQQTRNNRSHNIQANIRQDKTPDIDFRDKHGXSPTVSPDTVRRDESVISDLVGHGFEEEDYPVVDYESDLQTAMSTTV

SEQ ID NO: 196965 - protein, 1023 aa, Oryza sativa
  unsure (1)..(1023): unsure at all Xaa locations
  Clone ID: PAT_MRT4530_92769C.1.pep
KKHSNKFPIPVLALALVLLINLASLTSSCTEQDRSSLLKFIRELSQDGGLSASWQDGTDCCKWDGIACXKMCKWDGITCSQDSTVTDVSLASRSLQGRISPSLGNLPGLLRLNLSHNLLSGALPKELLSSSTLQVLNISSNLLAGQFPSSTWVVMKNMVALNVSNNSFSGHIPANFCTNSPYLSVLELSYNQLSGSIPPGFGSCSRLRVLKAGHNNLSGTIPDEIFNATSLECLSFPNNDFQGTLEWANVVKLSKLATLDLGENNFSGNISESIGQLNRLEELHLNNNKMFGSIPSNLSNCTSLKIIDLNNNNFSGELIYVNFSNLPNLKTLDLMRNNFSGEIPESIYTCSNLTALRVSSNKLHGQLSKGLGNLKSLSFLSLAGNCLTNIANALQILSSSSNLTTLLIGHNFMNERMPDGSIDGFENLQVLSLSECSLSGKIPRWLSKLSRLEVLELDNNRLTGPIPDWISSLNFLFYLDISNNSLTGEIPMSLLQMPMLRSDRAAAQLDRRAFQLPIYISASLLQYRKASAFPKVLNLGKNEFTGLIPPEIGLLKVLLSLNLSFNKLYGDIPQSICNLTDLLVLDLSSNNLTGTIPAALNNLNFLSEFNISYNDLEGPIPTGGQLDTFTNSSFYGNPKLCGPMLVRHCSSADGHLISKKQQNKKVILAIVFGVFFGAIVILMLSGYLLWSISGMSFRTKNRCSNDYTEALSSNISSEHLLVMLQQGKEAEDKITFTGIMEATNNFNREHIIGCGGYGLVYRAELPDGSKLAIKKLNGEMCLMEREFSAEVETLSMAQHDNLVPLLGYCIQGNSRLLIYSYMENGSLDDWLHNRDNDASSFLDWPMRLKIAQGASQGLAYIHDVCKPNIVHRDIKSSNILLDKEFKAYVADFGLSRLILPNKTHVTTELVGTLGYVPPEYGQGWMATLRGDMYSFGVVLLELLTGRRPIPVLSASKELIEWVQEMRSKGKQIEVLDPTLRGTGHEEQMLKVLEVACQCVNHNPGMRPTIREVVSCLDIIGTEL

SEQ ID NO: 196966 - protein, 178 aa, Oryza sativa
  unsure (1)..(178): unsure at all Xaa locations
  Clone ID: PAT_MRT4530_9276C.1.pep
LGDKSEQAVVDYVPHWILLVIHLNDSKIVVFDGLRTPQAKFQSVIDTLXNKALVRYKKKCIRHAPRANTFRVWAHPYCLRQDPGTSTCGFYLMRFMSIFMEDNNWNIMDAKKLKLPTSKLLPHACFGLAEQLCGFIFNHIISSDGAYNISKAPTGLVGFIEAGCPSDTLDSRSTTKEM

SEQ ID NO: 196967 - protein, 65 aa, Oryza sativa
  unsure (1)..(65): unsure at all Xaa locations
  Clone ID: PAT_MRT4530_92770C.1.pep
GGNGGGRGGDRAHVVGCEREGRGGADFAAEWAASGXMVVAAGQPEEGGGADKWGLGNLVPRFWDG

SEQ ID NO: 196968 - protein, 42 aa, Oryza sativa
  Clone ID: PAT_MRT4530_92771C.1.pep
SALIGAIGGGLRCRLRDARYCREPGLCLQWVLVIGLVCRWTR

SEQ ID NO: 196969 - protein, 64 aa, Oryza sativa
  Clone ID: PAT_MRT4530_92772C.1.pep
FWPGYFYPPSPHFWWGRVGLVVKKRQPWVIVGVLSRGEPKGSWVYSGFLKWGSKVLCPVPRTGG

SEQ ID NO: 196970 - protein, 142 aa, Oryza sativa
  Clone ID: PAT_MRT4530_92773C.1.pep
QERWGGSKRGEDSRGVDSDCRIAPTSDGRHDFMRTPIWACKYFMESLSSLLSNGSIPMSISDLEQLQSSFYCRVLFCPRCCVTSFGPNVLYIKLGPLGVRPRVRARHQHPCGRSPPLLIPLAAAKNTWALFRSKYSVATWPS

SEQ ID NO: 196971 - protein, 80 aa, Oryza sativa
  unsure (1)..(80): unsure at all Xaa locations
  Clone ID: PAT_MRT4530_92774C.1.pep
MKLSMKRPPYNRTSRMGIGLYECMRMKSSWSGYCQCEVIEKLCRDASHVLGRGSCVGXLRSAGKVYIHCSVTVLQSCLST

SEQ ID NO: 196972 - protein, 625 aa, Oryza sativa
  unsure (1)..(625): unsure at all Xaa locations
  Clone ID: PAT_MRT4530_92775C.1.pep
MILTVLLILGCCFFFLPMPMVAAQPWMICGSSKYTANSIYQSNLDSLLSSSFLVVSGDSSSGALFAKGSRGAAPDTVYAVALCRGDANASACSGCVDAAYAAATARLCPLSKDAAVFYDECALRFSDEDILNMDAFGRVNTSAAVGVAPLVLMNITSEPMLSGWNTNIQGTKNFTQFFIKTMNYIVAQALSTTKHYAAIRVDMDDADASNTVTLPRRLFCLAQCAPDLVEDICYNCLQNFSDLATANFAGRQGGRILALRCNRWYHPDSSFAGKTNADEDEALIWGLQGRSSEFTIYDFSQVLEATDNFSEENKLGQGGFGPVYKGRFPDGVEIAVKRLASHSGQGLTEFKNEIQLIAKLQHTNLVRLLGCCYQGQEKILIYEYLPNXSLDFFIFDETRRALIDWHKRLAIIDGIAQGLLYLHKHSRLRVIHRDLKAGNILLDREMNPKIADFGLAKIFSVNDNEGNTKRIVGTYGYMAPEYASEGLFSIKSDVFSFGVLILEIVSGKKTSSFHRYGEFINLLGHAWQMWKDETWLQLVDPLLPTDSHTIEIMRCINIALLCVQENAADRPTTSEVVAMLSNETMTLPEPKHPAFFNMRLTNEEASTVIAASSVNGITLSAIDGR

SEQ ID NO: 196973 - protein, 245 aa, Oryza sativa
  unsure (1)..(245): unsure at all Xaa locations
  Clone ID: PAT_MRT4530_92776C.1.pep
EKGERHSGGTSRREGDKKGEEGRPGKGTRDDKETGAAEPKGEGDGRAERNTHEARKEKGRGGPHAGPPGGARTTGGGPRERGRGGKNRPPGRGKGERGDGGARGPGHPAGGGANPARREEGATAASGRKGPPPASGGEAPAATETARHGSPPTPPPQPAXAAPSRREGKESGAXGGRGGRXGEGAAPPEGGEGKRRRWGEGEGERRRXSGVGEAAERLRGGGRGGXRVRVRVRVLIRPWGGGRRR

SEQ ID NO: 196974 - protein, 91 aa, Oryza sativa
  unsure (1)..(91): unsure at all Xaa locations
  Clone ID: PAT_MRT4530_92777C.1.pep
KNEEKKGKDKKRWKEKGKREKKGRGVKGEEGKDEGKRKGXGRKKREEKEGEWRRRKKARGKEGMKGGEKESKEEEKEKNGRRARKRWKSKG

SEQ ID NO: 196975 - protein, 58 aa, Oryza sativa
  Clone ID: PAT_MRT4530_92778C.1.pep
MAAGTAGHHGLTRVPDRPRLKLRGVQYYCTTPSWQLRTRSTSHLISHTKKKKTPCCCC

SEQ ID NO: 196976 - protein, 43 aa, Oryza sativa
  Clone ID: PAT_MRT4530_92779C.1.pep
SWSTRELMAREKKLVERRRLRRLPSDFFHLPVRLVSLPLLLTS

SEQ ID NO: 196977 - protein, 139 aa, Oryza sativa
  Clone ID: PAT_MRT4530_9277C.1.pep
SNVEVEKAWGILYHTIYNCTDGIADHNNDYIVEFPDISPNSFSSDVSKRKAISEVKKHRRFVLSEVSASLPHPHLWYSTKEAIKALELFLNAGNDLSKSLTYRYDLVDLTRQSLSKLANEVYLDAMNAYRKKDSNGLNF

SEQ ID NO: 196978 - protein, 61 aa, Oryza sativa
  Clone ID: PAT_MRT4530_92780C.1.pep
MAAKFMVGAGAAAAAFMASARAQTEAAARVGTPAGGLATRKSAKKAAGRNVGNIYREDVFR

SEQ ID NO: 196979 - protein, 392 aa, Oryza sativa
  Clone ID: PAT_MRT4530_92781C.1.pep
MAAEASRTSEARRDAVFGRWVVFSPARSRRPTDLKSHAPANPSPGAGAAAGAPKPSCPFCQGRESECAPEIFRVPAPPDASPWRIRVIENLYPALRRDAEPPAPEEAGEGEATPGERAVVGFGFHDVVIETPRHDVRLWDLDAAGVGDVLLAYARRVRQLMEHPAVKSPLPDLENMVILETGSHACPVIEAKFEESLLMDGWYLPPEETGMVFKNHGASAGASMAHSHSQMLGTPFVPPSVTTRLNCMKEVFERLGKCSLCEFQSKDILVRETHNFSAIVPFAASYPFEIWIIPRQHSSYFHEIDKDTALDLGSLLRTMLAKLSKQLNDPPFNFMIHSAPFGVSSSCLPYTHWFLQIVPQLSLIGGFEIGSGCYINPVFPEDAAKILWELDC

SEQ ID NO: 196980 - protein, 77 aa, Oryza sativa
  Clone ID: PAT_MRT4530_92782C.1.pep
RDKSAPTSPKARPLASSGRGRGSKAAQAKLGAQRIGSASFNWDVKRQSSYKLLDKGWVDSFPCFSLAFCRGYCHFVN

SEQ ID NO: 196981 - protein, 1581 aa, Oryza sativa
  Clone ID: PAT_MRT4530_92783C.1.pep
MSTELDRRGSSDRLRERVKFRFSGFRAVQVPVVSDRLMLSIVAVDTGKTIAKSTKAAALSGACQWPDSILESIWFSQDQVSEEFQECQCRFVVSMGSTNSGILGEVFLNLTNYLSSLESTAISLPLKRCDSGTILQLNIQCLGAKSKTSRTNDDTECTSDGFDSMLNRTTHSLSGNDLGGSYQDEAGNRVASLSASRSYSGDSTTDRTNMPPSDNLNDELNTQRHNFASPDAIHVSADHVDEASRSNNSSFSSQTPSRNMLQGNNAQPSASDLSQLSSGVSHASKDVLENAEETIDELRGEAKMWQRKTRKLKQGLETLKKVSTDKSKQRSEQDLEKMWQRKTRKLKQGLETLKKECADKSKQQSELELELSISISERDSLRQEIEELKRSLEEVTARQTISRSPRSGDAIELQKEVEDDVQFLKESNASLATQLNKAQEANIELVSILQELEETIEVQRAEISNLSHTSDLIDHEVSPNNLLIQEDVEWARKVSLKEDEILMLREKIDRMLHVENPNGEGSGAIYLELEKENDFLKVKIQELEKDCSELTDENLELIYKLKEVSEVAKGEDPSVPNSEEVSSEGDLSDRLTSKVKYLETKCADLELKLISFRSESSELEEKLQKSQEELKDRILELSDLRDKLSGFHALEMEEGDTDSAKSYKLKSEKLDENDNKTELDALRSTVLLKEQEIESLQHSKKEMESFISEIMNEKNKLEELLEESLKECSITAACLDEMREELLLLTSSIDSHVSTNNVLETKITELESCKVNLELHISKLEHENVELSEFISGLESQLTYLANEKELSMLQMDESRSLITNLKDELEQVEAQKVELKLQMDESRSLITNLKDELEQVEAQKVELKLQMDESRSLITNLKDELEQVEAQKVELKENQLESHRRLSEVQEDSEALRRSNAKLQATVDHVVEECKSLQTLTADLKKQKLEVHGYASHLEQELEQSKRKTMDFCKTLESLEAKLSSLQEDISLKEQSLLSELENIFQEHKEHEERIDRVHLLLNKIEKEKTVELHFPRFLEREVISLTAQLSSTEEERESSTLDTIREVSILRADKAKLEANLEDVNAQMIHYESQLEDLRESKTKIKDLVDSLNASKQNEEMLTTDVDNMRRSIEAARSNEDNLRKTLCELELKSKSSDYEKQQIIEEISVLKIQVHKIAGLQDEVLTLQSSLDEAKFEKGKLEGLIQSLSEECEELKAQKGMLTDKVSCMQDTLNAANEGKQIEISAQTKLVMLGDEPPVKETSDVLEAELKSELSIIRGANSEYQQKIYSLQEENEDLTRRNQLMEKELDLKTSQNKDENTNKQVSLQDEVLMLQSSLDEAKFENGKLEGLLQSLSEECEELKAQKGMLTDKVSCMQDTLNAANEGKQIEISAQTKLVMLGDEPPVKETSDVLEAELKSELSIIRGANSEYQQKIHSLQKENEDLTRRNQLMEKELDLKTSQNKDENTNKQGNDANENGDSPVNEVPELQSKIQLLETRLAEALEENKLYRGQLKSPMPEGKSASKDGKENDDAKISQLESELKDMQERLLNVSLQYAEVEAQREELVMELRTANAKRGRWF

SEQ ID NO: 196982 - protein, 600 aa, Oryza sativa
  Clone ID: PAT_MRT4530_92784C.1.pep
MADSHHCCWFLLLLLLLAAWCVRGEAEVANGGHQDLPPLLSFKSYNPAAAALESWVGGDPCSGAWIGVRCSRGRVVGVFLDNASLVGGLAPLLGLARLGVLAVRRNSLSGRLPPLDNSTSPRLRHLLVSHNQLTGGLRVSLPSLVTLRAEHNGFHGDLRALSVPMVRSFNVSRNMLDGEISGDLSRFPSSSFGGNLGLCGLPLPRCVHAYNALGDSVGQSPSAAMEEASSGGSNGGLSKLSVTALMATGIGNAALMVISVAISVAMFVYMRRKLRSWKGASDAALSFEEEDKVRNREEKGQKSNGGGLVCFDGGEELRLESLLKASAEVLGKGVSGSTYKAVLEDGIVVAVKRLSALQFPGRSKAFDRHMRLAGRLRHRHVVSLRGYCNSNGERLLVYDYLPNGSLQSLLHGSNGGGGGGRSLDWAARKAILFGAAQGLNYIHTFPARPALVHANVKPSNILLDEHGAACVSECGVMRYAANIQQSIPQPPRCPPGLFLDRAAAAAGGGGWHGYAAPELASGAGAAGARATQESDVYSFGMVLLEVVTADNAGDGNGGGGGDGGEDETMGWVKIGMLCTAEAPEERPRMAQVLAMMGEFM

SEQ ID NO: 196983 - protein, 1090 aa, Oryza sativa
  Clone ID: PAT_MRT4530_92785C.1.pep
MGAKKHTLQVLPWLLLFAQHTAASACDCANTTDGADRQGAMKLKLIAIASILAAGAAGVLVPVIGRSMAALRPDGDIFFAVKAFAAGVILATGMVHILPAAFDALTSPCLKRGGGDRNPFPFAGLVSMSAAVSTMVVDSLAAGYYHRSQFRKARPVDNINVHKHAGDERAEHAQHINAHTHGGHTHSHGDIVVCGSPEEGSVAESIRHKVLELGILVHSVIIGVSLGASVRPSTIRPLVGALSFHQFFEGVGLGGCIVQANFKVRATVIMAIFFSLTAPVGIVLGIAISSSYNVHSSTAFVVEGVFNSASAGILIYMSLVDLLATDFNNPKLQINTKLQLMAYLALFLGAGLIRREPHGGGSVIAMLLRVGLSRRRLTTAALPLSIAARGRRLSTGPSPPPPPPAAEWTDTVDYLDESGEVLSSAPGARAAVPGADATILSGSSAHPLPRPAAAARLAALALRFRSGPSLSAALSALPSQPDPALLLLAASSLPASDPTPLLALVAWARVQPWVLETHAYNALLSLLLTRGLAFKAFEVLDEMSSSGCALDEGTYELVVPALARAGRIDAARKMFDEMRKREGIGRASAGMYGVLVDVLAKAGRLDAAMGMYREMVAVGHRASPAVSTAVVEGLVRAGKLDAGMELWEEMRRGGLRPSFGLYTMVVEANARSGRLDVATQLFGDMEKSGFFPTPATYACLVEMHASAGQVDAAMRLYHSMANAGQRPGLSTFTALLMMLANKRMLDLAAKVLLEMKASGFPIEVTASDLLMIYIKEGSTELALRWLRFMGSAGIRTNNFIIRQLFESCMKTGLYDSARPLLETYVAGAAKVDLILYTSILAHLVRCQDEGRERAIMDILSVSKHKAHDFMCGLFTGPEQRKKPVLSFVREFFQGIDYDNEESAARYFVNVLLNYLVLMGQMNRARCIWKVAYENKLFAKAIVFDQHIAWSLDVRNLSVGAALVATVHTLHRFRKRMLYYGVVPRRIKLVTGPTLKMVVAQVLASLESPFEVSKVVLRAPGDSVLEWFKKPIVQQFLLNEIPSKADVLMHRLNVMFPSSAPESENVTLVPVYKYSNALLQNANGSFLDRSQ

SEQ ID NO: 196984 - protein, 65 aa, Oryza sativa
  Clone ID: PAT_MRT4530_92786C.1.pep
SEPANPAIGLFQPRLMYSWFIGHSTGVLDPSYILYPPLSNKLIYRGAVSIKLHLETSKHYTNFTT

SEQ ID NO: 196985 - protein, 884 aa, Oryza sativa
  unsure (1)..(884): unsure at all Xaa locations
  Clone ID: PAT_MRT4530_92787C.1.pep
MGAKKHTLQVLPWLLLFAQHTAASACDCANTTDGADRQGAMKLKLIAIASILAAGAAGVLVPVIGRSMAALRPDGDIFFAVKAFAAGVILATGMVHILPAAFDALTSPCLKRGGGDRNPFPFAGLVSMSAAVSTMVVDSLAAGYYHRSQFRKARPVDNINVLELGILVHSVIIGVSLGASVRPSTIRPLVGALSFHQFFEGVGLGGCIVQANFKVRATVIMAIFFSLTAPVGIVLGIAISSSYNVHSSTAFVVEGVFNSASAGILIYMSLVDLLATDFNNPKLQINTKLQLMAYLALFLGAGLIRREPHGGGSVIAMLLRVGLSRRRLTTAALPLSIAARGRRLSTGPSPPPPPPAAEWTDTVDYLDESGEVLSSAPGARAAVPGADATILSGSSAHPLPRPAAAARLAALALRFRSGPSLSAALSALPSQPDPALLLLAASSLPASDPTPLLALVAWARVQPWFVPSDDLSSLLAARLAPATHSSELLSLFDDTLALPDPAAFPKTLNAVLSALATHGLLEPAFFCFKRLRDAGFRVLETHAYNALLSLLLTRGLAFKAFEVLDEMSSSGCALDEGTYELVVPALARAGRIDAARKMFDEMRKREGIGRASAGMYGVLVDVLAKAGRLDAAMGMYREMVAVGHRASPAVSTAVVEGLVRAGKLDAGMELWEEMRRGGLRPSFGLYTMVVEANARSGRLDVATQLFGQVDAAMRLYHSMANAGQRPGLSTFTALLMMLANKRMLDLAAKVLLEMKASGFPIEVTASDLLMIYIKEGSTELALRWLRFMGSAGIRTNNFIIRQLFESCMKTGLYDSARPVLERHVAGEGHVDLLLYTNSVAQLPRWPEXGRERVSTDLLSGGEHREGGVQCRRFDVAGQRIQQVA

SEQ ID NO: 196986 - protein, 155 aa, Oryza sativa
  Clone ID: PAT_MRT4530_92788C.1.pep
SVLWEEMRRGGLRPSFGLYTMVVEANARSGRLDVATQLFGDMEKSGFFPTPATYACLVEMHASAGQVDAAMRLYHSMANAGQRPGLSTFTALLMMLANKRMLDLAAKVLLEMKASGFPIEVTASDLLMIYIKEGSTELALRWLRFMGSGGIRTNN

SEQ ID NO: 196987 - protein, 99 aa, Oryza sativa
  Clone ID: PAT_MRT4530_92789C.1.pep
MVGDRFDRCRTTEPEIVGILLQKGSGKEKRTRPQLDIVAQVQQSRKSSKKACYQGFSEKLLSKCLVVELFLYRNREKTDDVVIVSALNRKPMEEIGIPN

SEQ ID NO: 196988 - protein, 852 aa, Oryza sativa
  Clone ID: PAT_MRT4530_9278C.1.pep
MPEPQAILPLRALPPDAPLPPPLPAPFHSPSTPAAATATATATPATATATPATPPNPPAPPAAPPPTFSSSRPPHPWEIAARAWLESFPDGRPPTEAEVDAYIDVHRPELPSLPRSQLHQRLLALRGDQVLDADQSAFPYRFQRTDLWKPVYKWLESLELESLVTSKEISEWLTSNPQIMDRLVEKHSKYHLIHYTQRMHLKLLKKRGKIPKSLQLSAARATVPASASPVTPQESTPTVRKSLPPVTGVSASRFVGGDAPIRDKKMSLSKKKEAFLKYELLTDLQNQLTSVLLKNRRTVAIKETDFQKPETNVSMQEGAATASTSTPTEVTKIYCNEQPNQGAADNEFGQKRKRNPIIVTPAWCYSEATTGTLQHEQNSSSHSNGARSYDIWKGHVNPSFPQRSIKKNILFCLEGREAGANWSQTCSNGGHAGRNCERWSPFLEGWNSPAVQFEGPAVHVVKQSYLSWCPTSCAYTSSAPSAQPHDRQGVRKVLDVKFHPEGLPQLVSCSNEAPNELLLFNLLSGRATQLRGHNTKIQATAFAVKGASIVSCGSNLLKVWDCITGSCLYTLGGDDHNSVGHTQKINAMAVNKWQSCLVVTSGAKGDGKLLLWNALRGELASDLNSNLRSQDMVYPSIDTMEFCSENLLACGSDCEYGGSAVVQLWDIESPESYLSFSASDSYITSLKTNPAGNTIITGSGDGTIGLFDIRACSAINHLSVGPGCEVTSVSFSNCGTYFSASSTSNNTLVWDTRIVPLNQSRDVSRSKDMRFFRPLHCLSHGKQMPTAEYTSQLPGHVDEGDQGVNAMQWLHKEPVLVTVSGDGRFYIIVKVGVPTLIGVSHILSQEMINVLP

SEQ ID NO: 196989 - protein, 70 aa, Oryza sativa
  Clone ID: PAT_MRT4530_92790C.1.pep
MEAEDGKSRKKTKLFCLNESHRKVRITGGGGAVEATVVDECDSRRGCKDDVVDSSPAVWRAMGRVYYAIL

SEQ ID NO: 196990 - protein, 184 aa, Oryza sativa
  Clone ID: PAT_MRT4530_92791C.1.pep
MRFSSTLSLATLATSTAAQSFNSAKSDLDGSVWQSVASVQTRSWSSIPRNRPTKRQSGWNPPSNLAGALKEVWDHEVKTYSDALGFKNYGWDQVIAGKGQLNVCVRWESTASVTAEQRTKVATALQDSYTSWMKWVSGWDNFPYEDVKINVVGWAVKDKSLLQGPTTGLDIYTDTDAEGDPPML

SEQ ID NO: 196991 - protein, 267 aa, Oryza sativa
  Clone ID: PAT_MRT4530_92792C.1.pep
MTQEYPAVLATFLLVFFTTVGCNLIRSLTKRILRNDPVWYSYAAELISTFQLVAGVIEGDIILEEYGLYWYALYLWILFVSESLTFDGDSTANTCMIWQSMLKGDFSPGAALSKICLQVVGGQLAYPYVRFMWKVVPTNRHQRKVSHLLQVYCASALNVSILEGGFAEALATLTYFMTLNFQPKGKYSGMFADAAIQVLIIVTGLEWTGMMFNPALAAGITLNCGNQSLLEHLLVYWAAPLATVPLARAIAGAFNRPTPAVPPTKED

SEQ ID NO: 196992 - protein, 68 aa, Oryza sativa
  Clone ID: PAT_MRT4530_92793C.1.pep
MANAHPMVPLVLRNLLPLLRDVDTGQFALDVGHAGCATTPPGLVLLGALARASQAPGAGGVDFLGGRG

SEQ ID NO: 196993 - protein, 168 aa, Oryza sativa
  unsure (1)..(168): unsure at all Xaa locations
  Clone ID: PAT_MRT4530_92794C.1.pep
MSSIGAGAGGAVVGAAVAAVAVGGGAPPHVLAVDDSSVDRAVIAGILRSSRFRVTAVDSGKRALELLGSEPNVSMIITDYWMPEMTGYELLKKVKESSKLKKIPVVIMSSENVPTRISRLPSTXTIVLPSLLCSIGLLTRCLEEGAEDFLVKPVRPSDVSRLFSRVLP

SEQ ID NO: 196994 - protein, 423 aa, Oryza sativa
  Clone ID: PAT_MRT4530_92795C.1.pep
MARNKKKVAVAAPKARKPKRDAEEKKFAKKADMTEFRAQLDSLGLKIIEVSADGNCFFRAMGDQLEGNEEEHMKYRAMIVQYIKEHRVDFEPFIEDEEPFEKYCDSMLEDGTWAGHMELQAASILKRKNICIHMLNSPRWYIRNFSDREATSMIHLSYHQGEHYNSVRLREDPCQGPAMPVIIKADANVASTSNNAQTKAKDLKKSSDRSKYDHISVKLVMAGTGCSNIAAVEQVLKDMDGDIDAAIEYMLAEQLILGSDDADGDPYLDYACDDHQNMITVPRSMNGVIESSTEYVQTIEDELSMKQDESQLDEHKKEEKDCSSKGETAQKHNSSHSKKGKSKTKECSCGSARKHKPSCNLATTVASREPPKTTAPSREPPKTKGGQGKGQKGKKQKKKEQDETPAIRDHDSKVAPDLGALCI

SEQ ID NO: 196995 - protein, 53 aa, Oryza sativa
  Clone ID: PAT_MRT4530_92796C.1.pep
MAAMSADNLVIYVATTQRGGGQQEWDKWNELDMRTSPISTTMAGEDRSTINFT

SEQ ID NO: 196996 - protein, 236 aa, Oryza sativa
  unsure (1)..(236): unsure at all Xaa locations
  Clone ID: PAT_MRT4530_92797C.1.pep
MSSFMFSHLVNVVAGGTRTSSGFKAVHLNACARAVNERFNSTFTGEQIKNHLKTRQRKFSKINRLRKDHKANADYFNKPLAHYGEMLXIFGSTMATGKYAKDSSSVLGTEDVQDDNDEENDGPATTDDRAEASSASKPKKAKXQENEDXGLIGAFTSVGDKLASAILKVAEPDNKLPEGLFDILKTLPGFEEVHRSFYYAHLVANPHIARAFDGLPFENKMHWFAMFISEKFPGST

SEQ ID NO: 196997 - protein, 1588 aa, Oryza sativa
  Clone ID: PAT_MRT4530_92798C.1.pep
MMSNVKSKFMDSFQDRRGTIVQKYKLKVVAADEVGLSSSQGDKGTTTGSGDKSGVPQDGAVEDLGIDGNQEPLQFNNFQDRIDYAVQHALMNQSGVLVNTLTNMVKTVVDGSIAEHQASGASCCNVFAKSIDSRSNTAVADPASTTETADGSADSASEFAACIGKPNLQNYQGGNLGYQYQPPSPHVQYQQTGSPQPQYAPQFNQFEPMQQQMQGVPQHASLADMIADVMSEQFGLKPKDNGNLYRHPYPEWFERVQLPSQYKVPDFSKFSGQDNVSTYEHVSRFIAQCGVASATNALRVRLFPLSLSGSAFTWFSSLTYNSVNSWADLEKQFHSYFYSGVHEMKLSDLTAIKQRHDESVQDYIQRFREMRNMCYSLSLTDSQLADLAFQGLIAPIKEKFSAQDFESLSHLAQKVTLHEQRFIEAKKNFKKINHVYPYMYDSDDEDDDSEVAATEWVKSKKVIPCQWVRSSGKEERFDFDITKADKIFDLLLREKQIQLPAVFRQQIQAAIKGGKIKFDDSKKLMKVDGMRLPSIEDCPGCNEDAGNSSRSNNRGNRLSQKRVSVHQRLGPVNQDGDYDEDEDRKTQWCPTGIFTKNQKRRVQRLRNRERFQEVQQEINHRLGKTKTRQEWRVKRIITTADEVEADKAKRVLKGKAVASASVNMVFMLPAEFEAKQVEVIDVEEASAKLVLSPEQAIFEKPEGTQNRHLKPLYINGFVNGKLMSKMIVDGGAAVNLMPYATFRKLGRNPHDLIKTNMVLKDFGGNPSETKGVLNVELTVGSKTVPTTFFVIDGKGSYSLLLGRDWIHATCCIPSTMHRCLIQWQGDKIEIVPADSRLKIESPNYYFEGVVEGSNVYNKDTQPPRRCKADMLEAIKAEVKHLYDAGFIRPCRYAEWVSNIVPVIKKNSKVRVCIDFRNLNKATPKDEYPMPIVDQLVDAASGYKILSFMDGNAGYNQIFMAEEDIHKTAFRCPGAIGLFEWVVMTFRLKSARATYQRAMNRLFLGFLVHERGIEVTQRGINAIQKIQPLEDKTKLQELIGKLIKGQAIADFIVDHRDDSIGSVDIVPWTLFFDGSVCTHDCGIRLVIISPRGPSFEFAYTIKPYATNNQAEYEAVLKGLQLLREVEADAIEIMGDSLLVISQLAGEYECKNATLMVYNEKCRRLMEGFRLITLKHVPHEKNIEANDLAQGASGYKPMWKDVEIGVATITADDWRYDLFQYLHNPSQSASRKVRYKALQYTWLDNELYYWTIDGVLLKCLSVDQAKVAIGEVHEGIYGTHQSAHKMKWLLRRAGYFWPTMLEDCFKYYKGCQDCQKFGAIQRAPASAMNPIIKPWLFRGWGMDMIGQINPSSSKGHTFILVATDYFTKWVEAIPLKKVDSGDAIQFVKEHIINRFGIPQTITTDQGSIFVSDEFVQFADSIGIRLAEALWSYRMACHGSIQVPPYKLVYGHEAVLPWEVRIGSRRTNLQNELTADEYYNLMADEREDLVQSRLRALAQVTKDKERVARHYNNKVVPKSFYEGELVWKLILPIGTRYNKFGKWSPTREGPFQIHNVVSKGAYMFQGLDGEVYGRPLNGIYLKKYYRLMEYT

SEQ ID NO: 196998 - protein, 542 aa, Oryza sativa
  unsure (1)..(542): unsure at all Xaa locations
  Clone ID: PAT_MRT4530_92799C.1.pep
MAMIIRSRKRTRGAWREDAIHMCIEEQVAMFLHTVGHNLRNRLVRTSFRRSGETDCIGAIXDGTHIRASVRKNVESSFRGRKSHATQNVMAAVDFDLRFTYVLAGWEGTAHHAVVLRDALERENGLRVPQGNKFYLVDAGYGAKQGFLPPFRAVRYHLNEWGNNPVQNEKELFNLRHSSLRVTVERAFGSLKRRSKCFKVLDDATPFFPFRTQVDIVVACCIIHNWVINDGIDELVAPSDWSSEDIDESPTGQANDHALMEXMDNTSGKGGSTHASWTSAMSSFMLSLLANLVAGGTRTSSGFKAVHLNACARAVNERFNSTLTGEQIKNHLKTWQRKFSKINRLRKVSAAGWDEKIFIITLDDEHYNGYIEDHKADADYFNKPLAHYGEMLTIFRSTMATGKYAKDSSSVLGTEDVQADNDEEENDGPATTDDRAEASSASKPKKARTQEIEDDGLIGAFTSVGDKLASAILKVAEPDNKLPDGLFDTLKTLPGFEEVHGSVYYAHLVANPHIARAFDGLPFENKMHWVALFINEKFPGST

SEQ ID NO: 196999 - protein, 66 aa, Oryza sativa
  Clone ID: PAT_MRT4530_9279C.1.pep
WPKAAVEVVLTGVRGDAGSGDGPRWRRGGRAEAAAAGGSTAQERWGARGSSARWGKRAREWRWSLN

SEQ ID NO: 197000 - protein, 38 aa, Oryza sativa
  Clone ID: PAT_MRT4530_927C.1.pep
MVTCASWAHDDAVTCRWIVSCGASELKMKLEDQGSDPS

SEQ ID NO: 197001 - protein, 581 aa, Oryza sativa
  Clone ID: PAT_MRT4530_92800C.1.pep
MAMIIRSRKRKRCSRREVGHNLRNRLVRTNFDRSGETVSRYFNKVLHAIGELRDELIRPPSLDTPTKIAGNPRWDPYFKDCIGAIDGTHIRASVRKNVESSFRGRKSHATQNVMAAVDFDLRFTYVLAGWEGTAHDAVVLRDALERENGLRVPQGNRLQGKYYLVDAGYGAKQGFLPPFRAVRYHLNEWGNNPVQNEKELFNLRHSSLRVTVERAFGSLKRRFKVLDDATPFFPFRTQVDIVVACCIIHNWVVNDGIDELIAPPDWSSEDIDESLTGQANDHALMVQFRQGLADQMWADRNSHHGIGKGGSTHASWTSAMSSFMLKHLANLVAGGTRTSSGFKAVHLYACARAVNERFNSTLTGEQIKNHLKTWQRKFTKINRLRKVSAAGWDEKNLIITLDDEHYNGYIEDHKADADYFNKPLAHYGEMLTIFGSTMATGKYAKDSSSVLGTEDVQTENDEEENDGPATTDDRAEASSASKPKKARTQEIEDDGLIGAFTSVGDKLASAILKVAEPDNKLPDGLFQTLKSLPGFEEIHVSVYYAHLVANPHIARAFDGLPFENKIHWVHLFINEKFPGSM

SEQ ID NO: 197002 - protein, 146 aa, Oryza sativa
  unsure (1)..(146): unsure at all Xaa locations
  Clone ID: PAT_MRT4530_92801C.1.pep
DSCLQLTVYRWKEMLRRNCRSLQGPEIDHCTVDKIRDAIKDQKEITVHIISYTKIGKNIWNLIHLQPIRDQTEELQYFIAVQVDGRDHVEPIRIRLXQNTDIQIAKXSKXPAENVDDAVRELPDANLRPQDGRASHSMRVCPKHHI

SEQ ID NO: 197003 - protein, 1110 aa, Oryza sativa
  unsure (1)..(1110): unsure at all Xaa locations
  Clone ID: PAT_MRT4530_92802C.1.pep
MVVQLGQVSIGAQTSELTNILNKRVNADRRPELLGKGAKEADVTCNFRCSSTNGVDSNRYMVSGATDHITGELDKLTLSDKYKANEQVHTANGADVYAPAPISVGRHKYYVSLVDDYIARLRAEIALLPSYLVAHDLGGEQQSDHVLDFPNTANEFSGSNSDDSGTDEGVDLASPTPAFEAHGAGEIASGSEPNATRQTAQTLAQQTHGAAAPLHSGGYTSLFTLPSPAPHQTTSVPSHDETGTRADTKHVFGWEDIPGWDGIVPFLVGHNLRNRLVRTSFHRSGETVSRYFNKVLHAIGEVRDELIRPPSLDTPTKIAGNPRRDPYFKLFDGTHIRVSVRKNVESSFRGRKSHATQNVMAAVDFDLRFTYVLAGWEGTAHHAVVLRDALERENGLRVPQGKYYLVDAGYGAKQGFLPPFRAVRYHLNEWGNNPVQNEKELFNLRHSSLRVMVERAFGSLKRRRTSSDFKAVHLNTCARAMNERFNSTLTGEQIKNHLKTWQRKFTKINRLRKVSAAGWDEKIFIITLDDEHYNGYIEADADYFNKPLAYYGEMLTIFRSTMATGKYAKDSSSVLGTEDVQTENDEEENDGPATTDDRAEASSASKPKKARTQEIEDDGLIGAFTSLVQYAEILKLPLFLAVVMKLLELIFNYSDMKGEPSNLEEALGNKQWKDAMDAEYSALMKNRTWHLVPYQEAVSRGWSLQQLDVQNAFLYGVIEEEVYMRQPPGYENSSKPNFICKLDKALYGLKQAPRAWYARLSGKLQQLGFKPSKADTSLFYFNKGSITMFILIYVDDIIVASSTKDAVSALLCDLNEDFALKDLGELHYFLGIEVNKVNNGLILSQGKYISDLLKRTNMVDCKPVNTPLSTTEKLSLHEGDQLGPNDATQYRSIAGALQYLTLTRPDISFAVNKVCQFLQTPKIVHWAAVKRILRYLKYTASLGINFDRSVSTLVSAFTDANWARCLDDRRSTGGFAVYLGSNLVSWSARKQATVSRSSTEAEYKALANATTEVMWIQTLLDELDVHAPRSAKIWCDNIKAKHLSANPVFHARTKHIEVDYHFVRERVLNKXLLEVEYISSGDQVADGFTKPLGVKQLEMFRNNLNLRSSD

SEQ ID NO: 197004 - protein, 36 aa, Oryza sativa
  Clone ID: PAT_MRT4530_92803C.1.pep
MARREPELAHRELVHRTTTPTEAVLPTIQRRDFHRV

SEQ ID NO: 197005 - protein, 618 aa, Oryza sativa
  unsure (1)..(618): unsure at all Xaa locations
  Clone ID: PAT_MRT4530_92804C.1.pep
MEKRGAGEEGLSAGLGLVAAAEAHKAAARAGGKAAPHEQGEAAAWPEAARYQGDAAAWPRRLGGARRARRLRELGLAGGASWAKRRHEKASSSPSLPTNCRARFPLFKMDKRTKLLVCIAATNLLLSMMAMIIRSRKKNERFKERRSGETVSRYFNKVLHAIGELRDELIRPPSLDTPTKIAGNPRWDPYFKDCIGAIDGTHIRASVRKNVESSFRGRKSHATQNVMAAVDFDLRFTYVLAGWEGTAHDAVVLRDALERENGIHVPQGKFYLVDAGYGAKQGFLPPFRAVRYHLKEWGNNPVQNEELFNLRHSSLRITVERAFGSLKRRFKVLDDATPFFPFRTQVGNGQQQWQGRSAMSSFMLSHLANIVAGGTRTSSGFKAVHLNACARAVNKRFNSTLTGEQIKNHLKTWQRKFSKINRLRKVSAAGWDEKNFIITLDDEHYNGYIEDHKADADYFNKPLAHYGEMLTIFGSTMATEKYAKDSSSVLGTEDVQDDNDEENDGPATTDDRAEASSASKPKKAKTQENEDGGLIGAFTSVGDKLAYAILKVAEPDNKLPEGLFDTLKTLPGFEEVHRSFYYAHLVANPHIARAFDRLPFENKXWFAMFISEKFPGST

SEQ ID NO: 197006 - protein, 503 aa, Oryza sativa
  Clone ID: PAT_MRT4530_92805C.1.pep
MASLLLLPTAAPAWPTASCWQRMWVHPGPSFPHRMMIRHPLLSSLHAARLMPCKCTAPSSPIAKHHFEEQINTTLRNIHSIEFYSSNLHEVALRFRLLRQQGYWVSPDEFNKFKCEDGSFKSDINNDPKGLLSLYHAAYLLTHNERALKEAILFATHHLELLSGSLEFPLAEQVKRALQIPLPRTLKRVEALNFIFEWWKDVSSDINLDYTRDRVVECYFCAYIVYYEKEYARARMMLAKKIMLISLLDDTYDVHATLEEARKFNEALQRWDKNAVSLVPEGLKRFFLSIMSNFRDFEDELEPHEKYRNAYNIKAFQILSNNYLQEAEWFHQKYIPSFTEHATVSLVTGGAIELPVSIIVGMGDIATKDAFDWALSYADAGRAFGEVSRFMDDLAVSQNGREKMDVANAVECYMKEHGVTSDVAEAEISEMVEGAWRTLNQARFEDRVYLPFVQRIANVSMSIALLFHGKRDGYTNSHELKDMFESHFVNPIPLDHLDTIEDM

SEQ ID NO: 197007 - protein, 34 aa, Oryza sativa
  Clone ID: PAT_MRT4530_92806C.1.pep
GDLRNCNPWQLCRHFINQTLAPSEPWKDVFPSNS

SEQ ID NO: 197008 - protein, 115 aa, Oryza sativa
  unsure (1)..(115): unsure at all Xaa locations
  Clone ID: PAT_MRT4530_92807C.1.pep
NFRRREGGPPAPQRLRKSSIFAVGATARRAAPRRRHHRRPRRPSPSILWPDLGGRGRREPPPATPRXSSPPSLPPASPSLLWPDLGGRGRGEPPPXSRRRMQSPSPPRRRSRRTE

SEQ ID NO: 197009 - protein, 51 aa, Oryza sativa
  unsure (1)..(51): unsure at all Xaa locations
  Clone ID: PAT_MRT4530_92808C.1.pep
CLLLCFYNLQRKGKRNSSAXLTFQKKILLLILKNSSTIIELYTFRQVKRAN

SEQ ID NO: 197010 - protein, 150 aa, Oryza sativa
  Clone ID: PAT_MRT4530_92809C.1.pep
MRLEMSPDNLLFFCSVAASAAAGFCLFSLYRRLARRCHHHHAAPAGGSEEEEEERRRLTAVASGLPAFMYDRLVRHSGKGASWTECAVCLGVIHVGAMVKLLPACAHIYHVDCIDLWLSSHPTCPLCRCRVDHPGQGQETARQLAQLSPA

SEQ ID NO: 197011 - protein, 105 aa, Oryza sativa
  unsure (1)..(105): unsure at all Xaa locations
  Clone ID: PAT_MRT4530_9280C.1.pep
GPCRCRRSGPAIVPVRRXERMLLAAPSSAAAXPPPPHQRRRPRSLPTVNHVAALPHLSHHRPPTARFVFLSMEGGGFNFFSEDPNPSVWPSIPITILDNFHCLEK

SEQ ID NO: 197012 - protein, 481 aa, Oryza sativa
  Clone ID: PAT_MRT4530_92810C.1.pep
MARRARLRLRLVRALATASASGSPAAPRPARQAAPYLAVLHRRGRAEAAACLNRHLRLLPLGEATSLLDALPSVRDAVSYNTVLTALCRRGHHDRAGALLRAMSLEPHPACRPNAVSYTVLMRALCADRLADQAVGLLRSMRSAGVRADVVTYGTLIRGLCDAAEVDKAVELMGEMCESGIEPNVVVYSSLLQGYCKSGRWEDVGKVFVEMSEKGIEPDVVMYTGLIDSLCKVGKAKKAHGVMDMMVRRGLEPNVVTYNVLINCMCKEGSVKEAIGVLKKMSEKGVAPDVVTYNTLIKGLSDVLEMDEAMWLLEEMVRGDLKTAKELLKSIVDEGLTPDAVTYSIVINMFAKSGDMEAANGGAAASPGERGCGRWRTSTTAGKRRLRAWVVRGRSRRSGGVFGRGRSRGAGDAAARRRLFPPLPPASSPPAPPGFLSPSPAGRWEKGGHSRVAWTGPTTRLPEPGAPSAPVAAARHHAGLL

SEQ ID NO: 197013 - protein, 44 aa, Oryza sativa
  Clone ID: PAT_MRT4530_92811C.1.pep
KATEYKRGEGAQVYPGTDTMRNEVSDHSEDSIKRAISSSCNKGQ

SEQ ID NO: 197014 - protein, 77 aa, Oryza sativa
  Clone ID: PAT_MRT4530_92812C.1.pep
LNVWCSKSHRPRKADKLPSKFGWMLLTLDRNLAQAPAQALLALNLPSRYGIYPRYYSHLCNAPIFVREFKNHLIKKK

SEQ ID NO: 197015 - protein, 908 aa, Oryza sativa
  unsure (1)..(908): unsure at all Xaa locations
  Clone ID: PAT_MRT4530_92813C.1.pep
RERERGDAGAGHSLSLLSPPPTPPCAMVALASLSSLSPCGLARRRSASSAASISCCAAPPPPSAKGSQESRTPRRRVRKTEGATKSLEDSVKRKMEQFYEGLDGPPLRVLPIGGLGEIGMNCMLVGNYDRYILIDAGVMFPDFDEFGVQKIIPDTTFIKKWSHKIEAVIITHGHEDHIGALPWVIPALDSSTPIFASSFTMELIKRRLKEFGIFLSSRLKVFRVRKRFQAGPFEVEPLRVTHSIPDCCGLVLRCADGIIFHTGDWKIDESPVDGKIFDRQALEELSKEGVTLMMSDSTNVLSPGRSISESVVAGSLLRHISEAKGRVITTQFASNIHRIGSIKAAADLTGRKLVFVGMSLRTYLDAAFRDGKSPIDPSTLVHLIESRFLLKVKVEDMDAYAPNDLLVVTTGSQAEPRAALNLASFGGSHALXLSKEDVLLYSAKVIPGNESRVMKMLNRLTELGPKIVMGKDAGLHTSGHAYHDELEEVLQIVKPQHFLPVHGELLFLKEHELLGRSTGIRHTTVIKNGEMLGVSHLRNRRVLSNGFVALGKEDLRLMYSDGDKAFGTSTDLCIDERLRIASDGVIFVSMEIFRPQKELASSQSGLKGKFKITTRCLWLDNGRLLDALYKAAYAALSSCPVNCPLSHMERMVSEILRKMVRKYSGKRPDVIAVATENTTVSFVEDSETKSSGKFGSFSAPRHSSRSSGRSLEESDKSCPENTEGEAKENLPDVLRTTRDDATTSSNGEAFFSSDLHKPKTLEHFWDSFKSPTAVKIARIVNGSAQGSKSKIGKISIVGKDSSDPSSAPVKSSKKNKWKPEEIKSLIQMRGEMNEQFQTVKGRMVLWEEISSSMLSQGISRTPAQCKSLWTSLVQKYEESKKDEESVKTWPYFLDMDRVLSSQGEMATQ

SEQ ID NO: 197016 - protein, 52 aa, Oryza sativa
  Clone ID: PAT_MRT4530_92814C.1.pep
SYNVLQLVTYSSGIGAQSFRILHLVIGRSDLISGSSHIAPRTCDHCRIELHL

SEQ ID NO: 197017 - protein, 48 aa, Oryza sativa
  Clone ID: PAT_MRT4530_92815C.1.pep
NHYFKNVIFLLMVLPHTSPTLSSFLFTKPIFPNLNTTNSSPTNLSNHN

SEQ ID NO: 197018 - protein, 54 aa, Oryza sativa
  Clone ID: PAT_MRT4530_92816C.1.pep
MSRRLPLILLLIALPLWLAASYGARYGFMEDGQWVGICVDEASRWECQLRSTLG

SEQ ID NO: 197019 - protein, 89 aa, Oryza sativa
  Clone ID: PAT_MRT4530_92817C.1.pep
NASYLQETELHKIFCMELQDSEMQGSSIEKYQKRIPYKLKYVHSLAISHFHAIFKKFSIDWNSTTWINRSRCCRSVKENQIDFSGEIRG

SEQ ID NO: 197020 - protein, 110 aa, Oryza sativa
  Clone ID: PAT_MRT4530_92818C.1.pep
MATHALLESARCYKKIPDRGEKEAASAALALEKATELSMGRKKLESAATCCRLLAELYEEQKEWSKAMIHFQDAAYSYGGCASEESVFYARHCMLKAREIAQIIADAKHN

SEQ ID NO: 197021 - protein, 83 aa, Oryza sativa
  unsure (1)..(83): unsure at all Xaa locations
  Clone ID: PAT_MRT4530_92819C.1.pep
VHRXXSHXEGXLRXRYVFXDAXFPXGXTVSXGGFWRXXGGWRRWEGXARAARVSLPXRXRESGGRALCEGLGFLEYCLIWXXL

SEQ ID NO: 197022 - protein, 83 aa, Oryza sativa
  unsure (1)..(83): unsure at all Xaa locations
  Clone ID: PAT_MRT4530_9281C.1.pep
MEEFEYLAVACIHTVLVVPAHAIISLFTCFPKQADVDGNGTIDYAEFISATMHMNRLENEDHILKAXEYFDKDHSGYITVYEL

SEQ ID NO: 197023 - protein, 133 aa, Oryza sativa
  Clone ID: PAT_MRT4530_92820C.1.pep
LPPAAACRSLLSRLPLAATHRSSAISRRALLRPRPAATASPDPRPPRSEQPRRRDPRPPPLLPGRPPRAAPPLAQPPRAASLLVRPRPTAPPLAWPPRAVSLLARPPSAASLLARPPRAAPPHARLPRAAPPH

SEQ ID NO: 197024 - protein, 492 aa, Oryza sativa
  Clone ID: PAT_MRT4530_92821C.1.pep
MPAQDLLLMILSHVPMRDAARAACVSHAFLHSWRCYPNLIFNAENLALNRKGVNDNETPVDFIAIVDNIMRNHSGVGVKIFKLELGPGYAVHPSHLDRWLKAASTLKIKEFAFELPLRNKTEYTFPYSHLLSDNRRGNSVQSFHLSSCTLHPTLQFECLRSLKSVHLSWVDITGEELACFISNSFNLESLEISSCCKIGFLKTTSVLQKLNCLRVQHSHRLDMIEINAPMLSSFHYRGPLTVISLGDAVQLRDVNLLLYPWHRMFHYARTKLPTIARNVENLFLMTRDEDVNTPMVPNKFLYLRYLEMVFIGPRKESPPCYDFFSLVFFLDASPALETFVLHLDSVGTKNDRILEDSSELRKLPKCNYSNLKNVKITGLMSSKTLVELISHILDNTPSLEFLTLDTRIYGFKYEIRRFISWDCGIMMTTDDRMESELDRELLMSDSDLIEAYRAPQVIRRYIEGKVPSTVNFEVIEPCRKRVIVETSRGPRL

SEQ ID NO: 197025 - protein, 216 aa, Oryza sativa
  unsure (1)..(216): unsure at all Xaa locations
  Clone ID: PAT_MRT4530_92822C.1.pep
MAAGAGAGGGGGEGDSNGGGTSPGGVSAAAPAIGPHHLGVAAAEEAMWQMTLGGGESMESTPYPERIGEPDCSYYMRTGLCRFGMTCKFNHPPNRKLAVAAARMNGEYPYRVGQPECQYYLKTGTCKFGATCKFHHPREKAALANRVXNEKECAYYLRTGQCKFASTCKFHHPQPFNTMVAVRNFMYSPGQSATSPGQHTYSGAVTNWTLSRSASF

SEQ ID NO: 197026 - protein, 454 aa, Oryza sativa
  Clone ID: PAT_MRT4530_92823C.1.pep
MAAGAGAGGGGGEGDSNGGGTSPGGVSAAAPAIGPHHLGVAAAEEAMWQMTLGGGESMESTPYPERIGEPDCSYYMRTGLCRFGMTCKFNHPPNRKLAVAAARMNGEYPYRVGQPECQYYLKTGTCKFGATCKFHHPREKAALANRVQLNVLGYPMRPNEKECAYYLRTGQCKFASTCKFHHPQPSNTMVAVRNSMYSPGQSATSPGQHTYPGAVTNWTLSRSASFIASPRWPGHSGYAQVIVPQGLVQVPGWNPYAAQMGSSSPDDQQRTPVTTQYYGSRQSETGGMGDHGMYQSYQGGSVPVGVYTVQGENIFPERPDQPECQFYMKTGDCKFGAVCKFHHPKERLVPAPNCALNSLGLPLRPGEPVCTFYSRYGICKFGPNCKFDHPMGTLMYGSATSPRGDVSSMHYQLSPSPGHPGILLDGGSGRSHRVPQSDSQQIPSGDGNAEREAS

SEQ ID NO: 197027 - protein, 126 aa, Oryza sativa
  unsure (1)..(126): unsure at all Xaa locations
  Clone ID: PAT_MRT4530_92824C.1.pep
MDYSTQGQVITCKAVVRXEANRPMTIEDVQVVPTXAGEGQCKILFTALCHTDHYAWSGKDPEGLYPCVLGHEAAGIGESVGERVIMEQDEDHVIAXYQAKCRDCTFYKSEKTNLCRKVQAAAGVGV

SEQ ID NO: 197028 - protein, 107 aa, Oryza sativa
  Clone ID: PAT_MRT4530_92825C.1.pep
MASFQCLSFTASSKLHGSPEDLSLASTLIDCLLQLSPSRPLSNFTPHHAQSWSETQTTCFVGSPVPYPENEPVAPEVAPVFPDTDAVALNWGISQDSTYDFFFKQLL

SEQ ID NO: 197029 - protein, 138 aa, Oryza sativa
  Clone ID: PAT_MRT4530_92826C.1.pep
MEEIEKALKEMKTNITLGPDGLPVSLYKEFWKQIREQIKEMVDQLYEGTLELWRLNYELPISDRKLLASELATPTDKIERRLESGANDPCYRLLRKKYMSRGEGSFNHLLSGFLVLKGFHKVKKWMDVGSNYILGNGE

SEQ ID NO: 197030 - protein, 98 aa, Oryza sativa
  Clone ID: PAT_MRT4530_92827C.1.pep
MAWMWLTVLTKNERIGAGETEEATTGEASSRHGARCRWSGALRGYGPMRRPHIPCVTAAVAGEAITPSRCVVPKVVPLARSGKPKVGSIELNGVAAAA

SEQ ID NO: 197031 - protein, 334 aa, Oryza sativa
  unsure (1)..(334): unsure at all Xaa locations
  Clone ID: PAT_MRT4530_92828C.1.pep
RERPXRRREQREEDKEXERRRADRRRTEPEAAAXHVERRTRKRARQKQRRCEHTRRNARRKRXTSKEQRHSRRDTTXEAQRNAANTKQQHHKHAPRRRARTRSSHAAPNRSQQRPHDPAETAPHTTTREQHPTHTHDRGHTQQRRQGTTPHEQRPTDNEQAPQRPTTTRPSEPHRHRSRQPRRARARAAAPGRRAPPRPRPQRTRDHHSPGHHPQTATRDQTTRRKTRGTRTRQRDGSRARSRNRRTRGRDRRHATTAQETTAAHHHKKHHQTTQQPGSRQEEQTERAKKAARXGIASIVNRPGKRTGSRVSHQVAGTWVVRAKIGHRHDRQDG

SEQ ID NO: 197032 - protein, 65 aa, Oryza sativa
  Clone ID: PAT_MRT4530_92829C.1.pep
VWSRYTPFSPPLTPVETAIMLISSPIKCFQSTASLEEPSPVVEWTIIISSCLIQTKQKRIFLRSY

SEQ ID NO: 197033 - protein, 182 aa, Oryza sativa
  Clone ID: PAT_MRT4530_9282C.1.pep
TRPLVARRNASDASLRALGYEKASIDDVVKMTWEALEAEIATWTKAFRHTINVGLSTEHDLCARVFAGRHAAVGRGMFADLARCVMLHMLNFTEAVTMTKRAAEKLFKVLDMYEATRDASPVIDAFLTADDGNNSTALTDLKHELNSVRSRLGEFAAAIFRELESSIRADAGKQPVRRGAGH

SEQ ID NO: 197034 - protein, 597 aa, Oryza sativa
  unsure (1)..(597): unsure at all Xaa locations
  Clone ID: PAT_MRT4530_92830C.1.pep
NGILDIRVGTIXEFRDAXFFENEFHMKDAPSTSSEEPILPFDSFVPIEHDEQTPVKNPEENNTVATXRSERQMTAKFFSDNYIVYLVDDTPITIEETLCADVDYXRKLYSEMDSIMSSDTWKVVERLDRCKVGCKWVFKKKXLRPDATIEKYKARFVAKGYTQKEYXGFFDTNSPVALLTTIRILLALATSHGLLXNXMGIKTSFLNEELEEDIYMDQLDMFVLEGQEEMVCKLFXSLYSLKQTTKQWHXKFDRTLTSTIXTDKCVYYRYGEGEGVILCLYFNGMLIFGTSLNVIEEVKDFLSQSFEMTYLGPFDVILNIKLLRGDDGGVTLPQSHYVDKVLSLFGYSDCKPTPTPFDPIVLLRKNRRITRDQLRYSQIIGSLMYLVSAMRLDISFAVRKLSQFVSNPGDDHWRTLEXSIALSKGTVTYEIHYAGYTKVLEGYSDSNWMSDVDEIKTTSECVFTLGGGAISXKSCKETILTRSTIEAXLTALDTATVDAEWLRELLMDLLAVEIPVPTILMNFDNQTLITKVNSSKDNMXNXRHVKRQLNSIRKLKNSRVIALDYIXTAKNLVDQCTKGISRNVMDSALSEMGLKLT

SEQ ID NO: 197035 - protein, 111 aa, Oryza sativa
  Clone ID: PAT_MRT4530_92831C.1.pep
NSKLVDRKHEVGPKLAFGCMSVPVDLILQSTRNKDKETVVKSINDSRSARTVSMYGNHLEAHQLKPNVGCESYCWNRLYHLTQPDSDLADPVVADPDSSRFLLCFRNNPCL

SEQ ID NO: 197036 - protein, 237 aa, Oryza sativa
  unsure (1)..(237): unsure at all Xaa locations
  Clone ID: PAT_MRT4530_92832C.1.pep
IXIPFRSPLVDLLGFPIHESTHQSRPAMPWVYHPQLELLAVPQQPESCPMAAAVTQPESPAMAGVDRLRLDGAMPPSYPSSWSVLPREVVVVDEIDDGEELRRWNILRCDRRAGYGVCEAVVEGVKLGARIVSDRGFSALCIIVSKAARAGTRGQVCAAVLAIKNHVIVLSVAFPRSDLFHSLKXCVFILLPGLRRLRRVHHHDPRPAILLSHHKVSSAVTKEPLPSLVVLHITSSL

SEQ ID NO: 197037 - protein, 150 aa, Oryza sativa
  unsure (1)..(150): unsure at all Xaa locations
  Clone ID: PAT_MRT4530_92833C.1.pep
IDSRSGSREAACGSCCPGGGQEGRGPLAWWCAWRRWPVLGPGPRGRSWASRRRATRSWEAEAGTGKVRQATRWELVEAGPSLPSKWLVAGCYTSAAIWKHDALIMWAMIGAGLNSMFSNLLKRIFNHERPVSALRSDPGXMXSSHAQSFL

SEQ ID NO: 197038 - protein, 783 aa, Oryza sativa
  unsure (1)..(783): unsure at all Xaa locations
  Clone ID: PAT_MRT4530_92834C.1.pep
MYMGNNNNGYRPQGGQGXTXPCPYYQGGNNNGNFSNQSSLKDFVFAQAKTTDALSKXLAANDKVLENINVKLDGFAFTFQNXLSFNKIIETQLAQLAALVPTNESGRVPGQPNSSIENVKAITTRGGKSTCDPPYPNPAXGNGITKEAPSGNSADKEVXPEKVVPHEYCDTQLLPFPQRNRKPSVDEXFTRFVEVIQKIHINVPLLDAMKVPTYARYLKDILNNKRPLPTTEVVKLTXQCSNVILHKLPXKQKDSGCPTITYSIGAQQFDQAFCDLGASASVMPKXTSLTSLTSRKRSLSSSQGPNNAPWSESKFPAKGNNVSKEPLLEDAGETHYTDQKARAAGSEEAVSCTKTKEGMEGKAKDACSITSGDGWKIRELKLKDFAHKLIQALIVSLKFKYLVAYIXVALVKLTGGMRRRLSCLFKGSGSSSSHHDESSALSSADVSMEETDVPQRLLSDADLDLVNDRERQAYYMLSDREYAHMREYSPALLKKIGMDTDFRAIWKAIGWQRFAVVDEPGSRFLTLQFLCTLKEXEDGISFRFFHKEYTLSSKGLSTFLGFHDSCKMDLQKGISGFEKNRFWEDISGAPICKKPRTNNIHNPTLRFMHKWIAMTLFPRGDLRPIRRDELIIMFAMTIKESRVGGTYRETRNTARNEQEGSSSSTPMQMYEAGCEPTGDAPGWTQAPRHSIGVSSRVSASEDRWRAPHDIQTGEIQYNLEEHISQTQEWQQTADAQFANINNMMQQQHXTFRRTSALRCSILTKDPKQKPSLGGGETSLPPLR

SEQ ID NO: 197039 - protein, 76 aa, Oryza sativa
  Clone ID: PAT_MRT4530_92835C.1.pep
FCWSFGGICSGVVLFYTSTCRWFFFFFCSLMFLSFCLVHPLVCLELGRRDLSVWFFHFLGKISIACRSTRYFCYGL

SEQ ID NO: 197040 - protein, 247 aa, Oryza sativa
  Clone ID: PAT_MRT4530_92836C.1.pep
MATSWAAPPPGYPYAQGQGGAQPPHPPQSTAVAVTPVSNGVGNPYVIVTPASASPSTCQSLRKALERYGRKLEDGTRKAADTTGNIWHHLRTAPNMADAAVARLAQGTKVYAEGGHDRVFTQAFGVVPGEQLRKAYACYLSTSSGPVIGTLYISTARLAFCSDSPISYHAPAVAVAGAAPAHPPEAIYKVVLPLNQVKSVNPSASMTNRGERYIQIMTTDNHEFWFMGFVSYDKALKNLYEALQRRA

SEQ ID NO: 197041 - protein, 150 aa, Oryza sativa
  Clone ID: PAT_MRT4530_92837C.1.pep
MATSWAAPPPGYPYAQGQGGAQPPHPPQSTAVAVTPVSNGVGNPYVIVTPASASPSTCQSLRKALERYGRKLEDGTRKAADTTGNIWHHLRTAPNMADAAVARLAQGTKVYAEGGHDRVFTQAFGVVPGEQLRKAYACYLSTSSGPVIGT

SEQ ID NO: 197042 - protein, 69 aa, Oryza sativa
  Clone ID: PAT_MRT4530_92838C.1.pep
FPPPIIWRMYSPSCIQPSRIAAPSTWCFTSVLVSSQPVWRSILCGWSYRASVRQVLVVRPSMCVWFNGP

SEQ ID NO: 197043 - protein, 91 aa, Oryza sativa
  Clone ID: PAT_MRT4530_92839C.1.pep
TVNLYKNMVPLHTSCIAVCISVTFFPISNSHSLAYVYFILFIIPSLLFQLFMFNIGILCSIRCIQPFSMTEIFGSGLRELLNNPFETLIFD

SEQ ID NO: 197044 - protein, 364 aa, Oryza sativa
  unsure (1)..(364): unsure at all Xaa locations
  Clone ID: PAT_MRT4530_9283C.1.pep
MATANPFDLLGGDDNDDPAQLLAKAAVAAQKAEAKKAAAAAAAPAAGKGGAQPAASKFPTKPAPPSQAVRESRDGSAPSRGGYGRGERGRGRGGRGYGQNRDFGGEEMNGFQGGYGGGGGSRAGGEEGAQDRERGPRPPFQGGGRRGGYGDDSERMSRRPYERHSGTGRGYEMKREGSGRGNWGTTTDEILAQETGEALKLDEKAPVTEKQGAPEGAPQADENKDNKDVTPNEEEKEEDKEMTLEEFEKLREEKRKALLSLKTEERKVEIDXNKYDLGNDLNNRTGGFGQEKQEEAARSRGARPGASTSSWPAEGERYYGGRGRGRGRGDRGGFRGGYGEGHRSAAPPAPEIKDQSQFPTLGRK

SEQ ID NO: 197045 - protein, 889 aa, Oryza sativa
  Clone ID: PAT_MRT4530_92840C.1.pep
MSTMLPSKSRSGPNESPISRGRPSTPSSNHRPSTPSSIHRPSTPGATRRSIGGTPSTPRSRNNGVGGGGGGPFKSEPNSPPSATARPRLSFDRSPRSVDSKPVVERRVPKIGTPPDKQPRKEAELQARLESAQEDLKKAKDQLAFAVGERDRLVGELNEAKRVADETHEKLQDALMAKRWAEEATEIEKFRADELEQAGIDEAQKREEEWQREIECVRGQHAADLETLVTTTEELERFRRELAMANEAKKAALGHADDAMKIAEVNAEKVEILSSEVVRLKGLLDSTAESEESKNRETEELVKNLESEVSVLKGKLEEARIIEERLAETEKLIEELKSEVADAKKAESEARQLFEEWKHKAGLLEMELEAVTLSDKFKGESLASTTEELGKIQSALQDRESEIEVLKGKTTALEIEVARLLADVNESNEQFDASQQEVFGLQTTIDVLRNKLEAAEEAASEALNNEKAANVKIEGLTEENVKLISELNETRDREEKEKRAVEDLTAALSEESDKAKEAHERYLSKEDDHEHALAQIGDLKMALKSTKESYEVMLDEANYDITCLRKNVDKLEAEVNKYREECESKETDIVRLNKQSEEEISALQLEVDKAVESLQDAEHQLQVANEEKEKLQERLVYTESACAEASKALHEAKTEKESLEEKLIYTEAAVAEANKSVQEATYENSQLKERLLDKENALQSLTQENDEFRLREADAMKKIDELSALLAEAMIKKHPEEEEKLVVVDEAYSSVHEEVTDSVVENGDAESENDKNPKLELDVLNRSSNGDMNHEEEKGETKVEQEEVKTECTTQESNKIIEKQPHPDRKQETVSSKDELEPKEDTNTEHPNGTVSEDTSKVAMSPTKPQQQQKKNKPLLKKFGSLLKKKNSK

SEQ ID NO: 197046 - protein, 73 aa, Oryza sativa
  unsure (1)..(73): unsure at all Xaa locations
  Clone ID: PAT_MRT4530_92841C.1.pep
ITQSLRANCVACCGGRGNSQAPTIVRSEAXGARSSTSILGLVXPSFTTNGSTLGSVDHANVPMEGVKFQPAAF

SEQ ID NO: 197047 - protein, 101 aa, Oryza sativa
  Clone ID: PAT_MRT4530_92842C.1.pep
RNPRDLVRVDVEEVVDRTGSTFSSSCVLLAVLPCQSAPQSRGASTGIHMSREETPRADVLAPARSSYTLGCNPKTSFRSTCQQRSLAERIDPPSIHKDHIG

SEQ ID NO: 197048 - protein, 119 aa, Oryza sativa
  unsure (1)..(119): unsure at all Xaa locations
  Clone ID: PAT_MRT4530_92843C.1.pep
MAAAWRTSRVACVAAGEKDKHSKVVTSRGLPDRRVRLSVPTAIAFYDIQDRLGVDQPSKAIEWLIRAAAAAIDALPSLDCSLVLPNAAXAPHPPEAEAVERAAFGGAGAHEEGYGGGVA

SEQ ID NO: 197049 - protein, 98 aa, Oryza sativa
  Clone ID: PAT_MRT4530_92844C.1.pep
CAHRESGSGDWGLGWINNLVREAGGEVARKAGRCRSMAEQLLLGAQLRLRRRISRSCAGIMQQPMVDWWLEQQPATPQPPSLTEGSALRKFSECYIVY

SEQ ID NO: 197050 - protein, 59 aa, Oryza sativa
  Clone ID: PAT_MRT4530_92845C.1.pep
LFISDSIMSPPLFRVFPVCSSSFDFTGRALLLFLFHLIPLCLDVRVVSATTICCWVRHM

SEQ ID NO: 197051 - protein, 74 aa, Oryza sativa
  Clone ID: PAT_MRT4530_92846C.1.pep
EFACSVVYVMHLFAHKKTGPYPLETRLAEQCLKILMKVFLLYIVVFFGGKLLFFLHKNSISTITSMGFYYSCSL

SEQ ID NO: 197052 - protein, 494 aa, Oryza sativa
  Clone ID: PAT_MRT4530_92847C.1.pep
MAEGVVGSLIVKLGNTLASEAVELAKSLLGLEGSALKRLFSEIRDVKGELESIRAFLQAAERFKDADETTSAFVKQIRRLAFGIEDAVDEFTYQLGEGGGRMPFKRMCKIGTWSRLAANLQDIKVSLKSAAERRIRYDLKGVVVRGVKSVVGSSSNSNWRSDSVHFKRDDDLVGVDKNRDLLMRWVQDEQQQRHRIVSVWGMGGIGKTALVANVYNAVKDDFDTCAWITVSQSYDADDLLRTTVQEFRKNDRKKDFPDDEGASSYRRLVETIRSYLENKRYVLVLDDVWSTNVWFDSKDAFGGANIIGRIILTSRNYDVALLAPETNIINLQPLVKSHAWDLFCKEAFWKNGNRDCPPELLQLAQNFVDKCHGLPIAILQLYDAYDGKNIYFHENSFPRLRELSIRGAPHLNEIEMKRGAVASLTDLKLLVCPNLKQLPYGIEHVRTLEELTLDRAAEELVGRVRQKTETVISHVHRVYVGFSRNGVLAAERIQ

SEQ ID NO: 197053 - protein, 530 aa, Oryza sativa
  Clone ID: PAT_MRT4530_92848C.1.pep
MCGILAVLGVADVSLAKRSRIIELSRRLRHRGPDWSGIHCYQDCYLAHQRLAIVDPTSGDQPLYNEDKSVVVTVNGEIYNHEELKANLKSHKFQTASDCEVIAHLYEEYGEEFVDMLDGMFAFVLLDTRDKSFIAARDAIGICPLYMGWGLDVCRIKILVLIYVPSKKFKVFVTGHEVGFFFDVISGSLFKAIIKRLMTDVPFGVLLSGGLDSSLVASVVSRHLAEAKVAAQWGNKLHTFCIGLKGSPDLRAAKEVADYLGTVHHELHFTVQEGIDALEEVIYHVETYDVTTIRASTPMFLMSRKIKSLGVKMVLSGEGSDEIFGGYLYFHKAPNKKEFHEETCRKIKALHLYDCLRANKSTSAWGVEARVPFLDKNFINVAMDIDPEWKMIKRDLGRIEKWVLRNAFDDEEKPYLPKHILYRQKEQFSDGVGYSWIDGLKDHANEHNAARLTVPGGPSVACSTAKAVEWDAAWSKNLDPSGRAALGVHDAAYEDTLQKSPASANPVLDNGFGPALGESMVKTVASATAV

SEQ ID NO: 197054 - protein, 591 aa, Oryza sativa
  Clone ID: PAT_MRT4530_92849C.1.pep
MCGILAVLGVADVSLAKRSRIIELSRRLRHRGPDWSGIHCYQDCYLAHQRLAIVDPTSGDQPLYNEDKSVVVTVNGEIYNHEELKANLKSHKFQTASDCEVIAHLYEEYGEEFVDMLDGMFAFVLLDTRDKSFIAARDAIGICPLYMGWGLDGSVWFSSEMKALSDDCERFISFPPGHLYSSKTGGLRRWYNPPWFSESIPSTPYNPLLLRQSFEKAIIKRLMTDVPFGVLLSGGLDSSLVASVVSRHLAEAKVAAQWGNKLHTFCIGLKGSPDLRAAKEVADYLGTVHHELHFTVQEGIDALEEVIYHVETYDVTTIRASTPMFLMSRKIKSLGVKMVLSGEGSDEIFGGYLYFHKAPNKKEFHEETCRKIKALHLYDCLRANKSTSAWGVEARVPFLDKNFINVAMDIDPEWKMIKRDLGRIEKWVLRNAFDDEEKPYLPKHILYRQKEQFSDGVGYSWIDGLKDHANEHVSDSMMMNASFVYPENTPVTKEAYYYRTIFEKFFPKNAARLTVPGGPSVACSTAKAVEWDAAWSKNLDPSGRAALGVHDAAYEDTLQKSPASANPVLDNGFGPALGESMVKTVASATAV

SEQ ID NO: 197055 - protein, 61 aa, Oryza sativa
  Clone ID: PAT_MRT4530_9284C.1.pep
GADYYMRIFAGGSSYLSFFIFQCHHFLILLFSSYKMFFLLAFVAVSFMDIFTFGLCLLVRL

SEQ ID NO: 197056 - protein, 89 aa, Oryza sativa
  Clone ID: PAT_MRT4530_92850C.1.pep
KPLAGFHEVNQTTPTPKLIHGSNAAHACTHARTILLVLSKISNTGFARNFLPKELQLNWHPTDQTNGTKAHRCKLQETIYSKKLATTSG

SEQ ID NO: 197057 - protein, 51 aa, Oryza sativa
  Clone ID: PAT_MRT4530_92851C.1.pep
SISFPLNLRAKAKFFVIYCCSLSNNLLYYRRRGGGGKANKKNRKKNKKIKR

SEQ ID NO: 197058 - protein, 143 aa, Oryza sativa
  Clone ID: PAT_MRT4530_92852C.1.pep
GPRLPAATVCSVGPAVPPRATRLDRALGCRASAPNRQSSRRRGAGLWLPPFPKPKRTIRARARARAPCFGLFLPGECGIRRVALRSTDTDPAPDHPRAVNVNAITTRAAGRLIRSNTKSEQGKKKRGVESLRRADETRADHHP

SEQ ID NO: 197059 - protein, 107 aa, Oryza sativa
  Clone ID: PAT_MRT4530_92853C.1.pep
ARTGGRGEEGTASSAMGVLTGLCDRLRLMRLLLRRHPQHGVAPGGGHPRRERPLLGGSGSSSRGGADAIAIGSLDRTADGAPLLYFSTLLRCDATWACARAQSCSGG

SEQ ID NO: 197060 - protein, 97 aa, Oryza sativa
  Clone ID: PAT_MRT4530_92854C.1.pep
MASTAPTVRIWLSSTPSQSPSAPKLLPQPIRWWRWRRRLTWADPVEDATMAFSTGGSGDPVILYPLSSPSVPSFSRGGSGGGSREQIQPRQRQGLAF

SEQ ID NO: 197061 - protein, 97 aa, Oryza sativa
  unsure (1)..(97): unsure at all Xaa locations
  Clone ID: PAT_MRT4530_92855C.1.pep
WGLFCSAHHMGSCRMGATAGDGAVDVRCESXEAGWLYVCNSWLYVCNSCVLPTTVGVNPMITIQSVXYCVANSIADSLSDFYERIICRLQKESSPGT

SEQ ID NO: 197062 - protein, 72 aa, Oryza sativa
  Clone ID: PAT_MRT4530_92856C.1.pep
LVVWSTVRGKVFFPMLGLVTSIALFFCPSARLLGILGVHVPSFMPVCFSLVFVCSPLLIVSWYCPAFLCQKS

SEQ ID NO: 197063 - protein, 150 aa, Oryza sativa
  unsure (1)..(150): unsure at all Xaa locations
  Clone ID: PAT_MRT4530_92857C.1.pep
WGLFCSAHHMGSCRMGATAGDGAVDVRCESXEAGWLYVCNSWLYFMNVSFADCKKRARLEHKTADGDERERSEEGRRQIAVRLAAVVSGSLMLAAAVLLEMHMLMGGLRELDAMSFSGFVMQHVVVVLAAAGLLLVALAGCPPWDDERRR

SEQ ID NO: 197064 - protein, 190 aa, Oryza sativa
  Clone ID: PAT_MRT4530_92858C.1.pep
MAAKRLLLLSRCRLIAHRPSCHIPFLPPALARYLGSPSSPNPNPKNTSSMGTASSGEEEEDDEGKAFPWRRWRPDVAWLPKALEPALQLYNQYKPFLTSAPTDNIPASTRTFSEILSDLQRSKVSIKDWSLTDLTIGLYLIYLSQASAKDAQAFKGLHISCNNKASPPSLLFPITISQFIILLDCNSHFS

SEQ ID NO: 197065 - protein, 86 aa, Oryza sativa
  Clone ID: PAT_MRT4530_92859C.1.pep
MARRAVRPRSTPVRLATRRGQTRAIKPVRPISISFEEHPGGSVHVIYQRNIIKWNKNTYLQEKALESVSVLVASEQRRGGCRLESN

SEQ ID NO: 197066 - protein, 429 aa, Oryza sativa
  Clone ID: PAT_MRT4530_9285C.1.pep
MATTVVNSVGDEAHEADGATAVDQVYAPLDQFLAELDGGVLVAGLPPLGAAAVHADPPEPRPPLPCTTATALRRRRRRRPCSGAPLRRSLHCHRHQPRPQVGRARVRERGSDWRREMEREEIELEGEARVRLKDARVQYLSLVLLETIVKNCEKAFSEVAAERVLDEMVRLIDDPQTVVNNRNKALMLIEAWGESGDELRYLPVYEETYKSLKSRGVRFPGRDNESLAPIFTPARSVAEAEVDANFSQQTFEDVQVHTYTAEETKEAFDVARNSIELLSTVLSSSPQQDALQDDLTSTLVQQCYQSQHTIQRMIETAGDNEAMLFEALSVNDEIQKVLSKYEQMKKPAASENAEQRPVVIPIATEHEDSATVGNEDALVRKPAGSRARSGGDDDILDDLDEMIFGKKGGSSSQEGPKKQDPKKDDLISF

SEQ ID NO: 197067 - protein, 78 aa, Oryza sativa
  Clone ID: PAT_MRT4530_92860C.1.pep
AFGWTYPVGGHLSVGGGEETYEDSPSNGEARIMAVEHAHPVSLAVLPSSPAQATPLPLFLRYAAFRCGGDAAERIGPF

SEQ ID NO: 197068 - protein, 39 aa, Oryza sativa
  Clone ID: PAT_MRT4530_92861C.1.pep
RKPNKGKKNHAVKQMSTREKQSSNHQVSSLFFVMSVSSI

SEQ ID NO: 197069 - protein, 190 aa, Oryza sativa
  unsure (1)..(190): unsure at all Xaa locations
  Clone ID: PAT_MRT4530_92862C.1.pep
FEKAPPGKKPQPKGEKNPRGPRPENIKGPGRWINPPXWPQKRTNKPGSQKKMGGPQGTQLIGGAPAPPGPWKKPLAFGRGPGPREISPLPGPRGIPRRRGPSGKPSPRGPXWKGNGFPFYNPGRGGNPPPGGLPGGSGPPLXPDLKNVEAPPGGRTQEPPKMKGGPKKGWPPPPGGATPQPTLFLADPGP

SEQ ID NO: 197070 - protein, 46 aa, Oryza sativa
  Clone ID: PAT_MRT4530_92863C.1.pep
TVAYTTLTKAWFSYQLFFQTFNFSITSKLSYTHKLPTFPSHHFNFN

SEQ ID NO: 197071 - protein, 259 aa, Oryza sativa
  Clone ID: PAT_MRT4530_92864C.1.pep
MTERGAPHRETARAPLCRFGRGLRVRSQALCVCGKIATYRKSMKHKRCHTTGASATFSFSSGSDLFASFGSGSGGLGGRQPGAAGSMACARWRATGPCPDPAEAPAPNPDLAAVAVPCQDAAAVVAGTAVTAAAQPISPDFASSLTATSRRQPAHSQLALPIAGPGLAAADFWESFYPWMTTTSMRQQEEVPAAEMHRGRRGGDKLWPWTKDELPHRTGAAERRRGGGDRGEGKSCGQRRSRHTASEAGRGRHLDTASE

SEQ ID NO: 197072 - protein, 53 aa, Oryza sativa
  Clone ID: PAT_MRT4530_92865C.1.pep
HFLLLNTLYSLNILLLIFILPFLLPLILLTPKLLFYFHIIHSIFLTFIHVHIL

SEQ ID NO: 197073 - protein, 398 aa, Oryza sativa
  Clone ID: PAT_MRT4530_92866C.1.pep
MVSASRFVLLSRVPAAAASSRFLRPLAAAGSLLPAALAPFAPPAAGARCFATQPATSSLRDSSPNWSNRPPKETILLDGCDFEHWLVVMDPPPGDPSNPEPTRDEIIDGYIKTLAQIVGSEDEARHKIYSVSTRHYFAFGALVSEELSYKLKELPKVRWVLPDSYLDVRNKDYGGEPFINGEAVPYDPKYHEEWVRNNARANERTRRNDRPRNFDRSRNFERRRENMHNFQNRDVPPGQGFNSPPPPGQGPVLPRDAPPMPPPPSPPNPGAPPSYQPHAPNPQAGYTNYQGGVPGYQGRAPGYQGGNQEYRGPPPPPPSAYQGNNPGYQGGGPGYHGGNPPPYQAGNPPPYQAGNPVFAGGAPGYQGQGGNPSYQQGSDNYNAGAPAYKRDEPGRNYQ

SEQ ID NO: 197074 - protein, 42 aa, Oryza sativa
  Clone ID: PAT_MRT4530_92867C.1.pep
LSGPYRRAPISYPFSEDQGRPAARSVRASRSVTLPLRITGQS

SEQ ID NO: 197075 - protein, 893 aa, Oryza sativa
  unsure (1)..(893): unsure at all Xaa locations
  Clone ID: PAT_MRT4530_92868C.1.pep
MASASRFLLLSRLPAAAASSTSRLLRPLSAAGSLLPAALAPSAPRAAAAAARCFATQPATSSLRDSSPNWSNRPPKETILLDGCDFEHWLVVVEPPPGDPSNPEPTRDEIIDGYIKTLAQVVGSEEEARHKIYSVSTRHYFAFGALVSEELSYKLKELPKVRWVLPDSYLDVRNKDYGGEPFINGEAVPYDPKYHEEWVRNNARANERSRRNDRPRNFDRSRNFERRRENMQNFQNRDVPPXQGFNSPPPPGQGPVLPRDAPPMHHAQGNVPPPPPPNAGPPNYQPHAPNPQGYTNYQQGGAPGYQGGPPGYQGSNQGYQGPPPPPPSAYQGNNPGYQGGGPGYQGGNPPPYQGGNPGYAPGYHGQGGNPSYQQGGDNYNAGSSARSWAAGCCRWAVGYCRWAAGCCDCEARRRRLLGVAVASSSVVVAAVKRRDGAAAARRRCETAGQRREMAAVRDGEDGGGWRMSSAAVNGLAGAGGGIIAQIITYPLQTVNTRQQTERSAKKKKANGAAIANTSTLFQMLQLFQTEGWGGLYSGLKPSLIGTAASQILKNKVEDLAVARGKKGLGDGTVGMFSWLGIAAVAGSINVLLTNPIWVLVTRMQTHTQAEKKIMESKKELLLKDVARANSIEVSILKDRLYKLDSEKPRPYGTIQAVREVYRESGIRGFWKGLIPTLIMVFLLGAIAKLGATVVTYPLLVVKSRLQAKQEIGRNVMSRYTGTIDAIIKMIRYEGLHGFYKGMDGEKPTKADKIRHSFLWAGKAYANGGVCRVAWARVCSPKEYGGLGIPDLERAIGHSECLPLNEHSFLSWLCDCRKKMVKEHCRGFDTIVTLVAWTIWKERNNRVFNQKSRTWAEVARVMTGEAELWRLARAAIPVLVAHVSGEGSQNLVGD

SEQ ID NO: 197076 - protein, 75 aa, Oryza sativa
  Clone ID: PAT_MRT4530_92869C.1.pep
QSKLPTYTILLLVAITPLLQFSTISSQAPFTMYLPPSPHSLSPVYPQKHIYLQAHLPISGIPAILDLNRRTKDEC

SEQ ID NO: 197077 - protein, 102 aa, Oryza sativa
  Clone ID: PAT_MRT4530_9286C.1.pep
CAAAAASAGATSATTRAATAAAAAASPTTPGRPSSTAPSASSSSPPSSSSPSSSPPTASSATSPSPSSPRPSRGSTSPPRRRPPLSPTTSRSRSPSATRTGP

SEQ ID NO: 197078 - protein, 135 aa, Oryza sativa
  Clone ID: PAT_MRT4530_92870C.1.pep
MERTVVLYPGLGVGHLVPMVELAKVFLRHGLAVTVAAVKPPLDSPDFSAAVARFAECNPAINFHVLPPPPPPPAPVGSGSDGESASPIVGMLGFLNAVNAPLRDFLCSLPSVDALIVDMFCTDALDVASELRLPV

SEQ ID NO: 197079 - protein, 188 aa, Oryza sativa
  unsure (1)..(188): unsure at all Xaa locations
  Clone ID: PAT_MRT4530_92871C.1.pep
AAAATAVADEEEMWRXRSGACALLLLQSSIHRPLPPPPPSPLRALTRLXPPPRPLSRFLSSSPEPLPDAAGGAASTSSDPTDDGEDSLASDPTEAGEDNLASLWEDAGDADDIFAADAMVDEVLVERVCAVVESTPEDQIPFALAFKVVDXNEPLLAAILVSTAKSCSGKKLLLQFKSINLSWPAGGH

SEQ ID NO: 197080 - protein, 188 aa, Oryza sativa
  Clone ID: PAT_MRT4530_92872C.1.pep
MSPILFNIVVDMLEVLIERTKGDGQIRGVIPHLVEDGLSILQYADDTIIFLDHDLEHAKNMKAIMRAIVGQKLIEWNDLILRLANITLANEADYFVWSLHKNGQFSIQSMYIANMNSNVRIEKRVLWDLKIPLKIKVIFMFSYWFHFWSTMLPQEEYDTMRNGAMLLVSTAEGLLLNYGWRSSIRIAS

SEQ ID NO: 197081 - protein, 231 aa, Oryza sativa
  unsure (1)..(231): unsure at all Xaa locations
  Clone ID: PAT_MRT4530_92873C.1.pep
MADPRERETKRRRDPGVGGGSARAASMAWNRCMRRPCRHPQSATALLHLLAVALLHLLPHQGEEAPLAAAAADLVPVTRREVVLCIGYDDDDLALIDVTYPKRDVDNMQWFREITLLYRGHRLSAPFVLGLIVLCGHAPPNNXCPWGXKGVRGHPRDPSTPIRYVVIYISGSHALCTSPXCNQSKYTVSVLPFHKDGGRMARLLAFLHNRRVTVACVEDLLIFTMFSSCFM

SEQ ID NO: 197082 - protein, 626 aa, Oryza sativa
  Clone ID: PAT_MRT4530_92874C.1.pep
MDGGDRLSALPNDVLHLILLRLRSAEAAARTSVLARRWRHVWATLPELRFRMDVSLAAHAAPALRRLEVSTDADDPAASTAALRLAAPRVAGELSFCIWPRWDDAPEEDDGPAPVRRPGVVKLPCFEKATELWLILGLLGVSLPKSGVFAQLTALAFRDVRFTGRCDLGAVVSSKRCPVLQKLQVHDSQDLYNLTIFSESLLHIELSDLHGGMGRLMIVAPLLRVLDVRHCFYWRTYRSHSLVRDQPYAAVFTPALEDLIWVDAYDPTTVQFGGVKRLRKLPLRFFIFSLSRFSIFCRIKERRRRWPLLQPIWRRGGMGAQRSGGMRQRPVWRREVVLCIGYDDDDLALVDVTYPKRDVDNMQWFREITLLYRGHRHSAPFVLGLIVLCGHAPPNNWCPWGREGRARPSSGPRHPDPLRRDLHRRLPCLVYQPDCNQSKYTVSMGRSQYLMEAITMLPAIEVMSLELSKRGHAFGQCVFHLLRMSTGIRKLKLALRGGLKDSEERISVLSTWFQGHQADARCSASCICNRPQAWKTEDLFLDSLQEVEISGFRGSEHELAFLKRRFGWAAILKTFTMHLHLDLTVSDDLCKELLSLATPETDVKIYFYRDDDVHARPAWVLYTPEE

SEQ ID NO: 197083 - protein, 109 aa, Oryza sativa
  Clone ID: PAT_MRT4530_92875C.1.pep
VRGPGRTTPFAVVCPGHPPLPRALHPQDRRPVRGWSPSSSRSPLASPSAPASFLPAATRVRSPLLGDPGLGPDLAFEWPPPPALVCSINHPVPSNYIVAFVCFSFRFGS

SEQ ID NO: 197084 - protein, 138 aa, Oryza sativa
  Clone ID: PAT_MRT4530_92876C.1.pep
MIDVPGLTAPGWLPTPLPSDTFPVQDGYLVADWGLTPPSRSPTPPPGRPPTPPLGDMLRVQDGYLVTDWGLTPPSWLPTLSPSYIVPVQDGHFAADRDLTPPSWPPSLPPTRGLHLRASCLRHCRVTSPHARRLLHRH

SEQ ID NO: 197085 - protein, 60 aa, Oryza sativa
  Clone ID: PAT_MRT4530_92877C.1.pep
CNTGPLGTFRLWDHRNNLVPRTGATIYHRWANIVLYGLGSNTALGKVKGCTLGSSYRGGS

SEQ ID NO: 197086 - protein, 103 aa, Oryza sativa
  Clone ID: PAT_MRT4530_92878C.1.pep
LSCLCLSGSRSRFPPCRFLHACQLQSYTDTVNQFLLCSHCSSARMVYESSSEITATRCAVQLPPPSPCLSETTPGHHHVGLLDYPAAGQHAPHVARNHSAELH

SEQ ID NO: 197087 - protein, 333 aa, Oryza sativa
  Clone ID: PAT_MRT4530_92879C.1.pep
MAASLQAAATLMQPAKLGGRASSAALPSRPSSHVARAFGVDTGAAGRITCSLQSDIREVANKCADAAKLAGFALATSALLVSGASAEGVPRRLTFDEIQSKTYMEVKGTGTANQCPTVEGGVDSFAFKAGKYNMKKFCLEPTSFTVKAEGVAKNAPPEFQKTKLMTRLTYTLDEIEGPLEVSSDGTIKFEEKDGIDYAAVTVQLPGGERVPFLFTIKNLVATGKPESFGGPFLVPSYRGSSFLDPKGRGGSTGYDNAVALPAGGRGDEEELAKENVKNASSSTGNITLSVTKSKPETGEVIGVFESVQPSDTDLGAKVPKDVKIQGVWYAQLE

SEQ ID NO: 197088 - protein, 122 aa, Oryza sativa
  Clone ID: PAT_MRT4530_9287C.1.pep
MTTTMNLALRSSLAVLASGAVGTSGSDADNGVGSGAWDLGSDDKDMDLALGSSSMAIENIFCETTMKSTISDYYHINSINIAHGGHTVVMLFCSPTAAHCRSARISAPLHCHAGQPPAGLPY

SEQ ID NO: 197089 - protein, 135 aa, Oryza sativa
  unsure (1)..(135): unsure at all Xaa locations
  Clone ID: PAT_MRT4530_92880C.1.pep
MVVATAGGGRGRAVAGSGDRGGGGRQWRGGRAAMEEAEQRRRRWQRRRSGVERASSGGGGGGVAAMEAEQQRRXPRHGGYEGGGPHDGERRTGGRDEEQTRGGGIGEKGREDREEVEKEENDRVALLACHKVVKK

SEQ ID NO: 197090 - protein, 43 aa, Oryza sativa
  Clone ID: PAT_MRT4530_92881C.1.pep
MAKLSSKQNPRNPEGVPNYLKRWEDDQRDSRVVLHLVGAHPTW

SEQ ID NO: 197091 - protein, 133 aa, Oryza sativa
  Clone ID: PAT_MRT4530_92882C.1.pep
MRLLTHNMLASNARGAVTGYPLKLQVVKWSTKEAEPNPEFLRGMLPKIDWPALVAATQALGLPELLPEAPPTDAELSAEGAAADEGSALRRLHRALLEIHIEEGALVCPDTDRCFPISRGVPNMLLHEDEVRN

SEQ ID NO: 197092 - protein, 28 aa, Oryza sativa
  Clone ID: PAT_MRT4530_92883C.1.pep
QQGLGNQLMRITFQTHYNGMQIHMEKRN

SEQ ID NO: 197093 - protein, 93 aa, Oryza sativa
  unsure (1)..(93): unsure at all Xaa locations
  Clone ID: PAT_MRT4530_92884C.1.pep
ENNSQLPGLNDPEAEKQQQELLIKCISEDLGFSIGRSIAAYLIYRCLIHXKSFEEDRTIVFDRIIQKISAAIEVCGSDLGNNFFSYRACDLAQ

SEQ ID NO: 197094 - protein, 58 aa, Oryza sativa
  Clone ID: PAT_MRT4530_92885C.1.pep
PCQEWATVSRVCRADAGITSNRLGLLSRCGDFLAGGGRSLSPPFLAVGSFGLYEMKCH

SEQ ID NO: 197095 - protein, 395 aa, Oryza sativa
  Clone ID: PAT_MRT4530_92886C.1.pep
MATVEGRRGWIPWARRAMGEDAEMGSLRRAAAAGEDDEKGVPESETAAKGDGAASYGYIPVPQDADGDKCVVLVPTANAADWSVAEMKDGGGGGGGGEDATATTKMIQMRPVGLGIARTRPGGDRLDGIEDGIEDDIDEVKDPGEDQAVHQPMLPVLVRGSAPEKSDLEKNWDRDQVGYGVHLLGSFIYPAAVAISMKDHPGDLTAVLLIFGTMWCILAMGFLLHLHAKESKALQRFTSIIPRVFLSCFSYLVMYHISFLIPNKKAAHIFWYVKVTVLLSLFHAGILIWVVIHKILKKHSNISMHQDTPINDFKYVPRNDLFDIDEYGHYIPSRPRDAFNWDRVLNCVNCVRLHQLVIAIVMTATRRKRTNQSGGLIANDVLTYARRPQWHPLTS

SEQ ID NO: 197096 - protein, 51 aa, Oryza sativa
  Clone ID: PAT_MRT4530_92887C.1.pep
TRIGVKPNTSNDMFLMLSQLRLINATLRSFILLSHYDTWRAHPRRTSKLHH

SEQ ID NO: 197097 - protein, 48 aa, Oryza sativa
  Clone ID: PAT_MRT4530_92888C.1.pep
MGRGRVELKKIENPTNRQVTFSKRRMGLLKKANELAILCDAQIGAIVF

SEQ ID NO: 197098 - protein, 99 aa, Oryza sativa
  Clone ID: PAT_MRT4530_92889C.1.pep
MRATVGQLATTHDQASHARTHAAYAAGVVRDTPISLQVHVCSMGADMVGETNKEPPAQSGKKKGVVLISKFICIIRQTEYLSLSPLDPSSPYQIISRVN

SEQ ID NO: 197099 - protein, 90 aa, Oryza sativa
  Clone ID: PAT_MRT4530_9288C.1.pep
TKNRNASILICGMNSCTPHDVLIICDELLLPPCPCHGLEPIDLICQHPGPGAIACRRYSVEAEKKKPFNVVCDYTFRSGMDISNPVALAS

SEQ ID NO: 197100 - protein, 68 aa, Oryza sativa
  Clone ID: PAT_MRT4530_92890C.1.pep
IREYYHKTTVKKESHQGRCPPKKIKQINPHTTQTQSPLPSFASPPRPRYLTISTQQTKQLLTKSYLCR

SEQ ID NO: 197101 - protein, 114 aa, Oryza sativa
  Clone ID: PAT_MRT4530_92891C.1.pep
KPLGGAKFGGPTAKKGTGPPKRSTRKENKPLKKKRKWAKRERKQGGQRSQKGGKKKNTPWGNKGGQKKGSPLMGEPPKDGPKKPLDILFKNQNPKQGGKKPKTETPKKRWESPP

SEQ ID NO: 197102 - protein, 240 aa, Oryza sativa
  Clone ID: PAT_MRT4530_92892C.1.pep
MKSSSQEAGEEVSEISSQAASNNNETCNSSSGKVSLDLSLTVAAAAAAAASATESSTTDSGGTRPAATATATAREPARVFTCNYCQRKFFSSQALGGHQNAHRRERTLARRAVRLDAFPYGYADVASLPLYGAGLYPIGIQAHASVHHHHPGVAAPAGRAELRSARALLGPMPFFVQAAGDEDASFGWPGSFRPPPTAATTIPAAAAAPVAVNSGSSNSNHGGSVVVQAAADEPDLTLRL

SEQ ID NO: 197103 - protein, 470 aa, Oryza sativa
  Clone ID: PAT_MRT4530_92893C.1.pep
MATHHARRLPAAAAVLLLVLLAGGSAADDASSDDDAGVPPSPGCSNKFQLVKVKNWVNGTEGTIVVGLSARFGASVPRDIHEAQKTFAVLANPLDCCSNSTSKLTNYIAIAQRGECAFTAKAKIAQTGGAVGLLVINDNEELYKMVCSDNDTSINVTIPVVMIPQSAGKKMKGLLDQGARLEVQLYSPNRPVVDLSACFLWIMAIGTIVCASLWTEFVACEQVDERYNQLTRKFVTGLCFTDRFVPFRAKQDGPNSGTTNREDKEIFEISAKGAIVFILVASVFLLLLFYFMSSWFVWLLIVLFCIGGIEVASALLSAAFVYDVFWVFISPLIFHESVMIAVARGDNSGEAIPMLLRIPRFFDPWGGYDMIGFGDIIFPGLLVAFSYRFDRASKRGLFNGYFLWLTVGYAVGLFLTYLALFLMDGHGQPALLYLVPCTLGLIVILGWFRGELHDLWNYGRSQTENLVDEP

SEQ ID NO: 197104 - protein, 236 aa, Oryza sativa
  Clone ID: PAT_MRT4530_92894C.1.pep
FMSSWFVWLLIVLFCIGGIEGMHVCLVTLLTRICKDCGQKTVQLPFFGEVLTLSVLIVPFCTIFAILWAVYRHASFACIGQDILGICLMITVLQMARLPNIRVASALLSAAFVYDVFWVFISPLIFHESVMIAVARGDNSGEAIPMLLRIPRFFDPWGGYDMIGFGDIIFPGLLVAFSYRFDRASKRGLFNGYFLWLTVGYAVGLFLTYLALFLMDGHGQPALLYLVPCTLGLIVI

SEQ ID NO: 197105 - protein, 64 aa, Oryza sativa
  Clone ID: PAT_MRT4530_92895C.1.pep
PRSLARRRRRLRCCSPRSSPRRSPPSLSRPCGSLWGWLPVLVSPSRWRCWADRSVGRPDSGRSA

SEQ ID NO: 197106 - protein, 462 aa, Oryza sativa
  Clone ID: PAT_MRT4530_92896C.1.pep
MAAAVAVVVGCVLLGGVWGFPEEDLVARLPGQPVVGFRQFAGYVDVDEKAGRSLFYYFAEAAEGAAAKPLTLWLNGDGIGVVIVNGPGCSSVGGGAFTELGPFYPRGDGRGLRLNKKSWNKVSNLLFVESPAGVGWSYSNTSSDYNTGDAQTANDMYKFLLGWYKKFPEYRSRGLLLSGESYAGHYIPQLTDVLLTHNEKSNGFKFNIKGVAIGNPLLKLDRDVPATYEYFWSHGMISDEIFLSISHSCDFEDYTFSNPHNESKSCNDAIAEANSIVGDYVNNYDVILDVCYPSIVMQELRLRKYVTKMSVGVDVCMTYERYFYFNLPEVQQALHANRTHLPYGWSMCSDVLNYSIKECNFNSLPELQDILNHSHPVWEFSGDQNHVVPQWGSRTLVRDLANDWGLHVSCRYKNWFRGLQFQIGILYHLERLEVEGWITYFIDILMDSTIAFLEVWNIEQSV

SEQ ID NO: 197107 - protein, 489 aa, Oryza sativa
  Clone ID: PAT_MRT4530_92897C.1.pep
MASERAGSKRAAKGTEGTTAAAAAAAALQLHGDVLGEVLRRLAPRWLAACRCVCKAWRDAIDGGGLLRADLLPLSLAGFFLNFSCHDYSEYFSRPTTTTTTTTTTCHRHLITGKLDFLPSEGEWQMALDHCNGLLLLESGCVVNPATKAWMDLTPYPPPPPLIEEEQEVKTYPEEHLVFDPTLSPHFEVLIIPHLLPFDKDRSKKQPPQNSAWPPSPLVLNVFSSRTREWEERPFVREGEAAGAMADVASVRGTHYAAYWRGTLYVRCQSNFVMRLSLLDNKYRIIHRPVDAEAREFSSRYLGKSKQGVYFASLSKDRLLVWLLDEPCGDMKWVLMHQTDLGPSLATSHKLDGHWILDDINYECSTWLFPKGRKPLTLARENFEWNSDDDDIVNDAAEDTVKRRYDEYALILGFHPYKEILFIESMDRGYAYHLSSSKFEELGKLHPVSLHGIPNEHLDVELSFPYTPCWIEEFPQPELDCKLNSIWKP

SEQ ID NO: 197108 - protein, 173 aa, Oryza sativa
  Clone ID: PAT_MRT4530_92898C.1.pep
MEMMEGSGAEATGEAGEVEVDLGVVVGGGVEVEEVGGGGAVEVLDDEVLDVDEAVDAAGDGDGAPLREAVLALGLLEQRPEERVLERKKRLMGLKGEGPGVGAGDGEAEDGEGGVAEGGVGCAPVSSSRSGLFLRSVSRRFGWITEMKDILVVVTYEVNYDGLKRKRAIGLAG

SEQ ID NO: 197109 - protein, 86 aa, Oryza sativa
  unsure (1)..(86): unsure at all Xaa locations
  Clone ID: PAT_MRT4530_92899C.1.pep
LVRHRRSDRRHCGGQTGRGVAVRPVTASGGIGDFXRSNRAIYTGQTGGTGAVRLADQPRSDRSTSNLRVTFNSVKSWQGSSLAASG

SEQ ID NO: 197110 - protein, 113 aa, Oryza sativa
  unsure (1)..(113): unsure at all Xaa locations
  Clone ID: PAT_MRT4530_9289C.1.pep
RTKYGNGAPIFPPCGGFARKFQPAIXPGQVGINVPIPVPLPFFSFPGSKASFAGDLIFFGKGGVQFFPQIKTVPHHWKEFPVQGFSLSMPPSQKWGEKKKRLFVRFSFAPPWK

SEQ ID NO: 197111 - protein, 272 aa, Oryza sativa
  unsure (1)..(272): unsure at all Xaa locations
  Clone ID: PAT_MRT4530_928C.1.pep
RPPPPAPLPAPAPPPKPTPTPTPTPMPKPPPPPRPPPCSRPPPAPPPKPPPVPPPPPRPPPPPXPAPPPAPPPKPPPXPAAPPPPRASPPAAPPVAIPPPSRSXPPTPPPAPNPPPLPPPPPIPPPPPPPKPPPPPPPSPPPVPLPPPTPPPAPKPPPXPPPPPTPPPLPPPKPPPPPPPRPPPAPLPPPTPPPKPPPSQPPPPSPPPPPPPNPPPPPSPPPPPPLNPPPPPNPPPPPWHRPKRQSWPKPGPRPNPLGPWPNPPGPNPSSSK

SEQ ID NO: 197112 - protein, 104 aa, Oryza sativa
  Clone ID: PAT_MRT4530_92900C.1.pep
WYATYKMGTKMTSCSWDGVPGLRIAATDPVFCDYGICSSEYHLKPLNFNLHDIVNPLIEQREVIYGLYIALIILEISSLSFMLPILAGFFWPTGPREDYYCPAL

SEQ ID NO: 197113 - protein, 265 aa, Oryza sativa
  Clone ID: PAT_MRT4530_92901C.1.pep
FPVDPASEMVQVETVAQFGVIFLLFALGLEFSTSKLRVVRAVAVVGGLLQIILFMLLCGISATLCGGKTKEGVFVGVLLSMSSTAVVLKFLMERNSINALHGQVTVGTLILQDCAVGLLFALLPILSGASGLLQGVASMAKSLVVLITFLTILSILSRTGVPWFLKLMISLSSQTNELYQLAAVAFCLLFAWCSDKLGLSLELGSFAAGVMISTTDLAQHTLEQIEPIRNFFAALFLASIGMLINVHFLWNHVDILLAAVILVIT

SEQ ID NO: 197114 - protein, 41 aa, Oryza sativa
  unsure (1)..(41): unsure at all Xaa locations
  Clone ID: PAT_MRT4530_92902C.1.pep
SSMASKRRWPWRRWRAVRPMLRRRTXTRRLRRCCYTIELXK

SEQ ID NO: 197115 - protein, 105 aa, Oryza sativa
  unsure (1)..(105): unsure at all Xaa locations
  Clone ID: PAT_MRT4530_92903C.1.pep
EFPGRPTRPIKHARSGGPYSWGXXYREVKGAKENLCVPNARWPCAPGKEYHARVPMQMRYKYNYGGXGNAIGTDLLRNPELGGTDQTVELKTELWLWMTERSTSQ

SEQ ID NO: 197116 - protein, 520 aa, Oryza sativa
  Clone ID: PAT_MRT4530_92904C.1.pep
MIDRALEKEFPESEGEQGGGEKDPGSFNNTVAEKQGVLETVARRVTKKNETKDNKSFPFKEVFLDRPEQEDVPTLIDRKDNVFIISNPKSKYPVLQLDLRLISDLVVVIVSATFGGIAFACLGQPVITGYLLAGSIIGPGGFSFVSEMVQLRVVRAVAVVGGLLQIILFMLLCGISATLCGGKTKEGVFVGVLLSMSSTAVGAQFVGGSSDCVGDDHWAEPVLKFLMERNSINALHGQVTVGTLILQDCAVGLLFALLPILSGASGLLQGVASMAKSLVVLITFLTILSILSRTGVPWFLKLMISLSSQTNELYQLAAVAFCLLFAWCSDKLGLSLELGSFAAGVMISTTDLAQHTLEQIEPIRNFFAALFLASIGMLINVHFLWNHVDILLAAVILVITVKTFIVAVVVKGFGYSNKTSLLVGMSLAQIGEFAFVLLSRASSIHLIEGKLYLLLLGTTALSLVTTPLLFKMIPAVVHLGVLLRWFSVDSNQVELGLKSDGLRIDSGKRINLIVQGSHDS

SEQ ID NO: 197117 - protein, 59 aa, Oryza sativa
  unsure (1)..(59): unsure at all Xaa locations
  Clone ID: PAT_MRT4530_92905C.1.pep
LRRGXGPPXXXXLPXPDDVADLAVXVHRXRXRLRRGXGESXRGVXPLVGTASASCCWVS

SEQ ID NO: 197118 - protein, 381 aa, Oryza sativa
  Clone ID: PAT_MRT4530_92906C.1.pep
MDAASRTWPPPTPSPPPFSSRPRVVGPPPPTPYDPSPPPPPHHHHHHRRRHRHSKKPKPQPQPQPPPPPLPPQQQQQEPAAGAGAGADFSALPPELVHRALAAAGASDVAAASRACRAWRDALRPLREAAALHARGRRVKHAAGAAAAAGAEGRKAERQRALGLFQRAARLGSAAAMVDAGLMCWEEGRRDEAVGCYQKAAELGHPVGMCNLGVSYLEADPPKAEEAVRWFYPAAAAGNARAQYNLGLCLQNGKGIKRNQREAAKWYLRAAEGGNVRAMYNISLCYNYGEGFSQDQVRSKRWLQLAADCGHKKALYECGIKLCAAGDKVRSLMYLELATRRGEAAASHMRDVILESLSLVNAQRALSDADKWRPRALYTRR

SEQ ID NO: 197119 - protein, 614 aa, Oryza sativa
  Clone ID: PAT_MRT4530_92907C.1.pep
MRGADLINLLLPDEILDEVLRRVAVSGAKRDLDACALVCRRWRRHDRATRRSAKLAASGARADEVLRLVAERFPALVEVSVDERISVEAAAAGPSCAAARSRRRPMYDVSPSGRRRRMSRSSNFGAHMSPFPLDQPGSDNETERTCLTDVGLTSLARGCKGLEKLSLVWCSSITSTGLVRISENCKNLSSLDLQACYIGDPGLIAIGEGCKLLRNLNLRFVEGTSDEGLIGLIKNCGQSLVSLGVATCAWMTDASLHAVGSHCPNLEFLSLESDHIKNEGVVSVAKGCRLLKTLKLQCMGAGDEALDAIGLFCSFLESLSLNNFEKFTDRSLSSIAKGCKNLTDLILNDCHLLTDRSLEFVARSCKKLARLKINGCQNMETAALEHIGRWCPGLLELSLIYCPRIQDSAFLEVGRGCSLLRSLYLVDCSRISDDALCYIAQGCKNLTELSIRRGYEIGDKALISFAENCKSLRELTLQFCERVSDAGLTAIAEGCPLRKLNLCGCQLITDNGLTAIARGCPDLVYLDISVLRSIGDMALAEIGEGCSQLKDIALSHCPEVTDVGLGHLVRGCLPLQSCQMVYCRRVSSTGIATIVSGCPKLKKLLVEEWKKSCS

SEQ ID NO: 197120 - protein, 79 aa, Oryza sativa
  Clone ID: PAT_MRT4530_92908C.1.pep
HLKYLSIELAPACSISPECDYLSLVYFLDASPVLETFILREYMEHCSVFDDASPMRLMAEHKKHKNLKNVTMIGFCSAK

SEQ ID NO: 197121 - protein, 92 aa, Oryza sativa
  unsure (1)..(92): unsure at all Xaa locations
  Clone ID: PAT_MRT4530_92909C.1.pep
YISSPIRGGGGVSGLHLITRKDGVVGAVIFSNKPERILSNSDDLTTQDINQYYGNVEKDXWTLYTPCYLYDTLAITQSVLFDNTRRKDDRLT

SEQ ID NO: 197122 - protein, 569 aa, Oryza sativa
  unsure (1)..(569): unsure at all Xaa locations
  Clone ID: PAT_MRT4530_9290C.1.pep
MALYLLFESASGYALFHAHGVDEIGQGVDAARASVLELQRFSKAVKLAGFXPFSSAVDALNQXMTDELRSFLELNLPKVKEGKKAKYSVGVMEPKVGSHISEATGIPCQCNEFVQELLRGVRLHFDHFIDQLKVVDFTFALVSTGHVAMWGWMVALCLLQFCTGAISVTAIPTDLEKAQLGLGHSYSRAKVKFNVNRVDNMVIQAIFLLDTLDKDINSFSMRVSLFFPLFYAMINSGGESLPPREWYSWHFPELVKIVNDNYVYSKIAKFVVNKSDLAEKDIPALADIIGDEDKAKEIVEAAKASMGNYNTICSIIELGARLISHAGSLSNLAKCAASTLQILGAEKALFRALKTRGNTPKYGLIFHSSFIGRASTRNKGRIARYLANKCSIASRIDCYSELNTSVFGQKLREQVEERLDFYDKGIAPRKNLDVMKAAINDMTNAVSEDGGEKEKNDTSAKKNKKKKSKAEADGEEMDLDKPAKVAAEETDPENENKKKKKHKLEEPQDQEMAVNGNLEQDETPKKKKKKKPEASEDVEPRTATEGKKRKKKKSKTLLIMSHDQLKCQG

SEQ ID NO: 197123 - protein, 642 aa, Oryza sativa
  Clone ID: PAT_MRT4530_92910C.1.pep
MDSKKLVPNSNNNSCLTGSQAPRKLPRKGDYPVQLRRNETFQDTKPPSTWICKNAACKAVLTADNTFCKRCSCCICHLFDDNKDPSLWLVCSSETGDRDCCESSCHIECALQHQKVGCVDLGQSIQLDGNYCCAACGKVIGILGFWKRQLMVAKDARRVDILCSRIYLSHRLLDGTTRFKEFHKIVEDAKAKLETEVGPLDGTSSKMARGIVGRLPVAADVQKLCSLAIDMADAWLKSNCKAETKQIDTLPAACRFRFEDITTSSLVVVLKEAASSQYHAIKGYKLWYWNSREQPSTRVPAIFPKDQRRILVSNLQPCTEYAFRIISFTEYGDLGHSECKCFTKSVEIIHKNMEHGAEGCSSTAKRDSKSRNGWSSGFQVHQLGKVLRKAWAEENGCPSEACKDEIEDSCCQSDSALHDKDQAAHVVSHELDLNESSVPDLNAEVVMPTESFRNENICSPGKNGLRKSNGSSDSDICAEGLVGEAPAMESRSQSRKQTSDLEQETYLEQETGADDSTLLISPPKHFSRRLGQLDDNYEYCVKVIRWLECSGHIEKDFRMKFLTWFSLRSTEQERRVVITFIRTLADDPSSLAGQLLDSFEEIVSSKKPRTGFCILMLCLAPSQPLPMMIYWNLNVCIWFTGK

SEQ ID NO: 197124 - protein, 97 aa, Oryza sativa
  Clone ID: PAT_MRT4530_92911C.1.pep
KKKKGFFWQGEIFPFFQNPPSPKGWAPLQKGSLSLPKQVREKLGKIPPYFFKFAKPRVPWIKAWEKLTPPPVVFENGKAKKIFFGSFCFPGWKAPFK

SEQ ID NO: 197125 - protein, 225 aa, Oryza sativa
  Clone ID: PAT_MRT4530_92912C.1.pep
MAARQQRLGHTSKNLVQQPWLNYKKCGELTYYGGNDNSGCKCEDVSIEDNAWARPPYQGPCRGSTPLPRRNPAAVRGLMRPPLLMVVVVVVSTAHRGTLMRFSLCRWLMLELLQVAKAQPCVLRRFTPASRRKCVAARGHGRQELRAGQYQLDDDEPLWLAVVRDITWGLRSFLAFLAEQPRQLKHLEWPGFRNTLRTATLTLILVAVFIVALSSVDAALCYILS

SEQ ID NO: 197126 - protein, 256 aa, Oryza sativa
  Clone ID: PAT_MRT4530_92913C.1.pep
MTGSVDTRSVVSKMTLALLEDSGWYQANYSMAEHLDWGRNQGTEFVISPCNLWKGAYRCNTTQLSGCTYNREAEGYCPIVSYSGDLPKWAQYFPQANKDGSCTDVNSARAPDRMLGEVRGSNSRLPLMGSGSHVRKLVDLFSSQGSMDLAQPSAQVMVYAKPMGSVNVKVDGLGLTAQQRFVMSNVVCTEESVIMHCAPSELSILQQLEAVVLVPNYNRLMPSGRTFLNFFNNANCAAAAKRSPLDLDSKVRRRWG

SEQ ID NO: 197127 - protein, 203 aa, Oryza sativa
  unsure (1)..(203): unsure at all Xaa locations
  Clone ID: PAT_MRT4530_92914C.1.pep
RLDGGKLSLGSQWMVDRTVIYGKGSGYLPDLKPLSXPELSRKRHRRTFTSSESRRVPRARAVLEHPAIVPCRRREALAWXAPSPHTHPPPRRRGPRRLRARLTRSSMPXHGXVPSSGAPPSRXSRSRLAFVTARTPARRTAVVAFAVVPLARRQRERGSGEKDLGATVLPLSPSHXFIRRRDDRSRPSDWTAQIRPASDRRRC

SEQ ID NO: 197128 - protein, 195 aa, Oryza sativa
  Clone ID: PAT_MRT4530_92915C.1.pep
LRLLMNEIMTGSVDTRSVVSKMTLALLEDSGWYQANYSMAEHLDWGRNQGTEFVISPCNLWKGAYRCNTTQLSGCTYNREAEGYCPIVSYSGDLPKWAQYFPQANKGGQSSLADYCTYYVAYSDGSCTDVNSARAPDRMLGEVRGSNSRCMASTLVRTGFVRGSMTQGNGCYQHRCTNNSLEVAVDGILKSCPQT

SEQ ID NO: 197129 - protein, 157 aa, Oryza sativa
  Clone ID: PAT_MRT4530_92916C.1.pep
KPMGSVNVKVDGLGLTAQQRFVMSNVVCDGGVCDNGKCEFRCSDYAGYTCQKGSAILPSLSMCHDVLVRDADGQHCAPSELSILQQLEAVVLVPNYNRLMPSGRTFLNFFNNANCAAAAKRLACWISIQRCDEDGDNRLRVCYSACELYNTACGGGS

SEQ ID NO: 197130 - protein, 77 aa, Oryza sativa
  Clone ID: PAT_MRT4530_92917C.1.pep
SAHDMIYLSFRTLISTSCTASGVIVLVLAWERVPRWRNSRRDKVVTGHNVVKSIKSLRKASVSFQSSLFTLCSPLEP

SEQ ID NO: 197131 - protein, 59 aa, Oryza sativa
  unsure (1)..(59): unsure at all Xaa locations
  Clone ID: PAT_MRT4530_92918C.1.pep
ISSSSVYEQPLAQSSQWSCLRIQWXKXQLISWGPKQCYDFCRSCIRICXGLAWPRPGAL

SEQ ID NO: 197132 - protein, 637 aa, Oryza sativa
  Clone ID: PAT_MRT4530_92919C.1.pep
MEIWWPEWDTYAEAFSRACNFSSGLIKLGHQRDSRAAIFADTRTEWIIAAQGCFRQNLTVVTIYASLGEDALVHSLNEMAKMTSELSPFFSFFCGEDHPHQDESTGLVHEGGLPHWETQVSTLICDSKQLKKLPAISSKLQSVKHVIYIEDEPVEAEVLNQMKHWTTFSFGEVEELGKTSHTDARLPSSTDTAVIMYTSGSTGLPKVYTHDEPTILLLSLNKSLSDGVMITHGNMVATTAAVMTIIPELGTGDVYLAYLPLAHVFELAAETVMLASGAAIGYGSALTMTDTSNKIKKGTKGDVSALKPTLMISVPAILDRIRDAVFKKVGEKGGLTKKLFDIAYKRNLGAIEGSWFGSWAPERMIWDNLIFKPIRSMLVLNYLCCSVPVGQGYGLTETCAGAAFSEWDDTSVGRVGPPLPCCYVKLVSWEEGGYKISDSPMPRGEVVVGGYSITKGYFNNEAKTNEVYKVDERGMRWFYTGDIGQFHPDGCLEIIDRKKDIVKLQHGEYVSLGKVESALTTSNYVDSIMVYADPFHNYCVALVVPAHQALEQWAQNSGINYKNFDELCHNDQAIKEVQQSLSKAAKAARLEKFEIPAKIVLLPEPWTPESGLVTAALKLKREQIKTKFKDDLGKLYH

SEQ ID NO: 197133 - protein, 217 aa, Oryza sativa
  Clone ID: PAT_MRT4530_9291C.1.pep
MTSVVHDVSGNHGADERQKQQRQGEPEDQQEASVTSTDSHTMVATPSTDYATPYAHHDMAHAMGQIAYANIDPYYGSLYAAYGGQPMMHPPLVGMHPAGLPLPTDAIEEPVYVNAKQYNAILRRRQSRAKAESEKKLVKGRKPYLHESRHQHALKRARGAGGRFLNSKSDDKEEHSDSSSRDKQDGVAPRDSGQPSTSPSSKGASSAKQNKKSKTSN

SEQ ID NO: 197134 - protein, 76 aa, Oryza sativa
  Clone ID: PAT_MRT4530_92920C.1.pep
MVRRRPANRPLVSLPSSFVACPPRSPLASPPQFPPISPQILLIFACFLIRLTLSRRRAPRPPPAPAVGFTPAILRR

SEQ ID NO: 197135 - protein, 302 aa, Oryza sativa
  unsure (1)..(302): unsure at all Xaa locations
  Clone ID: PAT_MRT4530_92921C.1.pep
MTFKFHRYQVLGALGTLFCRSNXSADVRLAGGWLFRQLLPHGEEEFTAFHLKWLKDSHKDYSIKLLDESGGCWRDLLVPIVKEAWKNCKKAIETSSPPKGSKSAILPLDSCSFGGDSSIAIAERIYEMVKGFVLQRQVILFCLGETLTDQPPIFSPTDLPVNNRATLAGFDGSVPKPGLEVNLVDAVPCRIAFERGKERHFCFLALSNGTSGWILLLEELPLKEKRHASANPEDAGGTCLFLLLKKPGRIARKLAIETSSPPKGSKSAILPLDSCSFGGDSSIAIAERIYEMVKVCKYFHFF

SEQ ID NO: 197136 - protein, 400 aa, Oryza sativa
  unsure (1)..(400): unsure at all Xaa locations
  Clone ID: PAT_MRT4530_92922C.1.pep
MSIVPKETIEVIGQSVGIANLPADVSAALAPDVEYRLREIMQEAIKCMRHAKRTVLTADDVDSALSLRNVEPVYGFASGDPLRFKRAVGHKDLFYIDDREXEIIEAPLPKAPLDTAVVAHWLAIEGVQPAIPENPPVDAIVAPTENKRTEHGKDDGLPVDIKLPVKHVLSRELQMYFDKIAELTMSRSETSVFREALVSLSRDSGLHPLVPYFSYFIADEVVILLLESILMCKLALPXVAMLSDLHQLMPSIITCMVAKRLGHRLSDNHWELRDFSANLVGSVCRRFGHAYHNIQTRVTRTLVQGFIDPAPMPGTMDGFSTQLPHPSMMQSAFSWQLAESHASGLIRRDQGSNHTQRVSTVLRLAWKEDQNAGHLLSSLYEVFGEAIFSFVQPPEISFFL

SEQ ID NO: 197137 - protein, 49 aa, Oryza sativa
  Clone ID: PAT_MRT4530_92923C.1.pep
SMDRVCTSRTCRLALALLIVQETTMTLMVKLYVISLRHGVGETLAEARA

SEQ ID NO: 197138 - protein, 102 aa, Oryza sativa
  Clone ID: PAT_MRT4530_92924C.1.pep
MTLFFNAKSCGAELRYLSATSSNAECRATVDVRLSQRANLQDQQDLISIRKAQWAPVCVALRPVQYRSMSMWLAFSLQDMWALKDKWKSSMSSPATEPNAPK

SEQ ID NO: 197139 - protein, 355 aa, Oryza sativa
  Clone ID: PAT_MRT4530_92925C.1.pep
MYSSSSMKPSSPSQANQDADDAKTYKELYQRCTDLVSSWPSRQGLSYLQLFRHEKGWYNGVTPLVGTMVADELFAARPSDIVVPTLPKSGTTWIKALLYATVHRREHPADAAGDHPFNSLGPHECVKFLEYHLYRADEAPDLDALPDPRLFATHAPFDLLPRAVVAAAPPSGCKVVYVCRDPKDTLVSLLQFVNEYKSRNGRELVAVDAAVGFFCDGVSPFGPYWEHVLGYWRAHRERPERVLFLRYEEMKRDPAGHVRRLAEFAGVPFTSPEEDGGAVDAIVRLCSFDNMVGLEATKGGRTQLTTTTVPNSAFFRRGEVGDWANHLSPEMAQRIDAITEAKFAGFGLAPSLIEL

SEQ ID NO: 197140 - protein, 299 aa, Oryza sativa
  Clone ID: PAT_MRT4530_92926C.1.pep
MTTRSNGEHHHGPPSYQQRRPHYGGGYGGGSASFRGCCCCIFLLLTFLALLALAVALVVVLVVKPRKPQFDLNQVSVQYLLVTPPSSAASAVGGTVAAAVPAAAYLSLNITLLFTAVNPNKVGIRYGATAFDVMYHGVPLGVAAVPGFEQPAHSTRLLQTRVIVDRFNVLQADAQDLVRDAAISDRVDLRITGDVGAKILVLGFSSPKVQWWGRGVLENLRLPGNEGRGLGDKPFVNADLQSCGRTFWRRNVALPCCVECQTAGIYRRVVLMPTGECLEPGYKGGSPDTAPGLDFPGLT

SEQ ID NO: 197141 - protein, 140 aa, Oryza sativa
  Clone ID: PAT_MRT4530_92927C.1.pep
MISAKRLVQLAKWQRMAALGRKRIMGKAQETEECSTSVAVKGHCVMYTADGRRFEVPLAYLGTVVFSELLRMSQEEFGFTSDGRIVLPCDAAEMEYAMCLLKRNPSVEVVDALLSSMLIRCHCTGSMVPTVGVNQQISCL

SEQ ID NO: 197142 - protein, 99 aa, Oryza sativa
  Clone ID: PAT_MRT4530_92928C.1.pep
MAEADDAWIEILLRLLGTTLGFIQLLQPSIISNLRSHFIFKSFVLAAAIQTQDFWSVVDAITGEVCYNSTIHVGSDWFSPLSWSVALAAAVVSEVAWTT

SEQ ID NO: 197143 - protein, 205 aa, Oryza sativa
  unsure (1)..(205): unsure at all Xaa locations
  Clone ID: PAT_MRT4530_92929C.1.pep
WTWPSQSSSTGPYPPPTPPLTLSLSQIHRLLHAQDRHRRLHRPPPPPRPQRCRLLLPRRSTXSFTDHGRLTSSSPDLRPAAVDLLHAATSSGPAQDPASPTATASLHAVPEPGASLHAVPEPGAAQDRRPRAXTSLHSVPEPGAAQDRRPRARHLPPRRPRAWRRPRPPSPSPAPSSTXVPEPGAAQDCRPRAHVNLLTEPATVQ

SEQ ID NO: 197144 - protein, 169 aa, Oryza sativa
  Clone ID: PAT_MRT4530_9292C.1.pep
MAATADNGEKMILLISSDGERFELSEAAASQSKTLSHMIEDDCTDNGVPLPNVTAVVLAKVVEYFKKHAAVTPKPATEAVAADKAKREEELKSFDAEFVDVDRTMVFELILAANFLNAQDLLDLTCQHAADLIKDMSVEEVREVFNITNDFTPEEEAEVRKENAWAFDN

SEQ ID NO: 197145 - protein, 204 aa, Oryza sativa
  Clone ID: PAT_MRT4530_92930C.1.pep
MEVVPGLEWDDVELDVYEDPNPVKDVVGQTLVDNKEIGKSEVPRVLKSHNSKSMGDQKEKWMVSTFRGGFFWLDFTDIHAIYRWEKMDVNFVGAWCLLQYMDAEKTKQSIEYLDPTRICQTQHTVTLSLNSKVNGRYRVNPEDLPRIEHRTNFDDTSITNVQRDLYLFIHRRRYHIKRRFFDLDSILATSNEYKALQEWSNAMP

SEQ ID NO: 197146 - protein, 161 aa, Oryza sativa
  Clone ID: PAT_MRT4530_92931C.1.pep
YRTYSTSRLTVKPPGSGCPVLSVKDRVRALAVCQAWKDQMDPTKWPLDGLELVGSQEAHLRIAGWIRATQPALNALAMRYFDQPQLLVTLSSIGARTALTELSLSGEAADILDSLVPVCLFSKLKRLSLACRYPPEDDFEGRLDLAALQPLSALEHLRCCS

SEQ ID NO: 197147 - protein, 231 aa, Oryza sativa
  Clone ID: PAT_MRT4530_92932C.1.pep
MCAYMVEELQVDIDAADELGITQLDEAGADVKGVGTFTPLIVAATEGLTDFYKCLLEGGADPDVPDKVDPFFKIRPADLKLEGNRAYMRKDYLTAAKLYNMADGRRQQAAAATAAALSGVGGSSSNNSSTSTITRRRHRLHHRQHVTAVACSSNTTSTAAATTSKEDCGTRILRPDWPKGCYREGTAHMFMKDYEKACNAFLDGFKLDPANIEIENALREALKSLKASRAA

SEQ ID NO: 197148 - protein, 579 aa, Oryza sativa
  Clone ID: PAT_MRT4530_92933C.1.pep
MDRRTRYQTYEDSTESVGAGYIPPGAQGPLVAQLRAPYRGQEVTIGGGALHLDQAVDAREIRMVQHEEDRIQVLPGFITELSHRRSAPRGVVSDTEIPVSVFTGKPHFPSSLQQRLSINCVLVFVSIQTAQAEARNLERAEREREKERARSAAMDEWEELAWRVPETLMLVSCEMEATRLIEVAHSNLQVRGTLFRRIHLGMPAAIAMNLFGDPAAEGVIPTEILEEARREISQSGARHGKTRHVFARYVVAHLGVQQDDPAYRSWEVHHQDAIRFTDKALEKVSEAASHAEAAKDAVDIAETLLSQPQPPLQLWAEWTSAAEKLVDQAALEATLALDEVLRARQSVALEFFDAVAILRRGRAPPAAVDKWWQEIERTLPGAFLLVATGGLKALRLIRDAHGKLQERVAMLRVNLRQETPAAAVPVEGNSAYQLDPEGICPTVALEDARREISQSTVLHAKTRHVLARYVAHLGAQQDDPAYRSWDVHHQEAVDHISKALKRVIDTVSNAEAGKVALVIMGSVAYGCPLWDVWASEAEKFTAVAALEATMATNEMRCAQEAVAQELSDAWTILLSRRRN

SEQ ID NO: 197149 - protein, 192 aa, Oryza sativa
  unsure (1)..(192): unsure at all Xaa locations
  Clone ID: PAT_MRT4530_92934C.1.pep
KIRSTSIVRQKNQAKKEKNQICLIQKKKREKKAGKRKTKRKKKGDKKKKKTDRSHPKKTGKRKIKTKRKKKRXKEKKLIGSIKKTRVKKPEKGKKKQICPIQKKGENKGKEKRIRLRLRGKKGRKKKKKSIXSKKKELYRKKSDERKNREKKKRAKKNRSDSKKKKSGEKTRRKRSGEKAGQKKKNPIMWTQ

SEQ ID NO: 197150 - protein, 90 aa, Oryza sativa
  unsure (1)..(90): unsure at all Xaa locations
  Clone ID: PAT_MRT4530_92935C.1.pep
ADYVSYSQYFANSTHNISVRGASSXAGTAKVDLVIGGVTVGSFNFTGKTPXTVQTLSKITHATGDQEIKLALTSDDGTWDAYVDFIEFSL

SEQ ID NO: 197151 - protein, 81 aa, Oryza sativa
  Clone ID: PAT_MRT4530_92936C.1.pep
LSIFFFFLTKSVLFYLPQHKCNPPDRSIHGATGPPGRGGTDNIQDVGASRSRFRASRRWGAGRSGRGPCKGPCGTPAGDPR

SEQ ID NO: 197152 - protein, 671 aa, Oryza sativa
  Clone ID: PAT_MRT4530_92937C.1.pep
MDFGPCNETLDTELLHVLTSGDEVRMADLLGRERRGHGHSLSQVAIRVDDDDDGRAPAGASRLLGVTTGNGNTALHVAATRGHAALAALVCATAPALAATRNRFLDTPLHCAAKSGHRDVAACLLSEMLRAGGAASAALPLRRATNCLGATALHEAVRNGHAGVVALLMAEAPELASVANDGGVSPLYLAATVGSVDIVRALLHPLPDGTPSPASAAGPDGRTALHSAATTSKEPSLALVCDIQGSFPLHVAAVMGSVRIVVELIQKCPNNYNDLVDDRGRNFLHCAVEHNKESIVRYICRDDRFGILMNAMDNEGNTPLHLAAEYGHPRMVSLLLETMSVDVAITNRDGLTAADLAYRHLQPGLHYFLNPRAVVKNLFYCTRAPVTLEGDHARTGIPSAMEDADAPKDSGGVTSTGTVASVLIATVTFAAALTVPGGYVADDHPNAGTAASAGRFAFRAFAVSDTMAFLCSIVGTCLLVVGEAREVRPSRGRLRAYQGSAWALVTAGAQFMVAAFAFGLQVALGGGADSRWLVVFVHALCSASVLLCFPGIWAPFCLGKACVDLEPATRAWRSPKCAAASARKEACHAGTRRSYNWRFSFFQRFRSASTWLALGLLGHGRRPPLPALILAMGATAGSLPPNQRLPIANASLPQLPSPAQQQLHGGSLVDF

SEQ ID NO: 197153 - protein, 67 aa, Oryza sativa
  Clone ID: PAT_MRT4530_92938C.1.pep
ALVSGMNKFLKSLNITFRRDPTNYRPRINKLNSMKDKEQKEQGNYFYLHDDEDEEDKSSKKKHEKKK

SEQ ID NO: 197154 - protein, 186 aa, Oryza sativa
  Clone ID: PAT_MRT4530_92939C.1.pep
MMACRALALLPLPAPSRLPRPRAASLARLDAARRRASASLLVRCCANPAGPGGQEDPPQDAVLKAISQVANSKGRVAQTTNVVMGGTVTDDATDEWLVLDKQVNTYPTVRGFTAIGTGGDDFVQAMVVAVESVLEEQIPKAQISHKVSSKGKYVSVKIGPIPVVSSEQVQAVYNAMKKDERMKFFL

SEQ ID NO: 197155 - protein, 70 aa, Oryza sativa
  unsure (1)..(70): unsure at all Xaa locations
  Clone ID: PAT_MRT4530_9293C.1.pep
DRTGIFVLTHAPVNTYHPKTXAAWELFLRGFHGSFPPAEGGDGVAVVRGALDAAQRSPRCRSCRSGGRAR

SEQ ID NO: 197156 - protein, 62 aa, Oryza sativa
  unsure (1)..(62): unsure at all Xaa locations
  Clone ID: PAT_MRT4530_92940C.1.pep
KSAPWCRQSPPRSSRVACLSSAPAVLHGPSLRLPHVRRALATRSGSAHASAHASAHGXAHAS

SEQ ID NO: 197157 - protein, 106 aa, Oryza sativa
  unsure (1)..(106): unsure at all Xaa locations
  Clone ID: PAT_MRT4530_92941C.1.pep
GSSRPRGSGDGVYSAAATTLPYEDADGLIKYFAVDDSRGRVFVFSVAVDALLELEPRVCNEPPITALLVYLSPRHTSXFLFTGHADGSIAAHRLVESSECGNWWRI

SEQ ID NO: 197158 - protein, 64 aa, Oryza sativa
  Clone ID: PAT_MRT4530_92942C.1.pep
VIWAWPDSGVVCSTYQPVLECVYSILSIFALPIWVNTFVRFLRLDYNLPAPSPLWFAKADAGVI

SEQ ID NO: 197159 - protein, 386 aa, Oryza sativa
  Clone ID: PAT_MRT4530_92943C.1.pep
MGFVRALFLLAMVCVAAHAKDYPKEEGAKAEGPAAASGGGGGSTHDVVKLGGKGDGKTDSTKAVNEAWTAACAGTGKQTIVVPKGDFLTGPLNFTGPCKGDIVIQLDGNLLGSTDLALFKSNWIEIMRLESLEISGKGKLDGQGAAVWSKNSCAKKYDCKILPNTLVLDFVNNGLISGISLVNPKFFHMNVFKSKNITIKDVTITAPGDSPNTDGIHMGDSSKISIIDTVIGTGDDCISIGPGTEGVNISGVTCGPGHGISVGSLGRYKDEKDVTDVTVKNCVLKKSTNGVRIKSYEDAASYCPNKICTANGNSKVTIKDITFKNITGTSSTPEAVSLLCSDKLPCTGVTLNDIKVEYSGTNNKTMAVCKNAKGTATGCLKELSCF

SEQ ID NO: 197160 - protein, 77 aa, Oryza sativa
  Clone ID: PAT_MRT4530_92944C.1.pep
HFRVRLFGCFRAAVDRATHVSFLQDTPDHFSATFPFEYSRLVCSPSTIYALRLELMNISTIGTCCCVPDQSIADHNV

SEQ ID NO: 197161 - protein, 451 aa, Oryza sativa
  Clone ID: PAT_MRT4530_92945C.1.pep
MPQDIDVGQNVEVDDLLDALLMEKESNPDAKTRPANSITVFDVDKACATARNASNTMLEVRLFLAAVFSFSSFTSSSNYVIRECLGSVLDLKTVATIDWSMKTPRLQYYTSSMVDDVFTRLGEDIKVKPWAHTVYGKNGIPDVQLDKIDYSFIPDLKKKHKHKAPNAKRYKIGKLGKKEKCPFEEQNDSFVRVPNMRNMLASHLDDLDLPTDMAIKVDHIIEKYQLSWRNAVEDITSKEMRHCAQELEELFGLEARNTINKDESSKRVVVDLGTFKFTEDAFVDVFQPHGWMSNWVVQALAIIAEYRKLLASEIWFHKDNLAMVDLTKTDSEKSDEERDTGTRTYIETDGRANGEESAGDSDRKGDASIKEESDATASDRDARKRKHSETESEIDGRANARAPRTASASRDSIPKKTRIVESINKNVEVHLAYPLEGIGSTVILLIDQSVN

SEQ ID NO: 197162 - protein, 53 aa, Oryza sativa
  Clone ID: PAT_MRT4530_92946C.1.pep
RRGSLEDYESLTTFLSVYRFFSFSLFYIMFLVIFFFFFFFFPPHCLMCQPFIP

SEQ ID NO: 197163 - protein, 412 aa, Oryza sativa
  Clone ID: PAT_MRT4530_92947C.1.pep
MGFVRALFLLAMVCVAAHAKDYPKEEGAKAEGPAAASGGGGGSTHDVVKLGGKGDGKTDSTKAVNEAWTAACAGTGKQTIVVPKGDFLTGPLNFTGPCKGDIVIQLDGNLLGSTDLALFKSNWIEIMRLESLEISGKGKLDGQGAAVWSKNSCAKKYDCKILPNTLVLDFVNNGLISGISLVNPKFFHMNVFKSKNITIKDVTITAPGDSPNTDGIHMGDSSKISIIDTVIGTGDDCISIGPGTEGVNISGVTCGPGHGISVGSLGRYKDEKDVTDVTVKNCVLKKSTNGVRIKSYEDAASVLTASKFTYENIKMEDVANPIIIDMKYCPNKICTANGNSKVTIKDITFKNITGTSSTPEAVSLLCSDKLPCTGVTLNDIKVEYSGTNNKTMAVCKNAKGTATGCLKELSCF

SEQ ID NO: 197164 - protein, 55 aa, Oryza sativa
  Clone ID: PAT_MRT4530_92948C.1.pep
VKELKNGPLAMFSMLGFFVQAIVTGKGPIKNLFDQVANPVAKKAWENATNFVPGK

SEQ ID NO: 197165 - protein, 94 aa, Oryza sativa
  Clone ID: PAT_MRT4530_92949C.1.pep
NKILKSRGSSSHPTHCHHRTTRRVSLTAAKSPIDQEQVGEKKKKKKKKKRKKKENKGKKDGQIRGEKTGDDRALTSAGPDPRSPCSSSLRALPL

SEQ ID NO: 197166 - protein, 81 aa, Oryza sativa
  unsure (1)..(81): unsure at all Xaa locations
  Clone ID: PAT_MRT4530_9294C.1.pep
GXXEDGRLGAXKFSERQPNGRAXXGSDDKDYKEPPXAPLFXPGDVKSWSLYRAGIAEFMATFLFLYITVLTVMGVNNSPSK

SEQ ID NO: 197167 - protein, 2020 aa, Oryza sativa
  Clone ID: PAT_MRT4530_92950C.1.pep
MAKPAKAHDLSPSMSGDDGEPNPRRRARTPPPPPRQSPRREKALERAEGSATSTPTGGGEGRRDGERRLLVYGDGSTPQGALQAAGALLRHPPVAHDPESPAQRWLDDVAKLVMTARQRLDAGGRSSATKASGAATTGSASSRRRARRAAAAVRHSAATPSSTPPTREDLLGEPDARISIERRRNGRRAPHATEGASSSGVSPHHGRGDQPSVPPVGGVGCRAFVASLRNVRWPPRFRPTIAEKYDGSVNPAEFPQVYTTGIEAAGGDDRVMANFFPMALKGQARGWLMNLPPASVHSWEDLCQQFTMNFQGTYPRPGEEADLHAVQRRDDESLRSYIQRFCQVRNTIPCIPAHAVIYAFRGGVRHNRMLEKIASKELQTTAELFQLADRVARKEEAWTWNPSGSGVAASAAPGSAAQIGRRDRRRKKRSAHTDDEGHVLAVEGASRATRKGRPAGGKKNEAGAPNRERPTGKWCTVHNTSLHDLADCRAVKSLAERTRKWEEERRQERREGKSPAVPSGNRRSEAKQKAPAEDIDDGDDDLGFQEPGATIATVDGGACAHVSRRSFKAMKRELLAAAPTHEATCRARWSEVALTFDQTDHPPCVARGGQIAMVVSLTVCNVKLGRVLIDGGAALNILSPAAFDAIKAPGMVLRPSQPIIGVTPGHTWPLGHIDLPVTFGGSANFRTERVNFDVADLSLPYNAVLGRPALVKFMAAVHYAYLQMKMPGPGGPISVHGDLKVALACLEQRADHLAAASKPEGGDERLGASAPATPRQRMITGDEVPEDALVSFLRANADVFAWRPADMLGVPREVIEHRLAVRPGARPVRQKVRRQAPERQAFIREEVARLLEAGFIREVIHPEWLANPVVVPKANGKLRMCIDYTDLNKACPKDPYPLPRIDQIVDSTAGCDLLCFLDAYSGYHQIRMAREDEEKTAFITPIGTYCYTTMPFGLKNAGPTFQRTTRISLGNQLGRNVEAYVDDLVVKTRNQEMLLSDLAETFESLRSARIKLNPDKCVFGVPAGKLLGFLVSARGIEANPEKIRAIERMRPPSKLRDVQCVTGCMAALSRFISRLGEKALPLFKLLKRFGPFTWTEEAENALTQLKAYLSSPPVQPLLLYLAATPQVVSVALVVERDENNSHFTLPHPVPTWPGREQGGEAPEPNGGPRPPTAGVGPLPACQTVLGAPDPQEGPEATVGRPHLSPFDPEANPVLTRPGKEQGEEAPEPNGGLRPLTTGVGPLPAFPTTPGAPDPQDGPEATVGRPPLLSSDPEVISTEDKCAPRGCLDEECPRDAAPSEEDRPHRKVQRPVYFVSEALRDAKTRYPQAQKMLYAILMASRKLRHYFQAHRVTVVTSYPLGQILHNREGTGRVVKWAIELSEFDLHFEPRHAIKSQALADFVAEWTPAPEPVSIPEASTDPSQLPHTAHWVMQFDGSLSLQGAGAGVTLTSPSGDVLRYLVRLDFRATNNMAVYEGLLAGLRVAAGLGIRRLLVLGDSQLVINQVCKEYRCSDPQMDAYVRQVRRMECHFDGIELRHVPRRDNMIADELSRLASSRAQTPPGAFEERLAQPSARPDPLGETDAPDRPPRPVGVQASGPEGSAPNSLRLIAWIAEIQAYLTDKTLPEDREGSERVHRISKRYVLVEGTLYRRAANGILLKCIPREQGVVLLADIHEGECGAHSASRTLVGKAFRQGFYWPTALNDAVDLVRRCRACQFHAKQIHQPAQALQTIPLSWPFAVWGLDILGPFRRAPGGFEYLYVAIDRFTKWPEAYPVVKIDKHSALKFIKGITARFGVPNRIITDNGTQFTSELFGDYCEDMGIKLCFASPAHPRSNGQVERANAEILKGLKTKTFNILKKHGDSWIEELPAVLWANRTTPSRATGETPFFLVYGAEAVLPSELTLRSPRATIYCEADQNQLRRDDLDYLEERRRRAALRAARYQQSLRRYHQRHVRARSLCVDDLVLRHVQTRAGLSKLSPMWEGPYRVVGVPRPGSIRLATGDGTELPNPWNIEHLGRFYP

SEQ ID NO: 197168 - protein, 67 aa, Oryza sativa
  Clone ID: PAT_MRT4530_92951C.1.pep
CQYMLCCEYLCLCPVIHEIRGQMNIVLVCFFMDIAELVNHFVFAIETLKALMPLIFIEKAVNWVDFF

SEQ ID NO: 197169 - protein, 383 aa, Oryza sativa
  Clone ID: PAT_MRT4530_92952C.1.pep
MAEPAKAHDLSPSMSGDDGEPNPRRRARTPPPPPRQSPRRDKALERAEGSATSTPTGGGEGRFRPTIAEKYDGSVNPAEFLQVYTTGIEAAGGDDRVMANFFPMALKGQARGWLMNLPPASVHSWEDLCQQFTMNFQGTYPRPGEEADLHAVQRRDDESLRSYIQRFCQVRNTIPCIPAHAVIYAFRGGVRHNRMLEKIASKEPQTTAELFQLADRVARKEEAWTWNPSGSGVAASAAPGSAAQIGRRDRRRKKRSAHTDDEGHVLAVEGASRATRKGRPAGGKKNEAGAPNRERPTGKWCTVHNTSLHDLADCRAVKSLAERTRKWEEETRQERREGKSPAVPSGNRRSEAKQKAPAEDIDDGDDDLGFQEPGATIATVDGG

SEQ ID NO: 197170 - protein, 775 aa, Oryza sativa
  Clone ID: PAT_MRT4530_92953C.1.pep
MAALGHTALGRYRRREAKARVATGGLTHASPHPVRMRASKHSSRAGAGVLAPGDGTGLCGCFSKLSHSFVCAKLFLFSPMAEQAKAHNLSPSVSGDNGEPNPRRRARTPSPPPRQSPRREEALERVEGSATSTSTGDGEGRRDGERRLLVYGDGSTPQGALQAAGALLRHPPIVPDPESPAQRWLDDVANLVMTAEGAASGGCCSPFGRHSFVSASDLGRSAWGAGCPHQYRAPAAFVASLRNIRWPPRFQPTIAEKYDGSVNPAEFLQVYTTGIEAAGGDDRAHIRAQVKKRTYMQSSKGMMSHFAHTFSGSVKGGVRHNRMLENIASKEPHFGRPRAFRWPPERGGLRATKRRKPTLPDLGYLEERRWRAALRAARYQQSLRRYHQRYVRARSLCVDDLVLRRVQTRAGLSKLSPMWEGPYRVIGVPRPGSVRLATGDGTELPNPWNIEHLRRFYPYIFDFLKAIKSAYNKKGARRPRKKKEKLLRLAEAWGLTPTCLGAPDPQDGPEATAGRPRLSPSDPEVVGTEAECAPRGLSDGERPGDVAPDEEDQPRRKVQRPVYFVSEALRDAETRYLQAQKMLYAILITSRKLRHYFQAHRVTVVTSYPLGQILYNREGTGLVVKWAIELSEFDLRFEPSHAIKSQALADFVVEWTPAPELVSAPEASSSPSQLPHTALWVMGVGPEGDTAALLFVSPRGRTAPVSAQRAEAPRPLVGFAPRIWGGLTHASPHPVRMRASKHSSLAGASVLAPGDGTLVPTAMFPRRACFRRKWR

SEQ ID NO: 197171 - protein, 43 aa, Oryza sativa
  unsure (1)..(43): unsure at all Xaa locations
  Clone ID: PAT_MRT4530_92954C.1.pep
AFGSCLVWSCXRVPFSLCXWLCXWFRLAVCGLSFGLAGSPAGR

SEQ ID NO: 197172 - protein, 1937 aa, Oryza sativa
  unsure (1)..(1937): unsure at all Xaa locations
  Clone ID: PAT_MRT4530_92955C.1.pep
MAEPAKAHDLSPSMSGDDGEPNPRRRARTPPPPPRQSPRREKALERAEGSATSTPTGGGEGRRDGERRLLVYGDGSTPQGALQAAGALLRHPPVAHDPESPAQRWLDDVAKLVMTARQRLDAGGRSSATKASGAATTGSASSRRRARRAAAAVRHSAATPSSTPPTQEDLRGEPDARISIERRRNGRRAPHATEGASSSGVSPHHGRGDQPSVPPVGGVGCRAFVASLRNVRWPPRFRPTIAEKYDGSVNPAEFLQVYTTGIEAAGGDDRVMANFFPMALKGQARGWLMNLPPASVHSWEDLCQQFTMNFQGTYPRPGEEADLHAVQRRDDESLRSYIQRFCQVRNTIPCIPAHAVIYAFRGASAAPGSAAQIGRRDRRRKKRSAHTDDEGHVLAVEGASRATRKGRPAGGKKNEAGAPNRERPTGKWCTVHNTSLHDLADCRAVKSLAERTRKWEEERRQERREGKSPAVPSGNRRSEAKQKASAEDIDDGDDDLGFQEPGATIATVDGGACAHVSRRSFKAMKRELLAAAPTHEATCRARWSEVALTFDQTDHPPCVARGGQIAMVVSPTVCNVKLGRVLIDGGAALNILSPAAFDAIKAPGMVLRPSQPIIGHIDLPVTFGGSANFRTERVNFDVADLSLPYNAVLGRPALVKFMAAVHYAYLQMKMPGPGGPISVHGDLKVTLACLEQRADHLAAASKPEGGDERLGASAPATPRQRMITGDEVPEDALVSFLRANADVFAWRPADMPGVPREVIEHRLAVRPGARPVRQKVRRQAPKRQAFIREEVARLLEAGFIREVIHPEWLANPVVVPKANGKLRMCIDYTDLNKACPKDPYPLPRIDQIVDSTAGCDLLCFLDAYSGYHQIRMAREDEEKTAFITPIGTYCYTTMPFGLKNAGPTFQRTTRISLGNQLGRNVEAYVDDLVVKTRNQEMLLSDLAETFESLRSARIKLNPDKCVFGVPAGKLLGFLVSARGIEANPEKIRAIERMRPPXKLRDVQCVTGXENALTQLKAYLSSPPVLVAPEPDEPLLLYLAATPQVVSAALVVERDENNSHFTLPHPVPTWPGRERGGEAPEPNGGPRPPTTGVGPLPACQTVLGAPDPQEGPEATVGRPHLSPFDPEANPVLTRPGKEQGEEAPEPNGGLRPLTTGVGPLPAFPTTPGAPDPQDGPEATVGRPPLLSSDPEVISTEDKCAPQGCLDEECPRDAAPSEEDRPHRKVQRPVYFVSEALRDAKTRYPQAQKMLYAILMASRKLRHYFQAYRVTVVTSYPLGQILHNREGTGRVVKWAIELSEFDLHFEPRHAIKSQALADFVAEWTPAPEPVSIPEASTDPSQLPHTAHWVMQFDGSLSLQGAGAGVTLTSPSGDVLRYLVRLDFRATNNMAEYEGLLAGLRVAAGLGIRRLLVLGDSQLVVNQVCKEYRCSDPQMDAYVRQVRRMERHFGGIELRHVPRRDNMIADELSRLASSRAQTPPGAFEERLAQPSARPDPLGETDAPDRPPRPVGVQASGPEGSAPNSLRLIAWIAEIQAYLTDKTLPEDREGSERVHRISKRYVLVEGTLYRRAANGILLKCIPREQGVVLLADIHEGECGAHSASRTLVGKAFRQGFYWPTALNDAVDLVRRCRACQFHAKQIHQPAQALQTIPLSWPFAVWGLDILGLFRRAPGGFEYLYVAIDRFTKWPEAYPVVKIDKHSALKFIKGITARFGVPNRIITDNGTQFTSELFGDYCEDMGIKLCFASPAHPRSNGQVERANAEILKGLKTKTFNILKKHGDSWIEELPAVLWANRTTPSRATGETPFFLVYGAEAVLPSELTLRSPRATMYCEADQNQLRRDDLDYLEERRRRAALRAARYQQSLRRYHQRHVRARSLCVDDLVLRRVQTRAGLSKLSPMWEGPYRVVGVPRPGSIRLATGDGTELPNPWNIEHLRRFYP

SEQ ID NO: 197173 - protein, 146 aa, Oryza sativa
  Clone ID: PAT_MRT4530_92956C.1.pep
MAAAAAARCSRGGRRRRRPWWGGRGTGCEPRVVAVEEDAAQREREEVRAQEAAGVDDERGATPCRRSGTLREATRREAAEDGREHVVRQRRRHIHRLSTSSSLDYRGKLGNSFSPMQLIWAQPLKPREVVVARCQVVSLPVNGPAH

SEQ ID NO: 197174 - protein, 969 aa, Oryza sativa
  Clone ID: PAT_MRT4530_92957C.1.pep
MTDVTGLTPVMSSADSHDSTSHLLPAKVETRNQEMLLSDLAETFESLRSARIKLNPDKCVFGVPAGKLLGFLVSARGIEANPEKIRAIERMRPPANLGMCNASPRAGRRGSRAERWPKAPDDRSWPSARLSDGARSPRPQEGPEATVGRPHLSPFDPEANPVLTRPGKEQGEEAPEPNGGLRPLTTGVGPLPAFPTTPGAPDPQDGPEATVGRPSLLSSDPEVISTEDKCAPRGCLDEECPRDAAPSKEDRPHRKVQRPVYFVNEALRDAKTRYPQAQKMLYAILMASRKLRHYFQAHRVTVVTSYPLGQILHNREGTGRVVKWAIELSEFDLHFEPRHAIKSQALADFVAEWTPAPEPVSIPEASTDPSQLPHTAHWVMQFDGSLSLQGAGAGVTLTSPSGDVLRYLVRLDFRATNNMAEYEGLLAGLRVAAGLGIRRLLVLGDSQLVVNQVCKEYRCSDPQMDAYVRQVRRMERHFDGIELRHVPRRDNMIADELSRLASSRAQIPPGAFEERLAQPSARPDPLGETDAPDRPPRPVGVQASGPEGSAPNSLRLIAWIAEIQAYLTDKTLPEDREGSERVHRISKRYVLVEGTLYRRAANGILLKCIPREQGVVLLADIHEGECGAHSASRTLVGKAFRQGFYWPTALNDAVDLVRRCRACQFHAKQIHQPAQALQTIPLSWPFAVWGLDILGPFRRAPGGFEYLYVAIDRFTKWPEAYPVVKIDKHSALKFIKGITARFGVPNRIITDNGTQFTSELFGDYCEDMGIKLCFASPAHRRSNGQVERANAEILKGLKTKTFNILKKHGDSWIEELPAVLWANRTTPSRATGETPFFLIYGAEAVLPSELTLRSPRATMYCEADQNQLRRDDLDYLEERRRRAALRAARYQQSLRRYHQRHVRARSLCIDDLVLRRVQTRAGLSKLSPMWEGPYRVVGVPRPGSIRLATGDGTELPNPWNIEHLRRFYP

SEQ ID NO: 197175 - protein, 49 aa, Oryza sativa
  Clone ID: PAT_MRT4530_92958C.1.pep
EMPGVNRICLLLNEQAQWMVCTGGLSTREKRVCFRVSGFFNFIKVVSIF

SEQ ID NO: 197176 - protein, 1855 aa, Oryza sativa
  Clone ID: PAT_MRT4530_92959C.1.pep
MAEPAKVHDLSPSMSGDDGEPNPRRRARTPPPPPRQSPRWEKALERAEGSATSTPTGGGEGRRDGERRLLVYGDGSTPQGALQAAGALLPHPPVAHDPESPAQRWLDDVAKLVMTARQRLDAGGRSSATKASGAATTGSASSRRRARRAAAAVRHSAATPSSTPPTREDLRGEPDARISIERRRNGRRAPHATEGASSSGVSPHQGRGDQPSVPPVGGVGCRAFVASLRNVRWPPRFRPTIAEKYDGSVNPAEFLQVYTTGIEAAGGDDRVMANFFPMALKGQAGGVRHNRMLEKIASKEPQTTAELFQLADRVARKEEAWTWNPSDSGVAASAAPGSAAQIGRRDRRRKKSEAKQKAPAEDIDDGDDDLGFQEPGATIATVDGGACAHVSRRSFKAMKRELLAAAPTHEATCRARWSEVALTFDQTDHPPCVARGGQIAMVVSPTVCNVKLERVLIDGGVALNILSPAAFDAIKAPGMVLRPSQPIIGVTPGHTWPLGHIDLPVTFGGSANFRMERVNFDVADLSLPYNAVLGRPALVKFMAAVHYAYLQMKMPGPGGPISVHGDLKVALACLEQRADHLAAASKPEGGDERLGASAPATPRQRMITGDEVPEDALVSFLRANADVFAWRPADMPGVPREVIEHRLAVRPGARPVRQKVRRQAPERQAFIREEVARLLEAGFIREVFHPEWLANPVVVPKANGKLRMCIDYTDLNKACPKDPYPLPRIDQIVDSTAGCDLLCFLDAYSGYHQIRMAREDEEKTAFITPIGTYCYTTMPFGLKNAGPTFQRTTRISLGSQLGRNVEAYVDDLVVKTRNQETLLSDLAETFESLRSARIKLNPDKCVFGVPAGKLLGFLVSARGIEANPEKIRAIERMRPPSKLRDVQCVTGCMAALSRFISRLGEKALPLFKLLKRSGPFTWTEEAKNALTQLKACLSSPPVLVAPEPDEPLLLYLAATPQVVSAALVVERDEDNSHFTPPHPVPTWPGREQGGEAPEPNGGPGPPTTGVGPLPACQTVLGAPDPQEGPEATVGRPHLSPFDPEANPVLTRPGKEQGEEAPEPNGGLRPLTTGVGPLPACPTTPGAPDPQDGPEATVGRPPLLSSDPEVISTEDKCAPRGCLDEECPRDAAPSEEDRPHRKVQRPVYFVSEALRDAKTRYPQAQKMLYAILMASRKLRHYFQAHRVTVVTSYPLGQILHNQEGTGRVVKWAIELSEFDLHFEPRHAIKSQALADFVAEWTPAPEPVSIPEASTDPSQLPHTAHWVMQFDGSLSLQGAGAGVTLTSPSGDVLRYLVRLDFRATNNMAEYEGLLAGLRVAAGLEIRRLLVLGDSQLVVNQVCKEYRCSDPQMDAYVRQVRRMERHFDGIKLRHVPRQDNMIADELSRLASSRAQTPPGAFEERLAQPSARPDPLGETDAPDRPPRPVGVQASGPEGSAPNSLRLIAWIAEIQAYLTDKTLPEDREGSERVHRISKRYVLVEGTLYRRAANGILLKCIPREQGVVLLADIHEGECGAHSASRTLVGKAFRQGFYWPTALNDAVDLVRRCRACQFHAKQIHQPAQALQTIPLSWPFAVWGLDILGPFRRAPGGFEYLYVAIDRFTKWPEAYPVVKIDKHSALKFIKGITARFGVPNRIITDNGTQFTSELFGDYCEDMGIKLCFASPAHPRSNGQVERANAEILKGLKTKTFNILKKHGDSWIEELPAVLWANRTTPSRATGETPFFLVYGAEAVLPSELTLRSPRATMYCEADQDQLRRDDLDYLEERRRRAALRAARYQQSLRRYHQRHVRARSLCVDDLVLRHVQTRAGLSKLSPMWEGPYRVVGVPRPGSIRLATGDGTELPNPWNIEHLRRFYP

SEQ ID NO: 197177 - protein, 878 aa, Oryza sativa
  unsure (1)..(878): unsure at all Xaa locations
  Clone ID: PAT_MRT4530_9295C.1.pep
AWMYDTRRTHPVFLKEASKFVGQTKVHALRGNKRDTFCPCFDCKNDKMLQDPKDILGHIVERGFKDDYKIWTLHGEVVGRNEEADDFCFDATENFIIEEMSQGTIPECGGSGIDDRYIYFDMEDMVRHIELEVLTNTRRSRVXNWEVLEKAANDLLYDESEGCDMDYVVFMYAKIIVYYCCLTCGTSWYKTGNRVSDKDVVNQDSSVDAKEKISAMVMWYLPVKDRLKQLFSNLQXCQSMRWQQEGRKTDGMIRHPADARQWXNFDALHPKFAKDPXNIRFALNTDGXETSSSHSTWPVLLTMYDLPTWICXKRKYILWTILIQGPKQPGIDMDVFLEPMMEDIXEMWKERLRVWDEKTVYMRHCRFLPQRHKWRVIARLFDKTVENDLPPEXELVHKSSTRQRRLRSCFGRERERQARGRKRIGIIHMQRIKKHSIFFRYLEYXKDLEIRHAIDVMHLEKNVFNSTISTPLDIPSKTNDGLKSRTDLVNLDIRHYLHPKELANGKIEIRPACYSLTPEEKKAFFRCLHSLKVPTGFSSNIXKLVSMKDLTISGYNAHHCRKMLTVFLHIAIRAVKPVHTKVVITKLCDFFNRISQKVFDPKXLGPLQTFAIETTCQLEMFFPPMLFSIQHQIRFDLLPSSPNMMPNSVVNNQMXAYERYMSVLKGYVHNQAHPKGSITEGYTTEEVVECCIDYMKDATLLGYPLXLHEGRLIGKGTVGKKRFYDDDYKAVAEAHSSVLQQLAILELYIDEKHKNEIRACNPRRSATWISKEQKHKFPELLKDQNLSFGESLEEXTLQRLANGPTCLVTLWQVYGINGYMFYMKGKDEKSAAQNSAYDGHVDQWRATKETFAAEGKPLLVQPLNPRTRNWVWARSMGK

SEQ ID NO: 197178 - protein, 106 aa, Oryza sativa
  Clone ID: PAT_MRT4530_92960C.1.pep
MSIFEDWACKSWRTHHYELRRASSKTGPANPGELTTMSIFEDWAGKSWRIDKSPQALRYRWLLCYNYRQGYPGGQNFWLRTKEGTENMMASRRNKAAVFDLLSDTH

SEQ ID NO: 197179 - protein, 1555 aa, Oryza sativa
  unsure (1)..(1555): unsure at all Xaa locations
  Clone ID: PAT_MRT4530_92961C.1.pep
MAEPAKAHDLSPSMSGDDGEPNPRRRARTPPPPPRQSPRREKALERAEGSATSIPTGGGEGRRDRERRLLVYGDGSTPQGALQAAGALLCHPPVAHDPESPAQRWLDDVAKLVMTARQRLDAGGRSSATKASGAATTGSASSRRRARRAAAAVRHSAAPPSSTLSTREDLRGEPDARISIERRRNGRRAPHATEGASSSGVSPHHGRGDQPSVPPVGGVGCRAFVASLRNVRWPPRFRPTIAEKYDGSVNPAEFLQVYTTGIEAAGGDDRVMANFFPMALKGQARGWLMNLPPASVHSWEDLCQQFTMNFQGTYPRPGEDADLHAVQRRDDESLRSYIQRFCQVRNTIPCIPAHAVIYAFRGGVRHNRMLEKIASKEPQTTGELFQLADRVARKEEAWTWNPSGSGVAASAAPGSAAQIGRRDRRRKKRSAHTDDEGHVLAVEGASRATRKGRPAGGKKNEAGAPNRERPTGKWCTVHNTSLHDLADCRAVKSLAERTRKWEEERRQERREGKSPAVPSGNRRSEAKQKAPAEDIDDGDDDLGFQEPGATIATVDGGACAHVSRRSFKAMKRELLAAAPTHEATCRARWSEVALTFDQIDHPPCVARGGQIAMVVSPTVCNVKLGRVLIDGGAALNILSPAAFDAIKAPGMVLRLSQPIIGVTPGHTWPLGHIDLPVTFGGSANFRTERVNFDVADLSLPYNAVLGRPALVKFMAAVHYAYLQMKMPGPGGPISVHGDLKVALACLEQRADHLAAASKPEGGDERLGASAPATPRQRMITGDEVPEDALVSFLRANANVFAWRPADMPGVPREVIEHRLAVRPGARPVRQKVRRQAPERQAFIREEVARLLEAGFIREVIHPEWLVNPVVVPKANGKLRMCIDYTDLNKACPKDPYPLPRIDQIVDSTAGCDLLCFLDAYSGYHQIRMAREDEEKTAFITPIGTYCYTTMPFGLKNAGPTFQRTTRISLGSQLGRNVEAYVDDLVVKTRNQEMLLSDLAETFESLRSARIKLNPDKCVFGVPAGKLLGFLVSARGIEANPEKIRAIERMHPPRKLRDVQCVTGCMAALSRFISRLGEKALPLFKLLKRSGPFTWTKEAENALTQLKAYLSSPPVLVAPEPDEPLLLYLAATPQVVSAALVVERDENNSHFMLPYPVPTWPGREQGGEAPEPNGGPRPPTTGVGPLPACQTVLGAPDPQEGPEATVGRPHLSPFDPEANPVLTRAGKEQGEKAPEPNGGLRPLTTGVGPLPACPTTPGAPXPQDGPEATVGRPPLLSSDPEXLNDAVDLVRRCRACQFHAKQIHQPAQALQTIPLSWPFAVWGLDILGPFRRAPGGFEYLYVAIDRFTKWPEAYPVVKIDKHSALKFIKGITARFGVPNRIITDNGTQFTSELFGDYCEDMGIKLCFASPAHPRSNGQVERANAEILKGLKTKTFNILKKHGDSWIEELPAVLWANRTTPSRATGETPFFLVYGAEAVLPSELTLRSPRATMYCEAEKXQLRRDDLDYLEERRRRAALRAARYQQSLRRYHQRHVRARSLCVDDLVLRRVQTRAGL

SEQ ID NO: 197180 - protein, 1903 aa, Oryza sativa
  unsure (1)..(1903): unsure at all Xaa locations
  Clone ID: PAT_MRT4530_92962C.1.pep
MAEPAKAHDLSPSMSGDDGEPNPRRRARTPPPPPRQSPRREKALERAEGSATSTPTGGGEGRRDGERRLLVYGDGSTPQGALQAAGALLRHPPVAHDPESPAQRWLDDVAKLVMTARQRLDAGGRSSATKASGAATTGSASSRRRARRAAAAVRHSAATPSSTPPTREDLRGEPDARISIERRRNGRRAPHATEGASSSGVSPHHGRGDQPSVPPRFCQVRNTIPCIPAHAVIYAFRGGVRHNRMLEKIASKEPQTTAELFQLADRVARKEEAWTWNPSGSGVAASAAPGSAAQIGRRDRRRKKRSAHTDDEGHVLAVEGASRATRKGRPAGGKKNEASAPNRERPTGKWCTVHNTSLHDLADYRAVKSLAEWTRKWEEERRQERREGKSPVVPSGNRRSEAKQKAPAEDIDDGDDDLGFQEPGATIATVDGGACAHVSRRSFKAMKRELLAAAPTHEATCRARWSEVALTFDQTDHPPCVAWGGQIAMVVSPTVCNVKLGRVLIDGGAALNILSPAAFDAIKAPGMVLRPSQPIIGVTPGHTWPLGHIDLPVTFGGSANFRTERVNFDVADLSLPYNAVLGRPALVKFMAAVHYAYLQMKMPGPGGPISVHGDLKVALACLEQRADHLAAASKPEGGDERLGASAPATPRQRMIIGDEVPEDALVSFLRANADVFTWRPADMPGVPREVIEHRLAVRPGARPVRQKVRRQAPGRQAFIREEVARLLEAGFIREVIHPEWLANPVVVPKANSKLRMCIDYTDLNKACPKDPYPLPRIDQIVDSTAGCDLLCFLDAYSGYHQIRMAREDEEKTAFITPIGTYCYTTMPFGLKNAGPTFQRTTRISLGNQLGRNVEAYVDDLVVKTRNQEMLLSDLAETFESLRSARIKLNPDKCVFGVPAGKLLGFLVSARGIEANPEKIRAIERMRPPSKLRDVQCVTGCMAALSRFISRLGEKALPLFKLLKRSGPFTWTEEAENALTQLKAYLSSPPVLVAPEPDEPLLLYLAATPQVVSAALVVERDENNSHFTLPHPVPTWPGREQGGEAPEPNGGPRPPTTGVGPLPACQTMLGAPDPQEGPEATVGRPHLSPFDPEANPVLTRPGKEQGEEAPEPNGGLRPLTTGVGPLPAFPTTPGAPDPQDGPEATVGRLPLLSSDPEVISTEDKCAPRGCLDEECPRDAAPSEEDRPHRKVQRPVYFVSEALRDAKTRYPQAQKMLYAILMASRKLRHYFQAHRVTVVTSYPLGQILHNREGTGRVVKWAIELSEFDLHFEPRHAIKSQALANFVVEWTPAPEPVSIPEASTDPSQLPHTAHWVMQFDGSLSLQGAGAGVTLTSPSGDVLRYLVRLDFRATNNMAEYEGLLAGLRVAAGLGIRRLLVLGDSQLVVNQVCKEYRCSDPQMDVYVRQVRRMERHFDGIELRHVPRRDNMIADELSRLASSRAQTPPGAFEERLAQPSARPDPLGETDAPDRPPRPVGVQASGPEGSAPNSLRSIAWIAEIQAYLTDKTLPEDREGSERVHRISKRYVLVEGTLYRRAANGILLKCIPREQGVVLLADIHEGECGAHSASRTLVGKAFRQGFYWPTALNDAVDLVRRCRACQFHAKQIHQPAQALQTIPLSWPFAVWGLDILGPFRRAPGGFEYLYVAIDRLTKWPEAYPVVKIDKHSALKFIKGITARFGVPNRIITDNGTQFTSELFGDYCEDMGIKLCFASPAHPRSNGQVERANAEIFKGLKTKTFNILKKHGDSWIEELPAVLWANRTIPSRATGETPFFLVYGAEAVLPSELTLRSPRATMYCEADQNQLRRDDLDYLEERRRRAALRAARYQQSLRRYHQRHVWARSLCVDDLVLRRVQTRAGLSKLSPMWEGXYRVVGVPRPGSIRLATGDGTELPNLWNIEHLRRFYP

SEQ ID NO: 197181 - protein, 2007 aa, Oryza sativa
  unsure (1)..(2007): unsure at all Xaa locations
  Clone ID: PAT_MRT4530_92963C.1.pep
MAEPAKAHDLSPSMSGDDGEPNPRRRPRTPPPLPRQSPRREKALERAQGSATSTSTGGGEGRRDGERRLLVYGDGSTPQGALQAAGALLRHPPVAHDPESPAQRWLDDVAKLVMTARQRLDAGGRSSATKDSGAATTGSTSSRRRARRAAAAIHHSAATPSSTPPTREDLRGEPDARISIERRRXSSSGVSPHHGRGDQPSVPXVGGVGCRAFVASLRNVRWPPRFRPTIAEKYDGSVNPAEFLQVYTTGIEAAGGDDRVMANFFPMALKGQARGWLMNLPPASVHSWEDLCQQFTMNFQGTYPRPGEEADLHAVQRRDDESLRSYIQRFCQVRNTIPCIPAHAVFYAFRGGVRHNRMLEKIASKEPQTTTELFQLADRVARKEEAWTWNPSGSGVAASAAPGSAAQIGRRDRRRKKRSAHTDDEGHVLAVEGASRATRKGRPAGGKKNETGAPSRERPTGKWCTVHNTSLHDLADCRAVKSLAERTRKWEEERRQERREGKSPAVPSSNRRSEAKQKAPAEDIDDGDDDLGFQEPRATIATVDGGACAHVSRRSFKAMKRELLAAAPTHEATRRARWSEVALTFDQTDHPPCVARGGQIAMVVSPTVCNVKLGRVLIDGGAALNILSPAAFDAIKAPGMVLRPSQPIIGVTPGHTWPLGHIDLPVTFGGSANFRTERVNFDVADLSLPYNAVLGRPALVKFMAAVHYAYLQMKMPGPGGPISVHGDLKVALACLEQRADHLAAASKPEGGDERLGAYAPATPRQRMITGDEVPVKEEDALVSFLRANADVFSWRPADMPGVPRGLIEHRLAVRPGARPVRQKVRRQAPERQAFIREEVARLLEAGFIREVIHPEWLANPVVVPKANGKLRMCIDYTDLNKACPKDPYPLPRIDQIVDSTAGCDLLCFLDAYSGYHQIRMAREDEEKTAFITSIGTYCYTTMPFGLKNAGPTFQRTTRISLGSQLGRNVEAYVDDLVVKTRNQEMLLSDLAETFESLRSARIKLNPDKCVFGVPAGKLLGFLVSARGIEANPEKIRAIERMRPPSKLRDVQCVTGCMAALSRFISRLGEKALPLFKLLKRSGPFTWTEEAENALTQLKAYLSSPPVLVAPEPDEPLLLYLAATPQVVSAALVVERDENNSHFTLPHPVPTWPGREQGGEAPEPNGGPRPPTTGVGPLPACQTVLGAPDPQEGPEATVGRPHLSPFDPEANPVLTRPGKEQGEEAPEPNGGLRPLTTGVGPLPACPTTPGAPDPQDGPEATVGRPPLLSSDPEVISTEDKCAPRGCLDKECPRDAAPSKEDRPHRKVQRPVYFVSEALRDAKTRYPQAQKMLYAILMASRKLRHYFQAHRVTVVTSYPLGQILHNREGTGRVVKWAIELSEFDLHFEPRHAIKSQALADFVAEWTPAPEPVSIPEASTDPSQLPHTAHWVMQFDGSLSLQGAGAGVTLTSPSGDVLRYLVRLDFRATNNMAEYEGLLAGLRVAAGLGIRRLLVLGDSQLVVNQVCKEYRCSDPQMDAYVRQVRRMERHFDGIELRHVPRRDNMIADELSRLASSRAQTPPGAFEERLAQPSARPDPLGETDAPDRPPRPVGVQASGPEGSAPNSLRLIAWIAEIQAYLTDKTLPEDREGSERVHRISKRYVLVEGTLYRRAANGILLKCISREQGVVLLADIHEGECGAHSASRTLVALNDAVDLVRRCRACQFHAKQIHQPAQALQTIPLSWPFAVWGLDILGPFRRAPGGFEYLYVAIDRFTKWPEAYPVVKIDKHSALKFIKGITARFGVPNRIITDNGTQFTSELFGDYCEDMGIKLCFASPAHPRSNGQVERANAEILKGLKTKTFNILKKHGDSWMEELPAVLWANRTTPSRATGETPFFLVYGAEAVLPSELTLRSPRATMYCEADQDQLRRDDLDYLEERRRRATLRAARYQQSLRRYHQRHVRARSLCVDDLVLRRVQTRAGLSKLSPMWEGPYRVVGVPRPGSIRLATGDGTELPNPWNIEHLRRFYP

SEQ ID NO: 197182 - protein, 179 aa, Oryza sativa
  Clone ID: PAT_MRT4530_92964C.1.pep
AFAALTALWFARYARFWREVSQMQNFVTAAIALGMVEVTTWYLDLAEFDASGVRPAGTTFWAATSGAVRAAACRVLALLVAMGYGGGRLGAAFLAAAEVLDVGDNVGIVSDHSPARRLFFILPVAALNTVFIYWIFTSLSRTISKLKARRMTAKLEMYRKFANSLTIAVALSLGWITFE

SEQ ID NO: 197183 - protein, 486 aa, Oryza sativa
  unsure (1)..(486): unsure at all Xaa locations
  Clone ID: PAT_MRT4530_92965C.1.pep
MSVMPSIRRLLLAGAAVAVVVVSCAVVCAEASVHEYAGERFAGVGNGFVLHGGSEGVYASATAESFVRFEKVAFRRTPEAASVAEEDGNRTVTVAAVIFEAGDRDAVGAVSDVVGGERALCCTPGMARRGGCTEGAVVYRAPASSNATGRWPKVLAASFLPGSLVAAFPDETVAVARTGMYSLHFVHCDASLAAGQVVAAEGKTIWKNSRGYLPGRMAPLKPLYGAXMSLAFAALAALWFAXNFATAAIALGMVKVTTWYLDLAEFDASGVRPAGTTFWAATSGAVRAAACRVLALLVAMGYGVTRPALGCGNARVAALGAAFLAAAEVLDVGDNVGIVSDHSPARRLFFILPVAALNTVFIYWIFTSLSRTISKLKARRMTAKLEMYRKFANSLTIAVALSLGWITFEVHFKTTDEHNERWRVAWVIPAVRLLREECEDDTEHNDEDDDVEDTRPLIRAGPLSYVDNWACYVTQDAKIILRTDSG

SEQ ID NO: 197184 - protein, 53 aa, Oryza sativa
  Clone ID: PAT_MRT4530_92966C.1.pep
LGVLAHNDRGTLSTGSCCELRPCETEGVGKKTVTHSHSIRCRHYTQPSKGDFL

SEQ ID NO: 197185 - protein, 531 aa, Oryza sativa
  Clone ID: PAT_MRT4530_92967C.1.pep
MPSIRRLLLAGAAVAVVVVSCAVVCAEASVHEYAGERFAGVGNGFVLHGGSEGVYASATAESFVRFEKVAFRRTPEAASVAEEDGNRTVTVAAVIFEAGDRDAVGAVSDVVGGERALCCTPGMARRGGCTEGAVVYRAPASSNATGRWPKVLAASFLPGSLVAAFPDETVAVARTGMYSLHFVHCDASLAAGQVVAAEGKTIWKNSRGYLPGRMAPLKPFYGAMSLAFAALAALWFARYARFWREVSPLQNFATAAIALGMVEVTTWYLDLAEFDASGVRPAGTTFWAATSGAVRAAACRVLALLVAMGYGVTRPALGCGNARVAALGAAFLAAAEVLDVGDNVGIVSDHSPARRLFFILPVAALNTVFIYWIFTSLSRTISKLKARRMTAKLEMYRKFANSLTIAVALSLGWITFEVHFKTTDEHNERWRVAWVIPAVWELISFFLLCTICILWTPSQNSMRFAYSREECEDDTEHNDEDDDVEDTRPLIRAGPLSYVDNWACYVTQDAKIILRTDSGVYAKAGEEYKRV

SEQ ID NO: 197186 - protein, 55 aa, Oryza sativa
  Clone ID: PAT_MRT4530_92968C.1.pep
SFTNNRDDEKKKRNMNLVSPPMAQIIDGKAVAADIRREGYSSFLPSLMMGFLISV

SEQ ID NO: 197187 - protein, 180 aa, Oryza sativa
  Clone ID: PAT_MRT4530_92969C.1.pep
MAAPRTVVSEAAAATEDARGEVAEGAQLLPRMVVWREEMGVGSTSDKAWGQRRRSSRVDASSIGSNDEQPSSPDLGGGDEVDGGWSTAEMVNDDGCNGAERKSARRSRRGAGSGRGHDRRRCRAAIHHRAAVPPCAVLPSALAFVLPCWCCRRDEDDERTKTETAENVMDWTKIMTEWHA

SEQ ID NO: 197188 - protein, 387 aa, Oryza sativa
  Clone ID: PAT_MRT4530_9296C.1.pep
MEGGGAKDGSAAAAQTRGSGDDGSHKPLPPCCLKAKAAAAESEAKCHATVVSGWFTEPRSHSGKTSKVQYFNNPMWPGEAHSLKVENILYQGKSPYQEILVFESSTYGNVLVLDGIVQLTEKDECAYQEMVTHLPLCSIPSPKSVLVVGGGDGGVLREIARHASVENIDICEIDQLVIDVCKDFFPQLSVGFKDPRVQLHVGDAVDFLRNAPEGKYDAIIVDSSDPIGPAQELVEKPFFQTIARALKPGGVLCNQAESMWLHTHLIQDMLSICRETFKGAVHYAWTSVPTYPSGVIGFLLCAKEGPAVNFLSPVNPIEKLEGAMEAGREIRFYNSEVHRAAFVLPTFVRRELESHNTCAEKDKSETKPVAKPKKMKIMPNSAIPTAS

SEQ ID NO: 197189 - protein, 130 aa, Oryza sativa
  Clone ID: PAT_MRT4530_92970C.1.pep
PSPRWTHRPRRRRPYLRGRARESPPPLLSSSWSSTSRTASAQIWRGGPLVVAADGGGVDPRAPPPLAPSFVTGAADAHLLSPHDHPRQQLRPLRDLPAKRPRRRRRRPRSRPSSPVAATPAPAFTAILGS

SEQ ID NO: 197190 - protein, 606 aa, Oryza sativa
  Clone ID: PAT_MRT4530_92971C.1.pep
MGCILGKLAAAPGSSLFFPAAAAASGAGGGGGAGEVQLAAPQPEKIAAVQKDESGWPLWLSSAAGDALAGWAPRSADAFHKLEKRKDSNVQIGSGTYSNVYKAKEVESGRVVALKKVRVDGVGEAESARFMAREIALLRRLGDHPNIVRLRGLVTSRLATAPSLYLVFDYMDHDLTGLAAAALAADQRFSLPQHAYGNRNLEQIRPPLIERKMVKCYMKQLLTGIEHCHNKGVLHRDIKSSNLLVSNDGILKIADFGLATSFDPDNKEQPMTSQVITLWYRPPELLLGATHYGVGVDLWSVGCILAELLLGEPIFPGRTEVLHKYFRELHDLEMKLLVIQVEQLHKIFKLCGSPSDDYWEKMKFPHASFRTYERCIAEKFKDVAPSALSLLETLLSIDPDMRGTATDALNSEFFRTEPYACEPSSLPRYPPCKEIDVKLKYEKHKRKLRANGSVERQTTARKPMSQNPGRRVFTPDVNNKPQAKPNIPRLVTSTSTTKLERFPPPHLDASIGFSLDSSADVSTEQFFTSSVVELKKMPSLIFGHMKSYLNSPKKNTHKAKPGLSMPPSAVLIGAFKPYSLGHPMEVRRKNRDQFRTKGRNSVGAVK

SEQ ID NO: 197191 - protein, 75 aa, Oryza sativa
  unsure (1)..(75): unsure at all Xaa locations
  Clone ID: PAT_MRT4530_92972C.1.pep
FFFFFFFFFFFFFFFFFFGEKKLTXALIHXDLFTIYXLQERGKGGAXNRDXXVANSELXXETKLXXPXXRGVPVF

SEQ ID NO: 197192 - protein, 44 aa, Oryza sativa
  unsure (1)..(44): unsure at all Xaa locations
  Clone ID: PAT_MRT4530_92973C.1.pep
TYISILSPASLFLYHITLPRVLAIWVNWNSXLLXSYKMLYNSSS

SEQ ID NO: 197193 - protein, 860 aa, Oryza sativa
  Clone ID: PAT_MRT4530_92974C.1.pep
MWGPGGGMARAEVGGGGGERSAAPADVSRNPEAQGQGGGVGEDALFTELWSACAGPLVTVPRVGEKVFYFPQGHIEQVEASTNQVGEQRMQLYNLPWKILCEVMNVELKAEPDTDEVYAQLTLLPELKQQEDNGSTEEEVPSAPAAGHVRPRVHSFCKTLTASDTSTHGGFSVLRRHADECLPPLDMSRQPPTQELVAKDLHGVEWRFRHIFRGQPRRHLLQSGWSVFVSAKRLVAGDAFIFLRGENGELRVGVRRAMRQQTNVPSSVISSHSMHLGVLATAWHAVNTGTMFTVYYKPRTSPAEFVVPYDRYMESLKRNYSIGMRFKMRFEGEEAPEQRFTGTIVGMGDSDPAGWPESKWRSLKVRWDEASSIPRPERVSPWQIEPAVSPPPVNPLPVPRTKRLRPNATALPADSSAIAKEAATKVVVESEPNGTQRTFQTQENATPKSGFGNSSELESAQKSIMRPSGFDREKNNTPIQWKLGSDGWMQMSKPESYSEMLSGFQPPKDVQTPQGFCSLPEQITAGHSNFWHTVNAQYQDQQSNHNMFPSSWSFMPPNTRLGLNKQNYSMIQEAGVLSQRPGNTKFGNGVYAALPGRGTEQYSGGWFGHMMPNSHMDDTQPRLIKPKPLVVAHGDVQKAKGASCKLFGIHLDSPAKSEPLKSPSSVVYDGTPQTPGATEWRRPDVTEVEKCSDPSKAMKPLDTPQPDSVPEKPSSQQASRNMSCKSQGVSTRSCKKVHKQGIALGRSVDLTKFNGYEELIAELDDMFDFNGELKGPKKEWMVVYTDNEGDMMLVGDDPWIEFCDMVHKIFIYTREEVQRMNPGTLNSRSEDSHANSMERGSVGREMRGCLSTSSLNSENC

SEQ ID NO: 197194 - protein, 289 aa, Oryza sativa
  Clone ID: PAT_MRT4530_92975C.1.pep
MAPLPVPCLALQQQQHGPESVKTTLFNIFEGQDIACDIDALTNNSSKFWVTPQGWILVHDKTSLSTFMFSPLNPDEKVQMPHLPDDLPRTSSCLLSDKPTLPGCIVLLVEPNANVIWHCGVDGKKWARHEYDIGTQLLDPVSDLHEKVPICPIAACRGKFYFNSESLTDIGVLRVLPHAGVQLARARWRARGCEQGEGVLGGIRGGALHVICYYTISLRQILLERKMFSVSGIPETNFVGKEMFSVSGIPETDFHTDNFSSEIVLNQELHELDMFPVKRIPTIIIIIIV

SEQ ID NO: 197195 - protein, 182 aa, Oryza sativa
  Clone ID: PAT_MRT4530_92976C.1.pep
MVPSAPLRKEHLHGAAAATRELEALSGAASACGSHPLAACRRICTSWRAAIDDRLREDLLPLSLAGIFLNLHDLFYPTQFFSCPTTTPPGGGGGAVSGNVDYTRRRSTLPDCHMPSINITDHCNGLVLVNNCVTYPATRRWERLPDCQLPRRHPRHVASTASARFAAVREHLVFDPAVSPRG

SEQ ID NO: 197196 - protein, 49 aa, Oryza sativa
  Clone ID: PAT_MRT4530_92977C.1.pep
IQVLCVLPLRVLRVGRRPTVRCCGCSRSGRAVSAWLEGGACGGRRRNEG

SEQ ID NO: 197197 - protein, 297 aa, Oryza sativa
  unsure (1)..(297): unsure at all Xaa locations
  Clone ID: PAT_MRT4530_92978C.1.pep
MALQPLPGSLRPSPAPPLPAVPTRKPPSRVSTCLLLATAAMTSLGFHEIGSSAKVISSLEWISLVSCMPTDDMIAEVLRRLPRXPLGSLAACRRICTSWRAAIDDRLREDLLPLSLAGIFLNLHDLFYPTQFFSCPTTTPPGGGGGAVSGNVDYTRRRSTLPDCHMPSINITDHCNGLVLVNNCVTYPATRRWERLPDCQLPRRHPRHVASTASARFAAVREHVAPRERERRRRRRDDEFYPTSDGSEWPPSPFFLSVFSSETRQWEGRRFVRDGPPAGTVAAMRHAGWRCFPVIFW

SEQ ID NO: 197198 - protein, 85 aa, Oryza sativa
  Clone ID: PAT_MRT4530_92979C.1.pep
KLCEKRKTNFFQMKKFNPLKLQKKKPPEKKNEKTRGQKGEPKKKLSRGKNLRFFRKKKMANPRKKKFSKLGGRGVIFFTNEGVFF

SEQ ID NO: 197199 - protein, 59 aa, Oryza sativa
  Clone ID: PAT_MRT4530_9297C.1.pep
FRPFFKFWLIAAWIVVRSPHARMAASPWCRFCGLLVNPAHLPMLFLMIIGSSVISLAFP

SEQ ID NO: 197200 - protein, 67 aa, Oryza sativa
  Clone ID: PAT_MRT4530_92980C.1.pep
MTTPPHCVASNSAPLPPPVAASFSLRTMRATVQSSSFCHGISDAALSANLSVPVPLYNASTGCLSPI

SEQ ID NO: 197201 - protein, 993 aa, Oryza sativa
  Clone ID: PAT_MRT4530_92981C.1.pep
MSLSKTIGFISGINECVNLFQWATSALSTLHSRWSGKQQQKLQGELLQLQSSLQRLRDTLPANYDLIDRAEWRIHKHCVANLLPNIKDAVYNADDLLDEFRWYEQKVALESNANQSPFMDFFNNMIQGSFNKVNDIMERLDNISSQLERMGLHEIPQRFDKSLRPETSSFPNERKIFGRDKELKKVMELLGVPINLTRACYKRKRNSSTADASMSTSEKSRISCFSVLPIVGIGGVGKTTLAQHICNHPQVKSHFDLIIWTCVSDDFDATRLIKEAIQSSSGKEATTDNLNCLQLGLSNIVNNKRFLIILDDVWDDALKENGQCWERLCLPLENGLQGSMVLVTTRSSKVADGVSTMDPFTLDGLKDDIFWDFFKLCAFGSQSSNNDPDLEDIGRGILPKLKGSPLAAKTLGRLLRMNLQIPYWNNILLSELWDLKQEETDILPALRLSYMYLPFHLKRCFSFCAVYPKDHKFEKNILAEIWVAEGFVESDGGFPILDIGHRYFEDLFLYATKCALESLPSDFSKLINLQTYESVGFAYYRMKNLLPVAGNDRNVRLMKNLNQFCGDLDIYPRGFSKDLAIEIDLKNKKDLRRLTLNWLFSSCKDNEIVLQVLQPPTNLKCLEVAGYGGESLPCWSNNGSISVFPSLTDLAISSCEKLSSLDHFLQADYMPVLERISIRECANVTSLQTERFGEFSCLGDFTVSNCPKLFHNSGSLSVPTLKNLELRNSGILLSNIECSSLTSLSFKCVHVTAIPIQLLSGNLPSLQKLNIIECESLTFIGESYPLNGAFSFLTVLIIECCHRLPTLDGLLKKEHLPAIEIIKIYSCTGLLSLPGESLTCLVELTMIKCHGIESFPNQMWRSNLASLKELHIADCPDLVSIGAVKPISKIKTVYIYECQKLTTVKQPFTRRGRPYQILSLPNFGMTNFDKRSGVSLCMEPVRAGRIGQLDRCDVLILRESVAGDGSGVNLGEDDIRTIRISCGTLSLKNNARG

SEQ ID NO: 197202 - protein, 57 aa, Oryza sativa
  Clone ID: PAT_MRT4530_92982C.1.pep
PCLGWISRPEHRFSRGNYPEEAHSLFSPCPSLAPSLYSSPPETANINVMTWDRDQVK

SEQ ID NO: 197203 - protein, 263 aa, Oryza sativa
  Clone ID: PAT_MRT4530_92983C.1.pep
MVWAPHISFFLFFLLSSLLLSGAALDGGEAAGGGVVERDRHRQVGGERGVGDAVAERRGLDSGCGGGGVAGGVAKRVVQARLHVHGCQRRARARVRGSTSMGAPLPMASAGPSPLPSPSSSARTHLSLCGGRKRRRRAEGEGRSWRRRSGAESSWHVGVESATPMTGAAVKPDNALLANHLLTTPTTRMRRMAGIPTTPPSPTWLCIGEQLLSSASLLPRRAAASVDADPRRCLPQFRKDEEDLGRRPSSPEIRRSSSFLGRR

SEQ ID NO: 197204 - protein, 42 aa, Oryza sativa
  Clone ID: PAT_MRT4530_92984C.1.pep
LYPHTLLLHPLWATLITGGGSKTPCLRMHGPQYQPSCGDRIA

SEQ ID NO: 197205 - protein, 468 aa, Oryza sativa
  Clone ID: PAT_MRT4530_92985C.1.pep
MVQIEPLEVSLEAGNQADSALLDDDGRPRRTGTFWTASAHIITAVIGSGVLSLPWATAQLGWVGGPAVMVVFGGVTYFTATLQAECYRTGDEETGARNYTYIGAVRAILGGANAKLCGIIQYANLVGTAVGYTIAASISMQAIKRAGCFHANGHNVPCHISSTPYMLIFGAFEIVFSQIPDFHEIWWLSIVAAVMSFTYSGVGLGLGIAQTVADGGFRGTIAGVTNVTATQKAWRSLQALGNIAFAFAFSNVYTEIQDTIKAPPPSEAKVMKQASLLSIVATSVFYALCGWMGYAAFGNAAPDNLLTGFGFFEPFWLVDAANVAIAVHLIGAYQVYCQPVFAFVERKASRRWPDSGFVNSELRVWPFAISAFRLAWRSVFVCFTTVVAMALPFFGVIVGLLGAISFWPLTVYLPTEMYIAQRGVRRGSALWIGLRALAVAGFVVSAAATTGAVANFVGDFMKFRPFSG

SEQ ID NO: 197206 - protein, 666 aa, Oryza sativa
  Clone ID: PAT_MRT4530_92986C.1.pep
GDSSSQFRVKKKQEATPPITEVSQSLTVSAAEEPPKVNAVATHEAPLSKAPTDKGEEPPIAGDVSTVENEHLHAENNTEPFVEKTQDVGTNEAIGALDMTSADVESDMTSSDIKIDATEASKVQQHDTVATTVDAIPTDADPMDTDVATEKAVLNDLGDTTSVYDEERKDSELTNEDEKPIAPKPNDQVPEVSPDLGSPIKCESISSDDISTNKKNNIEDNLNANNFDLELEAKPEMVKPSSGITSIGGDLQPLDDDKDLGKNQSSLEYIDSTANVDEGGSPEKLNLDRSSGDESMEEDVMEIKQVESNIKSEGTAELSSDHVKEVSLPDTVVDNSSVDTKEVIADEKTAASTEKRKLEAEETVAATEPIKRQRRWAADGAKVPERQPISHSGSDAPKENFQPALKRSFGRSDSTASGDSPKERVVPPSQKPATASLRIDRFVRPFTLKAVQELLGKTGSLCSFWMDHIKTHCYVTPFLLISITKMCSIMGIMDHFDMGILNMDPVIDHLEMFSSVEEAVATRDAVYDLQWPPNNGNRLVAEFVDPQEVKLKLEPPPPAAAPISPATTPKEPPFQQAQANQNMPRQAAAPREHLPPPPPLTTLPTSDSGSAKERLPPTPKKQPEPPVVTLDDLFRKTHSSPRIYYLPLSEEEVAAKLASQGKGKRE

SEQ ID NO: 197207 - protein, 104 aa, Oryza sativa
  unsure (1)..(104): unsure at all Xaa locations
  Clone ID: PAT_MRT4530_92987C.1.pep
REEQRAVPAAIVRRHRQHRGSRRRRRRRRRTRRWPGGARRRTTRSSVAAAGRKRNLRRRRCASRCSLXRRDSTTRSRHRHRHRHRRRLRLRRDSLRRSSSFFSP

SEQ ID NO: 197208 - protein, 95 aa, Oryza sativa
  unsure (1)..(95): unsure at all Xaa locations
  Clone ID: PAT_MRT4530_92988C.1.pep
SIDDHLNQHPPQYTEQQKPTYTKTRCRISTLKIGMTSPLRCLRILSGETKALSPISPGTDSRRKATLLSTTSQIFRPPCRQXLDRLPHILYWCDY

SEQ ID NO: 197209 - protein, 178 aa, Oryza sativa
  unsure (1)..(178): unsure at all Xaa locations
  Clone ID: PAT_MRT4530_92989C.1.pep
LVERGQRCRRGSLGQPPLPPPSLPQGGDVECPHPVVFPVSGGSPPPDPPPPXPPPPNQFRCFPPPPTHXPPPTPGAAPPPSGGREGGEXKSRPGRKPPPPGAVAASTRSGSKPPPPPPSAPSPPXPSTPSCQFLEEGGESPPPPPSPLPAEPPPPPPSVPTLPPPYXEGAPPPPPSPS

SEQ ID NO: 197210 - protein, 60 aa, Oryza sativa
  Clone ID: PAT_MRT4530_9298C.1.pep
NGEIAFLREVELISIAVHKNILRLIGFCTTTKERLLVYPYMENLSVASRLRGNSNIRISL

SEQ ID NO: 197211 - protein, 51 aa, Oryza sativa
  Clone ID: PAT_MRT4530_92990C.1.pep
IYTTIWCIKSIHILHESTASFLLFAAVVVEAVLPATTIRPRGVLRRKRQAR

SEQ ID NO: 197212 - protein, 62 aa, Oryza sativa
  Clone ID: PAT_MRT4530_92991C.1.pep
LGAPGEGHGPCSLILAPKMRFTPPCAPPLNVFQILLMVLSYHQKVKFRGKKKKKKTKKIKKQ

SEQ ID NO: 197213 - protein, 225 aa, Oryza sativa
  Clone ID: PAT_MRT4530_92992C.1.pep
PTRPPTRPGSLYNQGGSGVLQPSPPASLINDATLGTNPASGGALASNSLPSLASQYIIGRPSTPPFFGTPLQIQLSSGLAQSVSNPQPSLSSMQPRAPPPPPPQPHPSQTFQGSLRQPQEQPMPYPLNTIQPQVPLQFPNQLHVPQLQFYHQTQQESVLQPIGHVSEQPIGQSAQQQTDSGMNLNHFFSSPEAIQSLLSDRDKLCKLLEQNPKLMQMLQDRIGQL

SEQ ID NO: 197214 - protein, 348 aa, Oryza sativa
  unsure (1)..(348): unsure at all Xaa locations
  Clone ID: PAT_MRT4530_92993C.1.pep
SRCATTLPRWLVERGQRCRRGSLGQPPLPPPSLPQGGDVECPHPVVFPVSGGSPPPDPPPPXPPPPNQFRCFPPPPTXPPPTANPVAPAPRRHLFARPCPPPTAITLSHGEPSPSPPTPNPNPPLSLQTSYPPXPAKILWTNKKNISPPHPSPNPPPGAPLPSPLPPPSRSRREGGDPPSXPSPPGAAPPPKPPPPXPSPPPPDXSKPPPPPPSAPSPPFPLPLPAKSPPPPPSPLPAEPPPPPPSVPTLPPPXGRELPPPLPSAPPPPPSPLPPHARYGREGGEPPPPPPXPPPXEPPSPPSPSALPPPCGRIPRRERRGETKNGIFSCSPQHVRKFDNTSTQEARA

SEQ ID NO: 197215 - protein, 356 aa, Oryza sativa
  Clone ID: PAT_MRT4530_92994C.1.pep
MPHLVRERLFFGDINDAIAALTTTTAEAGGFTHLLSVVSSAFISFITDCRPGLSIPTEEVRRVVAGEEGAPPVSAVAPGRLMRVVERAGVGLRVTRMAVPLRDTEEENLLDHLEPCLDFIDEGRKEGNVLVHCFAGVSRSATIIVAYLMRTEQKSLEEALESLKEVNESACPNDGFLEQLKLFEEMGFKVDTSSPLYKRFRLKLLGQSYKIGEKIGSYVFEDDPGLSGQPNSSTQNLPNKQTQQPAYRCKKCRRIIAVQGNVVSHTPGEGESCFQWQNKRKGERSYSKEQDCSSLFVEPLKWMTPVEDGALEGKLSCIHCGARLGYFNWSGIQCNCGSWITPAFQISKSKVDISTT

SEQ ID NO: 197216 - protein, 102 aa, Oryza sativa
  unsure (1)..(102): unsure at all Xaa locations
  Clone ID: PAT_MRT4530_92995C.1.pep
PPCVGSLGQGLGPPGSGLLGWGPPSGVSSRVRCSPCSCSGGCPGRESVFSDVQAVTGGWFLGLFGSLGADVVLGMFLAGGVRGRSFLWPPPRFXWXXGLGPY

SEQ ID NO: 197217 - protein, 219 aa, Oryza sativa
  Clone ID: PAT_MRT4530_92996C.1.pep
EPSDVTFLALLYACSHSGLKEEGMDCFELMTKTYGIQPSVKHYTCVVDLLGRSGCLDEAEALILSRPLTPDGVIWKTLLSACKTQKNFDMAERIAKRVIELDPHDSASYVLLSNIRATSRRWGDVSEVRKAMRDNNVRKEPGVSWVELKGHIHQFCTGDESHPRQKEIDECLEEMMAKIRQCGYSPDMSMVLHDMEDEEKEVSLSHHSEKLAIAFAFLS

SEQ ID NO: 197218 - protein, 397 aa, Oryza sativa
  Clone ID: PAT_MRT4530_92997C.1.pep
MPHLVRERLFFGDINDAIAALTTTAADTGGFTHLLSVVSSASISFITDCRPGLSIPTEEVRRVVAGEEGAPPVSAVAPGRLLRVVERAGVGLRVTRMAVPLRDTEEENLLDHLEPCLDFIDEGRKEGNVLVHCFAGVSRSATIIVAYLMRTEQKSLEEALESLKEVNESACPNDGFLEQLKLFEEMGFKVDTSSPLYKRFRLKLLGQSYKIGEKIGSYVFEDDPGLSGQPNSSTQDLPNKQTQQTAYRCKKCRRIVAVQGNVEEGENPSTPHTLSHAGAPASGGTGDTRRRRSSSTGGGRRASEVAQPTSAFSCRLIGKKARRRGEERRGKEEGRMPHRARPMTGLLLFTGVNLVLLNTITPVYDFVCFHPYWERRRGRRQKEREALQANGSLQTAK

SEQ ID NO: 197219 - protein, 32 aa, Oryza sativa
  Clone ID: PAT_MRT4530_92998C.1.pep
DPPVRSFFFSLQSVLMAPGLETLIWRSLLLLS

SEQ ID NO: 197220 - protein, 65 aa, Oryza sativa
  Clone ID: PAT_MRT4530_92999C.1.pep
GLQEFGTRINQRHRMSCSCQRLSSGGRGRAVPVADAAPGELAAPEAINLVPNGKRGMPVLITPSL

SEQ ID NO: 197221 - protein, 83 aa, Oryza sativa
  unsure (1)..(83): unsure at all Xaa locations
  Clone ID: PAT_MRT4530_9299C.1.pep
MGTPHSRRGIHLMKRGFMYSKPKGLPSASLTRRPHLTVKAIQSQKPTYHMVQPINGDPFICSLETRLTYSPLVAXYLSNLPAY

SEQ ID NO: 197222 - protein, 270 aa, Oryza sativa
  unsure (1)..(270): unsure at all Xaa locations
  Clone ID: PAT_MRT4530_929C.1.pep
MPKPPPPPRPPPCSRPPPAPPPKPPPVPPPPPRPPPPPXPAPPPAPPPKPPPXPPPPPPPRPPPPPAPPPMTPPAPNPPPLPPPPPNPPPPPLPIPPPPPAAPPTPPPAPNPPPLPPPPPIPPPPPPPKPPPPPPPSPPPVPLPPPTPPPAPKPPPXPPPPPTPPPLPPPKPPPPPPPRPPPAPLPPPTPPPKPPPSQPPPPSPPPPPPPNPPPPPSPPPPPPLNPPPPPNPPPPPWHRPKRQSWPKPGPRPNPLGPWPNPPGPNPSSSK

SEQ ID NO: 197223 - protein, 274 aa, Oryza sativa
  unsure (1)..(274): unsure at all Xaa locations
  Clone ID: PAT_MRT4530_92C.1.pep
VERMMAYYGYLNQVRIDIIHQLRHTQETLKTRRTELKQQQKEQQAQLTIQKTQEKTLKKVQMERETTLHSLDKTLAQEQNRLDALKNNEIALRAQLAKAMEDAKREDKLQQARKQKEQQQETEKQSTAKVVEQPKIPEKLIKTVQGLGMPNKQFNMPVVGKXINRFGTTQMGELTWRGTVIEANQGSPVHAIAGGRVVLADWLQGYGQVVVIDHGKDDMSLYGYNQSLMVRKGDVVALGQKIALVGNTGGQNRSALYFEIRRKGNPKNPMGWVK

SEQ ID NO: 197224 - protein, 63 aa, Oryza sativa
  Clone ID: PAT_MRT4530_93000C.1.pep
MGSNNPNSTTNVLVTKAYIPLNNHVVTAPRRNNKTQLQAHEALTRAKLAAAAAEASQDSAANC

SEQ ID NO: 197225 - protein, 70 aa, Oryza sativa
  Clone ID: PAT_MRT4530_93001C.1.pep
CSVLSIFLSFLFFFFFTVLSDAKNHSAALVKFLWKVSFYNVYPSIKKANSNPLLSCFHSLSPYIRVDVWW

SEQ ID NO: 197226 - protein, 55 aa, Oryza sativa
  Clone ID: PAT_MRT4530_93002C.1.pep
FTDSRLAPMQDERLDLPQLNISSVLESVHGYYCCNPLLFPAAWLFSSVAKHSQYI

SEQ ID NO: 197227 - protein, 1300 aa, Oryza sativa
  Clone ID: PAT_MRT4530_93003C.1.pep
MSLLLRRLAGAAAGRHLRRALSTAASRPPWRMILTEAELDRSGAPSRSARASLDLVEPPRSSRLSVPAHFVNPGPLPDAEGDAVGFVGWVIGGSGDGLLLLKFYDTRYHAPVVANVRLAVALQLSRTTSEGVLDPDVAHFVCNPLSGQMYRLPPAIETTKYSTGRGLLTRSESRHGPPDRYVVAELTRGESGSSVLRRFMSETEEWDDVATVRSSSGSERAAAAERVMHLDHQVVAFGGRLWWVDVSWGALSVDPFSDRPEERFVELPKGSVLPDLTGIGGRRILGLYRRMGVSEGKLRYVEVSNAKKPFVVSAFSLDDEGSSWTLEHRMEITPSWKGELKVPEKPRIGAIDPLNANVVYLIFLHEVLAVDMAKGEVIGRSSPDDVNSSSVVPCILPPWLESCQIPSAATLSSKKTDVERNTLADTLMGLGTENAAMVPDEWPIWGFAEELHSIMCNKNNIRNVLVIADAGHGKTAILDSLVATAGITSQEVTESNSLISLYYEMPEDSLRSYKDKRAGNGHLINLIDSPVCCNLSNDVQPALCIMDGALVVVDSFEGVTLWTKTSIREALNMKIQPVFTLNKIDRFFLEQNVDGEKAYQTLSSLIDSVNATMSSHKDAQVYPTKGTVVFSSGLHGWAVAISNFAKMYSSKFKVEESKMIDRLWGENFFDLATKKWTKKNTGTATCKRGFVQFCYEPIREIMNACMNSKHKLWPMLEKIHVTVSSPAKELVGIELVKYVIQAWLPACSALSEMMMYHIPSPEKAQRHCVGNFGVDLDNIYHTSVRNCDAEGPLVLYVSKMTLALGKGRYFALGRVFSGKVTSGMNVQFLSPSYGIGERKDLYIKCIKSSLIWIGDKRELVEGSSCSSIPGHRDLFDKATYTTVNYQLIKKNSTLTSVKVMPMRAPAVTVRVDCKAYPDLPKFLEALKKLANTPVKTRLNDIPLSELEGCSRYPPNYHFLNLDEPDPWLLYENMMDCIGNHRFWTLSHSDNVYDFDCPESRSWTTPQKGHYLQYVQVDGIVMCFVGNASTSWLHGVITEGFVAEFIKKPPGDPKEVAKPTHYITTPEREKSDRFIKKPPGDPKQVAKPTHYITTTGRTRSDIPISGNYHRRLSTFAFGPAGFRKACKSLYMYVIGELSASADYLDMIVTIIILHLWDTSRNNDVLDKALMAFHPDNTEQIVLGDDCRVMLQRWKRVSCETVSSIDERRDYVPIAYTTPKCVSKACDIIRILYGEVHDHSPFDDKFLPLSFDAQIDSQSDDENDKSGHGRIKGNYHSKKEVYGSMRWSNAKLKAFGIYPLNP

SEQ ID NO: 197228 - protein, 65 aa, Oryza sativa
  Clone ID: PAT_MRT4530_93004C.1.pep
NFTSCHWQLNEMCMCMVSTSEYMAQKSIKSHDGTVNLKSDGAMLTVRKTTKLYHRYIVEAAKRES

SEQ ID NO: 197229 - protein, 43 aa, Oryza sativa
  Clone ID: PAT_MRT4530_93005C.1.pep
NRFLSIGRTNIKTIQVRAESLHITEMGQGRKSTYCSLIEIFFA

SEQ ID NO: 197230 - protein, 184 aa, Oryza sativa
  Clone ID: PAT_MRT4530_93006C.1.pep
DTIEYSSLHACRSTLEDPHSIPLPKWVLEEMDKDQDLAYTDRSGRRNYEYLSLGADAMPVLKGRTPVQCYGDFMRAFRDHFAAFMGNTIVEIQVGMGPAGELRYPSYPESNGTWRFPGIGEFQCYDRYMLSSLKAAAEAVGKPEWGNAGPGDSGGYNDWPEDSPFFRREGGWNTPYGEFWVPSS

SEQ ID NO: 197231 - protein, 305 aa, Oryza sativa
  unsure (1)..(305): unsure at all Xaa locations
  Clone ID: PAT_MRT4530_93007C.1.pep
LDLQEIQVGMGPAGELGXPWYPESNGTWRFPGIGEFQCYDRYMLSSLKAAAEAVGKPEWGNAGPGDSGGYNDWPEDSPFFRREGGWNTPYGEFFMSWYSQMLLEHGERILSAASGVYTGTPGVKISVKVAGIHWHYGTRSHAAELTAGYYNTRHHDGYQPIARMLARHGAVLNFTCVEMRNHEQPQDAQCRPEELVQQVAAAARESGVGLAGENALPRYDETAHDQIVTTAAEKAEEERMVAFTYLRMGPDLFQPDNWRRFAAFVKRMTESGVRDVCREQVEREAQGVAHATGSLVHEAAVALSN

SEQ ID NO: 197232 - protein, 269 aa, Oryza sativa
  Clone ID: PAT_MRT4530_93008C.1.pep
MPRGSGGERRRRLWRWGKRQWGAATAAVRSGSGGGGGERRLRRCGGEEEEEDGVLHASGRPRDPVAFRPDQSTRPHPEEGKKKSDRASPRAPATATATATTSAILPSLLATVGSLATGAVAALAAAGAHAGSLPRARSVASVAAAAAMSTARVYADVNVHRPREYWDYEALAVEWGYFKGPELLVDFQSYDYSLDMWSLGCMFAGMIFRKEPFFYGHDNHDQLVKIAKAIDFLDKLIRFDHHDRLTAREAMAHPYFEQVRAAEDCRMRT

SEQ ID NO: 197233 - protein, 317 aa, Oryza sativa
  Clone ID: PAT_MRT4530_93009C.1.pep
MSTARVYADVNVHRPREYWDYEALAVEWGEQDDYEVVRKVGRGKYSEVFEGINVTNDERCIIKILKPVKKKKIKREIKILQNLCGGPNIVKLHNIVRDQQSKTPSLIFEYVNSTDFKVLYPTLTDYDIRFYIYELLKALDYCHSQGIMHRDVKPHNVMIDHELRKLRLIDWGLAEFYFPEKEYFKGPELLVDFQSYDYSLDMWSLGCMFAGMIFRKEPFFYGHDNHDQLVKIAKVLGTDQLNAYLNKYRIALDPQLEALIGRHTRKPWSKFINPENRHLVSPEAIDFLDKLIRFDHHDRLTAREAMVGSCQAIHSQA

SEQ ID NO: 197234 - protein, 50 aa, Oryza sativa
  Clone ID: PAT_MRT4530_9300C.1.pep
ASSTRRSCRRCAGLSPTVQHLRPASTSYWLPHTIGSHLLFNQRDSDHNNE

SEQ ID NO: 197235 - protein, 513 aa, Oryza sativa
  Clone ID: PAT_MRT4530_93010C.1.pep
MAWYSLVLMTSLLFPLLVLLVMRCYVTRSGAKLLDKLPSVPGRLPVIGHLHLIGSLPHISLRDLATKHSPDMMLLHLGAVPTLVVSSSRVAQSILHTHDDIFASRPYSPIANILFYGATDVGFSPYNEYWRQIKKITTTHLLTMKKVRSYVSARQREVRIVMARITEAASKHVVVDLTEMLSCYSNNIVCHAVCGKFSLKEGWNQLLRELVKVNTSLLGGFNIEDYFPSFTRLAAVRRLLLSCAKAHNINKRWDQLLEKLIDDHTTKHIRSSSMLNHYDEEAGFIDVLLSIQHEYGLTKDNIKANLAAMLMAGMDTSFIELEYAMAELMQKPHVMGKLQAEVRRVMPKGQDIVTEEQLGCMPYLKAVIKETLRLHPPAPLLMPHLSISDCNINGYTIPSGTRVIVNVWALARDSNYWENADEFIPERFIVNTLGDYNGNNFHFLPFGSGRRICPGINFAIATIEIMLANLVYRFDWELPADQAAKGGIDMTETFGVAVHRKEKLLLIPHLHLR

SEQ ID NO: 197236 - protein, 978 aa, Oryza sativa
  Clone ID: PAT_MRT4530_93011C.1.pep
MEATAVSLARTVLDGVLGGAGSAVADEAALLLGVPREVDFIRSELEMMQSFLRATSGCAGDTARTWVKQVRDLAYDVEDCLLDFALHAHAHASSSSCAPPLWLRPWRLAERHRVAARIRELKASVEELNQRNHRYHVVPVLAAGDQQQQQHEPPAAPPPARGEQHHLRFRDWQVIGRGEEESELAKLISSGGDDDAETRRRVVSVWGMGGMGKSSVARSVYNDPAIVDGFDCRAWVTVPHPLDSAGEFKRRLVAQLETEVDGGGGGDDVSAWLRQKRYLIVVDDVRSLEEWEHIEPCLVESDAGGGRVIVTTRQVDVAQRCVRGMEHAYELKTLAAPHDMRLLCQKVYKDPEYTLQLHMLEEANKILGRCRGLPLAIATIGGLLANRPKTSAEWKNLRIHLGSELEFDQDINSINRVITSSYDGLPYHLKSCFLYLSIFPENHEIRYTRLVRRWIAEGYIAKRRDMTVEEVGQKHYNDLMNRSMIRPMKKKIGASMAVERCQVHGMVLQIILSKSIEENQLFIIDKHCNEVPQSKIRHLVVTRWKRSEEKMATNINLSLVRSLTVFGECPASLISPKLRLLRVLDLENAVDLENDDLKHIGDLHHLRYLGLRGTNISRLPSSLQNLKCLETLDVQDTKVTHLPDGTAKLEKLRYLLAGINFAEDLAEKMQTNAKNKVNKCNGNLLETLADVVCRCRRGFSECCESSSSCFAGHFSVRAPEGIEKLRNLHMLGVVRIERDSGVAQKLGKLISLRRLGVDLDATGEEGKALCNSIQKLARLERLEVRSKSLLFLNDLNGLAPKHLLSLRLYGHLEKLPDWVSSLNDLAKVKLLETQLEQKDINLLGNLSNLTSLGLWGKSFAGVSLHFSRDMFKNLKSLHIQGLENLETLNFEKSAADRLEKLLVKKCFALSDNERGISDILFLKNIVEITLISKGDKPHLQKGLQRQVSEFELVNKRRPKLQIVNSMSGRSPRANTIVG

SEQ ID NO: 197237 - protein, 555 aa, Oryza sativa
  unsure (1)..(555): unsure at all Xaa locations
  Clone ID: PAT_MRT4530_93012C.1.pep
EGGGGELWGAATACCGGAATACCGGDDSELWGAGRRRVLHAVTVGGPALGGSRHRRSLNHARYSYHRKVFSLYSLSVTLNLILDVRVRSHFSLPDGGPKTYXHKSSFKLLQLVDFIGSKIVXGSKQYITFWRICDDAWVEISSDEQLHEWLSLNIAHEVANIEADVDEFKGPLQCSPTKRRVHPNFRNTLPTAKVVEPPISKSKHTKRATRKRVSDETVGVDEEGSYSETESLVALSDSSYDTDLAASSDSDCYDSECSDSDNSYEPDDEIVDDDDDDDCDDIHDFSYDVNDPCIDVDVLFRDVDECKSAVTCHAILNDYAFQTVKKNKDRFRAKCRRAEEGCKWTFFASTSKSKYDGCKLXKVNKKYKMDVPNFRVFRAKEKAMDMIFDGHDWLFLVAYGVIEIESKESWTWFIQNLKQAIGTPTGLVINTDAGKGIEGAVDDVYPGVEHRECMRHLWKNMKKKYHGTLFSXNMWGAAKSCTFQRYEYHMDKIKEKCPDAIQWLDENHPYVWSRSNFFELCKVDYINNNLSESFNSWVSKTKDLHIVDMHEKIR

SEQ ID NO: 197238 - protein, 101 aa, Oryza sativa
  unsure (1)..(101): unsure at all Xaa locations
  Clone ID: PAT_MRT4530_93013C.1.pep
ALLGPDCEQVMCTNXNLDTFVLVCENQLSYLHQTLTDAAXLLNTDATDSHIRQNPDTNAYTLTITGKKPFIDENTSLVELITRNELQAALAHELRHLTCDH

SEQ ID NO: 197239 - protein, 35 aa, Oryza sativa
  Clone ID: PAT_MRT4530_93014C.1.pep
GNIIDLFRVINYTELLGDQSINLNLFKFKRFLSLE

SEQ ID NO: 197240 - protein, 279 aa, Oryza sativa
  Clone ID: PAT_MRT4530_93015C.1.pep
MAYLGLLVLLLAFCGGAEHHGAEAAGDASARGASARRGLATVSVAKPSYPTVTTPMSASTSPSTMPMSSSPSAFPSLATAGGGGGGGGGGSWCVASQSASPTALQVALDYACGYGADCSAIQPGGSCFNPDTVHDHASYAFNSYYQKNPVATSCDFGGTATITNTDPSSGSCQYSASSGGGQNMLPPPSPTTLPPPTPMTPTTPMTPTPTTPDTGTPIYGGSTTPPDYGSMSPPGGFGSNSPPDYGDVGAAPATMASGRAAVALAGVLIATVSLMSMST

SEQ ID NO: 197241 - protein, 415 aa, Oryza sativa
  Clone ID: PAT_MRT4530_93016C.1.pep
MLARAFGLVGKTWKRTPTMSVEASASPRRRSQMPQQQLCHLHGSTPSQRQKFPEEQLPGDTVEGSFDLRFAALKSIGEDRVNDRELKLLLKKKHAPICYVWCDPCPWMHISQGIMKTLNINKMVESGFKVKILMADWFSQMNSEISGNLNKMRTVGRYNIEMWKATGMALDKVDLVWLSDEIRQHGDEYWPIVMDIARTNSVRRIKRVISLESLLIEHRMLDQYMQCASILFQKADIWLLGMEQHDANLLARQYYKHFKKKNKAIAVLDSIFSLLYVLFQVVTCACAFGIWFLDGGTYMPRHLHKEDICFKMEKAFCPPKLAEGNPCLEYIKYIILPWFGMFEVVQKKGNGGKKTFLSMEELTADYESGALHPADVKLALEKSLNEILQPVRDHFGRNGEAKDLVEAIGECYGAD

SEQ ID NO: 197242 - protein, 302 aa, Oryza sativa
  Clone ID: PAT_MRT4530_93017C.1.pep
PRHNGKKFPQEQASRGILLRGVLTLGFPALKSIGRDRVNDRELKLLLKKKHAPICYVWCDPCPWMHISQGIMKTLNINKMVESGFKVKILMADWFSQMNSEISGNLNKMRTVGRYNIEMWKATGMALDKVDLVWLSDEIRQHGDEYWPIVMDIARTNSVRRIKSTCRSSYYCLPSRFCGSRNSYAIGKLNVDEIFYICLQCASILFQKADIWLLGMEQHDANLLARQYYKHFKKKNKAIAVLDNMLPNLLQYPQMENRRHPAWAIFMEDDKEDICFKMEKAFLPPKLAEGNSCLEYIKYIIL

SEQ ID NO: 197243 - protein, 137 aa, Oryza sativa
  Clone ID: PAT_MRT4530_93018C.1.pep
TEADAGQGRERHGGAGEGIHQEAAVVAREDEPAAAGGLVASEAEAGEAEGLVVGGAVEGAVREREQRQRRRRGEGPLPRGGAPLRAHRGEARAVGVRGEEAEHQAGDVRRYVRPRLRTPWRRLVRHRRPCKETQGKG

SEQ ID NO: 197244 - protein, 107 aa, Oryza sativa
  unsure (1)..(107): unsure at all Xaa locations
  Clone ID: PAT_MRT4530_93019C.1.pep
STCSLHILTVDKHALSAFRNRPIKGKHLFKKLKYSTNNAKLGYITISQLXIQLLGRIKGLCAMQCIQNFFEPLGVNYIFTIMSFTVSNERSIQGTKITYLTISFTLL

SEQ ID NO: 197245 - protein, 164 aa, Oryza sativa
  unsure (1)..(164): unsure at all Xaa locations
  Clone ID: PAT_MRT4530_9301C.1.pep
MVRTGTMLREEQRSSAVRILCEKVTRVWILGGQLRSTVGIGTKLRKELGSRRLRISCDEVRYEMAHGGXTSCERDLRNGLHEVLYVSWSMAGLIHAEASRLGSGGKQQQRGQESDLRQGGDLTRGVRAVRPAAIGLRRDFHQFKASASSLANIRRSRVSRVVQG

SEQ ID NO: 197246 - protein, 197 aa, Oryza sativa
  Clone ID: PAT_MRT4530_93020C.1.pep
MAFSRPITVTLGIALLFWFLAQWLKIIVVQDGLTRECTDDGHDEIIRHVYGRCGVRDIGGDAELVITRWRGEDSCDDDASGSDKLKIFAGSSRAETLVAPNLHVGDECTIGTGNDDKNGLVIGGETISAGDDDQKQMTRIRPVCGRDRITGIDDNHEDASAVRPAKAKGSWLDLATIVQAPSNGAPAFFSGGSTIIT

SEQ ID NO: 197247 - protein, 873 aa, Oryza sativa
  unsure (1)..(873): unsure at all Xaa locations
  Clone ID: PAT_MRT4530_93021C.1.pep
MASLKYDLPLLDQDTRFSFWQVKMRAVLAQQDLDDALSGFDKRTQDWSNDEKKRDRKAMSYIHLYLSNNILQEVLKEETTAGLWLKLEQICMTKDLTSKMHLKQKLFLHKLQDDGSVMDHLSAFKEIVADLESMEVKYDEEDLGLILLCSLPSSYANFRDTILYSHDTLTLKEVYDALHAKEKMKKMVPFEGSNSQAEGLVVRGRQQEKNTNSKSRDKSSSSYHGRSKSRGRYKSCKYCKRDGHDISECWKLQDKDKRTGKYVPKGKKEEEGKAAVVTDEKSDAELLVAYVGCAQTSDQWILNTACTYHMCPNRDWFATYEAVQGGTVLMGDDTPCEVAGIGTVQIKMFDGCIRTLSDVRHIPNLKRSLISLCTLDGKGYKYSGGDGILKVTKGSLVVMKADIKSANLYHLRGTTILGNVAAVSDSLSNSDATNLWHMRLGHTSEIGLAELSKRRLLDGQSIGKLKFYEHCIFGKHKRVKFNTSTHTTEGILDYGHSDLWGPAHSSIVHQSPKRSIAKDKPKRNIKPPPRYIEEANIVAYALSVAEEIEGNAEPSTYSEAIVSDDCNRWITAMHDEMESLEKNHTWELVKLPKEKKPIHCKWIFKRKECMSPSDEARYKARLVAKGYSQIPGIDFNDVFSPVVKHSSIRTLLSIVAMHDYELEQMDVKTAFLHGELEEDIYIEQPEDLCPQSDYDIEYMSRVPYSSXSWFTYVCHDFAGNLDRRRSLTGYVFTIGGCAVSWKASLXATVALSTTEAEYMAISEACKEAIWLRXQSAICXTKDQMFHERTKHIDVRYHFIRGVIAEGDVKVCKISTHDNPVDMMTKPVPATKFELCSSLDQINWHAHTSEGEFWTCTGVKQISQALCFLSTESY

SEQ ID NO: 197248 - protein, 2049 aa, Oryza sativa
  Clone ID: PAT_MRT4530_93022C.1.pep
MAAAAVARRVVLVLVLAAASLAAAPRGAAARSLGGREGPGECCHLLRVLLRCDISCVIWGVRNFLKSISTVIFALCVQLAETTSSFSLEDKKYENENMLPKNASDPEQIVQAIYDVEEATAQALQIILERKTIKPKNRDSLIRFLQILVARHPSKRCRRGSAELLINFDDHWSSNLSLSSQEGSKLLESVAEENHWICGKEVPRGYWLFCRGSKSETRGFSCGLWVLMHSLTVRIGDGESQSTFTSICDFIHNFFICEECRKHFYEMCSSVSAPFRTARELSLWLWSTHNKVNMRLMKEEKDMGTGDPLFPKVTWPPNQLCPSCYRSSKVTDGAVDWNEDAVYQFLVNYYGKKLVSSYKETYMESLQQQEKKIVSEDSSISNAASVPIGAALGVAIASCTFGALACFWRAQQKNRKEVIRFYLSIFLQAKKELELKNSLPVAHPALHQRGSSMNVYFSGRIKILLLIQKADEMGEIARSFFQELYTKDESIRPTELLNMFEPKITGEMNDNLTRPFTDEEIGDALFQIGPLKAPGSDCFPARFFQKNWAVMKKDVCEAVKKFFENGEMQEGVNDTVIVMIPKKNSAEEMKDFKPISLCNVVYKVVAKCLVSRLRPLLQDIISESQSAFVPGRLITDNALIAFECFHAIHKCTRENQNFCALKLDLSKTYDRVDWGFLNGVMQRMGFGDVWRKWIMACVTSVRYSVRLNANIDQATRIKEALDLFERSTGQLINPRLIPMASLKYDLPLLDRDTRFSLWQVKMRAVLAQQDLDDALSGFDKRTQDWSNDEKKRDRKAMSYIHLHLSNNILQEDLTSKMHLKQKLFLHKLQDDGSVMDHLSAFKEIVADLESMEVKYDEEDLGLILLCSLPSSYANFRDTILYSRDTLTLKEVYDALHAKEKMKKMVPSEGSNSQAEGLVVRGRQQEKNTNNKSRDKSSSIYRGRSKSRGRYKSCKYCKRDGHDISECWKLQDKDKRTRKYIPKGKKEEEGKAAVVTDEKSDAELLVAYAGCAQTSDQWILDTACTYHMCPNRDWFATYEAVQGGTVLMGDDTPCEVAGIGTVQIKMFDGCIRTLLDVRHIPNLKRSLISLCTLDRKGYKYSGGDGILKVTKGSLVVMKADIKYANLYHLRGTTILGNVAAVSDSLSNSDATNLWHMRLGHMSEIGLAELSKRGLLDGQSIGKLKFCEHCIFGKHKRVKFNTSTHTTEGILDYVHSDLWGPARKTSFGGARYMMTIVDDYSRKVWPYFLKHKYQAFDVFKEWKTMVERQTERKVKILRTDNGMELCSKIFKSYCKSEGIVRHYTVPHTPQQNGVAERMNRTIISKARCMLSNASLPKQFWAEAVSTACYLINRSPSYAIDKKTPIEVWSGSPANYSDLRVFGCTAYAHVDNGKLEPRVIKCIFLGYLSGVKGYKLWCPETKKVVISRNVVFHESIMLHDKPSTNVPVESQEKVSVQVEHLISSGHAPEKEDVAINQDAPVIEDSDSSIVQQSPKRSIAKDRPKRNTKPPRRYIEEANIVAYALSVAEEIEGNAEPSTYSDAIVSDDCNRWITAMHDEMESLEKNHSWELEKLPKEKKPIRCKWIFKRKEGMSPSDEARYKARLVAKGYSQIPGIDFNDVFSPVVKHSSIRTLLSIVAMHDYELEQMDVKTAFLHGELEEDIYMEQPEGFVVPGKENLVCRLKKSLYGLKQSPRQWYKRFDSFMLSQKFRRSNYDSCVYLKVVDGSAIYLLLYVDDMLIAAKDKSEIAKLKAQLSSEFEMKDLGAAKKILGMEITRERHSGKLYLSQKCYIEKVLHRFNMHDAKLVSTLLAAHFRLSSDLCPQSAYDIEYMSRVPYSSAVSSLMYAMVCSRPDLSHALSVVSRYMANPGKEHWKAVQWIFRYLRGTSSACLQFGRSSDGLVGYVDSDFAGDLDRRRSLTGYVFTVGGCAVSWKASLQATVALSTTEAEYMAISEACKEVIWLRGLYTELCGVTSCINIFCDSQSAICLTKDQMFHERTKHIDLRYHFIRGVIAEGDVKVCKISTHDNPVDMMTKPVPATKFELCSSLVGVTV

SEQ ID NO: 197249 - protein, 983 aa, Oryza sativa
  Clone ID: PAT_MRT4530_93024C.1.pep
MASLKYDLPLLDRDTRFSLWQVKMRAVLAQQDLDDALSRFDKRTQDWSNDEKKRDRKAMSYIHLHLSNNILHEVLKEETAAGLWLKLEQICMTKDLTSKMHLKQKLFLHKLQDDESVMDHLSAFKEIVTDLESMEVKYDEEDLGLILLCSLPSSYANFRDTILYSRDTLTLKEVYDTLHAKEKMKKMVPSEGSNSQAEGLVVRGRQQEKNTNSKSRDKSSSSYRGRSKSRGKYKSYKYYKRDRHDISECWKLQDKDKRTGKYVPKGKKEKEGKAVVVTDGKSDAELLVAYAGCAQTSDQWILDTACTNHMCPNRDWFATYEALQGGTVFMGDDTPCEVADIGTVQIKMFDGCIRTLSDVWHIPNLKRSLISLCTLDRKGYKYSGGDGILKFWAEAVSTACYLVNRSPSYAIDKKTPIEPRAIKCIFLGYPSGVKGYKLWCPETKKVVISRNVVFHESVILHDKPSTNVPVESQEKTSVQVEHLISSGHAPEKEDVAINQDAPVIQDSDSSIVHQSPKRSIAKDKPKRNIKPPRRYIEEANIVAYALSVAEEIEGNAEPSIYSEAIVSDDCNRWITTMHDEMESLEKNHTWELVKLPKEKKSIRCKWIFKRKEGMSPSDEARYKARLVAKGYSQIPSIDFNDVFSPIVKHSSIRTLLSIVAMHDYELEQMDVKTAFLHGELEEDIYMEQPEGFVVPGKENLVCRLKKSLYGLKQSPRQWYKRFDSFMLSQKFRRSNYDNCVYLKVVDGSAIYLLLYVDDMLIAAKDKSEIEKLKAQLSSEFEMKDLGAAKKILGMEITRERHSGKLYLSQKGYIEKVLRRFNMHDAKPVSTPLAAHFRSSSDLCPQSDYDIEYMSRVPYSSAVGSLMYAMFGRSRDELVGYVDSDFAGDLDRRRSLTGYVFTIGGCAVSWKASLQATVALSTTEAEYMSISEACKEAIWLRGVIAEGDVKVCKISTHDNLADMMTKPVPATKFELCSSLVGVTV

SEQ ID NO: 197250 - protein, 716 aa, Oryza sativa
  Clone ID: PAT_MRT4530_93025C.1.pep
MASLKYDLPLLDRDTRFSLWQVKMRTVLAQQDLDDALSGFDKRTQDWSNDEKKRDRKAMSYIHLHLSNNILQELQDDGSVMDHLSAFKEIVADLESMEVKYDEEDLGLILLCSLPSSYANFRDTILYSRDTLTLKEVYDALHAKEKMKKMVPSEGSNSQAEGLVVRGRQQEKNTKNQSRDKSSSSYRGRSKSRGRYKSCKYCKRDGHDISECWKLQDKDKRTGKYVPKGKKEEEGKATVVTDEKSDAELLVAYAGCAQTSDQWILNTACTYHMCPNRDWFATYEAVQGGTVLMGDDTPCEVAADIKSANLYHLRGTTILGNVAAVSDSLSNSDATNLWHMRLGHMSEISLAELSKRGLLDGQSIGKLKFCEHCIFGKHKRVKFNISTHTTEANYSDLRVFGCTAYAHVDNGKLEPRAIKCIFLGYPFGVKGYKLWCPETKKVVISRNVVFHESVMLHDKPSTNVPVEGQEKASVQVEHLTGRRSGGAGGGSRRRRSSRGSPAAAPATAAGDASRRREGLERGRVGSAAAEDEPPAGSTPHLLLLPAGALARSTPSSSTLRTPPPPLVRGRRRRCNRGRRHRLEASATEATTPAEGEEEPAPVGRSGFGGRRGFGDLGEEEPVEGGGNLWAPPADICGSHQWCLHCEVRVFKALLSYVSSHGNSRRDHIAGHLRFSDPSSHDSLTKQSTKFSRAEMLMLVTHTGADDLAKCSILKGM

SEQ ID NO: 197251 - protein, 498 aa, Oryza sativa
  Clone ID: PAT_MRT4530_93026C.1.pep
MASLKYDLPLLDRDTRFSLWQVKMRAVLAQQDLDDALSGFDKRTQDWSNDEKKRDRKAMSYIHLHLSNNILQEVLKEETAAGLWLKLEQICMTKDLTSKMHLKQKLFLHKLQDDGSMMDYLSAFKEIVVDLESMRDTILYSRDTLTLKEVYDALHAKEKMKKMVPSEGSNSQAEGLVVRGMQQEKNTKNQSRDKSSSSYRGRSKSRDRYKSCKYCKRDGHDISECWKLQDKDKRTGKYVPKGKKEEEGKAAVVTDEKSDVELLVAYAGCAQTSDQWILDTACTYHMCPNRDWFATYEVVQGGTVLMGDDTPCEVAGIGTVQIKMFDGCIRTLSDVRHIPNLKRSLISLCTLDCKGYKYSGGDGILKVIKGSLVVMKADIKSANLYHLRGTTILGNVATVSDSLSNSDATNLWHMRLGHMSEIGLAKLSKRGLLDGQSITKLKFCEHCIFCKHKRVKFNTSTHTTEGILDYVHSDLWGPARKTSFRGAQYMMTIVDDYS

SEQ ID NO: 197252 - protein, 1131 aa, Oryza sativa
  Clone ID: PAT_MRT4530_93027C.1.pep
MDPSKGEAIHDEHFGLSLVAGGLCKEVLKEETAVGLWLKLEQICMTKDLTNKMHLKQKLFLHKLQDDESVMDHLSTFKEIVADLESMEVKYEEEDLGLILLCSLPSSYANFRDTILYSRDTLTLKEVYDALHAKEKMKKMVPYEGSNSQAEGLVVRGRQHEKNTNSKSRDKSSSNYRGRSKSRDWYKSCKYCKRDRHDISEYWKLQDKDKRTGKYIPKGKKEEESKAAVVTDEKSDAELLVAYAGCAQTSDQWILNTACTYHMCPNRDWFATYEAIQGGTVLMGDDTPCEVAADIKSANLYHLRGTTILGNVATVSDSLSNSDATNLWHMRLGHMSEIGLAELSKRGLLDEQSVGKLKFREHCIFGKHKRVKFNTSTHTTEGILDYMYSDLWRPARKTSFGGAHYMMTIVDDYSRKVWPYFLKHKYQAFDAFKEWKTMVERQTERKVKILCTDNGMEFCSKIFKSYCKSEGIVRHYTVPHTPQQNGVAERMNRTIISKARCMLSNAGLPKQFWAEAVSTACYLINRSPSYAIDKKTLIEVWSGSPANYSDSKIFGCTAYAHVDNGKLEPRAIKCIFLGYPSGVKGYKLWCPETKKVVISRNVVFHESVMLHDKPSTNIPVESQEKASVQSPKRSIAKDKPKRNTKPPQRYIEEANIVAYALSVAEEIEGNAEPSTYSEAIVSDDCNRWITAMHDEIESLEKNHTWELVKLPKEKKPIHCKWIFKRKEGLSPSDEARYKAKLVAKGYSQIPGIDFNDVFSPVMKHSSIRTLLSIVAMHDYELEQMDVKTAFLHGELEENIYMEQPKAIYLLLYVDDMLIAAKDKSEIAKLKVQLSSEFEMKDLGAAKKILGMEITRERHSGKLYLSQKGYIEKVVRRFNMHDAKPVSTPLAAHFRLSSDLCPQSDYDVEYMSRVPYSSVVGSLMYAIVCSRPDLSHALSVVSRYMANPGKEHWKAVQWIFRYLRGTSTACLQFGRSRDGLVDYVDSDFARDLDRRRSLTGYVFTIGGCAVSWKASLQETVALSTIEAGYMAISEACKEAIWLRGLYTDLCGVMSCINIFCDSQSVICLTKDQMFHERTKHIDVRYHFIRGVIAEGDVKVCKISTHDNPADMMTKPVPTTKFELCSSLVGVTV

SEQ ID NO: 197253 - protein, 145 aa, Oryza sativa
  Clone ID: PAT_MRT4530_93028C.1.pep
RKKKKKKKKKKKKKKKKKKNKIKNTSMENTYIQKKKLLGRAFWGSLLCPPFCKNLTVFYRDPTCITRAGRHPPLDWGNPCGSPFTSLAHHHFFTRWAKWQKPCTGSSFQTVLPPTCKLAPPFAGALRPGAWGVSPYFGPFPSGFP

SEQ ID NO: 197254 - protein, 84 aa, Oryza sativa
  Clone ID: PAT_MRT4530_93029C.1.pep
MSRNPGCTVFIGNLDEKVPERVLYEILIQVGRVVDLHIPRDKETNRSKGYAFAEYETEEIAQYAVKLFSGLVASYRHLDCDFWQ

SEQ ID NO: 197255 - protein, 181 aa, Oryza sativa
  Clone ID: PAT_MRT4530_9302C.1.pep
MAVNGSGFDSTRLDGVLALLDSKARAAAEDELRRQSREEQASVPAPPACYTRSTSRSIGRCRGCCRRRPRGWAAHAWQPSVMETVTAALARRVLGDNTEATRTVGSDEILARGIEGIKFLNLQVDDKKDEGSGVVDGFCPLSCICGERERGCSILDGVCEVVMTLVSTDYRVKNSGTRGCS

SEQ ID NO: 197256 - protein, 899 aa, Oryza sativa
  Clone ID: PAT_MRT4530_93030C.1.pep
MASLKYDLPLLDRDTRFSLWQVKMRAVLAQQDLDDALSRFDKRTQDWSVNEKKRDRKAMSYIHLQLSNNVLQEMLKEETAVGLWLKLEQICMTKDLTSEMHLKQKLFLHNLQDDESVMDHLSTFKESVADLESMEVKYDEEDLGLILLCSLPSSYANFRDTILNCRDTLTLKKVYDALHAKEKMKMVPSKGSNSQAESLDVRGRQQEKNRKNQSRDKSSSSYHGRSKSRGRYKSCKYCKRDGHDISECWKLQDKDKRTGKYIPKGKAAVVTDEKSDVELLVAYAGCAQTSDQWILDTTCTYHMCPNRDWFATYEAIQGGTVLMGDNTPCKVAGIGTVQIKMFDGCIRTLSDVRHIPNLKRSLISLCTLDRKGYKYSGGDGILKVTKGSLVVMKADIKSANLYYLRGTTILGNVAAVSDSLSNSDATNLWHMRFGHMSENGLAELSKRGLLDGQSIGKLKFCELCIFGKHKRVKFNTSTHTAEGLPKQFWAEAVSTACYLINRSPSYAIDKKTPIEVWSGSPANYSDLRVFGCTAYAHVNNGKLEPRAIKCIFLGYPSGVKGYKLWCLETKKVVIRRNVVFHESVMLHDKPSTNVPVESQEKASVQLPKEKKPIRCKWIFKRKEGISPSDEARYKARELEEDIFMEQPEGFVVPRKENLVCRLKKSLYRLKQSPRQWYKRFDSFMLSQKFRRSNYNSCVYLKVVDGSAIYLLRYVDDMLIAAKDKSEIAKLKAQLSSEFEMKDLGAAKKILDYDVEYMSRVPYSSAVGSLMYAMFGISTDGLVGYVDSDFAGDLDRRRSLTGYIFTIGGCAVSWKASLQATVALSTTEAEYMAISEACKEAIWLRGLYTELCGVTSCVDIFCNSQSAICLTKDQMFHERTKHIDVRYHFIRGVIAEGDVK

SEQ ID NO: 197257 - protein, 1166 aa, Oryza sativa
  Clone ID: PAT_MRT4530_93031C.1.pep
MTSLKYDLPLLDRDTRFSLWQVKMRAVLAQQELDDALSGFDKRTQDWSNDEKKRDRKAMSYIHLHLSNNILQEVLKEETAAGLWLKLEQICMTKDLTSKMHLKQKLFLHKLQDDGSVMDHLSAFKEIVADLESMEVKYDEKDLALILLCSLPSSYANFRDTILYSRDTLTLKEVYDALHAKEKMKKMVPSEGSNSQAEGLVVRGSQQEKNTNNKSRDKSSSSYRGRSKSRGRYKSCKYCKRDGHDISKCWKLQDKDKRTGKYIPKGKKEEEGKAAVVTDEKSDAELLVAYAGCAQTSDQWILDTACTYHMCPNRDWFATYEVVQGGTVLMGDDTPCEVAGIGTVQIKMFDGCIRTLSDVRHIPNLKRSLISLCTLDRKGYKYSGGDGILKVTKGSLVVMKASIKSANLYHLQGTTILGNVATVSDSLSNSDATNLWHMRLGHMSEIGLAELSKRGLLDGQSISKLKFCEHCIFGKHKRVKFNTSTHTTEGILDYVHSDLWGPARKTSFGGARYMMTIVDDYSRKVWPYFLKHKYQAFNVFKEWKTMVERQTERKVKILRTDNGMEFCSKIFKSYCKSEGIVRHYTVPHTPQQNGVAERMNRIIISKARCMLSNAGLPKQFWAEAVSTACYLINRSPSYANKKTPIEVWSGSPANYSDLKVFGCTAYAHVDNGKLEPRAIKCIFLGYPSSVKGYKLWCPETKKVVISRNVVFHESIMLHDKPSTNVPVESQEKASVQVEHLINSGHAPEKEDVAINQDAPVIEDSDSSTVQQSPKRSIAKDKPKRNKELEKNHTWELVKLPKEKKHIRCKWIFKRKEEQMDVKTAFLHGELEEDIYMEQPEAIYLLLYVDDMLIAANDKSEIAKLKAQLSSEFEMKDLGVAKKILGMEITRERHSDKLYLSQKGYIEKVFRRFNMHDAKPVSTPLAAHFRLSSDLCPQSDYNIEYMSRVPYSSAVGSLMYAMICSRPDLSHALSVVSRYMANPGKEHWKDVQWIFRYLHGTSSACLQFGRSRDGLVGYVDSDFAGDLDRRRSLTGYVFTIGGCAVSWKASLQATVALSTTEAEYMAISEACKEAIWLRGLYTELCGVTSCINIFCDSQSAICLTKDQMFHERTKHIDVRYHFIRGVIAEGDVKVCKISTHDNPADMMTKPVPATKFELCSSLVGVTV

SEQ ID NO: 197258 - protein, 97 aa, Oryza sativa
  unsure (1)..(97): unsure at all Xaa locations
  Clone ID: PAT_MRT4530_93032C.1.pep
CCMYAAMYPETFGFSAYXQQQQPSSDAVFCIYTTXLPLIADPPDILVSCXXLXLPCTLANPHACIHGXGFPLIALSLTHGSCICSLSLSLSLITSHV

SEQ ID NO: 197259 - protein, 943 aa, Oryza sativa
  unsure (1)..(943): unsure at all Xaa locations
  Clone ID: PAT_MRT4530_93033C.1.pep
DALSGFDKRTQDWSNDEKKRDRXLKEETAAGLWLKLEQICMSKDLTSKMHLKQKLFLHKLQDDGSVMDHLSAFKEIVADLESMEDKDKRTGKYVPKGKKEEEGKAAVVTDEKSDAELLVAYAGCAQTSDQWILDTACTYHMCPNRDWFATYEAVQGGTVLMGDDTPCEVAGIGIVQIKMFDGCISTLSDVRHIPNLKRSLISLCTLDRKGYKYSGGDGILKVTKGSLVVMKADIKSANLYHLRGTTILGNVAAVSDSLSNSDATNLWHMRLGHMSEIGLAELSKRGLLDGQSIGKLKFCEHCIFGKHKRVKFNTSTHTTEGILDYVHSDLWGPARKTSFGGARYIMTIVDDYSRKVWPYFLKHKYQAFDVFKEWKTMVERQTERKVKILRTDNGMEFCSKIFKSYCKSEGIVRHYTPQQNGVAERMNRTIISKARCMLSNAGLPKQFWAAAVSTTCYLINRSPSYAIDKKTPIKVWSGFPANYSDLRVFGCTAYAHVDNGKLEPRAIKCIFLGYSSGVKGYKLWCPETKKVVISRNVVFHESVMLHDKPSTNVPVESQEKASVQFPKRSIAKDKPKRNTKPPQRYIEEANIVAYALSVTEEIEGNAEPSTYSEAIVSDDCNRWITTMHDEMESLEKNHTWELVKLPKEKKPIRCKWIFKRKEAIYLLLYVDDMLIAAKDKSEIEKLKAQLSSEFEMKDLGAAKKILSMEITRERHSGKLYLSQKGYIEKVLRRFNMHDAKPVSTPLAAHFRLSSDLCPQSDYDIEYMSRVPYSSAVGSLMYAMFGRSRDGLIGYVDSDFPGDLDRRRSLTGYVFTIGGCAVSWKASLQATVALSTTEAEYMAISEACKEALWLRGLYTELCGVTSCINIFCDSQSAIYLTEDQMFHERTKHIDVRYHFIRGVIAEGDVKVCKISTHDNPADMMIKAVPATKFELCSSLVGVKV

SEQ ID NO: 197260 - protein, 662 aa, Oryza sativa
  Clone ID: PAT_MRT4530_93034C.1.pep
MESGRLLAHSDEPSSAASKHGDGRGGWRAALFIIAVGFLERVGFYGVQGNLMMYLTGLMGMSMAAAAAADNAWGGTVMVLTLVGALAADSHLGRYRAVVAAGVLYLLSLGMLTVSSTLQPKHPRPASCNGGATACLPPPSPTSRLAFFYAALYLLALAQGFHKPCSEAIGADQFADDADPGANASRSSYFNWFHFSTSWGYAVATTLLSYVEDNVSWTVGFAVCWATMVLYLAVFLLGTGTYRATAERPIDGAPLARLAETSAAAARAWTKRVFCRKDAICTERSGVSAYGRSGCAKRAGGGASFFSLPVSTLSLLELLPFFVGSFGWVEAAAGQWRKLKRPKRCCLVPGSPLAEHGERPAGGGTEVAWASSQGRSGGMQRAGGRVLQQVRKSAGGGAPVRSWWKPRAANACVVVNELMGDKLLERLQGFQAIVFAIIASQDITLFTKQGSTMNRNVGGGLVVPPAALQFAISVTIVTLLPVYDRALVPLARRLTRHLAGITTLQRVGAGMAMSGLAMAVAALVEAKRLRAASDAGLVDRPDATVPTSVWWLVPQFVLLGTSKVFGLIGLEEFFYDQVPVELCSVGLAVSLSVLGVGSYASGVLVSAIDWVTRGEGESWFSDNLNRAHLDYFYWILATLAALEVAIFVYIAKRYVYKNKGEQ

SEQ ID NO: 197261 - protein, 2323 aa, Oryza sativa
  Clone ID: PAT_MRT4530_93035C.1.pep
MRSSMKPEAGHRAGPASPMRQSTPARMSLRHGHSIKAVEATIEIKITEGSSDFGARFAARMGGIADEVVLIDYGDRPVPVDGDGVVQISRRVVVVDKDGVLKLNARAWRGNSDGVDVAGEDDAEFTAQSARTSGAILDVGFAKLLKPAIGTNKREIHMENHPFPKRRRLMAPPPRSASAAAAAGGGFIPDDILFSEILVRLPAKCLVRFQSVCKLWRATIISTSFARRHLEHSRPRPSMVVMPRMFLSNPKKFKLQGVTFYRFQPGQSKVAELILEKRFPRGIPMFSMPLHCDGLILIPCVSGEIFVCNLTTSEFVELPRGSHSVALEHRVAFGFDPWSGKYKVARHFLRSSHSGGESRAGHEILTLGDGEDCWKWKATIDPPYPINARTPICLPGFFYWSALHSTTGHGLSKGLSEQQRHAMPAWWQVVLCPLRLAIFDKRTQDWSVDEKKRDRKAMSYIHLHLSNNILHEVLKEETAAGLWLKLEQICMTKDLTNDESVMDHLSAFKEIVADLESMEVKYDEEDLGLILLCSLPSSYANFRDTILYSRDTLTLKEVYDALHAKEKMKKMVPSEGSNSQAEGLVVRGRQQEKNTNNKSRDKSSSSYRGRSKSRGRYKSCKYCKRDGHDISECWKLQDKDKRTGKYIPKGKKEEEGKAAVVTDEKSDAELLVAYVGCAQTSDQWILDTAYTYHMCPNRDWFATYEVVQGGTVLMGDDTPCEVAGIGTVQNEMFDGCIRTLSDVRHIPNLKRSLISLCTLDRKGYKYSDGDGILKVTKGSLVVMKADIKSANLYHLRGTTILGNVAVVSDSLSNSDATNLWHMRLGHMSEIGLAELSKRGLLDGQSIGKLKFCEHCIFGKHKRVKFNTSTHTTEGILDYVHSDLWGPARKTSFGGARYMMTIVDDYSRKVWPYFLKHKYQAFDVFKEWKTMVERQTERKVKILRTDNGMEFCSKIFKSYCKSEGIVRHYTVPHTPQQNGVAERMNRTIISKARCMLSNAGLPKQFWAEAVSTACYLINQSPSYAIDKKTPIEVWSGSPANYSDLRVFGCTAYAHVDNGKLEPRAIKCIFLGYPSGVKGYKLWCPETKKVVISRNIVFHESVMLHDKPSTNVPVESQEKASVQVEHLISSGHAPEKEDVAINQDAPVIEDSDSSIVQQSPKRSIAKDKPKRNIKPSRRYIEEANIVAYALSVAEEIEGNAEPSTYSEAIVSDVCNRWITAMHDEMESLEKNHTWELVKLPKEKKPIRCKWIFKRKEGMSPSDEARYKARLVAKGYSQIPGIDFNDIFSPVVKHSSIRTLLSIVAMHDYELEQMDGKTAFLHGELEEDIYMEQPEGFVVPGKENLVCRLKKSLYGLKQSPRQWYKRFDSFMLSQKFRRSNYDSCVYLKVVDGSAIYLLLYVDDMLIAAKDKSEIEKLKAQLSSEFEMKDLGAAKKILGMEITRERHSGKLYLSQKCYSEKVLRRFNMHDAKPVSTPLAAHFRLSLDLCPQSYYDVEYMSRVPYSSAVGSLMYAMVCSRPDLSHALSVVSRYMANPGKEHWKAVQWIFRYLRGTSSACLLFGRSRDGLVGYVDSDFAGDLDRRRSFTGYVFTIGGCAVSWKASLQATVALFTTEAEYMAISEACKEAIWLRGLYTKLCGVTSCINIFCDSQSAICLTKDQMFHERTKHIDVRYHFIRCVIAEGDVKVCKISTHDNPADMMTKPVSATKFELCSSLLNVSVCVSLADREQVFLSIDGCSWHVHDSSSPCASSWSWASQVGDRIQLRPFSAAPAIVGDGIEDVDDRRVKQMRRRRDARIAQKAFMEYLHVTRGICFSDAEHMSKRSPIFISKLLEKVKDAAKEPTEEGEEVPFRSKVKKREMRDERVSKALVRLFNFHPINEFEPFFESIGIAPGEYEPLLPRDLMFLNDDETMLDNFRVLCNYGIARTKIGRIYRDATEVFSFGHGVLASKLKALEDQGLSKTSVIKLVMSSPVILVRDPNVELKILRWLDDVGIQRDWLGRFLSVKKSYNWGKMVQVPQFFSDLGFTNEGIGKLVRQNPDFLFSGSGKMLFSAVLVMLKAGFGKKELVDLFLNFPNLSVDNFTRNLRRGIFFLAEIGVSEEDIKKFVVSNGSILGSVQLKKPNSIMTHLSVGKKRLCRMVMEDPQLLMKFSLGAKVSRIPKVDLHEASFKEKVKFLQNLGFMEGSERMTRGLKAFRGKGDELKDRYDFLVKTGLDPEHVVQMITMAPHVLNQKIHVLESKISFLVNDMGYPLSTLVIFPSFLSFTVERTKLRFLMYNWLLEKGVIATGLALSTLLATADKHFVKRYVVRHPMGLEVWEKFKTEGTDE

SEQ ID NO: 197262 - protein, 258 aa, Oryza sativa
  unsure (1)..(258): unsure at all Xaa locations
  Clone ID: PAT_MRT4530_93036C.1.pep
MADMAPARALALVLLAVAVGSALMAAAQDAPSPPTPMAPSPSTDETPPVWLKAHATFYGGADASGTMGGACGYVDLYSXGCYKIACDRKRAPQWCKPEXVTVTVTATNFCPPNWNLPSDNGGWCNPPRPHFDMAQPAWEKIGIYRAGIIPVMYQRVPCVKKGGVRFTINGHDYFNLVLVTNVATTGSIKSMDIMGSNSTDWMPMVRNWGANWHSLSYLTGQMLSFRVTNMDGQTLVFRNIVPSGWKFGQTFASKLQFK

SEQ ID NO: 197263 - protein, 76 aa, Oryza sativa
  Clone ID: PAT_MRT4530_93037C.1.pep
MEESPEDDAEGNRFTWRGGEMEAGRSGGGEELSHGGEVMQEWRLETGAGEGEGEEELLDSYPRVANSVSFSGLIRV

SEQ ID NO: 197264 - protein, 262 aa, Oryza sativa
  Clone ID: PAT_MRT4530_93038C.1.pep
MASSPRAFALVFFAIAAVGCTQLTTADDAAPPVWQKAHATFYGGADASGTMGGGCGYGDLYSQGYGTRNAALSTALFNDGASCGQCYKIACDRKRAPQWCKPGVTVTITATNFCPPNWDLPSDNGGWCNPPRPHFDMAQPAWEKIGIYSAGIIPVIYQRVPCIKKGGVRFTINGHDYFNLVLVTNVATTGSIKSMDIMGSNSTDWMPMVRNWGANWHSLSYLTGQTLSFRVTNMDGQTLVFKNIVPSGWKFGQTFTSKLQFK

SEQ ID NO: 197265 - protein, 278 aa, Oryza sativa
  Clone ID: PAT_MRT4530_93039C.1.pep
MADMAPARALALVLLAVAVGSALMAAAQDAPSPPTPMAPSPSTDETPPVWLKAHATFYGGADASGTMGGACGYVDLYSQGYGTRNAALSTALFNDGASCGQCYKIACDRKRAPQWCKPGVTVTVTATNFCPPNWNLPSDNGGWCNPPRPHFDMAQPAWEKIGIYRAGIIPVMYQRVPCVKKGGVRFTINGHDYFNLVLVTNVATTGSIKSMDIMGSNSTDWMPMVRNWGANWHSLSYLTGQMLSFRVTNMDGQTLVFRNIVPSGWKFGQTFASKLQFK

SEQ ID NO: 197266 - protein, 182 aa, Oryza sativa
  Clone ID: PAT_MRT4530_9303C.1.pep
MTEYYSSTVDECYETTGRQHGHGHGHGHGHGHGHGGMRVESHTDDYYSEGGEIDRGRRNNSMHSQEYLMRQQSGHGGYGYGGGQQQEYYKREEREHKQRERVGEIGALASGAFALYEGHQAKKDPANAQRHRIEQGVAAVAAVGAGGYAYHEHREQKQASYGAKEQQYGYARMPQQQGYYCN

SEQ ID NO: 197267 - protein, 324 aa, Oryza sativa
  Clone ID: PAT_MRT4530_93040C.1.pep
MPELAHRVAAASSPAGSDGGEGTAAAVTPGCHRLPSPPVGSGTSGRCRLPSHWISGGEGAARARRLPSRRKGGRHPPPSSTCGVTGLENVSGDQQGSRLSAKWDAERHATATTRWSVLKPAALAVRDPGNGNNNQAGCGLTVEGLGVGSLGGVSMVELMRGESAAAARDDLGSVSGSGGGWEEDAADMPVDAAAVAERAEWRWPKHAGNSGAGREEGGEEARERAEEGGDRRGSVEAGRVVGVIPQPSPSSFELLPPEYDESRLPSAVPSSCRLELRWARWGVRADLPTGGTSDVRPAGHRRLSTTPAAYPDPTTPRRARCPSA

SEQ ID NO: 197268 - protein, 104 aa, Oryza sativa
  unsure (1)..(104): unsure at all Xaa locations
  Clone ID: PAT_MRT4530_93041C.1.pep
LRPPGRSGRRSREKSRWPDPWLAVGWRRRKWPTVGGEAAVAGXRRLVMWCWRRKRLTVGGEAAVAESVRRRPDPVXAGRRRLPTVGRRGGISGRRSGGGHGPIC

SEQ ID NO: 197269 - protein, 154 aa, Oryza sativa
  unsure (1)..(154): unsure at all Xaa locations
  Clone ID: PAT_MRT4530_93042C.1.pep
MATARRNQIMPSNIPKKYQEIDQANHHLQTSPPHCVGFRGSGRSSEKMXAXXXXHTXXXXXXXXXXXXXPXXXXXXXXXXXXXXPPXXXRSEAAGAGRRLGACRWAFVVVGGGGANTPARAAYARRLWARVVGKGDSSSCGPDNACAAAGLSWE

SEQ ID NO: 197270 - protein, 415 aa, Oryza sativa
  Clone ID: PAT_MRT4530_93043C.1.pep
MPFGGTAAGLRALSLPRIGNVVPTRSRIPVLRDRLGFRSRIPKFVYSIIDLKLSMLTIFLLDIYSRSRCRLWNKDDEGQKAAWLSLRQQLAPTVGTSERNHGERMSPKRVAKEKVAKRKESEAGGEMAAEEGVGAAGSAVIGDGALRWRRQRSHGRDRAQAGVTASGRSGQATATMSRFATDSARQVIRIRRWYRTGRKGCTAGRKQRRMVRGRVSNGRVVRECAAGWFVDGKVGLWLPIEQNGNVLLLEVHYEGSSVGPTETKNIGDTLRPEASGEGQKGNHMGESHMEKAVARNTQTWAGKRPRQKAARAKMVRKKRPTVEGEVTVAGSVVGGGVAEEEVADGRGRGCGGRIRRLVMWCWRRKRLTVGGEAAVAESVRRRPDPVVGGEAAAANGREAGRHQRPALGRGPRPDL

SEQ ID NO: 197271 - protein, 140 aa, Oryza sativa
  unsure (1)..(140): unsure at all Xaa locations
  Clone ID: PAT_MRT4530_93044C.1.pep
GRDHPSRRYPRPGRQPPTGSRRSPSVLAETMFGAKHNCTRATVLTWIIAYRLKSQHATIFMTLSLAKLLFPNYVWIFLLHFLLYIYSNFKKKKKKNSRGGGPVPHFPPMFNSFFPFPLALLFLQPSFDLGXTXCLXPTLX

SEQ ID NO: 197272 - protein, 158 aa, Oryza sativa
  Clone ID: PAT_MRT4530_93045C.1.pep
SCRPGRLSPPLRAACHRARLLSPSPCRPPPHRPPLPLLPHTPPCPHLPPAFVREIARARRGSARWPSASLIEEEEKRGEKRGDVRADDRGGGEEGEGLPEAAVAGVRGEDGGVGREGEGGRKGRRGKRAARRRQGPRLSTWRVRTSPRPSSPSRRPPH

SEQ ID NO: 197273 - protein, 554 aa, Oryza sativa
  Clone ID: PAT_MRT4530_93046C.1.pep
MVRRHLLRGHSLDRFLPIRSLIMSSSSSFSSSSPSPPPPSSSSSRGSSSGRWCGVSVAEEDEDDAAVSATTTPPLPPLQKRVLSRSHGSKAKPLGGSVDHLPPVVPPSSKNVRDSGPPSEIDLVKEKFAKLLLGEDMSGTGKGVSSALALSNAITNLAASVFGEQRRLEPMSADRRARWNKEIDWLLSVTDHIVEFVPSQQASTDGTSMEVMGTQQRRDLLINIPALRKLDAMLLEYLDNFKDEQEFWYVKKDADEGEKGDAPRQGDKWWIPTVRVPPEGLPDASKKWILHQKDLVGQVLKAAMAINADVLTEMEIPGEYIETLPKNGRSSLGDSIYKIITDDHFDPNELLSSVDLSTEHKIVDLKDRIEASVVIWQRKISNKLSWGPGVSLEKREQFEERAQTVLLILKHQFPGVPQSSLDISKIQYNKDVGYAILESYSRTLESLAFAVLSRIEDVLHADAIARDPKRTKSRRRPSLVDIPEIIDNALEEEETVNSIDANSQVTNNSIHWQEQEHEDKGARLRKVHRMVTKKLLHIEKVDNLGGGLKSFSHR

SEQ ID NO: 197274 - protein, 113 aa, Oryza sativa
  Clone ID: PAT_MRT4530_93047C.1.pep
LLLLRSLLRLVSLLSAPARGGRETDERRRGGLEVNGGGAVGLPEAWSHVRSPVIVPLLRLAVAVCLTLSVLLFLRRMCLAVVVSGVQILRRRPVRRFRCDPFPDDHPEVGSCA

SEQ ID NO: 197275 - protein, 110 aa, Oryza sativa
  Clone ID: PAT_MRT4530_93048C.1.pep
MADGSKRDRFSLGPRKRKETSARSPRHGWLCRFGNRPWGSAGARELRGEGMGSRVRGQTTWATAGAARLLLCVQALESSEGTEGGRGVGRGAGGAAWQGAGPDGAGTGSK

SEQ ID NO: 197276 - protein, 384 aa, Oryza sativa
  Clone ID: PAT_MRT4530_93049C.1.pep
MAAAGIGHIPSDAVVEILVRLPPSSRRRCRLVCRHWRDLVDDRTPEMRSRAKALVLVHAVAHVFDDLPEGRRRQLLPNCRGVDIVGTCNGLVFLCEWSRGFALVNPFTGERVDGAGVPPPPCPRGEEPPFYQPTHAAYAFGYHPTTGRYKIVHFPIQDRRTETFDAVRVLTLGAEEDASTSWRDVPMPAGGSSRRGSCGVVSVDGSTYWITRDTERVMSLDLGDDERVAAVTPLLPARTAGPGCTCKLTDVRGRLGVAVSVSMATSTDTDVWVLKGGGGGGGERRWSRRYSVRVHGVEQQLAWPHFAHGEHVLTTSTHCSIRGFLYAHRLSDDGRRRLQCSAVRINERRPGKVVGSFGACYRRDLRTFAYVETTEPVSVFSLRG

SEQ ID NO: 197277 - protein, 151 aa, Oryza sativa
  unsure (1)..(151): unsure at all Xaa locations
  Clone ID: PAT_MRT4530_9304C.1.pep
MAEYYSNTVDECYETTGRQHGHGHGHGHGGMRVESHTDDYYCEGGEIDRGRRNNSMHSQEYLMRQQSGHGGYGHGGGQQQEYYKREEREHKQRERVGEIGALASGAFALYEGHQAKKDPANAQRHXRIEQGVAAVAAGGAGGYSYHEHREQ

SEQ ID NO: 197278 - protein, 50 aa, Oryza sativa
  Clone ID: PAT_MRT4530_93050C.1.pep
MDLGNKDQWQIQGAKGGGAVRVVLEMAGVENALGKQLRSKNPLNNARATI

SEQ ID NO: 197279 - protein, 80 aa, Oryza sativa
  Clone ID: PAT_MRT4530_93051C.1.pep
MERSRASGITKLDNTATAMDLELEVTMMQTPSNLGELTGEQGFGTTTVGTTEDSQGGGNRRASLLLLRLLDPRGRGDGRG

SEQ ID NO: 197280 - protein, 52 aa, Oryza sativa
  Clone ID: PAT_MRT4530_93052C.1.pep
MRKKTTGTAGQAKIGLGEGGKRSTFTSHRRPEVRERMAVCQVNIAALWEGDF

SEQ ID NO: 197281 - protein, 129 aa, Oryza sativa
  Clone ID: PAT_MRT4530_93053C.1.pep
MGRRCYRDVFWLVVLLFHLLVFVGALAVTGLNRFAQADRFTNLTATHRFTESLEPVRELLQRPTLEVEEVTPLSSRSRSSPTMAPRGCGVYYRMGMVGGNYWEPRRKDAERVVMRAATHNLTTYLTVLT

SEQ ID NO: 197282 - protein, 83 aa, Oryza sativa
  Clone ID: PAT_MRT4530_93054C.1.pep
VGTVPNRPLEKSGALSLYVKGAPSPGTWTVGCGFAANLLALHDQSFGGGNAHGAARLGSAETGKTFGVIKGKDAGGILDRGGG

SEQ ID NO: 197283 - protein, 126 aa, Oryza sativa
  Clone ID: PAT_MRT4530_93055C.1.pep
MKKMVPSEGSNSQAEGLVVRGRQQEKNTKNQSRDKSSSSYRVRSKSRGRYKSCKYCKRDGHDISEYWKLQDKDKRTGKYIPKVVHKLSDQWILDTACTYHMCPNRDWFATYEAVQGGTVLMGDDTP

SEQ ID NO: 197284 - protein, 1169 aa, Oryza sativa
  Clone ID: PAT_MRT4530_93056C.1.pep
MASLKYDLPLLDRDTRFSIWQVKMRAVLAQQDLDDALSGFDKRTQDWSNDEKKRDRKAMSYIHLHLSNNILQEVLKEETAAGLWLKLEQICMTKDLTSKMHLKQKLFLHKLQDDGSVIDHLSAFKEIVADLESMEVKYDEEDLGLILLCSLPSSYANFRDTILYSRDTLTLKEVYDALHAKEKMKKMVPSEGSNSQAEGLVVRDSQQEKNTNNKSRDKSSSSYRGRSKSRGRYKSCKYCKRDGHDISECWKLQDKDKRTGKYIPKGKKEEEGKAAVVTDEKSDAELLVTYAGCAQTSDQWILDTACTYHMCPNRDWFATYEVVQGGTVLMGDDTPYEVAGIGTVQIKMFDGCIRTLSDVRHIPNLKRSLISLCTLDRKGYKYSGGDGILKVTKGSLVVMKADIKSANLYHLRELSKRGLLDGQSIGKLKFCEHCIFGKHKRVKFNTSTHTTEGILDYVHSDLWGPARKTSFGGARYMMTIVDDYSRKIWPYFLKHKYQAFNVFKEWKTMVERQTERKVKILRTDNGMEFCSKIFKSYCKSEGIVRHYTVPHTPQQNVVAERMNRTIISKARCMLSNAGLPKQFWAEAVSTACYLINRSPSYAIDKKIPIEVWSGSPANYSDLKVFGCTAYAHVDNVMLHDKPSTNVPVENQEKASVQVEHLISSGHAPEKEDVAINQDAPVIEDSDSSIVQQPPKHSIAKDKPKRNIKPPRRYIEEVNIVAYALSVAEEIEGNAEPSTYSEAIVSDDCNRWITAMHDEMESLEKNHTWELVKLPKEKKPIRCKWIFKRKEGMSPSDEARSKARLVAKGYSQIPGIDFNDVFSPVVKHSSIHTLLSIVAMHDYELEQMDVKTAFLHGELEEDIYMEQPEGFVVPGKENLVCRLKKSLYGLKQSPRQWYKRFDSFMLSQKFRRSNYDSCVYLKVVDGSAIYLLLYVDDTLIAAKDKSEIAKLKAQLSSEFEMKDLGAAKKILGMKITRERHSDLCPQSDYDIEYMSRVTYSSAVGSLMYAMFGRSRDGLVGYVDSDFAGDLDKRRSLTGYVFTIGGCAVSWKASLQATVALSTTEAEYMAISEACKEAIWLRGLYTELCGVTSCINIFCDSQSAICLTKDQMFYERTKHIDVRYHFIRGVITEGDVKVCKISTHDNPADMMTKPVPATKFELCSSLVGVTV

SEQ ID NO: 197285 - protein, 1137 aa, Oryza sativa
  Clone ID: PAT_MRT4530_93057C.1.pep
MHLKQKLFLHKLQDDGSVMDHLSAFKEIVADLESMEVKYDEEDLGLILLCSLPSSYANFRDTILYSRDTLTLKEVYDALHAKEKMKKMVPSEGSNSQAEGLVVRGRQQEKNTNSKSRDKSSSSYRGRSKSRGRYKSCKYCKRDGHDISECWKLQDKDKRTGKYTPKGKKEEEGKATVVTDEKSDAELLVAYAGCAQTSDQWILDTACTYHMCPNRDWFATYEAVQGGTVLMGDDTPCEVAADIKSANLYHLRGTTILGNVAAVSDSLSNSDATNLWHMRLGHMSEIGLAELSKRGLLDGQSIGKLKFCEHCIFGKHKRVKFNTSTHTTEGILDYVHSDLWGPAHKTSFGGARYMMTIVDDYSRKVWPYFLKHKYQAFDVFKEWKTMVERQTERKVKILRTDNGMEFCSKIFKSYCKSEGIVHHYTVPHTPQQNGVAERMNRTIISKARCMLSNAGLPKQFWAEAVSTACYLINRSPSYAIEKKTPIEVWSGSPANYSDLRVFGCTAYAHVDNGKLEPRAIKCIFLGYPSGVKGYKLWCPKTKKVVISRNVVFHESVMLRDKPSTNVPVESQEKTSVQFPKRSIAKDKPKKNIKPPRRYIEEANIVAYALSVAEEIEGNAEPSTYSEAIVSDDCNRWITVMHDEMESLEKNHTWELVKLPKEKKPIRCKWIFKRKEGMSPSDEARYKARLVAKGYSQIPGIDFNDVFSSVVKHSLIRTLLSIVAMHDYELEQMDVKTAFLHGELEEDIYMEQPEGFVVLGKENLVCRLKKSLYGLKQSPRQWYKRFDSFILSQKFRRSNYDSCVYLKVVDGSAIYLLLYVNDMLIVAKDKLEIANLKAQLSSEFEMKDLGAAKKILGMEITRERRSGKLYLSQKGYIEKVLRRFNMHDAKPVSTPLAAHFRLSSDLCPQSDYDIEYMSRVPCSSAVGSLMYAMVCSRPDLSHALSVVSRYMANPGKEHWKAVQWIFRYLRGTSSACLQFGRSRDGLVGYVDSDFARDLDRRRSLTGYVFTIGGCAVSWKVSLQATVALSTTEAEYTAISEACKEAIWLRGLYTELCGVTSCINIFCDSQSAICLTKDQMFHERTKHIDVRYHFIRGVIAEGDVKVCKISTHDNPDDMMTKPIPATKFELCSSLVGVTV

SEQ ID NO: 197286 - protein, 127 aa, Oryza sativa
  Clone ID: PAT_MRT4530_93058C.1.pep
MDEGAELFSDSPGEKFRIIPSGGGGCGCGMPLAGGDVQLCIAVRPSESRKLGSAPPHRRRCSLAVALADADEGNPLPRGCGSNTIPTTSNLGSVVGVDTLVLGQEGEACSLAALEPGETNREGGDQR

SEQ ID NO: 197287 - protein, 341 aa, Oryza sativa
  Clone ID: PAT_MRT4530_93059C.1.pep
DPPCAVDGCKEDLSKCRDYHRRHKVCEAHSKTPLVVVSGREMRFCQQCSRFHLLQEFDEAKRSCRKRLDGHNRRRRKPQPDPMNSASYLASQQGARFSPFATPRPEASWTGMIKTEESPYYTHHQIPLGISSRQQHFVGSTSDGGRRFPFLQEGEISFGTGAGAGGVPMDQAAAAAAASVCQPLLKTVAPPPPPHGGGGSGGGKMFSDGGLTQVLDSDCALSLLSAPANSTAIDVGGGRVVVQPTEHIPMAQPLISGLQFGGGGGSSAWFAARPHHQAATGAAATAVVVSTAGFSCPVVESEQLNTVLSSNDNEMNYNGMFHVGGEGSSDGTSSSLPFSWQ

SEQ ID NO: 197288 - protein, 318 aa, Oryza sativa
  unsure (1)..(318): unsure at all Xaa locations
  Clone ID: PAT_MRT4530_9305C.1.pep
MTMSTSASPPSSSAAEYVEHLTHQVAIPSITDKFQFFLGPIGDLDPTEFINGETNHIPFRFANPDLSCWKNTFKSWLSAENSWPAWYKRSXCGPTTNWQRVAEXLIDKKQFPLGKYLLGYLYQTLNTVVTKIASGKKVIDRPPLANAEFPRFEPITDDDGETSTTRRCRSFGEAASVNIASKLSAEPFGEWFNNFYDGFPKNARIWFAYEGHSVFELPEDFWFDEVNSEKYDKSREVFSAAIRPCIIPVGIHQGKNIKMTYEFYHPTCAARQFGIGQLPISLFFADKIQSRGEITSLLMMDQLLNLPGPPLQHQQYQI

SEQ ID NO: 197289 - protein, 940 aa, Oryza sativa
  Clone ID: PAT_MRT4530_93060C.1.pep
VYGALHPNRRERRLAPSEGSNSQAEGLVVRARQQEKNTNSKSRDKGASSYRGRSKSRGRYKSCKYYKRDGHDISECWKLQDKDKRTGKYVPKGKKEEEGKAAVVTDEKSDAELLVAYAGCAQTSDQWILDTACTYHMCLNRDWFATYEAVQGGTVLMGDDTPCEVAGVETVQIKMFDGCIKTLSDVRHIPNLKRSLISLCTLDRKVYKYSGGDGILKVTKGSFVVMKADINSANPVPCARDNYIRYTIDKKTPIEVWSGSPANYSDLRVFGCTAYAHVDNGKLEPRAIKCIFLGYPSGVKDYKLWCPKTKKVVISRNVVFHESVMLHDKPSTNVPVESQEKASVQVEHLISSGHAPEKEDVAINQDASVIEDSDSSAVQQSPKRSIAKDKPKRNIKPPRRYIEEANIVAYALSVAEEIEGNAEPSTYSEAIVSDGCNRWITAMHDEMESLEKNHTWELVKLPKEKKPIRCKWIFKRKKGMSPSDEARYKARLVAKGYSQIPGIDFNDVFSPVLKHSSIRTLLSIVAVHDYELEQMDVKTAFLHGELEEDIYMEQPEGFVVPGKENLVYRLKKSLYGLKQSPRQWYKRFDSFMFSQKFRRSNYDSCVYLKVVDGSSIYLLLYVDDMLIAAKDKSEIEQLKAQLSSEFEMKDLGAAKKILGMEITRERHSGKLYLSQKGYIEKVLRRFNMHDAKPVSTPLAAHFRLSSDLCPQSDYDIEYMSRVPYLSVVGSLMYAMVCSRLDLSHALSVVSRYMANPGKEHWKVVQWIFKYLRGTSSACLQFGRSRDGLVGYVDSDFAGDLDRRRSLTGYVFTIGGCAVSWKASLQATVALSTTEVEYMAISEACKEAIWLRGLYTELCGVTSCINIFCDSQSAICFTKDQMFHERTKHIDVRYHFIRGVIAEGDVKVCKISTHDNPADMMTKPVPTTKFELCSSLVGVTV

SEQ ID NO: 197290 - protein, 962 aa, Oryza sativa
  Clone ID: PAT_MRT4530_93061C.1.pep
MEVLKEETAAGLWLKLEQTCMTKDLTSKMHLKQKLFLHKLQDDESVMDHLSTFKEIVADLESLEVKYDEEDLGLILLCSLPSSYANFMDTILYSHDTLTLKEVYDALHAKEKMKKMVPSEGSNSQAEGLVVRGRQQEKNTKNQSRDKSSSSYRGRSKSRGRDWFATYEAVQGGTGLMGDDTPCEVAGIGTVQIKMFDGCIRILSDVRHIPNLKRSLISLCTLCRKGYKYSGGDRILKVTKGSLVVMKADIKSADLYHLRGTTILGNVAAVSDSLSNSDATNLWHMRLGHMSEIGLVELSKRGLLDGQSIGKLKFCEHCIFGKHKRVKFNTSTHTTEGILDYMHSDLWGLACKTSFGGACYMMTIVDDYSRKVWPHFLKHKYQAFDVFKEWKTMVERQTERKVKILRTDNGMEFCSKIFKSYCKSEGIVRHYTVPHTPQQNSVAERMKKTIISKTRCMLSNAGLPKQFWAEAVSTTYYLINRSPSYAIDKKTPIEPSPKRSIAKDKLKRNTKPPQRYIEEANIVAYALSVAEEIEGNAEPSTYSEAIVSDDCNRWITAMHDEMGSLEKNHTWELVKLPKEKKPIRCKWIFKRKEGISPSDEARYKARLVVKGYSQIPGIDFNDVFSPVVKHSSIRTLLSIVAMHDYELEQMDVKTAFLHGELEEDIYMEQPEGFVVPGKENLKFRRSNYDSCVYLKVVDGLAIYLLLYVDDMLIAAKDKSEIAKLKAQLSSEFGMKDLGAAKKILSMEITRERHSSKLYLSQKGYIEKVLRRFNMHDAKPSDYDIEYMSRVPYSSAVSLMHAMFGRSRDRLVGYVDSDFAGDLDRRRSLTGYIFTIGGCAVSWKASLQATVALSITEAEYMAISEACKEAIWLRGLYTELCGVTSCINIFCDSQSAICLTKDQMFHERTKHIDVRYHFIQGVIAEGDVKVCKISIHDNPVDMMIKPVPATKFELCSSLVGVTV

SEQ ID NO: 197291 - protein, 2076 aa, Oryza sativa
  unsure (1)..(2076): unsure at all Xaa locations
  Clone ID: PAT_MRT4530_93062C.1.pep
AMSCIEDHLSNNIVQEVIKEEIAAGLWLKLEQICMTKDLTSKMHLKQTLFLHKLQDDGSVKDHHSAFKEIIADLESMEVKYDEEDLGLILLCSLPSSYANFRDTILYSRDTLTLKEVYDALHVKEKMKKMVPSEGSNSQAEGLIVWGRQQEKNTKNQSRDKSSSSYRGRSKSRGRYKSCKYCKRDGHDIFECWKLHDKDKRTGKYVPXRXKEEQGKAAVVTDXKSFEELLVGYTGCGQKSDLVILKLACIYHLSAIRECFATYEAEEKGTVLLGNDTPCEVAGIGPVGITMFEGCIRTLTDVRHIQNLKKNKISLCTLDRKGYKYSGGDXSSMVTKGSFYGRRIDRTYVNLYHLXVTFILRIVSVISDTXSISKTTNLKHMRLRHMNEIGLAELSKRGLLDGQSIGKLKFCEHCIFGKHKRVKFNTSTHTTEGILDYVHSDLWGPARKTSFGGTRYMMTIVDDYSRKVWPYFLKHKYQAFDVFKEWKTMVERQTERKVKILRTDNGMEFCSKIFKSYCKSEGIVRHYTVPHTPQQNGVAERMNRTIISKARCLLSNAGLPKQFWAEAVSTACYLINRSPSYAIDKKTPIEVWSGSPANYSDLRVFGCTAYAHVDNGKLEPRAIKCIFLGYPSGVKGYKLWCPETKKVVISRNVVFHESVMLHDKPSTNVPVESQEKASVQVEHLISSGHAPEKEDVAINQDEPVIEDSNSSIVQQSPKRSIAKDRPKRNIKPPQRYIEEANIVAYALSVAEEIEGNAEPSTYSEAIVSDDCNRWITAMHDEMESLEKNHTWELVKLPKEKKPIRCKWIFKRKEGISSSDEARYKARLIAKGYSQIPGIDFNDVFSPVVKHSSIRTLLSIVAMHDYELEQMDVKTAFLHGELEEDIYMEQPKGFVVPGKENLVCRLKKSLYGLKQSPRQWYKRFDSFMLSQKFRRSNYDSCVYLKVVDGSAIYLLLYVDDMLIAAKDKSEIAKLKAQLSSEFEMKDLGAAKKILGMEITRKRHSFKLYLSQKGYIEKVLRRFNMHDAKPVSTPLAAHFRLSSDLCPQSDYDIEYMSRVPYSSAVGSLMYAMVCSRPDLSHALSVVSRYMANPGKEHWKAVQWIFRYLRGTSSACLQFGRSRDGLVGYVDSDFAGDLDRGRSLAGYVFTIGGCAVSWKASLQATVALSTTEAEYMAISEACKEAIWLRGLYTVLCAVTSCINIFCDSQSAICLTKDQMFHERTKHIDVRYHFIRGLIAEGDVKICKISIHDNPADMMTKPVPATKFELCSSLVILSDANVPGEGEHKIMSFIRAQRGREGYDPNTRHCLYGLDADLIMLALASHEVHFSILREEVLHQNNQENTIPITPKTFTSQEAEKFKCRAWFPRITEARPEGKLTKKPYQFLNIWVLREYLELDMKIPNPIQTLDVERMIDDFVFICFLTGNDFIPHIPSLEIHEGAIDLLIEVYKTSFNKMGGYIVDTDKVKDKHAAYLKVSRLEKFFHELSLYEEKIFLKCYDLARGFEDFGRKVGEEAEEQQEQGSWVAHPFGPSEPDIGAPVACNTWAVPDRVGECRINFQRKIERQAAENTWNERNTENVEENLDDQCIMVKSSQTDGQVSDEQDITMNTLELRKNLKDILHNKQDLIKTGACKHDKIKLGSPGWKSRFFKEKFDAETKDEIAKLQNEMVTISCFLNYANGILYLTVQKYLEGLCWVLCYYFADVPSWSWYYPFYYAPFASDVRGLSRSFALPGCYSKLMDCDESAIQAFYPSELDIDTDGKRYLWQGIAKLPFIEDKLLLSVTKTAEKDLAVHELRRNTVRQEKIFLRNSNALAKNEAFAQTSDCSLQKLPIDPATSEIGGWLSPDDDDFSNGFCGSPIENDLSISAKFFNPEAVKPATRLLQNVTVPYKTVTEADICARPLWHTHPYPKHPALSMHNVQQQRLQSSRPETPCWKPSTPPPPRREEIRSAGTGWLGRGRGGNIPVAVAASTAVAGETRQSWSSSRYGRGRGSGATAVGHGQMTTTRHQWSGGGGYGRSSGVDNGGGRGSYNLRPGGGGGGGGGYQWQQQQQTAWRPVGSPWGRGGGGGDGGNGQPRGR

SEQ ID NO: 197292 - protein, 394 aa, Oryza sativa
  unsure (1)..(394): unsure at all Xaa locations
  Clone ID: PAT_MRT4530_93063C.1.pep
LADLWQGTENSCRRAPPLAAAVLTRGAPPLPPLPSDLAEGRAPPATITSLPAVARCRHLPPTPPPPPADAAAAASRRIWRRGGRRPPMPPLAPPAPPQPPPAAPPAXPPPARRCWAWPHWPPPPPVRRTSPATRPPPPDRLPHPXAARPPVARPAXPPPPPESSPKCPHASPPSTPPTEPLPRVPPPHVSLPPRTPRHTKPRHSPPTISPPSPRSSLHADPRWPQQRRGGGAAAPPRSSASGPSTPTPPHPPPAPTSSSPAXPPPPPTPPLPPPXTPTSPCPSPSSPVWQIRRPPSPAAKHAAADRRPPHHKDKPTXAPRNPTPPPPPAAAXTRHQPEHQLLHRVPPPGELPPXPTPESPAPPPAAAAAAGSSASRGSSPRRCIEPWKPFFHLS

SEQ ID NO: 197293 - protein, 1122 aa, Oryza sativa
  Clone ID: PAT_MRT4530_93064C.1.pep
MASLKYDLPLLDRDTRFSLWQVKMRAVLAQQDLDDTLSGFDKRTQDWSNDEKKRDRKAMSYIHLHLSNNILKEVLKEETAAGLWLKLEQICMTKDLTSKMHLKQKLFLHKLQDDGSVMDHLSTFKEIVADLESMEVKYDEEDLGLILLCSLPSSYANFTDTILYSRDTLTLKEVYDALHAKEKMKKMVPSEGSNSQAEGLVVRGRQQEKNTKNQSRDKSSSSYRGRSKSRGRYKSCKYCKRDGHDISECWKLQDKDKRTGKYIPKGKKEEEGKATVVTNEKSDAELLVAYAGCAQTSDQWILDTACTYHMCPNRDWFATYEAVQGGTVLMGDDTPCEVAGIGTVQIKMFDGCIRTLSDVRHIPNLKRSLISLCTLDHKGYKYSCGDGILKITKGSLVVMKADIKYANLYHLRGTTILGNVAAVSDSLSNSDATNLWHMRLGHMSEIGLAELSKRGLLDGQSIGKLKFCEHCIFGKHKRVKFNTSTHTTEGILDYVHSDLWGPARLPKQFWAEAVSTACYLINRSPSYAIDKKTPIEVWSGSPANYSDLRVFGCTAYAHVDNDKLEPRAIKCIFLGYPSAVKGYKLWCPETKKVVISRNIVFHESVMLHDKPSTNVPVESQEKASVEVEHLISSGHAPEKEDVAINQDEPVIEDSNSSTVQQSPKRSIAKDRPKRNIKPSQRYIEEANIVAYTLSVAEEIEGNAEPSTYSEAIVSDDCNRWITAMHDEMESLEKNHTWELVKLPKEKKPIRCKWIFKRKEGMSPSDEARYKARLVAKGYSQIPGIDFNDVFSPVVKHSSIRTLLSIVAMHDYELEQMDVKTAFLHGELEEDIYMEQPEGFVVPGKENLVCRLKKSLYGLKQSPRQWYKRFDSFMLSQKFRRSNYDSCVYLKVVDCSAIYLFLYVDDMLIAAKDKSEIAKLKAQLSSEFEMKDLGAAKKILDYDVEYMSRVPYSSAVGSLMYAMFGRSRDGLVGYVDSDFAGDLDRRRSLTGYVFTIGGCAVSWKASLQATVALSTTEAKYMAISEACKEAIWLRGLYTELCEVTSCINIFCDSQSAICLTKDQMFHERTKHIDVRYHFIRGVIVEGDVKVCKISTHDNLADMMTKPVPATKFELCSSLVGVTV

SEQ ID NO: 197294 - protein, 165 aa, Oryza sativa
  unsure (1)..(165): unsure at all Xaa locations
  Clone ID: PAT_MRT4530_93065C.1.pep
EVGVWDPPGSGSVGGVLRTYGKPSNTTLRRRPCGERGAAAGRAAAAAWQATCGGRVAAAASGATPSSGGQAAGGRRGRRWRXGDGGSRRRWEERQYRRAAHSPQPDPAGGETAIPAAAGGAKGGIGGXAPSPPPDPAGGSGSGVGGRWRWRRREVAAAGDGRKRG

SEQ ID NO: 197295 - protein, 1236 aa, Oryza sativa
  Clone ID: PAT_MRT4530_93066C.1.pep
MASLKYDLPLLDRDTRFSLWQVKMRAVLAQQDLDDALSRFDKRTQDWSNDEKKRDRKAMSYIHLHLSNNILQEVLKEETAAGLWLKLEQICMTKDLTSEMHLKQKLFLHNLQDDESVMDHLSAFKESVADLESMEVKYDEEDLGLILLCSLPSSYANFRDTILYSRDTLTLKEVYDALHAKEKMKKMVTSEGSNSQAEGLVVRGRQQEKNTKNQSRDKSSSSYRGRSKSRGRYKSCKYCKRDGHDISECWKLQDKDKRTGKYIPKGKKEEEGKATVVTDEKSDAELLVAYAGCAQTSDKWILDTACTYHMCPNRDWFATYEALQGGTVLMGDDTPCEVAGIGTVQIKMFDGCIRTLSDVRHIPNLKRSLISLCTLDRKGYKYSGGDGILKVTKGSLVVMKADIKFANMYHLRGTTILGNVAAVSNSLSNSDATNLWHMRLGHMSEIGLAELSKRGLLDGQSIEKLKFCEHCIFGKHKRVKFNTSTHTTEGILDYVHSDLWGPARKTSFGGARYMMTIVDDYLRKVWPYFLKHKYQAFDVFKEWKTMVERQTERKVKILRTDNGMEFCSKIFKSYCKSEGIVRHYTVPHTPQQNGVAERMNRTIISKARCMLSNAGLPKQFWVEAVSTACYLINRSPSYAIDKKTPIEVWSSSPANYSDLRVFGCTAYAHVDNGKLEPRAIKCIFLGYPSGVKGYKLWCPETKKVVISRNVVFHESGILHDKPSTNVPVESQEKASVQVEHLISSGHAPEKEDVAINQDAPVIEDSDSSIVHQSPKRSIAKDKPKRNIKPPRRYIEEANIVAYALSVAEEIEGNAEPSTYSEAIVSDDCNRWITAMHDEMESLEKNHTWELVKLPKEKKPIRCKWIFKRKEGMSPSDEARYKARLVAKGYSQIPGIDFNDVFSPVVKHSSIRTLLSIVAMHDYELEQMDVKTAFLHGELEEDIYMEQPEGFVVPGKENLVCRLKKSLYGLKQSPRQWYKRFDSFMLSQKFRRSNYDSCVYLKVVDGSAIYLLLYVDDMLIAAKDKSEIAKLKTQLSSEFEMKDLGAAKKILGMEITRERHSGKLYLSQKCYIEKVLHRFNMHDAKPVSTPLAAHFRLSSDLCPQSDYDIEYMSRVPYSSAVGSLMYAMFGRSRDGLVGYVDSDFAGDLDRRRSLTGYVFTIGGCAVSWKASLQATVALFTTEAEYMAISEACKEAIWLRGDVKVCKISTHDNPADMMTKPVPATKFELCSSLVGVIV

SEQ ID NO: 197296 - protein, 233 aa, Oryza sativa
  unsure (1)..(233): unsure at all Xaa locations
  Clone ID: PAT_MRT4530_93067C.1.pep
DSERRTNGARLRLLSTTAVAALPXAARASSFLRGAGXXGXLLLKQAXSSSARAXFAVRAAAPXKPIWFPGSXPPPWLXSSLPGXFGFXPWVSDXXGKLXWNVQAELVHCXWAXLGXAGIFIXEFLNKXGILNTPXWXTAREQQYFTXTTTXFIIXLILXRWAQGPRWXXSSNPGCVXTXPSSPTTNSPGTXFGYLXVFCFNPSGWAPVPXKKXRNFPPXEIKKGXVXXLPXXG

SEQ ID NO: 197297 - protein, 1312 aa, Oryza sativa
  Clone ID: PAT_MRT4530_93068C.1.pep
MVVVDGAVARATSTRSGGGEAGDVSSLMAAEGLIPMASLKYDLPLLDRDTRFSLWQVKMRAVLAQQDLDDALSGFDKRTQDWSNDEKKKDRKAMSYIHLHLSNNILQEVLKEETAAGLWLKLEQICMTKDLTSKMHLKQKLFLHKLQDDGSVMDHLSTFKEIVADLESIEVKYDEEDLGLILLCSLPSSYANFRDTILYSHDTLILKEVYDALHAKEKMKKMVPSEGSNSQAEGLVVRGRQQEKNTKNQSRDKSSSSYRGRSKSRGRYKSCKYCKRDGHDISECWKLQDKDKRTGKYIPKGKKEEEGKAAVVTDEKSDTELLVAYAGCAQTSDQWILDTAWTYHMCPNRDWFATYEALQGGTVLMGDDTPCEVAGIGTVQIKMFDGYIRTLSDVRHIPNLKRSLISLCTLDRKGYKYSGGDGILKVTKGSLVVMKADIKSANLYHLRGTTILGNVAAVSDSLSNSDATNLWHMRLGHMSEIGLAELSKRELLDGQSIGKLKFCEHCIFGKHKRVKFNTSTHTTEGILDYVHSDLWGPACKTSFGGARYMMTIVDDYSRKVWPYFLKHKYQAFDVFKEWKTMVERQTEKKVKILRTDNGMEFCSKIFKSYCKSEGIVHHYTVPHTPQQNGVAERMNMAIISKARCMLSNADLPKQFWAEAVSTTCYLINRSPSYATDKKTPIEVWSGSPANYSDLRVFGCTAYAHVDNGKLEPRAIKCIFLGYPSGVKGYKLWCPETKKVVISRNVVFHESVILHDKPSTNVPVESQEKASVQVEHLISSGHAPEKENVAINQDAPVIEDSDSSIVQQSSKRSIAKDKPKRNIKPPRRYIEEANIVAYALSVAEEIEGNAEPSTYSEAIVSDDCNRWITAMHDEMESLKKNHTWEFVKLPKEKKPIRCKWIFKRKEGMSPSDEARYKARLVAKGYSQIPGIDFNDVFSPIMKHSSIRTLLGIVAMHDYELEQMDVKTAFLHGELEEDIYMEQPEGFVVLGKENLVCRLKKSLYGLKQSPRQWYKRFDSFMLSQKFRRSNYDSCVYLKVVDGSAIYLLLYVDDMLIAAKDKSEIAKLKAQLSSEFGMKDLGAAKKILGMEITRERHSGKLYLSQKGYIKKVLRRFNMHDVKPIIFRLCPQSDYDIEYMSRVPYSSAVGSLMYAMFGRSRDGFVGYVDSDFAGDLDRRRSLTGYVFTIGGCDVSWKASLQATVALSTTEAEYMAISEACKEAIWLRGLYTELCGVTSCINIFCDSQSAICLTKDQMFHERTKHIDVRYHIIRGVIVEGDVKVCKISTHDNPADMMTKPVSATKFELCSSLVGVTV

SEQ ID NO: 197298 - protein, 913 aa, Oryza sativa
  unsure (1)..(913): unsure at all Xaa locations
  Clone ID: PAT_MRT4530_93069C.1.pep
MYCISIGCCAILRSLGLASLLGQGRLSRRRDTTPCRPPSSSPPPKRPDGNHAAARTTAARGLLPRGRDAWSRQPRPSSKATTTTAVTWRQRRCRIRRSPGVDLAWVPSRAAGGGEARGGGRVSELRPPGDKAARCGRVVLVAAWSYGGGSGGAAVWRQRLDHMEVVARPCEGGGGEAIWLMPRWQEEEQRLAGGSSRIVERLATAEAGEARLVAEEVAAVRGGATKLQVRRDVACRRGGGGRRSGKREASAGGRWPRRGRGGMVKWGNGAYHRRGKASAAARGSSSHRWCSSSMSPARRHFSRGGAAVAAGQTVSAATIVGRKRCPPPLPDTTIAAAAALWGKESLRVEGVRDNKGGNPLLLNSDAWPPRVTAYRSRPPPSLLAIAAASLQGGEPAAGSVAARTGGGGPAVVRQGGPAVAWRGGGGGSVSGSVRLGEECSRGGGSARRKDVGGVXCGLARRPPGGGSARLGTDEEVQWRRLGKAELATAARGSTIYPFPQIRPFFPDRRSSQQQRALLSARLTSGTQLWLLSVGKSQRDIPCISAVQNESNGDGAWARLQVEISRFQPIRRPARAQDALSLRRTQLRLALRSAYAGASPRPRPAAAATGEAPGRRASREWRGTCAAVVIPERRQAAATGGAWRRPATGPDDVLMQGRAGSWPRAVAARTPPQSWRARRPRAGVAVASLLAGSRSRRRPDAGEAQQRCKRAGKIGGGRCLGRGMAGWAAGGDISTYRRAQPSSTLHYRAQLSPDSEWSDSEDDCFVVATCSPIRLFFVNYVAMEADHAGARGGACPLPRGVLWLAAHGRCSSPSADYSSGRRATHPGCVVTSPGHQPCAVLADRCGVRRPRAHGSSHGPASHAQGHPRPALAVLGLVRSGEETTIRITITPPHPSPPPCPSLSPAHCSTASVVA

SEQ ID NO: 197299 - protein, 252 aa, Oryza sativa
  Clone ID: PAT_MRT4530_9306C.1.pep
MTAAAAAAAVTLLRLPLARLSSHLRSLPPRPIPPPRLRVYTSHRLLSSLLAPSHVPAVSSLAEAVAAPDGEGVEVEEEEDEEEEAEARPTTFVLPRLPRPKLSVKERKELASYAHGLGKRLKSQQVGKGGVTPSVVAAFNDNLESNELLKLKIHLNCPGELPDVILQLEESTGSIAVDQIGRSVILYRPSTSKMKKREESARNRTRFVRSREPSEEQPRSSTSKRFIKSGGAFRPQQKRRPLASKESSYGRR

SEQ ID NO: 197300 - protein, 788 aa, Oryza sativa
  unsure (1)..(788): unsure at all Xaa locations
  Clone ID: PAT_MRT4530_93070C.1.pep
GRSKSRARYKSCKSCKRDGHDISECWKLQDKDKRPGKYIPKXWILDTTCTYHMCPNRDWFATYEAIQGGTVLMGDNTPCKVAGIGTVQIKMFDGCIRTLSDVRHIPNLKRSLISLCTLDRKGYKYSGGDGILKVTKGSLVVMKADIKSANLYYLRGTTILGNVAAVSDSLSNSDATNLWHMRFGHMSENGLAELSKRGLLDGQSIGKLKFCELCIFGKHKRVKFNTSTHTAEGLPKQFWAEAVSTACYLINRSPSYAIDKKTPIEVWSGSPANYSDLRVFGCTAYAHVNNGKLEPRAIKCIFLGYPSGVKGYKLWCLETKKVVIRRNVVFHESVMLHDKPSTNVPVESQEKAXANIVAYALSVAEEIEGNTEPSTYSEAIVSDDCNRWITTMHDEMESLEMNHTWELMKLPKEKKPIRCKWIFKRKEGISPSDEARYKARELEEDIFMEQPEGFVVPRKENLVCRLKKSLYRLKQSPRQWYKRFDSFMLSQKFRRSNYNSCVYLKVVDGSAIYLLRYVDDMLIAAKDKSEIAKLKAQLSSEFEMKDLGAAKKILDLCPQSDYDIEYMSRVPYSSAVGSLMYAMVYSRPELSHALSVVSRYMANPGKEHWKVVQWIFRYLRGTSSACLQFGISTDGLVGYVDSDFAGDLDRRRSLTGYIFTIGGCAVSWKASLQATVALSTTEAEYMAISEACKEAIWLRGLYTELCGVTSCVDIFCNSQSAICLTKDQMFHERTKHIDVRYHFIRGVIAEGDVKVCKRSTYDNPADMMTKPVTATKFELCSSLVGVTV

SEQ ID NO: 197301 - protein, 271 aa, Oryza sativa
  Clone ID: PAT_MRT4530_93071C.1.pep
MATARKAPRMVAIWAVVVVVVAADLFGAAVARSASARHAVGKKQREFDYFALALQWPGTICASTRHCCAINGCCRSEPLQTFTIHGLWPDYDDGTWPACCRHTSFDMDKILPLKPTLEKYWPSLYCSSSSTCFSGKGPFWAHEDELEYFTTALDLYFKYNVTEMLASGGIHVSNGKQYALTDVIDAIKCAFGASPQIVCKKGSVEELRLCFDKDLKPLDCLTTTATNENVSKKKYCPRYITLPTYDPIVHANSTREIITVESEVYGYLYTS

SEQ ID NO: 197302 - protein, 248 aa, Oryza sativa
  unsure (1)..(248): unsure at all Xaa locations
  Clone ID: PAT_MRT4530_93072C.1.pep
PRVRPKKQREFDYFALALQWPGTICASTRHCCAINGCCRSEPLQTFTIHGLWPDYDDGTWPACCRHTSFDMDKILPLKPTLEKYWPSLYCSSSSTCFSGKGPFWAHEWEKHGTCSSPVVKDELEYFTTALDLYFKYNVTEMLASGGIHVSNGKQYALTDVIDAIKCAFGASPQIVCKKGSVEELALCFDNPLKPLDXLTTTTTNENVSKKKYCPRYITLPTYDPIVHANSTREIITVESEVYGYLYTS

SEQ ID NO: 197303 - protein, 155 aa, Oryza sativa
  unsure (1)..(155): unsure at all Xaa locations
  Clone ID: PAT_MRT4530_93073C.1.pep
FFFFFFFLKPNQTVHTYYYQPXYKKQKFTYRKYINSVFLSLPLHVAAMHQRETLIKKITKKSKLDHTQIYRQSFALWMASIDWPVFRGQIQLNPCPGGGLLVVVRGVFPPLTPGPGGVVSRKKAPVEHGDIKQLREGEDYYQGLXHPEAPPPVAP

SEQ ID NO: 197304 - protein, 96 aa, Oryza sativa
  Clone ID: PAT_MRT4530_93074C.1.pep
GAESARRITPAHPSQGALGRCRGSPAGLVHAAPRADAPRLQSGCLRLQQALRQYVHRNESTRSSPRTQVATRDPVRLRSRSNLSPVCGPSLLSINL

SEQ ID NO: 197305 - protein, 47 aa, Oryza sativa
  unsure (1)..(47): unsure at all Xaa locations
  Clone ID: PAT_MRT4530_93075C.1.pep
NRGHXALXSPFPSXXVQXFXFIXXXSTXXXXVXXXVCXQHRLKSMXM

SEQ ID NO: 197306 - protein, 78 aa, Oryza sativa
  unsure (1)..(78): unsure at all Xaa locations
  Clone ID: PAT_MRT4530_93076C.1.pep
EDFWVLVHTRKREPGSVQSGWTSSDRAAAPPRARPPSGEXTWVWGQPNPKLGGGSRRNTPGSTPLGESHVSLRAASSL

SEQ ID NO: 197307 - protein, 82 aa, Oryza sativa
  unsure (1)..(82): unsure at all Xaa locations
  Clone ID: PAT_MRT4530_93077C.1.pep
RGYPRAXRQLYTXSICTXXPGLDSASRMTVLRLXRXXXRSATHAKIMIRYRXATSYXRAXMRRXFXVASTPXXXSDQPLASN

SEQ ID NO: 197308 - protein, 111 aa, Oryza sativa
  Clone ID: PAT_MRT4530_93078C.1.pep
RGLSPLLGLHAQAPHFVLQRLPSGYRRSQLLAHAGLPRRSLLQVLLEQGRLGRRLLLSCIGRLRGYTNLLFELGIDRREYGDLHVLKHQIAQLVGGPPGSLSRRQQWALRE

SEQ ID NO: 197309 - protein, 38 aa, Oryza sativa
  Clone ID: PAT_MRT4530_93079C.1.pep
MACIARFRKWLTPSLQCAKPSMKLSFDPPYASKQMNKH

SEQ ID NO: 197310 - protein, 508 aa, Oryza sativa
  Clone ID: PAT_MRT4530_9307C.1.pep
MEEAARRTLVLVNLAAIMERADEALLPAVYREVGEALRATPAALGALTLCRSSVQAACYPLAAYAAVRYDRARVVALGAFLWAAATFLVAVSDNFAQVAVARGMNGIGLALVTPAIQSLVADYSDDNSRGSAFGWLQLTGNLGSLIGGLFSIMLASTTFMGIAGWRIAFHVVALISVTVGILVRLFAVDPHYINFGNKKQHVRKSAWREMKDLVVEAKAVVKIPSFQIIVAQGITGSFPWSALSFAPMWLELMGFTHKGTGILMVTSAVASSLGGLFGGKMGDYLAKHYPNFGRIVISQISSASAIPLAALLLLGLPEDPSTGFLHGSVMFIVGFCISWNAPATNNPIFAEIVPERSRTSIYALDRSLESLFASFAPPVVGYLAEHAYGYNPITYGVGISSVERDKENAAALAKALYTAIAIPMLLCCFIYSLLYQTYPRDRERARMDSLITSELQRIEPDRSHRTSDYYNGEGVSVINIEYGEEGVDADDDEKPLMQFRIEQSAADK

SEQ ID NO: 197311 - protein, 133 aa, Oryza sativa
  unsure (1)..(133): unsure at all Xaa locations
  Clone ID: PAT_MRT4530_93080C.1.pep
KLIGVKNWAVXSSVLEYELLNLQIPTINIVGSLVKSGIRVLVYSGDQDSVIPLTGSRTLVQNLARDLGLKTSVPYRVWFEGQQVGGWTQVYGDMLSFATIRGASHEAPFSQPERSLVLFRAFLQGRPLPETFS

SEQ ID NO: 197312 - protein, 520 aa, Oryza sativa
  Clone ID: PAT_MRT4530_93081C.1.pep
MAAAAAPLPTLPLLLLLLTFLSAASASPHISAVISQSGLDFVKDLLVSRAAEAIVPLEVPDIERSVSIPVIGTVDMVASGIVLHGVAVDDSTVAVGDDGIVVAASLSSVNLTMGWSYSYSAWVVTISDSVREMMLDWRGTSMIDKLMFKISGLVSEFALIGMYGMKHVDGMDVGISMGMKNQNGSLKLFVTECGCNMKSLDISLNGGASWFYQGFVDGFSNHIRSSVENAITKKIMEGASKLDSFLGSLPKKIDVDSIAAMNVTFVSDPLFKSSSVEFDIDGLFIPSDKTAVSRHMHFRGVKYVPPLGSSSKMLWISLDEDVFNSVSALYFKAGSLQRMVDKIPDQLFLNTASWRFLIPRLYQKYPNDDMLLNISATSPPSVRINVGRIDAAVDLDVTVNVLDFDEIVPVACISVSVTVSGAAVVSGNNLAGRVELDYFSFTLKWSKVGKLHTFIVQSVMQILLKKLFVPYVNSYLKRGFPLPIIKGFSISDAYILTSQSRIIVSSDVAFIGGHTPYLSQ

SEQ ID NO: 197313 - protein, 102 aa, Oryza sativa
  unsure (1)..(102): unsure at all Xaa locations
  Clone ID: PAT_MRT4530_93082C.1.pep
MTVGVDGSRISMAKHLLTRHVPYTTGTCNEDVDEEVGADNNRTNVALAPPSDDESTIDPVDMMTSLQKGLYERATLQYTNKRRHIDLXRGRESRTDNISSWR

SEQ ID NO: 197314 - protein, 65 aa, Oryza sativa
  Clone ID: PAT_MRT4530_93083C.1.pep
TSTLNCGMRLTALLSSRANLSVPAAINCNLANAAGAAGGYAVYGRQGWFFFSPSDDGNQVMLSPA

SEQ ID NO: 197315 - protein, 120 aa, Oryza sativa
  Clone ID: PAT_MRT4530_93084C.1.pep
MEIARFVHMTTTFRASPDIYDLASAVDSRHGLVLFYVRVCSDEEERFVVWDPMVEEEEEEEQWIDGFPFPVETQYWTAAVMMYSSYTDGWSDEILHKEKDQIDTKACVLVGRKLFLPTRV

SEQ ID NO: 197316 - protein, 410 aa, Oryza sativa
  Clone ID: PAT_MRT4530_93085C.1.pep
MADPNGPRHLPTPFEPRPIDGLIGGDTADSDSGGTAIVGNMMTTGPGAALVLAAAGTTTTSTSLAESSGIGGRLVQDQEEAGSSVLGGSYIVPFPNGHGVLDHDGLTGKATPYEPPPSWIPWIESPSLFGGWRFGSDAVAGGGDKDIVDLSPVGNAHDELPSDGLNLSSAGDAIINTTASSSRCGLVDVLNEDMVTEILLRPPPEDPALFARLQLVCKQWHAILGDPCFIRLLRKFHDPPPMLGYFINEDEPGKPMEIARFVHMTTTFRASPDIYDLASAVDSRHGLVLFYVRVCSDEEERFVVWDPMVEEEEEEEQWIDGFPFPVETQYWTAAVMCGLLECHNDHLHCHGGPFLVVAACTRTMDSYSSLRMYSSYTDGWSDEILHKEKDQIDTKACVLVGRKLFLPTRV

SEQ ID NO: 197317 - protein, 76 aa, Oryza sativa
  Clone ID: PAT_MRT4530_93086C.1.pep
MSCWWSSNEWECGDYMRSSVGRRVAHGRVGGEKTVVPRRAAGETAHGSGRRVRAPTGGGMVAGRGVSTQYRPKTVG

SEQ ID NO: 197318 - protein, 75 aa, Oryza sativa
  Clone ID: PAT_MRT4530_93087C.1.pep
MGSDVHVLLAKLSGCARELLDCLGRGILLDCRLVPSRVKAEDPNSVGGPSNAGVAGAAEVKDLDLEYQAPAATPR

SEQ ID NO: 197319 - protein, 1186 aa, Oryza sativa
  unsure (1)..(1186): unsure at all Xaa locations
  Clone ID: PAT_MRT4530_93088C.1.pep
MASLKYDLPLLDRDTRFSLWQVKMRAVLAQQDLDDALSGFDKRTQDWKVLKEETAAGLWLKLEQICMTKDLTSKMHLKQKLFLHKLQDDGSVMDHLSAFKKIVADLESMEVKYDEEDLCLILLCSLPSSYANFRDTILYSCDTLTLKEVYDALHAKEKIKKMVPSEGSNSQAEGLVVRGRQQEKNTNSKSRDKSSSSYRGRSKSRGRYKSCKYYKRDGHDISECWKLQDKDKRTGKYVPKGKKEEEGKAAVVTDEKSDAELLVAYAGCAQTSDQWILDTACTYHMCLNRDWFATYEAVQGGTVLMGDDTPCEVAGVETVQIKMFDGCIRTLSDVRHIPNLKRSLISLCTLDRKVYKYSGGDGILKVTKGSLVVMKADIKSANLYHVRGTTILGNIAAVSDSLYNSDATNLWHMRLGHMSEIGLAELSKRGLLDGQSIGKLKFCEHCIFGKHKRVKFNTSTHTTESILDYVHSDLWXPAQWKTMVERQTERKIXIDKKTPIEVWSGSPANYSDLRVFGCTAYAHVDNGKLEPRAIKCIFLGYPSGVKDYKLWCPKTKKVVISRNVVFHESVMLHDKPSTNVPVESQEKASVQVEHLISSGHAPEKEDVAINQDASVIEDSDSSAVQQSPKRSIAKDKPKRNIKPPRRYIEEANIVAYALSVAEEIEGNAEPSTYSEAIVSDGCNRWITAMHDEMESLEKNHTWELVKLPKEKKPIRCKWIFKRKKGMSPSDEARYKARLVAKGYSQIPGIDFNDVFSPVLKHSSIRTLLSIVAVHDYELEQMDVKTAFLHGELEEDIYMEQPEGFVVPGKENLVYRLKKSLYGLKQSPRQWYKRFDSFMFSQKFRRSNYDSCVYLKVVDGSSIYLLLYVDDMLIAAKDKSEIEKLKAQLSSEFEMKDLGAAKKILGMEITRERHSGKLYLSQKGYIEKVLRRFNMHDAKPVSTPLAAHFRLSSDLCPQSDYDIEYMSRVPYLSVVGSLMYAMVCSRLDLSHALSVVSRYMANPGKEHWKVVQWIFKYLRGTSSACLQFGRSRDGLVGYVDSDFAGDLDRRRSLTGYVFTIGGCAVSWKASLQATVALSTTEVEYMAISEACKEAIWLRGLYTELCGVTSCINIFCDSQSAICFTKDQMFHERTKHIDVRYHFIRGVIAEGDVKVCKISTHDNPADMMTKPVPTTKFELCSSLVGVTV

SEQ ID NO: 197320 - protein, 107 aa, Oryza sativa
  Clone ID: PAT_MRT4530_93089C.1.pep
MRDGGGGMCGQGSVTSIEIYAGVDRRKEGSENASSSGTVRTPVWNASSSQATPQHADSSRRTTRVARPAQDDSDEGDESDEDDADHAPADEIGPSQLADAPEATQPS

SEQ ID NO: 197321 - protein, 57 aa, Oryza sativa
  Clone ID: PAT_MRT4530_9308C.1.pep
MASSSSSMQALSIMSCTYIVKTFSCEPVKVKPCMKVKVKDRRAKLPVRSPKFTARVD

SEQ ID NO: 197322 - protein, 765 aa, Oryza sativa
  unsure (1)..(765): unsure at all Xaa locations
  Clone ID: PAT_MRT4530_93090C.1.pep
HTASLLSLSAFSLEHMLILLKYDLPLLDRDTRFSLWQVKMRAVLAQQDLDDALSGFDKRTQDWSKDEKKRDRGRQQEKNTKNQSRDKSLSSYHGRSKSRCRYKSCKYCKRDGHDISECWKLQDKNKRTGKYIPKGKKEAACTYHMCPNRDXFATYEAVQGGTVLMGDDTPCEVAGYRYSCGDGILKVTKGFLVVMKADIKSANLXHLRGTNILGNVAAVSDLLSNSDATNLWHMRLGHMSEIGLAELSKRGLLDGQSIGKLKFCEHCIFGKHKRVKFNTSTHTTEGILDYVHSDLWGPARKTSFEGARYMMTIVDDYSRKVWPYFLKHKYQAFDVFKXWKTMVEKQTERKVKILRTDNGMEFCSKIFKSYCKSEGIVRHYTVPHTPQQNGEAERMNRTIISKARCMLSNAGLPKQFWVETVSTACYLINRSPSYAIDKKTPIEVWSDSPVNYSDLRVFGCTAYAHVDNGKLEPRAIKCIFLGYPSGMKGYKLWCPKTKKVVISRNVVFHESVMLHDKPSTNVPVESQEKASVQVEHLISSGHAPEKENVAINQDVPVIEDSDSSTVQQSPKRFIAKDKPKRNTKPPQRYIEEANIVAYALSVAEDIEGNAEPSTYSEAIVSDDCNRWITAMHDEMESLEKNHTWELVKLPKEKKPIRCKWIFKRKKGISPSDEAMYKASSIRTLLSIVAMHDYELEQMDVKTAFLHGELEEDIYMEQSEGFVVPGKENLVCRLKKSLYGLKQSSRQWYKRFDSFMLSQKFRRSNY

SEQ ID NO: 197323 - protein, 112 aa, Oryza sativa
  unsure (1)..(112): unsure at all Xaa locations
  Clone ID: PAT_MRT4530_93091C.1.pep
NWFRKYCNHQIGWANPNPTVKQQLPQTPTRDQLLERYWSHVMQCTSCRAALKGMRALEITLQVAAVAVVGFLAAGKETAVXVGCPESFAASRWLANFIEKTFYFQDYVHADK

SEQ ID NO: 197324 - protein, 1205 aa, Oryza sativa
  unsure (1)..(1205): unsure at all Xaa locations
  Clone ID: PAT_MRT4530_93092C.1.pep
MASLKYDLPLLDRDTRFSLWQVKMRAVLAQQDLDDAFSGFDKRTQDWSNDEKKMDRKAMSYIHLHLSNNILQEVLKEETAAGLWLKLEQICMTKDLTNDGSVMDHLSVFKEIVADLESMEVKYDEEDLGLILLCSLPSSYANFRDTILYSRDTLTLKEVYDALHAKEKMKKMVPSEGSNSQAEGLVVQGSQQEKNTNNKSRDKSSSSYRGRSKSRGRYKSCKYCKRDGHDISKCWKLQDKDKRTGKYIPKGKKEDEGKAAVVTDEKSDAELLVAYAGCAQTSDQWILDTACTYHMCPNRDWFATYEVVQGGTVLMGDDTPCEVAGIGTVQIKMFDGCIRTLSDVRHIPNLKRSLISLCTLDCKGYKYSGGDGILKVTKGSLVVMKADIKSANLYHLQGTTILGNVATVSDSLSNSDATNLWHMRLGHMSEIGLAELSMRGLLDGQSIGKLKFCEHCIFGKHKRVKFNTSTHTTEGILDYVHSDLWGPARKTSFGGARYMMTIVNDYSRKVWPYFLKHKYQAFNVFKEWKTMVERQTERKVKILRTDNGMEFCSKIFKSYCKSEGIMRHYTVPHTPQQNGVAERMNRTIISKARCMLSNAGLPKQFWAEAVSTACYLINRSPGYAIDKKTPIKVWSGSPANYSDLKVFGCTAYAHVDNGKLEPRTIKCIFLGYPSGVKGYKLWCPETKKVVISRYVVFHESVMLHDKPSTNIPVESQEKASVXDSDSSTVQQSPKRSIAKDKPKRNTKPPQRYXEANIVAYALSVAEELEKNHTWELVKLPKENKPIRCKWIFKRKEGMSPSDEARYKARLVAKGYSQIPGIDFNDIFSPVVKHSSIRTLLSIVAMHDYELEQMDVKTAFLHGELEEDIYMEQPEGFVVPGKENLVCRLKKSLYGLKQSPRQWYKRFDSFMLSQKFRRSNYDSCVYLKVVDGSAIYLLLYVDDMLIAAKDKSEIAKLKAQLSSEFEMKDLGAAKKILGMEITRERHSDKLYLSQKGYIEKVLRRFNMHDAKPIYVHSQIYVPYSSAVGSLMYAMICSRPDLSHALSVVSRYMVNPGKEHWKAVQWIFRYLHGTSSACLQFGRSRDGLVGYVDSDFAGDLDRRRSLTGYVFTIGGCAVSWKASLQATVALSTTEAEYIAISEACKEAIWLRDLYTELCGVTSCINIVCDSQSAICLTKDQMFHERTKHIDVRYHFIRGVIAEGDVKV

SEQ ID NO: 197325 - protein, 642 aa, Oryza sativa
  Clone ID: PAT_MRT4530_93093C.1.pep
MTLDNYSLNIAISAAARVPSLDVGSQFHALSLKLSLASDSFVLNALINMYSSCNYPASARLVLDSAPRWASDVVSWNTIIAGYIRGGMPNKALQSFHQMAKEQVRLDEVTLLNVLVACARTGAMKVGSLCHALVVLNGFEINCYIGSSLVSMYAKCGMVEEARRVFNRMPERNVVCWTSMIAGCTQSGRFKEAVDLFRDMQIAGVKADDATIATVVSSCGQMGALDLGRYLHAYCDGHGLGKELSVKNSLIDMYSKCGDVNKAYQIFHGLTKRDVFTWTVMIMGFAMNGLCVEALDLFAQMEGEDKVMPNEVIFLGVLTACSHGGLVEQGYHHFHRMSKVYNLVPRIEHYGCMVDLLGRAKLLAEAEQFIKDMPVAPDVVVWRSLLFACRASGQVGLAEYAAERIEQLEPKRCGGHVLLSNVYATTLRWVDVNNVRTGMGNSRTSQIAQVIVDFLEVAVSCVVFLKGFYPPRAFERRRYMNVVVQKAVHPQLAGYIHSATSGLLPFIQKGLVERVVVIFYDKAHVPVEKFVFKLAVNQSYGSKIEEASLEFALRAFLIKLAVAEPLTRTLPSDGSWEIAAYFRSLPPDGEKEAQLWIPTDTKQWMQPPQITPIKSMSCDPVKMQLYLEQPSRTEPRDPPTEP

SEQ ID NO: 197326 - protein, 1196 aa, Oryza sativa
  Clone ID: PAT_MRT4530_93094C.1.pep
LQDDGSVMDHLSAFKEIVADLESMEVKYDEEDLGLILLCSLPSSYANFRDTILYSRDTLTLKEVYDALHAKEKMKKMVPSEGSNSQAEGLVVRGRQQEKNTNSKSRDKSSSSYRGRSKSRGRYKSCKYCKRDGHDISECWKLQDKDKRTGKYTPKGKKEEEGKATVVTDEKSDAELLVAYAGCAQTSDQWILDTACTYHMCPNRDWFATYEAVQGGTVLMGDDTPCEVAGIGTVQIKMFDGCIRTLSLSDVRHIPNLKRILISLCTLDRKGYKYSGGDGVLKVTKGSLVVMKADIKSANLYHLRGTTILGNVAAVSDSLSNSDATNLWHMRLGHMSEIGLAELSKRGLLDGQSIGKLKFCEHCIFGKHKRVKFNTSTHTTEGILDYVHSDLWGPAHKTSFGGARYMMTIVDDYSRKVWPYFLKHKYQAFDVFKEWKTMVERQTERKVKILRTDNGMEFCSKIFKSYCKSEGIVHHYTVPHTPQQNGVAERMNRTIISKARCMLSNAGLPKQFWAEAVSTACYLINRSPSYAIEKKTPIEVWSGSPANYSDLRVFGCTAYAHVDNGKLEPRAIKCIFLGYPSGVKGYKLWCPKTKKVVISRNVVFHESVMLRDKPSTNVPVESQEKTSVQILLLFSSFQNVLLQKDKPKKNIKPPRRYIEEANIVAYALSVAEEIEGNAEPSTYSEAIVSDDCNRWITVMHDEMESLEKNHTWELVKLPKEKKPIRCKWIFKRKEGMSPSDEARYKARLVAKGYSQIPGIDFNDVFSSVVKHSLIRTLLSIVAMHDYELEQMDVKTAFLHGELEEDIYMEQPEGFVVLGKENLVCRLKKSLYGLKQSPRQWYKRFDSFILSQKFRRSNYDSCVYLKVVDGSAIYLLLYVNDMLIVAKDKLEIANLKAQLSSEFEMKDLGAAKKILGMEITRERRSGKLYLIQKGYIEKVLRRFNMHDAKPVSTPLAAHFRLSSDLCPQSDYDIEYMSRVPCSSAVGSLMYAMVCSRPDLSHALSVVSRYMANPGKEHWKAVQWIFRYLRGTSSACLQFGRSRDGLVGYVDSDFARDLDRRRSLTGYVFTIGGCAVSWKVSLQATVALSTTEAEYTAISEACKEAIWLRGLYTELCGVTSCINIFCDSQSAICLTKDQMFHERTKHIDVRYHFIRGVIAEGDVKVCKISTHDNPDDMMTKPIPATKFELCSSLVGVTV

SEQ ID NO: 197327 - protein, 453 aa, Oryza sativa
  Clone ID: PAT_MRT4530_93095C.1.pep
MSPEAWKFVICRTKSDVGQQLIMENQWSIYCNDERGIDWVSIASMRYFLCDLGCAELSQKHKYGHFCSMCPACRNYKPHYEKVAKLFNGRDAAHPGLILMARVDCASKHSSFSLEDKKYENENMLPKNASDPEQIVQAIYDVEEATAQALQIILERKTIKPKNRDSLIRFLQILVARHPSKRCRRGSAELLINFDDHWSSNLSLSSQEGSKLLESVAEENHWICGKEVPRGYWLFCRGSKSETRGFSCGLWVLMHSLTVRIGDGESQSTFTSICDFIHNFFICEECRKHFYEMCSSVSAPFRTARELSLWLWSTHNKVNMRLMKEEKDMGTGDPLFPKVTWPPNQLCPSCYRSSKVTDGAVDWNEDAVYQFLVNYYGKKLVSSYKETYMESLQQQEKKIVSEDSSISNAASVPIGAALGVAIASCTFGALACFWRAQQKNRKYSHHLRSLKKI

SEQ ID NO: 197328 - protein, 129 aa, Oryza sativa
  Clone ID: PAT_MRT4530_93096C.1.pep
TSYKCSQTATCHSTNAPKSPHVPTVLHEIDRSNHLGRLLLRIKNRCSCAARIDACLKQSMLESLSATQHADAPFHEMRSPSDCTREVNITRLVARLHTTVDNEQRTQCCTARRRSPPPPQRPPVSVVSS

SEQ ID NO: 197329 - protein, 407 aa, Oryza sativa
  Clone ID: PAT_MRT4530_93097C.1.pep
AFLHGELEEDIYMEQPEGFVVPGKENLVCRLKKSLRLKKSIYRLKQSPRQCYKRFASFMLSQKFRRSNYDSCVYLKVVDGSAIYLLLYIDDMLIAAKDKSEIAKLKAQLSSEFEMKDLGAAKKILGMEITRERHSGKLYLSQKGYIEKVLHRFNMHDAKPVSTPLAAHFRLFSDLCPQSDYDIEYMSRVPYSSAVGSLMYAMVYSRPELSHALSVVSRYMANPGKKHWKAVQWIFRYLCGISSACLQFGRSRDGLVGYVDSDFAGDLDRRRSLTGYVFTIGGYAVIWKASLQATVVLSTTEVEYMAISEGCKKAIWLRGLYTDLCGVTSCINIFCDSQSAICLTKDQMFHERTKHIDVRYHFIRGVIAEGDVKVCKISTHDNPADMMTKPVPTTKFELCSSLVGITV

SEQ ID NO: 197330 - protein, 1237 aa, Oryza sativa
  Clone ID: PAT_MRT4530_93098C.1.pep
MAFSTRHRLHVLLLVLAVVALALHSGQSGAHAARVPAALQEDETTTTTAAPLGVEHAAGDGHGVPSTEIFNVGDAAPSPSPSPGDGGHAIFGDGAERASLRGGGGHGGGGHSSGGHSSGGGDGRAAGGGGYVGGAGAGVPHRRSGSGSTKPAIIPAFVSLLGGIAMEVHRGFAFLLVYPNFLPANSGLIPMASLKYDLPLLDRDTRFSLWQVKMRAVLAQQDLDDALSGFDKRTQDWSNDEKKRDRKAISYIHLHLSNNILQEVLKEETAAGLWLKLEQICMTKDLTSKMHLKQKLFLHKLQDDESVMDHLSAFKEIVADLESMEVKYDEDDLGLILLCSLPSSYANFRGTILYSRDTLTLKEVYDAFHAKEKMKKMVTSEGSNSQAEGLVVRGRQQKKNTKNQSRDKSSSSYRGRTKSRGRYKSCKYCKRDGHDISECWKLQDKDKRTGKYIPKGKKEEEGKAAVVTDEKSDAELLVAYAGCAQTSDQDWFATYEALQGGTVLMGDDTPCEVAVDIKSANLYHLRGTTILGNVAAVFDSLSNSDATNLWHMRLGHMSEIGLAELSKRGLLDGQSIRKLKFCEHCIFGKHKRVKFNTSTHTTEGILDYVHSDLWGPAHKTSFGGARYMMTIVDDYSRKVWPYFLKHKYQAFDGFKEWKTMVERQTERKVKILRTDNGMEFCSKIFKSYCKSEGIVCHYTAPHTPQQNDVAERMNRTIISKARCMLSNAGLPKQFWAEAVSTACYLINRSPGYAIDKKTPIEVWSGSPTNYSDLRVFGCTAYAHVDNGKLEPRAIKCIFLGYASGVKGYKLWCPETKKVVISRNVVFHESVILHDKPSTNVPVESQEKASVQVEHLISSGHAPEKEDVAINQDAPVIEDSDSSIVHQSPKRSIAKDKPKRNIKPPRRYIEEAKIVAYALSVAEKIEEQMNVKTAFLHGELEEDIYMEQPEGFVVPGKENLVCRLKKSLYGLKQSPRQWYKRFDSFMLSQKFRISNYDSCVYLKVVDGSVIYLLLYVDDMLIAAKDKSEIEKLKAQLSSEFEMKDLGAAKKILGMEITRERHSGKLYLSQKGYIEKVLRRFNMHDAKPVSTPLAAHFRLSSDLCPLSDYDIEYMSRVPYSSAVGSLMYAMFERSRDGLVGYVDSDFAGDLDRRRSITGYVFTIGGCAVSWKASLQATVALSTTEAEYMAIFEACKEAIWLRGDVKVCKISTHDNPADMMTKPVPATKFELCSSLVGVTV

SEQ ID NO: 197331 - protein, 58 aa, Oryza sativa
  unsure (1)..(58): unsure at all Xaa locations
  Clone ID: PAT_MRT4530_93099C.1.pep
GPNVVRPPPPARREPPPPMVXSPPPPPPLPVGCLPPLPPPPPPSAQASRRLASPPRGL

SEQ ID NO: 197332 - protein, 46 aa, Oryza sativa
  unsure (1)..(46): unsure at all Xaa locations
  Clone ID: PAT_MRT4530_9309C.1.pep
RTEEIKLQVIFMSFYWLHFXSTMLPHEEHDTAHNGATLLESVAKGL

SEQ ID NO: 197333 - protein, 329 aa, Oryza sativa
  unsure (1)..(329): unsure at all Xaa locations
  Clone ID: PAT_MRT4530_930C.1.pep
RPPPPAPPPAPAPPPKPTPTPTPTPTPKPPPPRPPPCPSPPPNPPPWPRPPPAPPPKPPPAPPPPPRPPPPPPPRPPLPPXPAPPPAPPPKPPPAPPPIPPPPPPPMPPPPPPPRPPPPPAPPPMPPPAPNPPPLPPPPPNPPPPPPPIPPPPPAPPPTPPPAPNPPSLPPPPPSPPPPSPPKPPPPPPPSPPPVPLPPPTPPPAPKPPPXPPPPPTPPPPPPPRPPPPPPPRPPPSPPPPPPTPPPKPPPLPPPPPRPPPPPAPPPPPNPPPPPSPPPPPPPKPPSPPNPPPPPRHRPKRQSWPKPGPRPNPLGPWPNPPGPNPSSSK

SEQ ID NO: 197334 - protein, 937 aa, Oryza sativa
  Clone ID: PAT_MRT4530_93100C.1.pep
MRAVLAQQDLDDALSGFDKKTQDWSNDEKKRDHKAMSYIHLHLSNNILQEMLKEEIAARLWLKLEQICMTKDLTSKMHLKQKLFLHKLQDDGSVMDHLSTFKEIVADLESMEVKYNEENLGLILLCSLPSSYANFKDTILYSRDTLTLKKVYDALHAKEKMKKMVPSEGSNSQAEGLVVRGRQQEKNTNSKSRDKSSSGYRGRSKSRGRYKSCKYCKRDGHDISECWKLQDKDKRTGKYIPKVTSGFLILHAPIACTYHMCPNRDWFATYEAVQGGTVLMGDDTPCEVAGIGTVQIKMFDGCIRTLSDVRHIPNLKRSLISLCTLDRKGYKYSGGDGILKHMRLGHMSEIGLAELSKRGLLDGQSIGKLKFCEHCIFGKHKRVKFNTSTHTTEGLPKQFWAEAVSTTCYLINRSPSYAIDKKTPIEVWSGSPANYSDLKVFCCTAYAHVDNGKLEPRAIKCIFLGYPSGVKGYRLWCPETKKVVISRNVVFYESVMLHDKHSTNVPVESQEKANVQVEHLISSGHAPEKENVAINQDALVIEDSDSSIVQQSPKRSIAKDKPKRNTRPPQRYIEEANIVAYALSVAEEIEGIDFNDVFSPVVKHSSIRTVLSIVAMHDYELKQMDVKTAFLHGELEEDIYMEQPEGFAVPGKENLVCRLKKSLYGLKQSPRQWYKRFDSFMLSQKFRRSNYDSCVYLKVVDGSAIYLLLYVDDMLIAAKDKSEIAKLKAQLSSEFEMKDLGAAKKILGMEITRERHSGNLYLSQKGYIEKVLRRFNMHDAKPVSIPLAAHFRLSSDLCPQSDYDIEYMSRVPYSSAVGSLMYAMVCSRPDLSHALSVVSRYMANPGKEHWKAVQWIFRYLRGTSSACLQFGRSRDGLVGYVDSDFAGDLDRRRSLTGYVFTIGGCAVSWKASLQATDALSTTEAEYMAISEACKEAI

SEQ ID NO: 197335 - protein, 190 aa, Oryza sativa
  Clone ID: PAT_MRT4530_93101C.1.pep
MAADKFLCFAFASLVSMVVLAAGSKSPDGVAALPRRGQLVAGGDNDKNECVYTLYVETGWIWKAGTDAAIGVELAAADGSGFAVGDLERWGGLMGAGHDYYERGNVDVFSGRAPCLPSPPCRMNLTSDGAGAHHGWYCKSVEVTATGPHAGCAKAAFDVEQWLATDAPPYQLYAERSVCAKSRPGGEEER

SEQ ID NO: 197336 - protein, 60 aa, Oryza sativa
  Clone ID: PAT_MRT4530_93102C.1.pep
FCKSYNLLAPGYLSIGNQSPQAYLFVLHRSSTILQKNVSVKSFALQGTILTYPTWLQKLP

SEQ ID NO: 197337 - protein, 1211 aa, Oryza sativa
  Clone ID: PAT_MRT4530_93103C.1.pep
MASLKYDLPLLDRDTRFSLWQVKMRAVLAQQDLDDTLSGFDKRTQDWSNDEKKRDRKAMSYIHLHLSNNILKEVLKEETAAGLWLKLEQICMTKDLTSKMHLKQKLFLHKLQDDGSVMDHLSTFKEIVADLESMEVKYDEKDLGLILLCSLPSSYANFTDTILYSRDTLTLKEVYDALHAKEKMKKMVPSEGSNSQAEGLVVRGRQQEKNTKNQSRDKSSSSYRGRSKSRGRYKSCKYCKRDGHDISECWKLQDKDKRTGKYIPKGKKEEEGKATVVTNEKSDAELLVAYAGCAQTSDQWILDTACTYHMCPNRDWFATYEAVQGGTVLMGDDTPCEVAGIGTVQIKMFDGCIRTLSDVRHIPNLKRSLISLCTLDHKGYKYSCGDGILKITKGSLVVMKADIKYANLYHLRGTTILGNVAAVSDSLSNSDATNLWHMRLGHMSEIGLAELSKRGLLDGQSIGKLKFCEHCIFGKHKRVKFNTSTHTTEGILDYVHSDLWGPARKTSFGGARYMMTIVDDYSRKVWPYFLKHKYQAFDVFKEWKTMVERKTERKSEGIVRHYTVPHTPQQNGVAEHMNRTIISKARCMLSNAGLPKQFWAEAVSTACYLINRSPSYAIDKKTPIEVWSGSPANYSDLRVFGCTAYAHVDNDKLEPRAIKCIFLGYPSAVKGYKLWCPETKKVVISRNIVFHESVMLHDKPSTNVPVESQEKASVEVEHLISSGHAPEKEDVAINQDEPVIEDSNSSTVQQSPKRSIAKDRPKRNIKPSQRYIEEANIVAYTLSVAEEIEGNAEPSTYSEAIVSDDCNRWITAMHDEMESLEKNHTWELVKLPKEKKPIRCKWIFKRKEGMSPSDEARYKARLVAKGYSQIPGIDFNDVFSPVVKHSSIRTLLSIVAMHDYELEQMDVKTAFLHGELEEDIYMEQPEGFVVPGKENLVCRLKKSLYGLKQSPRQWYKRFDSFMLSQKFRRSNYDSCVYLKVVDCSAIYLFLYVDDMLIAAKDKSEIAKLKAQLSSEFEMKDLGAAKKILDYDVEYMSRVPYSSAVGSLMYAMFGRSRDGLVGYVDSDFAGDLDRRRSLTGYVFTIGGCAVSWKASLQATVALSTTEAKYMAISEACKEAIWLRGLYTELCEVTSCINIFCDSQSAICLTKDQMFHERTKHIDVRYHFIRGVIVEGDVKVCKISTHDNLADMMTKPVPATKFELCSSLVGVTV

SEQ ID NO: 197338 - protein, 1226 aa, Oryza sativa
  unsure (1)..(1226): unsure at all Xaa locations
  Clone ID: PAT_MRT4530_93104C.1.pep
MENDKKYIRENSYTMLISTRHVRYILPDLDLWQSISLICFWRPRVFSCGVCYVPIFLDLGLIVDWGYALTLEPYLSSPNALHQSHSPDRKSAYNGYLSVGLDKIRIKNAAISGSNQPPKLVYQEVSDLRYVHTRSVPSFAILLGLHQFLTSKFSINSHDRDTRFSLWQVKMRAVLAQQDLDDALSGFDKRTQDWSNDEKKRDRNRQQEKNTNSKSRDKSSSSYHGRSKSRGRYKSCKYCKRDGYDISKCWKLQDKDKRTGKYVPKGKKEEEGKAAVVTDEKSDAKLLVAYAGCAQTSDQWILDTACTYHMCSNRDWFATYEAVQGGTVLMGDDTPCEVAGYKYSGGDGILKVTKGSLVVMKADIKSANLYHLRGTTILGNVAAVSDSLSNSDATNLWHMRLGHMSEIGLAELSKRGLLDGQSIKKLKFCEHCIFGKHKRVKFNTSTHTTEGILDYVHSDLWGPARKTSFGGARYMMTIVDDYSRKVWPYFLKHKYQAFDVFKEWKTMVERQTERKVKILRTDNGMDFCSKIFKSYCKSEGIVRHYTVPHTPQQNGVAERMNRTIISKARCMLSNAGLPKQFWAEAVSTACYLINRSPSYAIDKKTPIKVWSGSPANYSDLRVFGCIAYAHVDNSKLEPRAIKCIFLGYPSGVKGYKLWCPETKKVVISRNVVFHESVMLHDKPSTNVPVESQEKASVQVEHLISSGHAPEKENVAINQDAPVIEDTNSSTVQQSPKRSIAKEKPKRSTKPPQRYIEEANIVAYALSVAEEIEGNAEPSTYSEAIVSDDCNRWITAMHDEMESLEKNHTWELVKLPKEKKPIRCKWIFKRKECISPSDEAMYKASSIRTLLSIVAMHDYELEQMDVKTAFLHGELEEDIYMEQPEGFVVPGKENLVCRLKKSLYGLKQSPRQWYKRFDSFMLSQKFRRSNYDSCVYVKVADGSAIYLLLYVDDMLIAAKDKSEIAKLKAQLSSEFEMKDLGAVKKILGMEITRERHSXRKLYPSQKNLCPQSDCDIEYMSRVHYSSAVGSIMYAMFGRSRNGLIGYVDSDFAGDLDRRRSLTSYVFTIGGCAVSWKASLQATVALSTTEADYMAISEACKEAIWLRGLYTELCGVTSCINIFCDSQSAICLTKDQMFHERTKYIDVRYHFIRGVIAEGDVKQMISGPYEIFAQGHSPSISEAYARCCIFAIEPKVDPQKTNLSSHKLWKATCSRLENVPKVFACLVM

SEQ ID NO: 197339 - protein, 794 aa, Oryza sativa
  Clone ID: PAT_MRT4530_93105C.1.pep
MRCAAAARSFLPLPSTTRIHTTATASSPSLAAELDAADALHTLLSTLPPSLPALLPCLSLLSPTLTPHAVSDALLCAAIPAASRLRLFLFSALSPRLRSRPLHAHAVSLLLRLSSHADEAMFDALADARAAGLPASSSAFAALVAAHSSAGRHADAVQAFSRMDEFQSRPTAFVYNTILKALVDSGVILLALALYNRMVAAGCAPNRATYNVLMDGLCKQGMAGDALKMFDEMLDRGIMPNVKIYTVLLSSLCNAGKIDEAVQLLGSMKDKGCLPDEVTYNAFLSGLCKVGRVNEAFQRLVMLQDGGFALGLKGYSCLIDGLFQARRFDEGFGYYKTMLERNISPDVVLYTIMIRGCAEAGRIEDALSFLDVMKKKGFVPDTFCYNTVLKVLCDHGDLERAHTLRSEMLQNNLVLDSTTQTIMICGLCKRGLVDEAMQIFDEMGEHGCDPTVMTYNALIDGFYREGRLEEARMLFHKMEMGNNPSLFLRLTLGANQVCDSESLRKLVHDMCQSGQVLKAYKLLRSIIDSGVVPDVVTYNTLINGLCKARNLDGAVRLFKELQLKGISPDEITYGTLIDGLLRAHRENDAMMLFQNILQSGSSPSLSIYNSMMRSLCRMKKLSQAINLWLDYLPKKYNFPVESEVLANAHKEIEDGSLDDGVRELIKIDQEYGYISSNPYTIWLIGLCQVRRTDDALRIFHTLQEFGIDITPACCALLINYLCWDRNLNAAVDIMLYALSKSIILSQPVGNRLLRWLCICYRRQDAQALAWRMHLVGYDMDVYLREPTKSLLYSQ

SEQ ID NO: 197340 - protein, 68 aa, Oryza sativa
  Clone ID: PAT_MRT4530_93106C.1.pep
MDPSKRIMMPVVAASLLASVMIVADAIAGEGSSWRSNGLLIPELEHTVTDYNLEEKTAEIQYMNMTKY

SEQ ID NO: 197341 - protein, 84 aa, Oryza sativa
  unsure (1)..(84): unsure at all Xaa locations
  Clone ID: PAT_MRT4530_93107C.1.pep
PIQSINPLMTYTPXRPCGTRTLLIIIWVTAADVVAGERGVVVDEPRGAASAPGSTFSSVSWNKXXRYGXHGKWASVTASPPPRA

SEQ ID NO: 197342 - protein, 59 aa, Oryza sativa
  Clone ID: PAT_MRT4530_93108C.1.pep
MSSADSHVPTLRLLPAEVEVNLATISLTRVGRDHVQRRHRVLQCSATGSSDRCVSANAT

SEQ ID NO: 197343 - protein, 449 aa, Oryza sativa
  unsure (1)..(449): unsure at all Xaa locations
  Clone ID: PAT_MRT4530_93109C.1.pep
MEALLRWAAELGVSDSPSAPSPSSCLGRSVLIADFPDAGGRGLAAARDLRRGELVLRAPRAALLTSGRVMDDDPRIASSVASHLPRLSSVQFGQKDWMDLAILGRVDEAIWVAQKALRGIRSDWEEATPLMKGLGFKPKLLMFKSWIWAFATVSSRTLHIAWDDAGCLCPISDXFNYVAPNDDNSPTEHYLDYLLXYEKCSSPSKTDFISLDKLTDGVFVDDNENRLYAQKRXKKGEQVLLAYGTYTNLELLEHYGFLLGENPNEKIYIPLDLDLCMIGSWPRDSLYILPNGHPSFALLCALRLWTTPRNRRKALSHQIYSGSLLSVENELEILKWLVKKCKETLQQLPTTIEFDDNLLVLLCKLQNSTSCITEMNRSIFEQEFAPFFRFHGFKLDCSIHSKLPVRLLRSLERWGLAVQWRCNYKRTLTKCIVHCKSLVHELSLQQNQQ

SEQ ID NO: 197344 - protein, 176 aa, Oryza sativa
  Clone ID: PAT_MRT4530_9310C.1.pep
MTRKVVHGSPNRNDGSPLSFGCLVELGFWHRSRFLAGSYPLAAVRLCRSGRIRAHTSNSQTLGEAGTGHYVAFIVTLIAMQAVLKRIYLQVCCYLFGHVSIHGGVDIVGKAVVIVEYSTATNTPNFQLAKLLGRGHDLIPCAADVEQRNLVTACEVRRIWRAELLLLRNRSIDRSL

SEQ ID NO: 197345 - protein, 83 aa, Oryza sativa
  Clone ID: PAT_MRT4530_93110C.1.pep
MVLAFVPMKVDHASAVVNGKQCLTFGKEGTATHAKEEVLSKLDQGPGGFMIFARNFRESSSNRKVPFSVIEDSMSLRFYTGND

SEQ ID NO: 197346 - protein, 99 aa, Oryza sativa
  Clone ID: PAT_MRT4530_93111C.1.pep
MERVVRFRVSLLRSDHEAPGQIDHMLPAGSVLSYQSTLKHLGVLSTPLCGILSMAASPMVDFERSTGRLVKMEMVLATVLPGAHKVMLQQYHAREAILG

SEQ ID NO: 197347 - protein, 59 aa, Oryza sativa
  Clone ID: PAT_MRT4530_93112C.1.pep
LSARRMIAKKKNSMPTGAIMVRGSSCVLTVVVKGRSLYIQAPRRVQLERSCGGLQPVAV

SEQ ID NO: 197348 - protein, 61 aa, Oryza sativa
  Clone ID: PAT_MRT4530_93113C.1.pep
VAILETYRSHTWDDLEGRWGINPLARFGDSQDHYVPVDGPDLYEQVKDCSVTAGLEQYRHV

SEQ ID NO: 197349 - protein, 99 aa, Oryza sativa
  Clone ID: PAT_MRT4530_93114C.1.pep
MAGGGVARGCADDPAGAARGGTAAGVGPGATAGESTPRWIGYGDDGAARLRLEFGLDPGRGYAWKGFLQKFLQSKRDQPSPIDRDYPRSNLSAPKFPEK

SEQ ID NO: 197350 - protein, 109 aa, Oryza sativa
  Clone ID: PAT_MRT4530_93115C.1.pep
APSSPSHVELERRSWRAAVSRGGVQMILRAPLEAGPPPALGRAQRRESRRRGGLDTGTTARRGFGWNSASILGEVTRGGFGDCYPVKSSSDERIPSEIPPIQTGPAISD

SEQ ID NO: 197351 - protein, 46 aa, Oryza sativa
  Clone ID: PAT_MRT4530_93116C.1.pep
MVEGSARLGKPRAAEEWRLKCGIDGDLAFDIKAVKIKIMGKMKRIE

SEQ ID NO: 197352 - protein, 105 aa, Oryza sativa
  Clone ID: PAT_MRT4530_93117C.1.pep
MSPPWSWSPLPLPWAPEATSAPILKPTVTARTSEDAGRPFGSERGNFEGVEKEMQEEGRTGCAAACSSMCTATGNSFKGAANPITKPAYREESLLTNCGVEDEGA

SEQ ID NO: 197353 - protein, 64 aa, Oryza sativa
  unsure (1)..(64): unsure at all Xaa locations
  Clone ID: PAT_MRT4530_93118C.1.pep
KRSIKQKNIVKKLFISQPYLRCYYNNLVTFTIFLTTMLHKLWCILYIMRMISKIFVFINRSLXX

SEQ ID NO: 197354 - protein, 147 aa, Oryza sativa
  unsure (1)..(147): unsure at all Xaa locations
  Clone ID: PAT_MRT4530_93119C.1.pep
MMGTVALRLVDSGHAKRGGGCGARSVTWRSNGQISRAPRPEATGGSSGEQAREWFGRVVERRVGRGSGWIGCGXPPCAGAALVAKTGHAARTHGTMASRGFRHQPQRSSSQAGLGEYKRLLGWDAALFFALLSAWATALDWYSNDDI

SEQ ID NO: 197355 - protein, 110 aa, Oryza sativa
  Clone ID: PAT_MRT4530_9311C.1.pep
LFFFFFLFFFFFFFYNSTPSIYPCRQPVCALGQMHFIYTRRRDSNQPPHEHTHVPLLIDLHMHYPGMHLQTKDLLEKKPEVEPVKEEVGPKDAGDAPKKKAAGELGPNRG

SEQ ID NO: 197356 - protein, 119 aa, Oryza sativa
  Clone ID: PAT_MRT4530_93120C.1.pep
MPRPHLLPHCFPMLPLTGSVTTRAREREREERGDGDGRRRLEAPVLAAEEHKDDVVVVVIALGDDGDDGHRAPCPAFFADTLLATAGAVPATAGAATVSSPIWPRGAQIRPLRCRIWRP

SEQ ID NO: 197357 - protein, 56 aa, Oryza sativa
  Clone ID: PAT_MRT4530_93121C.1.pep
MAKATGALIAREAENSIHNPMKAVSTAGDAMFGNIASVVERDAKGRERSNLLFSTG

SEQ ID NO: 197358 - protein, 51 aa, Oryza sativa
  Clone ID: PAT_MRT4530_93122C.1.pep
IICISVISSCFKSSIYAPSRDGVDAWEELGDASRVERSRSRSHSPRSTRRA

SEQ ID NO: 197359 - protein, 108 aa, Oryza sativa
  Clone ID: PAT_MRT4530_93124C.1.pep
QPPPPPPPQPPPPPPPPPPPPQAGPPQALPPQTAPTPTVPPPGLVSRFRPPELSMPSAQLNTTNATIATVATKTSAMPTTLLLMSGTEPPPPPPAKPRPRPASTASLT

SEQ ID NO: 197360 - protein, 52 aa, Oryza sativa
  Clone ID: PAT_MRT4530_93125C.1.pep
QIQVQQGGVVFFYQTQGQGQALVAFNLPPQWGFFPKYSLAPRSIPPLGGGWG

SEQ ID NO: 197361 - protein, 68 aa, Oryza sativa
  Clone ID: PAT_MRT4530_93126C.1.pep
FRYGALRPWARSRPLKPWGRVRLHRLIQDIGHRDSGDYLTRAHGRHKNPNHDRTFNDNNATVLDLKDS

SEQ ID NO: 197362 - protein, 53 aa, Oryza sativa
  Clone ID: PAT_MRT4530_93127C.1.pep
MEGVARNVVVVMTELRNPGEGGERVGKTVNGYKQHSFFIGRRKIISSVGYGHE

SEQ ID NO: 197363 - protein, 595 aa, Oryza sativa
  Clone ID: PAT_MRT4530_93128C.1.pep
MVEVGGRVRGFVRNRWLVFVAAMWMQSFAGVGYLFGSISPVIKASLGYNQREVAGLGVAKDLGDSVGFLAGTLSAVLPLWAAVLVGAAQNLFGYGWVWLAVTHRAPVPPLWAMCILIFIGTNGETYFNTAALVSCVQNFPKSRGPIVGILKGFAGLSGAILTQMYAMIHSPDHAALIFMVAVGPTMVVIALMFIVRPVGGHRQVRPSDGTSFTFVYSVCLLLAAYLMGVMILGDLVDLSHTVMVLLTIILIVLLIVPIVIPVILSFFSDNDESAYASLLQSPGKEEASASTPSEEQTEVIFSEVEDEKPKEVDLLPASERQKRIAELQTKLFQAAAVGAVRVKRRKGPRRGEDFTLMQALIKADFWLLFFSLLLGSGSGLTVIDNLGQMSQSLGYEDSHIFVSMISIWNFLGRIGGGYFSELIVKDYAYPRAIALATAQVFMAFGHFSFAMAWPGAMYIGTLLVGLGYGAHWAIVPAAASELFGLKNFGALYNFLTVANPAGSLVFSGIIASGIYDSEAEKQAHQHHNSTLLAMPGRLLAMASDATQPLKCEGAICFFLSSLIMSGFCIVAAVLSLILIYRTKIVYANLYGNPRT

SEQ ID NO: 197364 - protein, 60 aa, Oryza sativa
  unsure (1)..(60): unsure at all Xaa locations
  Clone ID: PAT_MRT4530_93129C.1.pep
KVNKMDPGVNPKQVRYSLRTXPEWMCSQMKFIRGATKIHXCNVNSMNENLVINFYCTNAL

SEQ ID NO: 197365 - protein, 35 aa, Oryza sativa
  Clone ID: PAT_MRT4530_9312C.1.pep
RLCSFFFHWVLYAAPDKGHYHKLVLQGKGRDFITT

SEQ ID NO: 197366 - protein, 86 aa, Oryza sativa
  Clone ID: PAT_MRT4530_93130C.1.pep
MAVDQAAAQRIEARRRCIEALRRRIELSDQGGGSESSGSSGGSIMRRRIKRRRWQIEAATADRATAALGSIFFLIYLFGSSPSSHG

SEQ ID NO: 197367 - protein, 255 aa, Oryza sativa
  unsure (1)..(255): unsure at all Xaa locations
  Clone ID: PAT_MRT4530_93131C.1.pep
MAEPNPQVEREVEVEEVRRPKLRYLEFVQVAAAQATICLAGLYALAKDHAGPLRPGVDAVESAVKGVVGPVYGRFHGVPLDVLXFVDRKVDDTVQELDRHLPPTLKAASAKACAVARGVPDVARELTAEVQQSGVTGAARVAYAKVEPVAKGVYGRIQPAAKDLYVRYEPAAEHLAVSTWRSLNNLPLFPQVAQIAVPTAAYWAEKYNKVIAAAADKGYTGAQYLPAIPTERIAKVFGELSPEAQPSKSESAKTQ

SEQ ID NO: 197368 - protein, 43 aa, Oryza sativa
  unsure (1)..(43): unsure at all Xaa locations
  Clone ID: PAT_MRT4530_93132C.1.pep
PRAREWPTRHCKXSLFPSXNVPMLAQIVQSCDESEMIHPEFKN

SEQ ID NO: 197369 - protein, 230 aa, Oryza sativa
  unsure (1)..(230): unsure at all Xaa locations
  Clone ID: PAT_MRT4530_93133C.1.pep
MPKSGQNRRHGGRGEKSRRPWRGRGGRRRRRVAEPARRRPEAPPPQRAGAAAARGGRRQRPPHHLPVPRRHPSHRRRPACPAARLPPRQRRRRXPPPPLARPRPTQLNPSSSPRGTRHPHRPASACYCRRRRRRCSASSAAAPLLAPPSENSSSLVVPRFTAAATLPASASGVFLSSSRLVASYTHEPPASYARRVAWRSAAMSARASGRRSRSEPYIRLAPSRARSRSC

SEQ ID NO: 197370 - protein, 180 aa, Oryza sativa
  unsure (1)..(180): unsure at all Xaa locations
  Clone ID: PAT_MRT4530_93134C.1.pep
MVHRFFSCTGATRPPAPENADITLVSGPSCWLSIWSVIVLKCLFVLLHDKKMGIYALIYVLRACRYIEDDEGIRKYFAAFHLLGSFPAAVIIDDFADFFSERSCQQRYGNARARDLAVVRILALCQNAVAHANLDIYSLHFISIFEILFDXGDGHGSYILKSISSSDCGSREGRAAKYSI

SEQ ID NO: 197371 - protein, 55 aa, Oryza sativa
  Clone ID: PAT_MRT4530_93135C.1.pep
KFSKLQANQKLMRGCYGIGVGGVRLSFALLPSSPLPARVSSVLLFRSLPCCALSW

SEQ ID NO: 197372 - protein, 68 aa, Oryza sativa
  Clone ID: PAT_MRT4530_93136C.1.pep
TPHTKKKKKGLPFKPSKLTYPSLQHNNILIMTTKYNYPALILQPINTKNPVATQLNTLKKHPPFTRRH

SEQ ID NO: 197373 - protein, 89 aa, Oryza sativa
  Clone ID: PAT_MRT4530_93137C.1.pep
MGLDKCTIELSPKAVVVRDVGLKGGRLTPHFDRRRHTSADHLVSGMPTFALPVQDGGVGFDYRLHMAVPDKWIELLNFARLLLEAASVF

SEQ ID NO: 197374 - protein, 106 aa, Oryza sativa
  Clone ID: PAT_MRT4530_93138C.1.pep
GIESKLYIFFFKKKNNWVKKFFKKTASKKKETQNFFYPKTTQKPPKTFSPPPGATPEIPTLTLEDTQFLPKKSAIKVKENKGKCCTWWKIVTQTKSTKKTTPKEKR

SEQ ID NO: 197375 - protein, 167 aa, Oryza sativa
  Clone ID: PAT_MRT4530_93139C.1.pep
MAGGRPVGGDVTLSQKIRQKYDNFDLLMFVEIYRDEIYAGGITSNGPNQYGYRNIQQKLKAQLNEDFSKQKIKNSWDVTHRRYANWCHLQSSATDLGRDPESGTIIAPDEWWKGVLMVKYYDLRTVDTNNGGKGTTVKYITSKQLLSGAQMRASKRKQLEILARARQ

SEQ ID NO: 197376 - protein, 80 aa, Oryza sativa
  Clone ID: PAT_MRT4530_9313C.1.pep
MGVVRSMTVTAVASYLCVFLDVDFVLNSMIVLLDVFGLGISYVDFVLNSRIVFLDVFESRISGVLVEKYNTYMGFSTGTH

SEQ ID NO: 197377 - protein, 94 aa, Oryza sativa
  Clone ID: PAT_MRT4530_93140C.1.pep
MMTHPIPLILRMLQSKMRMQIWLTKQKEFWMEGRIMVFEDFMTTALEEAEDFNVNNDSRKSWGWMLLLGENIPLMMNTGKRTLSTTLGSVTLSR

SEQ ID NO: 197378 - protein, 168 aa, Oryza sativa
  unsure (1)..(168): unsure at all Xaa locations
  Clone ID: PAT_MRT4530_93141C.1.pep
MNIFDILSLLDLAERSASAQIDACTYGQCQQKPIMQPIMNPCNELARXQQCRPMSLPCQQSRKVQLSSCQVKRQQCCQQMRMMAQQYHCQASLHXVQAIMQKVQLDADFADEPQAHDHDHEDLNLPSMCEDYPRNCNTPCKDATDHCDSWECEPSYIYSWIDKESHII

SEQ ID NO: 197379 - protein, 658 aa, Oryza sativa
  unsure (1)..(658): unsure at all Xaa locations
  Clone ID: PAT_MRT4530_93142C.1.pep
IIPIRGLRQGDPISPYLFLLCAEVFSSLLNAAEERGDLSGVKVCQXHLLFADDSLLLLKADERSAECLQNVLSLYERCSGQTINKEKSSVMFSMNTKENDREKFRGALDIGVEAWNEKYLGLPVYMGRSKSKTFSYLKERVWRKIQGWKEKLLSRAGKDILIKAVAQAIPSFAMSCFDLTKTLCDEISSLICRFFWAQHDRENKMHWIAWDRLCSRKEKGGLGYRDLHPFNLARXWRLLSNPDSLCARVLKAKYFPDLEVKEGPGISYSWRSIVRGVQALKSGLIWRVGDGSEIDIWKDPWIPSGITRRPITPRGGTILNRVXRLGEWDKELIQDIFWEEDVRNILAIPLNMGSEDFAAWXGIFTVKSAYHTLEDQREHLASRQTGESSSGVARTASLDWGKLWRLHYFPKVKHFLWRFAHNTLPLRMNIDRRGMEIDTRCPVCHRLNEDGGHCFFKCKYVKAGWRVMNLKHIRLELMQYSSALDVCKHILNMKEDKMLTTVLFLWNWWDARNKKSRPNVQAQRKWHPPILGELKLNFDGAFFDEGKTGGWGFVVRDHXAGAGRIELVHDALCAEATACLYALRAAANNGISHVSVETDCSVLSFAYRSCNSCAHELARRGANWDPVWTLASCPQAPESSLVSDSASLTTTLRARGES

SEQ ID NO: 197380 - protein, 66 aa, Oryza sativa
  Clone ID: PAT_MRT4530_93143C.1.pep
PRRCLLDAGCCSCSSTSAAACSAGSSLACCGGGGQSSSAAERLLLPPGPRLLISGMAPPHISIFTS

SEQ ID NO: 197381 - protein, 165 aa, Oryza sativa
  unsure (1)..(165): unsure at all Xaa locations
  Clone ID: PAT_MRT4530_93144C.1.pep
PPILGELKLNFDGAFFDEGKTGGWGFVVRDHGGHCVLAGAGRIELVHDALCAEAMACLYALRAAANNGISHVSVETDCSVLVRALKSADYDQATAGVIFKXIRLMSLVDFVKVDLSFAYRFCNSCAHELARRGANWDPGQMSIWTNPLPCFIRSFVVRDYTEPAY

SEQ ID NO: 197382 - protein, 32 aa, Oryza sativa
  Clone ID: PAT_MRT4530_93145C.1.pep
GTFFGKLIHPFSLGTNGEGQLDGNSLEWPHPC

SEQ ID NO: 197383 - protein, 93 aa, Oryza sativa
  Clone ID: PAT_MRT4530_93146C.1.pep
FFFFCSPICNLPLRVLSMFLVMVMILWKRGVGDLLPIIPFTSHSIVTTISVSLLVDLGTQHTVVGPASEQRQASPSPLVCNFHTPRSPPLESL

SEQ ID NO: 197384 - protein, 75 aa, Oryza sativa
  unsure (1)..(75): unsure at all Xaa locations
  Clone ID: PAT_MRT4530_93147C.1.pep
SRHTQCVLLDDAGMPTEYRHMDGWVRNTYTLATRDAEGRNSKSHWKPTCRVRXSMDDQATLVXQDDDRHATHDLY

SEQ ID NO: 197385 - protein, 55 aa, Oryza sativa
  Clone ID: PAT_MRT4530_93148C.1.pep
AANINNQKSRSSSHNLIKQKVMEFASKLVNLVLKETFHSLSATLAREICCKYLTQ

SEQ ID NO: 197386 - protein, 80 aa, Oryza sativa
  Clone ID: PAT_MRT4530_93149C.1.pep
HTDMRKKGVSKNCILTRGQVSVPLALFLGFETEVKLRWVRREYGSTQTCERKRFKKIVSRSWFRFPWFYFFLLVDDCKSR

SEQ ID NO: 197387 - protein, 333 aa, Oryza sativa
  Clone ID: PAT_MRT4530_9314C.1.pep
MEVGDLHKVWEIRALKRKPDEPAARALLDRVAKQVQPIMRRRKWRVKVLSEFSPKNPRLLGLNVGGGVEVKLRLRHAGRDYDFIPYEEVLDTMLHELCHIARGPHDAQFYKLWDELRKECEELVSKGITGSGQGFDGTGRRLGGFTVHPPPPSLRQATLAAAQKRARNGALLPSGPRKLGGNNDIMSALSPIQAAAMAAERRMYDDLWCGSHDQSGIDDSEDVVILEDTPNLPTQLGKSTKDGFSSSSENPSTSSGFPTAAQNGSSSCRITTDAGDSSLWECVACTLLNQLTLEPFSILPAPEVLKHDRARWYYHESLLLQLSDISCHFILIN

SEQ ID NO: 197388 - protein, 691 aa, Oryza sativa
  Clone ID: PAT_MRT4530_93150C.1.pep
MEANGVIPDVMMPSLLADVEVSHLAGFDVTPSPHAEPSPRPQLRHDNPSRSRVPPLERVSRRSEVVFPPLDSPFQAPGYRSVQPVSISLPASPTGFGVPVALPIAVGDAGEPADLRRQAMSNAARDAEEQQLAAQGKGSNNNVRFVQPDKVVFRSQPIPGGKPARRAASNRGGRMMSRDRRYDSFKTWSGKLERQLTHLAGAGPEVPEEEEDGCDGDAISSHHTKSMPQVDRFFAALEGPELDKLRSSEELVLPSDKTWPFLLRFPVSAFGICLGVSSQAILWKTVATSTPTRFLHVTTKVNLVLWCVSLALMCVIAAIYACKVVFFFEAVRREYYHPIRVNFFFAPWIACLFLAIGVPPSVATELPRWLWYALMTPILCMELKIYGQWMSGGQRRLSKVANPSNHLSVVGNFVGALLGASMGLKEGPVFFFSVGLAHYTVLFVTLYQRLPTNETLPKELHPVFFLFVAAPSVACMAWAKITGEFGLGSRVAYFIAMFLYASLAVRINFFRGFRFSLAWWAYTFPMTGAAIASIRYSTEVDNAFTKALCVALSVLAMLTVLALLATTIVHGFVLRNLFPNDISIAITERKVKPIVELHEMLGSNDSAAGRSNDDIEAARQPFAQAFPATIAGSGWVRAAATSMPLPELAPALLSSPHAARPFSPPVQHRGGDAIAALLPPGGGIWRPPTSM

SEQ ID NO: 197389 - protein, 421 aa, Oryza sativa
  Clone ID: PAT_MRT4530_93151C.1.pep
MVELIAQGVKTDKGFKEVHLNYGLAKNLTDHYGLDTSGTQVYNHLRKWRSMWVRIGRLKDLSGALWDDQNNMIVLEDEHYMGHTKDKSKDVEFLNVPLENYTPMAIIFGGTQATGRFAMGSNEALGGPADMADGGLGVMDGDMEGGNGVGAGCESVAGASAAGPVSGNFIPTVNDIAGGSTSSGKRKRTPVVTEEEGAFLTNMTAAIPGLAQEDLPLAGREKREEGALRGRESSVDVGMSPSTVGMSPSTVLGSPSAIPAEPLHRRQLPLCYPCPPLPPSRVPLRHSELQLLSPPITAAPSCLPRPRPPPLLRAASTVPVRRSGPQFPLCCSELASPSPPAPVAVPTRHCRFELPPPSPPATAVLSSPSAVLAHRCPLPPSSAPPPCGGLVMERNGGEGREKSERIGERDKEAVVTSHGKR

SEQ ID NO: 197390 - protein, 258 aa, Oryza sativa
  unsure (1)..(258): unsure at all Xaa locations
  Clone ID: PAT_MRT4530_93152C.1.pep
MGGAVVAASRRQSGGANQWWQSGTGREEGGDXARERAEEGGDRRGNGEAGRVIGVIPQPPPSSFEPLPPEYDEPNHTRCCDDHLWPDDDHYAPLPFPDACXLLGSSAAAERSAARLLPLDALAASPPRALAGIPARLDSLPSFVPSSRRPELRRAWWGKRDGRQVPRTLKMMTASSGARADLPTARERGVTLGHFAALATLPPSASTGGHRRRHAHWPPAAFPPRPPRPPLASAPPLPATLAARPRTAAAANCLSTRA

SEQ ID NO: 197391 - protein, 82 aa, Oryza sativa
  Clone ID: PAT_MRT4530_93153C.1.pep
YRSPQPGTSTVVVSSQGRVQECTISTEVGVRWPRSHGVIRSSQHLLHPSDDYSLPQMNLVSVATAGFERSRVCYRPASGHVG

SEQ ID NO: 197392 - protein, 92 aa, Oryza sativa
  Clone ID: PAT_MRT4530_93154C.1.pep
NPLYVVLHTTTTRYNWRGTGPINMEDRVNWGAPADGMAGGEHDQAQGMVEHQAERVGKIQGPTLRVALAGAVVQAEDELRDRGDLQQLPVGH

SEQ ID NO: 197393 - protein, 102 aa, Oryza sativa
  Clone ID: PAT_MRT4530_93155C.1.pep
FSQRGGRGGGYEPILNRISSLIRSCFQRQLQGKEKNKREKSRAELKRNSSPSLGLFFYFFVAVGFLSLFFLKNLYSVVCNNGCLGYNKAQVGSDRNSEHIGR

SEQ ID NO: 197394 - protein, 103 aa, Oryza sativa
  Clone ID: PAT_MRT4530_93156C.1.pep
MAVGSCEVGGALDQSPSCAAAAEEGKLSAVHGGEAVARKRGLSRWSNQGVLRVNQEEEEVIPAQSDGELSGPSPPPPPSSSPAATRERERGWSGGEAAAQLNQ

SEQ ID NO: 197395 - protein, 655 aa, Oryza sativa
  unsure (1)..(655): unsure at all Xaa locations
  Clone ID: PAT_MRT4530_93157C.1.pep
MSTSTDPSTTATAENAEHLSHQVAIPSIVDEYQFYLGPIGNLDPTEFINAKTNRIPFRFANPNLGLWKNTFKSWPSAEKSCPAWYMRVVVRPPLSEAEFSRFELIINEDGEEVTKRRCMSFGEATSTNAGSKLSVDLFRDWFTNFYDGFPRNTRIWFAYEGFASFELPADFQFDEINFEKYDKSREVFSTVINPCILPVGIHQGKNIQVSYEFYHPTSAARQLGMGQVLISLFFADKIQSRGEITSALTMDRLLNIPGPPLGSIDNIKLRMLRSAAFDRCDSGLEIQYAPGLLPNGGGLARPVIGYHAPKTSTLPHGLPRVPTAPVAGKKKRTKSAAAPSAASKKSKKQKTAADDLPSIDPDVEQFLNDISSDIPAPQRTPSPPSRPTYQPTPRHSPTPVSESSDHTPSATDSHHVXQEEVAPPPAIPVLADMFSFDIRQFMDEEDETTSKALVPLADDLKATLLDISKRLEGSLETLVVCCGSIRDRFLEIHNKLPDELADVITPVAYLEQHRLKLKKAKQRIADRCERRDLEATIQTSRASINEEKAKLDELEAGPSSTQANIDRLNTRQIKLLAELEQCSAQIALEEQKLADLPKAIEDQKSKLKSSVKYLAGLTKSLKVISGTDAADAQIIDEVDQIRQRAISAIQKYVSG

SEQ ID NO: 197396 - protein, 67 aa, Oryza sativa
  Clone ID: PAT_MRT4530_93158C.1.pep
KQQKTHLYNHECVSYKINNSKTNTKHHLYSETICLLRFHAPSQINTPTIPFSHPHKYPHLSSLHILY

SEQ ID NO: 197397 - protein, 48 aa, Oryza sativa
  Clone ID: PAT_MRT4530_93159C.1.pep
TTPASCYCAVIYLYTYSDMALFFKFFGRRGRDIYSIILRNNNNTTYIF

SEQ ID NO: 197398 - protein, 65 aa, Oryza sativa
  Clone ID: PAT_MRT4530_9315C.1.pep
YDYGVFDALLIGDEVLAYGEVVVMSDSNDAVVDWTVCTTRTTCRCRTSARSTTASHYNASICSAL

SEQ ID NO: 197399 - protein, 96 aa, Oryza sativa
  unsure (1)..(96): unsure at all Xaa locations
  Clone ID: PAT_MRT4530_93160C.1.pep
MISAVTSSPTAARPRVLAGERRRDGANEGHXRRRRGRSGGHLQLDDDGGAPAIYSDGGEADEVGDDLTITTAAFPSDDDDRKDGGARLDERRRRRR

SEQ ID NO: 197400 - protein, 173 aa, Oryza sativa
  unsure (1)..(173): unsure at all Xaa locations
  Clone ID: PAT_MRT4530_93161C.1.pep
TILYRNGSRKRTAEIDLSKTDQDLTVYDRSTVDGVDDISSDVITDGGSASRARRRTTARRREXRTPTGCGRHGELTGDQSSGGRSTDGDGDEEEAVVTFSSTTTAGLRRSTATAERRTRSATIXRSQRRLSRATTTTGRTAAHGWTNGGDGGARLHDARALPATRDLGEGGGG

SEQ ID NO: 197401 - protein, 154 aa, Oryza sativa
  unsure (1)..(154): unsure at all Xaa locations
  Clone ID: PAT_MRT4530_93162C.1.pep
APPSPPXSPPARIWPPRPPLKAXAXRPPPARTWGSPRTRSAPGGGGGGEGAGFASGAPGSGPPSPASPPXSIPGAPYPSPPPTVPNIRHSSPSPSPSPPPPPSPSSPPAATPPDLAGAARIWRAPPPPPQSPRRHFTWVSPVPRRASRVKRGGL

SEQ ID NO: 197402 - protein, 49 aa, Oryza sativa
  Clone ID: PAT_MRT4530_93163C.1.pep
YGSSGRATPHATASVFLPNKGGSFSGLGPKRWGGPTLKEPPNRSILSRL

SEQ ID NO: 197403 - protein, 59 aa, Oryza sativa
  Clone ID: PAT_MRT4530_93164C.1.pep
KHNANENLVRYLLIFFTTFLPTHSHFYTHILPPKPFISPLLFKPTIPSNIKTHSYNLKF

SEQ ID NO: 197404 - protein, 122 aa, Oryza sativa
  Clone ID: PAT_MRT4530_93165C.1.pep
MEEGRTPGSNAAPRPRKRGSGSGEKRRLRWGWDNDRRPAAHSASGCSPAVRLRRRGAGEQGGGREEAETHREIMGRSGGLTGGEDPGEEGVAGAVLRWRSGGGGGCRDGGLEVLVWEDFGSE

SEQ ID NO: 197405 - protein, 465 aa, Oryza sativa
  Clone ID: PAT_MRT4530_93166C.1.pep
MDPSPAVDPSPAVDPSPAAETRRRATGKGGKQRGGKQLGLKRPPPISVPATPPPAATSSSPAAPTAIPPRPPQSSPIFVPDSPNPSPAAPTSSLASGTSTARPPQPQGGGWGPTSTISPNFASFFGNQQDPNSCLVRGYPPGGFVNFIQQNCPPQPQQQGENFHFVGHNMGFNPISPQPPSAYGTPTPQATNQGTSTNIMIDEEDNNDDSRAAKKRWTHEEEERLASAWLNASKDSIHGNDKKGDTFWKEVTDEFNKKGNGKRRREINQLKVHWSRLKSAISEFNDYWSTVTQMHTSGYSDDMLEKEAQRLYANRFGKPFALVHWWKILKDEPKWCAQFESEKDKSEMDAVPEQQSRPIGREAAKSERNGKRKKENVMEGIVLLGDNVQKIIKVHEDRRVDREKATEAQIQISNATLLAAKEQKEAKMFDVYNTLLSKDTSNMSEDQMASHQRAIRKLEEKLFAD

SEQ ID NO: 197406 - protein, 85 aa, Oryza sativa
  Clone ID: PAT_MRT4530_93167C.1.pep
MRGEAVVGARGERQPLVASAARSVPLSCWEAVLVPERRGERPPPAPEGRGHRSSLASLANLSRLKRERERWEGADHAYACTCTEE

SEQ ID NO: 197407 - protein, 253 aa, Oryza sativa
  Clone ID: PAT_MRT4530_93168C.1.pep
MGRGLGLYTGIRKGDGQMHRWIGSTCRPTSHGTLTWTKTTDETLPRITQYNVDTHNARARKPYPYEHLRRLGRQILERLTKSPQAPRCRRETSTGRYRCQAQDGDNEEVVGEGQPVAAAATLALPSNTTGDAMSGLSDLVAAAAAPFQLHLSSPGAKLATIVGFTSPPHASSASLAGVGHKYRRWCGQEEKPTNCRPCFSSPQAAVDKSPPRHCLRARAPLKICRLLLYALELEKKRRHQRKCTIKCMLGRKS

SEQ ID NO: 197408 - protein, 45 aa, Oryza sativa
  Clone ID: PAT_MRT4530_93169C.1.pep
MEQGLFGKSVTKHGLQNERVMLSVIMKSATVLHRHRGSIVVIHLD

SEQ ID NO: 197409 - protein, 107 aa, Oryza sativa
  Clone ID: PAT_MRT4530_9316C.1.pep
FCFFFFFGFFFFFFCFFFFFFFFYKKRGIPWIFGGLPKGQRCTPGPNHSAFSHPQQKFIFLQKFKQLFLREIKLARYKKWAAIYPPNHVTKTWGNEDPIPIAKLDKI

SEQ ID NO: 197410 - protein, 82 aa, Oryza sativa
  Clone ID: PAT_MRT4530_93170C.1.pep
ISRIQESQGLQYSQIDVVKLRLFLPRNSVEIEIVCYVHSNYVIERVDPFQLPRPPSRDGRQQSSRGKPLVAGEEKTKRQKKA

SEQ ID NO: 197411 - protein, 269 aa, Oryza sativa
  Clone ID: PAT_MRT4530_93171C.1.pep
PPHARTSLLLLARSSSSPHVAPPHPRRRRSSSPRVLLPHPHRSRCPRRHLLLPPPNPASSLPSRPDPTSAPSAAAGVGPSRPCRRSTSMFPFSLSSTGSANAMIGLYLPSTTVFWTKKQKYQQGCVLQKLELHQAVATPSDVSSVTGRIIRDLSMMVIPIEHHMVHRGHGIFDFQQGLKISRCSAQPCNCVGRCCNGSTLEHPWCGLKPVRDKAIDDCFRTATPTRIKLGDGGTSFWVDDWFPDSGAVANLVPIVSTSVKPEKWTVASI

SEQ ID NO: 197412 - protein, 157 aa, Oryza sativa
  unsure (1)..(157): unsure at all Xaa locations
  Clone ID: PAT_MRT4530_93172C.1.pep
DPAXEAPPXQRRARRAPXRTPRREEPQQRGRPSSGARRRARKRPGRQTARKAGPSXARRRTRGKPPRGGRTXXTRRRGHRAXLTXXRRPARAXKSGRPTXATRDTRXXPARPGRRATRPPPPXXPPXPPSPHHRRHRRRRXXEDDTNGPXSNHPPRH

SEQ ID NO: 197413 - protein, 88 aa, Oryza sativa
  Clone ID: PAT_MRT4530_93173C.1.pep
PRSPIACRRYLHPASRRRPHTSAAPARWNGSHRRRPDRCGVAGDAARRRGELSRRRRRASLSSYLGRHGPRRPLHHGPLFLFVFSFFQ

SEQ ID NO: 197414 - protein, 449 aa, Oryza sativa
  Clone ID: PAT_MRT4530_93174C.1.pep
MDNAAAPPSSGAAGKEMATAGALPDDLLDEILLRMPARSILRCRAVCKAWRSRTSHPYFLRAHAARSRIIAAAVVDTTAIPDGEFRTTISIRPLGDGDGDRSGAAVSSSSSFASVRFGSRPFVLGSWDGVVCLVPAGVVRPLSRIDRYVLVNPLTKACTSVPPPATRGIVICGYAHPTTSRYHLLHADDAYPYNHMAAATIRILRVGEKNNVWRKIARHPAPACVESRTYIRFGGAPPVSLHGCLHWLVAPLSAASARPLLSVFDMEREEFRQMDAPEQWARHGNLPHMMGVQIARLSGKLCAFVNEPSASALGMWTLEDYSDPSSWRMERSIDYSRHGAGSRNIARTFRNRFSAATTAVEVLPDGVSGNGDVGGGGEEEIMFLFNQFDTREAVYNVGRAAWRWRRILPPPTRRVMAHKECMLPREVSFGGAAHFVEESDIGGHRCICI

SEQ ID NO: 197415 - protein, 621 aa, Oryza sativa
  Clone ID: PAT_MRT4530_93175C.1.pep
MPPPPRKRLGRAALLLAAAAYLAFLLLFELPSLDLFPSSDAAAGAAMPTHRPRRRELEASSSSSAFASPVLRRPATAVSPAPASAAAAAAGALPIFSSLLLLPRPNATATPFDGTAAEAFAAARPHLDHLRTAAAAAAEEASSSSTAPTCPTSISVHADGLPGDGVRTVELPCGLAVGSHVTVVARPRAARPEYDPKIAERKSGQEPLMVSQFMVELVGTKAVDGEAPPRILHFNPRIRGDYSGKPVIEMNSCYRMQWGQSQRCEGYASRPADETVDGQLKCEKWIRDDDKKSEESKMKWWVKRLIAASHFAERMAVRKSWMMYTRKSTNIVARFFVALNGKKEVNAELKREAEFFQDIVIVPFMDSYDLVVLKTIAIAEYGVRVIPAKYIMKCDDDTFVRIDSVLDQVKKVRSDKSVYVGSMNYFHRPLRSGKWAVTYEEWPEEAYPNYANGPGYVISADIARYIVSEFDNQTLRLFKMEDVNMGMWVEKFNNTLRPVEYRHDVRFYQSGCFDGYFTAHYQSPQHMICLWRKLQSGSSRCCNEFLRLVVVVVAAVDRPALRRAGTRHRGAIGELEWAPAVLPPEEWTNLTAAVAHEGSGFYVLAVLRRERRGGRSCRSLP

SEQ ID NO: 197416 - protein, 210 aa, Oryza sativa
  unsure (1)..(210): unsure at all Xaa locations
  Clone ID: PAT_MRT4530_93176C.1.pep
GSTGPTHIELPTSRSSPVLLLAVVSVLAAPGATGGRSTHPPNHTSWVLPPPPGAPASWFPTPSPRXPPPPSPRSRVAGRWCQRPMRRPWPRPPPPXRSGATCCRPLAAVGSTLVPVRSAPPPAGQPLRALGAPAVGPPSPQCSAAAGTGHWHARRRTSRRSAKWPLPQGGQWCLPHGLAATGLHSPQASMVNLDLGAPVLVWVLGHPKNI

SEQ ID NO: 197417 - protein, 136 aa, Oryza sativa
  unsure (1)..(136): unsure at all Xaa locations
  Clone ID: PAT_MRT4530_93177C.1.pep
MGLALFTSAAAAAAARALAARVTTTTTRGYPASAASSAIKRAAAAVERKGAAGITQAKERSFXPAGKEGFWVPHPLTGHLPAFNFGGXPRPRTSGRPPLPQVPPRVVGGNLPAVQPRQHPSIIFFFVPGKSPFNLF

SEQ ID NO: 197418 - protein, 55 aa, Oryza sativa
  Clone ID: PAT_MRT4530_93178C.1.pep
MATKPATPSSRAALLGSKQEPTPSTDPPPNPQFRRPQISPTTADSQQKRYYYYYY

SEQ ID NO: 197419 - protein, 95 aa, Oryza sativa
  unsure (1)..(95): unsure at all Xaa locations
  Clone ID: PAT_MRT4530_93179C.1.pep
HAALGTQCVXVTWGNRGATSLEGLGLHDPSNLKQAEYILAHDTEALCLPLSDPLCKSLEELEQGLMLSLEKRLPMEEANPEYVTVEPPNPRVMPG

SEQ ID NO: 197420 - protein, 137 aa, Oryza sativa
  Clone ID: PAT_MRT4530_9317C.1.pep
MKSFFVLTGSFKVSHFVTAAYVKRARTGHHGDNGTVRSPRLQWRGSSFPPSLAIVPPGRAAAPVGGGEIVSIKTAWPEVVGWDGMSAVMKIHRDRADVRVEVHTVGESVPPGFDGERVLVFLNDDNAATVAQTPVVG

SEQ ID NO: 197421 - protein, 63 aa, Oryza sativa
  Clone ID: PAT_MRT4530_93180C.1.pep
MDLGKWANEAQAVDLGLRGLDLVVEVPQATSFNYGLIVLPQAPQTTPDCRVPYNNPSWLSNRK

SEQ ID NO: 197422 - protein, 74 aa, Oryza sativa
  Clone ID: PAT_MRT4530_93181C.1.pep
MKLGIVSDRRFISPLSSARFLSATQQRVIPMKSVFDRLKESLKVTGGDTPAITVPVTKVPETKLVANPKIQNVR

SEQ ID NO: 197423 - protein, 126 aa, Oryza sativa
  Clone ID: PAT_MRT4530_93182C.1.pep
MPLIPSPPLLMLLAMPPLTTAAARCCHRVAAAAGAAAIHRAATNTFKAMEGAAAGGSSAAGFSLSAVASLLFLFSMLQEHIPFQLQDCLAALAARLHALLSPYVTVVGVNLFLEHTSLLSNSLYYS

SEQ ID NO: 197424 - protein, 550 aa, Oryza sativa
  Clone ID: PAT_MRT4530_93183C.1.pep
MATQPRAGDGAAAAAAAKEAPAVSYLQACVELDDWWLERVEGEEGKVRVVGSNTTTSRAGRRFTSASIKTRHASGDLETEDGIIIMIARPPNISKMHLNGFPDEVSKHFSLGFPVQWENIINANMAEMNKQPQSPLKSTEYYIEKFLRGNLKYSMGLFSWDGLNIYQGSRSDADRFPSERLSNSSNGRPTVEDPTANTDCNVNFMGTLATSEEFCTGRMDMPEEPRATPSETCGNDQENNQHLCMLMNTCENGNKVQHGTSSVGPSVVPAEKYVRSKAEQDALLVNDSTSHVSSVLGDCATPKCGKSLTHLGTKDALETNEGMNPQFGVPQGSEGSTVRRLRNGKVIVISTSASTKKVYKRARMQDNTFSENVIPNKNVTCPTGLISQENVGSVAVTAAAKLQIHDTPRKACASRPVSAASRRSRSLSTPPSPSRMRRRWWRVRETVVDARDKVIVVVVVETLAARAAASSPARRLQPSSCLAPPPADRRAPPAPLRPMDPQQPEPVSYLCGDCGAENTLKPGDVIQCRECGYRILYKKRTRRIVQYEAR

SEQ ID NO: 197425 - protein, 43 aa, Oryza sativa
  Clone ID: PAT_MRT4530_93184C.1.pep
DKKNFKQKISFYLKVGLFKNTCELYKQPHLYKYILTHIQMVNL

SEQ ID NO: 197426 - protein, 192 aa, Oryza sativa
  unsure (1)..(192): unsure at all Xaa locations
  Clone ID: PAT_MRT4530_93185C.1.pep
SQIISRSSLQQLAIRIELQPKELPDAKIELLLPFTTSEEKNALCKWLHAVILSTGFSSNIRKLVLMKDLTISRYNFHDCHVMLTXVFLPNTIRAIKPPXIKVVITNICYFLNXISQKLFDTLELGPLXKFVKETVCQLEMYFAPLFFNMIVHLIVXIVSQIIELGPLYLHQIWXYERYMSIMNGYVRNRAHL

SEQ ID NO: 197427 - protein, 103 aa, Oryza sativa
  Clone ID: PAT_MRT4530_93186C.1.pep
GSWVQHWQVPGAREIPPGQTPTGGHSTGRGSLPDGGCNNRVSHNCHHVAAGLGNQALFNGLAVEFDNMVPPVLGKKSSRLQVICNCGHRKWYHPGYIVLWLQK

SEQ ID NO: 197428 - protein, 128 aa, Oryza sativa
  Clone ID: PAT_MRT4530_93187C.1.pep
MAYKPPEKMIARNVRHTAAASLFLPLDMSLDIVEEDGLGVEVTSNAISRGRKGDVVAVCVRANGEAAAVIRCEWVTEDGNCNIRNNRPKSSASTGKKSKGLLHMQNYNSTPSTSLFLWMIIPFYVSMW

SEQ ID NO: 197429 - protein, 90 aa, Oryza sativa
  Clone ID: PAT_MRT4530_93188C.1.pep
GRKPGLNAILFRGQPSGWDRCPAMCLTLDLRKGLALPILGRGLPLKPIDRAGSQGFLSSRVLGTAASWLGQEEKRAFGSSIVLTDKTPKP

SEQ ID NO: 197430 - protein, 123 aa, Oryza sativa
  unsure (1)..(123): unsure at all Xaa locations
  Clone ID: PAT_MRT4530_93189C.1.pep
PAGLSLSLHPQPPHSHVPSTLLSSPAVGTGDDSVRRRPPPLLPLAVPAYSPPPLTTPPPSPPSPGSGAADLPPIAPASGPXPSPPLLGTGAVDPPPPSTPPPPPIPSLCMPHAVAYPPDFPLQ

SEQ ID NO: 197431 - protein, 271 aa, Oryza sativa
  Clone ID: PAT_MRT4530_9318C.1.pep
NSEYSSFNVSDHSKGRSMLVAALMDIITSNCDNADYSSFQPLLPSDADTRDIAAAIEVIEQGGMHFDDHDDNNSDDGDSGLKGIGIKVLGGTTVLGFSREINSLEVGTRMMLYPFATWALANWAIASDLNRSRIQELDSDGHTVTTALKAPERTVKWHGAMVARALLEDQSLTLAPSVPDWCSSLLLTASRAAENGDMALAQMSLSTFLLSMIRCNESKFVIRQKGLHLLRSIAKKIENENAQSRMKESLAVALSLLYAGEVPLSLEETQR

SEQ ID NO: 197432 - protein, 1578 aa, Oryza sativa
  unsure (1)..(1578): unsure at all Xaa locations
  Clone ID: PAT_MRT4530_93190C.1.pep
MDGGVLGGGTDGASVGGSLAGATQAQVAAREQQHGRLRDTAGLPRCRPGHRVGVGGSGGGGAAWGLEASRLRVLGVALPRGGGDGTRGLEELVERGAEAGGDTHPRMLLRAHPAELLLQLRVVAALAIQLGLRRTHPTRRGAPARHGRRQRPDVSLLRFLQPCAHLLDLHDIHQTPTPIKHHSPNTNRGGRQRERNETSTTGTYEKPRYVTKQAAKIMDQDGKLDLLLKKMEEAEKKREESEKKREHSEEKSRAELMALKAVVESRFPAVEKRVDDLQGSVKDLQGKVEQLQLDVQQFPQEQPAIASMLNQTGALKTSIPFPDVTDLDRSPSDVANSVGVMGLGGSVPPMSYPQFDGVNPQMWKWNCEEYFDIYGVHAKNWVRIAEKFDSIMHQLLAYNNSLPLNYFVTKFVEGLKQEIRSAVLTQKPQDLDSACSLAFLQEEILEGSKSVSHKKSDQPILVRNSLKSFSPQGYSNSVVKGTSSAPSDDRRGSDSTRARDDRLAALRSYRRSKGLCFTCGERWSKEHKCATSVQLHVIQELLETLSPNSVDSDEQEMEEGNLMAISLQAISGTESATSFKIKGCIQGTEVLMLIDSGSSHSFLDTQVAHKFQVEKFQEMXISVQSCRSFNCNIYLQINLLKFPCNSGLFYLNFRIFLLNLLVYLLRERVTTEXPLLPNSKPVYIRPYRHNPAQKDEIERQVKEMLASGVIRPSSSAYSSPALLVKKKDGTWRVCIDYRQPNAITVKGKFPMPVIDELLDELSRAQVFSKLDLRAGYHQIRLQEGEEHKTAFQTHTGHCEYMVMSFGLTGAPATFQGAMNDTLAPVLRKFALVFFDDILVYSQDMQSHLTHLKEVFLLLHKHQWKVKLSKCSFGQSQLSYLGHIISGKGVATDQSKIEEVVNWKVPDIVKKLRGFLGLAGYYRKFVKNFRVISKPLTQLLRKDVPFVRSSEANQAFQSLKVALVTAPVLALPDFSKTFTIETDASDGGIGAVLCQEGHPIAYVSKALGIKNRGLSTYEKEYLAILLAVDHWRSYLQHAEFIILTYHHSLMHLNEQRLHTPWQHKAXSHLYSISSDCNCRXGSSNAAADALSRKYNLDPVDLMAVSSCVPVWLQEVAAGYLLDEQTKQLLAELSLSVNSKPPFSLHNSIIKYKGRIWIGYNTELQADEIDRQSDHSIHRTAHCCFHRRRIKSLFAWPKMKQTVQRALKGCGVCLQVKPNRSKYPGLLQPLPVPDGAWQLFARSGTQLHLSTVYHPQTDGQTERVNQCLEIFLRCFVHSMPHKWSSWLYLAEFWFNTSYYSTLLKSPFEVLYGYPPGHFGIRDDSCSVPDLDNWLQERKLMVQLLKQHPNRAQQQMKCYADKNRSVRAFEVGDFVYLKLQPYVQSSVSRRANHKLSFRYFGPYQVLAKVGKVAYHLQLPSDSSIHPVFHVSQLKSAAGFSKVVQPQLPEMGQLKVPEVILNTRQVQRGKSLIPQVLVCWSGDVAGQETWEDLVDLRQRFPAALAWGQAQSQGEGIVRNLTLLGELQEADNSREEEQTYAGRGARVRGGGILITATLVGGGVGRRSSGGQWCLQCRGGTRQD

SEQ ID NO: 197433 - protein, 137 aa, Oryza sativa
  unsure (1)..(137): unsure at all Xaa locations
  Clone ID: PAT_MRT4530_93191C.1.pep
MAAPPRASSPVRACTRGCAHGRRVAPRRCLFAPPPSVAGVNDGRRRGKIRDEEEVPAIVVVVAXLTWAAAAMVVVTATVLRRSGGRRGSRRGRGVAVESSRHWLRPLDRLGFMGWSGGGDHGRDLTHSSDPKSTATI

SEQ ID NO: 197434 - protein, 91 aa, Oryza sativa
  unsure (1)..(91): unsure at all Xaa locations
  Clone ID: PAT_MRT4530_93192C.1.pep
RNTXKPXPXAXSXXLRNXXPXXVVEGTXLEPGRXXXXVXXXPAAXGGXNVXKRXRXGXXAASHRCQXXVEXRPXRPXAANCGDXRAELELE

SEQ ID NO: 197435 - protein, 675 aa, Oryza sativa
  Clone ID: PAT_MRT4530_93193C.1.pep
MGSLHKFSVILLMLCFATLGSAQYVKYKDPKQPVSVRVKDLLGRMTLAEKIGQMTQIERENATAEQIAKYFIGSVLSGGGSVPAPQASAQAWASMVNEMQKGALSTRLGIPMIYGIDAVHGHNNVYKATIFPHNVGLGATRDPDLVKRIGEATALEVRATGIPYVFAPCVAVCRDPRWGRCYESYSEDPKVVQSLTTLISGLQGDVPSNDVGRPYVGGSKKVAACAKHYVGDGGTVKGINENNTIIDTHGLLTIHMPPYYNSIIRGVSTVMVSYSSWNGVKMHANHHLITDFLKNKLRFRGFVISDWQGIDRITSPPHKNYSYSIEAGIGAGIDMIMVPYTYTEFIDDLTEQVNNKIIPMSRIDDAVYRILRVKFTMGLFESPFADSSLADELGKQEHRELAREAVRKSLVLLKNGKSSYSPVLPLPKKAGKILVAGSHADDLGRQCGGWTITWQGQPGNNITAGTTILSAIKATVDPSTTVVYSENPDSSVVTGDKYDYAIVVVGEPPYAEGFGDNLNLTIPEPGPTVIQTVCKSIKCVVVLISGRPLGVEAYIGGIDAFVAAWLPGTEGQGVADVLFGDYGFTGELSRAWFKSGAQLPMSVGDAHYDLPPTFAAGFRSKGHTASSARAAVCEWRWCGREAVVTRARARMQYYIHTALGWICWRWGECNNDESV

SEQ ID NO: 197436 - protein, 378 aa, Oryza sativa
  unsure (1)..(378): unsure at all Xaa locations
  Clone ID: PAT_MRT4530_93194C.1.pep
MLRRAARLKRRRRNLVQEDSPSSAPDPAAVALEKDALSGAGGAPVEPRSGGCAARQAVDASVRAVAAAASARAACEDSSAGRLGGCRISRYTSASVARGDFANNQGEPMAKTKKPRSSAPDPPAHLPWHHPPAPPISTALLISFAALLLRVLVSVGPYSGQGVAPKFGDYEAQRHWMELTLHLPSSDWYRNTSANDLAYWGLDYPPLSAYQSRLHGLLLNASLPDAVALRSSRGFESPEXEAADALDGAVVRSDGVLPSGAVVRXMSLYFAPAFFGHLLGKCIKRKYPIVEVMKFGFVVLGTFAFVWWPFLHSYEAPRRPISPSRRRRCGSGVVSADSSAPGPAEFLSWASHPRRRGSGGSRIWWLRRRHPRCCCPLL

SEQ ID NO: 197437 - protein, 111 aa, Oryza sativa
  Clone ID: PAT_MRT4530_93195C.1.pep
MLAGDPAAAEALAPASVLVTEKAAAEATLAGGSPATATPSGCFELSSPFHGKVPLYSSSLLSHGGQVIRLSSIAHIHIDINESRHTYISRFINIYMNVDNAKKSYNTKPKK

SEQ ID NO: 197438 - protein, 157 aa, Oryza sativa
  unsure (1)..(157): unsure at all Xaa locations
  Clone ID: PAT_MRT4530_93196C.1.pep
FYQKAVADGADVIDCPVQVTKDGIPICMSSIDLGDVTTVATSQFASQTTVVNDIKATPGFYSFNLTWEDISKNLKPKISNPMSKYQVYRNPRNRNAGNFMRLSDFLDFTKGKDLSGVMISIERAAFMAQKLGFGVXVDAVIKALDDFRYSKQTTQKV

SEQ ID NO: 197439 - protein, 41 aa, Oryza sativa
  Clone ID: PAT_MRT4530_93197C.1.pep
GDISPKAACDAAMFESNRLYSHIINITTMTSILFPEVMDKQ

SEQ ID NO: 197440 - protein, 142 aa, Oryza sativa
  Clone ID: PAT_MRT4530_93198C.1.pep
MVTDHREAFNAVQTSQSSDSVADEMDHDRDLDGGFARDGEDDFMHEIAEDGTPNESTMEIRFEIPRNREDDMADDDEDSDEDMSADDGEEVDEDEDEDEDEENNNLEEDDAHQMSHPDTDQEDREMDEEELDEDLLEEDDDE

SEQ ID NO: 197441 - protein, 554 aa, Oryza sativa
  Clone ID: PAT_MRT4530_93199C.1.pep
MAGLKKMEEVTAAAAAVAASSTAEKRAAAVVVPDAALTMNGAAGAEEKTAAAAAAPEDLPAPAALSGWPRRVGLYLFVMNIRSVFKLDELGSEVLRIAVPASLALAADPLASLVDTAFIGRLGSVEIAAVGVSIAIFNQVSKVCIYPLVSVTTSFVAEEDAIISKCIEENSSQDLEKASPVDSETNNLPVSGEKNTALIHHKSELAICLFCQTLFPGPDKAVFLVFSAKFVLNIMGVKNDSPMLRPAVRYLTIRSLGAPAVLLSLAMQGVFRGFKDTKTPLYATVVGDAANIILDPILMFVCHMGVTGAAVAHVISQYLITMILLCRLIRQVDVIPPSLKSLKFGRFLGCGFLLLARVVAVTFCVTLASSLAARHGPTIMAAFQICCQLWLATSLLADGLAVAGQAVLASAFAKNDKGKVVVATSRVLQLSIVLGMGLTVVLGVGMKFGAGIFTKDIDVIDVIHKGIPFVAGTQTINSLAFVFDGINFGASDYTYSAYSMVGVAAISIPCLVYLSAHNGFIGIWIALTIYMSLRTIASTWRMGAARGPWVFLRK

SEQ ID NO: 197442 - protein, 1193 aa, Oryza sativa
  unsure (1)..(1193): unsure at all Xaa locations
  Clone ID: PAT_MRT4530_9319C.1.pep
MLRRGLLVVNRLRNVHLQRLPRHRTHCSSGPASAPSTSTTSSSAPLPVAAPPPPHHLAPRGGGGGGGPRRRLTPLLALSTLSLVTAAGTIYHISAWDLEGTVERSRASAARVVERMQHTCAAGKVLXRSLMSVLSSANHEVRSGFELRVAALLADIAAASAARRAAIVSAGGGAVVDWLLESVVRRATQAEAARALAHLLADPWVAPAVLGRPRAVPCLLQFIFSYQPKRGKKNSEYSSFNVSDHSKGRSMLVAALMDIITSNCDNADYSSFQPLLPSDADTRDIAAAIEVIEQGGMHFDDHDDNNSDDGDSGLKGIGIKELGGTTVLGFSREINSLEVGNSDDGIVGASNSRILMQETATDSPLVEKLSSAAAPGLWDDLQREHVAVPFATWALANWAIASDLNRSRIQELDSDGHTVTTALKAPERTVKWHGAMVARALLEDQSLTLAPSVPDWCSSLLLTASRAAENGDMALAQMSLSTFLLSMIRCNESKFVIRQKGLHLLRSIAKKIENENAQSRMKESLAVALSLLYAGEVPLSLEETQRWSGILLRWLFDKSVSETTNLTAIKILSCILEDYGPASVPISQGWLALVLSEILGDNKTQNLKGTTQPQPERVKNQVDHHNASSATQILNQLATAVVKLAIVQSHYDPASGDKVPLFDFLSLEPFATALKNLNKKNPPKFDAADSASATLKGIKALAELCSEDGACQKRIADLGVLSLLRRILLGDDYEKLAAIEAYDASRIREVQDKNVSTSNDSSNDTTSDPSSVRVPPAAHIRRHAGRLVTILSLLPNSKKEIISDVVRSKXLEPCASDRISCDDILVNSXCRLTSLHAFCSDVPHSGSGYDEYTDARGGCKGDCAEVGDALGRLNPELALEVHLDNHGHEISRKKFKDDCCTEEGGDSETGDAPSNRAKYTPPLMDVVFVHGLRGGPFNSWRIADDKSSTTKAGLVESIDEDAGKEGTCWPREWLSADFPQARFLTVKYKTNLTQWTGASLPLQEVSSMLLRKLIAAGIGSRPVVFVTHSMGGLVVKQMLYQAKLNNYDKFLNNTNGLVFYSCPHFGSRLADMPWRMGLVFRPAPSIGELRSGSPRLVELNDFVRQRHSKGLLNVLSFSETQVTPIVEGYGGWALRMEIVPIESAYPGYGELVVLASTDHINSCKPVNKNDPSYADTLAFLEKILKSRLKESES

SEQ ID NO: 197443 - protein, 229 aa, Oryza sativa
  Clone ID: PAT_MRT4530_931C.1.pep
MEPEREAAGEARSASTSGAAATSGRAPLPQRDAVPFPSPIRACGRTCGGGGGQLVTASRAVLLLADPTLNQADAAVIHPSASRGVGSTKARKTLELKLSGAEAGAVPKSRRVQKQRGRRRHQRRRPVRISAYNTFTGVWRRDSGAGSRRHQRQQILVSSRGRRSHCLLFYRTVEDDEKFQNFGVTFSPVVAFIIRVTADSEFRFTKSVSEILQIVVLNLEYITVQVYNN

SEQ ID NO: 197444 - protein, 83 aa, Oryza sativa
  Clone ID: PAT_MRT4530_93200C.1.pep
CICLTCLGMYNSIVLICYAYVLFLFRYLLVLYVQFAMPMPMPVPQFAMQGFKALYGHMRGFKVLYGCGYKYCATNVCFSIGQV

SEQ ID NO: 197445 - protein, 90 aa, Oryza sativa
  Clone ID: PAT_MRT4530_93201C.1.pep
STPTYAQTRGYLNLSLSRCTTAEETVLYCGRSVDVVTGASTATIPNAGWTSTKPHRRRRIRNPQPTRGSMPHHRRRAADDPLSDPPDLIE

SEQ ID NO: 197446 - protein, 135 aa, Oryza sativa
  Clone ID: PAT_MRT4530_93202C.1.pep
MKCPPAPGSGPELKRRGSGAAAAGGKRDKEDEPVEYVHDAQGDNEEATAPGGYGGGASRAEHEHETEAKVVSTTVNLLHDHCMNAMDLHRLLVLAMARPLMLHDGAATGKKCNLLWSAPGAAAPPLQQGETGKRK

SEQ ID NO: 197447 - protein, 414 aa, Oryza sativa
  Clone ID: PAT_MRT4530_93203C.1.pep
MAGSRAASTLLAAAAIHRHRRYSRRRLRPGRGVERRGVEARGVEGRGEGRGGEGRGRGEVDHLSGVCIRGHLALKDMFACENKTPTSRKMLSEAFYNNSQVGRDNLEMLQQVGSYSLEIGAAEAAGVAGEEYRSGTPPPGQFVKELLGVGSLTLAMAAGTLVYKPPHGLLFQRHVLAYYLTLVGIFLAGVAEVWTAFWLSEAAGDGRRRRRRALGRAVLWASVVPLAAIAGIGGYTVLGRRNEEIKRHNLAKVGTQIRYNKHKGIDSEPNKRVQKNGRLVDRANLQATMQADSNNLEIGAADEAQDAGEEELGSVRKKLNGVGFVTLAMAVSTLVHKPADHGELFQGHAIAYYLTLMVIFLAGVVEVWTALWVSNAGESGRRRRAFGRVVLCASVVPLAAVAGIGGYTVIVNMF

SEQ ID NO: 197448 - protein, 36 aa, Oryza sativa
  Clone ID: PAT_MRT4530_93204C.1.pep
QNLSLRLYCLFLCYTIVTIMINLWGACGQHNKDDVG

SEQ ID NO: 197449 - protein, 928 aa, Oryza sativa
  Clone ID: PAT_MRT4530_93205C.1.pep
MSDHQFAGQPDVQCLVCTRPFTLDAQVTDTFEALAICRDCKMTVLNDDERDEITSTYRQNTRRRQISRTASIDFLEDAFLQEFSQLIDLARRQGRETDIDSSSVAPQHASFNSTPSQSQRWHASDDESDGLNYVDSVFGEIESAISLGDYGGDSDTSIEEHSVMTRRRISIQLDNDSYMNTDTDIDPMNARLDQWDSDDQEDVEESGFDEIVNTMTQHQQQSHDIQLSGLSEDESEDGVWNWSVSVRQRANVTNLLDDMEEPEMRTTFVGNPDDYVDARQFEMLLEQFAEDNDSRRGAPPAATSFIENLPSVIISASHQTNGDVICPVCKDPIPTRARAKQLPCMHLYHSSCILPWLSSRNTCPVCRYELPTDDAEYERSKQATTNVRDIQVVEEISDEQEVQVTRQMAAGVIEETNTSEHNVRVDEQPNSARRRSGWLFIAAAPVCFCQNSTQCPVESLALFYLCNILWLRAVKIRKKLRRQGIRGPKPTFLYGNTKEIKRIRQELKFSQKQGTNNFISTLFPHFLLCRETYGPVFLYSTGALEILQVSHPDMVKDIGRWTPSELGKPNYLKKSRKALFGGGLFTENGDEWAYQRKIIAPEFFMDKIKGMIQLIEDATVTVLEAWEDMIDDVGGCREIVVDDYLRNLSADVIARACFGSSFTKGEEIFCKLRQLQKVIAQQDSFVGLSALWKYLPTKSNQEIQMLDEQVRLLILDVAKEQHHYQDSHNSLVNAIIDGAQDGRSAAEAEDFIVGNCKTIYFGGHESTAVTAIWCLMLLATHSEAMEVTMVIQETLRLYPPASVMMQEALTDVKLGNIEVPRGTIVQVPRLMLHLDKEAWGADADEFRPDRFANGVAAACRAAHMYVPFGHGPRTCIGQNLAMAELKVVLARLLTKFAFSPSPRYRHSPAFRLTIEPGFGLPLMVTKLP

SEQ ID NO: 197450 - protein, 114 aa, Oryza sativa
  unsure (1)..(114): unsure at all Xaa locations
  Clone ID: PAT_MRT4530_93206C.1.pep
MGDRPGRISRVHTSEDKMCRKDMCWSVRAVYDLXKLSDVSGPGFSRFHGRVYRSCAGMVRMAGVDLEWLHSMAHALSLDTWAWPREDVPGLGLIDGGVNLGWVTDRKNFPGAHE

SEQ ID NO: 197451 - protein, 209 aa, Oryza sativa
  Clone ID: PAT_MRT4530_93207C.1.pep
MAAVAAMVVVVALLLGGGAVEAVWLDLPPTGTKCVSEEIQPNVVVLADYALMYESHPTAHPTVAVKVTSPYGNTVHHNENATTGQFAFTTSEAGNYLACFWLDSPEKGSGVSLNLDWKIGIAAKDWDTVAKKEKIEGVELELRKLEAAVESIHHNLLYLKAREAEMRTVSEKTNSRVAWFSILSLGVCIVVSVLQLWHLQGFFRKKKLI

SEQ ID NO: 197452 - protein, 128 aa, Oryza sativa
  unsure (1)..(128): unsure at all Xaa locations
  Clone ID: PAT_MRT4530_93208C.1.pep
QCKAELQRELGLPIRPAVPLFGFIGRSDYQKXIDLIKLAIPDLMRDNIQFVMLGSGGGGGEGWMRSTESGSRGKFRGWVGFSVPVSHRLSAGCDILSLPSRFEPCGXSSLSAVACGTVPVVLGSGGLR

SEQ ID NO: 197453 - protein, 214 aa, Oryza sativa
  Clone ID: PAT_MRT4530_93209C.1.pep
MAAVAAMVVVVALLLGGGAVEAVWLDLPPTGTKCVSEEIQPNVVVLADYALMYESHPTAHPTVAVKEYLVIGRNTLYWAVHNSNQSILSASLRVEAAKVTSPYGNTVHHNENATTGQFAFTTSEAGNYLACFWLDSPEKGSGVSLNLDWKIGIAAKDWDTVAKKEKIEGVELELRKLEAAVESIHHNLLYLKAREAEMRTLWHLQGFFRKKKLI

SEQ ID NO: 197454 - protein, 59 aa, Oryza sativa
  unsure (1)..(59): unsure at all Xaa locations
  Clone ID: PAT_MRT4530_9320C.1.pep
KMGGVFGKKGSXIMEVKASCNVENHFGGAKGPPAGVLIFGPGREVKKFGAIPRGPMGGF

SEQ ID NO: 197455 - protein, 78 aa, Oryza sativa
  unsure (1)..(78): unsure at all Xaa locations
  Clone ID: PAT_MRT4530_93210C.1.pep
RPLPPPRCPRHAAAVPMVAGDRSALPVVVGNGSTLPAVAGDGSALPVVXGDKSAPPPPPITLAGYNQEIHVVSNCHRH

SEQ ID NO: 197456 - protein, 98 aa, Oryza sativa
  Clone ID: PAT_MRT4530_93211C.1.pep
RDNHCLHRLPPPSSPPHPAPPPLLHRRSLHIPPRHRGLYSVVAVFNPTRPSQPPSLHGLGGPQLSLSPLNGDFYSLCLRWHGGSPRQRQGWGVYGTSV

SEQ ID NO: 197457 - protein, 169 aa, Oryza sativa
  unsure (1)..(169): unsure at all Xaa locations
  Clone ID: PAT_MRT4530_93212C.1.pep
MMRQNCPSCPPPPPLRKRSLSSPAISMSTTSSSPSSSSSSSMDGIQNGAIWESPDGEVAGKSSDIFPSLDLATSADYLAAVADGLXEVASPRSTTGPELPGKRPGTSWQLFMLSKEIQLLANLTGDGGGGGHGGEAATVAGELERKPPPPRGLLDDLAFASSVPSGGGG

SEQ ID NO: 197458 - protein, 188 aa, Oryza sativa
  Clone ID: PAT_MRT4530_93213C.1.pep
AAGIGTRNTSNLVGQSLFYGPKDNDNWYGIYYSSCFGGINATLASGKIVLCYNPKPMVTIFPPFYLSSVVKAAKEAGAKGIILATYAFDMLDGLQDCGTMPCVLVDFDFVTRLSHALSENSELVVKVNPAVTWIGNGVLAPKISTFSSRGPSPLFPQFLKPDVAAPGSNILAAVKDSYQFMSGTSMAC

SEQ ID NO: 197459 - protein, 60 aa, Oryza sativa
  Clone ID: PAT_MRT4530_93214C.1.pep
DAWDKKKKIYSKKRKTKMKLGGGLQAIVGLTMLIQGILTQAKSCESDKQYDSDPIKLSFS

SEQ ID NO: 197460 - protein, 289 aa, Oryza sativa
  Clone ID: PAT_MRT4530_93215C.1.pep
ILKLKHYFQAHKVTVSSQYPLGEVLRGKEVTGRLSKWAAELSPFDLHFVARTAVKSQVLANFVAEWTLAFAPEPEPVEQPWVMYSDGSWSHKWAGVAAVLTSPGGVPIRYVARLQFDTTNNAAEYKVILLGLKKAKTLGVRRLLIRTDSKLVAGHVHNSFEAKEEGMKKYLEAVRSMEKCFAGIMVEHLSRGQNEEEDALAKSTAYGGPHSPSIFFEVLYAPSVPAEGLDVMAIDQTELGEDPTDWRTPFVRYFKNGWLPEDEAEAKRLQLRAAKYKMVSGQLYRSGIL

SEQ ID NO: 197461 - protein, 311 aa, Oryza sativa
  Clone ID: PAT_MRT4530_93216C.1.pep
MAPGREEEKMVATTTIEDLHADVLARALRRLDGRSLAAASCATAGLRALAADPETWRALCLAEWPSMAGHPRLLSVVPPRRLFADAFPFPRPDAGELGGGGGGPLPSELVSAVDVYYRGAPLLSRVVETPASSPWFLGSPFRVEAVECKKPAAEAALSPAELELSWVVVDPARGRAVNVSSRRAVAVDRHWYTGETLVRFAVVLGGCKFETTVTCSEGAGNISEVSLAVQDADGAAASGERSLRLLAAAMEEQRIGGGRERDEAKRRYDEFVKSRKGRKESKARREALIDLCCSAASAMAVLSFVAAVVLR

SEQ ID NO: 197462 - protein, 115 aa, Oryza sativa
  unsure (1)..(115): unsure at all Xaa locations
  Clone ID: PAT_MRT4530_93217C.1.pep
INLDLAGLIEMLEARRGSQGLYMGCMKSGGXQQWYEPEWWKFGDSKTYFRHASGALFILSNNLARYININSASLQSYAHDDISVGSWMMGLNTTYVDDDRLCCGSSRQEKVCSHA

SEQ ID NO: 197463 - protein, 359 aa, Oryza sativa
  Clone ID: PAT_MRT4530_93218C.1.pep
METLASAMRRENRRFKPPSSSSASASAALSSGRVPLVMAFLSCLAWLYVAGRLWQDAQTRMILSGLLEKSSGNLPKVLSVEDKLRNLGCIGIGRKIAEAEMDLTKAKSEGYLWGNGTATGSSDKKKLLAVIGVYTGFGSRLKRNTFRGSWMPRGDALKKLEEKGVVIRFVIGRSANRGDSLDRNIDDENRRTKDFLILESHEEAAEELPSKVKFFFSAAIEAWDAEFYVKVDDNINLDLAGLIEMLEARRGSQGLYMGCMKSGGVPLDTNFNFRGQQWYEPEWWKFGDSKTYFRHASGALFILSNNLARYININSASLQSYAHDDISVGSWMMGLNTTYVDDDRLCCGSSRQEKVCSHA

SEQ ID NO: 197464 - protein, 96 aa, Oryza sativa
  Clone ID: PAT_MRT4530_93219C.1.pep
SPSPGKAMLFPPEGALLPPPKGRVFPFPGGPESSFPPSSQTRAIKFFGPRPFFWGPPKNPGPFSPRLWGPSKPFAPPPFNGPISPKKCWGVFSPFA

SEQ ID NO: 197465 - protein, 155 aa, Oryza sativa
  Clone ID: PAT_MRT4530_9321C.1.pep
LSKLGADAIIPAMPGHVMQAFTLLKSSPEAQGVVASLASDKNVWDAVLKNEKVMEFYKTHQQSLVYTFPEGTASVVSPEKLADASSENSSSGEKPESSPFADFMDNARKTVIDIVNNITNFFQDMFRKPNEAEILGGSFMALAIAVILLIMFKKA

SEQ ID NO: 197466 - protein, 459 aa, Oryza sativa
  Clone ID: PAT_MRT4530_93220C.1.pep
MSTNVNNGNSESNLKRSYQVVVSATRDMGIGKDGTLPWKLPGDLKFFKDITVTTSDPSKKNAVVMGRKTWESIPLKFRPLPGRLNVILTRSGSFDFATAENVVICGSLDSALQLLATTPYCLTVEKTFIIGGGEILRQSLNAPACEAIHLTDIESSIECDTFIPPIDLSMFHPWYSSFPVVENGIKHSFISFVRVTKSIAEANDSSGKELTGNDSKKVKFEIENFSFLPKMIFERHEEYQYLNLVQDIIRNGAKKNDRTGTGTVSKFGCQMRFNLRRNFPLLTTKRVFWRGVLEELLWFISGSTNAKVLQEKGIHIWDGNASRQYLDRYTDMHADYVGKGFDQLMDFYVENGELSCQMYQRSADMGLGVPFNIASYSLLTCMIAQVCDLSPGDFVHVIGDAHVYRTHVEALEEQMRKQPKPFPILKINPVKKDIDSFVTSDFKLVRYDPHHKIEMKMAV

SEQ ID NO: 197467 - protein, 87 aa, Oryza sativa
  unsure (1)..(87): unsure at all Xaa locations
  Clone ID: PAT_MRT4530_93221C.1.pep
ARDELHCLLNEDELRDAVLMAFANKHELNNAMNGGEXTSKLGVDSLSQRDWDMQRTXATYGEGLYEGLDWICNNIDDKAGSILTGLK

SEQ ID NO: 197468 - protein, 243 aa, Oryza sativa
  Clone ID: PAT_MRT4530_93222C.1.pep
MGVAYGRTPPSSSSSPAASASAGNGAGAAEVRYHECLRNHAAAMGGHVVDGCREFMPMPGDAADALKCAACGCHRSFHRKDDGQQQQQLRLLIPSPPTPRVPLLMPPPQPQPHPHPQHPYLHPPFPYHHTPSGSGGTTTESSSEERGPPSSSAAAAQGRRKRFRTKFTPEQKEQMLAFAERVGWRMQKQDEALVEQFCAQVGVRRQVFKVWMHNNKSSIGSSSGGGSRRQPQEQQSQQQQQQQ

SEQ ID NO: 197469 - protein, 68 aa, Oryza sativa
  Clone ID: PAT_MRT4530_93223C.1.pep
QSSPCEHLAPIHLTKPKIPHSSPPPPQEHRQIKRRTDKMDSSGSGEKSTEPKERKSGRLCAGRVLPVP

SEQ ID NO: 197470 - protein, 61 aa, Oryza sativa
  Clone ID: PAT_MRT4530_93224C.1.pep
LPAMATTDKRALLTAENGHGGGGPVAVSFNTNAIVLLALLVCGLGAVALHVVLQCTLHVTS

SEQ ID NO: 197471 - protein, 40 aa, Oryza sativa
  Clone ID: PAT_MRT4530_93225C.1.pep
GSAAGACTRAREVRPGQSERLTPLYDPRSIDPAQLSLASY
